United States Patent Application Publication US 2014/0004565 A1 - sequence listing, part 56

SEQ ID NO: 1333216 - RNA, 19 nt, Artificial Sequence
  Description of Artificial Sequence: Synthetic oligonucleotide
ugaacugaccaaucccaac

SEQ ID NO: 1333217 - RNA, 19 nt, Artificial Sequence
  Description of Artificial Sequence: Synthetic oligonucleotide
acggugaguccuaugaccg

SEQ ID NO: 1333218 - RNA, 19 nt, Artificial Sequence
  Description of Artificial Sequence: Synthetic oligonucleotide
cacaaauaggucauguaaa

SEQ ID NO: 1333219 - RNA, 19 nt, Artificial Sequence
  Description of Artificial Sequence: Synthetic oligonucleotide
caucgcaggacacacugac

SEQ ID NO: 1333220 - RNA, 19 nt, Artificial Sequence
  Description of Artificial Sequence: Synthetic oligonucleotide
uacuauacuuucuucccuu

SEQ ID NO: 1333221 - RNA, 19 nt, Artificial Sequence
  Description of Artificial Sequence: Synthetic oligonucleotide
guaaugacgcugguggcag

SEQ ID NO: 1333222 - RNA, 19 nt, Artificial Sequence
  Description of Artificial Sequence: Synthetic oligonucleotide
cuuaagugugcgccggcgc

SEQ ID NO: 1333223 - RNA, 19 nt, Artificial Sequence
  Description of Artificial Sequence: Synthetic oligonucleotide
ugggucacacgcuucacuc

SEQ ID NO: 1333224 - RNA, 19 nt, Artificial Sequence
  Description of Artificial Sequence: Synthetic oligonucleotide
aagcccagugcacucuugu

SEQ ID NO: 1333225 - RNA, 19 nt, Artificial Sequence
  Description of Artificial Sequence: Synthetic oligonucleotide
cuuugcagggaaggaaagg

SEQ ID NO: 1333226 - RNA, 19 nt, Artificial Sequence
  Description of Artificial Sequence: Synthetic oligonucleotide
uuuggacuuuacuauugua

SEQ ID NO: 1333227 - RNA, 19 nt, Artificial Sequence
  Description of Artificial Sequence: Synthetic oligonucleotide
caucagucaggcuggugcc

SEQ ID NO: 1333228 - RNA, 19 nt, Artificial Sequence
  Description of Artificial Sequence: Synthetic oligonucleotide
agggcgucaagcuccagcu

SEQ ID NO: 1333229 - RNA, 19 nt, Artificial Sequence
  Description of Artificial Sequence: Synthetic oligonucleotide
cuuugccacgcacucagug

SEQ ID NO: 1333230 - RNA, 19 nt, Artificial Sequence
  Description of Artificial Sequence: Synthetic oligonucleotide
ggaugauaggggcucagcc

SEQ ID NO: 1333231 - RNA, 19 nt, Artificial Sequence
  Description of Artificial Sequence: Synthetic oligonucleotide
guucuuaagugugcgccgg

SEQ ID NO: 1333232 - RNA, 19 nt, Artificial Sequence
  Description of Artificial Sequence: Synthetic oligonucleotide
ugacaccggacccaucgca

SEQ ID NO: 1333233 - RNA, 19 nt, Artificial Sequence
  Description of Artificial Sequence: Synthetic oligonucleotide
aacagugacaccggaccca

SEQ ID NO: 1333234 - RNA, 19 nt, Artificial Sequence
  Description of Artificial Sequence: Synthetic oligonucleotide
cuuauccagugcacugugc

SEQ ID NO: 1333235 - RNA, 19 nt, Artificial Sequence
  Description of Artificial Sequence: Synthetic oligonucleotide
uuggucuuauccagugcac

SEQ ID NO: 1333236 - RNA, 19 nt, Artificial Sequence
  Description of Artificial Sequence: Synthetic oligonucleotide
aacuaaacuccaacagcca

SEQ ID NO: 1333237 - RNA, 19 nt, Artificial Sequence
  Description of Artificial Sequence: Synthetic oligonucleotide
agagaaagggcagaccuaa

SEQ ID NO: 1333238 - RNA, 19 nt, Artificial Sequence
  Description of Artificial Sequence: Synthetic oligonucleotide
ccaacguacaaaacacacg

SEQ ID NO: 1333239 - RNA, 19 nt, Artificial Sequence
  Description of Artificial Sequence: Synthetic oligonucleotide
aacuucguaaaaggaacuu

SEQ ID NO: 1333240 - RNA, 19 nt, Artificial Sequence
  Description of Artificial Sequence: Synthetic oligonucleotide
aggaugauaggggcucagc

SEQ ID NO: 1333241 - RNA, 19 nt, Artificial Sequence
  Description of Artificial Sequence: Synthetic oligonucleotide
agcccaacgccccugggug

SEQ ID NO: 1333242 - RNA, 19 nt, Artificial Sequence
  Description of Artificial Sequence: Synthetic oligonucleotide
acuguugaacugaccaauc

SEQ ID NO: 1333243 - RNA, 19 nt, Artificial Sequence
  Description of Artificial Sequence: Synthetic oligonucleotide
acucuuguccauuccugca

SEQ ID NO: 1333244 - RNA, 19 nt, Artificial Sequence
  Description of Artificial Sequence: Synthetic oligonucleotide
ggccuacccauccagagcc

SEQ ID NO: 1333245 - RNA, 19 nt, Artificial Sequence
  Description of Artificial Sequence: Synthetic oligonucleotide
aguuuauacuauacuuucu

SEQ ID NO: 1333246 - RNA, 19 nt, Artificial Sequence
  Description of Artificial Sequence: Synthetic oligonucleotide
aaccacacaaauaggucau

SEQ ID NO: 1333247 - RNA, 19 nt, Artificial Sequence
  Description of Artificial Sequence: Synthetic oligonucleotide
augcuggcguuuucggagg

SEQ ID NO: 1333248 - RNA, 19 nt, Artificial Sequence
  Description of Artificial Sequence: Synthetic oligonucleotide
auaggggcucagcccaacg

SEQ ID NO: 1333249 - RNA, 19 nt, Artificial Sequence
  Description of Artificial Sequence: Synthetic oligonucleotide
uggccuacccauccagagc

SEQ ID NO: 1333250 - RNA, 19 nt, Artificial Sequence
  Description of Artificial Sequence: Synthetic oligonucleotide
gcgauuuggucuuauccag

SEQ ID NO: 1333251 - RNA, 19 nt, Artificial Sequence
  Description of Artificial Sequence: Synthetic oligonucleotide
accuaagcccagugcacuc

SEQ ID NO: 1333252 - RNA, 19 nt, Artificial Sequence
  Description of Artificial Sequence: Synthetic oligonucleotide
uuuagcucuuaaacauaua

SEQ ID NO: 1333253 - RNA, 19 nt, Artificial Sequence
  Description of Artificial Sequence: Synthetic oligonucleotide
guggccuacccauccagag

SEQ ID NO: 1333254 - RNA, 19 nt, Artificial Sequence
  Description of Artificial Sequence: Synthetic oligonucleotide
agagcccaucucuuccuuc

SEQ ID NO: 1333255 - RNA, 19 nt, Artificial Sequence
  Description of Artificial Sequence: Synthetic oligonucleotide
ggucuuauccagugcacug

SEQ ID NO: 1333256 - RNA, 19 nt, Artificial Sequence
  Description of Artificial Sequence: Synthetic oligonucleotide
agaccuaagcccagugcac

SEQ ID NO: 1333257 - RNA, 19 nt, Artificial Sequence
  Description of Artificial Sequence: Synthetic oligonucleotide
gaccgagcaucuguuuugg

SEQ ID NO: 1333258 - RNA, 19 nt, Artificial Sequence
  Description of Artificial Sequence: Synthetic oligonucleotide
ggcgauuuggucuuaucca

SEQ ID NO: 1333259 - RNA, 19 nt, Artificial Sequence
  Description of Artificial Sequence: Synthetic oligonucleotide
guaaacagugacaccggac

SEQ ID NO: 1333260 - RNA, 19 nt, Artificial Sequence
  Description of Artificial Sequence: Synthetic oligonucleotide
acaccggacccaucgcagg

SEQ ID NO: 1333261 - RNA, 19 nt, Artificial Sequence
  Description of Artificial Sequence: Synthetic oligonucleotide
acuuagaaccggcgauuug

SEQ ID NO: 1333262 - RNA, 19 nt, Artificial Sequence
  Description of Artificial Sequence: Synthetic oligonucleotide
uggugccauucucacccgg

SEQ ID NO: 1333263 - RNA, 19 nt, Artificial Sequence
  Description of Artificial Sequence: Synthetic oligonucleotide
augaccgagcaucuguuuu

SEQ ID NO: 1333264 - RNA, 19 nt, Artificial Sequence
  Description of Artificial Sequence: Synthetic oligonucleotide
caaauaggucauguaaaca

SEQ ID NO: 1333265 - RNA, 19 nt, Artificial Sequence
  Description of Artificial Sequence: Synthetic oligonucleotide
cucgaaccgacauggucac

SEQ ID NO: 1333266 - RNA, 19 nt, Artificial Sequence
  Description of Artificial Sequence: Synthetic oligonucleotide
ccuagcaaaguuuauacua

SEQ ID NO: 1333267 - RNA, 19 nt, Artificial Sequence
  Description of Artificial Sequence: Synthetic oligonucleotide
gaaccgacauggucaccag

SEQ ID NO: 1333268 - RNA, 19 nt, Artificial Sequence
  Description of Artificial Sequence: Synthetic oligonucleotide
uggucuuauccagugcacu

SEQ ID NO: 1333269 - RNA, 19 nt, Artificial Sequence
  Description of Artificial Sequence: Synthetic oligonucleotide
ggacuccuagccugcaugg

SEQ ID NO: 1333270 - RNA, 19 nt, Artificial Sequence
  Description of Artificial Sequence: Synthetic oligonucleotide
cccaacaucacuguugaac

SEQ ID NO: 1333271 - RNA, 19 nt, Artificial Sequence
  Description of Artificial Sequence: Synthetic oligonucleotide
gacaccggacccaucgcag

SEQ ID NO: 1333272 - RNA, 19 nt, Artificial Sequence
  Description of Artificial Sequence: Synthetic oligonucleotide
caaucccaacguacaaaac

SEQ ID NO: 1333273 - RNA, 19 nt, Artificial Sequence
  Description of Artificial Sequence: Synthetic oligonucleotide
agggguuaggggcaaccca

SEQ ID NO: 1333274 - RNA, 19 nt, Artificial Sequence
  Description of Artificial Sequence: Synthetic oligonucleotide
cagggcgucaagcuccagc

SEQ ID NO: 1333275 - RNA, 19 nt, Artificial Sequence
  Description of Artificial Sequence: Synthetic oligonucleotide
ugauaacucuguguauaaa

SEQ ID NO: 1333276 - RNA, 19 nt, Artificial Sequence
  Description of Artificial Sequence: Synthetic oligonucleotide
cuagcaaaguuuauacuau

SEQ ID NO: 1333277 - RNA, 19 nt, Artificial Sequence
  Description of Artificial Sequence: Synthetic oligonucleotide
uaagcccagugcacucuug

SEQ ID NO: 1333278 - RNA, 19 nt, Artificial Sequence
  Description of Artificial Sequence: Synthetic oligonucleotide
acgcgugacgacaaggaug

SEQ ID NO: 1333279 - RNA, 19 nt, Artificial Sequence
  Description of Artificial Sequence: Synthetic oligonucleotide
cuagccugcauggccuugg

SEQ ID NO: 1333280 - RNA, 19 nt, Artificial Sequence
  Description of Artificial Sequence: Synthetic oligonucleotide
ggucacacgcuucacucug

SEQ ID NO: 1333281 - RNA, 19 nt, Artificial Sequence
  Description of Artificial Sequence: Synthetic oligonucleotide
uggucaaauguuggguuuc

SEQ ID NO: 1333282 - RNA, 19 nt, Artificial Sequence
  Description of Artificial Sequence: Synthetic oligonucleotide
cacacgcgugacgacaagg

SEQ ID NO: 1333283 - RNA, 19 nt, Artificial Sequence
  Description of Artificial Sequence: Synthetic oligonucleotide
gcuauauaaccacacaaau

SEQ ID NO: 1333284 - RNA, 19 nt, Artificial Sequence
  Description of Artificial Sequence: Synthetic oligonucleotide
aucaagcugagaggcccac

SEQ ID NO: 1333285 - RNA, 19 nt, Artificial Sequence
  Description of Artificial Sequence: Synthetic oligonucleotide
cugaagagaaagcucccaa

SEQ ID NO: 1333286 - RNA, 19 nt, Artificial Sequence
  Description of Artificial Sequence: Synthetic oligonucleotide
ugacgcugguggcagccac

SEQ ID NO: 1333287 - RNA, 19 nt, Artificial Sequence
  Description of Artificial Sequence: Synthetic oligonucleotide
cuggccacugcacggugag

SEQ ID NO: 1333288 - RNA, 19 nt, Artificial Sequence
  Description of Artificial Sequence: Synthetic oligonucleotide
ugccauucucacccggcuc

SEQ ID NO: 1333289 - RNA, 19 nt, Artificial Sequence
  Description of Artificial Sequence: Synthetic oligonucleotide
aacacacgcgugacgacaa

SEQ ID NO: 1333290 - RNA, 19 nt, Artificial Sequence
  Description of Artificial Sequence: Synthetic oligonucleotide
gccccuaaagacugccugg

SEQ ID NO: 1333291 - RNA, 19 nt, Artificial Sequence
  Description of Artificial Sequence: Synthetic oligonucleotide
uaagugugcgccggcgcug

SEQ ID NO: 1333292 - RNA, 19 nt, Artificial Sequence
  Description of Artificial Sequence: Synthetic oligonucleotide
gacccaucgcaggacacac

SEQ ID NO: 1333293 - RNA, 19 nt, Artificial Sequence
  Description of Artificial Sequence: Synthetic oligonucleotide
ccgagcaucuguuuuggac

SEQ ID NO: 1333294 - RNA, 19 nt, Artificial Sequence
  Description of Artificial Sequence: Synthetic oligonucleotide
ggcuauauaaccacacaaa

SEQ ID NO: 1333295 - RNA, 19 nt, Artificial Sequence
  Description of Artificial Sequence: Synthetic oligonucleotide
acgguccuggcaaaguucu

SEQ ID NO: 1333296 - RNA, 19 nt, Artificial Sequence
  Description of Artificial Sequence: Synthetic oligonucleotide
ugcuggcguuuucggaggc

SEQ ID NO: 1333297 - RNA, 19 nt, Artificial Sequence
  Description of Artificial Sequence: Synthetic oligonucleotide
guuaggggcaacccaacau

SEQ ID NO: 1333298 - RNA, 19 nt, Artificial Sequence
  Description of Artificial Sequence: Synthetic oligonucleotide
cacacaaauaggucaugua

SEQ ID NO: 1333299 - RNA, 19 nt, Artificial Sequence
  Description of Artificial Sequence: Synthetic oligonucleotide
gcagaccuaagcccagugc

SEQ ID NO: 1333300 - RNA, 19 nt, Artificial Sequence
  Description of Artificial Sequence: Synthetic oligonucleotide
ccaacuuugccacgcacuc

SEQ ID NO: 1333301 - RNA, 19 nt, Artificial Sequence
  Description of Artificial Sequence: Synthetic oligonucleotide
acacgcgugacgacaagga

SEQ ID NO: 1333302 - RNA, 19 nt, Artificial Sequence
  Description of Artificial Sequence: Synthetic oligonucleotide
ccuaaagacugccuggcca

SEQ ID NO: 1333303 - RNA, 19 nt, Artificial Sequence
  Description of Artificial Sequence: Synthetic oligonucleotide
cuuuuaaauaaagggcuau

SEQ ID NO: 1333304 - RNA, 19 nt, Artificial Sequence
  Description of Artificial Sequence: Synthetic oligonucleotide
aggggcaacccaacaucac

SEQ ID NO: 1333305 - RNA, 19 nt, Artificial Sequence
  Description of Artificial Sequence: Synthetic oligonucleotide
uggagcgcagggcgucaag

SEQ ID NO: 1333306 - RNA, 19 nt, Artificial Sequence
  Description of Artificial Sequence: Synthetic oligonucleotide
uuuucagggcagagcccau

SEQ ID NO: 1333307 - RNA, 19 nt, Artificial Sequence
  Description of Artificial Sequence: Synthetic oligonucleotide
uccuaugaccgagcaucug

SEQ ID NO: 1333308 - RNA, 19 nt, Artificial Sequence
  Description of Artificial Sequence: Synthetic oligonucleotide
gacuccuagccugcauggc

SEQ ID NO: 1333309 - RNA, 19 nt, Artificial Sequence
  Description of Artificial Sequence: Synthetic oligonucleotide
acacuuagaaccggcgauu

SEQ ID NO: 1333310 - RNA, 19 nt, Artificial Sequence
  Description of Artificial Sequence: Synthetic oligonucleotide
ggggucgucauaacccggg

SEQ ID NO: 1333311 - RNA, 19 nt, Artificial Sequence
  Description of Artificial Sequence: Synthetic oligonucleotide
accggacccaucgcaggac

SEQ ID NO: 1333312 - RNA, 19 nt, Artificial Sequence
  Description of Artificial Sequence: Synthetic oligonucleotide
acccggcucccgcuucacc

SEQ ID NO: 1333313 - RNA, 19 nt, Artificial Sequence
  Description of Artificial Sequence: Synthetic oligonucleotide
uggccccuaaagacugccu

SEQ ID NO: 1333314 - RNA, 19 nt, Artificial Sequence
  Description of Artificial Sequence: Synthetic oligonucleotide
ccaaucccaacguacaaaa

SEQ ID NO: 1333315 - RNA, 19 nt, Artificial Sequence
  Description of Artificial Sequence: Synthetic oligonucleotide
gaucaagcugagaggccca

SEQ ID NO: 1333316 - RNA, 19 nt, Artificial Sequence
  Description of Artificial Sequence: Synthetic oligonucleotide
acacacgcgugacgacaag

SEQ ID NO: 1333317 - RNA, 19 nt, Artificial Sequence
  Description of Artificial Sequence: Synthetic oligonucleotide
ucacccggcucccgcuuca

SEQ ID NO: 1333318 - RNA, 19 nt, Artificial Sequence
  Description of Artificial Sequence: Synthetic oligonucleotide
gcugccaacuuugccacgc

SEQ ID NO: 1333319 - RNA, 19 nt, Artificial Sequence
  Description of Artificial Sequence: Synthetic oligonucleotide
guccauuccugcagugccc

SEQ ID NO: 1333320 - RNA, 19 nt, Artificial Sequence
  Description of Artificial Sequence: Synthetic oligonucleotide
cagcucucgaaccgacaug

SEQ ID NO: 1333321 - RNA, 19 nt, Artificial Sequence
  Description of Artificial Sequence: Synthetic oligonucleotide
cacacuuagaaccggcgau

SEQ ID NO: 1333322 - RNA, 19 nt, Artificial Sequence
  Description of Artificial Sequence: Synthetic oligonucleotide
cgggaucaagcugagaggc

SEQ ID NO: 1333323 - RNA, 19 nt, Artificial Sequence
  Description of Artificial Sequence: Synthetic oligonucleotide
cgguucuuaagugugcgcc

SEQ ID NO: 1333324 - RNA, 19 nt, Artificial Sequence
  Description of Artificial Sequence: Synthetic oligonucleotide
gagagaaagggcagaccua

SEQ ID NO: 1333325 - RNA, 19 nt, Artificial Sequence
  Description of Artificial Sequence: Synthetic oligonucleotide
ugcguagccgcgguucuua

SEQ ID NO: 1333326 - RNA, 19 nt, Artificial Sequence
  Description of Artificial Sequence: Synthetic oligonucleotide
ggcagaccuaagcccagug

SEQ ID NO: 1333327 - RNA, 19 nt, Artificial Sequence
  Description of Artificial Sequence: Synthetic oligonucleotide
cacccacacuuagaaccgg

SEQ ID NO: 1333328 - RNA, 19 nt, Artificial Sequence
  Description of Artificial Sequence: Synthetic oligonucleotide
gguuaggggcaacccaaca

SEQ ID NO: 1333329 - RNA, 19 nt, Artificial Sequence
  Description of Artificial Sequence: Synthetic oligonucleotide
ggugccauucucacccggc

SEQ ID NO: 1333330 - RNA, 19 nt, Artificial Sequence
  Description of Artificial Sequence: Synthetic oligonucleotide
ggcacaaugagcaggcacu

SEQ ID NO: 1333331 - RNA, 19 nt, Artificial Sequence
  Description of Artificial Sequence: Synthetic oligonucleotide
cacgcuucacucugcagcu

SEQ ID NO: 1333332 - RNA, 19 nt, Artificial Sequence
  Description of Artificial Sequence: Synthetic oligonucleotide
gucacacgcuucacucugc

SEQ ID NO: 1333333 - RNA, 19 nt, Artificial Sequence
  Description of Artificial Sequence: Synthetic oligonucleotide
cgcgugacgacaaggauga

SEQ ID NO: 1333334 - RNA, 19 nt, Artificial Sequence
  Description of Artificial Sequence: Synthetic oligonucleotide
aucgcaggacacacugaca

SEQ ID NO: 1333335 - RNA, 19 nt, Artificial Sequence
  Description of Artificial Sequence: Synthetic oligonucleotide
ggagcgcagggcgucaagc

SEQ ID NO: 1333336 - RNA, 19 nt, Artificial Sequence
  Description of Artificial Sequence: Synthetic oligonucleotide
ucucacccggcucccgcuu

SEQ ID NO: 1333337 - RNA, 19 nt, Artificial Sequence
  Description of Artificial Sequence: Synthetic oligonucleotide
acgcugguggcagccaccu

SEQ ID NO: 1333338 - RNA, 19 nt, Artificial Sequence
  Description of Artificial Sequence: Synthetic oligonucleotide
cacuguugaacugaccaau

SEQ ID NO: 1333339 - RNA, 19 nt, Artificial Sequence
  Description of Artificial Sequence: Synthetic oligonucleotide
agcuucaugcuggcguuuu

SEQ ID NO: 1333340 - RNA, 19 nt, Artificial Sequence
  Description of Artificial Sequence: Synthetic oligonucleotide
cagagccuucaagacauaa

SEQ ID NO: 1333341 - RNA, 19 nt, Artificial Sequence
  Description of Artificial Sequence: Synthetic oligonucleotide
gcacggugaguccuaugac

SEQ ID NO: 1333342 - RNA, 19 nt, Artificial Sequence
  Description of Artificial Sequence: Synthetic oligonucleotide
cuaugaccgagcaucuguu

SEQ ID NO: 1333343 - RNA, 19 nt, Artificial Sequence
  Description of Artificial Sequence: Synthetic oligonucleotide
ccccuaaagacugccuggc

SEQ ID NO: 1333344 - RNA, 19 nt, Artificial Sequence
  Description of Artificial Sequence: Synthetic oligonucleotide
gcgcagggcgucaagcucc

SEQ ID NO: 1333345 - RNA, 19 nt, Artificial Sequence
  Description of Artificial Sequence: Synthetic oligonucleotide
agguugugcuuugcaggga

SEQ ID NO: 1333346 - RNA, 19 nt, Artificial Sequence
  Description of Artificial Sequence: Synthetic oligonucleotide
gggaucaagcugagaggcc

SEQ ID NO: 1333347 - RNA, 19 nt, Artificial Sequence
  Description of Artificial Sequence: Synthetic oligonucleotide
ggggcaacccaacaucacu

SEQ ID NO: 1333348 - RNA, 19 nt, Artificial Sequence
  Description of Artificial Sequence: Synthetic oligonucleotide
ucgaaccgacauggucacc

SEQ ID NO: 1333349 - RNA, 19 nt, Artificial Sequence
  Description of Artificial Sequence: Synthetic oligonucleotide
gggguuaggggcaacccaa

SEQ ID NO: 1333350 - RNA, 19 nt, Artificial Sequence
  Description of Artificial Sequence: Synthetic oligonucleotide
ccuaugaccgagcaucugu

SEQ ID NO: 1333351 - RNA, 19 nt, Artificial Sequence
  Description of Artificial Sequence: Synthetic oligonucleotide
caacuuugccacgcacuca

SEQ ID NO: 1333352 - RNA, 19 nt, Artificial Sequence
  Description of Artificial Sequence: Synthetic oligonucleotide
uccuagccugcauggccuu

SEQ ID NO: 1333353 - RNA, 19 nt, Artificial Sequence
  Description of Artificial Sequence: Synthetic oligonucleotide
cugcacggugaguccuaug

SEQ ID NO: 1333354 - RNA, 19 nt, Artificial Sequence
  Description of Artificial Sequence: Synthetic oligonucleotide
caccggacccaucgcagga

SEQ ID NO: 1333355 - RNA, 19 nt, Artificial Sequence
  Description of Artificial Sequence: Synthetic oligonucleotide
agaggcccacuggaaucug

SEQ ID NO: 1333356 - RNA, 19 nt, Artificial Sequence
  Description of Artificial Sequence: Synthetic oligonucleotide
cugcagugcccacucugga

SEQ ID NO: 1333357 - RNA, 19 nt, Artificial Sequence
  Description of Artificial Sequence: Synthetic oligonucleotide
cugagaggcccacuggaau

SEQ ID NO: 1333358 - RNA, 19 nt, Artificial Sequence
  Description of Artificial Sequence: Synthetic oligonucleotide
ccacacuuagaaccggcga

SEQ ID NO: 1333359 - RNA, 19 nt, Artificial Sequence
  Description of Artificial Sequence: Synthetic oligonucleotide
cuauuguaaugacgcuggu

SEQ ID NO: 1333360 - RNA, 19 nt, Artificial Sequence
  Description of Artificial Sequence: Synthetic oligonucleotide
cucacccggcucccgcuuc

SEQ ID NO: 1333361 - RNA, 19 nt, Artificial Sequence
  Description of Artificial Sequence: Synthetic oligonucleotide
gaguccuaugaccgagcau

SEQ ID NO: 1333362 - RNA, 19 nt, Artificial Sequence
  Description of Artificial Sequence: Synthetic oligonucleotide
caacgccccugggugcagg

SEQ ID NO: 1333363 - RNA, 19 nt, Artificial Sequence
  Description of Artificial Sequence: Synthetic oligonucleotide
augacgcugguggcagcca

SEQ ID NO: 1333364 - RNA, 19 nt, Artificial Sequence
  Description of Artificial Sequence: Synthetic oligonucleotide
uuggagcgcagggcgucaa

SEQ ID NO: 1333365 - RNA, 19 nt, Artificial Sequence
  Description of Artificial Sequence: Synthetic oligonucleotide
agcuggcugcguagccgcg

SEQ ID NO: 1333366 - RNA, 19 nt, Artificial Sequence
  Description of Artificial Sequence: Synthetic oligonucleotide
cugccaacuuugccacgca

SEQ ID NO: 1333367 - RNA, 19 nt, Artificial Sequence
  Description of Artificial Sequence: Synthetic oligonucleotide
ggcugcguagccgcgguuc

SEQ ID NO: 1333368 - RNA, 19 nt, Artificial Sequence
  Description of Artificial Sequence: Synthetic oligonucleotide
acuuugccacgcacucagu

SEQ ID NO: 1333369 - RNA, 19 nt, Artificial Sequence
  Description of Artificial Sequence: Synthetic oligonucleotide
ggacccaucgcaggacaca

SEQ ID NO: 1333370 - RNA, 19 nt, Artificial Sequence
  Description of Artificial Sequence: Synthetic oligonucleotide
cuuggagcgcagggcguca

SEQ ID NO: 1333371 - RNA, 19 nt, Artificial Sequence
  Description of Artificial Sequence: Synthetic oligonucleotide
gguggccuacccauccaga

SEQ ID NO: 1333372 - RNA, 19 nt, Artificial Sequence
  Description of Artificial Sequence: Synthetic oligonucleotide
ggguuaggggcaacccaac

SEQ ID NO: 1333373 - RNA, 19 nt, Artificial Sequence
  Description of Artificial Sequence: Synthetic oligonucleotide
gccaacuuugccacgcacu

SEQ ID NO: 1333374 - RNA, 19 nt, Artificial Sequence
  Description of Artificial Sequence: Synthetic oligonucleotide
ccacgcacucaguggcccc

SEQ ID NO: 1333375 - RNA, 19 nt, Artificial Sequence
  Description of Artificial Sequence: Synthetic oligonucleotide
guccuaugaccgagcaucu

SEQ ID NO: 1333376 - RNA, 19 nt, Artificial Sequence
  Description of Artificial Sequence: Synthetic oligonucleotide
gcuggcguuuucggaggcc

SEQ ID NO: 1333377 - RNA, 19 nt, Artificial Sequence
  Description of Artificial Sequence: Synthetic oligonucleotide
ccgacauggucaccagcuc

SEQ ID NO: 1333378 - RNA, 19 nt, Artificial Sequence
  Description of Artificial Sequence: Synthetic oligonucleotide
gcccaacgccccugggugc

SEQ ID NO: 1333379 - RNA, 19 nt, Artificial Sequence
  Description of Artificial Sequence: Synthetic oligonucleotide
cacugcacggugaguccua

SEQ ID NO: 1333380 - RNA, 19 nt, Artificial Sequence
  Description of Artificial Sequence: Synthetic oligonucleotide
cguagccgcgguucuuaag

SEQ ID NO: 1333381 - RNA, 19 nt, Artificial Sequence
  Description of Artificial Sequence: Synthetic oligonucleotide
ggucaaauguuggguuucu

SEQ ID NO: 1333382 - RNA, 19 nt, Artificial Sequence
  Description of Artificial Sequence: Synthetic oligonucleotide
accggcgauuuggucuuau

SEQ ID NO: 1333383 - RNA, 19 nt, Artificial Sequence
  Description of Artificial Sequence: Synthetic oligonucleotide
cacgcgugacgacaaggau

SEQ ID NO: 1333384 - RNA, 19 nt, Artificial Sequence
  Description of Artificial Sequence: Synthetic oligonucleotide
gggucacacgcuucacucu

SEQ ID NO: 1333385 - RNA, 19 nt, Artificial Sequence
  Description of Artificial Sequence: Synthetic oligonucleotide
cagcccaacgccccugggu

SEQ ID NO: 1333386 - RNA, 19 nt, Artificial Sequence
  Description of Artificial Sequence: Synthetic oligonucleotide
cuaagcccagugcacucuu

SEQ ID NO: 1333387 - RNA, 19 nt, Artificial Sequence
  Description of Artificial Sequence: Synthetic oligonucleotide
cuucgggaucaagcugaga

SEQ ID NO: 1333388 - RNA, 19 nt, Artificial Sequence
  Description of Artificial Sequence: Synthetic oligonucleotide
uggcugcguagccgcgguu

SEQ ID NO: 1333389 - RNA, 19 nt, Artificial Sequence
  Description of Artificial Sequence: Synthetic oligonucleotide
ccaucgcaggacacacuga

SEQ ID NO: 1333390 - RNA, 19 nt, Artificial Sequence
  Description of Artificial Sequence: Synthetic oligonucleotide
gaccccgagcuggggccac

SEQ ID NO: 1333391 - RNA, 19 nt, Artificial Sequence
  Description of Artificial Sequence: Synthetic oligonucleotide
cuggcugcguagccgcggu

SEQ ID NO: 1333392 - RNA, 19 nt, Artificial Sequence
  Description of Artificial Sequence: Synthetic oligonucleotide
gcacucaguggccccuaaa

SEQ ID NO: 1333393 - RNA, 19 nt, Artificial Sequence
  Description of Artificial Sequence: Synthetic oligonucleotide
cgugacgacaaggaugaua

SEQ ID NO: 1333394 - RNA, 19 nt, Artificial Sequence
  Description of Artificial Sequence: Synthetic oligonucleotide
gcguuuucggaggccagcu

SEQ ID NO: 1333395 - RNA, 19 nt, Artificial Sequence
  Description of Artificial Sequence: Synthetic oligonucleotide
cgggccacgguccuggcaa

SEQ ID NO: 1333396 - RNA, 19 nt, Artificial Sequence
  Description of Artificial Sequence: Synthetic oligonucleotide
ccuagccugcauggccuug

SEQ ID NO: 1333397 - RNA, 19 nt, Artificial Sequence
  Description of Artificial Sequence: Synthetic oligonucleotide
ccggacccaucgcaggaca

SEQ ID NO: 1333398 - RNA, 19 nt, Artificial Sequence
  Description of Artificial Sequence: Synthetic oligonucleotide
cacccggcucccgcuucac

SEQ ID NO: 1333399 - RNA, 19 nt, Artificial Sequence
  Description of Artificial Sequence: Synthetic oligonucleotide
cccggcucccgcuucaccu

SEQ ID NO: 1333400 - RNA, 19 nt, Artificial Sequence
  Description of Artificial Sequence: Synthetic oligonucleotide
cacgcacucaguggccccu

SEQ ID NO: 1333401 - RNA, 19 nt, Artificial Sequence
  Description of Artificial Sequence: Synthetic oligonucleotide
acgcacucaguggccccua

SEQ ID NO: 1333402 - RNA, 19 nt, Artificial Sequence
  Description of Artificial Sequence: Synthetic oligonucleotide
gcguagccgcgguucuuaa

SEQ ID NO: 1333403 - RNA, 19 nt, Artificial Sequence
  Description of Artificial Sequence: Synthetic oligonucleotide
gugcgccggcgcugcuuca

SEQ ID NO: 1333404 - RNA, 19 nt, Artificial Sequence
  Description of Artificial Sequence: Synthetic oligonucleotide
ccuaagcccagugcacucu

SEQ ID NO: 1333405 - RNA, 19 nt, Artificial Sequence
  Description of Artificial Sequence: Synthetic oligonucleotide
gcgggccacgguccuggca

SEQ ID NO: 1333406 - RNA, 19 nt, Artificial Sequence
  Description of Artificial Sequence: Synthetic oligonucleotide
cccaacgccccugggugca

SEQ ID NO: 1333407 - RNA, 19 nt, Artificial Sequence
  Description of Artificial Sequence: Synthetic oligonucleotide
cggugaguccuaugaccga

SEQ ID NO: 1333408 - RNA, 19 nt, Artificial Sequence
  Description of Artificial Sequence: Synthetic oligonucleotide
ccaacgccccugggugcag

SEQ ID NO: 1333409 - RNA, 19 nt, Artificial Sequence
  Description of Artificial Sequence: Synthetic oligonucleotide
gggcagaccuaagcccagu

SEQ ID NO: 1333410 - RNA, 19 nt, Artificial Sequence
  Description of Artificial Sequence: Synthetic oligonucleotide
gcucucgaaccgacauggu

SEQ ID NO: 1333411 - RNA, 19 nt, Artificial Sequence
  Description of Artificial Sequence: Synthetic oligonucleotide
gggcgucaagcuccagcuu

SEQ ID NO: 1333412 - RNA, 19 nt, Artificial Sequence
  Description of Artificial Sequence: Synthetic oligonucleotide
cugcguagccgcgguucuu

SEQ ID NO: 1333413 - RNA, 19 nt, Artificial Sequence
  Description of Artificial Sequence: Synthetic oligonucleotide
cguuuucggaggccagcuu

SEQ ID NO: 1333414 - RNA, 19 nt, Artificial Sequence
  Description of Artificial Sequence: Synthetic oligonucleotide
gcgugacgacaaggaugau

SEQ ID NO: 1333415 - RNA, 19 nt, Artificial Sequence
  Description of Artificial Sequence: Synthetic oligonucleotide
uauacuuccacauacaaag

SEQ ID NO: 1333416 - RNA, 19 nt, Artificial Sequence
  Description of Artificial Sequence: Synthetic oligonucleotide
aauauauauauauauauau

SEQ ID NO: 1333417 - RNA, 19 nt, Artificial Sequence
  Description of Artificial Sequence: Synthetic oligonucleotide
uuuaaauauauauauauau

SEQ ID NO: 1333418 - RNA, 19 nt, Artificial Sequence
  Description of Artificial Sequence: Synthetic oligonucleotide
agaucuguaaaguauuucc

SEQ ID NO: 1333419 - RNA, 19 nt, Artificial Sequence
  Description of Artificial Sequence: Synthetic oligonucleotide
ucaucuaauuccaugauag

SEQ ID NO: 1333420 - RNA, 19 nt, Artificial Sequence
  Description of Artificial Sequence: Synthetic oligonucleotide
uuuaguuuaaaugaaagga

SEQ ID NO: 1333421 - RNA, 19 nt, Artificial Sequence
  Description of Artificial Sequence: Synthetic oligonucleotide
aggguaaugaauuaagugg

SEQ ID NO: 1333422 - RNA, 19 nt, Artificial Sequence
  Description of Artificial Sequence: Synthetic oligonucleotide
uauauauauauauauauau

SEQ ID NO: 1333423 - RNA, 19 nt, Artificial Sequence
  Description of Artificial Sequence: Synthetic oligonucleotide
aaggaaaucucuuuaaugu

SEQ ID NO: 1333424 - RNA, 19 nt, Artificial Sequence
  Description of Artificial Sequence: Synthetic oligonucleotide
uaaauauauauauauauau

SEQ ID NO: 1333425 - RNA, 19 nt, Artificial Sequence
  Description of Artificial Sequence: Synthetic oligonucleotide
uauauauauauauauauua

SEQ ID NO: 1333426 - RNA, 19 nt, Artificial Sequence
  Description of Artificial Sequence: Synthetic oligonucleotide
agacauucaucauaaaagc

SEQ ID NO: 1333427 - RNA, 19 nt, Artificial Sequence
  Description of Artificial Sequence: Synthetic oligonucleotide
aaugucaagacauaucaca

SEQ ID NO: 1333428 - RNA, 19 nt, Artificial Sequence
  Description of Artificial Sequence: Synthetic oligonucleotide
uuaaguggaagucagguug

SEQ ID NO: 1333429 - RNA, 19 nt, Artificial Sequence
  Description of Artificial Sequence: Synthetic oligonucleotide
uccacaaacaguaacagga

SEQ ID NO: 1333430 - RNA, 19 nt, Artificial Sequence
  Description of Artificial Sequence: Synthetic oligonucleotide
uguaauacgcucuggauag

SEQ ID NO: 1333431 - RNA, 19 nt, Artificial Sequence
  Description of Artificial Sequence: Synthetic oligonucleotide
aaaagccagguauacuucc

SEQ ID NO: 1333432 - RNA, 19 nt, Artificial Sequence
  Description of Artificial Sequence: Synthetic oligonucleotide
uguucaguacaccaaauag

SEQ ID NO: 1333433 - RNA, 19 nt, Artificial Sequence
  Description of Artificial Sequence: Synthetic oligonucleotide
uguuaugacaacauacucc

SEQ ID NO: 1333434 - RNA, 19 nt, Artificial Sequence
  Description of Artificial Sequence: Synthetic oligonucleotide
ucucaaauugugcuaaacg

SEQ ID NO: 1333435 - RNA, 19 nt, Artificial Sequence
  Description of Artificial Sequence: Synthetic oligonucleotide
aaugaauuaaguggaaguc

SEQ ID NO: 1333436 - RNA, 19 nt, Artificial Sequence
  Description of Artificial Sequence: Synthetic oligonucleotide
aaggagaugaagcagucag

SEQ ID NO: 1333437 - RNA, 19 nt, Artificial Sequence
  Description of Artificial Sequence: Synthetic oligonucleotide
uguaaguggaagauaauca

SEQ ID NO: 1333438 - RNA, 19 nt, Artificial Sequence
  Description of Artificial Sequence: Synthetic oligonucleotide
uuguaaacgauccagggcu

SEQ ID NO: 1333439 - RNA, 19 nt, Artificial Sequence
  Description of Artificial Sequence: Synthetic oligonucleotide
aguauggcacguuuggucc

SEQ ID NO: 1333440 - RNA, 19 nt, Artificial Sequence
  Description of Artificial Sequence: Synthetic oligonucleotide
aauauuguaauacgcucug

SEQ ID NO: 1333441 - RNA, 19 nt, Artificial Sequence
  Description of Artificial Sequence: Synthetic oligonucleotide
guuccuacaacacagcagg

SEQ ID NO: 1333442 - RNA, 19 nt, Artificial Sequence
  Description of Artificial Sequence: Synthetic oligonucleotide
uuaaauauauauauauaua

SEQ ID NO: 1333443 - RNA, 19 nt, Artificial Sequence
  Description of Artificial Sequence: Synthetic oligonucleotide
uauauauauauauauuaaa

SEQ ID NO: 1333444 - RNA, 19 nt, Artificial Sequence
  Description of Artificial Sequence: Synthetic oligonucleotide
auuaguauggcacguuugg

SEQ ID NO: 1333445 - RNA, 19 nt, Artificial Sequence
  Description of Artificial Sequence: Synthetic oligonucleotide
uguaacuaaauuuccaagu

SEQ ID NO: 1333446 - RNA, 19 nt, Artificial Sequence
  Description of Artificial Sequence: Synthetic oligonucleotide
uguaguuuaaugucaagac

SEQ ID NO: 1333447 - RNA, 19 nt, Artificial Sequence
  Description of Artificial Sequence: Synthetic oligonucleotide
uaaugcuacaagaagaguc

SEQ ID NO: 1333448 - RNA, 19 nt, Artificial Sequence
  Description of Artificial Sequence: Synthetic oligonucleotide
ugcuuaaccagccaagaag

SEQ ID NO: 1333449 - RNA, 19 nt, Artificial Sequence
  Description of Artificial Sequence: Synthetic oligonucleotide
aaauaaugcagaucaacau

SEQ ID NO: 1333450 - RNA, 19 nt, Artificial Sequence
  Description of Artificial Sequence: Synthetic oligonucleotide
aaugguuccuacaacacag

SEQ ID NO: 1333451 - RNA, 19 nt, Artificial Sequence
  Description of Artificial Sequence: Synthetic oligonucleotide
uaaugaauuaaguggaagu

SEQ ID NO: 1333452 - RNA, 19 nt, Artificial Sequence
  Description of Artificial Sequence: Synthetic oligonucleotide
ucuuguaaacgauccaggg

SEQ ID NO: 1333453 - RNA, 19 nt, Artificial Sequence
  Description of Artificial Sequence: Synthetic oligonucleotide
ucauaaaagccauagacuu

SEQ ID NO: 1333454 - RNA, 19 nt, Artificial Sequence
  Description of Artificial Sequence: Synthetic oligonucleotide
uggggaagaauuuacagga

SEQ ID NO: 1333455 - RNA, 19 nt, Artificial Sequence
  Description of Artificial Sequence: Synthetic oligonucleotide
uuuuaaauauauauauaua

SEQ ID NO: 1333456 - RNA, 19 nt, Artificial Sequence
  Description of Artificial Sequence: Synthetic oligonucleotide
ugaucuagaacacagugua

SEQ ID NO: 1333457 - RNA, 19 nt, Artificial Sequence
  Description of Artificial Sequence: Synthetic oligonucleotide
ucaucauuaguauggcacg

SEQ ID NO: 1333458 - RNA, 19 nt, Artificial Sequence
  Description of Artificial Sequence: Synthetic oligonucleotide
aauuaaguggaagucaggu

SEQ ID NO: 1333459 - RNA, 19 nt, Artificial Sequence
  Description of Artificial Sequence: Synthetic oligonucleotide
uuauuuguucaguacacca

SEQ ID NO: 1333460 - RNA, 19 nt, Artificial Sequence
  Description of Artificial Sequence: Synthetic oligonucleotide
auagauaguugguaucugg

SEQ ID NO: 1333461 - RNA, 19 nt, Artificial Sequence
  Description of Artificial Sequence: Synthetic oligonucleotide
uguaucuauggauggagag

SEQ ID NO: 1333462 - RNA, 19 nt, Artificial Sequence
  Description of Artificial Sequence: Synthetic oligonucleotide
uuaaaauuuccuuagccuu

SEQ ID NO: 1333463 - RNA, 19 nt, Artificial Sequence
  Description of Artificial Sequence: Synthetic oligonucleotide
uucuuguaaacgauccagg

SEQ ID NO: 1333464 - RNA, 19 nt, Artificial Sequence
  Description of Artificial Sequence: Synthetic oligonucleotide
ucaauauuguaauacgcuc

SEQ ID NO: 1333465 - RNA, 19 nt, Artificial Sequence
  Description of Artificial Sequence: Synthetic oligonucleotide
caguacaccaaauaggaug

SEQ ID NO: 1333466 - RNA, 19 nt, Artificial Sequence
  Description of Artificial Sequence: Synthetic oligonucleotide
guaacuaaauuuccaagug

SEQ ID NO: 1333467 - RNA, 19 nt, Artificial Sequence
  Description of Artificial Sequence: Synthetic oligonucleotide
uacaggguaaugaauuaag

SEQ ID NO: 1333468 - RNA, 19 nt, Artificial Sequence
  Description of Artificial Sequence: Synthetic oligonucleotide
uuuaaugucaagacauauc

SEQ ID NO: 1333469 - RNA, 19 nt, Artificial Sequence
  Description of Artificial Sequence: Synthetic oligonucleotide
caugauagcagccugguuc

SEQ ID NO: 1333470 - RNA, 19 nt, Artificial Sequence
  Description of Artificial Sequence: Synthetic oligonucleotide
acugaucuagaacacagug

SEQ ID NO: 1333471 - RNA, 19 nt, Artificial Sequence
  Description of Artificial Sequence: Synthetic oligonucleotide
cauacuuucguagacauuc

SEQ ID NO: 1333472 - RNA, 19 nt, Artificial Sequence
  Description of Artificial Sequence: Synthetic oligonucleotide
cuuucguagacauucauca

SEQ ID NO: 1333473 - RNA, 19 nt, Artificial Sequence
  Description of Artificial Sequence: Synthetic oligonucleotide
uccaugauguaguuuaaug

SEQ ID NO: 1333474 - RNA, 19 nt, Artificial Sequence
  Description of Artificial Sequence: Synthetic oligonucleotide
caacauacucccaagaauc

SEQ ID NO: 1333475 - RNA, 19 nt, Artificial Sequence
  Description of Artificial Sequence: Synthetic oligonucleotide
gacucuauuaauccaugcc

SEQ ID NO: 1333476 - RNA, 19 nt, Artificial Sequence
  Description of Artificial Sequence: Synthetic oligonucleotide
auauauauauauauuaaaa

SEQ ID NO: 1333477 - RNA, 19 nt, Artificial Sequence
  Description of Artificial Sequence: Synthetic oligonucleotide
uaaacgcucaucauuagua

SEQ ID NO: 1333478 - RNA, 19 nt, Artificial Sequence
  Description of Artificial Sequence: Synthetic oligonucleotide
aaacaguaacaggacagcg

SEQ ID NO: 1333479 - RNA, 19 nt, Artificial Sequence
  Description of Artificial Sequence: Synthetic oligonucleotide
auguuaugacaacauacuc

SEQ ID NO: 1333480 - RNA, 19 nt, Artificial Sequence
  Description of Artificial Sequence: Synthetic oligonucleotide
aguguaguaaguucagucu

SEQ ID NO: 1333481 - RNA, 19 nt, Artificial Sequence
  Description of Artificial Sequence: Synthetic oligonucleotide
auaggaugcaagcacuguc

SEQ ID NO: 1333482 - RNA, 19 nt, Artificial Sequence
  Description of Artificial Sequence: Synthetic oligonucleotide
aaugcuacaagaagaguca

SEQ ID NO: 1333483 - RNA, 19 nt, Artificial Sequence
  Description of Artificial Sequence: Synthetic oligonucleotide
aaauauauauauauauaua

SEQ ID NO: 1333484 - RNA, 19 nt, Artificial Sequence
  Description of Artificial Sequence: Synthetic oligonucleotide
uacguagucacccaugaau

SEQ ID NO: 1333485 - RNA, 19 nt, Artificial Sequence
  Description of Artificial Sequence: Synthetic oligonucleotide
cucuauuaauccaugccag

SEQ ID NO: 1333486 - RNA, 19 nt, Artificial Sequence
  Description of Artificial Sequence: Synthetic oligonucleotide
caagacauaucacaauuug

SEQ ID NO: 1333487 - RNA, 19 nt, Artificial Sequence
  Description of Artificial Sequence: Synthetic oligonucleotide
uuguaauacgcucuggaua

SEQ ID NO: 1333488 - RNA, 19 nt, Artificial Sequence
  Description of Artificial Sequence: Synthetic oligonucleotide
cuuguaaacgauccagggc

SEQ ID NO: 1333489 - RNA, 19 nt, Artificial Sequence
  Description of Artificial Sequence: Synthetic oligonucleotide
uaaagcuguaaguggaaga

SEQ ID NO: 1333490 - RNA, 19 nt, Artificial Sequence
  Description of Artificial Sequence: Synthetic oligonucleotide
ucuacguagucacccauga

SEQ ID NO: 1333491 - RNA, 19 nt, Artificial Sequence
  Description of Artificial Sequence: Synthetic oligonucleotide
caggguaaugaauuaagug

SEQ ID NO: 1333492 - RNA, 19 nt, Artificial Sequence
  Description of Artificial Sequence: Synthetic oligonucleotide
aacuccgacucuauuaauc

SEQ ID NO: 1333493 - RNA, 19 nt, Artificial Sequence
  Description of Artificial Sequence: Synthetic oligonucleotide
ugaccauaagagaucacac

SEQ ID NO: 1333494 - RNA, 19 nt, Artificial Sequence
  Description of Artificial Sequence: Synthetic oligonucleotide
ucguagacauucaucauaa

SEQ ID NO: 1333495 - RNA, 19 nt, Artificial Sequence
  Description of Artificial Sequence: Synthetic oligonucleotide
ugcuaaacgcucaucauua

SEQ ID NO: 1333496 - RNA, 19 nt, Artificial Sequence
  Description of Artificial Sequence: Synthetic oligonucleotide
aacaucaaacaguaauuua

SEQ ID NO: 1333497 - RNA, 19 nt, Artificial Sequence
  Description of Artificial Sequence: Synthetic oligonucleotide
cauuuccauacuuucguag

SEQ ID NO: 1333498 - RNA, 19 nt, Artificial Sequence
  Description of Artificial Sequence: Synthetic oligonucleotide
auuuccauacuuucguaga

SEQ ID NO: 1333499 - RNA, 19 nt, Artificial Sequence
  Description of Artificial Sequence: Synthetic oligonucleotide
aaagcuguaaguggaagau

SEQ ID NO: 1333500 - RNA, 19 nt, Artificial Sequence
  Description of Artificial Sequence: Synthetic oligonucleotide
caacacagcaggcagacug

SEQ ID NO: 1333501 - RNA, 19 nt, Artificial Sequence
  Description of Artificial Sequence: Synthetic oligonucleotide
auauauauauauauauuaa

SEQ ID NO: 1333502 - RNA, 19 nt, Artificial Sequence
  Description of Artificial Sequence: Synthetic oligonucleotide
ugaauagauaguugguauc

SEQ ID NO: 1333503 - RNA, 19 nt, Artificial Sequence
  Description of Artificial Sequence: Synthetic oligonucleotide
uuuauuuguucaguacacc

SEQ ID NO: 1333504 - RNA, 19 nt, Artificial Sequence
  Description of Artificial Sequence: Synthetic oligonucleotide
cacagaauaauaaccucug

SEQ ID NO: 1333505 - RNA, 19 nt, Artificial Sequence
  Description of Artificial Sequence: Synthetic oligonucleotide
ugggucaaacugaagaaaa

SEQ ID NO: 1333506 - RNA, 19 nt, Artificial Sequence
  Description of Artificial Sequence: Synthetic oligonucleotide
uucguagacauucaucaua

SEQ ID NO: 1333507 - RNA, 19 nt, Artificial Sequence
  Description of Artificial Sequence: Synthetic oligonucleotide
cuuggugaacgccuugucg

SEQ ID NO: 1333508 - RNA, 19 nt, Artificial Sequence
  Description of Artificial Sequence: Synthetic oligonucleotide
aguuaaacacuguaacuaa

SEQ ID NO: 1333509 - RNA, 19 nt, Artificial Sequence
  Description of Artificial Sequence: Synthetic oligonucleotide
uauuaauccaugccaguua

SEQ ID NO: 1333510 - RNA, 19 nt, Artificial Sequence
  Description of Artificial Sequence: Synthetic oligonucleotide
uaauacgcucuggauagcg

SEQ ID NO: 1333511 - RNA, 19 nt, Artificial Sequence
  Description of Artificial Sequence: Synthetic oligonucleotide
auuaauccaugccaguuaa

SEQ ID NO: 1333512 - RNA, 19 nt, Artificial Sequence
  Description of Artificial Sequence: Synthetic oligonucleotide
acaguaacaggacagcgaa

SEQ ID NO: 1333513 - RNA, 19 nt, Artificial Sequence
  Description of Artificial Sequence: Synthetic oligonucleotide
uuuccauacuuucguagac

SEQ ID NO: 1333514 - RNA, 19 nt, Artificial Sequence
  Description of Artificial Sequence: Synthetic oligonucleotide
ucuuuaauguuaugacaac

SEQ ID NO: 1333515 - RNA, 19 nt, Artificial Sequence
  Description of Artificial Sequence: Synthetic oligonucleotide
guaaugaauuaaguggaag

SEQ ID NO: 1333516 - RNA, 19 nt, Artificial Sequence
  Description of Artificial Sequence: Synthetic oligonucleotide
acaacauacucccaagaau

SEQ ID NO: 1333517 - RNA, 19 nt, Artificial Sequence
  Description of Artificial Sequence: Synthetic oligonucleotide
ugauguaguuuaaugucaa

SEQ ID NO: 1333518 - RNA, 19 nt, Artificial Sequence
  Description of Artificial Sequence: Synthetic oligonucleotide
auuuguucaguacaccaaa

SEQ ID NO: 1333519 - RNA, 19 nt, Artificial Sequence
  Description of Artificial Sequence: Synthetic oligonucleotide
aguuacacauuucaauaaa

SEQ ID NO: 1333520 - RNA, 19 nt, Artificial Sequence
  Description of Artificial Sequence: Synthetic oligonucleotide
aauagauaguugguaucug

SEQ ID NO: 1333521 - RNA, 19 nt, Artificial Sequence
  Description of Artificial Sequence: Synthetic oligonucleotide
gaauuuacaggaaguaguc

SEQ ID NO: 1333522 - RNA, 19 nt, Artificial Sequence
  Description of Artificial Sequence: Synthetic oligonucleotide
aguguaucuauggauggag

SEQ ID NO: 1333523 - RNA, 19 nt, Artificial Sequence
  Description of Artificial Sequence: Synthetic oligonucleotide
auguaguuuaaugucaaga

SEQ ID NO: 1333524 - RNA, 19 nt, Artificial Sequence
  Description of Artificial Sequence: Synthetic oligonucleotide
aauuuacaggaaguagucu

SEQ ID NO: 1333525 - RNA, 19 nt, Artificial Sequence
  Description of Artificial Sequence: Synthetic oligonucleotide
aaacgcucaucauuaguau

SEQ ID NO: 1333526 - RNA, 19 nt, Artificial Sequence
  Description of Artificial Sequence: Synthetic oligonucleotide
aagacauaucacaauuugu

SEQ ID NO: 1333527 - RNA, 19 nt, Artificial Sequence
  Description of Artificial Sequence: Synthetic oligonucleotide
augacaacauacucccaag

SEQ ID NO: 1333528 - RNA, 19 nt, Artificial Sequence
  Description of Artificial Sequence: Synthetic oligonucleotide
ucuauuaauccaugccagu

SEQ ID NO: 1333529 - RNA, 19 nt, Artificial Sequence
  Description of Artificial Sequence: Synthetic oligonucleotide
uggugaaaugccccauccg

SEQ ID NO: 1333530 - RNA, 19 nt, Artificial Sequence
  Description of Artificial Sequence: Synthetic oligonucleotide
auaucuguccaucuacuaa

SEQ ID NO: 1333531 - RNA, 19 nt, Artificial Sequence
  Description of Artificial Sequence: Synthetic oligonucleotide
acagcgaaccucuuguaca

SEQ ID NO: 1333532 - RNA, 19 nt, Artificial Sequence
  Description of Artificial Sequence: Synthetic oligonucleotide
aguaauugggugcacuaaa

SEQ ID NO: 1333533 - RNA, 19 nt, Artificial Sequence
  Description of Artificial Sequence: Synthetic oligonucleotide
ugaaaugccccauccgcca

SEQ ID NO: 1333534 - RNA, 19 nt, Artificial Sequence
  Description of Artificial Sequence: Synthetic oligonucleotide
acugaagaaaagaauauuu

SEQ ID NO: 1333535 - RNA, 19 nt, Artificial Sequence
  Description of Artificial Sequence: Synthetic oligonucleotide
gaauaauaaccucugucua

SEQ ID NO: 1333536 - RNA, 19 nt, Artificial Sequence
  Description of Artificial Sequence: Synthetic oligonucleotide
ggaaaguuuauuuguucag

SEQ ID NO: 1333537 - RNA, 19 nt, Artificial Sequence
  Description of Artificial Sequence: Synthetic oligonucleotide
aucuagaacacaguguagu

SEQ ID NO: 1333538 - RNA, 19 nt, Artificial Sequence
  Description of Artificial Sequence: Synthetic oligonucleotide
uaguauggcacguuugguc

SEQ ID NO: 1333539 - RNA, 19 nt, Artificial Sequence
  Description of Artificial Sequence: Synthetic oligonucleotide
ggugaaaugccccauccgc

SEQ ID NO: 1333540 - RNA, 19 nt, Artificial Sequence
  Description of Artificial Sequence: Synthetic oligonucleotide
guaaguggaagauaaucaa

SEQ ID NO: 1333541 - RNA, 19 nt, Artificial Sequence
  Description of Artificial Sequence: Synthetic oligonucleotide
auagcagccugguucccac

SEQ ID NO: 1333542 - RNA, 19 nt, Artificial Sequence
  Description of Artificial Sequence: Synthetic oligonucleotide
uuugcuuaaccagccaaga

SEQ ID NO: 1333543 - RNA, 19 nt, Artificial Sequence
  Description of Artificial Sequence: Synthetic oligonucleotide
aaauaggaugcaagcacug

SEQ ID NO: 1333544 - RNA, 19 nt, Artificial Sequence
  Description of Artificial Sequence: Synthetic oligonucleotide
caucuacuaaagcuguaag

SEQ ID NO: 1333545 - RNA, 19 nt, Artificial Sequence
  Description of Artificial Sequence: Synthetic oligonucleotide
auauauauauauauauaua

SEQ ID NO: 1333546 - RNA, 19 nt, Artificial Sequence
  Description of Artificial Sequence: Synthetic oligonucleotide
auauauauauauauauauu

SEQ ID NO: 1333547 - RNA, 19 nt, Artificial Sequence
  Description of Artificial Sequence: Synthetic oligonucleotide
aauugugcuaaacgcucau

SEQ ID NO: 1333548 - RNA, 19 nt, Artificial Sequence
  Description of Artificial Sequence: Synthetic oligonucleotide
uccauacuuucguagacau

SEQ ID NO: 1333549 - RNA, 19 nt, Artificial Sequence
  Description of Artificial Sequence: Synthetic oligonucleotide
aacaguaacaggacagcga

SEQ ID NO: 1333550 - RNA, 19 nt, Artificial Sequence
  Description of Artificial Sequence: Synthetic oligonucleotide
uacgccgggucacaugagg

SEQ ID NO: 1333551 - RNA, 19 nt, Artificial Sequence
  Description of Artificial Sequence: Synthetic oligonucleotide
uccgacucuauuaauccau

SEQ ID NO: 1333552 - RNA, 19 nt, Artificial Sequence
  Description of Artificial Sequence: Synthetic oligonucleotide
auccagggcucuuauauga

SEQ ID NO: 1333553 - RNA, 19 nt, Artificial Sequence
  Description of Artificial Sequence: Synthetic oligonucleotide
caagaagagucacagucuc

SEQ ID NO: 1333554 - RNA, 19 nt, Artificial Sequence
  Description of Artificial Sequence: Synthetic oligonucleotide
gggaagaauuuacaggaag

SEQ ID NO: 1333555 - RNA, 19 nt, Artificial Sequence
  Description of Artificial Sequence: Synthetic oligonucleotide
acuuucguagacauucauc

SEQ ID NO: 1333556 - RNA, 19 nt, Artificial Sequence
  Description of Artificial Sequence: Synthetic oligonucleotide
ugguuccuacaacacagca

SEQ ID NO: 1333557 - RNA, 19 nt, Artificial Sequence
  Description of Artificial Sequence: Synthetic oligonucleotide
cuguaaguggaagauaauc

SEQ ID NO: 1333558 - RNA, 19 nt, Artificial Sequence
  Description of Artificial Sequence: Synthetic oligonucleotide
cauggaggcagaauaucug

SEQ ID NO: 1333559 - RNA, 19 nt, Artificial Sequence
  Description of Artificial Sequence: Synthetic oligonucleotide
ugccaguuaaacacuguaa

SEQ ID NO: 1333560 - RNA, 19 nt, Artificial Sequence
  Description of Artificial Sequence: Synthetic oligonucleotide
agacauaucacaauuuguu

SEQ ID NO: 1333561 - RNA, 19 nt, Artificial Sequence
  Description of Artificial Sequence: Synthetic oligonucleotide
caugaggcucuccacgacg

SEQ ID NO: 1333562 - RNA, 19 nt, Artificial Sequence
  Description of Artificial Sequence: Synthetic oligonucleotide
uccacagaauaauaaccuc

SEQ ID NO: 1333563 - RNA, 19 nt, Artificial Sequence
  Description of Artificial Sequence: Synthetic oligonucleotide
ucuagaacacaguguagua

SEQ ID NO: 1333564 - RNA, 19 nt, Artificial Sequence
  Description of Artificial Sequence: Synthetic oligonucleotide
ugagcucgagacaccagug

SEQ ID NO: 1333565 - RNA, 19 nt, Artificial Sequence
  Description of Artificial Sequence: Synthetic oligonucleotide
caguuaguuacacauuuca

SEQ ID NO: 1333566 - RNA, 19 nt, Artificial Sequence
  Description of Artificial Sequence: Synthetic oligonucleotide
guaauuuaguuuaaaugaa

SEQ ID NO: 1333567 - RNA, 19 nt, Artificial Sequence
  Description of Artificial Sequence: Synthetic oligonucleotide
auacgcucuggauagcgca

SEQ ID NO: 1333568 - RNA, 19 nt, Artificial Sequence
  Description of Artificial Sequence: Synthetic oligonucleotide
acaccaaauaggaugcaag

SEQ ID NO: 1333569 - RNA, 19 nt, Artificial Sequence
  Description of Artificial Sequence: Synthetic oligonucleotide
ugucaagacauaucacaau

SEQ ID NO: 1333570 - RNA, 19 nt, Artificial Sequence
  Description of Artificial Sequence: Synthetic oligonucleotide
ccucuuguacauuugauuc

SEQ ID NO: 1333571 - RNA, 19 nt, Artificial Sequence
  Description of Artificial Sequence: Synthetic oligonucleotide
auuaaguggaagucagguu

SEQ ID NO: 1333572 - RNA, 19 nt, Artificial Sequence
  Description of Artificial Sequence: Synthetic oligonucleotide
gguaaccacauuccgauca

SEQ ID NO: 1333573 - RNA, 19 nt, Artificial Sequence
  Description of Artificial Sequence: Synthetic oligonucleotide
uacaacacagcaggcagac

SEQ ID NO: 1333574 - RNA, 19 nt, Artificial Sequence
  Description of Artificial Sequence: Synthetic oligonucleotide
agcucgagacaccagugug

SEQ ID NO: 1333575 - RNA, 19 nt, Artificial Sequence
  Description of Artificial Sequence: Synthetic oligonucleotide
ucuuguccaaagguguagc

SEQ ID NO: 1333576 - RNA, 19 nt, Artificial Sequence
  Description of Artificial Sequence: Synthetic oligonucleotide
cucaauauuguaauacgcu

SEQ ID NO: 1333577 - RNA, 19 nt, Artificial Sequence
  Description of Artificial Sequence: Synthetic oligonucleotide
uuaaccagccaagaagaau

SEQ ID NO: 1333578 - RNA, 19 nt, Artificial Sequence
  Description of Artificial Sequence: Synthetic oligonucleotide
uuaaugcuacaagaagagu

SEQ ID NO: 1333579 - RNA, 19 nt, Artificial Sequence
  Description of Artificial Sequence: Synthetic oligonucleotide
uuggcaugguuaaauguuu

SEQ ID NO: 1333580 - RNA, 19 nt, Artificial Sequence
  Description of Artificial Sequence: Synthetic oligonucleotide
gauccagggcucuuauaug

SEQ ID NO: 1333581 - RNA, 19 nt, Artificial Sequence
  Description of Artificial Sequence: Synthetic oligonucleotide
gcagaucaacaucaaacag

SEQ ID NO: 1333582 - RNA, 19 nt, Artificial Sequence
  Description of Artificial Sequence: Synthetic oligonucleotide
gccaguuaaacacuguaac

SEQ ID NO: 1333583 - RNA, 19 nt, Artificial Sequence
  Description of Artificial Sequence: Synthetic oligonucleotide
caccuuuaaugcuacaaga

SEQ ID NO: 1333584 - RNA, 19 nt, Artificial Sequence
  Description of Artificial Sequence: Synthetic oligonucleotide
auaagagaucacacauugg

SEQ ID NO: 1333585 - RNA, 19 nt, Artificial Sequence
  Description of Artificial Sequence: Synthetic oligonucleotide
aggaaaucucuuuaauguu

SEQ ID NO: 1333586 - RNA, 19 nt, Artificial Sequence
  Description of Artificial Sequence: Synthetic oligonucleotide
acauacucccaagaaucuc

SEQ ID NO: 1333587 - RNA, 19 nt, Artificial Sequence
  Description of Artificial Sequence: Synthetic oligonucleotide
gcucuuauaugauccagug

SEQ ID NO: 1333588 - RNA, 19 nt, Artificial Sequence
  Description of Artificial Sequence: Synthetic oligonucleotide
accucuuguacauuugauu

SEQ ID NO: 1333589 - RNA, 19 nt, Artificial Sequence
  Description of Artificial Sequence: Synthetic oligonucleotide
ucuuguacauuugauucuu

SEQ ID NO: 1333590 - RNA, 19 nt, Artificial Sequence
  Description of Artificial Sequence: Synthetic oligonucleotide
uugcuuaaccagccaagaa

SEQ ID NO: 1333591 - RNA, 19 nt, Artificial Sequence
  Description of Artificial Sequence: Synthetic oligonucleotide
gaagucagguugugaaauc

SEQ ID NO: 1333592 - RNA, 19 nt, Artificial Sequence
  Description of Artificial Sequence: Synthetic oligonucleotide
uuccauacuuucguagaca

SEQ ID NO: 1333593 - RNA, 19 nt, Artificial Sequence
  Description of Artificial Sequence: Synthetic oligonucleotide
cugaccauaagagaucaca

SEQ ID NO: 1333594 - RNA, 19 nt, Artificial Sequence
  Description of Artificial Sequence: Synthetic oligonucleotide
caauauuguaauacgcucu

SEQ ID NO: 1333595 - RNA, 19 nt, Artificial Sequence
  Description of Artificial Sequence: Synthetic oligonucleotide
uguaaacgauccagggcuc

SEQ ID NO: 1333596 - RNA, 19 nt, Artificial Sequence
  Description of Artificial Sequence: Synthetic oligonucleotide
uggaauuggccaugcacau

SEQ ID NO: 1333597 - RNA, 19 nt, Artificial Sequence
  Description of Artificial Sequence: Synthetic oligonucleotide
ccuacaacacagcaggcag

SEQ ID NO: 1333598 - RNA, 19 nt, Artificial Sequence
  Description of Artificial Sequence: Synthetic oligonucleotide
gcaccuuuaaugcuacaag

SEQ ID NO: 1333599 - RNA, 19 nt, Artificial Sequence
  Description of Artificial Sequence: Synthetic oligonucleotide
cagaucaacaucaaacagu

SEQ ID NO: 1333600 - RNA, 19 nt, Artificial Sequence
  Description of Artificial Sequence: Synthetic oligonucleotide
caccacguggugaaaugcc

SEQ ID NO: 1333601 - RNA, 19 nt, Artificial Sequence
  Description of Artificial Sequence: Synthetic oligonucleotide
uaaugcagaucaacaucaa

SEQ ID NO: 1333602 - RNA, 19 nt, Artificial Sequence
  Description of Artificial Sequence: Synthetic oligonucleotide
uuaguauggcacguuuggu

SEQ ID NO: 1333603 - RNA, 19 nt, Artificial Sequence
  Description of Artificial Sequence: Synthetic oligonucleotide
uacuuucguagacauucau

SEQ ID NO: 1333604 - RNA, 19 nt, Artificial Sequence
  Description of Artificial Sequence: Synthetic oligonucleotide
caguuaaacacuguaacua

SEQ ID NO: 1333605 - RNA, 19 nt, Artificial Sequence
  Description of Artificial Sequence: Synthetic oligonucleotide
uuucguagacauucaucau

SEQ ID NO: 1333606 - RNA, 19 nt, Artificial Sequence
  Description of Artificial Sequence: Synthetic oligonucleotide
auugugcuaaacgcucauc

SEQ ID NO: 1333607 - RNA, 19 nt, Artificial Sequence
  Description of Artificial Sequence: Synthetic oligonucleotide
acaauuuguuacagaaaca

SEQ ID NO: 1333608 - RNA, 19 nt, Artificial Sequence
  Description of Artificial Sequence: Synthetic oligonucleotide
gaggcucuccacgacgagg

SEQ ID NO: 1333609 - RNA, 19 nt, Artificial Sequence
  Description of Artificial Sequence: Synthetic oligonucleotide
auaaaacuccgacucuauu

SEQ ID NO: 1333610 - RNA, 19 nt, Artificial Sequence
  Description of Artificial Sequence: Synthetic oligonucleotide
guaucuauggauggagaga

SEQ ID NO: 1333611 - RNA, 19 nt, Artificial Sequence
  Description of Artificial Sequence: Synthetic oligonucleotide
augucaagacauaucacaa

SEQ ID NO: 1333612 - RNA, 19 nt, Artificial Sequence
  Description of Artificial Sequence: Synthetic oligonucleotide
gcacguuugguccaugaug

SEQ ID NO: 1333613 - RNA, 19 nt, Artificial Sequence
  Description of Artificial Sequence: Synthetic oligonucleotide
uuuccauacguuggcauuu

SEQ ID NO: 1333614 - RNA, 19 nt, Artificial Sequence
  Description of Artificial Sequence: Synthetic oligonucleotide
accuuuaaugcuacaagaa

SEQ ID NO: 1333615 - RNA, 19 nt, Artificial Sequence
  Description of Artificial Sequence: Synthetic oligonucleotide
uagcgcaccuuuaaugcua

SEQ ID NO: 1333616 - RNA, 19 nt, Artificial Sequence
  Description of Artificial Sequence: Synthetic oligonucleotide
acaggguaaugaauuaagu

SEQ ID NO: 1333617 - RNA, 19 nt, Artificial Sequence
  Description of Artificial Sequence: Synthetic oligonucleotide
cuccacagaauaauaaccu

SEQ ID NO: 1333618 - RNA, 19 nt, Artificial Sequence
  Description of Artificial Sequence: Synthetic oligonucleotide
uacgcucuggauagcgcac

SEQ ID NO: 1333619 - RNA, 19 nt, Artificial Sequence
  Description of Artificial Sequence: Synthetic oligonucleotide
ccucucaauauuguaauac

SEQ ID NO: 1333620 - RNA, 19 nt, Artificial Sequence
  Description of Artificial Sequence: Synthetic oligonucleotide
gguuccuacaacacagcag

SEQ ID NO: 1333621 - RNA, 19 nt, Artificial Sequence
  Description of Artificial Sequence: Synthetic oligonucleotide
aagcacugucaugacaaau

SEQ ID NO: 1333622 - RNA, 19 nt, Artificial Sequence
  Description of Artificial Sequence: Synthetic oligonucleotide
ucuggauagcgcaccuuua

SEQ ID NO: 1333623 - RNA, 19 nt, Artificial Sequence
  Description of Artificial Sequence: Synthetic oligonucleotide
acgacgaggugcuggguca

SEQ ID NO: 1333624 - RNA, 19 nt, Artificial Sequence
  Description of Artificial Sequence: Synthetic oligonucleotide
gucaucuaauuccaugaua

SEQ ID NO: 1333625 - RNA, 19 nt, Artificial Sequence
  Description of Artificial Sequence: Synthetic oligonucleotide
acagcguccgcacuugguu

SEQ ID NO: 1333626 - RNA, 19 nt, Artificial Sequence
  Description of Artificial Sequence: Synthetic oligonucleotide
gaaaugccccauccgccac

SEQ ID NO: 1333627 - RNA, 19 nt, Artificial Sequence
  Description of Artificial Sequence: Synthetic oligonucleotide
ucugaccauaagagaucac

SEQ ID NO: 1333628 - RNA, 19 nt, Artificial Sequence
  Description of Artificial Sequence: Synthetic oligonucleotide
gguacgccgggucacauga

SEQ ID NO: 1333629 - RNA, 19 nt, Artificial Sequence
  Description of Artificial Sequence: Synthetic oligonucleotide
acgcucuggauagcgcacc

SEQ ID NO: 1333630 - RNA, 19 nt, Artificial Sequence
  Description of Artificial Sequence: Synthetic oligonucleotide
cacauugggcccucaugug

SEQ ID NO: 1333631 - RNA, 19 nt, Artificial Sequence
  Description of Artificial Sequence: Synthetic oligonucleotide
gucucaaauugugcuaaac

SEQ ID NO: 1333632 - RNA, 19 nt, Artificial Sequence
  Description of Artificial Sequence: Synthetic oligonucleotide
agcaguaauugggugcacu

SEQ ID NO: 1333633 - RNA, 19 nt, Artificial Sequence
  Description of Artificial Sequence: Synthetic oligonucleotide
cauacguuggcauuuccau

SEQ ID NO: 1333634 - RNA, 19 nt, Artificial Sequence
  Description of Artificial Sequence: Synthetic oligonucleotide
agggcucuuauaugaucca

SEQ ID NO: 1333635 - RNA, 19 nt, Artificial Sequence
  Description of Artificial Sequence: Synthetic oligonucleotide
agcgcaccuuuaaugcuac

SEQ ID NO: 1333636 - RNA, 19 nt, Artificial Sequence
  Description of Artificial Sequence: Synthetic oligonucleotide
cugaucuagaacacagugu

SEQ ID NO: 1333637 - RNA, 19 nt, Artificial Sequence
  Description of Artificial Sequence: Synthetic oligonucleotide
guaauugggugcacuaaaa

SEQ ID NO: 1333638 - RNA, 19 nt, Artificial Sequence
  Description of Artificial Sequence: Synthetic oligonucleotide
uaaccacauuccgaucaug

SEQ ID NO: 1333639 - RNA, 19 nt, Artificial Sequence
  Description of Artificial Sequence: Synthetic oligonucleotide
uccaucuacuaaagcugua

SEQ ID NO: 1333640 - RNA, 19 nt, Artificial Sequence
  Description of Artificial Sequence: Synthetic oligonucleotide
uggcacguuugguccauga

SEQ ID NO: 1333641 - RNA, 19 nt, Artificial Sequence
  Description of Artificial Sequence: Synthetic oligonucleotide
cuccacgacgaggugcugg

SEQ ID NO: 1333642 - RNA, 19 nt, Artificial Sequence
  Description of Artificial Sequence: Synthetic oligonucleotide
caggacagcgaaccucuug

SEQ ID NO: 1333643 - RNA, 19 nt, Artificial Sequence
  Description of Artificial Sequence: Synthetic oligonucleotide
acguagucacccaugaaua

SEQ ID NO: 1333644 - RNA, 19 nt, Artificial Sequence
  Description of Artificial Sequence: Synthetic oligonucleotide
uggugaacgccuugucguc

SEQ ID NO: 1333645 - RNA, 19 nt, Artificial Sequence
  Description of Artificial Sequence: Synthetic oligonucleotide
cacgacgaggugcuggguc

SEQ ID NO: 1333646 - RNA, 19 nt, Artificial Sequence
  Description of Artificial Sequence: Synthetic oligonucleotide
uuccgaucauggcaccaau

SEQ ID NO: 1333647 - RNA, 19 nt, Artificial Sequence
  Description of Artificial Sequence: Synthetic oligonucleotide
gauagcagccugguuccca

SEQ ID NO: 1333648 - RNA, 19 nt, Artificial Sequence
  Description of Artificial Sequence: Synthetic oligonucleotide
gcuaaacgcucaucauuag

SEQ ID NO: 1333649 - RNA, 19 nt, Artificial Sequence
  Description of Artificial Sequence: Synthetic oligonucleotide
acuaaagcuguaaguggaa

SEQ ID NO: 1333650 - RNA, 19 nt, Artificial Sequence
  Description of Artificial Sequence: Synthetic oligonucleotide
aagcuguaaguggaagaua

SEQ ID NO: 1333651 - RNA, 19 nt, Artificial Sequence
  Description of Artificial Sequence: Synthetic oligonucleotide
aaacgauccagggcucuua

SEQ ID NO: 1333652 - RNA, 19 nt, Artificial Sequence
  Description of Artificial Sequence: Synthetic oligonucleotide
gucuacguagucacccaug

SEQ ID NO: 1333653 - RNA, 19 nt, Artificial Sequence
  Description of Artificial Sequence: Synthetic oligonucleotide
cucuuguacauuugauucu

SEQ ID NO: 1333654 - RNA, 19 nt, Artificial Sequence
  Description of Artificial Sequence: Synthetic oligonucleotide
cuaaacgcucaucauuagu

SEQ ID NO: 1333655 - RNA, 19 nt, Artificial Sequence
  Description of Artificial Sequence: Synthetic oligonucleotide
cuggauagcgcaccuuuaa

SEQ ID NO: 1333656 - RNA, 19 nt, Artificial Sequence
  Description of Artificial Sequence: Synthetic oligonucleotide
auacuuucguagacauuca

SEQ ID NO: 1333657 - RNA, 19 nt, Artificial Sequence
  Description of Artificial Sequence: Synthetic oligonucleotide
agucucaaauugugcuaaa

SEQ ID NO: 1333658 - RNA, 19 nt, Artificial Sequence
  Description of Artificial Sequence: Synthetic oligonucleotide
gugagcucgagacaccagu

SEQ ID NO: 1333659 - RNA, 19 nt, Artificial Sequence
  Description of Artificial Sequence: Synthetic oligonucleotide
aggcucuccacgacgaggu

SEQ ID NO: 1333660 - RNA, 19 nt, Artificial Sequence
  Description of Artificial Sequence: Synthetic oligonucleotide
ggcagaauaucuguccauc

SEQ ID NO: 1333661 - RNA, 19 nt, Artificial Sequence
  Description of Artificial Sequence: Synthetic oligonucleotide
cuccgacucuauuaaucca

SEQ ID NO: 1333662 - RNA, 19 nt, Artificial Sequence
  Description of Artificial Sequence: Synthetic oligonucleotide
cacguggugaaaugcccca

SEQ ID NO: 1333663 - RNA, 19 nt, Artificial Sequence
  Description of Artificial Sequence: Synthetic oligonucleotide
guauggcacguuuggucca

SEQ ID NO: 1333664 - RNA, 19 nt, Artificial Sequence
  Description of Artificial Sequence: Synthetic oligonucleotide
ccaugauguaguuuaaugu

SEQ ID NO: 1333665 - RNA, 19 nt, Artificial Sequence
  Description of Artificial Sequence: Synthetic oligonucleotide
guccuggggaagaauuuac

SEQ ID NO: 1333666 - RNA, 19 nt, Artificial Sequence
  Description of Artificial Sequence: Synthetic oligonucleotide
aucauuaguauggcacguu

SEQ ID NO: 1333667 - RNA, 19 nt, Artificial Sequence
  Description of Artificial Sequence: Synthetic oligonucleotide
cagucucaaauugugcuaa

SEQ ID NO: 1333668 - RNA, 19 nt, Artificial Sequence
  Description of Artificial Sequence: Synthetic oligonucleotide
cugucuacguagucaccca

SEQ ID NO: 1333669 - RNA, 19 nt, Artificial Sequence
  Description of Artificial Sequence: Synthetic oligonucleotide
gucagguugugaaaucuua

SEQ ID NO: 1333670 - RNA, 19 nt, Artificial Sequence
  Description of Artificial Sequence: Synthetic oligonucleotide
cagcguccgcacuugguuc

SEQ ID NO: 1333671 - RNA, 19 nt, Artificial Sequence
  Description of Artificial Sequence: Synthetic oligonucleotide
cgccuugucguccauggcg

SEQ ID NO: 1333672 - RNA, 19 nt, Artificial Sequence
  Description of Artificial Sequence: Synthetic oligonucleotide
uaaacgauccagggcucuu

SEQ ID NO: 1333673 - RNA, 19 nt, Artificial Sequence
  Description of Artificial Sequence: Synthetic oligonucleotide
guaauacgcucuggauagc

SEQ ID NO: 1333674 - RNA, 19 nt, Artificial Sequence
  Description of Artificial Sequence: Synthetic oligonucleotide
ccaugccaguuaaacacug

SEQ ID NO: 1333675 - RNA, 19 nt, Artificial Sequence
  Description of Artificial Sequence: Synthetic oligonucleotide
caggcagacugaucuagaa

SEQ ID NO: 1333676 - RNA, 19 nt, Artificial Sequence
  Description of Artificial Sequence: Synthetic oligonucleotide
gugcuaaacgcucaucauu

SEQ ID NO: 1333677 - RNA, 19 nt, Artificial Sequence
  Description of Artificial Sequence: Synthetic oligonucleotide
cugggucaaacugaagaaa

SEQ ID NO: 1333678 - RNA, 19 nt, Artificial Sequence
  Description of Artificial Sequence: Synthetic oligonucleotide
gaacgccuugucguccaug

SEQ ID NO: 1333679 - RNA, 19 nt, Artificial Sequence
  Description of Artificial Sequence: Synthetic oligonucleotide
acaagcuggugagcucgag

SEQ ID NO: 1333680 - RNA, 19 nt, Artificial Sequence
  Description of Artificial Sequence: Synthetic oligonucleotide
guaacaggacagcgaaccu

SEQ ID NO: 1333681 - RNA, 19 nt, Artificial Sequence
  Description of Artificial Sequence: Synthetic oligonucleotide
accagccaagaagaauggu

SEQ ID NO: 1333682 - RNA, 19 nt, Artificial Sequence
  Description of Artificial Sequence: Synthetic oligonucleotide
cgacucuauuaauccaugc

SEQ ID NO: 1333683 - RNA, 19 nt, Artificial Sequence
  Description of Artificial Sequence: Synthetic oligonucleotide
gcaguaauugggugcacua

SEQ ID NO: 1333684 - RNA, 19 nt, Artificial Sequence
  Description of Artificial Sequence: Synthetic oligonucleotide
ccgacucuauuaauccaug

SEQ ID NO: 1333685 - RNA, 19 nt, Artificial Sequence
  Description of Artificial Sequence: Synthetic oligonucleotide
gauggagagaggccaccau

SEQ ID NO: 1333686 - RNA, 19 nt, Artificial Sequence
  Description of Artificial Sequence: Synthetic oligonucleotide
cucuccacgacgaggugcu

SEQ ID NO: 1333687 - RNA, 19 nt, Artificial Sequence
  Description of Artificial Sequence: Synthetic oligonucleotide
caguaauugggugcacuaa

SEQ ID NO: 1333688 - RNA, 19 nt, Artificial Sequence
  Description of Artificial Sequence: Synthetic oligonucleotide
guaaccacauuccgaucau

SEQ ID NO: 1333689 - RNA, 19 nt, Artificial Sequence
  Description of Artificial Sequence: Synthetic oligonucleotide
uccgcacuugguucucguu

SEQ ID NO: 1333690 - RNA, 19 nt, Artificial Sequence
  Description of Artificial Sequence: Synthetic oligonucleotide
cuucucgcacagcguccgc

SEQ ID NO: 1333691 - RNA, 19 nt, Artificial Sequence
  Description of Artificial Sequence: Synthetic oligonucleotide
ggaagucagguugugaaau

SEQ ID NO: 1333692 - RNA, 19 nt, Artificial Sequence
  Description of Artificial Sequence: Synthetic oligonucleotide
acaccagugugagaccguu

SEQ ID NO: 1333693 - RNA, 19 nt, Artificial Sequence
  Description of Artificial Sequence: Synthetic oligonucleotide
ugaacgccuugucguccau

SEQ ID NO: 1333694 - RNA, 19 nt, Artificial Sequence
  Description of Artificial Sequence: Synthetic oligonucleotide
gccggcuuucaugauuucc

SEQ ID NO: 1333695 - RNA, 19 nt, Artificial Sequence
  Description of Artificial Sequence: Synthetic oligonucleotide
ccagggcucuuauaugauc

SEQ ID NO: 1333696 - RNA, 19 nt, Artificial Sequence
  Description of Artificial Sequence: Synthetic oligonucleotide
caagcacugucaugacaaa

SEQ ID NO: 1333697 - RNA, 19 nt, Artificial Sequence
  Description of Artificial Sequence: Synthetic oligonucleotide
ccgcacuugguucucguuc

SEQ ID NO: 1333698 - RNA, 19 nt, Artificial Sequence
  Description of Artificial Sequence: Synthetic oligonucleotide
caucauuaguauggcacgu

SEQ ID NO: 1333699 - RNA, 19 nt, Artificial Sequence
  Description of Artificial Sequence: Synthetic oligonucleotide
ccaaagguguagccagcac

SEQ ID NO: 1333700 - RNA, 19 nt, Artificial Sequence
  Description of Artificial Sequence: Synthetic oligonucleotide
acaacacagcaggcagacu

SEQ ID NO: 1333701 - RNA, 19 nt, Artificial Sequence
  Description of Artificial Sequence: Synthetic oligonucleotide
cuacguagucacccaugaa

SEQ ID NO: 1333702 - RNA, 19 nt, Artificial Sequence
  Description of Artificial Sequence: Synthetic oligonucleotide
acguuugguccaugaugua

SEQ ID NO: 1333703 - RNA, 19 nt, Artificial Sequence
  Description of Artificial Sequence: Synthetic oligonucleotide
acgauccagggcucuuaua

SEQ ID NO: 1333704 - RNA, 19 nt, Artificial Sequence
  Description of Artificial Sequence: Synthetic oligonucleotide
guacaccaaauaggaugca

SEQ ID NO: 1333705 - RNA, 19 nt, Artificial Sequence
  Description of Artificial Sequence: Synthetic oligonucleotide
guaaacgauccagggcucu

SEQ ID NO: 1333706 - RNA, 19 nt, Artificial Sequence
  Description of Artificial Sequence: Synthetic oligonucleotide
ccaucuacuaaagcuguaa

SEQ ID NO: 1333707 - RNA, 19 nt, Artificial Sequence
  Description of Artificial Sequence: Synthetic oligonucleotide
ggaauuggccaugcacauc

SEQ ID NO: 1333708 - RNA, 19 nt, Artificial Sequence
  Description of Artificial Sequence: Synthetic oligonucleotide
cagcgaaccucuuguacau

SEQ ID NO: 1333709 - RNA, 19 nt, Artificial Sequence
  Description of Artificial Sequence: Synthetic oligonucleotide
cugccggcuuucaugauuu

SEQ ID NO: 1333710 - RNA, 19 nt, Artificial Sequence
  Description of Artificial Sequence: Synthetic oligonucleotide
ggcucuuauaugauccagu

SEQ ID NO: 1333711 - RNA, 19 nt, Artificial Sequence
  Description of Artificial Sequence: Synthetic oligonucleotide
ggguacgccgggucacaug

SEQ ID NO: 1333712 - RNA, 19 nt, Artificial Sequence
  Description of Artificial Sequence: Synthetic oligonucleotide
ugccggcuuucaugauuuc

SEQ ID NO: 1333713 - RNA, 19 nt, Artificial Sequence
  Description of Artificial Sequence: Synthetic oligonucleotide
cgcucaucauuaguauggc

SEQ ID NO: 1333714 - RNA, 19 nt, Artificial Sequence
  Description of Artificial Sequence: Synthetic oligonucleotide
ccagguauacuuccacaua

SEQ ID NO: 1333715 - RNA, 19 nt, Artificial Sequence
  Description of Artificial Sequence: Synthetic oligonucleotide
auggcacguuugguccaug

SEQ ID NO: 1333716 - RNA, 19 nt, Artificial Sequence
  Description of Artificial Sequence: Synthetic oligonucleotide
gacaccagugugagaccgu

SEQ ID NO: 1333717 - RNA, 19 nt, Artificial Sequence
  Description of Artificial Sequence: Synthetic oligonucleotide
agcgaaccucuuguacauu

SEQ ID NO: 1333718 - RNA, 19 nt, Artificial Sequence
  Description of Artificial Sequence: Synthetic oligonucleotide
cacagcguccgcacuuggu

SEQ ID NO: 1333719 - RNA, 19 nt, Artificial Sequence
  Description of Artificial Sequence: Synthetic oligonucleotide
cgauccagggcucuuauau

SEQ ID NO: 1333720 - RNA, 19 nt, Artificial Sequence
  Description of Artificial Sequence: Synthetic oligonucleotide
ggcucuccacgacgaggug

SEQ ID NO: 1333721 - RNA, 19 nt, Artificial Sequence
  Description of Artificial Sequence: Synthetic oligonucleotide
gcaggcagacugaucuaga

SEQ ID NO: 1333722 - RNA, 19 nt, Artificial Sequence
  Description of Artificial Sequence: Synthetic oligonucleotide
ggacagcgaaccucuugua

SEQ ID NO: 1333723 - RNA, 19 nt, Artificial Sequence
  Description of Artificial Sequence: Synthetic oligonucleotide
guccgcacuugguucucgu

SEQ ID NO: 1333724 - RNA, 19 nt, Artificial Sequence
  Description of Artificial Sequence: Synthetic oligonucleotide
ggcacguuugguccaugau

SEQ ID NO: 1333725 - RNA, 19 nt, Artificial Sequence
  Description of Artificial Sequence: Synthetic oligonucleotide
cgcaccuuuaaugcuacaa

SEQ ID NO: 1333726 - RNA, 19 nt, Artificial Sequence
  Description of Artificial Sequence: Synthetic oligonucleotide
ggcggcgagccgcgcgucc

SEQ ID NO: 1333727 - RNA, 19 nt, Artificial Sequence
  Description of Artificial Sequence: Synthetic oligonucleotide
gcagucagugaccccuuuu

SEQ ID NO: 1333728 - RNA, 19 nt, Artificial Sequence
  Description of Artificial Sequence: Synthetic oligonucleotide
gcgcaccuuuaaugcuaca

SEQ ID NO: 1333729 - RNA, 19 nt, Artificial Sequence
  Description of Artificial Sequence: Synthetic oligonucleotide
ccauacuuucguagacauu

SEQ ID NO: 1333730 - RNA, 19 nt, Artificial Sequence
  Description of Artificial Sequence: Synthetic oligonucleotide
gggguacgccgggucacau

SEQ ID NO: 1333731 - RNA, 19 nt, Artificial Sequence
  Description of Artificial Sequence: Synthetic oligonucleotide
cgcucuggauagcgcaccu

SEQ ID NO: 1333732 - RNA, 19 nt, Artificial Sequence
  Description of Artificial Sequence: Synthetic oligonucleotide
cgacgaggugcugggucaa

SEQ ID NO: 1333733 - RNA, 19 nt, Artificial Sequence
  Description of Artificial Sequence: Synthetic oligonucleotide
gaugaaauaggccagagag

SEQ ID NO: 1333734 - RNA, 19 nt, Artificial Sequence
  Description of Artificial Sequence: Synthetic oligonucleotide
ugaguuagcuuuuagaagg

SEQ ID NO: 1333735 - RNA, 19 nt, Artificial Sequence
  Description of Artificial Sequence: Synthetic oligonucleotide
aaugaaggggcccugcucc

SEQ ID NO: 1333736 - RNA, 19 nt, Artificial Sequence
  Description of Artificial Sequence: Synthetic oligonucleotide
aguugagugauguaagugc

SEQ ID NO: 1333737 - RNA, 19 nt, Artificial Sequence
  Description of Artificial Sequence: Synthetic oligonucleotide
aagcauuugacuuccacuc

SEQ ID NO: 1333738 - RNA, 19 nt, Artificial Sequence
  Description of Artificial Sequence: Synthetic oligonucleotide
aauuuggucagcauugacc

SEQ ID NO: 1333739 - RNA, 19 nt, Artificial Sequence
  Description of Artificial Sequence: Synthetic oligonucleotide
augagguaaagacucaugc

SEQ ID NO: 1333740 - RNA, 19 nt, Artificial Sequence
  Description of Artificial Sequence: Synthetic oligonucleotide
ugugacacgaccauagcgg

SEQ ID NO: 1333741 - RNA, 19 nt, Artificial Sequence
  Description of Artificial Sequence: Synthetic oligonucleotide
aaauuagucuggaucaucc

SEQ ID NO: 1333742 - RNA, 19 nt, Artificial Sequence
  Description of Artificial Sequence: Synthetic oligonucleotide
aauagcgagcaccaaacuc

SEQ ID NO: 1333743 - RNA, 19 nt, Artificial Sequence
  Description of Artificial Sequence: Synthetic oligonucleotide
uauagcaggaugaaauagg

SEQ ID NO: 1333744 - RNA, 19 nt, Artificial Sequence
  Description of Artificial Sequence: Synthetic oligonucleotide
accacuuagcuuuaguccc

SEQ ID NO: 1333745 - RNA, 19 nt, Artificial Sequence
  Description of Artificial Sequence: Synthetic oligonucleotide
ugucaaugaaauuagucug

SEQ ID NO: 1333746 - RNA, 19 nt, Artificial Sequence
  Description of Artificial Sequence: Synthetic oligonucleotide
ugugcuacuacgagggugg

SEQ ID NO: 1333747 - RNA, 19 nt, Artificial Sequence
  Description of Artificial Sequence: Synthetic oligonucleotide
augaaauuagucuggauca

SEQ ID NO: 1333748 - RNA, 19 nt, Artificial Sequence
  Description of Artificial Sequence: Synthetic oligonucleotide
gaugacgagaauuugguca

SEQ ID NO: 1333749 - RNA, 19 nt, Artificial Sequence
  Description of Artificial Sequence: Synthetic oligonucleotide
gauaacagagcuucgugcc

SEQ ID NO: 1333750 - RNA, 19 nt, Artificial Sequence
  Description of Artificial Sequence: Synthetic oligonucleotide
auagcgagcaccaaacucc

SEQ ID NO: 1333751 - RNA, 19 nt, Artificial Sequence
  Description of Artificial Sequence: Synthetic oligonucleotide
cuugaugacgagaauuugg

SEQ ID NO: 1333752 - RNA, 19 nt, Artificial Sequence
  Description of Artificial Sequence: Synthetic oligonucleotide
uuucucuuacaauagcgag

SEQ ID NO: 1333753 - RNA, 19 nt, Artificial Sequence
  Description of Artificial Sequence: Synthetic oligonucleotide
auuguaguauuucaccguc

SEQ ID NO: 1333754 - RNA, 19 nt, Artificial Sequence
  Description of Artificial Sequence: Synthetic oligonucleotide
gagguaaagacucaugcac

SEQ ID NO: 1333755 - RNA, 19 nt, Artificial Sequence
  Description of Artificial Sequence: Synthetic oligonucleotide
gauauuguuggcaauggug

SEQ ID NO: 1333756 - RNA, 19 nt, Artificial Sequence
  Description of Artificial Sequence: Synthetic oligonucleotide
uccuauagcaggaugaaau

SEQ ID NO: 1333757 - RNA, 19 nt, Artificial Sequence
  Description of Artificial Sequence: Synthetic oligonucleotide
guaugcacaaaguaaggag

SEQ ID NO: 1333758 - RNA, 19 nt, Artificial Sequence
  Description of Artificial Sequence: Synthetic oligonucleotide
ucuuacaauagcgagcacc

SEQ ID NO: 1333759 - RNA, 19 nt, Artificial Sequence
  Description of Artificial Sequence: Synthetic oligonucleotide
aaacccugauacuugacga

SEQ ID NO: 1333760 - RNA, 19 nt, Artificial Sequence
  Description of Artificial Sequence: Synthetic oligonucleotide
agcggucuacuucauaacc

SEQ ID NO: 1333761 - RNA, 19 nt, Artificial Sequence
  Description of Artificial Sequence: Synthetic oligonucleotide
uucauaacccucagcauug

SEQ ID NO: 1333762 - RNA, 19 nt, Artificial Sequence
  Description of Artificial Sequence: Synthetic oligonucleotide
aguguacauuuucaaauuc

SEQ ID NO: 1333763 - RNA, 19 nt, Artificial Sequence
  Description of Artificial Sequence: Synthetic oligonucleotide
uccgugaccacaauaguca

SEQ ID NO: 1333764 - RNA, 19 nt, Artificial Sequence
  Description of Artificial Sequence: Synthetic oligonucleotide
cuaccugugucucauaccc

SEQ ID NO: 1333765 - RNA, 19 nt, Artificial Sequence
  Description of Artificial Sequence: Synthetic oligonucleotide
uauuucaccgucucaaagu

SEQ ID NO: 1333766 - RNA, 19 nt, Artificial Sequence
  Description of Artificial Sequence: Synthetic oligonucleotide
uucucuuacaauagcgagc

SEQ ID NO: 1333767 - RNA, 19 nt, Artificial Sequence
  Description of Artificial Sequence: Synthetic oligonucleotide
uuagcuuuuagaagggaaa

SEQ ID NO: 1333768 - RNA, 19 nt, Artificial Sequence
  Description of Artificial Sequence: Synthetic oligonucleotide
auagcaggaugaaauaggc

SEQ ID NO: 1333769 - RNA, 19 nt, Artificial Sequence
  Description of Artificial Sequence: Synthetic oligonucleotide
cugugugcuacuacgaggg

SEQ ID NO: 1333770 - RNA, 19 nt, Artificial Sequence
  Description of Artificial Sequence: Synthetic oligonucleotide
uugaugacgagaauuuggu

SEQ ID NO: 1333771 - RNA, 19 nt, Artificial Sequence
  Description of Artificial Sequence: Synthetic oligonucleotide
uccaaugugagaccggaga

SEQ ID NO: 1333772 - RNA, 19 nt, Artificial Sequence
  Description of Artificial Sequence: Synthetic oligonucleotide
ucuacucggaugcagccag

SEQ ID NO: 1333773 - RNA, 19 nt, Artificial Sequence
  Description of Artificial Sequence: Synthetic oligonucleotide
agcaccaaacuccuauagc

SEQ ID NO: 1333774 - RNA, 19 nt, Artificial Sequence
  Description of Artificial Sequence: Synthetic oligonucleotide
ucuguagcggucuacuuca

SEQ ID NO: 1333775 - RNA, 19 nt, Artificial Sequence
  Description of Artificial Sequence: Synthetic oligonucleotide
cauuuauuccuuacagugc

SEQ ID NO: 1333776 - RNA, 19 nt, Artificial Sequence
  Description of Artificial Sequence: Synthetic oligonucleotide
acaauagucaggaugaggu

SEQ ID NO: 1333777 - RNA, 19 nt, Artificial Sequence
  Description of Artificial Sequence: Synthetic oligonucleotide
caugucaaugaaauuaguc

SEQ ID NO: 1333778 - RNA, 19 nt, Artificial Sequence
  Description of Artificial Sequence: Synthetic oligonucleotide
uguguguucauaucacggc

SEQ ID NO: 1333779 - RNA, 19 nt, Artificial Sequence
  Description of Artificial Sequence: Synthetic oligonucleotide
auacccuucagggaaagac

SEQ ID NO: 1333780 - RNA, 19 nt, Artificial Sequence
  Description of Artificial Sequence: Synthetic oligonucleotide
aaugaggccaaaccaggca

SEQ ID NO: 1333781 - RNA, 19 nt, Artificial Sequence
  Description of Artificial Sequence: Synthetic oligonucleotide
cauaucacggcgaaacuug

SEQ ID NO: 1333782 - RNA, 19 nt, Artificial Sequence
  Description of Artificial Sequence: Synthetic oligonucleotide
acaacuccaaugugagacc

SEQ ID NO: 1333783 - RNA, 19 nt, Artificial Sequence
  Description of Artificial Sequence: Synthetic oligonucleotide
ucaaaguugagcagcgagu

SEQ ID NO: 1333784 - RNA, 19 nt, Artificial Sequence
  Description of Artificial Sequence: Synthetic oligonucleotide
caggaugagguaaagacuc

SEQ ID NO: 1333785 - RNA, 19 nt, Artificial Sequence
  Description of Artificial Sequence: Synthetic oligonucleotide
cuguguguucauaucacgg

SEQ ID NO: 1333786 - RNA, 19 nt, Artificial Sequence
  Description of Artificial Sequence: Synthetic oligonucleotide
guccauuuauuccuuacag

SEQ ID NO: 1333787 - RNA, 19 nt, Artificial Sequence
  Description of Artificial Sequence: Synthetic oligonucleotide
augacgagaauuuggucag

SEQ ID NO: 1333788 - RNA, 19 nt, Artificial Sequence
  Description of Artificial Sequence: Synthetic oligonucleotide
accgucucaaaguugagca

SEQ ID NO: 1333789 - RNA, 19 nt, Artificial Sequence
  Description of Artificial Sequence: Synthetic oligonucleotide
caauaaugaugucagccag

SEQ ID NO: 1333790 - RNA, 19 nt, Artificial Sequence
  Description of Artificial Sequence: Synthetic oligonucleotide
guaaaauugugcucuuccc

SEQ ID NO: 1333791 - RNA, 19 nt, Artificial Sequence
  Description of Artificial Sequence: Synthetic oligonucleotide
ugaaguguacauuuucaaa

SEQ ID NO: 1333792 - RNA, 19 nt, Artificial Sequence
  Description of Artificial Sequence: Synthetic oligonucleotide
guguguucauaucacggcg

SEQ ID NO: 1333793 - RNA, 19 nt, Artificial Sequence
  Description of Artificial Sequence: Synthetic oligonucleotide
uacaauagcgagcaccaaa

SEQ ID NO: 1333794 - RNA, 19 nt, Artificial Sequence
  Description of Artificial Sequence: Synthetic oligonucleotide
cugaguuagcuuuuagaag

SEQ ID NO: 1333795 - RNA, 19 nt, Artificial Sequence
  Description of Artificial Sequence: Synthetic oligonucleotide
ucacugacgaaguaugcac

SEQ ID NO: 1333796 - RNA, 19 nt, Artificial Sequence
  Description of Artificial Sequence: Synthetic oligonucleotide
guucauaucacggcgaaac

SEQ ID NO: 1333797 - RNA, 19 nt, Artificial Sequence
  Description of Artificial Sequence: Synthetic oligonucleotide
gauucaauacaaccaguga

SEQ ID NO: 1333798 - RNA, 19 nt, Artificial Sequence
  Description of Artificial Sequence: Synthetic oligonucleotide
aauuuggcccuuaugaaaa

SEQ ID NO: 1333799 - RNA, 19 nt, Artificial Sequence
  Description of Artificial Sequence: Synthetic oligonucleotide
aauuagucuggaucauccu

SEQ ID NO: 1333800 - RNA, 19 nt, Artificial Sequence
  Description of Artificial Sequence: Synthetic oligonucleotide
cacuccgugaccacaauag

SEQ ID NO: 1333801 - RNA, 19 nt, Artificial Sequence
  Description of Artificial Sequence: Synthetic oligonucleotide
aaguaugcacaaaguaagg

SEQ ID NO: 1333802 - RNA, 19 nt, Artificial Sequence
  Description of Artificial Sequence: Synthetic oligonucleotide
auauuguuggcaauggugu

SEQ ID NO: 1333803 - RNA, 19 nt, Artificial Sequence
  Description of Artificial Sequence: Synthetic oligonucleotide
uggggcacaacuccaaugu

SEQ ID NO: 1333804 - RNA, 19 nt, Artificial Sequence
  Description of Artificial Sequence: Synthetic oligonucleotide
cacaucucagcguacacac

SEQ ID NO: 1333805 - RNA, 19 nt, Artificial Sequence
  Description of Artificial Sequence: Synthetic oligonucleotide
gagccugugugcuacuacg

SEQ ID NO: 1333806 - RNA, 19 nt, Artificial Sequence
  Description of Artificial Sequence: Synthetic oligonucleotide
aaguugagcagcgagucca

SEQ ID NO: 1333807 - RNA, 19 nt, Artificial Sequence
  Description of Artificial Sequence: Synthetic oligonucleotide
uuagcuuuaguccccgcuc

SEQ ID NO: 1333808 - RNA, 19 nt, Artificial Sequence
  Description of Artificial Sequence: Synthetic oligonucleotide
gagccuuaagaauggugcg

SEQ ID NO: 1333809 - RNA, 19 nt, Artificial Sequence
  Description of Artificial Sequence: Synthetic oligonucleotide
uguguucauaucacggcga

SEQ ID NO: 1333810 - RNA, 19 nt, Artificial Sequence
  Description of Artificial Sequence: Synthetic oligonucleotide
ucaauuuggcccuuaugaa

SEQ ID NO: 1333811 - RNA, 19 nt, Artificial Sequence
  Description of Artificial Sequence: Synthetic oligonucleotide
ucuaugauguagccguccu

SEQ ID NO: 1333812 - RNA, 19 nt, Artificial Sequence
  Description of Artificial Sequence: Synthetic oligonucleotide
gcagacuuuggccagagag

SEQ ID NO: 1333813 - RNA, 19 nt, Artificial Sequence
  Description of Artificial Sequence: Synthetic oligonucleotide
uagcuuuuagaagggaaag

SEQ ID NO: 1333814 - RNA, 19 nt, Artificial Sequence
  Description of Artificial Sequence: Synthetic oligonucleotide
cugugacacgaccauagcg

SEQ ID NO: 1333815 - RNA, 19 nt, Artificial Sequence
  Description of Artificial Sequence: Synthetic oligonucleotide
acgaccauagcggauauug

SEQ ID NO: 1333816 - RNA, 19 nt, Artificial Sequence
  Description of Artificial Sequence: Synthetic oligonucleotide
uaaagucucccgcccauca

SEQ ID NO: 1333817 - RNA, 19 nt, Artificial Sequence
  Description of Artificial Sequence: Synthetic oligonucleotide
uugacgauggccucucugu

SEQ ID NO: 1333818 - RNA, 19 nt, Artificial Sequence
  Description of Artificial Sequence: Synthetic oligonucleotide
uccugaguuagcuuuuaga

SEQ ID NO: 1333819 - RNA, 19 nt, Artificial Sequence
  Description of Artificial Sequence: Synthetic oligonucleotide
aucaguguagcugaagugu

SEQ ID NO: 1333820 - RNA, 19 nt, Artificial Sequence
  Description of Artificial Sequence: Synthetic oligonucleotide
agcacaaaguccccaaccu

SEQ ID NO: 1333821 - RNA, 19 nt, Artificial Sequence
  Description of Artificial Sequence: Synthetic oligonucleotide
ugagaccggagagagaucu

SEQ ID NO: 1333822 - RNA, 19 nt, Artificial Sequence
  Description of Artificial Sequence: Synthetic oligonucleotide
aucacggcgaaacuuggcu

SEQ ID NO: 1333823 - RNA, 19 nt, Artificial Sequence
  Description of Artificial Sequence: Synthetic oligonucleotide
gguaaagacucaugcacag

SEQ ID NO: 1333824 - RNA, 19 nt, Artificial Sequence
  Description of Artificial Sequence: Synthetic oligonucleotide
uccuugaugacgagaauuu

SEQ ID NO: 1333825 - RNA, 19 nt, Artificial Sequence
  Description of Artificial Sequence: Synthetic oligonucleotide
ggagccuuaagaauggugc

SEQ ID NO: 1333826 - RNA, 19 nt, Artificial Sequence
  Description of Artificial Sequence: Synthetic oligonucleotide
aaagucucccgcccaucag

SEQ ID NO: 1333827 - RNA, 19 nt, Artificial Sequence
  Description of Artificial Sequence: Synthetic oligonucleotide
aaacagcaggcguaaaauu

SEQ ID NO: 1333828 - RNA, 19 nt, Artificial Sequence
  Description of Artificial Sequence: Synthetic oligonucleotide
guuagauguauccagugcu

SEQ ID NO: 1333829 - RNA, 19 nt, Artificial Sequence
  Description of Artificial Sequence: Synthetic oligonucleotide
agcuuuuagaagggaaagg

SEQ ID NO: 1333830 - RNA, 19 nt, Artificial Sequence
  Description of Artificial Sequence: Synthetic oligonucleotide
ucguuagauguauccagug

SEQ ID NO: 1333831 - RNA, 19 nt, Artificial Sequence
  Description of Artificial Sequence: Synthetic oligonucleotide
ccuuucucuuacaauagcg

SEQ ID NO: 1333832 - RNA, 19 nt, Artificial Sequence
  Description of Artificial Sequence: Synthetic oligonucleotide
agugauguaagugccaaaa

SEQ ID NO: 1333833 - RNA, 19 nt, Artificial Sequence
  Description of Artificial Sequence: Synthetic oligonucleotide
cuuucucuuacaauagcga

SEQ ID NO: 1333834 - RNA, 19 nt, Artificial Sequence
  Description of Artificial Sequence: Synthetic oligonucleotide
aguaugcacaaaguaagga

SEQ ID NO: 1333835 - RNA, 19 nt, Artificial Sequence
  Description of Artificial Sequence: Synthetic oligonucleotide
cucgggauaacagagcuuc

SEQ ID NO: 1333836 - RNA, 19 nt, Artificial Sequence
  Description of Artificial Sequence: Synthetic oligonucleotide
acgaaguaugcacaaagua

SEQ ID NO: 1333837 - RNA, 19 nt, Artificial Sequence
  Description of Artificial Sequence: Synthetic oligonucleotide
ucgcucguuagauguaucc

SEQ ID NO: 1333838 - RNA, 19 nt, Artificial Sequence
  Description of Artificial Sequence: Synthetic oligonucleotide
aagucucccgcccaucagu

SEQ ID NO: 1333839 - RNA, 19 nt, Artificial Sequence
  Description of Artificial Sequence: Synthetic oligonucleotide
ugugucucauacccuucag

SEQ ID NO: 1333840 - RNA, 19 nt, Artificial Sequence
  Description of Artificial Sequence: Synthetic oligonucleotide
ggauaacagagcuucgugc

SEQ ID NO: 1333841 - RNA, 19 nt, Artificial Sequence
  Description of Artificial Sequence: Synthetic oligonucleotide
uaguaggugccaaaccagu

SEQ ID NO: 1333842 - RNA, 19 nt, Artificial Sequence
  Description of Artificial Sequence: Synthetic oligonucleotide
ugagaggcauguacaguug

SEQ ID NO: 1333843 - RNA, 19 nt, Artificial Sequence
  Description of Artificial Sequence: Synthetic oligonucleotide
agagccugugugcuacuac

SEQ ID NO: 1333844 - RNA, 19 nt, Artificial Sequence
  Description of Artificial Sequence: Synthetic oligonucleotide
ugugaaauguccugcccau

SEQ ID NO: 1333845 - RNA, 19 nt, Artificial Sequence
  Description of Artificial Sequence: Synthetic oligonucleotide
guagcggucuacuucauaa

SEQ ID NO: 1333846 - RNA, 19 nt, Artificial Sequence
  Description of Artificial Sequence: Synthetic oligonucleotide
uucauaucacggcgaaacu

SEQ ID NO: 1333847 - RNA, 19 nt, Artificial Sequence
  Description of Artificial Sequence: Synthetic oligonucleotide
uccuaccugugucucauac

SEQ ID NO: 1333848 - RNA, 19 nt, Artificial Sequence
  Description of Artificial Sequence: Synthetic oligonucleotide
acauuuuccuguguguuca

SEQ ID NO: 1333849 - RNA, 19 nt, Artificial Sequence
  Description of Artificial Sequence: Synthetic oligonucleotide
aggcguaaaauugugcucu

SEQ ID NO: 1333850 - RNA, 19 nt, Artificial Sequence
  Description of Artificial Sequence: Synthetic oligonucleotide
gagcacaguguccuggggc

SEQ ID NO: 1333851 - RNA, 19 nt, Artificial Sequence
  Description of Artificial Sequence: Synthetic oligonucleotide
gauacuugacgauggccuc

SEQ ID NO: 1333852 - RNA, 19 nt, Artificial Sequence
  Description of Artificial Sequence: Synthetic oligonucleotide
cucucuaugauguagccgu

SEQ ID NO: 1333853 - RNA, 19 nt, Artificial Sequence
  Description of Artificial Sequence: Synthetic oligonucleotide
uuccucuuucagcaaguca

SEQ ID NO: 1333854 - RNA, 19 nt, Artificial Sequence
  Description of Artificial Sequence: Synthetic oligonucleotide
gccaauaaugaugucagcc

SEQ ID NO: 1333855 - RNA, 19 nt, Artificial Sequence
  Description of Artificial Sequence: Synthetic oligonucleotide
cagcguacacaccaccucg

SEQ ID NO: 1333856 - RNA, 19 nt, Artificial Sequence
  Description of Artificial Sequence: Synthetic oligonucleotide
cacaauagucaggaugagg

SEQ ID NO: 1333857 - RNA, 19 nt, Artificial Sequence
  Description of Artificial Sequence: Synthetic oligonucleotide
aaccaggcauugaagaaca

SEQ ID NO: 1333858 - RNA, 19 nt, Artificial Sequence
  Description of Artificial Sequence: Synthetic oligonucleotide
gcuacuacgaggguggugc

SEQ ID NO: 1333859 - RNA, 19 nt, Artificial Sequence
  Description of Artificial Sequence: Synthetic oligonucleotide
gaauggugcgggcaauggc

SEQ ID NO: 1333860 - RNA, 19 nt, Artificial Sequence
  Description of Artificial Sequence: Synthetic oligonucleotide
accucgggauaacagagcu

SEQ ID NO: 1333861 - RNA, 19 nt, Artificial Sequence
  Description of Artificial Sequence: Synthetic oligonucleotide
caucuacucggaugcagcc

SEQ ID NO: 1333862 - RNA, 19 nt, Artificial Sequence
  Description of Artificial Sequence: Synthetic oligonucleotide
gaaggacacauccuguaaa

SEQ ID NO: 1333863 - RNA, 19 nt, Artificial Sequence
  Description of Artificial Sequence: Synthetic oligonucleotide
caaaguugagcagcgaguc

SEQ ID NO: 1333864 - RNA, 19 nt, Artificial Sequence
  Description of Artificial Sequence: Synthetic oligonucleotide
auguccugcccaucuacuc

SEQ ID NO: 1333865 - RNA, 19 nt, Artificial Sequence
  Description of Artificial Sequence: Synthetic oligonucleotide
uguaaagucucccgcccau

SEQ ID NO: 1333866 - RNA, 19 nt, Artificial Sequence
  Description of Artificial Sequence: Synthetic oligonucleotide
gaauuuggucagcauugac

SEQ ID NO: 1333867 - RNA, 19 nt, Artificial Sequence
  Description of Artificial Sequence: Synthetic oligonucleotide
ucaguguagcugaagugua

SEQ ID NO: 1333868 - RNA, 19 nt, Artificial Sequence
  Description of Artificial Sequence: Synthetic oligonucleotide
uggcucgcucguuagaugu

SEQ ID NO: 1333869 - RNA, 19 nt, Artificial Sequence
  Description of Artificial Sequence: Synthetic oligonucleotide
uuucaccgucucaaaguug

SEQ ID NO: 1333870 - RNA, 19 nt, Artificial Sequence
  Description of Artificial Sequence: Synthetic oligonucleotide
agccuuaagaauggugcgg

SEQ ID NO: 1333871 - RNA, 19 nt, Artificial Sequence
  Description of Artificial Sequence: Synthetic oligonucleotide
uuguaguauuucaccgucu

SEQ ID NO: 1333872 - RNA, 19 nt, Artificial Sequence
  Description of Artificial Sequence: Synthetic oligonucleotide
auaacagagcuucgugccu

SEQ ID NO: 1333873 - RNA, 19 nt, Artificial Sequence
  Description of Artificial Sequence: Synthetic oligonucleotide
accauagcggauauuguug

SEQ ID NO: 1333874 - RNA, 19 nt, Artificial Sequence
  Description of Artificial Sequence: Synthetic oligonucleotide
uggucagcauugaccacag

SEQ ID NO: 1333875 - RNA, 19 nt, Artificial Sequence
  Description of Artificial Sequence: Synthetic oligonucleotide
cuccgugaccacaauaguc

SEQ ID NO: 1333876 - RNA, 19 nt, Artificial Sequence
  Description of Artificial Sequence: Synthetic oligonucleotide
gcaccaaacuccuauagca

SEQ ID NO: 1333877 - RNA, 19 nt, Artificial Sequence
  Description of Artificial Sequence: Synthetic oligonucleotide
uaucacggcgaaacuuggc

SEQ ID NO: 1333878 - RNA, 19 nt, Artificial Sequence
  Description of Artificial Sequence: Synthetic oligonucleotide
cauccuuuacuuccguuuc

SEQ ID NO: 1333879 - RNA, 19 nt, Artificial Sequence
  Description of Artificial Sequence: Synthetic oligonucleotide
accaccucgggauaacaga

SEQ ID NO: 1333880 - RNA, 19 nt, Artificial Sequence
  Description of Artificial Sequence: Synthetic oligonucleotide
agcugugacacgaccauag

SEQ ID NO: 1333881 - RNA, 19 nt, Artificial Sequence
  Description of Artificial Sequence: Synthetic oligonucleotide
gcucguuagauguauccag

SEQ ID NO: 1333882 - RNA, 19 nt, Artificial Sequence
  Description of Artificial Sequence: Synthetic oligonucleotide
acugacgaaguaugcacaa

SEQ ID NO: 1333883 - RNA, 19 nt, Artificial Sequence
  Description of Artificial Sequence: Synthetic oligonucleotide
agcaggcguaaaauugugc

SEQ ID NO: 1333884 - RNA, 19 nt, Artificial Sequence
  Description of Artificial Sequence: Synthetic oligonucleotide
augaggccaaaccaggcau

SEQ ID NO: 1333885 - RNA, 19 nt, Artificial Sequence
  Description of Artificial Sequence: Synthetic oligonucleotide
ucgggauaacagagcuucg

SEQ ID NO: 1333886 - RNA, 19 nt, Artificial Sequence
  Description of Artificial Sequence: Synthetic oligonucleotide
cccuuaugaaaaugaaggg

SEQ ID NO: 1333887 - RNA, 19 nt, Artificial Sequence
  Description of Artificial Sequence: Synthetic oligonucleotide
ucauaucacggcgaaacuu

SEQ ID NO: 1333888 - RNA, 19 nt, Artificial Sequence
  Description of Artificial Sequence: Synthetic oligonucleotide
acuuagcuuuaguccccgc

SEQ ID NO: 1333889 - RNA, 19 nt, Artificial Sequence
  Description of Artificial Sequence: Synthetic oligonucleotide
ugaugacgagaauuugguc

SEQ ID NO: 1333890 - RNA, 19 nt, Artificial Sequence
  Description of Artificial Sequence: Synthetic oligonucleotide
guccugcccaucuacucgg

SEQ ID NO: 1333891 - RNA, 19 nt, Artificial Sequence
  Description of Artificial Sequence: Synthetic oligonucleotide
uagcggauauuguuggcaa

SEQ ID NO: 1333892 - RNA, 19 nt, Artificial Sequence
  Description of Artificial Sequence: Synthetic oligonucleotide
ccauagcggauauuguugg

SEQ ID NO: 1333893 - RNA, 19 nt, Artificial Sequence
  Description of Artificial Sequence: Synthetic oligonucleotide
cuuacagugcuuucuggaa

SEQ ID NO: 1333894 - RNA, 19 nt, Artificial Sequence
  Description of Artificial Sequence: Synthetic oligonucleotide
uguacaguugagugaugua

SEQ ID NO: 1333895 - RNA, 19 nt, Artificial Sequence
  Description of Artificial Sequence: Synthetic oligonucleotide
aacuccaaugugagaccgg

SEQ ID NO: 1333896 - RNA, 19 nt, Artificial Sequence
  Description of Artificial Sequence: Synthetic oligonucleotide
auaucacggcgaaacuugg

SEQ ID NO: 1333897 - RNA, 19 nt, Artificial Sequence
  Description of Artificial Sequence: Synthetic oligonucleotide
cuuaagaauggugcgggca

SEQ ID NO: 1333898 - RNA, 19 nt, Artificial Sequence
  Description of Artificial Sequence: Synthetic oligonucleotide
acgaggguggugcgguugg

SEQ ID NO: 1333899 - RNA, 19 nt, Artificial Sequence
  Description of Artificial Sequence: Synthetic oligonucleotide
cucggaugcagccagagcu

SEQ ID NO: 1333900 - RNA, 19 nt, Artificial Sequence
  Description of Artificial Sequence: Synthetic oligonucleotide
agguaaagacucaugcaca

SEQ ID NO: 1333901 - RNA, 19 nt, Artificial Sequence
  Description of Artificial Sequence: Synthetic oligonucleotide
uggugcagacuuuggccag

SEQ ID NO: 1333902 - RNA, 19 nt, Artificial Sequence
  Description of Artificial Sequence: Synthetic oligonucleotide
gagaggcauguacaguuga

SEQ ID NO: 1333903 - RNA, 19 nt, Artificial Sequence
  Description of Artificial Sequence: Synthetic oligonucleotide
ucucccgcccaucagugua

SEQ ID NO: 1333904 - RNA, 19 nt, Artificial Sequence
  Description of Artificial Sequence: Synthetic oligonucleotide
uggggaugauguugaacac

SEQ ID NO: 1333905 - RNA, 19 nt, Artificial Sequence
  Description of Artificial Sequence: Synthetic oligonucleotide
gggauaacagagcuucgug

SEQ ID NO: 1333906 - RNA, 19 nt, Artificial Sequence
  Description of Artificial Sequence: Synthetic oligonucleotide
caggcguaaaauugugcuc

SEQ ID NO: 1333907 - RNA, 19 nt, Artificial Sequence
  Description of Artificial Sequence: Synthetic oligonucleotide
cugggucugauucaauaca

SEQ ID NO: 1333908 - RNA, 19 nt, Artificial Sequence
  Description of Artificial Sequence: Synthetic oligonucleotide
ccugaguuagcuuuuagaa

SEQ ID NO: 1333909 - RNA, 19 nt, Artificial Sequence
  Description of Artificial Sequence: Synthetic oligonucleotide
ccugugugcuacuacgagg

SEQ ID NO: 1333910 - RNA, 19 nt, Artificial Sequence
  Description of Artificial Sequence: Synthetic oligonucleotide
ugccaauaaugaugucagc

SEQ ID NO: 1333911 - RNA, 19 nt, Artificial Sequence
  Description of Artificial Sequence: Synthetic oligonucleotide
agacaggauggcaucauga

SEQ ID NO: 1333912 - RNA, 19 nt, Artificial Sequence
  Description of Artificial Sequence: Synthetic oligonucleotide
agcuuuaguccccgcucuc

SEQ ID NO: 1333913 - RNA, 19 nt, Artificial Sequence
  Description of Artificial Sequence: Synthetic oligonucleotide
aggagcccaagcccaauca

SEQ ID NO: 1333914 - RNA, 19 nt, Artificial Sequence
  Description of Artificial Sequence: Synthetic oligonucleotide
gaacacaaugaggccaaac

SEQ ID NO: 1333915 - RNA, 19 nt, Artificial Sequence
  Description of Artificial Sequence: Synthetic oligonucleotide
ucacggcgaaacuuggcuc

SEQ ID NO: 1333916 - RNA, 19 nt, Artificial Sequence
  Description of Artificial Sequence: Synthetic oligonucleotide
uacucggaugcagccagag

SEQ ID NO: 1333917 - RNA, 19 nt, Artificial Sequence
  Description of Artificial Sequence: Synthetic oligonucleotide
gcagcgaguccacugcucg

SEQ ID NO: 1333918 - RNA, 19 nt, Artificial Sequence
  Description of Artificial Sequence: Synthetic oligonucleotide
ugcacaaaguaaggagcca

SEQ ID NO: 1333919 - RNA, 19 nt, Artificial Sequence
  Description of Artificial Sequence: Synthetic oligonucleotide
gaaacagcaggcguaaaau

SEQ ID NO: 1333920 - RNA, 19 nt, Artificial Sequence
  Description of Artificial Sequence: Synthetic oligonucleotide
accugugucucauacccuu

SEQ ID NO: 1333921 - RNA, 19 nt, Artificial Sequence
  Description of Artificial Sequence: Synthetic oligonucleotide
gacgagaauuuggucagca

SEQ ID NO: 1333922 - RNA, 19 nt, Artificial Sequence
  Description of Artificial Sequence: Synthetic oligonucleotide
cucaugcacaggaacacaa

SEQ ID NO: 1333923 - RNA, 19 nt, Artificial Sequence
  Description of Artificial Sequence: Synthetic oligonucleotide
uacuacgaggguggugcgg

SEQ ID NO: 1333924 - RNA, 19 nt, Artificial Sequence
  Description of Artificial Sequence: Synthetic oligonucleotide
ucauacccuucagggaaag

SEQ ID NO: 1333925 - RNA, 19 nt, Artificial Sequence
  Description of Artificial Sequence: Synthetic oligonucleotide
gccuuaagaauggugcggg

SEQ ID NO: 1333926 - RNA, 19 nt, Artificial Sequence
  Description of Artificial Sequence: Synthetic oligonucleotide
uagcggucuacuucauaac

SEQ ID NO: 1333927 - RNA, 19 nt, Artificial Sequence
  Description of Artificial Sequence: Synthetic oligonucleotide
acuccgugaccacaauagu

SEQ ID NO: 1333928 - RNA, 19 nt, Artificial Sequence
  Description of Artificial Sequence: Synthetic oligonucleotide
acuacgaggguggugcggu

SEQ ID NO: 1333929 - RNA, 19 nt, Artificial Sequence
  Description of Artificial Sequence: Synthetic oligonucleotide
uuuggucagcauugaccac

SEQ ID NO: 1333930 - RNA, 19 nt, Artificial Sequence
  Description of Artificial Sequence: Synthetic oligonucleotide
caccaccucgggauaacag

SEQ ID NO: 1333931 - RNA, 19 nt, Artificial Sequence
  Description of Artificial Sequence: Synthetic oligonucleotide
ccaaugugagaccggagag

SEQ ID NO: 1333932 - RNA, 19 nt, Artificial Sequence
  Description of Artificial Sequence: Synthetic oligonucleotide
agaggcauguacaguugag

SEQ ID NO: 1333933 - RNA, 19 nt, Artificial Sequence
  Description of Artificial Sequence: Synthetic oligonucleotide
guacacaccaccucgggau

SEQ ID NO: 1333934 - RNA, 19 nt, Artificial Sequence
  Description of Artificial Sequence: Synthetic oligonucleotide
cagcauugaccacaguuga

SEQ ID NO: 1333935 - RNA, 19 nt, Artificial Sequence
  Description of Artificial Sequence: Synthetic oligonucleotide
ccacuccaaacccugauac

SEQ ID NO: 1333936 - RNA, 19 nt, Artificial Sequence
  Description of Artificial Sequence: Synthetic oligonucleotide
ugacgauggccucucugua

SEQ ID NO: 1333937 - RNA, 19 nt, Artificial Sequence
  Description of Artificial Sequence: Synthetic oligonucleotide
uguagcggucuacuucaua

SEQ ID NO: 1333938 - RNA, 19 nt, Artificial Sequence
  Description of Artificial Sequence: Synthetic oligonucleotide
aacccucagcauuguagua

SEQ ID NO: 1333939 - RNA, 19 nt, Artificial Sequence
  Description of Artificial Sequence: Synthetic oligonucleotide
caccgucucaaaguugagc

SEQ ID NO: 1333940 - RNA, 19 nt, Artificial Sequence
  Description of Artificial Sequence: Synthetic oligonucleotide
gugacacgaccauagcgga

SEQ ID NO: 1333941 - RNA, 19 nt, Artificial Sequence
  Description of Artificial Sequence: Synthetic oligonucleotide
ugccacaucucagcguaca

SEQ ID NO: 1333942 - RNA, 19 nt, Artificial Sequence
  Description of Artificial Sequence: Synthetic oligonucleotide
cacugacgaaguaugcaca

SEQ ID NO: 1333943 - RNA, 19 nt, Artificial Sequence
  Description of Artificial Sequence: Synthetic oligonucleotide
aagcgaaacagcaggcgua

SEQ ID NO: 1333944 - RNA, 19 nt, Artificial Sequence
  Description of Artificial Sequence: Synthetic oligonucleotide
cagcaggcguaaaauugug

SEQ ID NO: 1333945 - RNA, 19 nt, Artificial Sequence
  Description of Artificial Sequence: Synthetic oligonucleotide
ugccuuccucucucuauga

SEQ ID NO: 1333946 - RNA, 19 nt, Artificial Sequence
  Description of Artificial Sequence: Synthetic oligonucleotide
ccuguaaagucucccgccc

SEQ ID NO: 1333947 - RNA, 19 nt, Artificial Sequence
  Description of Artificial Sequence: Synthetic oligonucleotide
ucuccaugucaaugaaauu

SEQ ID NO: 1333948 - RNA, 19 nt, Artificial Sequence
  Description of Artificial Sequence: Synthetic oligonucleotide
uaccugugucucauacccu

SEQ ID NO: 1333949 - RNA, 19 nt, Artificial Sequence
  Description of Artificial Sequence: Synthetic oligonucleotide
auggcucgcucguuagaug

SEQ ID NO: 1333950 - RNA, 19 nt, Artificial Sequence
  Description of Artificial Sequence: Synthetic oligonucleotide
gaccauagcggauauuguu

SEQ ID NO: 1333951 - RNA, 19 nt, Artificial Sequence
  Description of Artificial Sequence: Synthetic oligonucleotide
agcguacacaccaccucgg

SEQ ID NO: 1333952 - RNA, 19 nt, Artificial Sequence
  Description of Artificial Sequence: Synthetic oligonucleotide
aucucagcguacacaccac

SEQ ID NO: 1333953 - RNA, 19 nt, Artificial Sequence
  Description of Artificial Sequence: Synthetic oligonucleotide
gagaucugugucaccugug

SEQ ID NO: 1333954 - RNA, 19 nt, Artificial Sequence
  Description of Artificial Sequence: Synthetic oligonucleotide
ugaggccaaaccaggcauu

SEQ ID NO: 1333955 - RNA, 19 nt, Artificial Sequence
  Description of Artificial Sequence: Synthetic oligonucleotide
gugaaggacacauccugua

SEQ ID NO: 1333956 - RNA, 19 nt, Artificial Sequence
  Description of Artificial Sequence: Synthetic oligonucleotide
uacacaccaccucgggaua

SEQ ID NO: 1333957 - RNA, 19 nt, Artificial Sequence
  Description of Artificial Sequence: Synthetic oligonucleotide
cuccugaguuagcuuuuag

SEQ ID NO: 1333958 - RNA, 19 nt, Artificial Sequence
  Description of Artificial Sequence: Synthetic oligonucleotide
uuuaguccccgcucuccua

SEQ ID NO: 1333959 - RNA, 19 nt, Artificial Sequence
  Description of Artificial Sequence: Synthetic oligonucleotide
ccaccacuuagcuuuaguc

SEQ ID NO: 1333960 - RNA, 19 nt, Artificial Sequence
  Description of Artificial Sequence: Synthetic oligonucleotide
gaaauguccugcccaucua

SEQ ID NO: 1333961 - RNA, 19 nt, Artificial Sequence
  Description of Artificial Sequence: Synthetic oligonucleotide
ggggaugauguugaacacc

SEQ ID NO: 1333962 - RNA, 19 nt, Artificial Sequence
  Description of Artificial Sequence: Synthetic oligonucleotide
gcaggcguaaaauugugcu

SEQ ID NO: 1333963 - RNA, 19 nt, Artificial Sequence
  Description of Artificial Sequence: Synthetic oligonucleotide
acucaugcacaggaacaca

SEQ ID NO: 1333964 - RNA, 19 nt, Artificial Sequence
  Description of Artificial Sequence: Synthetic oligonucleotide
aucuacucggaugcagcca

SEQ ID NO: 1333965 - RNA, 19 nt, Artificial Sequence
  Description of Artificial Sequence: Synthetic oligonucleotide
gaaauaggccagagaggga

SEQ ID NO: 1333966 - RNA, 19 nt, Artificial Sequence
  Description of Artificial Sequence: Synthetic oligonucleotide
cugcucgugccuuggugac

SEQ ID NO: 1333967 - RNA, 19 nt, Artificial Sequence
  Description of Artificial Sequence: Synthetic oligonucleotide
agccccagauggccccacc

SEQ ID NO: 1333968 - RNA, 19 nt, Artificial Sequence
  Description of Artificial Sequence: Synthetic oligonucleotide
agcggauauuguuggcaau

SEQ ID NO: 1333969 - RNA, 19 nt, Artificial Sequence
  Description of Artificial Sequence: Synthetic oligonucleotide
gcggucuacuucauaaccc

SEQ ID NO: 1333970 - RNA, 19 nt, Artificial Sequence
  Description of Artificial Sequence: Synthetic oligonucleotide
ucauaacccucagcauugu

SEQ ID NO: 1333971 - RNA, 19 nt, Artificial Sequence
  Description of Artificial Sequence: Synthetic oligonucleotide
gaccggagagagaucugug

SEQ ID NO: 1333972 - RNA, 19 nt, Artificial Sequence
  Description of Artificial Sequence: Synthetic oligonucleotide
agcgaaacagcaggcguaa

SEQ ID NO: 1333973 - RNA, 19 nt, Artificial Sequence
  Description of Artificial Sequence: Synthetic oligonucleotide
ccuaccugugucucauacc

SEQ ID NO: 1333974 - RNA, 19 nt, Artificial Sequence
  Description of Artificial Sequence: Synthetic oligonucleotide
cucguuagauguauccagu

SEQ ID NO: 1333975 - RNA, 19 nt, Artificial Sequence
  Description of Artificial Sequence: Synthetic oligonucleotide
aggcauugaagaacaugcu

SEQ ID NO: 1333976 - RNA, 19 nt, Artificial Sequence
  Description of Artificial Sequence: Synthetic oligonucleotide
uacuuccguuuccucuuuc

SEQ ID NO: 1333977 - RNA, 19 nt, Artificial Sequence
  Description of Artificial Sequence: Synthetic oligonucleotide
caauagucaggaugaggua

SEQ ID NO: 1333978 - RNA, 19 nt, Artificial Sequence
  Description of Artificial Sequence: Synthetic oligonucleotide
gaggcauguacaguugagu

SEQ ID NO: 1333979 - RNA, 19 nt, Artificial Sequence
  Description of Artificial Sequence: Synthetic oligonucleotide
acaguccauuuauuccuua

SEQ ID NO: 1333980 - RNA, 19 nt, Artificial Sequence
  Description of Artificial Sequence: Synthetic oligonucleotide
agucucccgcccaucagug

SEQ ID NO: 1333981 - RNA, 19 nt, Artificial Sequence
  Description of Artificial Sequence: Synthetic oligonucleotide
cuguaaagucucccgccca

SEQ ID NO: 1333982 - RNA, 19 nt, Artificial Sequence
  Description of Artificial Sequence: Synthetic oligonucleotide
cagccucuaccucacuguc

SEQ ID NO: 1333983 - RNA, 19 nt, Artificial Sequence
  Description of Artificial Sequence: Synthetic oligonucleotide
ccuguaguaggugccaaac

SEQ ID NO: 1333984 - RNA, 19 nt, Artificial Sequence
  Description of Artificial Sequence: Synthetic oligonucleotide
cucgcucguuagauguauc

SEQ ID NO: 1333985 - RNA, 19 nt, Artificial Sequence
  Description of Artificial Sequence: Synthetic oligonucleotide
caaucaccaaguucugggu

SEQ ID NO: 1333986 - RNA, 19 nt, Artificial Sequence
  Description of Artificial Sequence: Synthetic oligonucleotide
gauggcucgcucguuagau

SEQ ID NO: 1333987 - RNA, 19 nt, Artificial Sequence
  Description of Artificial Sequence: Synthetic oligonucleotide
aggaugagguaaagacuca

SEQ ID NO: 1333988 - RNA, 19 nt, Artificial Sequence
  Description of Artificial Sequence: Synthetic oligonucleotide
gcguacacaccaccucggg

SEQ ID NO: 1333989 - RNA, 19 nt, Artificial Sequence
  Description of Artificial Sequence: Synthetic oligonucleotide
caccagguagcucagcagu

SEQ ID NO: 1333990 - RNA, 19 nt, Artificial Sequence
  Description of Artificial Sequence: Synthetic oligonucleotide
ccuuaagaauggugcgggc

SEQ ID NO: 1333991 - RNA, 19 nt, Artificial Sequence
  Description of Artificial Sequence: Synthetic oligonucleotide
gcugugacacgaccauagc

SEQ ID NO: 1333992 - RNA, 19 nt, Artificial Sequence
  Description of Artificial Sequence: Synthetic oligonucleotide
caggagcccaagcccaauc

SEQ ID NO: 1333993 - RNA, 19 nt, Artificial Sequence
  Description of Artificial Sequence: Synthetic oligonucleotide
ucuccugaguuagcuuuua

SEQ ID NO: 1333994 - RNA, 19 nt, Artificial Sequence
  Description of Artificial Sequence: Synthetic oligonucleotide
acggcgaaacuuggcucuc

SEQ ID NO: 1333995 - RNA, 19 nt, Artificial Sequence
  Description of Artificial Sequence: Synthetic oligonucleotide
cacggcgaaacuuggcucu

SEQ ID NO: 1333996 - RNA, 19 nt, Artificial Sequence
  Description of Artificial Sequence: Synthetic oligonucleotide
uccacuccgugaccacaau

SEQ ID NO: 1333997 - RNA, 19 nt, Artificial Sequence
  Description of Artificial Sequence: Synthetic oligonucleotide
cauccuguaguaggugcca

SEQ ID NO: 1333998 - RNA, 19 nt, Artificial Sequence
  Description of Artificial Sequence: Synthetic oligonucleotide
gagaccggagagagaucug

SEQ ID NO: 1333999 - RNA, 19 nt, Artificial Sequence
  Description of Artificial Sequence: Synthetic oligonucleotide
guaaagucucccgcccauc

SEQ ID NO: 1334000 - RNA, 19 nt, Artificial Sequence
  Description of Artificial Sequence: Synthetic oligonucleotide
uggugcgggcaauggcaac

SEQ ID NO: 1334001 - RNA, 19 nt, Artificial Sequence
  Description of Artificial Sequence: Synthetic oligonucleotide
cggauauuguuggcaaugg

SEQ ID NO: 1334002 - RNA, 19 nt, Artificial Sequence
  Description of Artificial Sequence: Synthetic oligonucleotide
cccuucagggaaagacagg

SEQ ID NO: 1334003 - RNA, 19 nt, Artificial Sequence
  Description of Artificial Sequence: Synthetic oligonucleotide
agccugugugcuacuacga

SEQ ID NO: 1334004 - RNA, 19 nt, Artificial Sequence
  Description of Artificial Sequence: Synthetic oligonucleotide
ccgucucaaaguugagcag

SEQ ID NO: 1334005 - RNA, 19 nt, Artificial Sequence
  Description of Artificial Sequence: Synthetic oligonucleotide
ugcucgugccuuggugaca

SEQ ID NO: 1334006 - RNA, 19 nt, Artificial Sequence
  Description of Artificial Sequence: Synthetic oligonucleotide
gagcuucgugccuuccucu

SEQ ID NO: 1334007 - RNA, 19 nt, Artificial Sequence
  Description of Artificial Sequence: Synthetic oligonucleotide
uggugcgguuggugcagac

SEQ ID NO: 1334008 - RNA, 19 nt, Artificial Sequence
  Description of Artificial Sequence: Synthetic oligonucleotide
cucuccuaccugugucuca

SEQ ID NO: 1334009 - RNA, 19 nt, Artificial Sequence
  Description of Artificial Sequence: Synthetic oligonucleotide
cuggauggcucgcucguua

SEQ ID NO: 1334010 - RNA, 19 nt, Artificial Sequence
  Description of Artificial Sequence: Synthetic oligonucleotide
caauagcgagcaccaaacu

SEQ ID NO: 1334011 - RNA, 19 nt, Artificial Sequence
  Description of Artificial Sequence: Synthetic oligonucleotide
accgucuguccaggcauca

SEQ ID NO: 1334012 - RNA, 19 nt, Artificial Sequence
  Description of Artificial Sequence: Synthetic oligonucleotide
cccaucuacucggaugcag

SEQ ID NO: 1334013 - RNA, 19 nt, Artificial Sequence
  Description of Artificial Sequence: Synthetic oligonucleotide
cauaacccucagcauugua

SEQ ID NO: 1334014 - RNA, 19 nt, Artificial Sequence
  Description of Artificial Sequence: Synthetic oligonucleotide
ccaucaguguagcugaagu

SEQ ID NO: 1334015 - RNA, 19 nt, Artificial Sequence
  Description of Artificial Sequence: Synthetic oligonucleotide
gcgguuggugcagacuuug

SEQ ID NO: 1334016 - RNA, 19 nt, Artificial Sequence
  Description of Artificial Sequence: Synthetic oligonucleotide
acacaccaccucgggauaa

SEQ ID NO: 1334017 - RNA, 19 nt, Artificial Sequence
  Description of Artificial Sequence: Synthetic oligonucleotide
ccgcccaucaguguagcug

SEQ ID NO: 1334018 - RNA, 19 nt, Artificial Sequence
  Description of Artificial Sequence: Synthetic oligonucleotide
ggucuacuucauaacccuc

SEQ ID NO: 1334019 - RNA, 19 nt, Artificial Sequence
  Description of Artificial Sequence: Synthetic oligonucleotide
gcgaaacuuggcucuccac

SEQ ID NO: 1334020 - RNA, 19 nt, Artificial Sequence
  Description of Artificial Sequence: Synthetic oligonucleotide
gcgagcaccaaacuccuau

SEQ ID NO: 1334021 - RNA, 19 nt, Artificial Sequence
  Description of Artificial Sequence: Synthetic oligonucleotide
gagcagcgaguccacugcu

SEQ ID NO: 1334022 - RNA, 19 nt, Artificial Sequence
  Description of Artificial Sequence: Synthetic oligonucleotide
cuacucggaugcagccaga

SEQ ID NO: 1334023 - RNA, 19 nt, Artificial Sequence
  Description of Artificial Sequence: Synthetic oligonucleotide
ggguggugcgguuggugca

SEQ ID NO: 1334024 - RNA, 19 nt, Artificial Sequence
  Description of Artificial Sequence: Synthetic oligonucleotide
cgaaacagcaggcguaaaa

SEQ ID NO: 1334025 - RNA, 19 nt, Artificial Sequence
  Description of Artificial Sequence: Synthetic oligonucleotide
ggauggcucgcucguuaga

SEQ ID NO: 1334026 - RNA, 19 nt, Artificial Sequence
  Description of Artificial Sequence: Synthetic oligonucleotide
augugagaccggagagaga

SEQ ID NO: 1334027 - RNA, 19 nt, Artificial Sequence
  Description of Artificial Sequence: Synthetic oligonucleotide
gccaccgucuguccaggca

SEQ ID NO: 1334028 - RNA, 19 nt, Artificial Sequence
  Description of Artificial Sequence: Synthetic oligonucleotide
gugcgggcaauggcaacuc

SEQ ID NO: 1334029 - RNA, 19 nt, Artificial Sequence
  Description of Artificial Sequence: Synthetic oligonucleotide
gcguaaaauugugcucuuc

SEQ ID NO: 1334030 - RNA, 19 nt, Artificial Sequence
  Description of Artificial Sequence: Synthetic oligonucleotide
ggugcgggcaauggcaacu

SEQ ID NO: 1334031 - RNA, 19 nt, Artificial Sequence
  Description of Artificial Sequence: Synthetic oligonucleotide
ggaugagguaaagacucau

SEQ ID NO: 1334032 - RNA, 19 nt, Artificial Sequence
  Description of Artificial Sequence: Synthetic oligonucleotide
cuaugauguagccguccuu

SEQ ID NO: 1334033 - RNA, 19 nt, Artificial Sequence
  Description of Artificial Sequence: Synthetic oligonucleotide
gugagaccggagagagauc

SEQ ID NO: 1334034 - RNA, 19 nt, Artificial Sequence
  Description of Artificial Sequence: Synthetic oligonucleotide
ccgcucuccuaccuguguc

SEQ ID NO: 1334035 - RNA, 19 nt, Artificial Sequence
  Description of Artificial Sequence: Synthetic oligonucleotide
ccaagcccaaucaccaagu

SEQ ID NO: 1334036 - RNA, 19 nt, Artificial Sequence
  Description of Artificial Sequence: Synthetic oligonucleotide
accaggcauugaagaacau

SEQ ID NO: 1334037 - RNA, 19 nt, Artificial Sequence
  Description of Artificial Sequence: Synthetic oligonucleotide
guugagcagcgaguccacu

SEQ ID NO: 1334038 - RNA, 19 nt, Artificial Sequence
  Description of Artificial Sequence: Synthetic oligonucleotide
gcuucgugccuuccucucu

SEQ ID NO: 1334039 - RNA, 19 nt, Artificial Sequence
  Description of Artificial Sequence: Synthetic oligonucleotide
cggucuacuucauaacccu

SEQ ID NO: 1334040 - RNA, 19 nt, Artificial Sequence
  Description of Artificial Sequence: Synthetic oligonucleotide
gucucccgcccaucagugu

SEQ ID NO: 1334041 - RNA, 19 nt, Artificial Sequence
  Description of Artificial Sequence: Synthetic oligonucleotide
uugccucguccagcagaau

SEQ ID NO: 1334042 - RNA, 19 nt, Artificial Sequence
  Description of Artificial Sequence: Synthetic oligonucleotide
ccaaaccaguugagaggca

SEQ ID NO: 1334043 - RNA, 19 nt, Artificial Sequence
  Description of Artificial Sequence: Synthetic oligonucleotide
cgcucguuagauguaucca

SEQ ID NO: 1334044 - RNA, 19 nt, Artificial Sequence
  Description of Artificial Sequence: Synthetic oligonucleotide
ggugcgguuggugcagacu

SEQ ID NO: 1334045 - RNA, 19 nt, Artificial Sequence
  Description of Artificial Sequence: Synthetic oligonucleotide
ccagcugugacacgaccau

SEQ ID NO: 1334046 - RNA, 19 nt, Artificial Sequence
  Description of Artificial Sequence: Synthetic oligonucleotide
cagcugugacacgaccaua

SEQ ID NO: 1334047 - RNA, 19 nt, Artificial Sequence
  Description of Artificial Sequence: Synthetic oligonucleotide
gcucgugccuuggugacau

SEQ ID NO: 1334048 - RNA, 19 nt, Artificial Sequence
  Description of Artificial Sequence: Synthetic oligonucleotide
ggcguaaaauugugcucuu

SEQ ID NO: 1334049 - RNA, 19 nt, Artificial Sequence
  Description of Artificial Sequence: Synthetic oligonucleotide
agcgagcaccaaacuccua

SEQ ID NO: 1334050 - RNA, 19 nt, Artificial Sequence
  Description of Artificial Sequence: Synthetic oligonucleotide
ccaccgucuguccaggcau

SEQ ID NO: 1334051 - RNA, 19 nt, Artificial Sequence
  Description of Artificial Sequence: Synthetic oligonucleotide
gcucgcucguuagauguau

SEQ ID NO: 1334052 - RNA, 19 nt, Artificial Sequence
  Description of Artificial Sequence: Synthetic oligonucleotide
cgagcaccaaacuccuaua

SEQ ID NO: 1334053 - RNA, 19 nt, Artificial Sequence
  Description of Artificial Sequence: Synthetic oligonucleotide
ccccgcucuccuaccugug

SEQ ID NO: 1334054 - RNA, 19 nt, Artificial Sequence
  Description of Artificial Sequence: Synthetic oligonucleotide
cccucagcauuguaguauu

SEQ ID NO: 1334055 - RNA, 19 nt, Artificial Sequence
  Description of Artificial Sequence: Synthetic oligonucleotide
cggcgaaacuuggcucucc

SEQ ID NO: 1334056 - RNA, 19 nt, Artificial Sequence
  Description of Artificial Sequence: Synthetic oligonucleotide
gugcuacuacgaggguggu

SEQ ID NO: 1334057 - RNA, 19 nt, Artificial Sequence
  Description of Artificial Sequence: Synthetic oligonucleotide
ggcucgcucguuagaugua

SEQ ID NO: 1334058 - RNA, 19 nt, Artificial Sequence
  Description of Artificial Sequence: Synthetic oligonucleotide
cuacgaggguggugcgguu

SEQ ID NO: 1334059 - RNA, 19 nt, Artificial Sequence
  Description of Artificial Sequence: Synthetic oligonucleotide
cgggauaacagagcuucgu

SEQ ID NO: 1334060 - RNA, 19 nt, Artificial Sequence
  Description of Artificial Sequence: Synthetic oligonucleotide
gcgaaacagcaggcguaaa

SEQ ID NO: 1334061 - RNA, 19 nt, Artificial Sequence
  Description of Artificial Sequence: Synthetic oligonucleotide
gcccaucuacucggaugca

SEQ ID NO: 1334062 - RNA, 19 nt, Artificial Sequence
  Description of Artificial Sequence: Synthetic oligonucleotide
cacgaccauagcggauauu

SEQ ID NO: 1334063 - RNA, 19 nt, Artificial Sequence
  Description of Artificial Sequence: Synthetic oligonucleotide
cucgugccuuggugacauu

SEQ ID NO: 1334064 - RNA, 19 nt, Artificial Sequence
  Description of Artificial Sequence: Synthetic oligonucleotide
ccacugcucgugccuuggu

SEQ ID NO: 1334065 - RNA, 19 nt, Artificial Sequence
  Description of Artificial Sequence: Synthetic oligonucleotide
cccgcccaucaguguagcu

SEQ ID NO: 1334066 - RNA, 19 nt, Artificial Sequence
  Description of Artificial Sequence: Synthetic oligonucleotide
ucugguaucauuauggagg

SEQ ID NO: 1334067 - RNA, 19 nt, Artificial Sequence
  Description of Artificial Sequence: Synthetic oligonucleotide
cuuaauuuaaccaaagagc

SEQ ID NO: 1334068 - RNA, 19 nt, Artificial Sequence
  Description of Artificial Sequence: Synthetic oligonucleotide
aauacguuucauuuaacac

SEQ ID NO: 1334069 - RNA, 19 nt, Artificial Sequence
  Description of Artificial Sequence: Synthetic oligonucleotide
aaaacuuuuagucuuauaa

SEQ ID NO: 1334070 - RNA, 19 nt, Artificial Sequence
  Description of Artificial Sequence: Synthetic oligonucleotide
uuaauuuaaccaaagagcu

SEQ ID NO: 1334071 - RNA, 19 nt, Artificial Sequence
  Description of Artificial Sequence: Synthetic oligonucleotide
uaaguuagaaguauugggg

SEQ ID NO: 1334072 - RNA, 19 nt, Artificial Sequence
  Description of Artificial Sequence: Synthetic oligonucleotide
aauauaacaacaaggauug

SEQ ID NO: 1334073 - RNA, 19 nt, Artificial Sequence
  Description of Artificial Sequence: Synthetic oligonucleotide
uccaaaguaguuuaaaucc

SEQ ID NO: 1334074 - RNA, 19 nt, Artificial Sequence
  Description of Artificial Sequence: Synthetic oligonucleotide
cuuacuauguccaaaguag

SEQ ID NO: 1334075 - RNA, 19 nt, Artificial Sequence
  Description of Artificial Sequence: Synthetic oligonucleotide
cauaguaacaacugaaagg

SEQ ID NO: 1334076 - RNA, 19 nt, Artificial Sequence
  Description of Artificial Sequence: Synthetic oligonucleotide
aaugaaaugagugcuuuac

SEQ ID NO: 1334077 - RNA, 19 nt, Artificial Sequence
  Description of Artificial Sequence: Synthetic oligonucleotide
uguaagaaacaacaccugg

SEQ ID NO: 1334078 - RNA, 19 nt, Artificial Sequence
  Description of Artificial Sequence: Synthetic oligonucleotide
aaaguaauuccucagucca

SEQ ID NO: 1334079 - RNA, 19 nt, Artificial Sequence
  Description of Artificial Sequence: Synthetic oligonucleotide
uuaucuuuaucuuaauacc

SEQ ID NO: 1334080 - RNA, 19 nt, Artificial Sequence
  Description of Artificial Sequence: Synthetic oligonucleotide
aaucuccuaaguuagaagu

SEQ ID NO: 1334081 - RNA, 19 nt, Artificial Sequence
  Description of Artificial Sequence: Synthetic oligonucleotide
ucaucuaaaaguaauuccu

SEQ ID NO: 1334082 - RNA, 19 nt, Artificial Sequence
  Description of Artificial Sequence: Synthetic oligonucleotide
cuaaguuagaaguauuggg

SEQ ID NO: 1334083 - RNA, 19 nt, Artificial Sequence
  Description of Artificial Sequence: Synthetic oligonucleotide
aaauguuuuagacagucau

SEQ ID NO: 1334084 - RNA, 19 nt, Artificial Sequence
  Description of Artificial Sequence: Synthetic oligonucleotide
aauaccuuguaccaaacau

SEQ ID NO: 1334085 - RNA, 19 nt, Artificial Sequence
  Description of Artificial Sequence: Synthetic oligonucleotide
ugggcauuuagcaauacag

SEQ ID NO: 1334086 - RNA, 19 nt, Artificial Sequence
  Description of Artificial Sequence: Synthetic oligonucleotide
uaccuuguaccaaacaugg

SEQ ID NO: 1334087 - RNA, 19 nt, Artificial Sequence
  Description of Artificial Sequence: Synthetic oligonucleotide
uuaucuuaauaccagcuca

SEQ ID NO: 1334088 - RNA, 19 nt, Artificial Sequence
  Description of Artificial Sequence: Synthetic oligonucleotide
aaagaauuuugacugaaaa

SEQ ID NO: 1334089 - RNA, 19 nt, Artificial Sequence
  Description of Artificial Sequence: Synthetic oligonucleotide
ugaaagguuacuacaauga

SEQ ID NO: 1334090 - RNA, 19 nt, Artificial Sequence
  Description of Artificial Sequence: Synthetic oligonucleotide
aagucaauauaacaacaag

SEQ ID NO: 1334091 - RNA, 19 nt, Artificial Sequence
  Description of Artificial Sequence: Synthetic oligonucleotide
uacauaaugaaaugagugc

SEQ ID NO: 1334092 - RNA, 19 nt, Artificial Sequence
  Description of Artificial Sequence: Synthetic oligonucleotide
aauuuaaccaaagagcuaa

SEQ ID NO: 1334093 - RNA, 19 nt, Artificial Sequence
  Description of Artificial Sequence: Synthetic oligonucleotide
uucuuaaagaauuuugacu

SEQ ID NO: 1334094 - RNA, 19 nt, Artificial Sequence
  Description of Artificial Sequence: Synthetic oligonucleotide
ucuaaaaguaauuccucag

SEQ ID NO: 1334095 - RNA, 19 nt, Artificial Sequence
  Description of Artificial Sequence: Synthetic oligonucleotide
acaauuaguuuguugcuac

SEQ ID NO: 1334096 - RNA, 19 nt, Artificial Sequence
  Description of Artificial Sequence: Synthetic oligonucleotide
auaguaacaacugaaaggu

SEQ ID NO: 1334097 - RNA, 19 nt, Artificial Sequence
  Description of Artificial Sequence: Synthetic oligonucleotide
agucaauauaacaacaagg

SEQ ID NO: 1334098 - RNA, 19 nt, Artificial Sequence
  Description of Artificial Sequence: Synthetic oligonucleotide
aauugcaggguuguauugc

SEQ ID NO: 1334099 - RNA, 19 nt, Artificial Sequence
  Description of Artificial Sequence: Synthetic oligonucleotide
auuauggagguuucggacg

SEQ ID NO: 1334100 - RNA, 19 nt, Artificial Sequence
  Description of Artificial Sequence: Synthetic oligonucleotide
aaggacuauuccuaaauga

SEQ ID NO: 1334101 - RNA, 19 nt, Artificial Sequence
  Description of Artificial Sequence: Synthetic oligonucleotide
augauguaaggacuauucc

SEQ ID NO: 1334102 - RNA, 19 nt, Artificial Sequence
  Description of Artificial Sequence: Synthetic oligonucleotide
aaagccccaauucauuauc

SEQ ID NO: 1334103 - RNA, 19 nt, Artificial Sequence
  Description of Artificial Sequence: Synthetic oligonucleotide
acuuguuugaaaugccugg

SEQ ID NO: 1334104 - RNA, 19 nt, Artificial Sequence
  Description of Artificial Sequence: Synthetic oligonucleotide
aaaucuccuaaguuagaag

SEQ ID NO: 1334105 - RNA, 19 nt, Artificial Sequence
  Description of Artificial Sequence: Synthetic oligonucleotide
aagaauuuugacugaaaau

SEQ ID NO: 1334106 - RNA, 19 nt, Artificial Sequence
  Description of Artificial Sequence: Synthetic oligonucleotide
aauuaaaugccaccauacu

SEQ ID NO: 1334107 - RNA, 19 nt, Artificial Sequence
  Description of Artificial Sequence: Synthetic oligonucleotide
ugguacauggacauggccc

SEQ ID NO: 1334108 - RNA, 19 nt, Artificial Sequence
  Description of Artificial Sequence: Synthetic oligonucleotide
auuaguuuguugcuacuuc

SEQ ID NO: 1334109 - RNA, 19 nt, Artificial Sequence
  Description of Artificial Sequence: Synthetic oligonucleotide
acuauuccuaaaugaaaac

SEQ ID NO: 1334110 - RNA, 19 nt, Artificial Sequence
  Description of Artificial Sequence: Synthetic oligonucleotide
aaugacauauugguaagug

SEQ ID NO: 1334111 - RNA, 19 nt, Artificial Sequence
  Description of Artificial Sequence: Synthetic oligonucleotide
auuaucugauuucuuaaug

SEQ ID NO: 1334112 - RNA, 19 nt, Artificial Sequence
  Description of Artificial Sequence: Synthetic oligonucleotide
uuagcaauacagacaaaug

SEQ ID NO: 1334113 - RNA, 19 nt, Artificial Sequence
  Description of Artificial Sequence: Synthetic oligonucleotide
ugauguaaggacuauuccu

SEQ ID NO: 1334114 - RNA, 19 nt, Artificial Sequence
  Description of Artificial Sequence: Synthetic oligonucleotide
uauucuuagacguuuuagu

SEQ ID NO: 1334115 - RNA, 19 nt, Artificial Sequence
  Description of Artificial Sequence: Synthetic oligonucleotide
aagguuacuacaaugacau

SEQ ID NO: 1334116 - RNA, 19 nt, Artificial Sequence
  Description of Artificial Sequence: Synthetic oligonucleotide
auauuuauacaaugcacca

SEQ ID NO: 1334117 - RNA, 19 nt, Artificial Sequence
  Description of Artificial Sequence: Synthetic oligonucleotide
auacacauagccuuagaug

SEQ ID NO: 1334118 - RNA, 19 nt, Artificial Sequence
  Description of Artificial Sequence: Synthetic oligonucleotide
uaguuuaaauccuuaguga

SEQ ID NO: 1334119 - RNA, 19 nt, Artificial Sequence
  Description of Artificial Sequence: Synthetic oligonucleotide
uuugaaaugccugggaggc

SEQ ID NO: 1334120 - RNA, 19 nt, Artificial Sequence
  Description of Artificial Sequence: Synthetic oligonucleotide
aaaugagugcuuuacuuaa

SEQ ID NO: 1334121 - RNA, 19 nt, Artificial Sequence
  Description of Artificial Sequence: Synthetic oligonucleotide
uuuaucuuaauaccagcuc

SEQ ID NO: 1334122 - RNA, 19 nt, Artificial Sequence
  Description of Artificial Sequence: Synthetic oligonucleotide
uuuagcaauacagacaaau

SEQ ID NO: 1334123 - RNA, 19 nt, Artificial Sequence
  Description of Artificial Sequence: Synthetic oligonucleotide
ucauuuaacacucccuggu

SEQ ID NO: 1334124 - RNA, 19 nt, Artificial Sequence
  Description of Artificial Sequence: Synthetic oligonucleotide
auuuaacacucccugguuc

SEQ ID NO: 1334125 - RNA, 19 nt, Artificial Sequence
  Description of Artificial Sequence: Synthetic oligonucleotide
uccacuaguauaagaagug

SEQ ID NO: 1334126 - RNA, 19 nt, Artificial Sequence
  Description of Artificial Sequence: Synthetic oligonucleotide
ucuuagacguuuuaguuau

SEQ ID NO: 1334127 - RNA, 19 nt, Artificial Sequence
  Description of Artificial Sequence: Synthetic oligonucleotide
ugauaccucaugcuggaag

SEQ ID NO: 1334128 - RNA, 19 nt, Artificial Sequence
  Description of Artificial Sequence: Synthetic oligonucleotide
uuccacuaguauaagaagu

SEQ ID NO: 1334129 - RNA, 19 nt, Artificial Sequence
  Description of Artificial Sequence: Synthetic oligonucleotide
uuuaccugaagccauguuu

SEQ ID NO: 1334130 - RNA, 19 nt, Artificial Sequence
  Description of Artificial Sequence: Synthetic oligonucleotide
uccuaaguuagaaguauug

SEQ ID NO: 1334131 - RNA, 19 nt, Artificial Sequence
  Description of Artificial Sequence: Synthetic oligonucleotide
uuaacacuccucaaauaug

SEQ ID NO: 1334132 - RNA, 19 nt, Artificial Sequence
  Description of Artificial Sequence: Synthetic oligonucleotide
uuauucuuagacguuuuag

SEQ ID NO: 1334133 - RNA, 19 nt, Artificial Sequence
  Description of Artificial Sequence: Synthetic oligonucleotide
ucguuauauuuauacaaug

SEQ ID NO: 1334134 - RNA, 19 nt, Artificial Sequence
  Description of Artificial Sequence: Synthetic oligonucleotide
agcauaguaugucugagga

SEQ ID NO: 1334135 - RNA, 19 nt, Artificial Sequence
  Description of Artificial Sequence: Synthetic oligonucleotide
ucaauauaacaacaaggau

SEQ ID NO: 1334136 - RNA, 19 nt, Artificial Sequence
  Description of Artificial Sequence: Synthetic oligonucleotide
gaauacguuucauuuaaca

SEQ ID NO: 1334137 - RNA, 19 nt, Artificial Sequence
  Description of Artificial Sequence: Synthetic oligonucleotide
gucaauauaacaacaagga

SEQ ID NO: 1334138 - RNA, 19 nt, Artificial Sequence
  Description of Artificial Sequence: Synthetic oligonucleotide
cagacaaaugcauauucag

SEQ ID NO: 1334139 - RNA, 19 nt, Artificial Sequence
  Description of Artificial Sequence: Synthetic oligonucleotide
ucuuauaaguauguaauua

SEQ ID NO: 1334140 - RNA, 19 nt, Artificial Sequence
  Description of Artificial Sequence: Synthetic oligonucleotide
uuaguuuguugcuacuuca

SEQ ID NO: 1334141 - RNA, 19 nt, Artificial Sequence
  Description of Artificial Sequence: Synthetic oligonucleotide
uuacuacaaugacauauug

SEQ ID NO: 1334142 - RNA, 19 nt, Artificial Sequence
  Description of Artificial Sequence: Synthetic oligonucleotide
uguucguuauauuuauaca

SEQ ID NO: 1334143 - RNA, 19 nt, Artificial Sequence
  Description of Artificial Sequence: Synthetic oligonucleotide
uuacaugguggccuucugg

SEQ ID NO: 1334144 - RNA, 19 nt, Artificial Sequence
  Description of Artificial Sequence: Synthetic oligonucleotide
ugcaccauucauuucauuc

SEQ ID NO: 1334145 - RNA, 19 nt, Artificial Sequence
  Description of Artificial Sequence: Synthetic oligonucleotide
uccuaaaugaaaacugaaa

SEQ ID NO: 1334146 - RNA, 19 nt, Artificial Sequence
  Description of Artificial Sequence: Synthetic oligonucleotide
guucauguauguaagaaac

SEQ ID NO: 1334147 - RNA, 19 nt, Artificial Sequence
  Description of Artificial Sequence: Synthetic oligonucleotide
aggucaacaagucacauuu

SEQ ID NO: 1334148 - RNA, 19 nt, Artificial Sequence
  Description of Artificial Sequence: Synthetic oligonucleotide
cuagcuugugcauaguaac

SEQ ID NO: 1334149 - RNA, 19 nt, Artificial Sequence
  Description of Artificial Sequence: Synthetic oligonucleotide
uuuucgggaacuuguaaac

SEQ ID NO: 1334150 - RNA, 19 nt, Artificial Sequence
  Description of Artificial Sequence: Synthetic oligonucleotide
guucguuauauuuauacaa

SEQ ID NO: 1334151 - RNA, 19 nt, Artificial Sequence
  Description of Artificial Sequence: Synthetic oligonucleotide
ucuuaauaccagcucaaaa

SEQ ID NO: 1334152 - RNA, 19 nt, Artificial Sequence
  Description of Artificial Sequence: Synthetic oligonucleotide
uaaauccuuagugauaccu

SEQ ID NO: 1334153 - RNA, 19 nt, Artificial Sequence
  Description of Artificial Sequence: Synthetic oligonucleotide
cauuuagcaauacagacaa

SEQ ID NO: 1334154 - RNA, 19 nt, Artificial Sequence
  Description of Artificial Sequence: Synthetic oligonucleotide
uuuaacacucccugguucu

SEQ ID NO: 1334155 - RNA, 19 nt, Artificial Sequence
  Description of Artificial Sequence: Synthetic oligonucleotide
aucuaaaaguaauuccuca

SEQ ID NO: 1334156 - RNA, 19 nt, Artificial Sequence
  Description of Artificial Sequence: Synthetic oligonucleotide
ugguaaguguucauguaug

SEQ ID NO: 1334157 - RNA, 19 nt, Artificial Sequence
  Description of Artificial Sequence: Synthetic oligonucleotide
gaaagguuacuacaaugac

SEQ ID NO: 1334158 - RNA, 19 nt, Artificial Sequence
  Description of Artificial Sequence: Synthetic oligonucleotide
acauaaugaaaugagugcu

SEQ ID NO: 1334159 - RNA, 19 nt, Artificial Sequence
  Description of Artificial Sequence: Synthetic oligonucleotide
agaaguauuggggugcagg

SEQ ID NO: 1334160 - RNA, 19 nt, Artificial Sequence
  Description of Artificial Sequence: Synthetic oligonucleotide
aucauuauggagguuucgg

SEQ ID NO: 1334161 - RNA, 19 nt, Artificial Sequence
  Description of Artificial Sequence: Synthetic oligonucleotide
uacaaugcaccauucauuu

SEQ ID NO: 1334162 - RNA, 19 nt, Artificial Sequence
  Description of Artificial Sequence: Synthetic oligonucleotide
ugacuguggauuuauucca

SEQ ID NO: 1334163 - RNA, 19 nt, Artificial Sequence
  Description of Artificial Sequence: Synthetic oligonucleotide
cugaaagguuacuacaaug

SEQ ID NO: 1334164 - RNA, 19 nt, Artificial Sequence
  Description of Artificial Sequence: Synthetic oligonucleotide
uuucggacgaauacguuuc

SEQ ID NO: 1334165 - RNA, 19 nt, Artificial Sequence
  Description of Artificial Sequence: Synthetic oligonucleotide
uugguaaguguucauguau

SEQ ID NO: 1334166 - RNA, 19 nt, Artificial Sequence
  Description of Artificial Sequence: Synthetic oligonucleotide
uucugguaucauuauggag

SEQ ID NO: 1334167 - RNA, 19 nt, Artificial Sequence
  Description of Artificial Sequence: Synthetic oligonucleotide
agucuuauaaguauguaau

SEQ ID NO: 1334168 - RNA, 19 nt, Artificial Sequence
  Description of Artificial Sequence: Synthetic oligonucleotide
uuuauacaaugcaccauuc

SEQ ID NO: 1334169 - RNA, 19 nt, Artificial Sequence
  Description of Artificial Sequence: Synthetic oligonucleotide
aaguguucauguauguaag

SEQ ID NO: 1334170 - RNA, 19 nt, Artificial Sequence
  Description of Artificial Sequence: Synthetic oligonucleotide
uaugucugaggagugacca

SEQ ID NO: 1334171 - RNA, 19 nt, Artificial Sequence
  Description of Artificial Sequence: Synthetic oligonucleotide
agacguuuuaguuauuuua

SEQ ID NO: 1334172 - RNA, 19 nt, Artificial Sequence
  Description of Artificial Sequence: Synthetic oligonucleotide
acugugcacacuuggaaug

SEQ ID NO: 1334173 - RNA, 19 nt, Artificial Sequence
  Description of Artificial Sequence: Synthetic oligonucleotide
agcacagacugauuacagg

SEQ ID NO: 1334174 - RNA, 19 nt, Artificial Sequence
  Description of Artificial Sequence: Synthetic oligonucleotide
acgaauacguuucauuuaa

SEQ ID NO: 1334175 - RNA, 19 nt, Artificial Sequence
  Description of Artificial Sequence: Synthetic oligonucleotide
auguaauuaaaugccacca

SEQ ID NO: 1334176 - RNA, 19 nt, Artificial Sequence
  Description of Artificial Sequence: Synthetic oligonucleotide
agcuaaacaaacuccacuu

SEQ ID NO: 1334177 - RNA, 19 nt, Artificial Sequence
  Description of Artificial Sequence: Synthetic oligonucleotide
aaagagccaguauuucagu

SEQ ID NO: 1334178 - RNA, 19 nt, Artificial Sequence
  Description of Artificial Sequence: Synthetic oligonucleotide
caacaagucacauuuaucu

SEQ ID NO: 1334179 - RNA, 19 nt, Artificial Sequence
  Description of Artificial Sequence: Synthetic oligonucleotide
guuagaaguauuggggugc

SEQ ID NO: 1334180 - RNA, 19 nt, Artificial Sequence
  Description of Artificial Sequence: Synthetic oligonucleotide
uucuuagacguuuuaguua

SEQ ID NO: 1334181 - RNA, 19 nt, Artificial Sequence
  Description of Artificial Sequence: Synthetic oligonucleotide
uguccaaaguaguuuaaau

SEQ ID NO: 1334182 - RNA, 19 nt, Artificial Sequence
  Description of Artificial Sequence: Synthetic oligonucleotide
uauugcaccugguccacag

SEQ ID NO: 1334183 - RNA, 19 nt, Artificial Sequence
  Description of Artificial Sequence: Synthetic oligonucleotide
uuaaagaauuuugacugaa

SEQ ID NO: 1334184 - RNA, 19 nt, Artificial Sequence
  Description of Artificial Sequence: Synthetic oligonucleotide
ugacaaaaucuccuaaguu

SEQ ID NO: 1334185 - RNA, 19 nt, Artificial Sequence
  Description of Artificial Sequence: Synthetic oligonucleotide
caucuaaaaguaauuccuc

SEQ ID NO: 1334186 - RNA, 19 nt, Artificial Sequence
  Description of Artificial Sequence: Synthetic oligonucleotide
uccuuagugauaccucaug

SEQ ID NO: 1334187 - RNA, 19 nt, Artificial Sequence
  Description of Artificial Sequence: Synthetic oligonucleotide
caagcuagcuugugcauag

SEQ ID NO: 1334188 - RNA, 19 nt, Artificial Sequence
  Description of Artificial Sequence: Synthetic oligonucleotide
uguuuacauacauuaguuu

SEQ ID NO: 1334189 - RNA, 19 nt, Artificial Sequence
  Description of Artificial Sequence: Synthetic oligonucleotide
aagugacaaaaucuccuaa

SEQ ID NO: 1334190 - RNA, 19 nt, Artificial Sequence
  Description of Artificial Sequence: Synthetic oligonucleotide
gacuauuccuaaaugaaaa

SEQ ID NO: 1334191 - RNA, 19 nt, Artificial Sequence
  Description of Artificial Sequence: Synthetic oligonucleotide
ucacauuuaucuuuaucuu

SEQ ID NO: 1334192 - RNA, 19 nt, Artificial Sequence
  Description of Artificial Sequence: Synthetic oligonucleotide
augacauauugguaagugu

SEQ ID NO: 1334193 - RNA, 19 nt, Artificial Sequence
  Description of Artificial Sequence: Synthetic oligonucleotide
auagcuuccacuaguauaa

SEQ ID NO: 1334194 - RNA, 19 nt, Artificial Sequence
  Description of Artificial Sequence: Synthetic oligonucleotide
cauauucaguuuaauguga

SEQ ID NO: 1334195 - RNA, 19 nt, Artificial Sequence
  Description of Artificial Sequence: Synthetic oligonucleotide
uaauuuaaccaaagagcua

SEQ ID NO: 1334196 - RNA, 19 nt, Artificial Sequence
  Description of Artificial Sequence: Synthetic oligonucleotide
uuuaaccaaagagcuaaac

SEQ ID NO: 1334197 - RNA, 19 nt, Artificial Sequence
  Description of Artificial Sequence: Synthetic oligonucleotide
gaauugcaggguuguauug

SEQ ID NO: 1334198 - RNA, 19 nt, Artificial Sequence
  Description of Artificial Sequence: Synthetic oligonucleotide
gagugcuuuacuuaauuua

SEQ ID NO: 1334199 - RNA, 19 nt, Artificial Sequence
  Description of Artificial Sequence: Synthetic oligonucleotide
auagccuuagaugugaauu

SEQ ID NO: 1334200 - RNA, 19 nt, Artificial Sequence
  Description of Artificial Sequence: Synthetic oligonucleotide
agaugugaauuucaucuaa

SEQ ID NO: 1334201 - RNA, 19 nt, Artificial Sequence
  Description of Artificial Sequence: Synthetic oligonucleotide
agugauaccucaugcugga

SEQ ID NO: 1334202 - RNA, 19 nt, Artificial Sequence
  Description of Artificial Sequence: Synthetic oligonucleotide
uugcagaccuaacauaguu

SEQ ID NO: 1334203 - RNA, 19 nt, Artificial Sequence
  Description of Artificial Sequence: Synthetic oligonucleotide
gauguaaggacuauuccua

SEQ ID NO: 1334204 - RNA, 19 nt, Artificial Sequence
  Description of Artificial Sequence: Synthetic oligonucleotide
augaaaugagugcuuuacu

SEQ ID NO: 1334205 - RNA, 19 nt, Artificial Sequence
  Description of Artificial Sequence: Synthetic oligonucleotide
uuugguuuucgggaacuug

SEQ ID NO: 1334206 - RNA, 19 nt, Artificial Sequence
  Description of Artificial Sequence: Synthetic oligonucleotide
auaccuuguaccaaacaug

SEQ ID NO: 1334207 - RNA, 19 nt, Artificial Sequence
  Description of Artificial Sequence: Synthetic oligonucleotide
ugcugugacccuuuuaaua

SEQ ID NO: 1334208 - RNA, 19 nt, Artificial Sequence
  Description of Artificial Sequence: Synthetic oligonucleotide
gguacauggacauggcccc

SEQ ID NO: 1334209 - RNA, 19 nt, Artificial Sequence
  Description of Artificial Sequence: Synthetic oligonucleotide
acuaguauaagaagugaaa

SEQ ID NO: 1334210 - RNA, 19 nt, Artificial Sequence
  Description of Artificial Sequence: Synthetic oligonucleotide
agacugauuacagggagca

SEQ ID NO: 1334211 - RNA, 19 nt, Artificial Sequence
  Description of Artificial Sequence: Synthetic oligonucleotide
gcugugacccuuuuaauac

SEQ ID NO: 1334212 - RNA, 19 nt, Artificial Sequence
  Description of Artificial Sequence: Synthetic oligonucleotide
ugaccaugguugacugugg

SEQ ID NO: 1334213 - RNA, 19 nt, Artificial Sequence
  Description of Artificial Sequence: Synthetic oligonucleotide
caggggugguucaaaaccc

SEQ ID NO: 1334214 - RNA, 19 nt, Artificial Sequence
  Description of Artificial Sequence: Synthetic oligonucleotide
guuuucgggaacuuguaaa

SEQ ID NO: 1334215 - RNA, 19 nt, Artificial Sequence
  Description of Artificial Sequence: Synthetic oligonucleotide
auugcaggguuguauugca

SEQ ID NO: 1334216 - RNA, 19 nt, Artificial Sequence
  Description of Artificial Sequence: Synthetic oligonucleotide
uacuauguccaaaguaguu

SEQ ID NO: 1334217 - RNA, 19 nt, Artificial Sequence
  Description of Artificial Sequence: Synthetic oligonucleotide
cuuaaagaauuuugacuga

SEQ ID NO: 1334218 - RNA, 19 nt, Artificial Sequence
  Description of Artificial Sequence: Synthetic oligonucleotide
aaguaauuccucaguccag

SEQ ID NO: 1334219 - RNA, 19 nt, Artificial Sequence
  Description of Artificial Sequence: Synthetic oligonucleotide
ucuccuaaguuagaaguau

SEQ ID NO: 1334220 - RNA, 19 nt, Artificial Sequence
  Description of Artificial Sequence: Synthetic oligonucleotide
uacuuacuauguccaaagu

SEQ ID NO: 1334221 - RNA, 19 nt, Artificial Sequence
  Description of Artificial Sequence: Synthetic oligonucleotide
acaaugcaccauucauuuc

SEQ ID NO: 1334222 - RNA, 19 nt, Artificial Sequence
  Description of Artificial Sequence: Synthetic oligonucleotide
aguguucauguauguaaga

SEQ ID NO: 1334223 - RNA, 19 nt, Artificial Sequence
  Description of Artificial Sequence: Synthetic oligonucleotide
gcaggggugguucaaaacc

SEQ ID NO: 1334224 - RNA, 19 nt, Artificial Sequence
  Description of Artificial Sequence: Synthetic oligonucleotide
agcuuaguggacauggcug

SEQ ID NO: 1334225 - RNA, 19 nt, Artificial Sequence
  Description of Artificial Sequence: Synthetic oligonucleotide
aaaguaguuuaaauccuua

SEQ ID NO: 1334226 - RNA, 19 nt, Artificial Sequence
  Description of Artificial Sequence: Synthetic oligonucleotide
auguuuauucuuaaagaau

SEQ ID NO: 1334227 - RNA, 19 nt, Artificial Sequence
  Description of Artificial Sequence: Synthetic oligonucleotide
uuaaauccuuagugauacc

SEQ ID NO: 1334228 - RNA, 19 nt, Artificial Sequence
  Description of Artificial Sequence: Synthetic oligonucleotide
uacaauuaguuuguugcua

SEQ ID NO: 1334229 - RNA, 19 nt, Artificial Sequence
  Description of Artificial Sequence: Synthetic oligonucleotide
uauguccaaaguaguuuaa

SEQ ID NO: 1334230 - RNA, 19 nt, Artificial Sequence
  Description of Artificial Sequence: Synthetic oligonucleotide
cagacugauuacagggagc

SEQ ID NO: 1334231 - RNA, 19 nt, Artificial Sequence
  Description of Artificial Sequence: Synthetic oligonucleotide
ugagugcuuuacuuaauuu

SEQ ID NO: 1334232 - RNA, 19 nt, Artificial Sequence
  Description of Artificial Sequence: Synthetic oligonucleotide
ucuuaacacuccucaaaua

SEQ ID NO: 1334233 - RNA, 19 nt, Artificial Sequence
  Description of Artificial Sequence: Synthetic oligonucleotide
ugccaccauacuuacuaug

SEQ ID NO: 1334234 - RNA, 19 nt, Artificial Sequence
  Description of Artificial Sequence: Synthetic oligonucleotide
augcugggguagcacagac

SEQ ID NO: 1334235 - RNA, 19 nt, Artificial Sequence
  Description of Artificial Sequence: Synthetic oligonucleotide
auaaugaaaugagugcuuu

SEQ ID NO: 1334236 - RNA, 19 nt, Artificial Sequence
  Description of Artificial Sequence: Synthetic oligonucleotide
uuggucguuccuucuguug

SEQ ID NO: 1334237 - RNA, 19 nt, Artificial Sequence
  Description of Artificial Sequence: Synthetic oligonucleotide
uggacauggccccagcaua

SEQ ID NO: 1334238 - RNA, 19 nt, Artificial Sequence
  Description of Artificial Sequence: Synthetic oligonucleotide
uagaugugaauuucaucua

SEQ ID NO: 1334239 - RNA, 19 nt, Artificial Sequence
  Description of Artificial Sequence: Synthetic oligonucleotide
ccuaaguuagaaguauugg

SEQ ID NO: 1334240 - RNA, 19 nt, Artificial Sequence
  Description of Artificial Sequence: Synthetic oligonucleotide
agccuuagaugugaauuuc

SEQ ID NO: 1334241 - RNA, 19 nt, Artificial Sequence
  Description of Artificial Sequence: Synthetic oligonucleotide
aggacuauuccuaaaugaa

SEQ ID NO: 1334242 - RNA, 19 nt, Artificial Sequence
  Description of Artificial Sequence: Synthetic oligonucleotide
ugcagaccuaacauaguuu

SEQ ID NO: 1334243 - RNA, 19 nt, Artificial Sequence
  Description of Artificial Sequence: Synthetic oligonucleotide
uagccuuagaugugaauuu

SEQ ID NO: 1334244 - RNA, 19 nt, Artificial Sequence
  Description of Artificial Sequence: Synthetic oligonucleotide
uguguguuacaugguggcc

SEQ ID NO: 1334245 - RNA, 19 nt, Artificial Sequence
  Description of Artificial Sequence: Synthetic oligonucleotide
uuagaaguauuggggugca

SEQ ID NO: 1334246 - RNA, 19 nt, Artificial Sequence
  Description of Artificial Sequence: Synthetic oligonucleotide
uuuguucguuauauuuaua

SEQ ID NO: 1334247 - RNA, 19 nt, Artificial Sequence
  Description of Artificial Sequence: Synthetic oligonucleotide
ggagguuucggacgaauac

SEQ ID NO: 1334248 - RNA, 19 nt, Artificial Sequence
  Description of Artificial Sequence: Synthetic oligonucleotide
aagcaaauugugaaauguu

SEQ ID NO: 1334249 - RNA, 19 nt, Artificial Sequence
  Description of Artificial Sequence: Synthetic oligonucleotide
uuagucuuauaaguaugua

SEQ ID NO: 1334250 - RNA, 19 nt, Artificial Sequence
  Description of Artificial Sequence: Synthetic oligonucleotide
gacgaauacguuucauuua

SEQ ID NO: 1334251 - RNA, 19 nt, Artificial Sequence
  Description of Artificial Sequence: Synthetic oligonucleotide
uguuuuagacagucauuuu

SEQ ID NO: 1334252 - RNA, 19 nt, Artificial Sequence
  Description of Artificial Sequence: Synthetic oligonucleotide
ccuuagugauaccucaugc

SEQ ID NO: 1334253 - RNA, 19 nt, Artificial Sequence
  Description of Artificial Sequence: Synthetic oligonucleotide
guugcuacuucauaacuau

SEQ ID NO: 1334254 - RNA, 19 nt, Artificial Sequence
  Description of Artificial Sequence: Synthetic oligonucleotide
acaccuggagaggaagaac

SEQ ID NO: 1334255 - RNA, 19 nt, Artificial Sequence
  Description of Artificial Sequence: Synthetic oligonucleotide
cacauuuaucuuuaucuua

SEQ ID NO: 1334256 - RNA, 19 nt, Artificial Sequence
  Description of Artificial Sequence: Synthetic oligonucleotide
auguaagaaacaacaccug

SEQ ID NO: 1334257 - RNA, 19 nt, Artificial Sequence
  Description of Artificial Sequence: Synthetic oligonucleotide
ccccaaaccauacaauuag

SEQ ID NO: 1334258 - RNA, 19 nt, Artificial Sequence
  Description of Artificial Sequence: Synthetic oligonucleotide
uucccuucccugcagcuua

SEQ ID NO: 1334259 - RNA, 19 nt, Artificial Sequence
  Description of Artificial Sequence: Synthetic oligonucleotide
guaaggacuauuccuaaau

SEQ ID NO: 1334260 - RNA, 19 nt, Artificial Sequence
  Description of Artificial Sequence: Synthetic oligonucleotide
auguaaggacuauuccuaa

SEQ ID NO: 1334261 - RNA, 19 nt, Artificial Sequence
  Description of Artificial Sequence: Synthetic oligonucleotide
agcuuccacuaguauaaga

SEQ ID NO: 1334262 - RNA, 19 nt, Artificial Sequence
  Description of Artificial Sequence: Synthetic oligonucleotide
uagacguuuuaguuauuuu

SEQ ID NO: 1334263 - RNA, 19 nt, Artificial Sequence
  Description of Artificial Sequence: Synthetic oligonucleotide
gugacaaaaucuccuaagu

SEQ ID NO: 1334264 - RNA, 19 nt, Artificial Sequence
  Description of Artificial Sequence: Synthetic oligonucleotide
acguuuuaguuauuuuaua

SEQ ID NO: 1334265 - RNA, 19 nt, Artificial Sequence
  Description of Artificial Sequence: Synthetic oligonucleotide
ugcaggggugguucaaaac

SEQ ID NO: 1334266 - RNA, 19 nt, Artificial Sequence
  Description of Artificial Sequence: Synthetic oligonucleotide
aaugcugggguagcacaga

SEQ ID NO: 1334267 - RNA, 19 nt, Artificial Sequence
  Description of Artificial Sequence: Synthetic oligonucleotide
uuuuaccugaagccauguu

SEQ ID NO: 1334268 - RNA, 19 nt, Artificial Sequence
  Description of Artificial Sequence: Synthetic oligonucleotide
cuuagugauaccucaugcu

SEQ ID NO: 1334269 - RNA, 19 nt, Artificial Sequence
  Description of Artificial Sequence: Synthetic oligonucleotide
uucggacgaauacguuuca

SEQ ID NO: 1334270 - RNA, 19 nt, Artificial Sequence
  Description of Artificial Sequence: Synthetic oligonucleotide
auauucaguuuaaugugau

SEQ ID NO: 1334271 - RNA, 19 nt, Artificial Sequence
  Description of Artificial Sequence: Synthetic oligonucleotide
cuuggaaugcugggguagc

SEQ ID NO: 1334272 - RNA, 19 nt, Artificial Sequence
  Description of Artificial Sequence: Synthetic oligonucleotide
cuaguauaagaagugaaau

SEQ ID NO: 1334273 - RNA, 19 nt, Artificial Sequence
  Description of Artificial Sequence: Synthetic oligonucleotide
uuaacacucccugguucug

SEQ ID NO: 1334274 - RNA, 19 nt, Artificial Sequence
  Description of Artificial Sequence: Synthetic oligonucleotide
aaugcaccauucauuucau

SEQ ID NO: 1334275 - RNA, 19 nt, Artificial Sequence
  Description of Artificial Sequence: Synthetic oligonucleotide
ugguuuucgggaacuugua

SEQ ID NO: 1334276 - RNA, 19 nt, Artificial Sequence
  Description of Artificial Sequence: Synthetic oligonucleotide
agguuucggacgaauacgu

SEQ ID NO: 1334277 - RNA, 19 nt, Artificial Sequence
  Description of Artificial Sequence: Synthetic oligonucleotide
accuuguaccaaacauggc

SEQ ID NO: 1334278 - RNA, 19 nt, Artificial Sequence
  Description of Artificial Sequence: Synthetic oligonucleotide
aagucacauuuaucuuuau

SEQ ID NO: 1334279 - RNA, 19 nt, Artificial Sequence
  Description of Artificial Sequence: Synthetic oligonucleotide
cugugcacacuuggaaugc

SEQ ID NO: 1334280 - RNA, 19 nt, Artificial Sequence
  Description of Artificial Sequence: Synthetic oligonucleotide
cauacuuacuauguccaaa

SEQ ID NO: 1334281 - RNA, 19 nt, Artificial Sequence
  Description of Artificial Sequence: Synthetic oligonucleotide
cauaaaauugggauaucuu

SEQ ID NO: 1334282 - RNA, 19 nt, Artificial Sequence
  Description of Artificial Sequence: Synthetic oligonucleotide
ucguuccuucuguugggca

SEQ ID NO: 1334283 - RNA, 19 nt, Artificial Sequence
  Description of Artificial Sequence: Synthetic oligonucleotide
guuacaugguggccuucug

SEQ ID NO: 1334284 - RNA, 19 nt, Artificial Sequence
  Description of Artificial Sequence: Synthetic oligonucleotide
ggcaaguccaacugugcac

SEQ ID NO: 1334285 - RNA, 19 nt, Artificial Sequence
  Description of Artificial Sequence: Synthetic oligonucleotide
agcagugcuuuggucguuc

SEQ ID NO: 1334286 - RNA, 19 nt, Artificial Sequence
  Description of Artificial Sequence: Synthetic oligonucleotide
caguauuucagugguccuc

SEQ ID NO: 1334287 - RNA, 19 nt, Artificial Sequence
  Description of Artificial Sequence: Synthetic oligonucleotide
cuacaaugacauauuggua

SEQ ID NO: 1334288 - RNA, 19 nt, Artificial Sequence
  Description of Artificial Sequence: Synthetic oligonucleotide
cuuaguggacauggcugcc

SEQ ID NO: 1334289 - RNA, 19 nt, Artificial Sequence
  Description of Artificial Sequence: Synthetic oligonucleotide
gaggagugaccaugguuga

SEQ ID NO: 1334290 - RNA, 19 nt, Artificial Sequence
  Description of Artificial Sequence: Synthetic oligonucleotide
gcuaaacaaacuccacuuc

SEQ ID NO: 1334291 - RNA, 19 nt, Artificial Sequence
  Description of Artificial Sequence: Synthetic oligonucleotide
guaucauuauggagguuuc

SEQ ID NO: 1334292 - RNA, 19 nt, Artificial Sequence
  Description of Artificial Sequence: Synthetic oligonucleotide
cauacacauagccuuagau

SEQ ID NO: 1334293 - RNA, 19 nt, Artificial Sequence
  Description of Artificial Sequence: Synthetic oligonucleotide
agcuagcuugugcauagua

SEQ ID NO: 1334294 - RNA, 19 nt, Artificial Sequence
  Description of Artificial Sequence: Synthetic oligonucleotide
guuucggacgaauacguuu

SEQ ID NO: 1334295 - RNA, 19 nt, Artificial Sequence
  Description of Artificial Sequence: Synthetic oligonucleotide
accaugguugacuguggau

SEQ ID NO: 1334296 - RNA, 19 nt, Artificial Sequence
  Description of Artificial Sequence: Synthetic oligonucleotide
gaccaugguugacugugga

SEQ ID NO: 1334297 - RNA, 19 nt, Artificial Sequence
  Description of Artificial Sequence: Synthetic oligonucleotide
uuuggucguuccuucuguu

SEQ ID NO: 1334298 - RNA, 19 nt, Artificial Sequence
  Description of Artificial Sequence: Synthetic oligonucleotide
ugguugacuguggauuuau

SEQ ID NO: 1334299 - RNA, 19 nt, Artificial Sequence
  Description of Artificial Sequence: Synthetic oligonucleotide
aggaagaacuccacucaca

SEQ ID NO: 1334300 - RNA, 19 nt, Artificial Sequence
  Description of Artificial Sequence: Synthetic oligonucleotide
uuggaaugcugggguagca

SEQ ID NO: 1334301 - RNA, 19 nt, Artificial Sequence
  Description of Artificial Sequence: Synthetic oligonucleotide
aucuuaauaccagcucaaa

SEQ ID NO: 1334302 - RNA, 19 nt, Artificial Sequence
  Description of Artificial Sequence: Synthetic oligonucleotide
caaaacccuuuccaggcaa

SEQ ID NO: 1334303 - RNA, 19 nt, Artificial Sequence
  Description of Artificial Sequence: Synthetic oligonucleotide
uaccucaugcuggaagcaa

SEQ ID NO: 1334304 - RNA, 19 nt, Artificial Sequence
  Description of Artificial Sequence: Synthetic oligonucleotide
auugcagaccuaacauagu

SEQ ID NO: 1334305 - RNA, 19 nt, Artificial Sequence
  Description of Artificial Sequence: Synthetic oligonucleotide
cugguaucauuauggaggu

SEQ ID NO: 1334306 - RNA, 19 nt, Artificial Sequence
  Description of Artificial Sequence: Synthetic oligonucleotide
ugcauaaaauugggauauc

SEQ ID NO: 1334307 - RNA, 19 nt, Artificial Sequence
  Description of Artificial Sequence: Synthetic oligonucleotide
gccccaauucauuaucuga

SEQ ID NO: 1334308 - RNA, 19 nt, Artificial Sequence
  Description of Artificial Sequence: Synthetic oligonucleotide
uagaaguauuggggugcag

SEQ ID NO: 1334309 - RNA, 19 nt, Artificial Sequence
  Description of Artificial Sequence: Synthetic oligonucleotide
ggacgaauacguuucauuu

SEQ ID NO: 1334310 - RNA, 19 nt, Artificial Sequence
  Description of Artificial Sequence: Synthetic oligonucleotide
ggguagcacagacugauua

SEQ ID NO: 1334311 - RNA, 19 nt, Artificial Sequence
  Description of Artificial Sequence: Synthetic oligonucleotide
gcugccuuguguguguuac

SEQ ID NO: 1334312 - RNA, 19 nt, Artificial Sequence
  Description of Artificial Sequence: Synthetic oligonucleotide
gggcauuuagcaauacaga

SEQ ID NO: 1334313 - RNA, 19 nt, Artificial Sequence
  Description of Artificial Sequence: Synthetic oligonucleotide
gucguuccuucuguugggc

SEQ ID NO: 1334314 - RNA, 19 nt, Artificial Sequence
  Description of Artificial Sequence: Synthetic oligonucleotide
gguuuucgggaacuuguaa

SEQ ID NO: 1334315 - RNA, 19 nt, Artificial Sequence
  Description of Artificial Sequence: Synthetic oligonucleotide
uggcaacuucaaucuuaac

SEQ ID NO: 1334316 - RNA, 19 nt, Artificial Sequence
  Description of Artificial Sequence: Synthetic oligonucleotide
gcagaccuaacauaguuuu

SEQ ID NO: 1334317 - RNA, 19 nt, Artificial Sequence
  Description of Artificial Sequence: Synthetic oligonucleotide
gcauaaaauugggauaucu

SEQ ID NO: 1334318 - RNA, 19 nt, Artificial Sequence
  Description of Artificial Sequence: Synthetic oligonucleotide
gaggucaacaagucacauu

SEQ ID NO: 1334319 - RNA, 19 nt, Artificial Sequence
  Description of Artificial Sequence: Synthetic oligonucleotide
ucggacgaauacguuucau

SEQ ID NO: 1334320 - RNA, 19 nt, Artificial Sequence
  Description of Artificial Sequence: Synthetic oligonucleotide
ccagcauaguaugucugag

SEQ ID NO: 1334321 - RNA, 19 nt, Artificial Sequence
  Description of Artificial Sequence: Synthetic oligonucleotide
gcuagcuugugcauaguaa

SEQ ID NO: 1334322 - RNA, 19 nt, Artificial Sequence
  Description of Artificial Sequence: Synthetic oligonucleotide
caauuaguuuguugcuacu

SEQ ID NO: 1334323 - RNA, 19 nt, Artificial Sequence
  Description of Artificial Sequence: Synthetic oligonucleotide
ggaauugcaggguuguauu

SEQ ID NO: 1334324 - RNA, 19 nt, Artificial Sequence
  Description of Artificial Sequence: Synthetic oligonucleotide
aagcuagcuugugcauagu

SEQ ID NO: 1334325 - RNA, 19 nt, Artificial Sequence
  Description of Artificial Sequence: Synthetic oligonucleotide
auggagguuucggacgaau

SEQ ID NO: 1334326 - RNA, 19 nt, Artificial Sequence
  Description of Artificial Sequence: Synthetic oligonucleotide
agccaguauuucagugguc

SEQ ID NO: 1334327 - RNA, 19 nt, Artificial Sequence
  Description of Artificial Sequence: Synthetic oligonucleotide
ggcacugguacauggacau

SEQ ID NO: 1334328 - RNA, 19 nt, Artificial Sequence
  Description of Artificial Sequence: Synthetic oligonucleotide
cauauugguaaguguucau

SEQ ID NO: 1334329 - RNA, 19 nt, Artificial Sequence
  Description of Artificial Sequence: Synthetic oligonucleotide
guugggcauuuagcaauac

SEQ ID NO: 1334330 - RNA, 19 nt, Artificial Sequence
  Description of Artificial Sequence: Synthetic oligonucleotide
cuuguguguguuacauggu

SEQ ID NO: 1334331 - RNA, 19 nt, Artificial Sequence
  Description of Artificial Sequence: Synthetic oligonucleotide
cagcuuaguggacauggcu

SEQ ID NO: 1334332 - RNA, 19 nt, Artificial Sequence
  Description of Artificial Sequence: Synthetic oligonucleotide
cccugugaaagggauggag

SEQ ID NO: 1334333 - RNA, 19 nt, Artificial Sequence
  Description of Artificial Sequence: Synthetic oligonucleotide
auccuuagugauaccucau

SEQ ID NO: 1334334 - RNA, 19 nt, Artificial Sequence
  Description of Artificial Sequence: Synthetic oligonucleotide
caugguugacuguggauuu

SEQ ID NO: 1334335 - RNA, 19 nt, Artificial Sequence
  Description of Artificial Sequence: Synthetic oligonucleotide
cguuuuaguuauuuuauau

SEQ ID NO: 1334336 - RNA, 19 nt, Artificial Sequence
  Description of Artificial Sequence: Synthetic oligonucleotide
agguuacuacaaugacaua

SEQ ID NO: 1334337 - RNA, 19 nt, Artificial Sequence
  Description of Artificial Sequence: Synthetic oligonucleotide
cauggccccagcauaguau

SEQ ID NO: 1334338 - RNA, 19 nt, Artificial Sequence
  Description of Artificial Sequence: Synthetic oligonucleotide
gccuuguguguguuacaug

SEQ ID NO: 1334339 - RNA, 19 nt, Artificial Sequence
  Description of Artificial Sequence: Synthetic oligonucleotide
ggagugaccaugguugacu

SEQ ID NO: 1334340 - RNA, 19 nt, Artificial Sequence
  Description of Artificial Sequence: Synthetic oligonucleotide
guauuucagugguccucaa

SEQ ID NO: 1334341 - RNA, 19 nt, Artificial Sequence
  Description of Artificial Sequence: Synthetic oligonucleotide
augcaccauucauuucauu

SEQ ID NO: 1334342 - RNA, 19 nt, Artificial Sequence
  Description of Artificial Sequence: Synthetic oligonucleotide
gccuuagaugugaauuuca

SEQ ID NO: 1334343 - RNA, 19 nt, Artificial Sequence
  Description of Artificial Sequence: Synthetic oligonucleotide
cugggguagcacagacuga

SEQ ID NO: 1334344 - RNA, 19 nt, Artificial Sequence
  Description of Artificial Sequence: Synthetic oligonucleotide
cauagccuuagaugugaau

SEQ ID NO: 1334345 - RNA, 19 nt, Artificial Sequence
  Description of Artificial Sequence: Synthetic oligonucleotide
augguugacuguggauuua

SEQ ID NO: 1334346 - RNA, 19 nt, Artificial Sequence
  Description of Artificial Sequence: Synthetic oligonucleotide
gcagcuuaguggacauggc

SEQ ID NO: 1334347 - RNA, 19 nt, Artificial Sequence
  Description of Artificial Sequence: Synthetic oligonucleotide
cgaauacguuucauuuaac

SEQ ID NO: 1334348 - RNA, 19 nt, Artificial Sequence
  Description of Artificial Sequence: Synthetic oligonucleotide
ggacauggcugccuugugu

SEQ ID NO: 1334349 - RNA, 19 nt, Artificial Sequence
  Description of Artificial Sequence: Synthetic oligonucleotide
cuccuaaguuagaaguauu

SEQ ID NO: 1334350 - RNA, 19 nt, Artificial Sequence
  Description of Artificial Sequence: Synthetic oligonucleotide
ccaaaccauacaauuaguu

SEQ ID NO: 1334351 - RNA, 19 nt, Artificial Sequence
  Description of Artificial Sequence: Synthetic oligonucleotide
cugccuuguguguguuaca

SEQ ID NO: 1334352 - RNA, 19 nt, Artificial Sequence
  Description of Artificial Sequence: Synthetic oligonucleotide
cagcucaaaagccccaauu

SEQ ID NO: 1334353 - RNA, 19 nt, Artificial Sequence
  Description of Artificial Sequence: Synthetic oligonucleotide
ccccaauucauuaucugau

SEQ ID NO: 1334354 - RNA, 19 nt, Artificial Sequence
  Description of Artificial Sequence: Synthetic oligonucleotide
gugaaauguuuuagacagu

SEQ ID NO: 1334355 - RNA, 19 nt, Artificial Sequence
  Description of Artificial Sequence: Synthetic oligonucleotide
ccuuagaugugaauuucau

SEQ ID NO: 1334356 - RNA, 19 nt, Artificial Sequence
  Description of Artificial Sequence: Synthetic oligonucleotide
ugguaucauuauggagguu

SEQ ID NO: 1334357 - RNA, 19 nt, Artificial Sequence
  Description of Artificial Sequence: Synthetic oligonucleotide
guguuacaugguggccuuc

SEQ ID NO: 1334358 - RNA, 19 nt, Artificial Sequence
  Description of Artificial Sequence: Synthetic oligonucleotide
cucaguccagcagugcuuu

SEQ ID NO: 1334359 - RNA, 19 nt, Artificial Sequence
  Description of Artificial Sequence: Synthetic oligonucleotide
cagaugauguaaggacuau

SEQ ID NO: 1334360 - RNA, 19 nt, Artificial Sequence
  Description of Artificial Sequence: Synthetic oligonucleotide
gugauaccucaugcuggaa

SEQ ID NO: 1334361 - RNA, 19 nt, Artificial Sequence
  Description of Artificial Sequence: Synthetic oligonucleotide
uggcugccuuguguguguu

SEQ ID NO: 1334362 - RNA, 19 nt, Artificial Sequence
  Description of Artificial Sequence: Synthetic oligonucleotide
ccaguauuucagugguccu

SEQ ID NO: 1334363 - RNA, 19 nt, Artificial Sequence
  Description of Artificial Sequence: Synthetic oligonucleotide
cccaauucauuaucugauu

SEQ ID NO: 1334364 - RNA, 19 nt, Artificial Sequence
  Description of Artificial Sequence: Synthetic oligonucleotide
ggccuggaauugcaggguu

SEQ ID NO: 1334365 - RNA, 19 nt, Artificial Sequence
  Description of Artificial Sequence: Synthetic oligonucleotide
gguuucggacgaauacguu

SEQ ID NO: 1334366 - RNA, 19 nt, Artificial Sequence
  Description of Artificial Sequence: Synthetic oligonucleotide
cggacgaauacguuucauu

SEQ ID NO: 1334367 - RNA, 19 nt, Artificial Sequence
  Description of Artificial Sequence: Synthetic oligonucleotide
ggguuguauugcaccuggu

SEQ ID NO: 1334368 - RNA, 19 nt, Artificial Sequence
  Description of Artificial Sequence: Synthetic oligonucleotide
uguauuguccccuagaggg

SEQ ID NO: 1334369 - RNA, 19 nt, Artificial Sequence
  Description of Artificial Sequence: Synthetic oligonucleotide
aauaguugagggcauaggc

SEQ ID NO: 1334370 - RNA, 19 nt, Artificial Sequence
  Description of Artificial Sequence: Synthetic oligonucleotide
aauuccugcaccaugaugc

SEQ ID NO: 1334371 - RNA, 19 nt, Artificial Sequence
  Description of Artificial Sequence: Synthetic oligonucleotide
uaaucugauguaaugaggc

SEQ ID NO: 1334372 - RNA, 19 nt, Artificial Sequence
  Description of Artificial Sequence: Synthetic oligonucleotide
uauuugacgaugaagucgc

SEQ ID NO: 1334373 - RNA, 19 nt, Artificial Sequence
  Description of Artificial Sequence: Synthetic oligonucleotide
aaucugauguaaugaggcc

SEQ ID NO: 1334374 - RNA, 19 nt, Artificial Sequence
  Description of Artificial Sequence: Synthetic oligonucleotide
cugaaaaccucccacacgg

SEQ ID NO: 1334375 - RNA, 19 nt, Artificial Sequence
  Description of Artificial Sequence: Synthetic oligonucleotide
ucugauguaaugaggccgg

SEQ ID NO: 1334376 - RNA, 19 nt, Artificial Sequence
  Description of Artificial Sequence: Synthetic oligonucleotide
gauguaaugaggccgguug

SEQ ID NO: 1334377 - RNA, 19 nt, Artificial Sequence
  Description of Artificial Sequence: Synthetic oligonucleotide
gagagauguacuuaaggug

SEQ ID NO: 1334378 - RNA, 19 nt, Artificial Sequence
  Description of Artificial Sequence: Synthetic oligonucleotide
uaggcuagcugcuugauca

SEQ ID NO: 1334379 - RNA, 19 nt, Artificial Sequence
  Description of Artificial Sequence: Synthetic oligonucleotide
uccucaaagauuugugggg

SEQ ID NO: 1334380 - RNA, 19 nt, Artificial Sequence
  Description of Artificial Sequence: Synthetic oligonucleotide
guauuugacgaugaagucg

SEQ ID NO: 1334381 - RNA, 19 nt, Artificial Sequence
  Description of Artificial Sequence: Synthetic oligonucleotide
uccuagguagacaaauucc

SEQ ID NO: 1334382 - RNA, 19 nt, Artificial Sequence
  Description of Artificial Sequence: Synthetic oligonucleotide
gaagauggggcucuguccc

SEQ ID NO: 1334383 - RNA, 19 nt, Artificial Sequence
  Description of Artificial Sequence: Synthetic oligonucleotide
ugucggacaaggauucugg

SEQ ID NO: 1334384 - RNA, 19 nt, Artificial Sequence
  Description of Artificial Sequence: Synthetic oligonucleotide
aaugaggccgguugagguc

SEQ ID NO: 1334385 - RNA, 19 nt, Artificial Sequence
  Description of Artificial Sequence: Synthetic oligonucleotide
agcuccguccacuuggggc

SEQ ID NO: 1334386 - RNA, 19 nt, Artificial Sequence
  Description of Artificial Sequence: Synthetic oligonucleotide
ugacacguugccgugaggg

SEQ ID NO: 1334387 - RNA, 19 nt, Artificial Sequence
  Description of Artificial Sequence: Synthetic oligonucleotide
uccugaaccuccauggggc

SEQ ID NO: 1334388 - RNA, 19 nt, Artificial Sequence
  Description of Artificial Sequence: Synthetic oligonucleotide
aucugauguaaugaggccg

SEQ ID NO: 1334389 - RNA, 19 nt, Artificial Sequence
  Description of Artificial Sequence: Synthetic oligonucleotide
uugacgaugaagucgcugu

SEQ ID NO: 1334390 - RNA, 19 nt, Artificial Sequence
  Description of Artificial Sequence: Synthetic oligonucleotide
ucggugagcauuucuaggc

SEQ ID NO: 1334391 - RNA, 19 nt, Artificial Sequence
  Description of Artificial Sequence: Synthetic oligonucleotide
ucuggggcguaccagaaga

SEQ ID NO: 1334392 - RNA, 19 nt, Artificial Sequence
  Description of Artificial Sequence: Synthetic oligonucleotide
agcauuucuaggcucagca

SEQ ID NO: 1334393 - RNA, 19 nt, Artificial Sequence
  Description of Artificial Sequence: Synthetic oligonucleotide
auaaucugauguaaugagg

SEQ ID NO: 1334394 - RNA, 19 nt, Artificial Sequence
  Description of Artificial Sequence: Synthetic oligonucleotide
cagagagauguacuuaagg

SEQ ID NO: 1334395 - RNA, 19 nt, Artificial Sequence
  Description of Artificial Sequence: Synthetic oligonucleotide
cuauccagggcuuccacgc

SEQ ID NO: 1334396 - RNA, 19 nt, Artificial Sequence
  Description of Artificial Sequence: Synthetic oligonucleotide
ucggacaaggauucugggg

SEQ ID NO: 1334397 - RNA, 19 nt, Artificial Sequence
  Description of Artificial Sequence: Synthetic oligonucleotide
agagcguccagcugcgggc

SEQ ID NO: 1334398 - RNA, 19 nt, Artificial Sequence
  Description of Artificial Sequence: Synthetic oligonucleotide
aagucccgcaggcagccgc

SEQ ID NO: 1334399 - RNA, 19 nt, Artificial Sequence
  Description of Artificial Sequence: Synthetic oligonucleotide
augucaauugcuccuaggu

SEQ ID NO: 1334400 - RNA, 19 nt, Artificial Sequence
  Description of Artificial Sequence: Synthetic oligonucleotide
aggaacucggcagaagggc

SEQ ID NO: 1334401 - RNA, 19 nt, Artificial Sequence
  Description of Artificial Sequence: Synthetic oligonucleotide
aagcguccgggcuuccugc

SEQ ID NO: 1334402 - RNA, 19 nt, Artificial Sequence
  Description of Artificial Sequence: Synthetic oligonucleotide
uguugucggacaaggauuc

SEQ ID NO: 1334403 - RNA, 19 nt, Artificial Sequence
  Description of Artificial Sequence: Synthetic oligonucleotide
gaucugaaucucccgcugg

SEQ ID NO: 1334404 - RNA, 19 nt, Artificial Sequence
  Description of Artificial Sequence: Synthetic oligonucleotide
ugaaucucccgcuggaagu

SEQ ID NO: 1334405 - RNA, 19 nt, Artificial Sequence
  Description of Artificial Sequence: Synthetic oligonucleotide
auuucuaggcucagcaccg

SEQ ID NO: 1334406 - RNA, 19 nt, Artificial Sequence
  Description of Artificial Sequence: Synthetic oligonucleotide
uucacaugcgccucgcucu

SEQ ID NO: 1334407 - RNA, 19 nt, Artificial Sequence
  Description of Artificial Sequence: Synthetic oligonucleotide
uccgcgaucuucacaugcg

SEQ ID NO: 1334408 - RNA, 19 nt, Artificial Sequence
  Description of Artificial Sequence: Synthetic oligonucleotide
cacguaguaguccuuuccg

SEQ ID NO: 1334409 - RNA, 19 nt, Artificial Sequence
  Description of Artificial Sequence: Synthetic oligonucleotide
uaaugaggccgguugaggu

SEQ ID NO: 1334410 - RNA, 19 nt, Artificial Sequence
  Description of Artificial Sequence: Synthetic oligonucleotide
ucgcuguaggugaagagcu

SEQ ID NO: 1334411 - RNA, 19 nt, Artificial Sequence
  Description of Artificial Sequence: Synthetic oligonucleotide
cacacaucagacuggcggg

SEQ ID NO: 1334412 - RNA, 19 nt, Artificial Sequence
  Description of Artificial Sequence: Synthetic oligonucleotide
ucaauugcuccuagguaga

SEQ ID NO: 1334413 - RNA, 19 nt, Artificial Sequence
  Description of Artificial Sequence: Synthetic oligonucleotide
acuugucggcuuccaagcc

SEQ ID NO: 1334414 - RNA, 19 nt, Artificial Sequence
  Description of Artificial Sequence: Synthetic oligonucleotide
cugagaggagcucauaauc

SEQ ID NO: 1334415 - RNA, 19 nt, Artificial Sequence
  Description of Artificial Sequence: Synthetic oligonucleotide
uaguugagggcauaggcua

SEQ ID NO: 1334416 - RNA, 19 nt, Artificial Sequence
  Description of Artificial Sequence: Synthetic oligonucleotide
agggguccuguauuguccc

SEQ ID NO: 1334417 - RNA, 19 nt, Artificial Sequence
  Description of Artificial Sequence: Synthetic oligonucleotide
cuagguagacaaauuccug

SEQ ID NO: 1334418 - RNA, 19 nt, Artificial Sequence
  Description of Artificial Sequence: Synthetic oligonucleotide
augcacugcgcgaugagcc

SEQ ID NO: 1334419 - RNA, 19 nt, Artificial Sequence
  Description of Artificial Sequence: Synthetic oligonucleotide
augaggccgguugaggucc

SEQ ID NO: 1334420 - RNA, 19 nt, Artificial Sequence
  Description of Artificial Sequence: Synthetic oligonucleotide
ugucaauugcuccuaggua

SEQ ID NO: 1334421 - RNA, 19 nt, Artificial Sequence
  Description of Artificial Sequence: Synthetic oligonucleotide
cacuugucggcuuccaagc

SEQ ID NO: 1334422 - RNA, 19 nt, Artificial Sequence
  Description of Artificial Sequence: Synthetic oligonucleotide
guaguaguccuuuccgagc

SEQ ID NO: 1334423 - RNA, 19 nt, Artificial Sequence
  Description of Artificial Sequence: Synthetic oligonucleotide
ugccucuccucaaagauuu

SEQ ID NO: 1334424 - RNA, 19 nt, Artificial Sequence
  Description of Artificial Sequence: Synthetic oligonucleotide
cuguauuguccccuagagg

SEQ ID NO: 1334425 - RNA, 19 nt, Artificial Sequence
  Description of Artificial Sequence: Synthetic oligonucleotide
uccagcgaggugaugugcc

SEQ ID NO: 1334426 - RNA, 19 nt, Artificial Sequence
  Description of Artificial Sequence: Synthetic oligonucleotide
gacuccccgguauuugacg

SEQ ID NO: 1334427 - RNA, 19 nt, Artificial Sequence
  Description of Artificial Sequence: Synthetic oligonucleotide
uuuccgagcggcagcagcu

SEQ ID NO: 1334428 - RNA, 19 nt, Artificial Sequence
  Description of Artificial Sequence: Synthetic oligonucleotide
agguacaugucaauugcuc

SEQ ID NO: 1334429 - RNA, 19 nt, Artificial Sequence
  Description of Artificial Sequence: Synthetic oligonucleotide
uccuguauuguccccuaga

SEQ ID NO: 1334430 - RNA, 19 nt, Artificial Sequence
  Description of Artificial Sequence: Synthetic oligonucleotide
gaggugaugugccuggguc

SEQ ID NO: 1334431 - RNA, 19 nt, Artificial Sequence
  Description of Artificial Sequence: Synthetic oligonucleotide
cuccuagguagacaaauuc

SEQ ID NO: 1334432 - RNA, 19 nt, Artificial Sequence
  Description of Artificial Sequence: Synthetic oligonucleotide
uuugacgaugaagucgcug

SEQ ID NO: 1334433 - RNA, 19 nt, Artificial Sequence
  Description of Artificial Sequence: Synthetic oligonucleotide
ucugagaggagcucauaau

SEQ ID NO: 1334434 - RNA, 19 nt, Artificial Sequence
  Description of Artificial Sequence: Synthetic oligonucleotide
ucguacagcaccacgccaa

SEQ ID NO: 1334435 - RNA, 19 nt, Artificial Sequence
  Description of Artificial Sequence: Synthetic oligonucleotide
caaauaguugagggcauag

SEQ ID NO: 1334436 - RNA, 19 nt, Artificial Sequence
  Description of Artificial Sequence: Synthetic oligonucleotide
guacuuaaggugccucucc

SEQ ID NO: 1334437 - RNA, 19 nt, Artificial Sequence
  Description of Artificial Sequence: Synthetic oligonucleotide
uuccaagccaagcguccgg

SEQ ID NO: 1334438 - RNA, 19 nt, Artificial Sequence
  Description of Artificial Sequence: Synthetic oligonucleotide
auaguugagggcauaggcu

SEQ ID NO: 1334439 - RNA, 19 nt, Artificial Sequence
  Description of Artificial Sequence: Synthetic oligonucleotide
auguacuuaaggugccucu

SEQ ID NO: 1334440 - RNA, 19 nt, Artificial Sequence
  Description of Artificial Sequence: Synthetic oligonucleotide
aaagguggacucccaucca

SEQ ID NO: 1334441 - RNA, 19 nt, Artificial Sequence
  Description of Artificial Sequence: Synthetic oligonucleotide
uguagcugcuucaccgcca

SEQ ID NO: 1334442 - RNA, 19 nt, Artificial Sequence
  Description of Artificial Sequence: Synthetic oligonucleotide
acgaugaagucgcugugca

SEQ ID NO: 1334443 - RNA, 19 nt, Artificial Sequence
  Description of Artificial Sequence: Synthetic oligonucleotide
guaaugaggccgguugagg

SEQ ID NO: 1334444 - RNA, 19 nt, Artificial Sequence
  Description of Artificial Sequence: Synthetic oligonucleotide
aucucggggacgucaggcg

SEQ ID NO: 1334445 - RNA, 19 nt, Artificial Sequence
  Description of Artificial Sequence: Synthetic oligonucleotide
aauugcuccuagguagaca

SEQ ID NO: 1334446 - RNA, 19 nt, Artificial Sequence
  Description of Artificial Sequence: Synthetic oligonucleotide
ugcgcaggaacucggcaga

SEQ ID NO: 1334447 - RNA, 19 nt, Artificial Sequence
  Description of Artificial Sequence: Synthetic oligonucleotide
guaggccaugcacugcgcg

SEQ ID NO: 1334448 - RNA, 19 nt, Artificial Sequence
  Description of Artificial Sequence: Synthetic oligonucleotide
ucguagaacuucagcuucu

SEQ ID NO: 1334449 - RNA, 19 nt, Artificial Sequence
  Description of Artificial Sequence: Synthetic oligonucleotide
cuuuccgagcggcagcagc

SEQ ID NO: 1334450 - RNA, 19 nt, Artificial Sequence
  Description of Artificial Sequence: Synthetic oligonucleotide
auguaaugaggccgguuga

SEQ ID NO: 1334451 - RNA, 19 nt, Artificial Sequence
  Description of Artificial Sequence: Synthetic oligonucleotide
augcgccucgcucuccacc

SEQ ID NO: 1334452 - RNA, 19 nt, Artificial Sequence
  Description of Artificial Sequence: Synthetic oligonucleotide
uguacuuaaggugccucuc

SEQ ID NO: 1334453 - RNA, 19 nt, Artificial Sequence
  Description of Artificial Sequence: Synthetic oligonucleotide
uugucggcuuccaagccaa

SEQ ID NO: 1334454 - RNA, 19 nt, Artificial Sequence
  Description of Artificial Sequence: Synthetic oligonucleotide
cacguugccgugagggagg

SEQ ID NO: 1334455 - RNA, 19 nt, Artificial Sequence
  Description of Artificial Sequence: Synthetic oligonucleotide
uccaagccaagcguccggg

SEQ ID NO: 1334456 - RNA, 19 nt, Artificial Sequence
  Description of Artificial Sequence: Synthetic oligonucleotide
cuucacaugcgccucgcuc

SEQ ID NO: 1334457 - RNA, 19 nt, Artificial Sequence
  Description of Artificial Sequence: Synthetic oligonucleotide
uugucggacaaggauucug

SEQ ID NO: 1334458 - RNA, 19 nt, Artificial Sequence
  Description of Artificial Sequence: Synthetic oligonucleotide
gucggacaaggauucuggg

SEQ ID NO: 1334459 - RNA, 19 nt, Artificial Sequence
  Description of Artificial Sequence: Synthetic oligonucleotide
ucccgugagggauggcacg

SEQ ID NO: 1334460 - RNA, 19 nt, Artificial Sequence
  Description of Artificial Sequence: Synthetic oligonucleotide
gauguacuuaaggugccuc

SEQ ID NO: 1334461 - RNA, 19 nt, Artificial Sequence
  Description of Artificial Sequence: Synthetic oligonucleotide
uaaggugccucuccucaaa

SEQ ID NO: 1334462 - RNA, 19 nt, Artificial Sequence
  Description of Artificial Sequence: Synthetic oligonucleotide
ugcuccuagguagacaaau

SEQ ID NO: 1334463 - RNA, 19 nt, Artificial Sequence
  Description of Artificial Sequence: Synthetic oligonucleotide
acgcucagggcccagcaug

SEQ ID NO: 1334464 - RNA, 19 nt, Artificial Sequence
  Description of Artificial Sequence: Synthetic oligonucleotide
acguaguaguccuuuccga

SEQ ID NO: 1334465 - RNA, 19 nt, Artificial Sequence
  Description of Artificial Sequence: Synthetic oligonucleotide
ggggcguaccagaagaugg

SEQ ID NO: 1334466 - RNA, 19 nt, Artificial Sequence
  Description of Artificial Sequence: Synthetic oligonucleotide
cuuggcgggcuccagcgag

SEQ ID NO: 1334467 - RNA, 19 nt, Artificial Sequence
  Description of Artificial Sequence: Synthetic oligonucleotide
uucuggggcguaccagaag

SEQ ID NO: 1334468 - RNA, 19 nt, Artificial Sequence
  Description of Artificial Sequence: Synthetic oligonucleotide
guccgcgaucuucacaugc

SEQ ID NO: 1334469 - RNA, 19 nt, Artificial Sequence
  Description of Artificial Sequence: Synthetic oligonucleotide
gguauuugacgaugaaguc

SEQ ID NO: 1334470 - RNA, 19 nt, Artificial Sequence
  Description of Artificial Sequence: Synthetic oligonucleotide
uauuguccccuagaggguc

SEQ ID NO: 1334471 - RNA, 19 nt, Artificial Sequence
  Description of Artificial Sequence: Synthetic oligonucleotide
aggagcucauaaucugaug

SEQ ID NO: 1334472 - RNA, 19 nt, Artificial Sequence
  Description of Artificial Sequence: Synthetic oligonucleotide
cagagcguccagcugcggg

SEQ ID NO: 1334473 - RNA, 19 nt, Artificial Sequence
  Description of Artificial Sequence: Synthetic oligonucleotide
cucaucucggggacgucag

SEQ ID NO: 1334474 - RNA, 19 nt, Artificial Sequence
  Description of Artificial Sequence: Synthetic oligonucleotide
agcucauaaucugauguaa

SEQ ID NO: 1334475 - RNA, 19 nt, Artificial Sequence
  Description of Artificial Sequence: Synthetic oligonucleotide
ucucggggacgucaggcgu

SEQ ID NO: 1334476 - RNA, 19 nt, Artificial Sequence
  Description of Artificial Sequence: Synthetic oligonucleotide
ugcacugcgcgaugagccc

SEQ ID NO: 1334477 - RNA, 19 nt, Artificial Sequence
  Description of Artificial Sequence: Synthetic oligonucleotide
gcaggcguagagcugggcg

SEQ ID NO: 1334478 - RNA, 19 nt, Artificial Sequence
  Description of Artificial Sequence: Synthetic oligonucleotide
ugaaaaccucccacacggu

SEQ ID NO: 1334479 - RNA, 19 nt, Artificial Sequence
  Description of Artificial Sequence: Synthetic oligonucleotide
uaggccaugcacugcgcga

SEQ ID NO: 1334480 - RNA, 19 nt, Artificial Sequence
  Description of Artificial Sequence: Synthetic oligonucleotide
ccuguauuguccccuagag

SEQ ID NO: 1334481 - RNA, 19 nt, Artificial Sequence
  Description of Artificial Sequence: Synthetic oligonucleotide
ggagcucauaaucugaugu

SEQ ID NO: 1334482 - RNA, 19 nt, Artificial Sequence
  Description of Artificial Sequence: Synthetic oligonucleotide
cucuugucgcuguagguga

SEQ ID NO: 1334483 - RNA, 19 nt, Artificial Sequence
  Description of Artificial Sequence: Synthetic oligonucleotide
aggcuagcugcuugaucac

SEQ ID NO: 1334484 - RNA, 19 nt, Artificial Sequence
  Description of Artificial Sequence: Synthetic oligonucleotide
uuaaggugccucuccucaa

SEQ ID NO: 1334485 - RNA, 19 nt, Artificial Sequence
  Description of Artificial Sequence: Synthetic oligonucleotide
uugcgcagguacaugucaa

SEQ ID NO: 1334486 - RNA, 19 nt, Artificial Sequence
  Description of Artificial Sequence: Synthetic oligonucleotide
gcucuggcgacccggaccg

SEQ ID NO: 1334487 - RNA, 19 nt, Artificial Sequence
  Description of Artificial Sequence: Synthetic oligonucleotide
guccccuagagggucauag

SEQ ID NO: 1334488 - RNA, 19 nt, Artificial Sequence
  Description of Artificial Sequence: Synthetic oligonucleotide
cacagagcguccagcugcg

SEQ ID NO: 1334489 - RNA, 19 nt, Artificial Sequence
  Description of Artificial Sequence: Synthetic oligonucleotide
cagguggccacgcuugcgc

SEQ ID NO: 1334490 - RNA, 19 nt, Artificial Sequence
  Description of Artificial Sequence: Synthetic oligonucleotide
gcuauccagggcuuccacg

SEQ ID NO: 1334491 - RNA, 19 nt, Artificial Sequence
  Description of Artificial Sequence: Synthetic oligonucleotide
uuccgcgcugacacguugc

SEQ ID NO: 1334492 - RNA, 19 nt, Artificial Sequence
  Description of Artificial Sequence: Synthetic oligonucleotide
uuggcgggcuccagcgagg

SEQ ID NO: 1334493 - RNA, 19 nt, Artificial Sequence
  Description of Artificial Sequence: Synthetic oligonucleotide
ugagcauuucuaggcucag

SEQ ID NO: 1334494 - RNA, 19 nt, Artificial Sequence
  Description of Artificial Sequence: Synthetic oligonucleotide
ugacuccccgguauuugac

SEQ ID NO: 1334495 - RNA, 19 nt, Artificial Sequence
  Description of Artificial Sequence: Synthetic oligonucleotide
uagagcugggcgccacugc

SEQ ID NO: 1334496 - RNA, 19 nt, Artificial Sequence
  Description of Artificial Sequence: Synthetic oligonucleotide
gagcucauaaucugaugua

SEQ ID NO: 1334497 - RNA, 19 nt, Artificial Sequence
  Description of Artificial Sequence: Synthetic oligonucleotide
augaaagguggacucccau

SEQ ID NO: 1334498 - RNA, 19 nt, Artificial Sequence
  Description of Artificial Sequence: Synthetic oligonucleotide
agcucuugucgcuguaggu

SEQ ID NO: 1334499 - RNA, 19 nt, Artificial Sequence
  Description of Artificial Sequence: Synthetic oligonucleotide
gguagacaaauuccugcac

SEQ ID NO: 1334500 - RNA, 19 nt, Artificial Sequence
  Description of Artificial Sequence: Synthetic oligonucleotide
ugugcaggcgcgcgcggug

SEQ ID NO: 1334501 - RNA, 19 nt, Artificial Sequence
  Description of Artificial Sequence: Synthetic oligonucleotide
gaacucggcagaagggcug

SEQ ID NO: 1334502 - RNA, 19 nt, Artificial Sequence
  Description of Artificial Sequence: Synthetic oligonucleotide
cacgcugccgaaguugccc

SEQ ID NO: 1334503 - RNA, 19 nt, Artificial Sequence
  Description of Artificial Sequence: Synthetic oligonucleotide
aggggauccugucggugag

SEQ ID NO: 1334504 - RNA, 19 nt, Artificial Sequence
  Description of Artificial Sequence: Synthetic oligonucleotide
cuugcgcagguacauguca

SEQ ID NO: 1334505 - RNA, 19 nt, Artificial Sequence
  Description of Artificial Sequence: Synthetic oligonucleotide
uccgcgcugacacguugcc

SEQ ID NO: 1334506 - RNA, 19 nt, Artificial Sequence
  Description of Artificial Sequence: Synthetic oligonucleotide
aggccggccggucuugcgg

SEQ ID NO: 1334507 - RNA, 19 nt, Artificial Sequence
  Description of Artificial Sequence: Synthetic oligonucleotide
aaagccccacuugucggcu

SEQ ID NO: 1334508 - RNA, 19 nt, Artificial Sequence
  Description of Artificial Sequence: Synthetic oligonucleotide
ugcuauccagggcuuccac

SEQ ID NO: 1334509 - RNA, 19 nt, Artificial Sequence
  Description of Artificial Sequence: Synthetic oligonucleotide
auguugucggacaaggauu

SEQ ID NO: 1334510 - RNA, 19 nt, Artificial Sequence
  Description of Artificial Sequence: Synthetic oligonucleotide
gcuccguccacuuggggcc

SEQ ID NO: 1334511 - RNA, 19 nt, Artificial Sequence
  Description of Artificial Sequence: Synthetic oligonucleotide
cccuagagggucauagcgg

SEQ ID NO: 1334512 - RNA, 19 nt, Artificial Sequence
  Description of Artificial Sequence: Synthetic oligonucleotide
uggggcguaccagaagaug

SEQ ID NO: 1334513 - RNA, 19 nt, Artificial Sequence
  Description of Artificial Sequence: Synthetic oligonucleotide
cuugucggcuuccaagcca

SEQ ID NO: 1334514 - RNA, 19 nt, Artificial Sequence
  Description of Artificial Sequence: Synthetic oligonucleotide
cacagcucaucucggggac

SEQ ID NO: 1334515 - RNA, 19 nt, Artificial Sequence
  Description of Artificial Sequence: Synthetic oligonucleotide
guccguaggccaugcacug

SEQ ID NO: 1334516 - RNA, 19 nt, Artificial Sequence
  Description of Artificial Sequence: Synthetic oligonucleotide
cacccaggggauccugucg

SEQ ID NO: 1334517 - RNA, 19 nt, Artificial Sequence
  Description of Artificial Sequence: Synthetic oligonucleotide
aguugagggcauaggcuag

SEQ ID NO: 1334518 - RNA, 19 nt, Artificial Sequence
  Description of Artificial Sequence: Synthetic oligonucleotide
uccccgguauuugacgaug

SEQ ID NO: 1334519 - RNA, 19 nt, Artificial Sequence
  Description of Artificial Sequence: Synthetic oligonucleotide
ucuugucgcuguaggugaa

SEQ ID NO: 1334520 - RNA, 19 nt, Artificial Sequence
  Description of Artificial Sequence: Synthetic oligonucleotide
gaugaaagguggacuccca

SEQ ID NO: 1334521 - RNA, 19 nt, Artificial Sequence
  Description of Artificial Sequence: Synthetic oligonucleotide
caagcguccgggcuuccug

SEQ ID NO: 1334522 - RNA, 19 nt, Artificial Sequence
  Description of Artificial Sequence: Synthetic oligonucleotide
ggucuugcgggcugggagc

SEQ ID NO: 1334523 - RNA, 19 nt, Artificial Sequence
  Description of Artificial Sequence: Synthetic oligonucleotide
agacuggcgggagaagaug

SEQ ID NO: 1334524 - RNA, 19 nt, Artificial Sequence
  Description of Artificial Sequence: Synthetic oligonucleotide
caguuugaugaaaggugga

SEQ ID NO: 1334525 - RNA, 19 nt, Artificial Sequence
  Description of Artificial Sequence: Synthetic oligonucleotide
ggcgccacugcacagcuca

SEQ ID NO: 1334526 - RNA, 19 nt, Artificial Sequence
  Description of Artificial Sequence: Synthetic oligonucleotide
ucugucccggcucgcggac

SEQ ID NO: 1334527 - RNA, 19 nt, Artificial Sequence
  Description of Artificial Sequence: Synthetic oligonucleotide
ugcgcagguacaugucaau

SEQ ID NO: 1334528 - RNA, 19 nt, Artificial Sequence
  Description of Artificial Sequence: Synthetic oligonucleotide
gcgggagaagauguugucg

SEQ ID NO: 1334529 - RNA, 19 nt, Artificial Sequence
  Description of Artificial Sequence: Synthetic oligonucleotide
cuggcgggagaagauguug

SEQ ID NO: 1334530 - RNA, 19 nt, Artificial Sequence
  Description of Artificial Sequence: Synthetic oligonucleotide
caccagggguccuguauug

SEQ ID NO: 1334531 - RNA, 19 nt, Artificial Sequence
  Description of Artificial Sequence: Synthetic oligonucleotide
cugucggugagcauuucua

SEQ ID NO: 1334532 - RNA, 19 nt, Artificial Sequence
  Description of Artificial Sequence: Synthetic oligonucleotide
acaugcgccucgcucucca

SEQ ID NO: 1334533 - RNA, 19 nt, Artificial Sequence
  Description of Artificial Sequence: Synthetic oligonucleotide
cucgcggaccacguaguag

SEQ ID NO: 1334534 - RNA, 19 nt, Artificial Sequence
  Description of Artificial Sequence: Synthetic oligonucleotide
acagcucaucucggggacg

SEQ ID NO: 1334535 - RNA, 19 nt, Artificial Sequence
  Description of Artificial Sequence: Synthetic oligonucleotide
cacugcgcgaugagcccgg

SEQ ID NO: 1334536 - RNA, 19 nt, Artificial Sequence
  Description of Artificial Sequence: Synthetic oligonucleotide
cuggcgacccggaccguag

SEQ ID NO: 1334537 - RNA, 19 nt, Artificial Sequence
  Description of Artificial Sequence: Synthetic oligonucleotide
ugauguaaugaggccgguu

SEQ ID NO: 1334538 - RNA, 19 nt, Artificial Sequence
  Description of Artificial Sequence: Synthetic oligonucleotide
guugccgugagggaggccu

SEQ ID NO: 1334539 - RNA, 19 nt, Artificial Sequence
  Description of Artificial Sequence: Synthetic oligonucleotide
acgucaggcgugccgggug

SEQ ID NO: 1334540 - RNA, 19 nt, Artificial Sequence
  Description of Artificial Sequence: Synthetic oligonucleotide
gauccugucggugagcauu

SEQ ID NO: 1334541 - RNA, 19 nt, Artificial Sequence
  Description of Artificial Sequence: Synthetic oligonucleotide
gcugacacguugccgugag

SEQ ID NO: 1334542 - RNA, 19 nt, Artificial Sequence
  Description of Artificial Sequence: Synthetic oligonucleotide
cuugucgcuguaggugaag

SEQ ID NO: 1334543 - RNA, 19 nt, Artificial Sequence
  Description of Artificial Sequence: Synthetic oligonucleotide
gggacgucaggcgugccgg

SEQ ID NO: 1334544 - RNA, 19 nt, Artificial Sequence
  Description of Artificial Sequence: Synthetic oligonucleotide
cacggaaggagggccgccg

SEQ ID NO: 1334545 - RNA, 19 nt, Artificial Sequence
  Description of Artificial Sequence: Synthetic oligonucleotide
cucggggacgucaggcgug

SEQ ID NO: 1334546 - RNA, 19 nt, Artificial Sequence
  Description of Artificial Sequence: Synthetic oligonucleotide
ggguccguaggccaugcac

SEQ ID NO: 1334547 - RNA, 19 nt, Artificial Sequence
  Description of Artificial Sequence: Synthetic oligonucleotide
cggcccaucacgcucaggg

SEQ ID NO: 1334548 - RNA, 19 nt, Artificial Sequence
  Description of Artificial Sequence: Synthetic oligonucleotide
gcauuucuaggcucagcac

SEQ ID NO: 1334549 - RNA, 19 nt, Artificial Sequence
  Description of Artificial Sequence: Synthetic oligonucleotide
ggcguaccagaagaugggg

SEQ ID NO: 1334550 - RNA, 19 nt, Artificial Sequence
  Description of Artificial Sequence: Synthetic oligonucleotide
ggcucuggcgacccggacc

SEQ ID NO: 1334551 - RNA, 19 nt, Artificial Sequence
  Description of Artificial Sequence: Synthetic oligonucleotide
ggggacgucaggcgugccg

SEQ ID NO: 1334552 - RNA, 19 nt, Artificial Sequence
  Description of Artificial Sequence: Synthetic oligonucleotide
ugucggcuuccaagccaag

SEQ ID NO: 1334553 - RNA, 19 nt, Artificial Sequence
  Description of Artificial Sequence: Synthetic oligonucleotide
cuuccgcgcugacacguug

SEQ ID NO: 1334554 - RNA, 19 nt, Artificial Sequence
  Description of Artificial Sequence: Synthetic oligonucleotide
guccuguauuguccccuag

SEQ ID NO: 1334555 - RNA, 19 nt, Artificial Sequence
  Description of Artificial Sequence: Synthetic oligonucleotide
ccgguauuugacgaugaag

SEQ ID NO: 1334556 - RNA, 19 nt, Artificial Sequence
  Description of Artificial Sequence: Synthetic oligonucleotide
uccacgccacagagcgucc

SEQ ID NO: 1334557 - RNA, 19 nt, Artificial Sequence
  Description of Artificial Sequence: Synthetic oligonucleotide
acgcugccgaaguugcccu

SEQ ID NO: 1334558 - RNA, 19 nt, Artificial Sequence
  Description of Artificial Sequence: Synthetic oligonucleotide
agauguugucggacaagga

SEQ ID NO: 1334559 - RNA, 19 nt, Artificial Sequence
  Description of Artificial Sequence: Synthetic oligonucleotide
ggcgccaaagccccacuug

SEQ ID NO: 1334560 - RNA, 19 nt, Artificial Sequence
  Description of Artificial Sequence: Synthetic oligonucleotide
ccuagguagacaaauuccu

SEQ ID NO: 1334561 - RNA, 19 nt, Artificial Sequence
  Description of Artificial Sequence: Synthetic oligonucleotide
gggcguaccagaagauggg

SEQ ID NO: 1334562 - RNA, 19 nt, Artificial Sequence
  Description of Artificial Sequence: Synthetic oligonucleotide
caaggauucuggggcguac

SEQ ID NO: 1334563 - RNA, 19 nt, Artificial Sequence
  Description of Artificial Sequence: Synthetic oligonucleotide
cgguauuugacgaugaagu

SEQ ID NO: 1334564 - RNA, 19 nt, Artificial Sequence
  Description of Artificial Sequence: Synthetic oligonucleotide
uuucuaggcucagcaccgu

SEQ ID NO: 1334565 - RNA, 19 nt, Artificial Sequence
  Description of Artificial Sequence: Synthetic oligonucleotide
accuuccgcgcugacacgu

SEQ ID NO: 1334566 - RNA, 19 nt, Artificial Sequence
  Description of Artificial Sequence: Synthetic oligonucleotide
cugaaccuccauggggcag

SEQ ID NO: 1334567 - RNA, 19 nt, Artificial Sequence
  Description of Artificial Sequence: Synthetic oligonucleotide
cauccccucgcgagccagg

SEQ ID NO: 1334568 - RNA, 19 nt, Artificial Sequence
  Description of Artificial Sequence: Synthetic oligonucleotide
cuccagcgaggugaugugc

SEQ ID NO: 1334569 - RNA, 19 nt, Artificial Sequence
  Description of Artificial Sequence: Synthetic oligonucleotide
cacgccacagagcguccag

SEQ ID NO: 1334570 - RNA, 19 nt, Artificial Sequence
  Description of Artificial Sequence: Synthetic oligonucleotide
aucagacuggcgggagaag

SEQ ID NO: 1334571 - RNA, 19 nt, Artificial Sequence
  Description of Artificial Sequence: Synthetic oligonucleotide
agccaagcguccgggcuuc

SEQ ID NO: 1334572 - RNA, 19 nt, Artificial Sequence
  Description of Artificial Sequence: Synthetic oligonucleotide
cucguacagcaccacgcca

SEQ ID NO: 1334573 - RNA, 19 nt, Artificial Sequence
  Description of Artificial Sequence: Synthetic oligonucleotide
agguggccacgcuugcgca

SEQ ID NO: 1334574 - RNA, 19 nt, Artificial Sequence
  Description of Artificial Sequence: Synthetic oligonucleotide
uugcuccuagguagacaaa

SEQ ID NO: 1334575 - RNA, 19 nt, Artificial Sequence
  Description of Artificial Sequence: Synthetic oligonucleotide
cugacacguugccgugagg

SEQ ID NO: 1334576 - RNA, 19 nt, Artificial Sequence
  Description of Artificial Sequence: Synthetic oligonucleotide
uggcgacccggaccguagc

SEQ ID NO: 1334577 - RNA, 19 nt, Artificial Sequence
  Description of Artificial Sequence: Synthetic oligonucleotide
aguccgcgaucuucacaug

SEQ ID NO: 1334578 - RNA, 19 nt, Artificial Sequence
  Description of Artificial Sequence: Synthetic oligonucleotide
ugaggccgguugagguccc

SEQ ID NO: 1334579 - RNA, 19 nt, Artificial Sequence
  Description of Artificial Sequence: Synthetic oligonucleotide
gcagccgcugggcagguac

SEQ ID NO: 1334580 - RNA, 19 nt, Artificial Sequence
  Description of Artificial Sequence: Synthetic oligonucleotide
ugaaggccggccggucuug

SEQ ID NO: 1334581 - RNA, 19 nt, Artificial Sequence
  Description of Artificial Sequence: Synthetic oligonucleotide
gcagagagauguacuuaag

SEQ ID NO: 1334582 - RNA, 19 nt, Artificial Sequence
  Description of Artificial Sequence: Synthetic oligonucleotide
ucggggacgucaggcgugc

SEQ ID NO: 1334583 - RNA, 19 nt, Artificial Sequence
  Description of Artificial Sequence: Synthetic oligonucleotide
gccacgcuugcgcagguac

SEQ ID NO: 1334584 - RNA, 19 nt, Artificial Sequence
  Description of Artificial Sequence: Synthetic oligonucleotide
caucagacuggcgggagaa

SEQ ID NO: 1334585 - RNA, 19 nt, Artificial Sequence
  Description of Artificial Sequence: Synthetic oligonucleotide
gacuggcgggagaagaugu

SEQ ID NO: 1334586 - RNA, 19 nt, Artificial Sequence
  Description of Artificial Sequence: Synthetic oligonucleotide
ggcgaggccgaaguccgcg

SEQ ID NO: 1334587 - RNA, 19 nt, Artificial Sequence
  Description of Artificial Sequence: Synthetic oligonucleotide
caccuuccgcgcugacacg

SEQ ID NO: 1334588 - RNA, 19 nt, Artificial Sequence
  Description of Artificial Sequence: Synthetic oligonucleotide
gcucugucccggcucgcgg

SEQ ID NO: 1334589 - RNA, 19 nt, Artificial Sequence
  Description of Artificial Sequence: Synthetic oligonucleotide
agcguccagcugcgggcuc

SEQ ID NO: 1334590 - RNA, 19 nt, Artificial Sequence
  Description of Artificial Sequence: Synthetic oligonucleotide
cgcgaucuucacaugcgcc

SEQ ID NO: 1334591 - RNA, 19 nt, Artificial Sequence
  Description of Artificial Sequence: Synthetic oligonucleotide
gucccgugagggauggcac

SEQ ID NO: 1334592 - RNA, 19 nt, Artificial Sequence
  Description of Artificial Sequence: Synthetic oligonucleotide
ucuggcgacccggaccgua

SEQ ID NO: 1334593 - RNA, 19 nt, Artificial Sequence
  Description of Artificial Sequence: Synthetic oligonucleotide
ggucccgugagggauggca

SEQ ID NO: 1334594 - RNA, 19 nt, Artificial Sequence
  Description of Artificial Sequence: Synthetic oligonucleotide
ccgguugaggucccgugag

SEQ ID NO: 1334595 - RNA, 19 nt, Artificial Sequence
  Description of Artificial Sequence: Synthetic oligonucleotide
cucugucccggcucgcgga

SEQ ID NO: 1334596 - RNA, 19 nt, Artificial Sequence
  Description of Artificial Sequence: Synthetic oligonucleotide
acugcgcgaugagcccggc

SEQ ID NO: 1334597 - RNA, 19 nt, Artificial Sequence
  Description of Artificial Sequence: Synthetic oligonucleotide
cagcuccguccacuugggg

SEQ ID NO: 1334598 - RNA, 19 nt, Artificial Sequence
  Description of Artificial Sequence: Synthetic oligonucleotide
ggccggccggucuugcggg

SEQ ID NO: 1334599 - RNA, 19 nt, Artificial Sequence
  Description of Artificial Sequence: Synthetic oligonucleotide
gcuccagcgaggugaugug

SEQ ID NO: 1334600 - RNA, 19 nt, Artificial Sequence
  Description of Artificial Sequence: Synthetic oligonucleotide
ccagggguccuguauuguc

SEQ ID NO: 1334601 - RNA, 19 nt, Artificial Sequence
  Description of Artificial Sequence: Synthetic oligonucleotide
ccgagcggcagcagcuugg

SEQ ID NO: 1334602 - RNA, 19 nt, Artificial Sequence
  Description of Artificial Sequence: Synthetic oligonucleotide
ccagcuccguccacuuggg

SEQ ID NO: 1334603 - RNA, 19 nt, Artificial Sequence
  Description of Artificial Sequence: Synthetic oligonucleotide
gccacugcacagcucaucu

SEQ ID NO: 1334604 - RNA, 19 nt, Artificial Sequence
  Description of Artificial Sequence: Synthetic oligonucleotide
gaaggccggccggucuugc

SEQ ID NO: 1334605 - RNA, 19 nt, Artificial Sequence
  Description of Artificial Sequence: Synthetic oligonucleotide
gcacugcgcgaugagcccg

SEQ ID NO: 1334606 - RNA, 19 nt, Artificial Sequence
  Description of Artificial Sequence: Synthetic oligonucleotide
ggcuuccaagccaagcguc

SEQ ID NO: 1334607 - RNA, 19 nt, Artificial Sequence
  Description of Artificial Sequence: Synthetic oligonucleotide
caugcgccucgcucuccac

SEQ ID NO: 1334608 - RNA, 19 nt, Artificial Sequence
  Description of Artificial Sequence: Synthetic oligonucleotide
gacaaggauucuggggcgu

SEQ ID NO: 1334609 - RNA, 19 nt, Artificial Sequence
  Description of Artificial Sequence: Synthetic oligonucleotide
auuugacgaugaagucgcu

SEQ ID NO: 1334610 - RNA, 19 nt, Artificial Sequence
  Description of Artificial Sequence: Synthetic oligonucleotide
gggauccugucggugagca

SEQ ID NO: 1334611 - RNA, 19 nt, Artificial Sequence
  Description of Artificial Sequence: Synthetic oligonucleotide
ccgcgaucuucacaugcgc

SEQ ID NO: 1334612 - RNA, 19 nt, Artificial Sequence
  Description of Artificial Sequence: Synthetic oligonucleotide
ggacgucaggcgugccggg

SEQ ID NO: 1334613 - RNA, 19 nt, Artificial Sequence
  Description of Artificial Sequence: Synthetic oligonucleotide
cggaccguagcugacuccc

SEQ ID NO: 1334614 - RNA, 19 nt, Artificial Sequence
  Description of Artificial Sequence: Synthetic oligonucleotide
ggccgguugaggucccgug

SEQ ID NO: 1334615 - RNA, 19 nt, Artificial Sequence
  Description of Artificial Sequence: Synthetic oligonucleotide
ggcucugucccggcucgcg

SEQ ID NO: 1334616 - RNA, 19 nt, Artificial Sequence
  Description of Artificial Sequence: Synthetic oligonucleotide
acgcuugcgcagguacaug

SEQ ID NO: 1334617 - RNA, 19 nt, Artificial Sequence
  Description of Artificial Sequence: Synthetic oligonucleotide
gcagaucugccaggcaaac

SEQ ID NO: 1334618 - RNA, 19 nt, Artificial Sequence
  Description of Artificial Sequence: Synthetic oligonucleotide
uugccgugagggaggccuu

SEQ ID NO: 1334619 - RNA, 19 nt, Artificial Sequence
  Description of Artificial Sequence: Synthetic oligonucleotide
acccggaccguagcugacu

SEQ ID NO: 1334620 - RNA, 19 nt, Artificial Sequence
  Description of Artificial Sequence: Synthetic oligonucleotide
gaggccgguugaggucccg

SEQ ID NO: 1334621 - RNA, 19 nt, Artificial Sequence
  Description of Artificial Sequence: Synthetic oligonucleotide
auccccucgcgagccagga

SEQ ID NO: 1334622 - RNA, 19 nt, Artificial Sequence
  Description of Artificial Sequence: Synthetic oligonucleotide
ggcuccagcgaggugaugu

SEQ ID NO: 1334623 - RNA, 19 nt, Artificial Sequence
  Description of Artificial Sequence: Synthetic oligonucleotide
auccugucggugagcauuu

SEQ ID NO: 1334624 - RNA, 19 nt, Artificial Sequence
  Description of Artificial Sequence: Synthetic oligonucleotide
gguccguaggccaugcacu

SEQ ID NO: 1334625 - RNA, 19 nt, Artificial Sequence
  Description of Artificial Sequence: Synthetic oligonucleotide
aggucgcggugcacacagc

SEQ ID NO: 1334626 - RNA, 19 nt, Artificial Sequence
  Description of Artificial Sequence: Synthetic oligonucleotide
gggguccuguauugucccc

SEQ ID NO: 1334627 - RNA, 19 nt, Artificial Sequence
  Description of Artificial Sequence: Synthetic oligonucleotide
agcugacuccccgguauuu

SEQ ID NO: 1334628 - RNA, 19 nt, Artificial Sequence
  Description of Artificial Sequence: Synthetic oligonucleotide
cacaugcgccucgcucucc

SEQ ID NO: 1334629 - RNA, 19 nt, Artificial Sequence
  Description of Artificial Sequence: Synthetic oligonucleotide
gcggcacagcuccacgcug

SEQ ID NO: 1334630 - RNA, 19 nt, Artificial Sequence
  Description of Artificial Sequence: Synthetic oligonucleotide
gcggcgcgcgcccagguac

SEQ ID NO: 1334631 - RNA, 19 nt, Artificial Sequence
  Description of Artificial Sequence: Synthetic oligonucleotide
ccgcugaaaaccucccaca

SEQ ID NO: 1334632 - RNA, 19 nt, Artificial Sequence
  Description of Artificial Sequence: Synthetic oligonucleotide
gaccacguaguaguccuuu

SEQ ID NO: 1334633 - RNA, 19 nt, Artificial Sequence
  Description of Artificial Sequence: Synthetic oligonucleotide
uuccgagcggcagcagcuu

SEQ ID NO: 1334634 - RNA, 19 nt, Artificial Sequence
  Description of Artificial Sequence: Synthetic oligonucleotide
gguggcgccaaagccccac

SEQ ID NO: 1334635 - RNA, 19 nt, Artificial Sequence
  Description of Artificial Sequence: Synthetic oligonucleotide
cccgcuggaagucccucug

SEQ ID NO: 1334636 - RNA, 19 nt, Artificial Sequence
  Description of Artificial Sequence: Synthetic oligonucleotide
gacccggaccguagcugac

SEQ ID NO: 1334637 - RNA, 19 nt, Artificial Sequence
  Description of Artificial Sequence: Synthetic oligonucleotide
ggaacucggcagaagggcu

SEQ ID NO: 1334638 - RNA, 19 nt, Artificial Sequence
  Description of Artificial Sequence: Synthetic oligonucleotide
gcgcgaugagcccggccag

SEQ ID NO: 1334639 - RNA, 19 nt, Artificial Sequence
  Description of Artificial Sequence: Synthetic oligonucleotide
cugucccggcucgcggacc

SEQ ID NO: 1334640 - RNA, 19 nt, Artificial Sequence
  Description of Artificial Sequence: Synthetic oligonucleotide
ggccuuuguccuccaaaua

SEQ ID NO: 1334641 - RNA, 19 nt, Artificial Sequence
  Description of Artificial Sequence: Synthetic oligonucleotide
aggucccgugagggauggc

SEQ ID NO: 1334642 - RNA, 19 nt, Artificial Sequence
  Description of Artificial Sequence: Synthetic oligonucleotide
gcgccaaagccccacuugu

SEQ ID NO: 1334643 - RNA, 19 nt, Artificial Sequence
  Description of Artificial Sequence: Synthetic oligonucleotide
gguccuguauuguccccua

SEQ ID NO: 1334644 - RNA, 19 nt, Artificial Sequence
  Description of Artificial Sequence: Synthetic oligonucleotide
aggccgguugaggucccgu

SEQ ID NO: 1334645 - RNA, 19 nt, Artificial Sequence
  Description of Artificial Sequence: Synthetic oligonucleotide
ggccgguagcugccccugg

SEQ ID NO: 1334646 - RNA, 19 nt, Artificial Sequence
  Description of Artificial Sequence: Synthetic oligonucleotide
gcgacccggaccguagcug

SEQ ID NO: 1334647 - RNA, 19 nt, Artificial Sequence
  Description of Artificial Sequence: Synthetic oligonucleotide
cuggcccgcugugcuguag

SEQ ID NO: 1334648 - RNA, 19 nt, Artificial Sequence
  Description of Artificial Sequence: Synthetic oligonucleotide
uccugucggugagcauuuc

SEQ ID NO: 1334649 - RNA, 19 nt, Artificial Sequence
  Description of Artificial Sequence: Synthetic oligonucleotide
gcgaggugaugugccuggg

SEQ ID NO: 1334650 - RNA, 19 nt, Artificial Sequence
  Description of Artificial Sequence: Synthetic oligonucleotide
gcgcugacacguugccgug

SEQ ID NO: 1334651 - RNA, 19 nt, Artificial Sequence
  Description of Artificial Sequence: Synthetic oligonucleotide
ccugaaccuccauggggca

SEQ ID NO: 1334652 - RNA, 19 nt, Artificial Sequence
  Description of Artificial Sequence: Synthetic oligonucleotide
cagggcgcugaaggccggc

SEQ ID NO: 1334653 - RNA, 19 nt, Artificial Sequence
  Description of Artificial Sequence: Synthetic oligonucleotide
cgguugaggucccgugagg

SEQ ID NO: 1334654 - RNA, 19 nt, Artificial Sequence
  Description of Artificial Sequence: Synthetic oligonucleotide
ccggaccguagcugacucc

SEQ ID NO: 1334655 - RNA, 19 nt, Artificial Sequence
  Description of Artificial Sequence: Synthetic oligonucleotide
cccggaccguagcugacuc

SEQ ID NO: 1334656 - RNA, 19 nt, Artificial Sequence
  Description of Artificial Sequence: Synthetic oligonucleotide
cguaggccaugcacugcgc

SEQ ID NO: 1334657 - RNA, 19 nt, Artificial Sequence
  Description of Artificial Sequence: Synthetic oligonucleotide
gucuggcccgcugugcugu

SEQ ID NO: 1334658 - RNA, 19 nt, Artificial Sequence
  Description of Artificial Sequence: Synthetic oligonucleotide
guugucggacaaggauucu

SEQ ID NO: 1334659 - RNA, 19 nt, Artificial Sequence
  Description of Artificial Sequence: Synthetic oligonucleotide
uguccccuagagggucaua

SEQ ID NO: 1334660 - RNA, 19 nt, Artificial Sequence
  Description of Artificial Sequence: Synthetic oligonucleotide
ggcaggcugcaggcggcgg

SEQ ID NO: 1334661 - RNA, 19 nt, Artificial Sequence
  Description of Artificial Sequence: Synthetic oligonucleotide
gccgcugggcagguacucc

SEQ ID NO: 1334662 - RNA, 19 nt, Artificial Sequence
  Description of Artificial Sequence: Synthetic oligonucleotide
gagcguccagcugcgggcu

SEQ ID NO: 1334663 - RNA, 19 nt, Artificial Sequence
  Description of Artificial Sequence: Synthetic oligonucleotide
ccacgcugccgaaguugcc

SEQ ID NO: 1334664 - RNA, 19 nt, Artificial Sequence
  Description of Artificial Sequence: Synthetic oligonucleotide
cagcucaucucggggacgu

SEQ ID NO: 1334665 - RNA, 19 nt, Artificial Sequence
  Description of Artificial Sequence: Synthetic oligonucleotide
gccggccgggguccguagg

SEQ ID NO: 1334666 - RNA, 19 nt, Artificial Sequence
  Description of Artificial Sequence: Synthetic oligonucleotide
cauaggcuagcugcuugau

SEQ ID NO: 1334667 - RNA, 19 nt, Artificial Sequence
  Description of Artificial Sequence: Synthetic oligonucleotide
ccggugugcaggcgcgcgc

SEQ ID NO: 1334668 - RNA, 19 nt, Artificial Sequence
  Description of Artificial Sequence: Synthetic oligonucleotide
ccccgguauuugacgauga

SEQ ID NO: 1334669 - RNA, 19 nt, Artificial Sequence
  Description of Artificial Sequence: Synthetic oligonucleotide
cuggggcguaccagaagau

SEQ ID NO: 1334670 - RNA, 19 nt, Artificial Sequence
  Description of Artificial Sequence: Synthetic oligonucleotide
ccacgcuugcgcagguaca

SEQ ID NO: 1334671 - RNA, 19 nt, Artificial Sequence
  Description of Artificial Sequence: Synthetic oligonucleotide
ggguccuguauuguccccu

SEQ ID NO: 1334672 - RNA, 19 nt, Artificial Sequence
  Description of Artificial Sequence: Synthetic oligonucleotide
ccauccccucgcgagccag

SEQ ID NO: 1334673 - RNA, 19 nt, Artificial Sequence
  Description of Artificial Sequence: Synthetic oligonucleotide
cugaaggccggccggucuu

SEQ ID NO: 1334674 - RNA, 19 nt, Artificial Sequence
  Description of Artificial Sequence: Synthetic oligonucleotide
gccgugagggaggccuuug

SEQ ID NO: 1334675 - RNA, 19 nt, Artificial Sequence
  Description of Artificial Sequence: Synthetic oligonucleotide
cgcgcugacacguugccgu

SEQ ID NO: 1334676 - RNA, 19 nt, Artificial Sequence
  Description of Artificial Sequence: Synthetic oligonucleotide
cggugcacacagcggcgcg

SEQ ID NO: 1334677 - RNA, 19 nt, Artificial Sequence
  Description of Artificial Sequence: Synthetic oligonucleotide
cggugugcaggcgcgcgcg

SEQ ID NO: 1334678 - RNA, 19 nt, Artificial Sequence
  Description of Artificial Sequence: Synthetic oligonucleotide
ccgcgcugacacguugccg

SEQ ID NO: 1334679 - RNA, 19 nt, Artificial Sequence
  Description of Artificial Sequence: Synthetic oligonucleotide
cugauguaaugaggccggu

SEQ ID NO: 1334680 - RNA, 19 nt, Artificial Sequence
  Description of Artificial Sequence: Synthetic oligonucleotide
cagcaccguggggcugacg

SEQ ID NO: 1334681 - RNA, 19 nt, Artificial Sequence
  Description of Artificial Sequence: Synthetic oligonucleotide
ggcugcuauccagggcuuc

SEQ ID NO: 1334682 - RNA, 19 nt, Artificial Sequence
  Description of Artificial Sequence: Synthetic oligonucleotide
cuccccgguauuugacgau

SEQ ID NO: 1334683 - RNA, 19 nt, Artificial Sequence
  Description of Artificial Sequence: Synthetic oligonucleotide
ccggguguugggucugaga

SEQ ID NO: 1334684 - RNA, 19 nt, Artificial Sequence
  Description of Artificial Sequence: Synthetic oligonucleotide
guggcgccaaagccccacu

SEQ ID NO: 1334685 - RNA, 19 nt, Artificial Sequence
  Description of Artificial Sequence: Synthetic oligonucleotide
ccugucggugagcauuucu

SEQ ID NO: 1334686 - RNA, 19 nt, Artificial Sequence
  Description of Artificial Sequence: Synthetic oligonucleotide
cgagcggcagcagcuuggc

SEQ ID NO: 1334687 - RNA, 19 nt, Artificial Sequence
  Description of Artificial Sequence: Synthetic oligonucleotide
ggcgacccggaccguagcu

SEQ ID NO: 1334688 - RNA, 19 nt, Artificial Sequence
  Description of Artificial Sequence: Synthetic oligonucleotide
cccgguauuugacgaugaa

SEQ ID NO: 1334689 - RNA, 19 nt, Artificial Sequence
  Description of Artificial Sequence: Synthetic oligonucleotide
gcuccuagguagacaaauu

SEQ ID NO: 1334690 - RNA, 19 nt, Artificial Sequence
  Description of Artificial Sequence: Synthetic oligonucleotide
cccauccauccccucgcga

SEQ ID NO: 1334691 - RNA, 19 nt, Artificial Sequence
  Description of Artificial Sequence: Synthetic oligonucleotide
gccggguguugggucugag

SEQ ID NO: 1334692 - RNA, 19 nt, Artificial Sequence
  Description of Artificial Sequence: Synthetic oligonucleotide
gcgccuugaggaucugaau

SEQ ID NO: 1334693 - RNA, 19 nt, Artificial Sequence
  Description of Artificial Sequence: Synthetic oligonucleotide
gggguccguaggccaugca

SEQ ID NO: 1334694 - RNA, 19 nt, Artificial Sequence
  Description of Artificial Sequence: Synthetic oligonucleotide
ggcguagagcugggcgcca

SEQ ID NO: 1334695 - RNA, 19 nt, Artificial Sequence
  Description of Artificial Sequence: Synthetic oligonucleotide
gcgcagguacaugucaauu

SEQ ID NO: 1334696 - RNA, 19 nt, Artificial Sequence
  Description of Artificial Sequence: Synthetic oligonucleotide
ggggccgguagcugccccu

SEQ ID NO: 1334697 - RNA, 19 nt, Artificial Sequence
  Description of Artificial Sequence: Synthetic oligonucleotide
cgcgcgcccagguacucca

SEQ ID NO: 1334698 - RNA, 19 nt, Artificial Sequence
  Description of Artificial Sequence: Synthetic oligonucleotide
gcgcgcgcccagguacucc

SEQ ID NO: 1334699 - RNA, 19 nt, Artificial Sequence
  Description of Artificial Sequence: Synthetic oligonucleotide
ggauccugucggugagcau

SEQ ID NO: 1334700 - RNA, 19 nt, Artificial Sequence
  Description of Artificial Sequence: Synthetic oligonucleotide
ccguagcugacuccccggu

SEQ ID NO: 1334701 - RNA, 19 nt, Artificial Sequence
  Description of Artificial Sequence: Synthetic oligonucleotide
gcgcaggaacucggcagaa

SEQ ID NO: 1334702 - RNA, 19 nt, Artificial Sequence
  Description of Artificial Sequence: Synthetic oligonucleotide
gggcucugucccggcucgc

SEQ ID NO: 1334703 - RNA, 19 nt, Artificial Sequence
  Description of Artificial Sequence: Synthetic oligonucleotide
ccgggguccguaggccaug

SEQ ID NO: 1334704 - RNA, 19 nt, Artificial Sequence
  Description of Artificial Sequence: Synthetic oligonucleotide
ccacgccacagagcgucca

SEQ ID NO: 1334705 - RNA, 19 nt, Artificial Sequence
  Description of Artificial Sequence: Synthetic oligonucleotide
gccaagcguccgggcuucc

SEQ ID NO: 1334706 - RNA, 19 nt, Artificial Sequence
  Description of Artificial Sequence: Synthetic oligonucleotide
ggcgcgcgcccagguacuc

SEQ ID NO: 1334707 - RNA, 19 nt, Artificial Sequence
  Description of Artificial Sequence: Synthetic oligonucleotide
ccgugagggauggcacgga

SEQ ID NO: 1334708 - RNA, 19 nt, Artificial Sequence
  Description of Artificial Sequence: Synthetic oligonucleotide
gcgcgcgguggcgcugcag

SEQ ID NO: 1334709 - RNA, 19 nt, Artificial Sequence
  Description of Artificial Sequence: Synthetic oligonucleotide
cgaggugaugugccugggu

SEQ ID NO: 1334710 - RNA, 19 nt, Artificial Sequence
  Description of Artificial Sequence: Synthetic oligonucleotide
gucaggcgugccggguguu

SEQ ID NO: 1334711 - RNA, 19 nt, Artificial Sequence
  Description of Artificial Sequence: Synthetic oligonucleotide
cguugccgugagggaggcc

SEQ ID NO: 1334712 - RNA, 19 nt, Artificial Sequence
  Description of Artificial Sequence: Synthetic oligonucleotide
ggaccacguaguaguccuu

SEQ ID NO: 1334713 - RNA, 19 nt, Artificial Sequence
  Description of Artificial Sequence: Synthetic oligonucleotide
cgccggccgggguccguag

SEQ ID NO: 1334714 - RNA, 19 nt, Artificial Sequence
  Description of Artificial Sequence: Synthetic oligonucleotide
cgaggccgaaguccgcgau

SEQ ID NO: 1334715 - RNA, 19 nt, Artificial Sequence
  Description of Artificial Sequence: Synthetic oligonucleotide
cucuggcgacccggaccgu

SEQ ID NO: 1334716 - RNA, 19 nt, Artificial Sequence
  Description of Artificial Sequence: Synthetic oligonucleotide
cggggacgucaggcgugcc

SEQ ID NO: 1334717 - RNA, 19 nt, Artificial Sequence
  Description of Artificial Sequence: Synthetic oligonucleotide
gcgccacugcacagcucau

SEQ ID NO: 1334718 - RNA, 19 nt, Artificial Sequence
  Description of Artificial Sequence: Synthetic oligonucleotide
ccggccggucuugcgggcu

SEQ ID NO: 1334719 - RNA, 19 nt, Artificial Sequence
  Description of Artificial Sequence: Synthetic oligonucleotide
cggcgcgcgcccagguacu

SEQ ID NO: 1334720 - RNA, 19 nt, Artificial Sequence
  Description of Artificial Sequence: Synthetic oligonucleotide
ccgccggccgggguccgua

SEQ ID NO: 1334721 - RNA, 19 nt, Artificial Sequence
  Description of Artificial Sequence: Synthetic oligonucleotide
cgcugccgaaguugcccuu

SEQ ID NO: 1334722 - RNA, 19 nt, Artificial Sequence
  Description of Artificial Sequence: Synthetic oligonucleotide
ugauaaaccguccugaagg

SEQ ID NO: 1334723 - RNA, 19 nt, Artificial Sequence
  Description of Artificial Sequence: Synthetic oligonucleotide
aauuacucuagccugcacc

SEQ ID NO: 1334724 - RNA, 19 nt, Artificial Sequence
  Description of Artificial Sequence: Synthetic oligonucleotide
uuuaauugggaaccaaggg

SEQ ID NO: 1334725 - RNA, 19 nt, Artificial Sequence
  Description of Artificial Sequence: Synthetic oligonucleotide
ugcaccauuggcaauaugg

SEQ ID NO: 1334726 - RNA, 19 nt, Artificial Sequence
  Description of Artificial Sequence: Synthetic oligonucleotide
uuuaacuuuucguagcagg

SEQ ID NO: 1334727 - RNA, 19 nt, Artificial Sequence
  Description of Artificial Sequence: Synthetic oligonucleotide
aaguggauggcuuggaagg

SEQ ID NO: 1334728 - RNA, 19 nt, Artificial Sequence
  Description of Artificial Sequence: Synthetic oligonucleotide
uuaauugggaaccaaggga

SEQ ID NO: 1334729 - RNA, 19 nt, Artificial Sequence
  Description of Artificial Sequence: Synthetic oligonucleotide
aacuccauccacucgggcc

SEQ ID NO: 1334730 - RNA, 19 nt, Artificial Sequence
  Description of Artificial Sequence: Synthetic oligonucleotide
auuacucuagccugcaccc

SEQ ID NO: 1334731 - RNA, 19 nt, Artificial Sequence
  Description of Artificial Sequence: Synthetic oligonucleotide
gauuacaucacucaauguc

SEQ ID NO: 1334732 - RNA, 19 nt, Artificial Sequence
  Description of Artificial Sequence: Synthetic oligonucleotide
aacacguuucgauagcggg

SEQ ID NO: 1334733 - RNA, 19 nt, Artificial Sequence
  Description of Artificial Sequence: Synthetic oligonucleotide
ugugauuagguauuugaag

SEQ ID NO: 1334734 - RNA, 19 nt, Artificial Sequence
  Description of Artificial Sequence: Synthetic oligonucleotide
agaauucauacacagacca

SEQ ID NO: 1334735 - RNA, 19 nt, Artificial Sequence
  Description of Artificial Sequence: Synthetic oligonucleotide
acuaguguuagccaacuag

SEQ ID NO: 1334736 - RNA, 19 nt, Artificial Sequence
  Description of Artificial Sequence: Synthetic oligonucleotide
ugugauauguccuguaaug

SEQ ID NO: 1334737 - RNA, 19 nt, Artificial Sequence
  Description of Artificial Sequence: Synthetic oligonucleotide
uggauuacaucacucaaug

SEQ ID NO: 1334738 - RNA, 19 nt, Artificial Sequence
  Description of Artificial Sequence: Synthetic oligonucleotide
uucgauagcgggcagcugg

SEQ ID NO: 1334739 - RNA, 19 nt, Artificial Sequence
  Description of Artificial Sequence: Synthetic oligonucleotide
uccaacuccauccacucgg

SEQ ID NO: 1334740 - RNA, 19 nt, Artificial Sequence
  Description of Artificial Sequence: Synthetic oligonucleotide
ugguaaauuacucuagccu

SEQ ID NO: 1334741 - RNA, 19 nt, Artificial Sequence
  Description of Artificial Sequence: Synthetic oligonucleotide
uuaacuuuucguagcaggc

SEQ ID NO: 1334742 - RNA, 19 nt, Artificial Sequence
  Description of Artificial Sequence: Synthetic oligonucleotide
ucuguucuuauaauucucc

SEQ ID NO: 1334743 - RNA, 19 nt, Artificial Sequence
  Description of Artificial Sequence: Synthetic oligonucleotide
aacguggccacacauccgg

SEQ ID NO: 1334744 - RNA, 19 nt, Artificial Sequence
  Description of Artificial Sequence: Synthetic oligonucleotide
ugcaucaugaaguaacgug

SEQ ID NO: 1334745 - RNA, 19 nt, Artificial Sequence
  Description of Artificial Sequence: Synthetic oligonucleotide
uaauugggaaccaagggaa

SEQ ID NO: 1334746 - RNA, 19 nt, Artificial Sequence
  Description of Artificial Sequence: Synthetic oligonucleotide
ucauacacagaccaugcga

SEQ ID NO: 1334747 - RNA, 19 nt, Artificial Sequence
  Description of Artificial Sequence: Synthetic oligonucleotide
uacacagucugucacccgg

SEQ ID NO: 1334748 - RNA, 19 nt, Artificial Sequence
  Description of Artificial Sequence: Synthetic oligonucleotide
agagcaggccgccaggucc

SEQ ID NO: 1334749 - RNA, 19 nt, Artificial Sequence
  Description of Artificial Sequence: Synthetic oligonucleotide
uucuuauaauucuccagag

SEQ ID NO: 1334750 - RNA, 19 nt, Artificial Sequence
  Description of Artificial Sequence: Synthetic oligonucleotide
aacucauaggucaugaagu

SEQ ID NO: 1334751 - RNA, 19 nt, Artificial Sequence
  Description of Artificial Sequence: Synthetic oligonucleotide
aagacgauggugguaacag

SEQ ID NO: 1334752 - RNA, 19 nt, Artificial Sequence
  Description of Artificial Sequence: Synthetic oligonucleotide
acuuccgcuggauucaugg

SEQ ID NO: 1334753 - RNA, 19 nt, Artificial Sequence
  Description of Artificial Sequence: Synthetic oligonucleotide
gugauuagguauuugaaga

SEQ ID NO: 1334754 - RNA, 19 nt, Artificial Sequence
  Description of Artificial Sequence: Synthetic oligonucleotide
uguaucuagagcaggccgc

SEQ ID NO: 1334755 - RNA, 19 nt, Artificial Sequence
  Description of Artificial Sequence: Synthetic oligonucleotide
aagaacuaguguuagccaa

SEQ ID NO: 1334756 - RNA, 19 nt, Artificial Sequence
  Description of Artificial Sequence: Synthetic oligonucleotide
gguaaauuacucuagccug

SEQ ID NO: 1334757 - RNA, 19 nt, Artificial Sequence
  Description of Artificial Sequence: Synthetic oligonucleotide
caguguuuugcaaacgucc

SEQ ID NO: 1334758 - RNA, 19 nt, Artificial Sequence
  Description of Artificial Sequence: Synthetic oligonucleotide
gaaguggauggcuuggaag

SEQ ID NO: 1334759 - RNA, 19 nt, Artificial Sequence
  Description of Artificial Sequence: Synthetic oligonucleotide
ucuuauaauucuccagaga

SEQ ID NO: 1334760 - RNA, 19 nt, Artificial Sequence
  Description of Artificial Sequence: Synthetic oligonucleotide
guaacguggccacacaucc

SEQ ID NO: 1334761 - RNA, 19 nt, Artificial Sequence
  Description of Artificial Sequence: Synthetic oligonucleotide
uugauaaaccguccugaag

SEQ ID NO: 1334762 - RNA, 19 nt, Artificial Sequence
  Description of Artificial Sequence: Synthetic oligonucleotide
uguccuguaauguuugagu

SEQ ID NO: 1334763 - RNA, 19 nt, Artificial Sequence
  Description of Artificial Sequence: Synthetic oligonucleotide
aaauuacucuagccugcac

SEQ ID NO: 1334764 - RNA, 19 nt, Artificial Sequence
  Description of Artificial Sequence: Synthetic oligonucleotide
aaccaagggaaugcgcugc

SEQ ID NO: 1334765 - RNA, 19 nt, Artificial Sequence
  Description of Artificial Sequence: Synthetic oligonucleotide
aagcgcucuccucucgucc

SEQ ID NO: 1334766 - RNA, 19 nt, Artificial Sequence
  Description of Artificial Sequence: Synthetic oligonucleotide
gauaaaccguccugaaggc

SEQ ID NO: 1334767 - RNA, 19 nt, Artificial Sequence
  Description of Artificial Sequence: Synthetic oligonucleotide
aacuuuucguagcaggcaa

SEQ ID NO: 1334768 - RNA, 19 nt, Artificial Sequence
  Description of Artificial Sequence: Synthetic oligonucleotide
uacuugauaaaccguccug

SEQ ID NO: 1334769 - RNA, 19 nt, Artificial Sequence
  Description of Artificial Sequence: Synthetic oligonucleotide
auuacaucacucaaugucu

SEQ ID NO: 1334770 - RNA, 19 nt, Artificial Sequence
  Description of Artificial Sequence: Synthetic oligonucleotide
gaaggggacauucaugguc

SEQ ID NO: 1334771 - RNA, 19 nt, Artificial Sequence
  Description of Artificial Sequence: Synthetic oligonucleotide
uugugauuagguauuugaa

SEQ ID NO: 1334772 - RNA, 19 nt, Artificial Sequence
  Description of Artificial Sequence: Synthetic oligonucleotide
cuguaucuagagcaggccg

SEQ ID NO: 1334773 - RNA, 19 nt, Artificial Sequence
  Description of Artificial Sequence: Synthetic oligonucleotide
uaucccucuguaucuagag

SEQ ID NO: 1334774 - RNA, 19 nt, Artificial Sequence
  Description of Artificial Sequence: Synthetic oligonucleotide
uuagccaacuagagccugg

SEQ ID NO: 1334775 - RNA, 19 nt, Artificial Sequence
  Description of Artificial Sequence: Synthetic oligonucleotide
acucauaggucaugaagug

SEQ ID NO: 1334776 - RNA, 19 nt, Artificial Sequence
  Description of Artificial Sequence: Synthetic oligonucleotide
ggcaauauggcuauugccc

SEQ ID NO: 1334777 - RNA, 19 nt, Artificial Sequence
  Description of Artificial Sequence: Synthetic oligonucleotide
ugucgcuuugugauuaggu

SEQ ID NO: 1334778 - RNA, 19 nt, Artificial Sequence
  Description of Artificial Sequence: Synthetic oligonucleotide
uggcaauauggcuauugcc

SEQ ID NO: 1334779 - RNA, 19 nt, Artificial Sequence
  Description of Artificial Sequence: Synthetic oligonucleotide
acagacguuggcaagaacu

SEQ ID NO: 1334780 - RNA, 19 nt, Artificial Sequence
  Description of Artificial Sequence: Synthetic oligonucleotide
gcaucaugaaguaacgugg

SEQ ID NO: 1334781 - RNA, 19 nt, Artificial Sequence
  Description of Artificial Sequence: Synthetic oligonucleotide
aaagcgcucuccucucguc

SEQ ID NO: 1334782 - RNA, 19 nt, Artificial Sequence
  Description of Artificial Sequence: Synthetic oligonucleotide
cuaguguuagccaacuaga

SEQ ID NO: 1334783 - RNA, 19 nt, Artificial Sequence
  Description of Artificial Sequence: Synthetic oligonucleotide
aacagacguuggcaagaac

SEQ ID NO: 1334784 - RNA, 19 nt, Artificial Sequence
  Description of Artificial Sequence: Synthetic oligonucleotide
guugcguccgccucaggcg

SEQ ID NO: 1334785 - RNA, 19 nt, Artificial Sequence
  Description of Artificial Sequence: Synthetic oligonucleotide
uuggcaagaacuaguguua

SEQ ID NO: 1334786 - RNA, 19 nt, Artificial Sequence
  Description of Artificial Sequence: Synthetic oligonucleotide
guaaauuacucuagccugc

SEQ ID NO: 1334787 - RNA, 19 nt, Artificial Sequence
  Description of Artificial Sequence: Synthetic oligonucleotide
guagcugcgguaaaaggcc

SEQ ID NO: 1334788 - RNA, 19 nt, Artificial Sequence
  Description of Artificial Sequence: Synthetic oligonucleotide
gcaagaacuaguguuagcc

SEQ ID NO: 1334789 - RNA, 19 nt, Artificial Sequence
  Description of Artificial Sequence: Synthetic oligonucleotide
ucuccagagagccuccaac

SEQ ID NO: 1334790 - RNA, 19 nt, Artificial Sequence
  Description of Artificial Sequence: Synthetic oligonucleotide
gacgauggugguaacagac

SEQ ID NO: 1334791 - RNA, 19 nt, Artificial Sequence
  Description of Artificial Sequence: Synthetic oligonucleotide
uagcaacuggaucaugcca

SEQ ID NO: 1334792 - RNA, 19 nt, Artificial Sequence
  Description of Artificial Sequence: Synthetic oligonucleotide
ucgcuuugugauuagguau

SEQ ID NO: 1334793 - RNA, 19 nt, Artificial Sequence
  Description of Artificial Sequence: Synthetic oligonucleotide
ugaaguaacguggccacac

SEQ ID NO: 1334794 - RNA, 19 nt, Artificial Sequence
  Description of Artificial Sequence: Synthetic oligonucleotide
ugauauguccuguaauguu

SEQ ID NO: 1334795 - RNA, 19 nt, Artificial Sequence
  Description of Artificial Sequence: Synthetic oligonucleotide
uuccgcuggauucauggcu

SEQ ID NO: 1334796 - RNA, 19 nt, Artificial Sequence
  Description of Artificial Sequence: Synthetic oligonucleotide
ucgaccggguacaucacgc

SEQ ID NO: 1334797 - RNA, 19 nt, Artificial Sequence
  Description of Artificial Sequence: Synthetic oligonucleotide
uccggcugcaccauuggca

SEQ ID NO: 1334798 - RNA, 19 nt, Artificial Sequence
  Description of Artificial Sequence: Synthetic oligonucleotide
acuugauaaaccguccuga

SEQ ID NO: 1334799 - RNA, 19 nt, Artificial Sequence
  Description of Artificial Sequence: Synthetic oligonucleotide
agcaacuggaucaugccag

SEQ ID NO: 1334800 - RNA, 19 nt, Artificial Sequence
  Description of Artificial Sequence: Synthetic oligonucleotide
agaacuaguguuagccaac

SEQ ID NO: 1334801 - RNA, 19 nt, Artificial Sequence
  Description of Artificial Sequence: Synthetic oligonucleotide
gguuguagcgucucugggg

SEQ ID NO: 1334802 - RNA, 19 nt, Artificial Sequence
  Description of Artificial Sequence: Synthetic oligonucleotide
aauagagggcgugggcagg

SEQ ID NO: 1334803 - RNA, 19 nt, Artificial Sequence
  Description of Artificial Sequence: Synthetic oligonucleotide
aaguaacguggccacacau

SEQ ID NO: 1334804 - RNA, 19 nt, Artificial Sequence
  Description of Artificial Sequence: Synthetic oligonucleotide
aggauguaggucaucgagg

SEQ ID NO: 1334805 - RNA, 19 nt, Artificial Sequence
  Description of Artificial Sequence: Synthetic oligonucleotide
acacguuucgauagcgggc

SEQ ID NO: 1334806 - RNA, 19 nt, Artificial Sequence
  Description of Artificial Sequence: Synthetic oligonucleotide
uguuagccaacuagagccu

SEQ ID NO: 1334807 - RNA, 19 nt, Artificial Sequence
  Description of Artificial Sequence: Synthetic oligonucleotide
ucgauagcgggcagcuggg

SEQ ID NO: 1334808 - RNA, 19 nt, Artificial Sequence
  Description of Artificial Sequence: Synthetic oligonucleotide
aaguaggcagucaccccgc

SEQ ID NO: 1334809 - RNA, 19 nt, Artificial Sequence
  Description of Artificial Sequence: Synthetic oligonucleotide
auagcgggcagcuggguca

SEQ ID NO: 1334810 - RNA, 19 nt, Artificial Sequence
  Description of Artificial Sequence: Synthetic oligonucleotide
uaacuuuucguagcaggca

SEQ ID NO: 1334811 - RNA, 19 nt, Artificial Sequence
  Description of Artificial Sequence: Synthetic oligonucleotide
uaaauuacucuagccugca

SEQ ID NO: 1334812 - RNA, 19 nt, Artificial Sequence
  Description of Artificial Sequence: Synthetic oligonucleotide
ugggucaggcuguagacuc

SEQ ID NO: 1334813 - RNA, 19 nt, Artificial Sequence
  Description of Artificial Sequence: Synthetic oligonucleotide
cucauaggucaugaagugg

SEQ ID NO: 1334814 - RNA, 19 nt, Artificial Sequence
  Description of Artificial Sequence: Synthetic oligonucleotide
aaagacgauggugguaaca

SEQ ID NO: 1334815 - RNA, 19 nt, Artificial Sequence
  Description of Artificial Sequence: Synthetic oligonucleotide
ugcgguaaaaggccccggc

SEQ ID NO: 1334816 - RNA, 19 nt, Artificial Sequence
  Description of Artificial Sequence: Synthetic oligonucleotide
gagagcacgugggagcugg

SEQ ID NO: 1334817 - RNA, 19 nt, Artificial Sequence
  Description of Artificial Sequence: Synthetic oligonucleotide
ugguaacagacguuggcaa

SEQ ID NO: 1334818 - RNA, 19 nt, Artificial Sequence
  Description of Artificial Sequence: Synthetic oligonucleotide
uaacguggccacacauccg

SEQ ID NO: 1334819 - RNA, 19 nt, Artificial Sequence
  Description of Artificial Sequence: Synthetic oligonucleotide
aguaacguggccacacauc

SEQ ID NO: 1334820 - RNA, 19 nt, Artificial Sequence
  Description of Artificial Sequence: Synthetic oligonucleotide
uggugguaacagacguugg

SEQ ID NO: 1334821 - RNA, 19 nt, Artificial Sequence
  Description of Artificial Sequence: Synthetic oligonucleotide
ucggaaguaggcagucacc

SEQ ID NO: 1334822 - RNA, 19 nt, Artificial Sequence
  Description of Artificial Sequence: Synthetic oligonucleotide
aaggcacuagccaugccug

SEQ ID NO: 1334823 - RNA, 19 nt, Artificial Sequence
  Description of Artificial Sequence: Synthetic oligonucleotide
gacgcagucgaccggguac

SEQ ID NO: 1334824 - RNA, 19 nt, Artificial Sequence
  Description of Artificial Sequence: Synthetic oligonucleotide
cucggaaguaggcagucac

SEQ ID NO: 1334825 - RNA, 19 nt, Artificial Sequence
  Description of Artificial Sequence: Synthetic oligonucleotide
gcaauauggcuauugcccc

SEQ ID NO: 1334826 - RNA, 19 nt, Artificial Sequence
  Description of Artificial Sequence: Synthetic oligonucleotide
guuggcaagaacuaguguu

SEQ ID NO: 1334827 - RNA, 19 nt, Artificial Sequence
  Description of Artificial Sequence: Synthetic oligonucleotide
agaaagcgcucuccucucg

SEQ ID NO: 1334828 - RNA, 19 nt, Artificial Sequence
  Description of Artificial Sequence: Synthetic oligonucleotide
uguaggucaucgagguacu

SEQ ID NO: 1334829 - RNA, 19 nt, Artificial Sequence
  Description of Artificial Sequence: Synthetic oligonucleotide
ugaaguggauggcuuggaa

SEQ ID NO: 1334830 - RNA, 19 nt, Artificial Sequence
  Description of Artificial Sequence: Synthetic oligonucleotide
acugcccguacacagucug

SEQ ID NO: 1334831 - RNA, 19 nt, Artificial Sequence
  Description of Artificial Sequence: Synthetic oligonucleotide
caaacguccagugggguug

SEQ ID NO: 1334832 - RNA, 19 nt, Artificial Sequence
  Description of Artificial Sequence: Synthetic oligonucleotide
agcgccucguacuccgggc

SEQ ID NO: 1334833 - RNA, 19 nt, Artificial Sequence
  Description of Artificial Sequence: Synthetic oligonucleotide
ugcgggcccagaaggaaag

SEQ ID NO: 1334834 - RNA, 19 nt, Artificial Sequence
  Description of Artificial Sequence: Synthetic oligonucleotide
guguuuugcaaacguccag

SEQ ID NO: 1334835 - RNA, 19 nt, Artificial Sequence
  Description of Artificial Sequence: Synthetic oligonucleotide
accaugugcguggugacag

SEQ ID NO: 1334836 - RNA, 19 nt, Artificial Sequence
  Description of Artificial Sequence: Synthetic oligonucleotide
gaccggguacaucacgcag

SEQ ID NO: 1334837 - RNA, 19 nt, Artificial Sequence
  Description of Artificial Sequence: Synthetic oligonucleotide
ugggaaccaagggaaugcg

SEQ ID NO: 1334838 - RNA, 19 nt, Artificial Sequence
  Description of Artificial Sequence: Synthetic oligonucleotide
aucaugccaggagacaaag

SEQ ID NO: 1334839 - RNA, 19 nt, Artificial Sequence
  Description of Artificial Sequence: Synthetic oligonucleotide
gguaacagacguuggcaag

SEQ ID NO: 1334840 - RNA, 19 nt, Artificial Sequence
  Description of Artificial Sequence: Synthetic oligonucleotide
ucuagccugcaccccucgg

SEQ ID NO: 1334841 - RNA, 19 nt, Artificial Sequence
  Description of Artificial Sequence: Synthetic oligonucleotide
ggugguaacagacguuggc

SEQ ID NO: 1334842 - RNA, 19 nt, Artificial Sequence
  Description of Artificial Sequence: Synthetic oligonucleotide
agcgccgacuccccggggc

SEQ ID NO: 1334843 - RNA, 19 nt, Artificial Sequence
  Description of Artificial Sequence: Synthetic oligonucleotide
uggguggauuacaucacuc

SEQ ID NO: 1334844 - RNA, 19 nt, Artificial Sequence
  Description of Artificial Sequence: Synthetic oligonucleotide
uggcaagaacuaguguuag

SEQ ID NO: 1334845 - RNA, 19 nt, Artificial Sequence
  Description of Artificial Sequence: Synthetic oligonucleotide
aguguuuugcaaacgucca

SEQ ID NO: 1334846 - RNA, 19 nt, Artificial Sequence
  Description of Artificial Sequence: Synthetic oligonucleotide
auagagggcgugggcaggc

SEQ ID NO: 1334847 - RNA, 19 nt, Artificial Sequence
  Description of Artificial Sequence: Synthetic oligonucleotide
auguccuguaauguuugag

SEQ ID NO: 1334848 - RNA, 19 nt, Artificial Sequence
  Description of Artificial Sequence: Synthetic oligonucleotide
auccggcugcaccauuggc

SEQ ID NO: 1334849 - RNA, 19 nt, Artificial Sequence
  Description of Artificial Sequence: Synthetic oligonucleotide
accauuggcaauauggcua

SEQ ID NO: 1334850 - RNA, 19 nt, Artificial Sequence
  Description of Artificial Sequence: Synthetic oligonucleotide
caagaacuaguguuagcca

SEQ ID NO: 1334851 - RNA, 19 nt, Artificial Sequence
  Description of Artificial Sequence: Synthetic oligonucleotide
acgcagugcuccaggaucc

SEQ ID NO: 1334852 - RNA, 19 nt, Artificial Sequence
  Description of Artificial Sequence: Synthetic oligonucleotide
auaggucaugaaguggaug

SEQ ID NO: 1334853 - RNA, 19 nt, Artificial Sequence
  Description of Artificial Sequence: Synthetic oligonucleotide
caucacgcagugcuccagg

SEQ ID NO: 1334854 - RNA, 19 nt, Artificial Sequence
  Description of Artificial Sequence: Synthetic oligonucleotide
gguaaaaggccccggcccc

SEQ ID NO: 1334855 - RNA, 19 nt, Artificial Sequence
  Description of Artificial Sequence: Synthetic oligonucleotide
agccaugccugugauaugu

SEQ ID NO: 1334856 - RNA, 19 nt, Artificial Sequence
  Description of Artificial Sequence: Synthetic oligonucleotide
ccgccuacuugauaaaccg

SEQ ID NO: 1334857 - RNA, 19 nt, Artificial Sequence
  Description of Artificial Sequence: Synthetic oligonucleotide
gaccaugcgauggccgugg

SEQ ID NO: 1334858 - RNA, 19 nt, Artificial Sequence
  Description of Artificial Sequence: Synthetic oligonucleotide
uagcugcgguaaaaggccc

SEQ ID NO: 1334859 - RNA, 19 nt, Artificial Sequence
  Description of Artificial Sequence: Synthetic oligonucleotide
guaacagacguuggcaaga

SEQ ID NO: 1334860 - RNA, 19 nt, Artificial Sequence
  Description of Artificial Sequence: Synthetic oligonucleotide
ggccccuucauuuugccac

SEQ ID NO: 1334861 - RNA, 19 nt, Artificial Sequence
  Description of Artificial Sequence: Synthetic oligonucleotide
uugucgcuuugugauuagg

SEQ ID NO: 1334862 - RNA, 19 nt, Artificial Sequence
  Description of Artificial Sequence: Synthetic oligonucleotide
agacguuggcaagaacuag

SEQ ID NO: 1334863 - RNA, 19 nt, Artificial Sequence
  Description of Artificial Sequence: Synthetic oligonucleotide
gucgaccggguacaucacg

SEQ ID NO: 1334864 - RNA, 19 nt, Artificial Sequence
  Description of Artificial Sequence: Synthetic oligonucleotide
ugggucguguagcugcggu

SEQ ID NO: 1334865 - RNA, 19 nt, Artificial Sequence
  Description of Artificial Sequence: Synthetic oligonucleotide
cuugauaaaccguccugaa

SEQ ID NO: 1334866 - RNA, 19 nt, Artificial Sequence
  Description of Artificial Sequence: Synthetic oligonucleotide
acagaccaugcgauggccg

SEQ ID NO: 1334867 - RNA, 19 nt, Artificial Sequence
  Description of Artificial Sequence: Synthetic oligonucleotide
uacaucacgcagugcucca

SEQ ID NO: 1334868 - RNA, 19 nt, Artificial Sequence
  Description of Artificial Sequence: Synthetic oligonucleotide
ucacccggugguacgguga

SEQ ID NO: 1334869 - RNA, 19 nt, Artificial Sequence
  Description of Artificial Sequence: Synthetic oligonucleotide
guaucuagagcaggccgcc

SEQ ID NO: 1334870 - RNA, 19 nt, Artificial Sequence
  Description of Artificial Sequence: Synthetic oligonucleotide
cuggauucauggcugcauc

SEQ ID NO: 1334871 - RNA, 19 nt, Artificial Sequence
  Description of Artificial Sequence: Synthetic oligonucleotide
cuuccgcuggauucauggc

SEQ ID NO: 1334872 - RNA, 19 nt, Artificial Sequence
  Description of Artificial Sequence: Synthetic oligonucleotide
gccaacuagagccuggaga

SEQ ID NO: 1334873 - RNA, 19 nt, Artificial Sequence
  Description of Artificial Sequence: Synthetic oligonucleotide
gugguaacagacguuggca

SEQ ID NO: 1334874 - RNA, 19 nt, Artificial Sequence
  Description of Artificial Sequence: Synthetic oligonucleotide
acucgggccagccgcggcg

SEQ ID NO: 1334875 - RNA, 19 nt, Artificial Sequence
  Description of Artificial Sequence: Synthetic oligonucleotide
gagaaagcgcucuccucuc

SEQ ID NO: 1334876 - RNA, 19 nt, Artificial Sequence
  Description of Artificial Sequence: Synthetic oligonucleotide
aauugggaaccaagggaau

SEQ ID NO: 1334877 - RNA, 19 nt, Artificial Sequence
  Description of Artificial Sequence: Synthetic oligonucleotide
cauacacagaccaugcgau

SEQ ID NO: 1334878 - RNA, 19 nt, Artificial Sequence
  Description of Artificial Sequence: Synthetic oligonucleotide
aacuaguguuagccaacua

SEQ ID NO: 1334879 - RNA, 19 nt, Artificial Sequence
  Description of Artificial Sequence: Synthetic oligonucleotide
uggagaaagcgcucuccuc

SEQ ID NO: 1334880 - RNA, 19 nt, Artificial Sequence
  Description of Artificial Sequence: Synthetic oligonucleotide
guacacagucugucacccg

SEQ ID NO: 1334881 - RNA, 19 nt, Artificial Sequence
  Description of Artificial Sequence: Synthetic oligonucleotide
gucgcuuugugauuaggua

SEQ ID NO: 1334882 - RNA, 19 nt, Artificial Sequence
  Description of Artificial Sequence: Synthetic oligonucleotide
ugcacuccgccccuccaac

SEQ ID NO: 1334883 - RNA, 19 nt, Artificial Sequence
  Description of Artificial Sequence: Synthetic oligonucleotide
cuugucgcuuugugauuag

SEQ ID NO: 1334884 - RNA, 19 nt, Artificial Sequence
  Description of Artificial Sequence: Synthetic oligonucleotide
acguuggcaagaacuagug

SEQ ID NO: 1334885 - RNA, 19 nt, Artificial Sequence
  Description of Artificial Sequence: Synthetic oligonucleotide
uccugcgcaggcuccggag

SEQ ID NO: 1334886 - RNA, 19 nt, Artificial Sequence
  Description of Artificial Sequence: Synthetic oligonucleotide
cccucuguucuuauaauuc

SEQ ID NO: 1334887 - RNA, 19 nt, Artificial Sequence
  Description of Artificial Sequence: Synthetic oligonucleotide
cuagccaugccugugauau

SEQ ID NO: 1334888 - RNA, 19 nt, Artificial Sequence
  Description of Artificial Sequence: Synthetic oligonucleotide
cacccguccagcagcgccg

SEQ ID NO: 1334889 - RNA, 19 nt, Artificial Sequence
  Description of Artificial Sequence: Synthetic oligonucleotide
agcugcgguaaaaggcccc

SEQ ID NO: 1334890 - RNA, 19 nt, Artificial Sequence
  Description of Artificial Sequence: Synthetic oligonucleotide
cauccggcugcaccauugg

SEQ ID NO: 1334891 - RNA, 19 nt, Artificial Sequence
  Description of Artificial Sequence: Synthetic oligonucleotide
gguggauuacaucacucaa

SEQ ID NO: 1334892 - RNA, 19 nt, Artificial Sequence
  Description of Artificial Sequence: Synthetic oligonucleotide
gaaagacgauggugguaac

SEQ ID NO: 1334893 - RNA, 19 nt, Artificial Sequence
  Description of Artificial Sequence: Synthetic oligonucleotide
aucacgcagugcuccagga

SEQ ID NO: 1334894 - RNA, 19 nt, Artificial Sequence
  Description of Artificial Sequence: Synthetic oligonucleotide
uuacucuagccugcacccc

SEQ ID NO: 1334895 - RNA, 19 nt, Artificial Sequence
  Description of Artificial Sequence: Synthetic oligonucleotide
uaacagacguuggcaagaa

SEQ ID NO: 1334896 - RNA, 19 nt, Artificial Sequence
  Description of Artificial Sequence: Synthetic oligonucleotide
cagagagccuccaacacgu

SEQ ID NO: 1334897 - RNA, 19 nt, Artificial Sequence
  Description of Artificial Sequence: Synthetic oligonucleotide
ggagaaagcgcucuccucu

SEQ ID NO: 1334898 - RNA, 19 nt, Artificial Sequence
  Description of Artificial Sequence: Synthetic oligonucleotide
ucgagguacugaggcaggc

SEQ ID NO: 1334899 - RNA, 19 nt, Artificial Sequence
  Description of Artificial Sequence: Synthetic oligonucleotide
aucccugccacggcgcccg

SEQ ID NO: 1334900 - RNA, 19 nt, Artificial Sequence
  Description of Artificial Sequence: Synthetic oligonucleotide
ggguggauuacaucacuca

SEQ ID NO: 1334901 - RNA, 19 nt, Artificial Sequence
  Description of Artificial Sequence: Synthetic oligonucleotide
cacguuucgauagcgggca

SEQ ID NO: 1334902 - RNA, 19 nt, Artificial Sequence
  Description of Artificial Sequence: Synthetic oligonucleotide
caccccgccuacuugauaa

SEQ ID NO: 1334903 - RNA, 19 nt, Artificial Sequence
  Description of Artificial Sequence: Synthetic oligonucleotide
ggcuccggagagcacgugg

SEQ ID NO: 1334904 - RNA, 19 nt, Artificial Sequence
  Description of Artificial Sequence: Synthetic oligonucleotide
agccaacuagagccuggag

SEQ ID NO: 1334905 - RNA, 19 nt, Artificial Sequence
  Description of Artificial Sequence: Synthetic oligonucleotide
uagccaacuagagccugga

SEQ ID NO: 1334906 - RNA, 19 nt, Artificial Sequence
  Description of Artificial Sequence: Synthetic oligonucleotide
cagacguuggcaagaacua

SEQ ID NO: 1334907 - RNA, 19 nt, Artificial Sequence
  Description of Artificial Sequence: Synthetic oligonucleotide
gagcacgugggagcugggg

SEQ ID NO: 1334908 - RNA, 19 nt, Artificial Sequence
  Description of Artificial Sequence: Synthetic oligonucleotide
ggcaagaacuaguguuagc

SEQ ID NO: 1334909 - RNA, 19 nt, Artificial Sequence
  Description of Artificial Sequence: Synthetic oligonucleotide
ccaugccugugauaugucc

SEQ ID NO: 1334910 - RNA, 19 nt, Artificial Sequence
  Description of Artificial Sequence: Synthetic oligonucleotide
aucgagguacugaggcagg

SEQ ID NO: 1334911 - RNA, 19 nt, Artificial Sequence
  Description of Artificial Sequence: Synthetic oligonucleotide
uacuccgggccggacuccg

SEQ ID NO: 1334912 - RNA, 19 nt, Artificial Sequence
  Description of Artificial Sequence: Synthetic oligonucleotide
cauccacucgggccagccg

SEQ ID NO: 1334913 - RNA, 19 nt, Artificial Sequence
  Description of Artificial Sequence: Synthetic oligonucleotide
gccuacuugauaaaccguc

SEQ ID NO: 1334914 - RNA, 19 nt, Artificial Sequence
  Description of Artificial Sequence: Synthetic oligonucleotide
ugcccguacacagucuguc

SEQ ID NO: 1334915 - RNA, 19 nt, Artificial Sequence
  Description of Artificial Sequence: Synthetic oligonucleotide
cccgccuacuugauaaacc

SEQ ID NO: 1334916 - RNA, 19 nt, Artificial Sequence
  Description of Artificial Sequence: Synthetic oligonucleotide
gugauauguccuguaaugu

SEQ ID NO: 1334917 - RNA, 19 nt, Artificial Sequence
  Description of Artificial Sequence: Synthetic oligonucleotide
acauccggcugcaccauug

SEQ ID NO: 1334918 - RNA, 19 nt, Artificial Sequence
  Description of Artificial Sequence: Synthetic oligonucleotide
cucuagccugcaccccucg

SEQ ID NO: 1334919 - RNA, 19 nt, Artificial Sequence
  Description of Artificial Sequence: Synthetic oligonucleotide
gacaguggcuccagccggc

SEQ ID NO: 1334920 - RNA, 19 nt, Artificial Sequence
  Description of Artificial Sequence: Synthetic oligonucleotide
cacaccgccugcacuccgc

SEQ ID NO: 1334921 - RNA, 19 nt, Artificial Sequence
  Description of Artificial Sequence: Synthetic oligonucleotide
ucguguagcugcgguaaaa

SEQ ID NO: 1334922 - RNA, 19 nt, Artificial Sequence
  Description of Artificial Sequence: Synthetic oligonucleotide
cacagucugucacccggug

SEQ ID NO: 1334923 - RNA, 19 nt, Artificial Sequence
  Description of Artificial Sequence: Synthetic oligonucleotide
aggggacauucauggucag

SEQ ID NO: 1334924 - RNA, 19 nt, Artificial Sequence
  Description of Artificial Sequence: Synthetic oligonucleotide
acccugguccccucagugu

SEQ ID NO: 1334925 - RNA, 19 nt, Artificial Sequence
  Description of Artificial Sequence: Synthetic oligonucleotide
gaacuaguguuagccaacu

SEQ ID NO: 1334926 - RNA, 19 nt, Artificial Sequence
  Description of Artificial Sequence: Synthetic oligonucleotide
aaacguccagugggguugu

SEQ ID NO: 1334927 - RNA, 19 nt, Artificial Sequence
  Description of Artificial Sequence: Synthetic oligonucleotide
accggguacaucacgcagu

SEQ ID NO: 1334928 - RNA, 19 nt, Artificial Sequence
  Description of Artificial Sequence: Synthetic oligonucleotide
cugucacccggugguacgg

SEQ ID NO: 1334929 - RNA, 19 nt, Artificial Sequence
  Description of Artificial Sequence: Synthetic oligonucleotide
gcgguaaaaggccccggcc

SEQ ID NO: 1334930 - RNA, 19 nt, Artificial Sequence
  Description of Artificial Sequence: Synthetic oligonucleotide
uuucgauagcgggcagcug

SEQ ID NO: 1334931 - RNA, 19 nt, Artificial Sequence
  Description of Artificial Sequence: Synthetic oligonucleotide
uaucuagagcaggccgcca

SEQ ID NO: 1334932 - RNA, 19 nt, Artificial Sequence
  Description of Artificial Sequence: Synthetic oligonucleotide
gaaagcgcucuccucucgu

SEQ ID NO: 1334933 - RNA, 19 nt, Artificial Sequence
  Description of Artificial Sequence: Synthetic oligonucleotide
gauguaggucaucgaggua

SEQ ID NO: 1334934 - RNA, 19 nt, Artificial Sequence
  Description of Artificial Sequence: Synthetic oligonucleotide
guuucgauagcgggcagcu

SEQ ID NO: 1334935 - RNA, 19 nt, Artificial Sequence
  Description of Artificial Sequence: Synthetic oligonucleotide
ggaaccaagggaaugcgcu

SEQ ID NO: 1334936 - RNA, 19 nt, Artificial Sequence
  Description of Artificial Sequence: Synthetic oligonucleotide
cacccggugguacggugag

SEQ ID NO: 1334937 - RNA, 19 nt, Artificial Sequence
  Description of Artificial Sequence: Synthetic oligonucleotide
uugacgcagucgaccgggu

SEQ ID NO: 1334938 - RNA, 19 nt, Artificial Sequence
  Description of Artificial Sequence: Synthetic oligonucleotide
uccgggucuugacgcaguc

SEQ ID NO: 1334939 - RNA, 19 nt, Artificial Sequence
  Description of Artificial Sequence: Synthetic oligonucleotide
cacuccgccccuccaacuc

SEQ ID NO: 1334940 - RNA, 19 nt, Artificial Sequence
  Description of Artificial Sequence: Synthetic oligonucleotide
cccgccaccaugugcgugg

SEQ ID NO: 1334941 - RNA, 19 nt, Artificial Sequence
  Description of Artificial Sequence: Synthetic oligonucleotide
acguuucgauagcgggcag

SEQ ID NO: 1334942 - RNA, 19 nt, Artificial Sequence
  Description of Artificial Sequence: Synthetic oligonucleotide
gcugcgguaaaaggccccg

SEQ ID NO: 1334943 - RNA, 19 nt, Artificial Sequence
  Description of Artificial Sequence: Synthetic oligonucleotide
ugacgcagucgaccgggua

SEQ ID NO: 1334944 - RNA, 19 nt, Artificial Sequence
  Description of Artificial Sequence: Synthetic oligonucleotide
cgguaaaaggccccggccc

SEQ ID NO: 1334945 - RNA, 19 nt, Artificial Sequence
  Description of Artificial Sequence: Synthetic oligonucleotide
cauccgggucuugacgcag

SEQ ID NO: 1334946 - RNA, 19 nt, Artificial Sequence
  Description of Artificial Sequence: Synthetic oligonucleotide
ccguacacagucugucacc

SEQ ID NO: 1334947 - RNA, 19 nt, Artificial Sequence
  Description of Artificial Sequence: Synthetic oligonucleotide
aggcacuagccaugccugu

SEQ ID NO: 1334948 - RNA, 19 nt, Artificial Sequence
  Description of Artificial Sequence: Synthetic oligonucleotide
agucgaccggguacaucac

SEQ ID NO: 1334949 - RNA, 19 nt, Artificial Sequence
  Description of Artificial Sequence: Synthetic oligonucleotide
acuagccaugccugugaua

SEQ ID NO: 1334950 - RNA, 19 nt, Artificial Sequence
  Description of Artificial Sequence: Synthetic oligonucleotide
ggucagcugggucguguag

SEQ ID NO: 1334951 - RNA, 19 nt, Artificial Sequence
  Description of Artificial Sequence: Synthetic oligonucleotide
acguggccacacauccggc

SEQ ID NO: 1334952 - RNA, 19 nt, Artificial Sequence
  Description of Artificial Sequence: Synthetic oligonucleotide
agaccaugcgauggccgug

SEQ ID NO: 1334953 - RNA, 19 nt, Artificial Sequence
  Description of Artificial Sequence: Synthetic oligonucleotide
caggccccgcgccuguugc

SEQ ID NO: 1334954 - RNA, 19 nt, Artificial Sequence
  Description of Artificial Sequence: Synthetic oligonucleotide
cguugcguccgccucaggc

SEQ ID NO: 1334955 - RNA, 19 nt, Artificial Sequence
  Description of Artificial Sequence: Synthetic oligonucleotide
cguacacagucugucaccc

SEQ ID NO: 1334956 - RNA, 19 nt, Artificial Sequence
  Description of Artificial Sequence: Synthetic oligonucleotide
guggauuacaucacucaau

SEQ ID NO: 1334957 - RNA, 19 nt, Artificial Sequence
  Description of Artificial Sequence: Synthetic oligonucleotide
acgcagucgaccggguaca

SEQ ID NO: 1334958 - RNA, 19 nt, Artificial Sequence
  Description of Artificial Sequence: Synthetic oligonucleotide
uggaggggaucugguaaau

SEQ ID NO: 1334959 - RNA, 19 nt, Artificial Sequence
  Description of Artificial Sequence: Synthetic oligonucleotide
gaucccugccacggcgccc

SEQ ID NO: 1334960 - RNA, 19 nt, Artificial Sequence
  Description of Artificial Sequence: Synthetic oligonucleotide
ucaccccgccuacuugaua

SEQ ID NO: 1334961 - RNA, 19 nt, Artificial Sequence
  Description of Artificial Sequence: Synthetic oligonucleotide
gcagcgccgacuccccggg

SEQ ID NO: 1334962 - RNA, 19 nt, Artificial Sequence
  Description of Artificial Sequence: Synthetic oligonucleotide
cgcaugggccuccacaggc

SEQ ID NO: 1334963 - RNA, 19 nt, Artificial Sequence
  Description of Artificial Sequence: Synthetic oligonucleotide
ggucguguagcugcgguaa

SEQ ID NO: 1334964 - RNA, 19 nt, Artificial Sequence
  Description of Artificial Sequence: Synthetic oligonucleotide
ccacccguccagcagcgcc

SEQ ID NO: 1334965 - RNA, 19 nt, Artificial Sequence
  Description of Artificial Sequence: Synthetic oligonucleotide
ggauuacaucacucaaugu

SEQ ID NO: 1334966 - RNA, 19 nt, Artificial Sequence
  Description of Artificial Sequence: Synthetic oligonucleotide
ggcacuagccaugccugug

SEQ ID NO: 1334967 - RNA, 19 nt, Artificial Sequence
  Description of Artificial Sequence: Synthetic oligonucleotide
uagagggcgugggcaggcc

SEQ ID NO: 1334968 - RNA, 19 nt, Artificial Sequence
  Description of Artificial Sequence: Synthetic oligonucleotide
gcacuagccaugccuguga

SEQ ID NO: 1334969 - RNA, 19 nt, Artificial Sequence
  Description of Artificial Sequence: Synthetic oligonucleotide
ugucacccggugguacggu

SEQ ID NO: 1334970 - RNA, 19 nt, Artificial Sequence
  Description of Artificial Sequence: Synthetic oligonucleotide
cacuuccgcuggauucaug

SEQ ID NO: 1334971 - RNA, 19 nt, Artificial Sequence
  Description of Artificial Sequence: Synthetic oligonucleotide
cagaccaugcgauggccgu

SEQ ID NO: 1334972 - RNA, 19 nt, Artificial Sequence
  Description of Artificial Sequence: Synthetic oligonucleotide
caggcuguagacucugcau

SEQ ID NO: 1334973 - RNA, 19 nt, Artificial Sequence
  Description of Artificial Sequence: Synthetic oligonucleotide
ccugugauauguccuguaa

SEQ ID NO: 1334974 - RNA, 19 nt, Artificial Sequence
  Description of Artificial Sequence: Synthetic oligonucleotide
cacugcgggcccagaagga

SEQ ID NO: 1334975 - RNA, 19 nt, Artificial Sequence
  Description of Artificial Sequence: Synthetic oligonucleotide
cacucgggccagccgcggc

SEQ ID NO: 1334976 - RNA, 19 nt, Artificial Sequence
  Description of Artificial Sequence: Synthetic oligonucleotide
gcugggucguguagcugcg

SEQ ID NO: 1334977 - RNA, 19 nt, Artificial Sequence
  Description of Artificial Sequence: Synthetic oligonucleotide
gauggugguaacagacguu

SEQ ID NO: 1334978 - RNA, 19 nt, Artificial Sequence
  Description of Artificial Sequence: Synthetic oligonucleotide
cugcaccauuggcaauaug

SEQ ID NO: 1334979 - RNA, 19 nt, Artificial Sequence
  Description of Artificial Sequence: Synthetic oligonucleotide
cacgccccgcugcagccac

SEQ ID NO: 1334980 - RNA, 19 nt, Artificial Sequence
  Description of Artificial Sequence: Synthetic oligonucleotide
cccugguccccucaguguc

SEQ ID NO: 1334981 - RNA, 19 nt, Artificial Sequence
  Description of Artificial Sequence: Synthetic oligonucleotide
agagcacgugggagcuggg

SEQ ID NO: 1334982 - RNA, 19 nt, Artificial Sequence
  Description of Artificial Sequence: Synthetic oligonucleotide
accaugcgauggccgugga

SEQ ID NO: 1334983 - RNA, 19 nt, Artificial Sequence
  Description of Artificial Sequence: Synthetic oligonucleotide
cuugccugcccuccacucu

SEQ ID NO: 1334984 - RNA, 19 nt, Artificial Sequence
  Description of Artificial Sequence: Synthetic oligonucleotide
gucguguagcugcgguaaa

SEQ ID NO: 1334985 - RNA, 19 nt, Artificial Sequence
  Description of Artificial Sequence: Synthetic oligonucleotide
gacuccggauccugccgua

SEQ ID NO: 1334986 - RNA, 19 nt, Artificial Sequence
  Description of Artificial Sequence: Synthetic oligonucleotide
accccgccuacuugauaaa

SEQ ID NO: 1334987 - RNA, 19 nt, Artificial Sequence
  Description of Artificial Sequence: Synthetic oligonucleotide
guaggcagucaccccgccu

SEQ ID NO: 1334988 - RNA, 19 nt, Artificial Sequence
  Description of Artificial Sequence: Synthetic oligonucleotide
gcgccucguacuccgggcc

SEQ ID NO: 1334989 - RNA, 19 nt, Artificial Sequence
  Description of Artificial Sequence: Synthetic oligonucleotide
cucgggccagccgcggcgc

SEQ ID NO: 1334990 - RNA, 19 nt, Artificial Sequence
  Description of Artificial Sequence: Synthetic oligonucleotide
ccaccaugugcguggugac

SEQ ID NO: 1334991 - RNA, 19 nt, Artificial Sequence
  Description of Artificial Sequence: Synthetic oligonucleotide
gcccguacacagucuguca

SEQ ID NO: 1334992 - RNA, 19 nt, Artificial Sequence
  Description of Artificial Sequence: Synthetic oligonucleotide
gauggccguggaggggauc

SEQ ID NO: 1334993 - RNA, 19 nt, Artificial Sequence
  Description of Artificial Sequence: Synthetic oligonucleotide
gcgauggccguggagggga

SEQ ID NO: 1334994 - RNA, 19 nt, Artificial Sequence
  Description of Artificial Sequence: Synthetic oligonucleotide
caccaugugcguggugaca

SEQ ID NO: 1334995 - RNA, 19 nt, Artificial Sequence
  Description of Artificial Sequence: Synthetic oligonucleotide
auccgggucuugacgcagu

SEQ ID NO: 1334996 - RNA, 19 nt, Artificial Sequence
  Description of Artificial Sequence: Synthetic oligonucleotide
ggauggcuuggaaggggac

SEQ ID NO: 1334997 - RNA, 19 nt, Artificial Sequence
  Description of Artificial Sequence: Synthetic oligonucleotide
ccggcugcaccauuggcaa

SEQ ID NO: 1334998 - RNA, 19 nt, Artificial Sequence
  Description of Artificial Sequence: Synthetic oligonucleotide
ccaugcgauggccguggag

SEQ ID NO: 1334999 - RNA, 19 nt, Artificial Sequence
  Description of Artificial Sequence: Synthetic oligonucleotide
gcaccccucggaaguaggc

SEQ ID NO: 1335000 - RNA, 19 nt, Artificial Sequence
  Description of Artificial Sequence: Synthetic oligonucleotide
ggagcugggguuguagcgu

SEQ ID NO: 1335001 - RNA, 19 nt, Artificial Sequence
  Description of Artificial Sequence: Synthetic oligonucleotide
gguccucccgccacaccgc

SEQ ID NO: 1335002 - RNA, 19 nt, Artificial Sequence
  Description of Artificial Sequence: Synthetic oligonucleotide
guaaaaggccccggccccu

SEQ ID NO: 1335003 - RNA, 19 nt, Artificial Sequence
  Description of Artificial Sequence: Synthetic oligonucleotide
cuccgggccggacuccgga

SEQ ID NO: 1335004 - RNA, 19 nt, Artificial Sequence
  Description of Artificial Sequence: Synthetic oligonucleotide
ccgcuggauucauggcugc

SEQ ID NO: 1335005 - RNA, 19 nt, Artificial Sequence
  Description of Artificial Sequence: Synthetic oligonucleotide
ggugguacggugaguugua

SEQ ID NO: 1335006 - RNA, 19 nt, Artificial Sequence
  Description of Artificial Sequence: Synthetic oligonucleotide
ccaggauguaggucaucga

SEQ ID NO: 1335007 - RNA, 19 nt, Artificial Sequence
  Description of Artificial Sequence: Synthetic oligonucleotide
cucguacuccgggccggac

SEQ ID NO: 1335008 - RNA, 19 nt, Artificial Sequence
  Description of Artificial Sequence: Synthetic oligonucleotide
ccggccccuucauuuugcc

SEQ ID NO: 1335009 - RNA, 19 nt, Artificial Sequence
  Description of Artificial Sequence: Synthetic oligonucleotide
ccauuggcaauauggcuau

SEQ ID NO: 1335010 - RNA, 19 nt, Artificial Sequence
  Description of Artificial Sequence: Synthetic oligonucleotide
cuccgcccgggcccagcag

SEQ ID NO: 1335011 - RNA, 19 nt, Artificial Sequence
  Description of Artificial Sequence: Synthetic oligonucleotide
ccgggucuugacgcagucg

SEQ ID NO: 1335012 - RNA, 19 nt, Artificial Sequence
  Description of Artificial Sequence: Synthetic oligonucleotide
ccgcaugggccuccacagg

SEQ ID NO: 1335013 - RNA, 19 nt, Artificial Sequence
  Description of Artificial Sequence: Synthetic oligonucleotide
gccugugauauguccugua

SEQ ID NO: 1335014 - RNA, 19 nt, Artificial Sequence
  Description of Artificial Sequence: Synthetic oligonucleotide
gcugggguuguagcgucuc

SEQ ID NO: 1335015 - RNA, 19 nt, Artificial Sequence
  Description of Artificial Sequence: Synthetic oligonucleotide
cgauggugguaacagacgu

SEQ ID NO: 1335016 - RNA, 19 nt, Artificial Sequence
  Description of Artificial Sequence: Synthetic oligonucleotide
gcuuaucccucuguaucua

SEQ ID NO: 1335017 - RNA, 19 nt, Artificial Sequence
  Description of Artificial Sequence: Synthetic oligonucleotide
gggucuugacgcagucgac

SEQ ID NO: 1335018 - RNA, 19 nt, Artificial Sequence
  Description of Artificial Sequence: Synthetic oligonucleotide
ccacaccgccugcacuccg

SEQ ID NO: 1335019 - RNA, 19 nt, Artificial Sequence
  Description of Artificial Sequence: Synthetic oligonucleotide
gcaaacguccagugggguu

SEQ ID NO: 1335020 - RNA, 19 nt, Artificial Sequence
  Description of Artificial Sequence: Synthetic oligonucleotide
gcccucuguucuuauaauu

SEQ ID NO: 1335021 - RNA, 19 nt, Artificial Sequence
  Description of Artificial Sequence: Synthetic oligonucleotide
cgggccggacuccggaucc

SEQ ID NO: 1335022 - RNA, 19 nt, Artificial Sequence
  Description of Artificial Sequence: Synthetic oligonucleotide
cagcgccgacuccccgggg

SEQ ID NO: 1335023 - RNA, 19 nt, Artificial Sequence
  Description of Artificial Sequence: Synthetic oligonucleotide
gggucguguagcugcggua

SEQ ID NO: 1335024 - RNA, 19 nt, Artificial Sequence
  Description of Artificial Sequence: Synthetic oligonucleotide
ccggugguacggugaguug

SEQ ID NO: 1335025 - RNA, 19 nt, Artificial Sequence
  Description of Artificial Sequence: Synthetic oligonucleotide
ccccgccuacuugauaaac

SEQ ID NO: 1335026 - RNA, 19 nt, Artificial Sequence
  Description of Artificial Sequence: Synthetic oligonucleotide
ccggcagcgccucguacuc

SEQ ID NO: 1335027 - RNA, 19 nt, Artificial Sequence
  Description of Artificial Sequence: Synthetic oligonucleotide
cugccacggcgcccgccac

SEQ ID NO: 1335028 - RNA, 19 nt, Artificial Sequence
  Description of Artificial Sequence: Synthetic oligonucleotide
caggcuccggagagcacgu

SEQ ID NO: 1335029 - RNA, 19 nt, Artificial Sequence
  Description of Artificial Sequence: Synthetic oligonucleotide
cugcccguacacagucugu

SEQ ID NO: 1335030 - RNA, 19 nt, Artificial Sequence
  Description of Artificial Sequence: Synthetic oligonucleotide
cgccucguacuccgggccg

SEQ ID NO: 1335031 - RNA, 19 nt, Artificial Sequence
  Description of Artificial Sequence: Synthetic oligonucleotide
cacuugccugcccuccacu

SEQ ID NO: 1335032 - RNA, 19 nt, Artificial Sequence
  Description of Artificial Sequence: Synthetic oligonucleotide
aggcuccggagagcacgug

SEQ ID NO: 1335033 - RNA, 19 nt, Artificial Sequence
  Description of Artificial Sequence: Synthetic oligonucleotide
gcgcaggcuccggagagca

SEQ ID NO: 1335034 - RNA, 19 nt, Artificial Sequence
  Description of Artificial Sequence: Synthetic oligonucleotide
cacaggcccucuguucuua

SEQ ID NO: 1335035 - RNA, 19 nt, Artificial Sequence
  Description of Artificial Sequence: Synthetic oligonucleotide
ccccuggguggauuacauc

SEQ ID NO: 1335036 - RNA, 19 nt, Artificial Sequence
  Description of Artificial Sequence: Synthetic oligonucleotide
cacugcccguacacagucu

SEQ ID NO: 1335037 - RNA, 19 nt, Artificial Sequence
  Description of Artificial Sequence: Synthetic oligonucleotide
gccccguugcguccgccuc

SEQ ID NO: 1335038 - RNA, 19 nt, Artificial Sequence
  Description of Artificial Sequence: Synthetic oligonucleotide
cccguugcguccgccucag

SEQ ID NO: 1335039 - RNA, 19 nt, Artificial Sequence
  Description of Artificial Sequence: Synthetic oligonucleotide
gccaugccugugauauguc

SEQ ID NO: 1335040 - RNA, 19 nt, Artificial Sequence
  Description of Artificial Sequence: Synthetic oligonucleotide
ccgggccggacuccggauc

SEQ ID NO: 1335041 - RNA, 19 nt, Artificial Sequence
  Description of Artificial Sequence: Synthetic oligonucleotide
gcccuccacucuucuuguc

SEQ ID NO: 1335042 - RNA, 19 nt, Artificial Sequence
  Description of Artificial Sequence: Synthetic oligonucleotide
ccacucgggccagccgcgg

SEQ ID NO: 1335043 - RNA, 19 nt, Artificial Sequence
  Description of Artificial Sequence: Synthetic oligonucleotide
gccccgcugcagccacccg

SEQ ID NO: 1335044 - RNA, 19 nt, Artificial Sequence
  Description of Artificial Sequence: Synthetic oligonucleotide
ccgcgccuguugcugugac

SEQ ID NO: 1335045 - RNA, 19 nt, Artificial Sequence
  Description of Artificial Sequence: Synthetic oligonucleotide
gcacuccgccccuccaacu

SEQ ID NO: 1335046 - RNA, 19 nt, Artificial Sequence
  Description of Artificial Sequence: Synthetic oligonucleotide
gcccgccaccaugugcgug

SEQ ID NO: 1335047 - RNA, 19 nt, Artificial Sequence
  Description of Artificial Sequence: Synthetic oligonucleotide
ccgguccucccgccacacc

SEQ ID NO: 1335048 - RNA, 19 nt, Artificial Sequence
  Description of Artificial Sequence: Synthetic oligonucleotide
cguuggcaagaacuagugu

SEQ ID NO: 1335049 - RNA, 19 nt, Artificial Sequence
  Description of Artificial Sequence: Synthetic oligonucleotide
ggaggggaucugguaaauu

SEQ ID NO: 1335050 - RNA, 19 nt, Artificial Sequence
  Description of Artificial Sequence: Synthetic oligonucleotide
ccccguugcguccgccuca

SEQ ID NO: 1335051 - RNA, 19 nt, Artificial Sequence
  Description of Artificial Sequence: Synthetic oligonucleotide
ggccccguugcguccgccu

SEQ ID NO: 1335052 - RNA, 19 nt, Artificial Sequence
  Description of Artificial Sequence: Synthetic oligonucleotide
cgccuacuugauaaaccgu

SEQ ID NO: 1335053 - RNA, 19 nt, Artificial Sequence
  Description of Artificial Sequence: Synthetic oligonucleotide
cggugguacggugaguugu

SEQ ID NO: 1335054 - RNA, 19 nt, Artificial Sequence
  Description of Artificial Sequence: Synthetic oligonucleotide
cgcgccgccgccgccgccg

SEQ ID NO: 1335055 - RNA, 19 nt, Artificial Sequence
  Description of Artificial Sequence: Synthetic oligonucleotide
gccacccguccagcagcgc

SEQ ID NO: 1335056 - RNA, 19 nt, Artificial Sequence
  Description of Artificial Sequence: Synthetic oligonucleotide
ccaugugcguggugacagu

SEQ ID NO: 1335057 - RNA, 19 nt, Artificial Sequence
  Description of Artificial Sequence: Synthetic oligonucleotide
ccguugcguccgccucagg

SEQ ID NO: 1335058 - RNA, 19 nt, Artificial Sequence
  Description of Artificial Sequence: Synthetic oligonucleotide
gcgccgacuccccggggcu

SEQ ID NO: 1335059 - RNA, 19 nt, Artificial Sequence
  Description of Artificial Sequence: Synthetic oligonucleotide
gccgccgccgccgccgcca

SEQ ID NO: 1335060 - RNA, 19 nt, Artificial Sequence
  Description of Artificial Sequence: Synthetic oligonucleotide
cgcuggauucauggcugca

SEQ ID NO: 1335061 - RNA, 19 nt, Artificial Sequence
  Description of Artificial Sequence: Synthetic oligonucleotide
ccucguacuccgggccgga

SEQ ID NO: 1335062 - RNA, 19 nt, Artificial Sequence
  Description of Artificial Sequence: Synthetic oligonucleotide
cccgcgccgccgccgccgc

SEQ ID NO: 1335063 - RNA, 19 nt, Artificial Sequence
  Description of Artificial Sequence: Synthetic oligonucleotide
cggcagcgccucguacucc

SEQ ID NO: 1335064 - RNA, 19 nt, Artificial Sequence
  Description of Artificial Sequence: Synthetic oligonucleotide
gccccggccccuucauuuu

SEQ ID NO: 1335065 - RNA, 19 nt, Artificial Sequence
  Description of Artificial Sequence: Synthetic oligonucleotide
gcgccgccgccgccgccgc

SEQ ID NO: 1335066 - RNA, 19 nt, Artificial Sequence
  Description of Artificial Sequence: Synthetic oligonucleotide
cccgcgccuguugcuguga

SEQ ID NO: 1335067 - RNA, 19 nt, Artificial Sequence
  Description of Artificial Sequence: Synthetic oligonucleotide
gggccggacuccggauccu

SEQ ID NO: 1335068 - RNA, 19 nt, Artificial Sequence
  Description of Artificial Sequence: Synthetic oligonucleotide
cgacuccccggggcuccgc

SEQ ID NO: 1335069 - RNA, 19 nt, Artificial Sequence
  Description of Artificial Sequence: Synthetic oligonucleotide
ccgccgccgccgccgccac

SEQ ID NO: 1335070 - RNA, 19 nt, Artificial Sequence
  Description of Artificial Sequence: Synthetic oligonucleotide
gggcuccgcccgggcccag

SEQ ID NO: 1335071 - RNA, 19 nt, Artificial Sequence
  Description of Artificial Sequence: Synthetic oligonucleotide
cggccccguugcguccgcc

SEQ ID NO: 1335072 - RNA, 19 nt, Artificial Sequence
  Description of Artificial Sequence: Synthetic oligonucleotide
ccgcgccgccgccgccgcc

SEQ ID NO: 1335073 - RNA, 19 nt, Artificial Sequence
  Description of Artificial Sequence: Synthetic oligonucleotide
cgccgccgccgccgccgcc

SEQ ID NO: 1335074 - RNA, 19 nt, Artificial Sequence
  Description of Artificial Sequence: Synthetic oligonucleotide
cgcccgccaccaugugcgu

SEQ ID NO: 1335075 - RNA, 19 nt, Artificial Sequence
  Description of Artificial Sequence: Synthetic oligonucleotide
cgcagucgaccggguacau

SEQ ID NO: 1335076 - RNA, 19 nt, Artificial Sequence
  Description of Artificial Sequence: Synthetic oligonucleotide
uuuauguuaauaaagaugg

SEQ ID NO: 1335077 - RNA, 19 nt, Artificial Sequence
  Description of Artificial Sequence: Synthetic oligonucleotide
aauguuuuagauuugagcu

SEQ ID NO: 1335078 - RNA, 19 nt, Artificial Sequence
  Description of Artificial Sequence: Synthetic oligonucleotide
uuaucaaucaucaagacac

SEQ ID NO: 1335079 - RNA, 19 nt, Artificial Sequence
  Description of Artificial Sequence: Synthetic oligonucleotide
aaucccuuuaacuucacgg

SEQ ID NO: 1335080 - RNA, 19 nt, Artificial Sequence
  Description of Artificial Sequence: Synthetic oligonucleotide
uuaacuucacggaauaugg

SEQ ID NO: 1335081 - RNA, 19 nt, Artificial Sequence
  Description of Artificial Sequence: Synthetic oligonucleotide
cuagauaagauagaaaucg

SEQ ID NO: 1335082 - RNA, 19 nt, Artificial Sequence
  Description of Artificial Sequence: Synthetic oligonucleotide
aacaagauuugcuuucgcc

SEQ ID NO: 1335083 - RNA, 19 nt, Artificial Sequence
  Description of Artificial Sequence: Synthetic oligonucleotide
uauaaccuaacacugcugg

SEQ ID NO: 1335084 - RNA, 19 nt, Artificial Sequence
  Description of Artificial Sequence: Synthetic oligonucleotide
aaggccuugacucagauga

SEQ ID NO: 1335085 - RNA, 19 nt, Artificial Sequence
  Description of Artificial Sequence: Synthetic oligonucleotide
aguccugagaaguauaacc

SEQ ID NO: 1335086 - RNA, 19 nt, Artificial Sequence
  Description of Artificial Sequence: Synthetic oligonucleotide
agaaguauaaccuaacacu

SEQ ID NO: 1335087 - RNA, 19 nt, Artificial Sequence
  Description of Artificial Sequence: Synthetic oligonucleotide
aacuacuacaauugagccc

SEQ ID NO: 1335088 - RNA, 19 nt, Artificial Sequence
  Description of Artificial Sequence: Synthetic oligonucleotide
gaacaauaaaggaagaagg

SEQ ID NO: 1335089 - RNA, 19 nt, Artificial Sequence
  Description of Artificial Sequence: Synthetic oligonucleotide
ugcuauuuuaugaaugagg

SEQ ID NO: 1335090 - RNA, 19 nt, Artificial Sequence
  Description of Artificial Sequence: Synthetic oligonucleotide
aguacuguaacucaaguga

SEQ ID NO: 1335091 - RNA, 19 nt, Artificial Sequence
  Description of Artificial Sequence: Synthetic oligonucleotide
caagcaaacggcuugaugc

SEQ ID NO: 1335092 - RNA, 19 nt, Artificial Sequence
  Description of Artificial Sequence: Synthetic oligonucleotide
uguauagccaaucagaauu

SEQ ID NO: 1335093 - RNA, 19 nt, Artificial Sequence
  Description of Artificial Sequence: Synthetic oligonucleotide
uuaacuagauuacaagacc

SEQ ID NO: 1335094 - RNA, 19 nt, Artificial Sequence
  Description of Artificial Sequence: Synthetic oligonucleotide
uuuauguaaacccauugcu

SEQ ID NO: 1335095 - RNA, 19 nt, Artificial Sequence
  Description of Artificial Sequence: Synthetic oligonucleotide
aacucaagugaucaacuac

SEQ ID NO: 1335096 - RNA, 19 nt, Artificial Sequence
  Description of Artificial Sequence: Synthetic oligonucleotide
uguuaagacaaaaugugug

SEQ ID NO: 1335097 - RNA, 19 nt, Artificial Sequence
  Description of Artificial Sequence: Synthetic oligonucleotide
uucauuugaggccagaaca

SEQ ID NO: 1335098 - RNA, 19 nt, Artificial Sequence
  Description of Artificial Sequence: Synthetic oligonucleotide
aaucugcuaaucuagauaa

SEQ ID NO: 1335099 - RNA, 19 nt, Artificial Sequence
  Description of Artificial Sequence: Synthetic oligonucleotide
uauguuaacaagcuuuuca

SEQ ID NO: 1335100 - RNA, 19 nt, Artificial Sequence
  Description of Artificial Sequence: Synthetic oligonucleotide
aaaugguaaccucagacca

SEQ ID NO: 1335101 - RNA, 19 nt, Artificial Sequence
  Description of Artificial Sequence: Synthetic oligonucleotide
ugagguuuaacuauucuga

SEQ ID NO: 1335102 - RNA, 19 nt, Artificial Sequence
  Description of Artificial Sequence: Synthetic oligonucleotide
uuuaaugcugcuaaugccu

SEQ ID NO: 1335103 - RNA, 19 nt, Artificial Sequence
  Description of Artificial Sequence: Synthetic oligonucleotide
aaaucgacaaacuuguuua

SEQ ID NO: 1335104 - RNA, 19 nt, Artificial Sequence
  Description of Artificial Sequence: Synthetic oligonucleotide
uguaaaagauguuaagaca

SEQ ID NO: 1335105 - RNA, 19 nt, Artificial Sequence
  Description of Artificial Sequence: Synthetic oligonucleotide
aaagaugaguuuuaaugcu

SEQ ID NO: 1335106 - RNA, 19 nt, Artificial Sequence
  Description of Artificial Sequence: Synthetic oligonucleotide
uagauuacaagaccaguag

SEQ ID NO: 1335107 - RNA, 19 nt, Artificial Sequence
  Description of Artificial Sequence: Synthetic oligonucleotide
auauugaucauaucucuag

SEQ ID NO: 1335108 - RNA, 19 nt, Artificial Sequence
  Description of Artificial Sequence: Synthetic oligonucleotide
auauucauuuaauacacca

SEQ ID NO: 1335109 - RNA, 19 nt, Artificial Sequence
  Description of Artificial Sequence: Synthetic oligonucleotide
ugugugagcaguuauuacc

SEQ ID NO: 1335110 - RNA, 19 nt, Artificial Sequence
  Description of Artificial Sequence: Synthetic oligonucleotide
ucaauaaucccuuuaacuu

SEQ ID NO: 1335111 - RNA, 19 nt, Artificial Sequence
  Description of Artificial Sequence: Synthetic oligonucleotide
caaaacaagauuucuaguc

SEQ ID NO: 1335112 - RNA, 19 nt, Artificial Sequence
  Description of Artificial Sequence: Synthetic oligonucleotide
guaugcaaaacucuuuggg

SEQ ID NO: 1335113 - RNA, 19 nt, Artificial Sequence
  Description of Artificial Sequence: Synthetic oligonucleotide
aagcaaacggcuugaugcc

SEQ ID NO: 1335114 - RNA, 19 nt, Artificial Sequence
  Description of Artificial Sequence: Synthetic oligonucleotide
aguaagaguacuguaacuc

SEQ ID NO: 1335115 - RNA, 19 nt, Artificial Sequence
  Description of Artificial Sequence: Synthetic oligonucleotide
auaagauagaaaucgacaa

SEQ ID NO: 1335116 - RNA, 19 nt, Artificial Sequence
  Description of Artificial Sequence: Synthetic oligonucleotide
uuaauaaagauggccacag

SEQ ID NO: 1335117 - RNA, 19 nt, Artificial Sequence
  Description of Artificial Sequence: Synthetic oligonucleotide
gauacucagguauaggcug

SEQ ID NO: 1335118 - RNA, 19 nt, Artificial Sequence
  Description of Artificial Sequence: Synthetic oligonucleotide
agucuuacgauuucccugg

SEQ ID NO: 1335119 - RNA, 19 nt, Artificial Sequence
  Description of Artificial Sequence: Synthetic oligonucleotide
uguagugauggacagacuc

SEQ ID NO: 1335120 - RNA, 19 nt, Artificial Sequence
  Description of Artificial Sequence: Synthetic oligonucleotide
aacuucacggaauauggca

SEQ ID NO: 1335121 - RNA, 19 nt, Artificial Sequence
  Description of Artificial Sequence: Synthetic oligonucleotide
uguuuuagauuugagcuag

SEQ ID NO: 1335122 - RNA, 19 nt, Artificial Sequence
  Description of Artificial Sequence: Synthetic oligonucleotide
uuuucggacauauucaaaa

SEQ ID NO: 1335123 - RNA, 19 nt, Artificial Sequence
  Description of Artificial Sequence: Synthetic oligonucleotide
aauauucauuuaauacacc

SEQ ID NO: 1335124 - RNA, 19 nt, Artificial Sequence
  Description of Artificial Sequence: Synthetic oligonucleotide
gguuucuuuacacauaugc

SEQ ID NO: 1335125 - RNA, 19 nt, Artificial Sequence
  Description of Artificial Sequence: Synthetic oligonucleotide
cuuuauguaaacccauugc

SEQ ID NO: 1335126 - RNA, 19 nt, Artificial Sequence
  Description of Artificial Sequence: Synthetic oligonucleotide
ugcuaaugccuucauauug

SEQ ID NO: 1335127 - RNA, 19 nt, Artificial Sequence
  Description of Artificial Sequence: Synthetic oligonucleotide
gagaaguauaaccuaacac

SEQ ID NO: 1335128 - RNA, 19 nt, Artificial Sequence
  Description of Artificial Sequence: Synthetic oligonucleotide
aauggaugaacuuuaugua

SEQ ID NO: 1335129 - RNA, 19 nt, Artificial Sequence
  Description of Artificial Sequence: Synthetic oligonucleotide
uaguaugcaaaacucuuug

SEQ ID NO: 1335130 - RNA, 19 nt, Artificial Sequence
  Description of Artificial Sequence: Synthetic oligonucleotide
uggauacucagguauaggc

SEQ ID NO: 1335131 - RNA, 19 nt, Artificial Sequence
  Description of Artificial Sequence: Synthetic oligonucleotide
uaugcaaaacucuuuggga

SEQ ID NO: 1335132 - RNA, 19 nt, Artificial Sequence
  Description of Artificial Sequence: Synthetic oligonucleotide
ucuaagcagauuaucaauc

SEQ ID NO: 1335133 - RNA, 19 nt, Artificial Sequence
  Description of Artificial Sequence: Synthetic oligonucleotide
ugugcuauuuuaugaauga

SEQ ID NO: 1335134 - RNA, 19 nt, Artificial Sequence
  Description of Artificial Sequence: Synthetic oligonucleotide
uuuagauuugagcuagaac

SEQ ID NO: 1335135 - RNA, 19 nt, Artificial Sequence
  Description of Artificial Sequence: Synthetic oligonucleotide
uauguaaacccauugcuau

SEQ ID NO: 1335136 - RNA, 19 nt, Artificial Sequence
  Description of Artificial Sequence: Synthetic oligonucleotide
ugcccuauuaucuuuaauc

SEQ ID NO: 1335137 - RNA, 19 nt, Artificial Sequence
  Description of Artificial Sequence: Synthetic oligonucleotide
guauucuuaguacaggcug

SEQ ID NO: 1335138 - RNA, 19 nt, Artificial Sequence
  Description of Artificial Sequence: Synthetic oligonucleotide
auuaggaucauaacuagug

SEQ ID NO: 1335139 - RNA, 19 nt, Artificial Sequence
  Description of Artificial Sequence: Synthetic oligonucleotide
acagguaauaauuuguaaa

SEQ ID NO: 1335140 - RNA, 19 nt, Artificial Sequence
  Description of Artificial Sequence: Synthetic oligonucleotide
aguauaaccuaacacugcu

SEQ ID NO: 1335141 - RNA, 19 nt, Artificial Sequence
  Description of Artificial Sequence: Synthetic oligonucleotide
aagcagauuaucaaucauc

SEQ ID NO: 1335142 - RNA, 19 nt, Artificial Sequence
  Description of Artificial Sequence: Synthetic oligonucleotide
gaguauucuuaguacaggc

SEQ ID NO: 1335143 - RNA, 19 nt, Artificial Sequence
  Description of Artificial Sequence: Synthetic oligonucleotide
uuaagacaaaaugugugag

SEQ ID NO: 1335144 - RNA, 19 nt, Artificial Sequence
  Description of Artificial Sequence: Synthetic oligonucleotide
uucagaguaauaacagucu

SEQ ID NO: 1335145 - RNA, 19 nt, Artificial Sequence
  Description of Artificial Sequence: Synthetic oligonucleotide
ucaauaagugucaccacac

SEQ ID NO: 1335146 - RNA, 19 nt, Artificial Sequence
  Description of Artificial Sequence: Synthetic oligonucleotide
ucgacaaacuuguuuaucu

SEQ ID NO: 1335147 - RNA, 19 nt, Artificial Sequence
  Description of Artificial Sequence: Synthetic oligonucleotide
uauugaucauaucucuagc

SEQ ID NO: 1335148 - RNA, 19 nt, Artificial Sequence
  Description of Artificial Sequence: Synthetic oligonucleotide
ucuaaggucuggaugcaag

SEQ ID NO: 1335149 - RNA, 19 nt, Artificial Sequence
  Description of Artificial Sequence: Synthetic oligonucleotide
gcuaaucuagauaagauag

SEQ ID NO: 1335150 - RNA, 19 nt, Artificial Sequence
  Description of Artificial Sequence: Synthetic oligonucleotide
ucuagauaagauagaaauc

SEQ ID NO: 1335151 - RNA, 19 nt, Artificial Sequence
  Description of Artificial Sequence: Synthetic oligonucleotide
aaaaugugugagcaguuau

SEQ ID NO: 1335152 - RNA, 19 nt, Artificial Sequence
  Description of Artificial Sequence: Synthetic oligonucleotide
acaagauuugcuuucgccu

SEQ ID NO: 1335153 - RNA, 19 nt, Artificial Sequence
  Description of Artificial Sequence: Synthetic oligonucleotide
aucauaacuagugucaucu

SEQ ID NO: 1335154 - RNA, 19 nt, Artificial Sequence
  Description of Artificial Sequence: Synthetic oligonucleotide
ucuagucuuacgauuuccc

SEQ ID NO: 1335155 - RNA, 19 nt, Artificial Sequence
  Description of Artificial Sequence: Synthetic oligonucleotide
ucugaucuugauuuguugu

SEQ ID NO: 1335156 - RNA, 19 nt, Artificial Sequence
  Description of Artificial Sequence: Synthetic oligonucleotide
ugagcaguuauuaccaaaa

SEQ ID NO: 1335157 - RNA, 19 nt, Artificial Sequence
  Description of Artificial Sequence: Synthetic oligonucleotide
ugaucgaguauucuuagua

SEQ ID NO: 1335158 - RNA, 19 nt, Artificial Sequence
  Description of Artificial Sequence: Synthetic oligonucleotide
cuuacgauuucccugggac

SEQ ID NO: 1335159 - RNA, 19 nt, Artificial Sequence
  Description of Artificial Sequence: Synthetic oligonucleotide
aauauggcaguaagaguac

SEQ ID NO: 1335160 - RNA, 19 nt, Artificial Sequence
  Description of Artificial Sequence: Synthetic oligonucleotide
agauaagauagaaaucgac

SEQ ID NO: 1335161 - RNA, 19 nt, Artificial Sequence
  Description of Artificial Sequence: Synthetic oligonucleotide
aguaugcaaaacucuuugg

SEQ ID NO: 1335162 - RNA, 19 nt, Artificial Sequence
  Description of Artificial Sequence: Synthetic oligonucleotide
uagccaaucagaauuugga

SEQ ID NO: 1335163 - RNA, 19 nt, Artificial Sequence
  Description of Artificial Sequence: Synthetic oligonucleotide
uuugcaagggcaagcaaac

SEQ ID NO: 1335164 - RNA, 19 nt, Artificial Sequence
  Description of Artificial Sequence: Synthetic oligonucleotide
gaauguauagccaaucaga

SEQ ID NO: 1335165 - RNA, 19 nt, Artificial Sequence
  Description of Artificial Sequence: Synthetic oligonucleotide
aaauaguaugcaaaacucu

SEQ ID NO: 1335166 - RNA, 19 nt, Artificial Sequence
  Description of Artificial Sequence: Synthetic oligonucleotide
cuauuuuaugaaugagggg

SEQ ID NO: 1335167 - RNA, 19 nt, Artificial Sequence
  Description of Artificial Sequence: Synthetic oligonucleotide
uuacacauaugcuucacau

SEQ ID NO: 1335168 - RNA, 19 nt, Artificial Sequence
  Description of Artificial Sequence: Synthetic oligonucleotide
agauuaucaaucaucaaga

SEQ ID NO: 1335169 - RNA, 19 nt, Artificial Sequence
  Description of Artificial Sequence: Synthetic oligonucleotide
agccaaucagaauuuggac

SEQ ID NO: 1335170 - RNA, 19 nt, Artificial Sequence
  Description of Artificial Sequence: Synthetic oligonucleotide
aaguauguuaacaagcuuu

SEQ ID NO: 1335171 - RNA, 19 nt, Artificial Sequence
  Description of Artificial Sequence: Synthetic oligonucleotide
uuguuuaucucaauauuua

SEQ ID NO: 1335172 - RNA, 19 nt, Artificial Sequence
  Description of Artificial Sequence: Synthetic oligonucleotide
aauggauacucagguauag

SEQ ID NO: 1335173 - RNA, 19 nt, Artificial Sequence
  Description of Artificial Sequence: Synthetic oligonucleotide
uuauguaaacccauugcua

SEQ ID NO: 1335174 - RNA, 19 nt, Artificial Sequence
  Description of Artificial Sequence: Synthetic oligonucleotide
uguaacucaagugaucaac

SEQ ID NO: 1335175 - RNA, 19 nt, Artificial Sequence
  Description of Artificial Sequence: Synthetic oligonucleotide
uaacuauucugaacacagg

SEQ ID NO: 1335176 - RNA, 19 nt, Artificial Sequence
  Description of Artificial Sequence: Synthetic oligonucleotide
uuccuuacguaaaauuaug

SEQ ID NO: 1335177 - RNA, 19 nt, Artificial Sequence
  Description of Artificial Sequence: Synthetic oligonucleotide
aauaguaugcaaaacucuu

SEQ ID NO: 1335178 - RNA, 19 nt, Artificial Sequence
  Description of Artificial Sequence: Synthetic oligonucleotide
ugauggacagacucuguag

SEQ ID NO: 1335179 - RNA, 19 nt, Artificial Sequence
  Description of Artificial Sequence: Synthetic oligonucleotide
cagguuuaggauuaggauc

SEQ ID NO: 1335180 - RNA, 19 nt, Artificial Sequence
  Description of Artificial Sequence: Synthetic oligonucleotide
uagucuuacgauuucccug

SEQ ID NO: 1335181 - RNA, 19 nt, Artificial Sequence
  Description of Artificial Sequence: Synthetic oligonucleotide
caauaaucccuuuaacuuc

SEQ ID NO: 1335182 - RNA, 19 nt, Artificial Sequence
  Description of Artificial Sequence: Synthetic oligonucleotide
gguaauaauuuguaaaaga

SEQ ID NO: 1335183 - RNA, 19 nt, Artificial Sequence
  Description of Artificial Sequence: Synthetic oligonucleotide
uauucuuaguacaggcugu

SEQ ID NO: 1335184 - RNA, 19 nt, Artificial Sequence
  Description of Artificial Sequence: Synthetic oligonucleotide
uaucucaauauuuaauauu

SEQ ID NO: 1335185 - RNA, 19 nt, Artificial Sequence
  Description of Artificial Sequence: Synthetic oligonucleotide
uagauaagauagaaaucga

SEQ ID NO: 1335186 - RNA, 19 nt, Artificial Sequence
  Description of Artificial Sequence: Synthetic oligonucleotide
ugagcaggcuuucaauaag

SEQ ID NO: 1335187 - RNA, 19 nt, Artificial Sequence
  Description of Artificial Sequence: Synthetic oligonucleotide
auguuaauaaagauggcca

SEQ ID NO: 1335188 - RNA, 19 nt, Artificial Sequence
  Description of Artificial Sequence: Synthetic oligonucleotide
uuuaacuauucugaacaca

SEQ ID NO: 1335189 - RNA, 19 nt, Artificial Sequence
  Description of Artificial Sequence: Synthetic oligonucleotide
uuuaauccagauugcuggc

SEQ ID NO: 1335190 - RNA, 19 nt, Artificial Sequence
  Description of Artificial Sequence: Synthetic oligonucleotide
gaucgaguauucuuaguac

SEQ ID NO: 1335191 - RNA, 19 nt, Artificial Sequence
  Description of Artificial Sequence: Synthetic oligonucleotide
ugagcccuuucuaauaugu

SEQ ID NO: 1335192 - RNA, 19 nt, Artificial Sequence
  Description of Artificial Sequence: Synthetic oligonucleotide
uaucuuuaauccagauugc

SEQ ID NO: 1335193 - RNA, 19 nt, Artificial Sequence
  Description of Artificial Sequence: Synthetic oligonucleotide
uguuuaucucaauauuuaa

SEQ ID NO: 1335194 - RNA, 19 nt, Artificial Sequence
  Description of Artificial Sequence: Synthetic oligonucleotide
uucacaugaaauucaacuu

SEQ ID NO: 1335195 - RNA, 19 nt, Artificial Sequence
  Description of Artificial Sequence: Synthetic oligonucleotide
gaugaacuuuauguaaacc

SEQ ID NO: 1335196 - RNA, 19 nt, Artificial Sequence
  Description of Artificial Sequence: Synthetic oligonucleotide
uaauccagauugcuggcca

SEQ ID NO: 1335197 - RNA, 19 nt, Artificial Sequence
  Description of Artificial Sequence: Synthetic oligonucleotide
uacgauuucccugggacag

SEQ ID NO: 1335198 - RNA, 19 nt, Artificial Sequence
  Description of Artificial Sequence: Synthetic oligonucleotide
ucuuaguacaggcuguuuu

SEQ ID NO: 1335199 - RNA, 19 nt, Artificial Sequence
  Description of Artificial Sequence: Synthetic oligonucleotide
agacacgguuucuuuacac

SEQ ID NO: 1335200 - RNA, 19 nt, Artificial Sequence
  Description of Artificial Sequence: Synthetic oligonucleotide
aguuagcugcccuauuauc

SEQ ID NO: 1335201 - RNA, 19 nt, Artificial Sequence
  Description of Artificial Sequence: Synthetic oligonucleotide
uuaugaaugaggggaucgg

SEQ ID NO: 1335202 - RNA, 19 nt, Artificial Sequence
  Description of Artificial Sequence: Synthetic oligonucleotide
aacuagauuacaagaccag

SEQ ID NO: 1335203 - RNA, 19 nt, Artificial Sequence
  Description of Artificial Sequence: Synthetic oligonucleotide
acuguaacucaagugauca

SEQ ID NO: 1335204 - RNA, 19 nt, Artificial Sequence
  Description of Artificial Sequence: Synthetic oligonucleotide
aaacccauugcuaucugug

SEQ ID NO: 1335205 - RNA, 19 nt, Artificial Sequence
  Description of Artificial Sequence: Synthetic oligonucleotide
cuaaggucuggaugcaagg

SEQ ID NO: 1335206 - RNA, 19 nt, Artificial Sequence
  Description of Artificial Sequence: Synthetic oligonucleotide
uucuggaucauuuuacauu

SEQ ID NO: 1335207 - RNA, 19 nt, Artificial Sequence
  Description of Artificial Sequence: Synthetic oligonucleotide
ggcaacaauguagugaugg

SEQ ID NO: 1335208 - RNA, 19 nt, Artificial Sequence
  Description of Artificial Sequence: Synthetic oligonucleotide
uccuuacguaaaauuaugu

SEQ ID NO: 1335209 - RNA, 19 nt, Artificial Sequence
  Description of Artificial Sequence: Synthetic oligonucleotide
aauugagcccuuucuaaua

SEQ ID NO: 1335210 - RNA, 19 nt, Artificial Sequence
  Description of Artificial Sequence: Synthetic oligonucleotide
ugcuaaucuagauaagaua

SEQ ID NO: 1335211 - RNA, 19 nt, Artificial Sequence
  Description of Artificial Sequence: Synthetic oligonucleotide
uuaggauuaggaucauaac

SEQ ID NO: 1335212 - RNA, 19 nt, Artificial Sequence
  Description of Artificial Sequence: Synthetic oligonucleotide
uuacaagaccaguaguuuc

SEQ ID NO: 1335213 - RNA, 19 nt, Artificial Sequence
  Description of Artificial Sequence: Synthetic oligonucleotide
uuugguuaaagaugaguuu

SEQ ID NO: 1335214 - RNA, 19 nt, Artificial Sequence
  Description of Artificial Sequence: Synthetic oligonucleotide
agguaauaauuuguaaaag

SEQ ID NO: 1335215 - RNA, 19 nt, Artificial Sequence
  Description of Artificial Sequence: Synthetic oligonucleotide
uugguuaaagaugaguuuu

SEQ ID NO: 1335216 - RNA, 19 nt, Artificial Sequence
  Description of Artificial Sequence: Synthetic oligonucleotide
ucuuucaauaaucccuuua

SEQ ID NO: 1335217 - RNA, 19 nt, Artificial Sequence
  Description of Artificial Sequence: Synthetic oligonucleotide
augcaaaacucuuugggaa

SEQ ID NO: 1335218 - RNA, 19 nt, Artificial Sequence
  Description of Artificial Sequence: Synthetic oligonucleotide
agauuacaagaccaguagu

SEQ ID NO: 1335219 - RNA, 19 nt, Artificial Sequence
  Description of Artificial Sequence: Synthetic oligonucleotide
agaucuaagcagauuauca

SEQ ID NO: 1335220 - RNA, 19 nt, Artificial Sequence
  Description of Artificial Sequence: Synthetic oligonucleotide
uuuucuaguuucuggggaa

SEQ ID NO: 1335221 - RNA, 19 nt, Artificial Sequence
  Description of Artificial Sequence: Synthetic oligonucleotide
agcagauuaucaaucauca

SEQ ID NO: 1335222 - RNA, 19 nt, Artificial Sequence
  Description of Artificial Sequence: Synthetic oligonucleotide
cugugcuauuuuaugaaug

SEQ ID NO: 1335223 - RNA, 19 nt, Artificial Sequence
  Description of Artificial Sequence: Synthetic oligonucleotide
aagauuugcuuucgccucu

SEQ ID NO: 1335224 - RNA, 19 nt, Artificial Sequence
  Description of Artificial Sequence: Synthetic oligonucleotide
acaauugagcccuuucuaa

SEQ ID NO: 1335225 - RNA, 19 nt, Artificial Sequence
  Description of Artificial Sequence: Synthetic oligonucleotide
uugacuuaaguauguuaac

SEQ ID NO: 1335226 - RNA, 19 nt, Artificial Sequence
  Description of Artificial Sequence: Synthetic oligonucleotide
uaagugucaccacacccac

SEQ ID NO: 1335227 - RNA, 19 nt, Artificial Sequence
  Description of Artificial Sequence: Synthetic oligonucleotide
agaguaauaacagucuuuu

SEQ ID NO: 1335228 - RNA, 19 nt, Artificial Sequence
  Description of Artificial Sequence: Synthetic oligonucleotide
uaacuucacggaauauggc

SEQ ID NO: 1335229 - RNA, 19 nt, Artificial Sequence
  Description of Artificial Sequence: Synthetic oligonucleotide
auuugagcuagaaccugcc

SEQ ID NO: 1335230 - RNA, 19 nt, Artificial Sequence
  Description of Artificial Sequence: Synthetic oligonucleotide
gauuugagcuagaaccugc

SEQ ID NO: 1335231 - RNA, 19 nt, Artificial Sequence
  Description of Artificial Sequence: Synthetic oligonucleotide
ucuuuacacauaugcuuca

SEQ ID NO: 1335232 - RNA, 19 nt, Artificial Sequence
  Description of Artificial Sequence: Synthetic oligonucleotide
guaagaguacuguaacuca

SEQ ID NO: 1335233 - RNA, 19 nt, Artificial Sequence
  Description of Artificial Sequence: Synthetic oligonucleotide
aguuauuaccaaaauagua

SEQ ID NO: 1335234 - RNA, 19 nt, Artificial Sequence
  Description of Artificial Sequence: Synthetic oligonucleotide
caagauuugcuuucgccuc

SEQ ID NO: 1335235 - RNA, 19 nt, Artificial Sequence
  Description of Artificial Sequence: Synthetic oligonucleotide
uaauaaagauggccacagc

SEQ ID NO: 1335236 - RNA, 19 nt, Artificial Sequence
  Description of Artificial Sequence: Synthetic oligonucleotide
ucgguaguugacuuaagua

SEQ ID NO: 1335237 - RNA, 19 nt, Artificial Sequence
  Description of Artificial Sequence: Synthetic oligonucleotide
cagguaauaauuuguaaaa

SEQ ID NO: 1335238 - RNA, 19 nt, Artificial Sequence
  Description of Artificial Sequence: Synthetic oligonucleotide
aaugguaaccucagaccag

SEQ ID NO: 1335239 - RNA, 19 nt, Artificial Sequence
  Description of Artificial Sequence: Synthetic oligonucleotide
caauaaaggaagaaggccu

SEQ ID NO: 1335240 - RNA, 19 nt, Artificial Sequence
  Description of Artificial Sequence: Synthetic oligonucleotide
agaguacuguaacucaagu

SEQ ID NO: 1335241 - RNA, 19 nt, Artificial Sequence
  Description of Artificial Sequence: Synthetic oligonucleotide
aacggcuugaugccauuca

SEQ ID NO: 1335242 - RNA, 19 nt, Artificial Sequence
  Description of Artificial Sequence: Synthetic oligonucleotide
aucaacuacuacaauugag

SEQ ID NO: 1335243 - RNA, 19 nt, Artificial Sequence
  Description of Artificial Sequence: Synthetic oligonucleotide
auagccaaucagaauuugg

SEQ ID NO: 1335244 - RNA, 19 nt, Artificial Sequence
  Description of Artificial Sequence: Synthetic oligonucleotide
agcaguuauuaccaaaaua

SEQ ID NO: 1335245 - RNA, 19 nt, Artificial Sequence
  Description of Artificial Sequence: Synthetic oligonucleotide
ugaguccugagaaguauaa

SEQ ID NO: 1335246 - RNA, 19 nt, Artificial Sequence
  Description of Artificial Sequence: Synthetic oligonucleotide
acucaagugaucaacuacu

SEQ ID NO: 1335247 - RNA, 19 nt, Artificial Sequence
  Description of Artificial Sequence: Synthetic oligonucleotide
cacggaauauggcaguaag

SEQ ID NO: 1335248 - RNA, 19 nt, Artificial Sequence
  Description of Artificial Sequence: Synthetic oligonucleotide
agcacuaacaagauuugcu

SEQ ID NO: 1335249 - RNA, 19 nt, Artificial Sequence
  Description of Artificial Sequence: Synthetic oligonucleotide
gaauuuggacacuguucag

SEQ ID NO: 1335250 - RNA, 19 nt, Artificial Sequence
  Description of Artificial Sequence: Synthetic oligonucleotide
agugucaccacacccacuu

SEQ ID NO: 1335251 - RNA, 19 nt, Artificial Sequence
  Description of Artificial Sequence: Synthetic oligonucleotide
aggauuaggaucauaacua

SEQ ID NO: 1335252 - RNA, 19 nt, Artificial Sequence
  Description of Artificial Sequence: Synthetic oligonucleotide
uuacgauuucccugggaca

SEQ ID NO: 1335253 - RNA, 19 nt, Artificial Sequence
  Description of Artificial Sequence: Synthetic oligonucleotide
gcccuauuaucuuuaaucc

SEQ ID NO: 1335254 - RNA, 19 nt, Artificial Sequence
  Description of Artificial Sequence: Synthetic oligonucleotide
ugccacagguaauaauuug

SEQ ID NO: 1335255 - RNA, 19 nt, Artificial Sequence
  Description of Artificial Sequence: Synthetic oligonucleotide
auaagugucaccacaccca

SEQ ID NO: 1335256 - RNA, 19 nt, Artificial Sequence
  Description of Artificial Sequence: Synthetic oligonucleotide
uuuuagauuugagcuagaa

SEQ ID NO: 1335257 - RNA, 19 nt, Artificial Sequence
  Description of Artificial Sequence: Synthetic oligonucleotide
guuuaacuauucugaacac

SEQ ID NO: 1335258 - RNA, 19 nt, Artificial Sequence
  Description of Artificial Sequence: Synthetic oligonucleotide
aggaucauaacuaguguca

SEQ ID NO: 1335259 - RNA, 19 nt, Artificial Sequence
  Description of Artificial Sequence: Synthetic oligonucleotide
aucgguaguugacuuaagu

SEQ ID NO: 1335260 - RNA, 19 nt, Artificial Sequence
  Description of Artificial Sequence: Synthetic oligonucleotide
uuugagcuagaaccugcca

SEQ ID NO: 1335261 - RNA, 19 nt, Artificial Sequence
  Description of Artificial Sequence: Synthetic oligonucleotide
cuggagaauccaaauagca

SEQ ID NO: 1335262 - RNA, 19 nt, Artificial Sequence
  Description of Artificial Sequence: Synthetic oligonucleotide
ggauuaggaucauaacuag

SEQ ID NO: 1335263 - RNA, 19 nt, Artificial Sequence
  Description of Artificial Sequence: Synthetic oligonucleotide
uaaguauguuaacaagcuu

SEQ ID NO: 1335264 - RNA, 19 nt, Artificial Sequence
  Description of Artificial Sequence: Synthetic oligonucleotide
uucccgggcaaauggauga

SEQ ID NO: 1335265 - RNA, 19 nt, Artificial Sequence
  Description of Artificial Sequence: Synthetic oligonucleotide
uuaauccagauugcuggcc

SEQ ID NO: 1335266 - RNA, 19 nt, Artificial Sequence
  Description of Artificial Sequence: Synthetic oligonucleotide
uuucaauaagugucaccac

SEQ ID NO: 1335267 - RNA, 19 nt, Artificial Sequence
  Description of Artificial Sequence: Synthetic oligonucleotide
agguauaggcugcaggccu

SEQ ID NO: 1335268 - RNA, 19 nt, Artificial Sequence
  Description of Artificial Sequence: Synthetic oligonucleotide
uuggccuauuuucucauua

SEQ ID NO: 1335269 - RNA, 19 nt, Artificial Sequence
  Description of Artificial Sequence: Synthetic oligonucleotide
cuuugggccaaaugguaac

SEQ ID NO: 1335270 - RNA, 19 nt, Artificial Sequence
  Description of Artificial Sequence: Synthetic oligonucleotide
cuagauuacaagaccagua

SEQ ID NO: 1335271 - RNA, 19 nt, Artificial Sequence
  Description of Artificial Sequence: Synthetic oligonucleotide
auugagcccuuucuaauau

SEQ ID NO: 1335272 - RNA, 19 nt, Artificial Sequence
  Description of Artificial Sequence: Synthetic oligonucleotide
uggccaggugaguucaagg

SEQ ID NO: 1335273 - RNA, 19 nt, Artificial Sequence
  Description of Artificial Sequence: Synthetic oligonucleotide
ugcaaaacucuuugggaau

SEQ ID NO: 1335274 - RNA, 19 nt, Artificial Sequence
  Description of Artificial Sequence: Synthetic oligonucleotide
ucugugcuauuuuaugaau

SEQ ID NO: 1335275 - RNA, 19 nt, Artificial Sequence
  Description of Artificial Sequence: Synthetic oligonucleotide
uucuagucuuacgauuucc

SEQ ID NO: 1335276 - RNA, 19 nt, Artificial Sequence
  Description of Artificial Sequence: Synthetic oligonucleotide
ucccuuuaacuucacggaa

SEQ ID NO: 1335277 - RNA, 19 nt, Artificial Sequence
  Description of Artificial Sequence: Synthetic oligonucleotide
ucuagcugccuuuggauuu

SEQ ID NO: 1335278 - RNA, 19 nt, Artificial Sequence
  Description of Artificial Sequence: Synthetic oligonucleotide
gaucaacuacuacaauuga

SEQ ID NO: 1335279 - RNA, 19 nt, Artificial Sequence
  Description of Artificial Sequence: Synthetic oligonucleotide
auacucagguauaggcugc

SEQ ID NO: 1335280 - RNA, 19 nt, Artificial Sequence
  Description of Artificial Sequence: Synthetic oligonucleotide
acuagauuacaagaccagu

SEQ ID NO: 1335281 - RNA, 19 nt, Artificial Sequence
  Description of Artificial Sequence: Synthetic oligonucleotide
aagacacgguuucuuuaca

SEQ ID NO: 1335282 - RNA, 19 nt, Artificial Sequence
  Description of Artificial Sequence: Synthetic oligonucleotide
acacgguuucuuuacacau

SEQ ID NO: 1335283 - RNA, 19 nt, Artificial Sequence
  Description of Artificial Sequence: Synthetic oligonucleotide
ggagaauccaaauagcacu

SEQ ID NO: 1335284 - RNA, 19 nt, Artificial Sequence
  Description of Artificial Sequence: Synthetic oligonucleotide
ucuggaugcaaggaucaga

SEQ ID NO: 1335285 - RNA, 19 nt, Artificial Sequence
  Description of Artificial Sequence: Synthetic oligonucleotide
auguuuuagauuugagcua

SEQ ID NO: 1335286 - RNA, 19 nt, Artificial Sequence
  Description of Artificial Sequence: Synthetic oligonucleotide
aucgacaaacuuguuuauc

SEQ ID NO: 1335287 - RNA, 19 nt, Artificial Sequence
  Description of Artificial Sequence: Synthetic oligonucleotide
uacuguaacucaagugauc

SEQ ID NO: 1335288 - RNA, 19 nt, Artificial Sequence
  Description of Artificial Sequence: Synthetic oligonucleotide
ucccaauaacauuucuccu

SEQ ID NO: 1335289 - RNA, 19 nt, Artificial Sequence
  Description of Artificial Sequence: Synthetic oligonucleotide
gaaaucgacaaacuuguuu

SEQ ID NO: 1335290 - RNA, 19 nt, Artificial Sequence
  Description of Artificial Sequence: Synthetic oligonucleotide
agacacuguacuucugaca

SEQ ID NO: 1335291 - RNA, 19 nt, Artificial Sequence
  Description of Artificial Sequence: Synthetic oligonucleotide
gguaguugacuuaaguaug

SEQ ID NO: 1335292 - RNA, 19 nt, Artificial Sequence
  Description of Artificial Sequence: Synthetic oligonucleotide
aaacggcuugaugccauuc

SEQ ID NO: 1335293 - RNA, 19 nt, Artificial Sequence
  Description of Artificial Sequence: Synthetic oligonucleotide
ugaguucaaggggaaagac

SEQ ID NO: 1335294 - RNA, 19 nt, Artificial Sequence
  Description of Artificial Sequence: Synthetic oligonucleotide
ugguuaaagaugaguuuua

SEQ ID NO: 1335295 - RNA, 19 nt, Artificial Sequence
  Description of Artificial Sequence: Synthetic oligonucleotide
uuucuagucuuacgauuuc

SEQ ID NO: 1335296 - RNA, 19 nt, Artificial Sequence
  Description of Artificial Sequence: Synthetic oligonucleotide
auuucuagucuuacgauuu

SEQ ID NO: 1335297 - RNA, 19 nt, Artificial Sequence
  Description of Artificial Sequence: Synthetic oligonucleotide
acagacucuguaguuagcu

SEQ ID NO: 1335298 - RNA, 19 nt, Artificial Sequence
  Description of Artificial Sequence: Synthetic oligonucleotide
gaucauaacuagugucauc

SEQ ID NO: 1335299 - RNA, 19 nt, Artificial Sequence
  Description of Artificial Sequence: Synthetic oligonucleotide
acugagcaggcuuucaaua

SEQ ID NO: 1335300 - RNA, 19 nt, Artificial Sequence
  Description of Artificial Sequence: Synthetic oligonucleotide
ucuuacgauuucccuggga

SEQ ID NO: 1335301 - RNA, 19 nt, Artificial Sequence
  Description of Artificial Sequence: Synthetic oligonucleotide
aguucccaauaacauuucu

SEQ ID NO: 1335302 - RNA, 19 nt, Artificial Sequence
  Description of Artificial Sequence: Synthetic oligonucleotide
uuagcugcccuauuaucuu

SEQ ID NO: 1335303 - RNA, 19 nt, Artificial Sequence
  Description of Artificial Sequence: Synthetic oligonucleotide
ggugaguucaaggggaaag

SEQ ID NO: 1335304 - RNA, 19 nt, Artificial Sequence
  Description of Artificial Sequence: Synthetic oligonucleotide
ugaggggaucgguaguuga

SEQ ID NO: 1335305 - RNA, 19 nt, Artificial Sequence
  Description of Artificial Sequence: Synthetic oligonucleotide
acccauugcuaucugugcu

SEQ ID NO: 1335306 - RNA, 19 nt, Artificial Sequence
  Description of Artificial Sequence: Synthetic oligonucleotide
auggauacucagguauagg

SEQ ID NO: 1335307 - RNA, 19 nt, Artificial Sequence
  Description of Artificial Sequence: Synthetic oligonucleotide
ggacagacucuguaguuag

SEQ ID NO: 1335308 - RNA, 19 nt, Artificial Sequence
  Description of Artificial Sequence: Synthetic oligonucleotide
gguaaccucagaccagucc

SEQ ID NO: 1335309 - RNA, 19 nt, Artificial Sequence
  Description of Artificial Sequence: Synthetic oligonucleotide
uccugagaaguauaaccua

SEQ ID NO: 1335310 - RNA, 19 nt, Artificial Sequence
  Description of Artificial Sequence: Synthetic oligonucleotide
aaugaggggaucgguaguu

SEQ ID NO: 1335311 - RNA, 19 nt, Artificial Sequence
  Description of Artificial Sequence: Synthetic oligonucleotide
agauuugagcuagaaccug

SEQ ID NO: 1335312 - RNA, 19 nt, Artificial Sequence
  Description of Artificial Sequence: Synthetic oligonucleotide
auguauagccaaucagaau

SEQ ID NO: 1335313 - RNA, 19 nt, Artificial Sequence
  Description of Artificial Sequence: Synthetic oligonucleotide
gcaguaagaguacuguaac

SEQ ID NO: 1335314 - RNA, 19 nt, Artificial Sequence
  Description of Artificial Sequence: Synthetic oligonucleotide
gauuucuagucuuacgauu

SEQ ID NO: 1335315 - RNA, 19 nt, Artificial Sequence
  Description of Artificial Sequence: Synthetic oligonucleotide
gacucagaugaguccugag

SEQ ID NO: 1335316 - RNA, 19 nt, Artificial Sequence
  Description of Artificial Sequence: Synthetic oligonucleotide
aguauguuaacaagcuuuu

SEQ ID NO: 1335317 - RNA, 19 nt, Artificial Sequence
  Description of Artificial Sequence: Synthetic oligonucleotide
ugguugagguuuaacuauu

SEQ ID NO: 1335318 - RNA, 19 nt, Artificial Sequence
  Description of Artificial Sequence: Synthetic oligonucleotide
gaucagaaccaaauggaua

SEQ ID NO: 1335319 - RNA, 19 nt, Artificial Sequence
  Description of Artificial Sequence: Synthetic oligonucleotide
uugagcccuuucuaauaug

SEQ ID NO: 1335320 - RNA, 19 nt, Artificial Sequence
  Description of Artificial Sequence: Synthetic oligonucleotide
aaauggauacucagguaua

SEQ ID NO: 1335321 - RNA, 19 nt, Artificial Sequence
  Description of Artificial Sequence: Synthetic oligonucleotide
aacuuuauguaaacccauu

SEQ ID NO: 1335322 - RNA, 19 nt, Artificial Sequence
  Description of Artificial Sequence: Synthetic oligonucleotide
guaguuagcugcccuauua

SEQ ID NO: 1335323 - RNA, 19 nt, Artificial Sequence
  Description of Artificial Sequence: Synthetic oligonucleotide
uugaggccagaacaauaaa

SEQ ID NO: 1335324 - RNA, 19 nt, Artificial Sequence
  Description of Artificial Sequence: Synthetic oligonucleotide
uugcaagggcaagcaaacg

SEQ ID NO: 1335325 - RNA, 19 nt, Artificial Sequence
  Description of Artificial Sequence: Synthetic oligonucleotide
cccaauaacauuucuccuc

SEQ ID NO: 1335326 - RNA, 19 nt, Artificial Sequence
  Description of Artificial Sequence: Synthetic oligonucleotide
gugcuauuuuaugaaugag

SEQ ID NO: 1335327 - RNA, 19 nt, Artificial Sequence
  Description of Artificial Sequence: Synthetic oligonucleotide
gugugagcaguuauuacca

SEQ ID NO: 1335328 - RNA, 19 nt, Artificial Sequence
  Description of Artificial Sequence: Synthetic oligonucleotide
auaucucuagcugccuuug

SEQ ID NO: 1335329 - RNA, 19 nt, Artificial Sequence
  Description of Artificial Sequence: Synthetic oligonucleotide
uggccuauuuucucauuaa

SEQ ID NO: 1335330 - RNA, 19 nt, Artificial Sequence
  Description of Artificial Sequence: Synthetic oligonucleotide
cagcuggaucacaauuucc

SEQ ID NO: 1335331 - RNA, 19 nt, Artificial Sequence
  Description of Artificial Sequence: Synthetic oligonucleotide
cuaccuggagccacaaaca

SEQ ID NO: 1335332 - RNA, 19 nt, Artificial Sequence
  Description of Artificial Sequence: Synthetic oligonucleotide
ucauaacuagugucaucuc

SEQ ID NO: 1335333 - RNA, 19 nt, Artificial Sequence
  Description of Artificial Sequence: Synthetic oligonucleotide
cggaauauggcaguaagag

SEQ ID NO: 1335334 - RNA, 19 nt, Artificial Sequence
  Description of Artificial Sequence: Synthetic oligonucleotide
cuuuacacauaugcuucac

SEQ ID NO: 1335335 - RNA, 19 nt, Artificial Sequence
  Description of Artificial Sequence: Synthetic oligonucleotide
aacacagguuuaggauuag

SEQ ID NO: 1335336 - RNA, 19 nt, Artificial Sequence
  Description of Artificial Sequence: Synthetic oligonucleotide
augguaaccucagaccagu

SEQ ID NO: 1335337 - RNA, 19 nt, Artificial Sequence
  Description of Artificial Sequence: Synthetic oligonucleotide
aauucccgggcaaauggau

SEQ ID NO: 1335338 - RNA, 19 nt, Artificial Sequence
  Description of Artificial Sequence: Synthetic oligonucleotide
cagaucuaagcagauuauc

SEQ ID NO: 1335339 - RNA, 19 nt, Artificial Sequence
  Description of Artificial Sequence: Synthetic oligonucleotide
ugggaauguauagccaauc

SEQ ID NO: 1335340 - RNA, 19 nt, Artificial Sequence
  Description of Artificial Sequence: Synthetic oligonucleotide
gaucuugauuuguugucua

SEQ ID NO: 1335341 - RNA, 19 nt, Artificial Sequence
  Description of Artificial Sequence: Synthetic oligonucleotide
guuagcugcccuauuaucu

SEQ ID NO: 1335342 - RNA, 19 nt, Artificial Sequence
  Description of Artificial Sequence: Synthetic oligonucleotide
acacagguuuaggauuagg

SEQ ID NO: 1335343 - RNA, 19 nt, Artificial Sequence
  Description of Artificial Sequence: Synthetic oligonucleotide
guucaaggggaaagacacg

SEQ ID NO: 1335344 - RNA, 19 nt, Artificial Sequence
  Description of Artificial Sequence: Synthetic oligonucleotide
gcugcuaaugccuucauau

SEQ ID NO: 1335345 - RNA, 19 nt, Artificial Sequence
  Description of Artificial Sequence: Synthetic oligonucleotide
uguaguuagcugcccuauu

SEQ ID NO: 1335346 - RNA, 19 nt, Artificial Sequence
  Description of Artificial Sequence: Synthetic oligonucleotide
augaguuuuaaugcugcua

SEQ ID NO: 1335347 - RNA, 19 nt, Artificial Sequence
  Description of Artificial Sequence: Synthetic oligonucleotide
auaguaugcaaaacucuuu

SEQ ID NO: 1335348 - RNA, 19 nt, Artificial Sequence
  Description of Artificial Sequence: Synthetic oligonucleotide
guaaacccauugcuaucug

SEQ ID NO: 1335349 - RNA, 19 nt, Artificial Sequence
  Description of Artificial Sequence: Synthetic oligonucleotide
ucauccacugguugagguu

SEQ ID NO: 1335350 - RNA, 19 nt, Artificial Sequence
  Description of Artificial Sequence: Synthetic oligonucleotide
cuggaucacaauuuccuua

SEQ ID NO: 1335351 - RNA, 19 nt, Artificial Sequence
  Description of Artificial Sequence: Synthetic oligonucleotide
agaccaguaguuucuucuu

SEQ ID NO: 1335352 - RNA, 19 nt, Artificial Sequence
  Description of Artificial Sequence: Synthetic oligonucleotide
uaacuagugucaucuccuu

SEQ ID NO: 1335353 - RNA, 19 nt, Artificial Sequence
  Description of Artificial Sequence: Synthetic oligonucleotide
gagcuagaaccugccacag

SEQ ID NO: 1335354 - RNA, 19 nt, Artificial Sequence
  Description of Artificial Sequence: Synthetic oligonucleotide
cagcacuaacaagauuugc

SEQ ID NO: 1335355 - RNA, 19 nt, Artificial Sequence
  Description of Artificial Sequence: Synthetic oligonucleotide
caguuauuaccaaaauagu

SEQ ID NO: 1335356 - RNA, 19 nt, Artificial Sequence
  Description of Artificial Sequence: Synthetic oligonucleotide
gcaagggcaagcaaacggc

SEQ ID NO: 1335357 - RNA, 19 nt, Artificial Sequence
  Description of Artificial Sequence: Synthetic oligonucleotide
cugagcaggcuuucaauaa

SEQ ID NO: 1335358 - RNA, 19 nt, Artificial Sequence
  Description of Artificial Sequence: Synthetic oligonucleotide
gauuaggaucauaacuagu

SEQ ID NO: 1335359 - RNA, 19 nt, Artificial Sequence
  Description of Artificial Sequence: Synthetic oligonucleotide
ccuugacucagaugagucc

SEQ ID NO: 1335360 - RNA, 19 nt, Artificial Sequence
  Description of Artificial Sequence: Synthetic oligonucleotide
uggaugcaaggaucagaac

SEQ ID NO: 1335361 - RNA, 19 nt, Artificial Sequence
  Description of Artificial Sequence: Synthetic oligonucleotide
auaaucccuuuaacuucac

SEQ ID NO: 1335362 - RNA, 19 nt, Artificial Sequence
  Description of Artificial Sequence: Synthetic oligonucleotide
gaauucccgggcaaaugga

SEQ ID NO: 1335363 - RNA, 19 nt, Artificial Sequence
  Description of Artificial Sequence: Synthetic oligonucleotide
auauggcaguaagaguacu

SEQ ID NO: 1335364 - RNA, 19 nt, Artificial Sequence
  Description of Artificial Sequence: Synthetic oligonucleotide
gaguccugagaaguauaac

SEQ ID NO: 1335365 - RNA, 19 nt, Artificial Sequence
  Description of Artificial Sequence: Synthetic oligonucleotide
uuggauuuucggacauauu

SEQ ID NO: 1335366 - RNA, 19 nt, Artificial Sequence
  Description of Artificial Sequence: Synthetic oligonucleotide
gaggggaucgguaguugac

SEQ ID NO: 1335367 - RNA, 19 nt, Artificial Sequence
  Description of Artificial Sequence: Synthetic oligonucleotide
auucccgggcaaauggaug

SEQ ID NO: 1335368 - RNA, 19 nt, Artificial Sequence
  Description of Artificial Sequence: Synthetic oligonucleotide
cuagucuuacgauuucccu

SEQ ID NO: 1335369 - RNA, 19 nt, Artificial Sequence
  Description of Artificial Sequence: Synthetic oligonucleotide
cugguugagguuuaacuau

SEQ ID NO: 1335370 - RNA, 19 nt, Artificial Sequence
  Description of Artificial Sequence: Synthetic oligonucleotide
gucuuacgauuucccuggg

SEQ ID NO: 1335371 - RNA, 19 nt, Artificial Sequence
  Description of Artificial Sequence: Synthetic oligonucleotide
gaacuuuauguaaacccau

SEQ ID NO: 1335372 - RNA, 19 nt, Artificial Sequence
  Description of Artificial Sequence: Synthetic oligonucleotide
gcaagcaaacggcuugaug

SEQ ID NO: 1335373 - RNA, 19 nt, Artificial Sequence
  Description of Artificial Sequence: Synthetic oligonucleotide
acggaauauggcaguaaga

SEQ ID NO: 1335374 - RNA, 19 nt, Artificial Sequence
  Description of Artificial Sequence: Synthetic oligonucleotide
guauguuaacaagcuuuuc

SEQ ID NO: 1335375 - RNA, 19 nt, Artificial Sequence
  Description of Artificial Sequence: Synthetic oligonucleotide
aggggaucgguaguugacu

SEQ ID NO: 1335376 - RNA, 19 nt, Artificial Sequence
  Description of Artificial Sequence: Synthetic oligonucleotide
gaucgguaguugacuuaag

SEQ ID NO: 1335377 - RNA, 19 nt, Artificial Sequence
  Description of Artificial Sequence: Synthetic oligonucleotide
uucacggaauauggcagua

SEQ ID NO: 1335378 - RNA, 19 nt, Artificial Sequence
  Description of Artificial Sequence: Synthetic oligonucleotide
uuuggccuauuuucucauu

SEQ ID NO: 1335379 - RNA, 19 nt, Artificial Sequence
  Description of Artificial Sequence: Synthetic oligonucleotide
cugcuaaucuagauaagau

SEQ ID NO: 1335380 - RNA, 19 nt, Artificial Sequence
  Description of Artificial Sequence: Synthetic oligonucleotide
accuaacacugcuggaguu

SEQ ID NO: 1335381 - RNA, 19 nt, Artificial Sequence
  Description of Artificial Sequence: Synthetic oligonucleotide
agccacaaacagaucuaag

SEQ ID NO: 1335382 - RNA, 19 nt, Artificial Sequence
  Description of Artificial Sequence: Synthetic oligonucleotide
gaugaguccugagaaguau

SEQ ID NO: 1335383 - RNA, 19 nt, Artificial Sequence
  Description of Artificial Sequence: Synthetic oligonucleotide
aucugcuaaucuagauaag

SEQ ID NO: 1335384 - RNA, 19 nt, Artificial Sequence
  Description of Artificial Sequence: Synthetic oligonucleotide
gaaugaggggaucgguagu

SEQ ID NO: 1335385 - RNA, 19 nt, Artificial Sequence
  Description of Artificial Sequence: Synthetic oligonucleotide
auucuuaguacaggcuguu

SEQ ID NO: 1335386 - RNA, 19 nt, Artificial Sequence
  Description of Artificial Sequence: Synthetic oligonucleotide
ggaauauggcaguaagagu

SEQ ID NO: 1335387 - RNA, 19 nt, Artificial Sequence
  Description of Artificial Sequence: Synthetic oligonucleotide
cuaguuucuggggaagaaa

SEQ ID NO: 1335388 - RNA, 19 nt, Artificial Sequence
  Description of Artificial Sequence: Synthetic oligonucleotide
cacuguacuucugacagcu

SEQ ID NO: 1335389 - RNA, 19 nt, Artificial Sequence
  Description of Artificial Sequence: Synthetic oligonucleotide
ggccaaaugguaaccucag

SEQ ID NO: 1335390 - RNA, 19 nt, Artificial Sequence
  Description of Artificial Sequence: Synthetic oligonucleotide
ugguaaccucagaccaguc

SEQ ID NO: 1335391 - RNA, 19 nt, Artificial Sequence
  Description of Artificial Sequence: Synthetic oligonucleotide
gagccacaaacagaucuaa

SEQ ID NO: 1335392 - RNA, 19 nt, Artificial Sequence
  Description of Artificial Sequence: Synthetic oligonucleotide
cacuuugcaagggcaagca

SEQ ID NO: 1335393 - RNA, 19 nt, Artificial Sequence
  Description of Artificial Sequence: Synthetic oligonucleotide
augaggggaucgguaguug

SEQ ID NO: 1335394 - RNA, 19 nt, Artificial Sequence
  Description of Artificial Sequence: Synthetic oligonucleotide
gguuaaagaugaguuuuaa

SEQ ID NO: 1335395 - RNA, 19 nt, Artificial Sequence
  Description of Artificial Sequence: Synthetic oligonucleotide
caauugagcccuuucuaau

SEQ ID NO: 1335396 - RNA, 19 nt, Artificial Sequence
  Description of Artificial Sequence: Synthetic oligonucleotide
caguaagaguacuguaacu

SEQ ID NO: 1335397 - RNA, 19 nt, Artificial Sequence
  Description of Artificial Sequence: Synthetic oligonucleotide
cgaguauucuuaguacagg

SEQ ID NO: 1335398 - RNA, 19 nt, Artificial Sequence
  Description of Artificial Sequence: Synthetic oligonucleotide
agugauggacagacucugu

SEQ ID NO: 1335399 - RNA, 19 nt, Artificial Sequence
  Description of Artificial Sequence: Synthetic oligonucleotide
ggaucgguaguugacuuaa

SEQ ID NO: 1335400 - RNA, 19 nt, Artificial Sequence
  Description of Artificial Sequence: Synthetic oligonucleotide
uucuuaguacaggcuguuu

SEQ ID NO: 1335401 - RNA, 19 nt, Artificial Sequence
  Description of Artificial Sequence: Synthetic oligonucleotide
cagaguaauaacagucuuu

SEQ ID NO: 1335402 - RNA, 19 nt, Artificial Sequence
  Description of Artificial Sequence: Synthetic oligonucleotide
cuccacuuugcaagggcaa

SEQ ID NO: 1335403 - RNA, 19 nt, Artificial Sequence
  Description of Artificial Sequence: Synthetic oligonucleotide
cacuaacaagauuugcuuu

SEQ ID NO: 1335404 - RNA, 19 nt, Artificial Sequence
  Description of Artificial Sequence: Synthetic oligonucleotide
cuguaacucaagugaucaa

SEQ ID NO: 1335405 - RNA, 19 nt, Artificial Sequence
  Description of Artificial Sequence: Synthetic oligonucleotide
agaaccugccacagguaau

SEQ ID NO: 1335406 - RNA, 19 nt, Artificial Sequence
  Description of Artificial Sequence: Synthetic oligonucleotide
gguauaggcugcaggccug

SEQ ID NO: 1335407 - RNA, 19 nt, Artificial Sequence
  Description of Artificial Sequence: Synthetic oligonucleotide
caagggcaagcaaacggcu

SEQ ID NO: 1335408 - RNA, 19 nt, Artificial Sequence
  Description of Artificial Sequence: Synthetic oligonucleotide
augaguccugagaaguaua

SEQ ID NO: 1335409 - RNA, 19 nt, Artificial Sequence
  Description of Artificial Sequence: Synthetic oligonucleotide
augcaaggaucagaaccaa

SEQ ID NO: 1335410 - RNA, 19 nt, Artificial Sequence
  Description of Artificial Sequence: Synthetic oligonucleotide
guuuuagauuugagcuaga

SEQ ID NO: 1335411 - RNA, 19 nt, Artificial Sequence
  Description of Artificial Sequence: Synthetic oligonucleotide
gaccaguaguuucuucuuu

SEQ ID NO: 1335412 - RNA, 19 nt, Artificial Sequence
  Description of Artificial Sequence: Synthetic oligonucleotide
ccacuuugcaagggcaagc

SEQ ID NO: 1335413 - RNA, 19 nt, Artificial Sequence
  Description of Artificial Sequence: Synthetic oligonucleotide
ggcugcaggccugaucgag

SEQ ID NO: 1335414 - RNA, 19 nt, Artificial Sequence
  Description of Artificial Sequence: Synthetic oligonucleotide
guauagccaaucagaauuu

SEQ ID NO: 1335415 - RNA, 19 nt, Artificial Sequence
  Description of Artificial Sequence: Synthetic oligonucleotide
aggccugaucgaguauucu

SEQ ID NO: 1335416 - RNA, 19 nt, Artificial Sequence
  Description of Artificial Sequence: Synthetic oligonucleotide
guuuaggauuaggaucaua

SEQ ID NO: 1335417 - RNA, 19 nt, Artificial Sequence
  Description of Artificial Sequence: Synthetic oligonucleotide
caggugaguucaaggggaa

SEQ ID NO: 1335418 - RNA, 19 nt, Artificial Sequence
  Description of Artificial Sequence: Synthetic oligonucleotide
guauaggcugcaggccuga

SEQ ID NO: 1335419 - RNA, 19 nt, Artificial Sequence
  Description of Artificial Sequence: Synthetic oligonucleotide
agaaaucgacaaacuuguu

SEQ ID NO: 1335420 - RNA, 19 nt, Artificial Sequence
  Description of Artificial Sequence: Synthetic oligonucleotide
cugaucgaguauucuuagu

SEQ ID NO: 1335421 - RNA, 19 nt, Artificial Sequence
  Description of Artificial Sequence: Synthetic oligonucleotide
auguagugauggacagacu

SEQ ID NO: 1335422 - RNA, 19 nt, Artificial Sequence
  Description of Artificial Sequence: Synthetic oligonucleotide
aggccuugacucagaugag

SEQ ID NO: 1335423 - RNA, 19 nt, Artificial Sequence
  Description of Artificial Sequence: Synthetic oligonucleotide
agauuugcuuucgccucuu

SEQ ID NO: 1335424 - RNA, 19 nt, Artificial Sequence
  Description of Artificial Sequence: Synthetic oligonucleotide
cgguaguugacuuaaguau

SEQ ID NO: 1335425 - RNA, 19 nt, Artificial Sequence
  Description of Artificial Sequence: Synthetic oligonucleotide
aggugaguucaaggggaaa

SEQ ID NO: 1335426 - RNA, 19 nt, Artificial Sequence
  Description of Artificial Sequence: Synthetic oligonucleotide
gccugaucgaguauucuua

SEQ ID NO: 1335427 - RNA, 19 nt, Artificial Sequence
  Description of Artificial Sequence: Synthetic oligonucleotide
ucccgggcaaauggaugaa

SEQ ID NO: 1335428 - RNA, 19 nt, Artificial Sequence
  Description of Artificial Sequence: Synthetic oligonucleotide
cugccacagguaauaauuu

SEQ ID NO: 1335429 - RNA, 19 nt, Artificial Sequence
  Description of Artificial Sequence: Synthetic oligonucleotide
caauuuccuuacguaaaau

SEQ ID NO: 1335430 - RNA, 19 nt, Artificial Sequence
  Description of Artificial Sequence: Synthetic oligonucleotide
ccaaauggauacucaggua

SEQ ID NO: 1335431 - RNA, 19 nt, Artificial Sequence
  Description of Artificial Sequence: Synthetic oligonucleotide
cugcuaaugccuucauauu

SEQ ID NO: 1335432 - RNA, 19 nt, Artificial Sequence
  Description of Artificial Sequence: Synthetic oligonucleotide
ggaucauaacuagugucau

SEQ ID NO: 1335433 - RNA, 19 nt, Artificial Sequence
  Description of Artificial Sequence: Synthetic oligonucleotide
caguccuuuggccuauuuu

SEQ ID NO: 1335434 - RNA, 19 nt, Artificial Sequence
  Description of Artificial Sequence: Synthetic oligonucleotide
gcugcccuauuaucuuuaa

SEQ ID NO: 1335435 - RNA, 19 nt, Artificial Sequence
  Description of Artificial Sequence: Synthetic oligonucleotide
ggccugaucgaguauucuu

SEQ ID NO: 1335436 - RNA, 19 nt, Artificial Sequence
  Description of Artificial Sequence: Synthetic oligonucleotide
cuguaguuagcugcccuau

SEQ ID NO: 1335437 - RNA, 19 nt, Artificial Sequence
  Description of Artificial Sequence: Synthetic oligonucleotide
gggcaagcaaacggcuuga

SEQ ID NO: 1335438 - RNA, 19 nt, Artificial Sequence
  Description of Artificial Sequence: Synthetic oligonucleotide
gagcccuuucuaauauguu

SEQ ID NO: 1335439 - RNA, 19 nt, Artificial Sequence
  Description of Artificial Sequence: Synthetic oligonucleotide
ccuaacacugcuggaguua

SEQ ID NO: 1335440 - RNA, 19 nt, Artificial Sequence
  Description of Artificial Sequence: Synthetic oligonucleotide
ccacugguugagguuuaac

SEQ ID NO: 1335441 - RNA, 19 nt, Artificial Sequence
  Description of Artificial Sequence: Synthetic oligonucleotide
gggaaagacacgguuucuu

SEQ ID NO: 1335442 - RNA, 19 nt, Artificial Sequence
  Description of Artificial Sequence: Synthetic oligonucleotide
cugcccuauuaucuuuaau

SEQ ID NO: 1335443 - RNA, 19 nt, Artificial Sequence
  Description of Artificial Sequence: Synthetic oligonucleotide
ggggaucgguaguugacuu

SEQ ID NO: 1335444 - RNA, 19 nt, Artificial Sequence
  Description of Artificial Sequence: Synthetic oligonucleotide
ggaguuacagcaggagcuu

SEQ ID NO: 1335445 - RNA, 19 nt, Artificial Sequence
  Description of Artificial Sequence: Synthetic oligonucleotide
gcaaacggcuugaugccau

SEQ ID NO: 1335446 - RNA, 19 nt, Artificial Sequence
  Description of Artificial Sequence: Synthetic oligonucleotide
ggggaaagacacgguuucu

SEQ ID NO: 1335447 - RNA, 19 nt, Artificial Sequence
  Description of Artificial Sequence: Synthetic oligonucleotide
gcugcaggccugaucgagu

SEQ ID NO: 1335448 - RNA, 19 nt, Artificial Sequence
  Description of Artificial Sequence: Synthetic oligonucleotide
cuacuacaauugagcccuu

SEQ ID NO: 1335449 - RNA, 19 nt, Artificial Sequence
  Description of Artificial Sequence: Synthetic oligonucleotide
ggcaagcaaacggcuugau

SEQ ID NO: 1335450 - RNA, 19 nt, Artificial Sequence
  Description of Artificial Sequence: Synthetic oligonucleotide
cgggcaaauggaugaacuu

SEQ ID NO: 1335451 - RNA, 19 nt, Artificial Sequence
  Description of Artificial Sequence: Synthetic oligonucleotide
ccaguccuuuggccuauuu

SEQ ID NO: 1335452 - RNA, 19 nt, Artificial Sequence
  Description of Artificial Sequence: Synthetic oligonucleotide
aagguaauaaaaguagagc

SEQ ID NO: 1335453 - RNA, 19 nt, Artificial Sequence
  Description of Artificial Sequence: Synthetic oligonucleotide
auuauggugauuucugagc

SEQ ID NO: 1335454 - RNA, 19 nt, Artificial Sequence
  Description of Artificial Sequence: Synthetic oligonucleotide
aauauuauugcagguuccc

SEQ ID NO: 1335455 - RNA, 19 nt, Artificial Sequence
  Description of Artificial Sequence: Synthetic oligonucleotide
gaccuuaaaauucaggaag

SEQ ID NO: 1335456 - RNA, 19 nt, Artificial Sequence
  Description of Artificial Sequence: Synthetic oligonucleotide
ucuauucucuauaaaagca

SEQ ID NO: 1335457 - RNA, 19 nt, Artificial Sequence
  Description of Artificial Sequence: Synthetic oligonucleotide
uaucaguauacuaucauga

SEQ ID NO: 1335458 - RNA, 19 nt, Artificial Sequence
  Description of Artificial Sequence: Synthetic oligonucleotide
agagacuucaauccggcgc

SEQ ID NO: 1335459 - RNA, 19 nt, Artificial Sequence
  Description of Artificial Sequence: Synthetic oligonucleotide
uuaucugcuaccauaaaac

SEQ ID NO: 1335460 - RNA, 19 nt, Artificial Sequence
  Description of Artificial Sequence: Synthetic oligonucleotide
ucucuauaaaagcaaauga

SEQ ID NO: 1335461 - RNA, 19 nt, Artificial Sequence
  Description of Artificial Sequence: Synthetic oligonucleotide
aaaacgaaacuucaaggga

SEQ ID NO: 1335462 - RNA, 19 nt, Artificial Sequence
  Description of Artificial Sequence: Synthetic oligonucleotide
agguaauaaaaguagagcu

SEQ ID NO: 1335463 - RNA, 19 nt, Artificial Sequence
  Description of Artificial Sequence: Synthetic oligonucleotide
cauaaaacgaaacuucaag

SEQ ID NO: 1335464 - RNA, 19 nt, Artificial Sequence
  Description of Artificial Sequence: Synthetic oligonucleotide
ucugcuaccauaaaacgaa

SEQ ID NO: 1335465 - RNA, 19 nt, Artificial Sequence
  Description of Artificial Sequence: Synthetic oligonucleotide
agaguugugagugucauuc

SEQ ID NO: 1335466 - RNA, 19 nt, Artificial Sequence
  Description of Artificial Sequence: Synthetic oligonucleotide
acugucgguagguagagcg

SEQ ID NO: 1335467 - RNA, 19 nt, Artificial Sequence
  Description of Artificial Sequence: Synthetic oligonucleotide
acuaucaugauuaugguga

SEQ ID NO: 1335468 - RNA, 19 nt, Artificial Sequence
  Description of Artificial Sequence: Synthetic oligonucleotide
gauuuaaguggccuugucc

SEQ ID NO: 1335469 - RNA, 19 nt, Artificial Sequence
  Description of Artificial Sequence: Synthetic oligonucleotide
aaacgaaacuucaagggag

SEQ ID NO: 1335470 - RNA, 19 nt, Artificial Sequence
  Description of Artificial Sequence: Synthetic oligonucleotide
gauuauggugauuucugag

SEQ ID NO: 1335471 - RNA, 19 nt, Artificial Sequence
  Description of Artificial Sequence: Synthetic oligonucleotide
uucucuaguuccaaggucu

SEQ ID NO: 1335472 - RNA, 19 nt, Artificial Sequence
  Description of Artificial Sequence: Synthetic oligonucleotide
ugaauagguaggauuuuag

SEQ ID NO: 1335473 - RNA, 19 nt, Artificial Sequence
  Description of Artificial Sequence: Synthetic oligonucleotide
uaauaggccgguuccaggg

SEQ ID NO: 1335474 - RNA, 19 nt, Artificial Sequence
  Description of Artificial Sequence: Synthetic oligonucleotide
uuucgugucaaauaaggau

SEQ ID NO: 1335475 - RNA, 19 nt, Artificial Sequence
  Description of Artificial Sequence: Synthetic oligonucleotide
uuuuaucaguauacuauca

SEQ ID NO: 1335476 - RNA, 19 nt, Artificial Sequence
  Description of Artificial Sequence: Synthetic oligonucleotide
aaauaaggauuaaagagaa

SEQ ID NO: 1335477 - RNA, 19 nt, Artificial Sequence
  Description of Artificial Sequence: Synthetic oligonucleotide
guaguuagaguugugagug

SEQ ID NO: 1335478 - RNA, 19 nt, Artificial Sequence
  Description of Artificial Sequence: Synthetic oligonucleotide
cauggaaacaugaggcugg

SEQ ID NO: 1335479 - RNA, 19 nt, Artificial Sequence
  Description of Artificial Sequence: Synthetic oligonucleotide
uuuaucaguauacuaucau

SEQ ID NO: 1335480 - RNA, 19 nt, Artificial Sequence
  Description of Artificial Sequence: Synthetic oligonucleotide
ucugauaccggcuguaagu

SEQ ID NO: 1335481 - RNA, 19 nt, Artificial Sequence
  Description of Artificial Sequence: Synthetic oligonucleotide
uguccuucgcuacuguuag

SEQ ID NO: 1335482 - RNA, 19 nt, Artificial Sequence
  Description of Artificial Sequence: Synthetic oligonucleotide
uucgugucaaauaaggauu

SEQ ID NO: 1335483 - RNA, 19 nt, Artificial Sequence
  Description of Artificial Sequence: Synthetic oligonucleotide
ugugugugaaggcuuagac

SEQ ID NO: 1335484 - RNA, 19 nt, Artificial Sequence
  Description of Artificial Sequence: Synthetic oligonucleotide
uauugcaccacgcucgccu

SEQ ID NO: 1335485 - RNA, 19 nt, Artificial Sequence
  Description of Artificial Sequence: Synthetic oligonucleotide
auaaagggacugucuaggg

SEQ ID NO: 1335486 - RNA, 19 nt, Artificial Sequence
  Description of Artificial Sequence: Synthetic oligonucleotide
agucguaauaggccgguuc

SEQ ID NO: 1335487 - RNA, 19 nt, Artificial Sequence
  Description of Artificial Sequence: Synthetic oligonucleotide
uuagagaccauugcgugug

SEQ ID NO: 1335488 - RNA, 19 nt, Artificial Sequence
  Description of Artificial Sequence: Synthetic oligonucleotide
aagcaaaugacagucguaa

SEQ ID NO: 1335489 - RNA, 19 nt, Artificial Sequence
  Description of Artificial Sequence: Synthetic oligonucleotide
caaacacuaacacagcuca

SEQ ID NO: 1335490 - RNA, 19 nt, Artificial Sequence
  Description of Artificial Sequence: Synthetic oligonucleotide
caauauuauugcagguucc

SEQ ID NO: 1335491 - RNA, 19 nt, Artificial Sequence
  Description of Artificial Sequence: Synthetic oligonucleotide
uucgcuacuguuaguguug

SEQ ID NO: 1335492 - RNA, 19 nt, Artificial Sequence
  Description of Artificial Sequence: Synthetic oligonucleotide
uccguggcagcuuagcgag

SEQ ID NO: 1335493 - RNA, 19 nt, Artificial Sequence
  Description of Artificial Sequence: Synthetic oligonucleotide
gaauagguaggauuuuaga

SEQ ID NO: 1335494 - RNA, 19 nt, Artificial Sequence
  Description of Artificial Sequence: Synthetic oligonucleotide
ugucauucuauucucuaua

SEQ ID NO: 1335495 - RNA, 19 nt, Artificial Sequence
  Description of Artificial Sequence: Synthetic oligonucleotide
gauaccggcuguaaguuug

SEQ ID NO: 1335496 - RNA, 19 nt, Artificial Sequence
  Description of Artificial Sequence: Synthetic oligonucleotide
ucuagggagcgccucguag

SEQ ID NO: 1335497 - RNA, 19 nt, Artificial Sequence
  Description of Artificial Sequence: Synthetic oligonucleotide
auugcagguucccuuuagg

SEQ ID NO: 1335498 - RNA, 19 nt, Artificial Sequence
  Description of Artificial Sequence: Synthetic oligonucleotide
acaagugagugugugcugg

SEQ ID NO: 1335499 - RNA, 19 nt, Artificial Sequence
  Description of Artificial Sequence: Synthetic oligonucleotide
aauccggcgcuuucguguc

SEQ ID NO: 1335500 - RNA, 19 nt, Artificial Sequence
  Description of Artificial Sequence: Synthetic oligonucleotide
acaaacacuaacacagcuc

SEQ ID NO: 1335501 - RNA, 19 nt, Artificial Sequence
  Description of Artificial Sequence: Synthetic oligonucleotide
uuuagagaccauugcgugu

SEQ ID NO: 1335502 - RNA, 19 nt, Artificial Sequence
  Description of Artificial Sequence: Synthetic oligonucleotide
uauugcagguucccuuuag

SEQ ID NO: 1335503 - RNA, 19 nt, Artificial Sequence
  Description of Artificial Sequence: Synthetic oligonucleotide
gugugugugugugugaagg

SEQ ID NO: 1335504 - RNA, 19 nt, Artificial Sequence
  Description of Artificial Sequence: Synthetic oligonucleotide
gaaggcuugggcccaagug

SEQ ID NO: 1335505 - RNA, 19 nt, Artificial Sequence
  Description of Artificial Sequence: Synthetic oligonucleotide
ggauauugcaccacgcucg

SEQ ID NO: 1335506 - RNA, 19 nt, Artificial Sequence
  Description of Artificial Sequence: Synthetic oligonucleotide
acagucguaaacuucucaa

SEQ ID NO: 1335507 - RNA, 19 nt, Artificial Sequence
  Description of Artificial Sequence: Synthetic oligonucleotide
aguuagaguugugaguguc

SEQ ID NO: 1335508 - RNA, 19 nt, Artificial Sequence
  Description of Artificial Sequence: Synthetic oligonucleotide
ugucgguagguagagcgcg

SEQ ID NO: 1335509 - RNA, 19 nt, Artificial Sequence
  Description of Artificial Sequence: Synthetic oligonucleotide
ucguaaacuucucaauuua

SEQ ID NO: 1335510 - RNA, 19 nt, Artificial Sequence
  Description of Artificial Sequence: Synthetic oligonucleotide
uugcuaguccuuauuuucu

SEQ ID NO: 1335511 - RNA, 19 nt, Artificial Sequence
  Description of Artificial Sequence: Synthetic oligonucleotide
accggcuguaaguuugucg

SEQ ID NO: 1335512 - RNA, 19 nt, Artificial Sequence
  Description of Artificial Sequence: Synthetic oligonucleotide
gcuacuguuaguguuggcg

SEQ ID NO: 1335513 - RNA, 19 nt, Artificial Sequence
  Description of Artificial Sequence: Synthetic oligonucleotide
aacuucaagggaguugcug

SEQ ID NO: 1335514 - RNA, 19 nt, Artificial Sequence
  Description of Artificial Sequence: Synthetic oligonucleotide
agucguaaacuucucaauu

SEQ ID NO: 1335515 - RNA, 19 nt, Artificial Sequence
  Description of Artificial Sequence: Synthetic oligonucleotide
agaaaucaaacagcaagga

SEQ ID NO: 1335516 - RNA, 19 nt, Artificial Sequence
  Description of Artificial Sequence: Synthetic oligonucleotide
guaauaggccgguuccagg

SEQ ID NO: 1335517 - RNA, 19 nt, Artificial Sequence
  Description of Artificial Sequence: Synthetic oligonucleotide
gaaccggcagucguaauag

SEQ ID NO: 1335518 - RNA, 19 nt, Artificial Sequence
  Description of Artificial Sequence: Synthetic oligonucleotide
uccuucgcuacuguuagug

SEQ ID NO: 1335519 - RNA, 19 nt, Artificial Sequence
  Description of Artificial Sequence: Synthetic oligonucleotide
ggguugacgaaguaggagc

SEQ ID NO: 1335520 - RNA, 19 nt, Artificial Sequence
  Description of Artificial Sequence: Synthetic oligonucleotide
gcuuucgugucaaauaagg

SEQ ID NO: 1335521 - RNA, 19 nt, Artificial Sequence
  Description of Artificial Sequence: Synthetic oligonucleotide
aauuuggaggcgucuccgu

SEQ ID NO: 1335522 - RNA, 19 nt, Artificial Sequence
  Description of Artificial Sequence: Synthetic oligonucleotide
uaaguggccuuguccuucg

SEQ ID NO: 1335523 - RNA, 19 nt, Artificial Sequence
  Description of Artificial Sequence: Synthetic oligonucleotide
augacagucguaaacuucu

SEQ ID NO: 1335524 - RNA, 19 nt, Artificial Sequence
  Description of Artificial Sequence: Synthetic oligonucleotide
auaggccgguuccagggac

SEQ ID NO: 1335525 - RNA, 19 nt, Artificial Sequence
  Description of Artificial Sequence: Synthetic oligonucleotide
ugugagugucauucuauuc

SEQ ID NO: 1335526 - RNA, 19 nt, Artificial Sequence
  Description of Artificial Sequence: Synthetic oligonucleotide
cuagggagcgccucguagc

SEQ ID NO: 1335527 - RNA, 19 nt, Artificial Sequence
  Description of Artificial Sequence: Synthetic oligonucleotide
gucgggauauugcaccacg

SEQ ID NO: 1335528 - RNA, 19 nt, Artificial Sequence
  Description of Artificial Sequence: Synthetic oligonucleotide
uaucugacagguaguuaga

SEQ ID NO: 1335529 - RNA, 19 nt, Artificial Sequence
  Description of Artificial Sequence: Synthetic oligonucleotide
aucaguauacuaucaugau

SEQ ID NO: 1335530 - RNA, 19 nt, Artificial Sequence
  Description of Artificial Sequence: Synthetic oligonucleotide
cacuaacacagcucagagg

SEQ ID NO: 1335531 - RNA, 19 nt, Artificial Sequence
  Description of Artificial Sequence: Synthetic oligonucleotide
gcaaaugacagucguaaac

SEQ ID NO: 1335532 - RNA, 19 nt, Artificial Sequence
  Description of Artificial Sequence: Synthetic oligonucleotide
ucgugucaaauaaggauua

SEQ ID NO: 1335533 - RNA, 19 nt, Artificial Sequence
  Description of Artificial Sequence: Synthetic oligonucleotide
ugugugugugugugaaggc

SEQ ID NO: 1335534 - RNA, 19 nt, Artificial Sequence
  Description of Artificial Sequence: Synthetic oligonucleotide
accggcagucguaauaggc

SEQ ID NO: 1335535 - RNA, 19 nt, Artificial Sequence
  Description of Artificial Sequence: Synthetic oligonucleotide
aauaggccgguuccaggga

SEQ ID NO: 1335536 - RNA, 19 nt, Artificial Sequence
  Description of Artificial Sequence: Synthetic oligonucleotide
ugucuuucggucaguccca

SEQ ID NO: 1335537 - RNA, 19 nt, Artificial Sequence
  Description of Artificial Sequence: Synthetic oligonucleotide
ucucuaguuccaaggucug

SEQ ID NO: 1335538 - RNA, 19 nt, Artificial Sequence
  Description of Artificial Sequence: Synthetic oligonucleotide
auuuggaggcgucuccgug

SEQ ID NO: 1335539 - RNA, 19 nt, Artificial Sequence
  Description of Artificial Sequence: Synthetic oligonucleotide
ugcagguucccuuuaggua

SEQ ID NO: 1335540 - RNA, 19 nt, Artificial Sequence
  Description of Artificial Sequence: Synthetic oligonucleotide
aacgaaacuucaagggagu

SEQ ID NO: 1335541 - RNA, 19 nt, Artificial Sequence
  Description of Artificial Sequence: Synthetic oligonucleotide
ugugugugugugaaggcuu

SEQ ID NO: 1335542 - RNA, 19 nt, Artificial Sequence
  Description of Artificial Sequence: Synthetic oligonucleotide
ugauuuaaguggccuuguc

SEQ ID NO: 1335543 - RNA, 19 nt, Artificial Sequence
  Description of Artificial Sequence: Synthetic oligonucleotide
cauagaauuuggaggcguc

SEQ ID NO: 1335544 - RNA, 19 nt, Artificial Sequence
  Description of Artificial Sequence: Synthetic oligonucleotide
cauggagugggacagaacu

SEQ ID NO: 1335545 - RNA, 19 nt, Artificial Sequence
  Description of Artificial Sequence: Synthetic oligonucleotide
ccaauauuauugcagguuc

SEQ ID NO: 1335546 - RNA, 19 nt, Artificial Sequence
  Description of Artificial Sequence: Synthetic oligonucleotide
ucgggauauugcaccacgc

SEQ ID NO: 1335547 - RNA, 19 nt, Artificial Sequence
  Description of Artificial Sequence: Synthetic oligonucleotide
caaggucugauaccggcug

SEQ ID NO: 1335548 - RNA, 19 nt, Artificial Sequence
  Description of Artificial Sequence: Synthetic oligonucleotide
acggguucugcugguagcc

SEQ ID NO: 1335549 - RNA, 19 nt, Artificial Sequence
  Description of Artificial Sequence: Synthetic oligonucleotide
auggugauuucugagcaca

SEQ ID NO: 1335550 - RNA, 19 nt, Artificial Sequence
  Description of Artificial Sequence: Synthetic oligonucleotide
gacuauggcaugaauaggu

SEQ ID NO: 1335551 - RNA, 19 nt, Artificial Sequence
  Description of Artificial Sequence: Synthetic oligonucleotide
aaccggcagucguaauagg

SEQ ID NO: 1335552 - RNA, 19 nt, Artificial Sequence
  Description of Artificial Sequence: Synthetic oligonucleotide
uagggagcgccucguagcc

SEQ ID NO: 1335553 - RNA, 19 nt, Artificial Sequence
  Description of Artificial Sequence: Synthetic oligonucleotide
gcgugagagacuucaaucc

SEQ ID NO: 1335554 - RNA, 19 nt, Artificial Sequence
  Description of Artificial Sequence: Synthetic oligonucleotide
ggagcguggggucucaucc

SEQ ID NO: 1335555 - RNA, 19 nt, Artificial Sequence
  Description of Artificial Sequence: Synthetic oligonucleotide
guauacuaucaugauuaug

SEQ ID NO: 1335556 - RNA, 19 nt, Artificial Sequence
  Description of Artificial Sequence: Synthetic oligonucleotide
gcugcaaguaucugacagg

SEQ ID NO: 1335557 - RNA, 19 nt, Artificial Sequence
  Description of Artificial Sequence: Synthetic oligonucleotide
aguauacuaucaugauuau

SEQ ID NO: 1335558 - RNA, 19 nt, Artificial Sequence
  Description of Artificial Sequence: Synthetic oligonucleotide
ugcgaggcgugcuggaagc

SEQ ID NO: 1335559 - RNA, 19 nt, Artificial Sequence
  Description of Artificial Sequence: Synthetic oligonucleotide
aaguaucugacagguaguu

SEQ ID NO: 1335560 - RNA, 19 nt, Artificial Sequence
  Description of Artificial Sequence: Synthetic oligonucleotide
ugugugugugugugugaag

SEQ ID NO: 1335561 - RNA, 19 nt, Artificial Sequence
  Description of Artificial Sequence: Synthetic oligonucleotide
accagcgcauggcuccugc

SEQ ID NO: 1335562 - RNA, 19 nt, Artificial Sequence
  Description of Artificial Sequence: Synthetic oligonucleotide
auugcaccacgcucgccuc

SEQ ID NO: 1335563 - RNA, 19 nt, Artificial Sequence
  Description of Artificial Sequence: Synthetic oligonucleotide
gacaagugagugugugcug

SEQ ID NO: 1335564 - RNA, 19 nt, Artificial Sequence
  Description of Artificial Sequence: Synthetic oligonucleotide
aguugugagugucauucua

SEQ ID NO: 1335565 - RNA, 19 nt, Artificial Sequence
  Description of Artificial Sequence: Synthetic oligonucleotide
ggaccgaaccccaagcugg

SEQ ID NO: 1335566 - RNA, 19 nt, Artificial Sequence
  Description of Artificial Sequence: Synthetic oligonucleotide
ugcugggcgcaugaaaacc

SEQ ID NO: 1335567 - RNA, 19 nt, Artificial Sequence
  Description of Artificial Sequence: Synthetic oligonucleotide
gucauucuauucucuauaa

SEQ ID NO: 1335568 - RNA, 19 nt, Artificial Sequence
  Description of Artificial Sequence: Synthetic oligonucleotide
aucugacagguaguuagag

SEQ ID NO: 1335569 - RNA, 19 nt, Artificial Sequence
  Description of Artificial Sequence: Synthetic oligonucleotide
auauuauugcagguucccu

SEQ ID NO: 1335570 - RNA, 19 nt, Artificial Sequence
  Description of Artificial Sequence: Synthetic oligonucleotide
cugggcgcaugaaaacccg

SEQ ID NO: 1335571 - RNA, 19 nt, Artificial Sequence
  Description of Artificial Sequence: Synthetic oligonucleotide
acuguuaguguuggcggag

SEQ ID NO: 1335572 - RNA, 19 nt, Artificial Sequence
  Description of Artificial Sequence: Synthetic oligonucleotide
uugugagugucauucuauu

SEQ ID NO: 1335573 - RNA, 19 nt, Artificial Sequence
  Description of Artificial Sequence: Synthetic oligonucleotide
cacagcucagaggaagccg

SEQ ID NO: 1335574 - RNA, 19 nt, Artificial Sequence
  Description of Artificial Sequence: Synthetic oligonucleotide
ucgcuacuguuaguguugg

SEQ ID NO: 1335575 - RNA, 19 nt, Artificial Sequence
  Description of Artificial Sequence: Synthetic oligonucleotide
uguguguguguguguguga

SEQ ID NO: 1335576 - RNA, 19 nt, Artificial Sequence
  Description of Artificial Sequence: Synthetic oligonucleotide
ugaaggcuuagaccuuaaa

SEQ ID NO: 1335577 - RNA, 19 nt, Artificial Sequence
  Description of Artificial Sequence: Synthetic oligonucleotide
gaugccggaggugccgugg

SEQ ID NO: 1335578 - RNA, 19 nt, Artificial Sequence
  Description of Artificial Sequence: Synthetic oligonucleotide
gaagccggcccaaaagaac

SEQ ID NO: 1335579 - RNA, 19 nt, Artificial Sequence
  Description of Artificial Sequence: Synthetic oligonucleotide
ucaauccggcgcuuucgug

SEQ ID NO: 1335580 - RNA, 19 nt, Artificial Sequence
  Description of Artificial Sequence: Synthetic oligonucleotide
cugucuagggagcgccucg

SEQ ID NO: 1335581 - RNA, 19 nt, Artificial Sequence
  Description of Artificial Sequence: Synthetic oligonucleotide
ucgguagguagagcgcgcg

SEQ ID NO: 1335582 - RNA, 19 nt, Artificial Sequence
  Description of Artificial Sequence: Synthetic oligonucleotide
gcuaccauaaaacgaaacu

SEQ ID NO: 1335583 - RNA, 19 nt, Artificial Sequence
  Description of Artificial Sequence: Synthetic oligonucleotide
uugcgugugugugugugug

SEQ ID NO: 1335584 - RNA, 19 nt, Artificial Sequence
  Description of Artificial Sequence: Synthetic oligonucleotide
cugucgguagguagagcgc

SEQ ID NO: 1335585 - RNA, 19 nt, Artificial Sequence
  Description of Artificial Sequence: Synthetic oligonucleotide
guuugucguccacugcgcc

SEQ ID NO: 1335586 - RNA, 19 nt, Artificial Sequence
  Description of Artificial Sequence: Synthetic oligonucleotide
ucuugcugagccccauaaa

SEQ ID NO: 1335587 - RNA, 19 nt, Artificial Sequence
  Description of Artificial Sequence: Synthetic oligonucleotide
ggcgugagagacuucaauc

SEQ ID NO: 1335588 - RNA, 19 nt, Artificial Sequence
  Description of Artificial Sequence: Synthetic oligonucleotide
uggagugggacagaacuuu

SEQ ID NO: 1335589 - RNA, 19 nt, Artificial Sequence
  Description of Artificial Sequence: Synthetic oligonucleotide
ugugugugugugugugugu

SEQ ID NO: 1335590 - RNA, 19 nt, Artificial Sequence
  Description of Artificial Sequence: Synthetic oligonucleotide
uaguuagaguugugagugu

SEQ ID NO: 1335591 - RNA, 19 nt, Artificial Sequence
  Description of Artificial Sequence: Synthetic oligonucleotide
caagugagugugugcuggc

SEQ ID NO: 1335592 - RNA, 19 nt, Artificial Sequence
  Description of Artificial Sequence: Synthetic oligonucleotide
cauugcgugugugugugug

SEQ ID NO: 1335593 - RNA, 19 nt, Artificial Sequence
  Description of Artificial Sequence: Synthetic oligonucleotide
auugcgugugugugugugu

SEQ ID NO: 1335594 - RNA, 19 nt, Artificial Sequence
  Description of Artificial Sequence: Synthetic oligonucleotide
gggauauugcaccacgcuc

SEQ ID NO: 1335595 - RNA, 19 nt, Artificial Sequence
  Description of Artificial Sequence: Synthetic oligonucleotide
agcaaaugacagucguaaa

SEQ ID NO: 1335596 - RNA, 19 nt, Artificial Sequence
  Description of Artificial Sequence: Synthetic oligonucleotide
ugcuaguccuuauuuucuu

SEQ ID NO: 1335597 - RNA, 19 nt, Artificial Sequence
  Description of Artificial Sequence: Synthetic oligonucleotide
uuauugcagguucccuuua

SEQ ID NO: 1335598 - RNA, 19 nt, Artificial Sequence
  Description of Artificial Sequence: Synthetic oligonucleotide
agguaggauuuuagagacc

SEQ ID NO: 1335599 - RNA, 19 nt, Artificial Sequence
  Description of Artificial Sequence: Synthetic oligonucleotide
augaauagguaggauuuua

SEQ ID NO: 1335600 - RNA, 19 nt, Artificial Sequence
  Description of Artificial Sequence: Synthetic oligonucleotide
ggcgcaugaaaacccgcgg

SEQ ID NO: 1335601 - RNA, 19 nt, Artificial Sequence
  Description of Artificial Sequence: Synthetic oligonucleotide
cacggguucugcugguagc

SEQ ID NO: 1335602 - RNA, 19 nt, Artificial Sequence
  Description of Artificial Sequence: Synthetic oligonucleotide
agcgcauggcuccugccca

SEQ ID NO: 1335603 - RNA, 19 nt, Artificial Sequence
  Description of Artificial Sequence: Synthetic oligonucleotide
ugggcgcaugaaaacccgc

SEQ ID NO: 1335604 - RNA, 19 nt, Artificial Sequence
  Description of Artificial Sequence: Synthetic oligonucleotide
ccauaaagggacugucuag

SEQ ID NO: 1335605 - RNA, 19 nt, Artificial Sequence
  Description of Artificial Sequence: Synthetic oligonucleotide
uggugauuucugagcacaa

SEQ ID NO: 1335606 - RNA, 19 nt, Artificial Sequence
  Description of Artificial Sequence: Synthetic oligonucleotide
gugugugugugugugugug

SEQ ID NO: 1335607 - RNA, 19 nt, Artificial Sequence
  Description of Artificial Sequence: Synthetic oligonucleotide
aggagcguggggucucauc

SEQ ID NO: 1335608 - RNA, 19 nt, Artificial Sequence
  Description of Artificial Sequence: Synthetic oligonucleotide
auauugcaccacgcucgcc

SEQ ID NO: 1335609 - RNA, 19 nt, Artificial Sequence
  Description of Artificial Sequence: Synthetic oligonucleotide
agucgggauauugcaccac

SEQ ID NO: 1335610 - RNA, 19 nt, Artificial Sequence
  Description of Artificial Sequence: Synthetic oligonucleotide
ccggcagucguaauaggcc

SEQ ID NO: 1335611 - RNA, 19 nt, Artificial Sequence
  Description of Artificial Sequence: Synthetic oligonucleotide
agcgcgcgcucucacuuag

SEQ ID NO: 1335612 - RNA, 19 nt, Artificial Sequence
  Description of Artificial Sequence: Synthetic oligonucleotide
cccgaguuggagaugccgg

SEQ ID NO: 1335613 - RNA, 19 nt, Artificial Sequence
  Description of Artificial Sequence: Synthetic oligonucleotide
gucguaaacuucucaauuu

SEQ ID NO: 1335614 - RNA, 19 nt, Artificial Sequence
  Description of Artificial Sequence: Synthetic oligonucleotide
gugcgaggcgugcuggaag

SEQ ID NO: 1335615 - RNA, 19 nt, Artificial Sequence
  Description of Artificial Sequence: Synthetic oligonucleotide
gguacuccccgaaaccucc

SEQ ID NO: 1335616 - RNA, 19 nt, Artificial Sequence
  Description of Artificial Sequence: Synthetic oligonucleotide
ucgccgccuuuguauuugg

SEQ ID NO: 1335617 - RNA, 19 nt, Artificial Sequence
  Description of Artificial Sequence: Synthetic oligonucleotide
ugauaccggcuguaaguuu

SEQ ID NO: 1335618 - RNA, 19 nt, Artificial Sequence
  Description of Artificial Sequence: Synthetic oligonucleotide
ugcaaguaucugacaggua

SEQ ID NO: 1335619 - RNA, 19 nt, Artificial Sequence
  Description of Artificial Sequence: Synthetic oligonucleotide
ggccccaggcaguuuaucc

SEQ ID NO: 1335620 - RNA, 19 nt, Artificial Sequence
  Description of Artificial Sequence: Synthetic oligonucleotide
accacgcucgccucuugcu

SEQ ID NO: 1335621 - RNA, 19 nt, Artificial Sequence
  Description of Artificial Sequence: Synthetic oligonucleotide
guagguagagcgcgcgcuc

SEQ ID NO: 1335622 - RNA, 19 nt, Artificial Sequence
  Description of Artificial Sequence: Synthetic oligonucleotide
gacauggugcgaggcgugc

SEQ ID NO: 1335623 - RNA, 19 nt, Artificial Sequence
  Description of Artificial Sequence: Synthetic oligonucleotide
accccaagcuggccggcuc

SEQ ID NO: 1335624 - RNA, 19 nt, Artificial Sequence
  Description of Artificial Sequence: Synthetic oligonucleotide
ggaggugccgugguggaag

SEQ ID NO: 1335625 - RNA, 19 nt, Artificial Sequence
  Description of Artificial Sequence: Synthetic oligonucleotide
gagugggacagaacuuuuc

SEQ ID NO: 1335626 - RNA, 19 nt, Artificial Sequence
  Description of Artificial Sequence: Synthetic oligonucleotide
gggguugacgaaguaggag

SEQ ID NO: 1335627 - RNA, 19 nt, Artificial Sequence
  Description of Artificial Sequence: Synthetic oligonucleotide
cucgccucuugcugagccc

SEQ ID NO: 1335628 - RNA, 19 nt, Artificial Sequence
  Description of Artificial Sequence: Synthetic oligonucleotide
uaggccgguuccagggacu

SEQ ID NO: 1335629 - RNA, 19 nt, Artificial Sequence
  Description of Artificial Sequence: Synthetic oligonucleotide
caauccggcgcuuucgugu

SEQ ID NO: 1335630 - RNA, 19 nt, Artificial Sequence
  Description of Artificial Sequence: Synthetic oligonucleotide
uagagaccauugcgugugu

SEQ ID NO: 1335631 - RNA, 19 nt, Artificial Sequence
  Description of Artificial Sequence: Synthetic oligonucleotide
gcgcaugaaaacccgcggc

SEQ ID NO: 1335632 - RNA, 19 nt, Artificial Sequence
  Description of Artificial Sequence: Synthetic oligonucleotide
ugcgugugugugugugugu

SEQ ID NO: 1335633 - RNA, 19 nt, Artificial Sequence
  Description of Artificial Sequence: Synthetic oligonucleotide
ccauggaaacaugaggcug

SEQ ID NO: 1335634 - RNA, 19 nt, Artificial Sequence
  Description of Artificial Sequence: Synthetic oligonucleotide
gaggcgucuccguggcagc

SEQ ID NO: 1335635 - RNA, 19 nt, Artificial Sequence
  Description of Artificial Sequence: Synthetic oligonucleotide
cucagaggaagccggccca

SEQ ID NO: 1335636 - RNA, 19 nt, Artificial Sequence
  Description of Artificial Sequence: Synthetic oligonucleotide
accgaaccccaagcuggcc

SEQ ID NO: 1335637 - RNA, 19 nt, Artificial Sequence
  Description of Artificial Sequence: Synthetic oligonucleotide
agagaccauugcgugugug

SEQ ID NO: 1335638 - RNA, 19 nt, Artificial Sequence
  Description of Artificial Sequence: Synthetic oligonucleotide
ggagaugccggaggugccg

SEQ ID NO: 1335639 - RNA, 19 nt, Artificial Sequence
  Description of Artificial Sequence: Synthetic oligonucleotide
ugucuagggagcgccucgu

SEQ ID NO: 1335640 - RNA, 19 nt, Artificial Sequence
  Description of Artificial Sequence: Synthetic oligonucleotide
ggcaugaauagguaggauu

SEQ ID NO: 1335641 - RNA, 19 nt, Artificial Sequence
  Description of Artificial Sequence: Synthetic oligonucleotide
gggcgcaugaaaacccgcg

SEQ ID NO: 1335642 - RNA, 19 nt, Artificial Sequence
  Description of Artificial Sequence: Synthetic oligonucleotide
ggacugucuagggagcgcc

SEQ ID NO: 1335643 - RNA, 19 nt, Artificial Sequence
  Description of Artificial Sequence: Synthetic oligonucleotide
gcaugaaaacccgcggccc

SEQ ID NO: 1335644 - RNA, 19 nt, Artificial Sequence
  Description of Artificial Sequence: Synthetic oligonucleotide
ccgaaccccaagcuggccg

SEQ ID NO: 1335645 - RNA, 19 nt, Artificial Sequence
  Description of Artificial Sequence: Synthetic oligonucleotide
uucugcugguagcccgagu

SEQ ID NO: 1335646 - RNA, 19 nt, Artificial Sequence
  Description of Artificial Sequence: Synthetic oligonucleotide
gcgccccaaacaaauaaag

SEQ ID NO: 1335647 - RNA, 19 nt, Artificial Sequence
  Description of Artificial Sequence: Synthetic oligonucleotide
agcgagcacggguucugcu

SEQ ID NO: 1335648 - RNA, 19 nt, Artificial Sequence
  Description of Artificial Sequence: Synthetic oligonucleotide
gaccgaaccccaagcuggc

SEQ ID NO: 1335649 - RNA, 19 nt, Artificial Sequence
  Description of Artificial Sequence: Synthetic oligonucleotide
uugcaccacgcucgccucu

SEQ ID NO: 1335650 - RNA, 19 nt, Artificial Sequence
  Description of Artificial Sequence: Synthetic oligonucleotide
gggcccauacaccagcgca

SEQ ID NO: 1335651 - RNA, 19 nt, Artificial Sequence
  Description of Artificial Sequence: Synthetic oligonucleotide
cucgccgccuuuguauuug

SEQ ID NO: 1335652 - RNA, 19 nt, Artificial Sequence
  Description of Artificial Sequence: Synthetic oligonucleotide
gcugggcgcaugaaaaccc

SEQ ID NO: 1335653 - RNA, 19 nt, Artificial Sequence
  Description of Artificial Sequence: Synthetic oligonucleotide
gcgcuuucgugucaaauaa

SEQ ID NO: 1335654 - RNA, 19 nt, Artificial Sequence
  Description of Artificial Sequence: Synthetic oligonucleotide
gagccccauaaagggacug

SEQ ID NO: 1335655 - RNA, 19 nt, Artificial Sequence
  Description of Artificial Sequence: Synthetic oligonucleotide
cgcaugaaaacccgcggcc

SEQ ID NO: 1335656 - RNA, 19 nt, Artificial Sequence
  Description of Artificial Sequence: Synthetic oligonucleotide
guaggagcucaugcugggc

SEQ ID NO: 1335657 - RNA, 19 nt, Artificial Sequence
  Description of Artificial Sequence: Synthetic oligonucleotide
agcuuagcgagcacggguu

SEQ ID NO: 1335658 - RNA, 19 nt, Artificial Sequence
  Description of Artificial Sequence: Synthetic oligonucleotide
gugucauucuauucucuau

SEQ ID NO: 1335659 - RNA, 19 nt, Artificial Sequence
  Description of Artificial Sequence: Synthetic oligonucleotide
cugcaaguaucugacaggu

SEQ ID NO: 1335660 - RNA, 19 nt, Artificial Sequence
  Description of Artificial Sequence: Synthetic oligonucleotide
guguuggcggaggauuuac

SEQ ID NO: 1335661 - RNA, 19 nt, Artificial Sequence
  Description of Artificial Sequence: Synthetic oligonucleotide
cggcagucguaauaggccg

SEQ ID NO: 1335662 - RNA, 19 nt, Artificial Sequence
  Description of Artificial Sequence: Synthetic oligonucleotide
gugugugugugugugugaa

SEQ ID NO: 1335663 - RNA, 19 nt, Artificial Sequence
  Description of Artificial Sequence: Synthetic oligonucleotide
guugacgaaguaggagcuc

SEQ ID NO: 1335664 - RNA, 19 nt, Artificial Sequence
  Description of Artificial Sequence: Synthetic oligonucleotide
guagagcgcgcgcucucac

SEQ ID NO: 1335665 - RNA, 19 nt, Artificial Sequence
  Description of Artificial Sequence: Synthetic oligonucleotide
ggcagucguaauaggccgg

SEQ ID NO: 1335666 - RNA, 19 nt, Artificial Sequence
  Description of Artificial Sequence: Synthetic oligonucleotide
ggaaccggcagucguaaua

SEQ ID NO: 1335667 - RNA, 19 nt, Artificial Sequence
  Description of Artificial Sequence: Synthetic oligonucleotide
gucuccguggcagcuuagc

SEQ ID NO: 1335668 - RNA, 19 nt, Artificial Sequence
  Description of Artificial Sequence: Synthetic oligonucleotide
gaguugugagugucauucu

SEQ ID NO: 1335669 - RNA, 19 nt, Artificial Sequence
  Description of Artificial Sequence: Synthetic oligonucleotide
gaccauugcgugugugugu

SEQ ID NO: 1335670 - RNA, 19 nt, Artificial Sequence
  Description of Artificial Sequence: Synthetic oligonucleotide
agccccauaaagggacugu

SEQ ID NO: 1335671 - RNA, 19 nt, Artificial Sequence
  Description of Artificial Sequence: Synthetic oligonucleotide
gcacggguucugcugguag

SEQ ID NO: 1335672 - RNA, 19 nt, Artificial Sequence
  Description of Artificial Sequence: Synthetic oligonucleotide
gcgagcacggguucugcug

SEQ ID NO: 1335673 - RNA, 19 nt, Artificial Sequence
  Description of Artificial Sequence: Synthetic oligonucleotide
aggccgguuccagggacuc

SEQ ID NO: 1335674 - RNA, 19 nt, Artificial Sequence
  Description of Artificial Sequence: Synthetic oligonucleotide
cuucgcuacuguuaguguu

SEQ ID NO: 1335675 - RNA, 19 nt, Artificial Sequence
  Description of Artificial Sequence: Synthetic oligonucleotide
ccgccuuuguauuuggaga

SEQ ID NO: 1335676 - RNA, 19 nt, Artificial Sequence
  Description of Artificial Sequence: Synthetic oligonucleotide
gucuuucggucagucccag

SEQ ID NO: 1335677 - RNA, 19 nt, Artificial Sequence
  Description of Artificial Sequence: Synthetic oligonucleotide
agaugccggaggugccgug

SEQ ID NO: 1335678 - RNA, 19 nt, Artificial Sequence
  Description of Artificial Sequence: Synthetic oligonucleotide
ugucguccacugcgccgcc

SEQ ID NO: 1335679 - RNA, 19 nt, Artificial Sequence
  Description of Artificial Sequence: Synthetic oligonucleotide
gcaugaauagguaggauuu

SEQ ID NO: 1335680 - RNA, 19 nt, Artificial Sequence
  Description of Artificial Sequence: Synthetic oligonucleotide
gugugugugugugaaggcu

SEQ ID NO: 1335681 - RNA, 19 nt, Artificial Sequence
  Description of Artificial Sequence: Synthetic oligonucleotide
cccgguacuccccgaaacc

SEQ ID NO: 1335682 - RNA, 19 nt, Artificial Sequence
  Description of Artificial Sequence: Synthetic oligonucleotide
cugcuaccauaaaacgaaa

SEQ ID NO: 1335683 - RNA, 19 nt, Artificial Sequence
  Description of Artificial Sequence: Synthetic oligonucleotide
gucgguagguagagcgcgc

SEQ ID NO: 1335684 - RNA, 19 nt, Artificial Sequence
  Description of Artificial Sequence: Synthetic oligonucleotide
acgaaacuucaagggaguu

SEQ ID NO: 1335685 - RNA, 19 nt, Artificial Sequence
  Description of Artificial Sequence: Synthetic oligonucleotide
agucuuggacauggugcga

SEQ ID NO: 1335686 - RNA, 19 nt, Artificial Sequence
  Description of Artificial Sequence: Synthetic oligonucleotide
agccggcccaaaagaacag

SEQ ID NO: 1335687 - RNA, 19 nt, Artificial Sequence
  Description of Artificial Sequence: Synthetic oligonucleotide
gcgugugugugugugugug

SEQ ID NO: 1335688 - RNA, 19 nt, Artificial Sequence
  Description of Artificial Sequence: Synthetic oligonucleotide
cccgaaaccuccccucccc

SEQ ID NO: 1335689 - RNA, 19 nt, Artificial Sequence
  Description of Artificial Sequence: Synthetic oligonucleotide
agcgccucguagccauaga

SEQ ID NO: 1335690 - RNA, 19 nt, Artificial Sequence
  Description of Artificial Sequence: Synthetic oligonucleotide
aguguuggcggaggauuua

SEQ ID NO: 1335691 - RNA, 19 nt, Artificial Sequence
  Description of Artificial Sequence: Synthetic oligonucleotide
auaccggcuguaaguuugu

SEQ ID NO: 1335692 - RNA, 19 nt, Artificial Sequence
  Description of Artificial Sequence: Synthetic oligonucleotide
uccggcgcuuucgugucaa

SEQ ID NO: 1335693 - RNA, 19 nt, Artificial Sequence
  Description of Artificial Sequence: Synthetic oligonucleotide
cagcuuagcgagcacgggu

SEQ ID NO: 1335694 - RNA, 19 nt, Artificial Sequence
  Description of Artificial Sequence: Synthetic oligonucleotide
gaaccccaagcuggccggc

SEQ ID NO: 1335695 - RNA, 19 nt, Artificial Sequence
  Description of Artificial Sequence: Synthetic oligonucleotide
ggugauuucugagcacaaa

SEQ ID NO: 1335696 - RNA, 19 nt, Artificial Sequence
  Description of Artificial Sequence: Synthetic oligonucleotide
cacugucgguagguagagc

SEQ ID NO: 1335697 - RNA, 19 nt, Artificial Sequence
  Description of Artificial Sequence: Synthetic oligonucleotide
acucgccgccuuuguauuu

SEQ ID NO: 1335698 - RNA, 19 nt, Artificial Sequence
  Description of Artificial Sequence: Synthetic oligonucleotide
cccaagugacuauggcaug

SEQ ID NO: 1335699 - RNA, 19 nt, Artificial Sequence
  Description of Artificial Sequence: Synthetic oligonucleotide
gcgcggugccggcugaggg

SEQ ID NO: 1335700 - RNA, 19 nt, Artificial Sequence
  Description of Artificial Sequence: Synthetic oligonucleotide
ggaagccggcccaaaagaa

SEQ ID NO: 1335701 - RNA, 19 nt, Artificial Sequence
  Description of Artificial Sequence: Synthetic oligonucleotide
guuaguguuggcggaggau

SEQ ID NO: 1335702 - RNA, 19 nt, Artificial Sequence
  Description of Artificial Sequence: Synthetic oligonucleotide
guagcccgaguuggagaug

SEQ ID NO: 1335703 - RNA, 19 nt, Artificial Sequence
  Description of Artificial Sequence: Synthetic oligonucleotide
gggguccaaagguaauaaa

SEQ ID NO: 1335704 - RNA, 19 nt, Artificial Sequence
  Description of Artificial Sequence: Synthetic oligonucleotide
ccaagugacuauggcauga

SEQ ID NO: 1335705 - RNA, 19 nt, Artificial Sequence
  Description of Artificial Sequence: Synthetic oligonucleotide
gcuuagcgagcacggguuc

SEQ ID NO: 1335706 - RNA, 19 nt, Artificial Sequence
  Description of Artificial Sequence: Synthetic oligonucleotide
aggcgugcuggaagccggg

SEQ ID NO: 1335707 - RNA, 19 nt, Artificial Sequence
  Description of Artificial Sequence: Synthetic oligonucleotide
gacucgccgccuuuguauu

SEQ ID NO: 1335708 - RNA, 19 nt, Artificial Sequence
  Description of Artificial Sequence: Synthetic oligonucleotide
gguagguagagcgcgcgcu

SEQ ID NO: 1335709 - RNA, 19 nt, Artificial Sequence
  Description of Artificial Sequence: Synthetic oligonucleotide
uaccggcuguaaguuuguc

SEQ ID NO: 1335710 - RNA, 19 nt, Artificial Sequence
  Description of Artificial Sequence: Synthetic oligonucleotide
cugauaccggcuguaaguu

SEQ ID NO: 1335711 - RNA, 19 nt, Artificial Sequence
  Description of Artificial Sequence: Synthetic oligonucleotide
ccacgcucgccucuugcug

SEQ ID NO: 1335712 - RNA, 19 nt, Artificial Sequence
  Description of Artificial Sequence: Synthetic oligonucleotide
gcgccucguagccauagaa

SEQ ID NO: 1335713 - RNA, 19 nt, Artificial Sequence
  Description of Artificial Sequence: Synthetic oligonucleotide
auccggcgcuuucguguca

SEQ ID NO: 1335714 - RNA, 19 nt, Artificial Sequence
  Description of Artificial Sequence: Synthetic oligonucleotide
cuuagcgagcacggguucu

SEQ ID NO: 1335715 - RNA, 19 nt, Artificial Sequence
  Description of Artificial Sequence: Synthetic oligonucleotide
cgaaguaggagcucaugcu

SEQ ID NO: 1335716 - RNA, 19 nt, Artificial Sequence
  Description of Artificial Sequence: Synthetic oligonucleotide
ccggcccaaaagaacagaa

SEQ ID NO: 1335717 - RNA, 19 nt, Artificial Sequence
  Description of Artificial Sequence: Synthetic oligonucleotide
ggcgccccaaacaaauaaa

SEQ ID NO: 1335718 - RNA, 19 nt, Artificial Sequence
  Description of Artificial Sequence: Synthetic oligonucleotide
cguagccauagaauuugga

SEQ ID NO: 1335719 - RNA, 19 nt, Artificial Sequence
  Description of Artificial Sequence: Synthetic oligonucleotide
gguagagcgcgcgcucuca

SEQ ID NO: 1335720 - RNA, 19 nt, Artificial Sequence
  Description of Artificial Sequence: Synthetic oligonucleotide
ccgaguuggagaugccgga

SEQ ID NO: 1335721 - RNA, 19 nt, Artificial Sequence
  Description of Artificial Sequence: Synthetic oligonucleotide
gcugggagacgaguucuga

SEQ ID NO: 1335722 - RNA, 19 nt, Artificial Sequence
  Description of Artificial Sequence: Synthetic oligonucleotide
ccagcgcauggcuccugcc

SEQ ID NO: 1335723 - RNA, 19 nt, Artificial Sequence
  Description of Artificial Sequence: Synthetic oligonucleotide
gagaugccggaggugccgu

SEQ ID NO: 1335724 - RNA, 19 nt, Artificial Sequence
  Description of Artificial Sequence: Synthetic oligonucleotide
ggucugauaccggcuguaa

SEQ ID NO: 1335725 - RNA, 19 nt, Artificial Sequence
  Description of Artificial Sequence: Synthetic oligonucleotide
cccacgcucugagggaacc

SEQ ID NO: 1335726 - RNA, 19 nt, Artificial Sequence
  Description of Artificial Sequence: Synthetic oligonucleotide
gagcgcgcgcucucacuua

SEQ ID NO: 1335727 - RNA, 19 nt, Artificial Sequence
  Description of Artificial Sequence: Synthetic oligonucleotide
gucuagggagcgccucgua

SEQ ID NO: 1335728 - RNA, 19 nt, Artificial Sequence
  Description of Artificial Sequence: Synthetic oligonucleotide
agcacggguucugcuggua

SEQ ID NO: 1335729 - RNA, 19 nt, Artificial Sequence
  Description of Artificial Sequence: Synthetic oligonucleotide
ccccuuggcucaagcuccc

SEQ ID NO: 1335730 - RNA, 19 nt, Artificial Sequence
  Description of Artificial Sequence: Synthetic oligonucleotide
agggcgugagagacuucaa

SEQ ID NO: 1335731 - RNA, 19 nt, Artificial Sequence
  Description of Artificial Sequence: Synthetic oligonucleotide
gggcgugagagacuucaau

SEQ ID NO: 1335732 - RNA, 19 nt, Artificial Sequence
  Description of Artificial Sequence: Synthetic oligonucleotide
cccaauauuauugcagguu

SEQ ID NO: 1335733 - RNA, 19 nt, Artificial Sequence
  Description of Artificial Sequence: Synthetic oligonucleotide
gacuucaauccggcgcuuu

SEQ ID NO: 1335734 - RNA, 19 nt, Artificial Sequence
  Description of Artificial Sequence: Synthetic oligonucleotide
gcgcgcucucacuuagcuc

SEQ ID NO: 1335735 - RNA, 19 nt, Artificial Sequence
  Description of Artificial Sequence: Synthetic oligonucleotide
gggagcgccucguagccau

SEQ ID NO: 1335736 - RNA, 19 nt, Artificial Sequence
  Description of Artificial Sequence: Synthetic oligonucleotide
ccgguuccagggacucgcc

SEQ ID NO: 1335737 - RNA, 19 nt, Artificial Sequence
  Description of Artificial Sequence: Synthetic oligonucleotide
ggccgguuccagggacucg

SEQ ID NO: 1335738 - RNA, 19 nt, Artificial Sequence
  Description of Artificial Sequence: Synthetic oligonucleotide
ggcgugcuggaagccgggc

SEQ ID NO: 1335739 - RNA, 19 nt, Artificial Sequence
  Description of Artificial Sequence: Synthetic oligonucleotide
gugccggcugagggcucgg

SEQ ID NO: 1335740 - RNA, 19 nt, Artificial Sequence
  Description of Artificial Sequence: Synthetic oligonucleotide
gccggcccaaaagaacaga

SEQ ID NO: 1335741 - RNA, 19 nt, Artificial Sequence
  Description of Artificial Sequence: Synthetic oligonucleotide
cgguagguagagcgcgcgc

SEQ ID NO: 1335742 - RNA, 19 nt, Artificial Sequence
  Description of Artificial Sequence: Synthetic oligonucleotide
ccccaauauuauugcaggu

SEQ ID NO: 1335743 - RNA, 19 nt, Artificial Sequence
  Description of Artificial Sequence: Synthetic oligonucleotide
gcagucguaauaggccggu

SEQ ID NO: 1335744 - RNA, 19 nt, Artificial Sequence
  Description of Artificial Sequence: Synthetic oligonucleotide
gggacucgccgccuuugua

SEQ ID NO: 1335745 - RNA, 19 nt, Artificial Sequence
  Description of Artificial Sequence: Synthetic oligonucleotide
guccuucgcuacuguuagu

SEQ ID NO: 1335746 - RNA, 19 nt, Artificial Sequence
  Description of Artificial Sequence: Synthetic oligonucleotide
ccuucgcuacuguuagugu

SEQ ID NO: 1335747 - RNA, 19 nt, Artificial Sequence
  Description of Artificial Sequence: Synthetic oligonucleotide
cgcuacuguuaguguuggc

SEQ ID NO: 1335748 - RNA, 19 nt, Artificial Sequence
  Description of Artificial Sequence: Synthetic oligonucleotide
gcgucuccguggcagcuua

SEQ ID NO: 1335749 - RNA, 19 nt, Artificial Sequence
  Description of Artificial Sequence: Synthetic oligonucleotide
gcguggggucucauccaug

SEQ ID NO: 1335750 - RNA, 19 nt, Artificial Sequence
  Description of Artificial Sequence: Synthetic oligonucleotide
ccguggcagcuuagcgagc

SEQ ID NO: 1335751 - RNA, 19 nt, Artificial Sequence
  Description of Artificial Sequence: Synthetic oligonucleotide
cggcgccccaaacaaauaa

SEQ ID NO: 1335752 - RNA, 19 nt, Artificial Sequence
  Description of Artificial Sequence: Synthetic oligonucleotide
cgggauauugcaccacgcu

SEQ ID NO: 1335753 - RNA, 19 nt, Artificial Sequence
  Description of Artificial Sequence: Synthetic oligonucleotide
cccggcgccccaaacaaau

SEQ ID NO: 1335754 - RNA, 19 nt, Artificial Sequence
  Description of Artificial Sequence: Synthetic oligonucleotide
ccgguacuccccgaaaccu

SEQ ID NO: 1335755 - RNA, 19 nt, Artificial Sequence
  Description of Artificial Sequence: Synthetic oligonucleotide
gggccccaggcaguuuauc

SEQ ID NO: 1335756 - RNA, 19 nt, Artificial Sequence
  Description of Artificial Sequence: Synthetic oligonucleotide
cgucuccguggcagcuuag

SEQ ID NO: 1335757 - RNA, 19 nt, Artificial Sequence
  Description of Artificial Sequence: Synthetic oligonucleotide
ccacugcgccgcccaggag

SEQ ID NO: 1335758 - RNA, 19 nt, Artificial Sequence
  Description of Artificial Sequence: Synthetic oligonucleotide
ccagggcgugagagacuuc

SEQ ID NO: 1335759 - RNA, 19 nt, Artificial Sequence
  Description of Artificial Sequence: Synthetic oligonucleotide
gcgcgcgcucucacuuagc

SEQ ID NO: 1335760 - RNA, 19 nt, Artificial Sequence
  Description of Artificial Sequence: Synthetic oligonucleotide
gggaaccggcagucguaau

SEQ ID NO: 1335761 - RNA, 19 nt, Artificial Sequence
  Description of Artificial Sequence: Synthetic oligonucleotide
cgugugugugugugugugu

SEQ ID NO: 1335762 - RNA, 19 nt, Artificial Sequence
  Description of Artificial Sequence: Synthetic oligonucleotide
gggcgcggugccggcugag

SEQ ID NO: 1335763 - RNA, 19 nt, Artificial Sequence
  Description of Artificial Sequence: Synthetic oligonucleotide
cccagggcgugagagacuu

SEQ ID NO: 1335764 - RNA, 19 nt, Artificial Sequence
  Description of Artificial Sequence: Synthetic oligonucleotide
cagucguaauaggccgguu

SEQ ID NO: 1335765 - RNA, 19 nt, Artificial Sequence
  Description of Artificial Sequence: Synthetic oligonucleotide
ccggcgccccaaacaaaua

SEQ ID NO: 1335766 - RNA, 19 nt, Artificial Sequence
  Description of Artificial Sequence: Synthetic oligonucleotide
ccauugcgugugugugugu

SEQ ID NO: 1335767 - RNA, 19 nt, Artificial Sequence
  Description of Artificial Sequence: Synthetic oligonucleotide
ggagcgccucguagccaua

SEQ ID NO: 1335768 - RNA, 19 nt, Artificial Sequence
  Description of Artificial Sequence: Synthetic oligonucleotide
ccccggcgccccaaacaaa

SEQ ID NO: 1335769 - RNA, 19 nt, Artificial Sequence
  Description of Artificial Sequence: Synthetic oligonucleotide
ggcgucuccguggcagcuu

SEQ ID NO: 1335770 - RNA, 19 nt, Artificial Sequence
  Description of Artificial Sequence: Synthetic oligonucleotide
ccgccccgguacuccccga

SEQ ID NO: 1335771 - RNA, 19 nt, Artificial Sequence
  Description of Artificial Sequence: Synthetic oligonucleotide
cucgggccccaggcaguuu

SEQ ID NO: 1335772 - RNA, 19 nt, Artificial Sequence
  Description of Artificial Sequence: Synthetic oligonucleotide
cggaggugccgugguggaa

SEQ ID NO: 1335773 - RNA, 19 nt, Artificial Sequence
  Description of Artificial Sequence: Synthetic oligonucleotide
cugcgccgcccaggagcgu

SEQ ID NO: 1335774 - RNA, 19 nt, Artificial Sequence
  Description of Artificial Sequence: Synthetic oligonucleotide
ccgagccuccgggcccaua

SEQ ID NO: 1335775 - RNA, 19 nt, Artificial Sequence
  Description of Artificial Sequence: Synthetic oligonucleotide
gccgagccuccgggcccau

SEQ ID NO: 1335776 - RNA, 19 nt, Artificial Sequence
  Description of Artificial Sequence: Synthetic oligonucleotide
aaauuagaagccuuaaucc

SEQ ID NO: 1335777 - RNA, 19 nt, Artificial Sequence
  Description of Artificial Sequence: Synthetic oligonucleotide
guuagaauaacuuagauuc

SEQ ID NO: 1335778 - RNA, 19 nt, Artificial Sequence
  Description of Artificial Sequence: Synthetic oligonucleotide
aauuagaagccuuaauccc

SEQ ID NO: 1335779 - RNA, 19 nt, Artificial Sequence
  Description of Artificial Sequence: Synthetic oligonucleotide
accacagauacucaggacc

SEQ ID NO: 1335780 - RNA, 19 nt, Artificial Sequence
  Description of Artificial Sequence: Synthetic oligonucleotide
ucacgcuugaccuucaggg

SEQ ID NO: 1335781 - RNA, 19 nt, Artificial Sequence
  Description of Artificial Sequence: Synthetic oligonucleotide
cucgacuuuauucagaaag

SEQ ID NO: 1335782 - RNA, 19 nt, Artificial Sequence
  Description of Artificial Sequence: Synthetic oligonucleotide
agcuguauacaguauaggg

SEQ ID NO: 1335783 - RNA, 19 nt, Artificial Sequence
  Description of Artificial Sequence: Synthetic oligonucleotide
uuagaauaacuuagauucg

SEQ ID NO: 1335784 - RNA, 19 nt, Artificial Sequence
  Description of Artificial Sequence: Synthetic oligonucleotide
gaauaacuuagauucgugc

SEQ ID NO: 1335785 - RNA, 19 nt, Artificial Sequence
  Description of Artificial Sequence: Synthetic oligonucleotide
uucccuaaauauaagauua

SEQ ID NO: 1335786 - RNA, 19 nt, Artificial Sequence
  Description of Artificial Sequence: Synthetic oligonucleotide
uccacuaccacagagguca

SEQ ID NO: 1335787 - RNA, 19 nt, Artificial Sequence
  Description of Artificial Sequence: Synthetic oligonucleotide
ucagcuguauacaguauag

SEQ ID NO: 1335788 - RNA, 19 nt, Artificial Sequence
  Description of Artificial Sequence: Synthetic oligonucleotide
ucuacgugcgcgcuugucg

SEQ ID NO: 1335789 - RNA, 19 nt, Artificial Sequence
  Description of Artificial Sequence: Synthetic oligonucleotide
cgugcaauaaauaagagug

SEQ ID NO: 1335790 - RNA, 19 nt, Artificial Sequence
  Description of Artificial Sequence: Synthetic oligonucleotide
gauucgugcaauaaauaag

SEQ ID NO: 1335791 - RNA, 19 nt, Artificial Sequence
  Description of Artificial Sequence: Synthetic oligonucleotide
uaaauucccugcaucagga

SEQ ID NO: 1335792 - RNA, 19 nt, Artificial Sequence
  Description of Artificial Sequence: Synthetic oligonucleotide
auaaauaacucugggagcu

SEQ ID NO: 1335793 - RNA, 19 nt, Artificial Sequence
  Description of Artificial Sequence: Synthetic oligonucleotide
uaagguccugggaaggucg

SEQ ID NO: 1335794 - RNA, 19 nt, Artificial Sequence
  Description of Artificial Sequence: Synthetic oligonucleotide
aaaguugccccucccuagg

SEQ ID NO: 1335795 - RNA, 19 nt, Artificial Sequence
  Description of Artificial Sequence: Synthetic oligonucleotide
agugcaaggguucagcugu

SEQ ID NO: 1335796 - RNA, 19 nt, Artificial Sequence
  Description of Artificial Sequence: Synthetic oligonucleotide
ugcaauaaauaagagugca

SEQ ID NO: 1335797 - RNA, 19 nt, Artificial Sequence
  Description of Artificial Sequence: Synthetic oligonucleotide
aaauaacucugggagcugg

SEQ ID NO: 1335798 - RNA, 19 nt, Artificial Sequence
  Description of Artificial Sequence: Synthetic oligonucleotide
aauauaaaguccagcucag

SEQ ID NO: 1335799 - RNA, 19 nt, Artificial Sequence
  Description of Artificial Sequence: Synthetic oligonucleotide
agaagccuuaaucccaagg

SEQ ID NO: 1335800 - RNA, 19 nt, Artificial Sequence
  Description of Artificial Sequence: Synthetic oligonucleotide
cucaaggaagauaacuggc

SEQ ID NO: 1335801 - RNA, 19 nt, Artificial Sequence
  Description of Artificial Sequence: Synthetic oligonucleotide
cuguauacaguauagggga

SEQ ID NO: 1335802 - RNA, 19 nt, Artificial Sequence
  Description of Artificial Sequence: Synthetic oligonucleotide
agauucgugcaauaaauaa

SEQ ID NO: 1335803 - RNA, 19 nt, Artificial Sequence
  Description of Artificial Sequence: Synthetic oligonucleotide
agcgcgucgagcuccaggc

SEQ ID NO: 1335804 - RNA, 19 nt, Artificial Sequence
  Description of Artificial Sequence: Synthetic oligonucleotide
uggauaaaggauccgcaga

SEQ ID NO: 1335805 - RNA, 19 nt, Artificial Sequence
  Description of Artificial Sequence: Synthetic oligonucleotide
uguauacaguauaggggag

SEQ ID NO: 1335806 - RNA, 19 nt, Artificial Sequence
  Description of Artificial Sequence: Synthetic oligonucleotide
gauacucaggaccaaauua

SEQ ID NO: 1335807 - RNA, 19 nt, Artificial Sequence
  Description of Artificial Sequence: Synthetic oligonucleotide
agggagucgagucggaggg

SEQ ID NO: 1335808 - RNA, 19 nt, Artificial Sequence
  Description of Artificial Sequence: Synthetic oligonucleotide
ucgacuuuauucagaaagu

SEQ ID NO: 1335809 - RNA, 19 nt, Artificial Sequence
  Description of Artificial Sequence: Synthetic oligonucleotide
ucgugcaauaaauaagagu

SEQ ID NO: 1335810 - RNA, 19 nt, Artificial Sequence
  Description of Artificial Sequence: Synthetic oligonucleotide
uuucccuaaauauaagauu

SEQ ID NO: 1335811 - RNA, 19 nt, Artificial Sequence
  Description of Artificial Sequence: Synthetic oligonucleotide
auaacuuagauucgugcaa

SEQ ID NO: 1335812 - RNA, 19 nt, Artificial Sequence
  Description of Artificial Sequence: Synthetic oligonucleotide
agaaacccggagcaggagg

SEQ ID NO: 1335813 - RNA, 19 nt, Artificial Sequence
  Description of Artificial Sequence: Synthetic oligonucleotide
auacucaggaccaaauuag

SEQ ID NO: 1335814 - RNA, 19 nt, Artificial Sequence
  Description of Artificial Sequence: Synthetic oligonucleotide
acaauccaaaagccucucc

SEQ ID NO: 1335815 - RNA, 19 nt, Artificial Sequence
  Description of Artificial Sequence: Synthetic oligonucleotide
guugcuauccagcuuuccc

SEQ ID NO: 1335816 - RNA, 19 nt, Artificial Sequence
  Description of Artificial Sequence: Synthetic oligonucleotide
acacuugccgcgcagcgcg

SEQ ID NO: 1335817 - RNA, 19 nt, Artificial Sequence
  Description of Artificial Sequence: Synthetic oligonucleotide
ucuugagugugcgacgccg

SEQ ID NO: 1335818 - RNA, 19 nt, Artificial Sequence
  Description of Artificial Sequence: Synthetic oligonucleotide
ugggaagggagucgagucg

SEQ ID NO: 1335819 - RNA, 19 nt, Artificial Sequence
  Description of Artificial Sequence: Synthetic oligonucleotide
agcgccucacacuugccgc

SEQ ID NO: 1335820 - RNA, 19 nt, Artificial Sequence
  Description of Artificial Sequence: Synthetic oligonucleotide
aaugacgcuggcaggcgcc

SEQ ID NO: 1335821 - RNA, 19 nt, Artificial Sequence
  Description of Artificial Sequence: Synthetic oligonucleotide
ugugucaccuucucucucc

SEQ ID NO: 1335822 - RNA, 19 nt, Artificial Sequence
  Description of Artificial Sequence: Synthetic oligonucleotide
uucagcuguauacaguaua

SEQ ID NO: 1335823 - RNA, 19 nt, Artificial Sequence
  Description of Artificial Sequence: Synthetic oligonucleotide
uauaggggaggugcuaggg

SEQ ID NO: 1335824 - RNA, 19 nt, Artificial Sequence
  Description of Artificial Sequence: Synthetic oligonucleotide
agccuuaaucccaagggac

SEQ ID NO: 1335825 - RNA, 19 nt, Artificial Sequence
  Description of Artificial Sequence: Synthetic oligonucleotide
gcuguauacaguauagggg

SEQ ID NO: 1335826 - RNA, 19 nt, Artificial Sequence
  Description of Artificial Sequence: Synthetic oligonucleotide
auucccugcaucaggaccg

SEQ ID NO: 1335827 - RNA, 19 nt, Artificial Sequence
  Description of Artificial Sequence: Synthetic oligonucleotide
agcuucuuuccccacccac

SEQ ID NO: 1335828 - RNA, 19 nt, Artificial Sequence
  Description of Artificial Sequence: Synthetic oligonucleotide
ugguuagaauaacuuagau

SEQ ID NO: 1335829 - RNA, 19 nt, Artificial Sequence
  Description of Artificial Sequence: Synthetic oligonucleotide
uugcuauccagcuuucccu

SEQ ID NO: 1335830 - RNA, 19 nt, Artificial Sequence
  Description of Artificial Sequence: Synthetic oligonucleotide
accgacaaccccaucagcg

SEQ ID NO: 1335831 - RNA, 19 nt, Artificial Sequence
  Description of Artificial Sequence: Synthetic oligonucleotide
guauacaguauaggggagg

SEQ ID NO: 1335832 - RNA, 19 nt, Artificial Sequence
  Description of Artificial Sequence: Synthetic oligonucleotide
ugcaucaggaccguagugu

SEQ ID NO: 1335833 - RNA, 19 nt, Artificial Sequence
  Description of Artificial Sequence: Synthetic oligonucleotide
ucuucuccgggccaucucu

SEQ ID NO: 1335834 - RNA, 19 nt, Artificial Sequence
  Description of Artificial Sequence: Synthetic oligonucleotide
aggucggaaggacauacug

SEQ ID NO: 1335835 - RNA, 19 nt, Artificial Sequence
  Description of Artificial Sequence: Synthetic oligonucleotide
uacucaggaccaaauuaga

SEQ ID NO: 1335836 - RNA, 19 nt, Artificial Sequence
  Description of Artificial Sequence: Synthetic oligonucleotide
gaaacccaggacccaacgc

SEQ ID NO: 1335837 - RNA, 19 nt, Artificial Sequence
  Description of Artificial Sequence: Synthetic oligonucleotide
acuaaauucccugcaucag

SEQ ID NO: 1335838 - RNA, 19 nt, Artificial Sequence
  Description of Artificial Sequence: Synthetic oligonucleotide
ugcuggauaaaggauccgc

SEQ ID NO: 1335839 - RNA, 19 nt, Artificial Sequence
  Description of Artificial Sequence: Synthetic oligonucleotide
uucacacggcagcuggccg

SEQ ID NO: 1335840 - RNA, 19 nt, Artificial Sequence
  Description of Artificial Sequence: Synthetic oligonucleotide
aucaggaccguagugucuc

SEQ ID NO: 1335841 - RNA, 19 nt, Artificial Sequence
  Description of Artificial Sequence: Synthetic oligonucleotide
aguauaggggaggugcuag

SEQ ID NO: 1335842 - RNA, 19 nt, Artificial Sequence
  Description of Artificial Sequence: Synthetic oligonucleotide
aaguugccccucccuaggg

SEQ ID NO: 1335843 - RNA, 19 nt, Artificial Sequence
  Description of Artificial Sequence: Synthetic oligonucleotide
aguugccccucccuagggc

SEQ ID NO: 1335844 - RNA, 19 nt, Artificial Sequence
  Description of Artificial Sequence: Synthetic oligonucleotide
gacauacugguacaaucca

SEQ ID NO: 1335845 - RNA, 19 nt, Artificial Sequence
  Description of Artificial Sequence: Synthetic oligonucleotide
uagauucgugcaauaaaua

SEQ ID NO: 1335846 - RNA, 19 nt, Artificial Sequence
  Description of Artificial Sequence: Synthetic oligonucleotide
ucagcccaaggaaacccag

SEQ ID NO: 1335847 - RNA, 19 nt, Artificial Sequence
  Description of Artificial Sequence: Synthetic oligonucleotide
aaaagagagcucgacuuua

SEQ ID NO: 1335848 - RNA, 19 nt, Artificial Sequence
  Description of Artificial Sequence: Synthetic oligonucleotide
gaaggucggaaggacauac

SEQ ID NO: 1335849 - RNA, 19 nt, Artificial Sequence
  Description of Artificial Sequence: Synthetic oligonucleotide
uggcaggcagagaaacccg

SEQ ID NO: 1335850 - RNA, 19 nt, Artificial Sequence
  Description of Artificial Sequence: Synthetic oligonucleotide
gaggcacucaggcacuuug

SEQ ID NO: 1335851 - RNA, 19 nt, Artificial Sequence
  Description of Artificial Sequence: Synthetic oligonucleotide
agugcggugggcccgcggg

SEQ ID NO: 1335852 - RNA, 19 nt, Artificial Sequence
  Description of Artificial Sequence: Synthetic oligonucleotide
gaaacccggagcaggaggc

SEQ ID NO: 1335853 - RNA, 19 nt, Artificial Sequence
  Description of Artificial Sequence: Synthetic oligonucleotide
uuccgguucagcucgcgca

SEQ ID NO: 1335854 - RNA, 19 nt, Artificial Sequence
  Description of Artificial Sequence: Synthetic oligonucleotide
uaaugacgcuggcaggcgc

SEQ ID NO: 1335855 - RNA, 19 nt, Artificial Sequence
  Description of Artificial Sequence: Synthetic oligonucleotide
agaauaacuuagauucgug

SEQ ID NO: 1335856 - RNA, 19 nt, Artificial Sequence
  Description of Artificial Sequence: Synthetic oligonucleotide
uuugggaagggagucgagu

SEQ ID NO: 1335857 - RNA, 19 nt, Artificial Sequence
  Description of Artificial Sequence: Synthetic oligonucleotide
agcucgacuuuauucagaa

SEQ ID NO: 1335858 - RNA, 19 nt, Artificial Sequence
  Description of Artificial Sequence: Synthetic oligonucleotide
cuacgugcgcgcuugucgc

SEQ ID NO: 1335859 - RNA, 19 nt, Artificial Sequence
  Description of Artificial Sequence: Synthetic oligonucleotide
gacgccgcugcuucagccg

SEQ ID NO: 1335860 - RNA, 19 nt, Artificial Sequence
  Description of Artificial Sequence: Synthetic oligonucleotide
acgcuugaccuucagggcu

SEQ ID NO: 1335861 - RNA, 19 nt, Artificial Sequence
  Description of Artificial Sequence: Synthetic oligonucleotide
ggaaugugaagucaccaca

SEQ ID NO: 1335862 - RNA, 19 nt, Artificial Sequence
  Description of Artificial Sequence: Synthetic oligonucleotide
uggcacacgcgcuucacac

SEQ ID NO: 1335863 - RNA, 19 nt, Artificial Sequence
  Description of Artificial Sequence: Synthetic oligonucleotide
uaacuuagauucgugcaau

SEQ ID NO: 1335864 - RNA, 19 nt, Artificial Sequence
  Description of Artificial Sequence: Synthetic oligonucleotide
guauaggggaggugcuagg

SEQ ID NO: 1335865 - RNA, 19 nt, Artificial Sequence
  Description of Artificial Sequence: Synthetic oligonucleotide
aggugcuagggccagacuu

SEQ ID NO: 1335866 - RNA, 19 nt, Artificial Sequence
  Description of Artificial Sequence: Synthetic oligonucleotide
gaagauaacuggcucacuu

SEQ ID NO: 1335867 - RNA, 19 nt, Artificial Sequence
  Description of Artificial Sequence: Synthetic oligonucleotide
aacuuagauucgugcaaua

SEQ ID NO: 1335868 - RNA, 19 nt, Artificial Sequence
  Description of Artificial Sequence: Synthetic oligonucleotide
cuugagugugcgacgccgc

SEQ ID NO: 1335869 - RNA, 19 nt, Artificial Sequence
  Description of Artificial Sequence: Synthetic oligonucleotide
ucgcgcaccgacaacccca

SEQ ID NO: 1335870 - RNA, 19 nt, Artificial Sequence
  Description of Artificial Sequence: Synthetic oligonucleotide
aacccggagcaggaggcac

SEQ ID NO: 1335871 - RNA, 19 nt, Artificial Sequence
  Description of Artificial Sequence: Synthetic oligonucleotide
gaugguaaugacgcuggca

SEQ ID NO: 1335872 - RNA, 19 nt, Artificial Sequence
  Description of Artificial Sequence: Synthetic oligonucleotide
cuuucccuaaauauaagau

SEQ ID NO: 1335873 - RNA, 19 nt, Artificial Sequence
  Description of Artificial Sequence: Synthetic oligonucleotide
aggugcggcguguucucgc

SEQ ID NO: 1335874 - RNA, 19 nt, Artificial Sequence
  Description of Artificial Sequence: Synthetic oligonucleotide
uaaauaacucugggagcug

SEQ ID NO: 1335875 - RNA, 19 nt, Artificial Sequence
  Description of Artificial Sequence: Synthetic oligonucleotide
gucgacuugacgaugguaa

SEQ ID NO: 1335876 - RNA, 19 nt, Artificial Sequence
  Description of Artificial Sequence: Synthetic oligonucleotide
cuaccacagauacucagga

SEQ ID NO: 1335877 - RNA, 19 nt, Artificial Sequence
  Description of Artificial Sequence: Synthetic oligonucleotide
cacgcuugaccuucagggc

SEQ ID NO: 1335878 - RNA, 19 nt, Artificial Sequence
  Description of Artificial Sequence: Synthetic oligonucleotide
cagcuuucccuaaauauaa

SEQ ID NO: 1335879 - RNA, 19 nt, Artificial Sequence
  Description of Artificial Sequence: Synthetic oligonucleotide
auaagagugcaaggguuca

SEQ ID NO: 1335880 - RNA, 19 nt, Artificial Sequence
  Description of Artificial Sequence: Synthetic oligonucleotide
acuuagauucgugcaauaa

SEQ ID NO: 1335881 - RNA, 19 nt, Artificial Sequence
  Description of Artificial Sequence: Synthetic oligonucleotide
cauggcggcguucucgcgc

SEQ ID NO: 1335882 - RNA, 19 nt, Artificial Sequence
  Description of Artificial Sequence: Synthetic oligonucleotide
gucagucccacacuaccac

SEQ ID NO: 1335883 - RNA, 19 nt, Artificial Sequence
  Description of Artificial Sequence: Synthetic oligonucleotide
guaaugacgcuggcaggcg

SEQ ID NO: 1335884 - RNA, 19 nt, Artificial Sequence
  Description of Artificial Sequence: Synthetic oligonucleotide
uccgccgacagaccgcgca

SEQ ID NO: 1335885 - RNA, 19 nt, Artificial Sequence
  Description of Artificial Sequence: Synthetic oligonucleotide
uccuacgaguucugcuucc

SEQ ID NO: 1335886 - RNA, 19 nt, Artificial Sequence
  Description of Artificial Sequence: Synthetic oligonucleotide
ggacccaacgcccuccccg

SEQ ID NO: 1335887 - RNA, 19 nt, Artificial Sequence
  Description of Artificial Sequence: Synthetic oligonucleotide
ggucggaaggacauacugg

SEQ ID NO: 1335888 - RNA, 19 nt, Artificial Sequence
  Description of Artificial Sequence: Synthetic oligonucleotide
gacucuacgugcgcgcuug

SEQ ID NO: 1335889 - RNA, 19 nt, Artificial Sequence
  Description of Artificial Sequence: Synthetic oligonucleotide
ggugucgacuugacgaugg

SEQ ID NO: 1335890 - RNA, 19 nt, Artificial Sequence
  Description of Artificial Sequence: Synthetic oligonucleotide
gcacacgcgcuucacacgg

SEQ ID NO: 1335891 - RNA, 19 nt, Artificial Sequence
  Description of Artificial Sequence: Synthetic oligonucleotide
aaggacauacugguacaau

SEQ ID NO: 1335892 - RNA, 19 nt, Artificial Sequence
  Description of Artificial Sequence: Synthetic oligonucleotide
cagcuguauacaguauagg

SEQ ID NO: 1335893 - RNA, 19 nt, Artificial Sequence
  Description of Artificial Sequence: Synthetic oligonucleotide
ggggcggguacuaagaggc

SEQ ID NO: 1335894 - RNA, 19 nt, Artificial Sequence
  Description of Artificial Sequence: Synthetic oligonucleotide
cuucacacggcagcuggcc

SEQ ID NO: 1335895 - RNA, 19 nt, Artificial Sequence
  Description of Artificial Sequence: Synthetic oligonucleotide
ugcggcguguucucgcuca

SEQ ID NO: 1335896 - RNA, 19 nt, Artificial Sequence
  Description of Artificial Sequence: Synthetic oligonucleotide
uucucgcucagcucacgcu

SEQ ID NO: 1335897 - RNA, 19 nt, Artificial Sequence
  Description of Artificial Sequence: Synthetic oligonucleotide
agucuacaaaauacucaag

SEQ ID NO: 1335898 - RNA, 19 nt, Artificial Sequence
  Description of Artificial Sequence: Synthetic oligonucleotide
cagcuggccgcauagccac

SEQ ID NO: 1335899 - RNA, 19 nt, Artificial Sequence
  Description of Artificial Sequence: Synthetic oligonucleotide
cccacacuaccacagauac

SEQ ID NO: 1335900 - RNA, 19 nt, Artificial Sequence
  Description of Artificial Sequence: Synthetic oligonucleotide
ucuccgggccaucucuaca

SEQ ID NO: 1335901 - RNA, 19 nt, Artificial Sequence
  Description of Artificial Sequence: Synthetic oligonucleotide
acuuugggaagggagucga

SEQ ID NO: 1335902 - RNA, 19 nt, Artificial Sequence
  Description of Artificial Sequence: Synthetic oligonucleotide
aggaccguagugucucucu

SEQ ID NO: 1335903 - RNA, 19 nt, Artificial Sequence
  Description of Artificial Sequence: Synthetic oligonucleotide
cacucugagaaggacuuuc

SEQ ID NO: 1335904 - RNA, 19 nt, Artificial Sequence
  Description of Artificial Sequence: Synthetic oligonucleotide
gaagggagucgagucggag

SEQ ID NO: 1335905 - RNA, 19 nt, Artificial Sequence
  Description of Artificial Sequence: Synthetic oligonucleotide
cagcgccucacacuugccg

SEQ ID NO: 1335906 - RNA, 19 nt, Artificial Sequence
  Description of Artificial Sequence: Synthetic oligonucleotide
cucagggcccacauauuuc

SEQ ID NO: 1335907 - RNA, 19 nt, Artificial Sequence
  Description of Artificial Sequence: Synthetic oligonucleotide
aaagagagcucgacuuuau

SEQ ID NO: 1335908 - RNA, 19 nt, Artificial Sequence
  Description of Artificial Sequence: Synthetic oligonucleotide
guucucgcucagcucacgc

SEQ ID NO: 1335909 - RNA, 19 nt, Artificial Sequence
  Description of Artificial Sequence: Synthetic oligonucleotide
cuccccgcaacuuagcaaa

SEQ ID NO: 1335910 - RNA, 19 nt, Artificial Sequence
  Description of Artificial Sequence: Synthetic oligonucleotide
aggggaccaauggucaguc

SEQ ID NO: 1335911 - RNA, 19 nt, Artificial Sequence
  Description of Artificial Sequence: Synthetic oligonucleotide
caauccaaaagccucuccu

SEQ ID NO: 1335912 - RNA, 19 nt, Artificial Sequence
  Description of Artificial Sequence: Synthetic oligonucleotide
agugucucucucuccacua

SEQ ID NO: 1335913 - RNA, 19 nt, Artificial Sequence
  Description of Artificial Sequence: Synthetic oligonucleotide
ucgcgcuccagcucggacu

SEQ ID NO: 1335914 - RNA, 19 nt, Artificial Sequence
  Description of Artificial Sequence: Synthetic oligonucleotide
cuccuccgccgacagaccg

SEQ ID NO: 1335915 - RNA, 19 nt, Artificial Sequence
  Description of Artificial Sequence: Synthetic oligonucleotide
ucuggcugguuagaauaac

SEQ ID NO: 1335916 - RNA, 19 nt, Artificial Sequence
  Description of Artificial Sequence: Synthetic oligonucleotide
gacccaacgcccuccccgc

SEQ ID NO: 1335917 - RNA, 19 nt, Artificial Sequence
  Description of Artificial Sequence: Synthetic oligonucleotide
ccccuuuuacuaaauuccc

SEQ ID NO: 1335918 - RNA, 19 nt, Artificial Sequence
  Description of Artificial Sequence: Synthetic oligonucleotide
uugcuggauaaaggauccg

SEQ ID NO: 1335919 - RNA, 19 nt, Artificial Sequence
  Description of Artificial Sequence: Synthetic oligonucleotide
agcgccucauccgacaggu

SEQ ID NO: 1335920 - RNA, 19 nt, Artificial Sequence
  Description of Artificial Sequence: Synthetic oligonucleotide
gacuuucagcccaaggaaa

SEQ ID NO: 1335921 - RNA, 19 nt, Artificial Sequence
  Description of Artificial Sequence: Synthetic oligonucleotide
gaaggggcggguacuaaga

SEQ ID NO: 1335922 - RNA, 19 nt, Artificial Sequence
  Description of Artificial Sequence: Synthetic oligonucleotide
ggaaggggcggguacuaag

SEQ ID NO: 1335923 - RNA, 19 nt, Artificial Sequence
  Description of Artificial Sequence: Synthetic oligonucleotide
ggacuuucagcccaaggaa

SEQ ID NO: 1335924 - RNA, 19 nt, Artificial Sequence
  Description of Artificial Sequence: Synthetic oligonucleotide
ccuagggccaucagguccc

SEQ ID NO: 1335925 - RNA, 19 nt, Artificial Sequence
  Description of Artificial Sequence: Synthetic oligonucleotide
cucccuagggccaucaggu

SEQ ID NO: 1335926 - RNA, 19 nt, Artificial Sequence
  Description of Artificial Sequence: Synthetic oligonucleotide
gacgcuggcaggcgccacc

SEQ ID NO: 1335927 - RNA, 19 nt, Artificial Sequence
  Description of Artificial Sequence: Synthetic oligonucleotide
aggacccaacgcccucccc

SEQ ID NO: 1335928 - RNA, 19 nt, Artificial Sequence
  Description of Artificial Sequence: Synthetic oligonucleotide
gagaaacccggagcaggag

SEQ ID NO: 1335929 - RNA, 19 nt, Artificial Sequence
  Description of Artificial Sequence: Synthetic oligonucleotide
uccuccgccgacagaccgc

SEQ ID NO: 1335930 - RNA, 19 nt, Artificial Sequence
  Description of Artificial Sequence: Synthetic oligonucleotide
caggcccgacucuacgugc

SEQ ID NO: 1335931 - RNA, 19 nt, Artificial Sequence
  Description of Artificial Sequence: Synthetic oligonucleotide
cuaagguccugggaagguc

SEQ ID NO: 1335932 - RNA, 19 nt, Artificial Sequence
  Description of Artificial Sequence: Synthetic oligonucleotide
uccccgcaacuuagcaaag

SEQ ID NO: 1335933 - RNA, 19 nt, Artificial Sequence
  Description of Artificial Sequence: Synthetic oligonucleotide
agucccacacuaccacaga

SEQ ID NO: 1335934 - RNA, 19 nt, Artificial Sequence
  Description of Artificial Sequence: Synthetic oligonucleotide
auauuucccugggaagaga

SEQ ID NO: 1335935 - RNA, 19 nt, Artificial Sequence
  Description of Artificial Sequence: Synthetic oligonucleotide
ucggaaggacauacuggua

SEQ ID NO: 1335936 - RNA, 19 nt, Artificial Sequence
  Description of Artificial Sequence: Synthetic oligonucleotide
acauacugguacaauccaa

SEQ ID NO: 1335937 - RNA, 19 nt, Artificial Sequence
  Description of Artificial Sequence: Synthetic oligonucleotide
cuugccgcgcagcgcgucg

SEQ ID NO: 1335938 - RNA, 19 nt, Artificial Sequence
  Description of Artificial Sequence: Synthetic oligonucleotide
accccaucagcgccucauc

SEQ ID NO: 1335939 - RNA, 19 nt, Artificial Sequence
  Description of Artificial Sequence: Synthetic oligonucleotide
ccuuaaucccaagggaccc

SEQ ID NO: 1335940 - RNA, 19 nt, Artificial Sequence
  Description of Artificial Sequence: Synthetic oligonucleotide
uucuccgggccaucucuac

SEQ ID NO: 1335941 - RNA, 19 nt, Artificial Sequence
  Description of Artificial Sequence: Synthetic oligonucleotide
cucgcucagcucacgcuug

SEQ ID NO: 1335942 - RNA, 19 nt, Artificial Sequence
  Description of Artificial Sequence: Synthetic oligonucleotide
cuccuacgaguucugcuuc

SEQ ID NO: 1335943 - RNA, 19 nt, Artificial Sequence
  Description of Artificial Sequence: Synthetic oligonucleotide
cugcaucaggaccguagug

SEQ ID NO: 1335944 - RNA, 19 nt, Artificial Sequence
  Description of Artificial Sequence: Synthetic oligonucleotide
aaggucggaaggacauacu

SEQ ID NO: 1335945 - RNA, 19 nt, Artificial Sequence
  Description of Artificial Sequence: Synthetic oligonucleotide
ugcuagggccagacuuccc

SEQ ID NO: 1335946 - RNA, 19 nt, Artificial Sequence
  Description of Artificial Sequence: Synthetic oligonucleotide
auccagcuuucccuaaaua

SEQ ID NO: 1335947 - RNA, 19 nt, Artificial Sequence
  Description of Artificial Sequence: Synthetic oligonucleotide
ugucgacuugacgauggua

SEQ ID NO: 1335948 - RNA, 19 nt, Artificial Sequence
  Description of Artificial Sequence: Synthetic oligonucleotide
uggugucgacuugacgaug

SEQ ID NO: 1335949 - RNA, 19 nt, Artificial Sequence
  Description of Artificial Sequence: Synthetic oligonucleotide
cagggcccacauauuuccc

SEQ ID NO: 1335950 - RNA, 19 nt, Artificial Sequence
  Description of Artificial Sequence: Synthetic oligonucleotide
aaacccggagcaggaggca

SEQ ID NO: 1335951 - RNA, 19 nt, Artificial Sequence
  Description of Artificial Sequence: Synthetic oligonucleotide
gcaacuuagcaaaguugcc

SEQ ID NO: 1335952 - RNA, 19 nt, Artificial Sequence
  Description of Artificial Sequence: Synthetic oligonucleotide
cagcgcgucgagcuccagg

SEQ ID NO: 1335953 - RNA, 19 nt, Artificial Sequence
  Description of Artificial Sequence: Synthetic oligonucleotide
ccucccuagggccaucagg

SEQ ID NO: 1335954 - RNA, 19 nt, Artificial Sequence
  Description of Artificial Sequence: Synthetic oligonucleotide
ccgcaacuuagcaaaguug

SEQ ID NO: 1335955 - RNA, 19 nt, Artificial Sequence
  Description of Artificial Sequence: Synthetic oligonucleotide
gacagaccgcgcagguucc

SEQ ID NO: 1335956 - RNA, 19 nt, Artificial Sequence
  Description of Artificial Sequence: Synthetic oligonucleotide
ggcggguacuaagaggcag

SEQ ID NO: 1335957 - RNA, 19 nt, Artificial Sequence
  Description of Artificial Sequence: Synthetic oligonucleotide
uacgugcgcgcuugucgca

SEQ ID NO: 1335958 - RNA, 19 nt, Artificial Sequence
  Description of Artificial Sequence: Synthetic oligonucleotide
caucagcgccucauccgac

SEQ ID NO: 1335959 - RNA, 19 nt, Artificial Sequence
  Description of Artificial Sequence: Synthetic oligonucleotide
cuggcugguuagaauaacu

SEQ ID NO: 1335960 - RNA, 19 nt, Artificial Sequence
  Description of Artificial Sequence: Synthetic oligonucleotide
ucuggcacacgcgcuucac

SEQ ID NO: 1335961 - RNA, 19 nt, Artificial Sequence
  Description of Artificial Sequence: Synthetic oligonucleotide
cuccacuaccacagagguc

SEQ ID NO: 1335962 - RNA, 19 nt, Artificial Sequence
  Description of Artificial Sequence: Synthetic oligonucleotide
gagucggaggggcguugcc

SEQ ID NO: 1335963 - RNA, 19 nt, Artificial Sequence
  Description of Artificial Sequence: Synthetic oligonucleotide
cacacuugccgcgcagcgc

SEQ ID NO: 1335964 - RNA, 19 nt, Artificial Sequence
  Description of Artificial Sequence: Synthetic oligonucleotide
ucaggaccguagugucucu

SEQ ID NO: 1335965 - RNA, 19 nt, Artificial Sequence
  Description of Artificial Sequence: Synthetic oligonucleotide
gugcuagggccagacuucc

SEQ ID NO: 1335966 - RNA, 19 nt, Artificial Sequence
  Description of Artificial Sequence: Synthetic oligonucleotide
gagcucgacuuuauucaga

SEQ ID NO: 1335967 - RNA, 19 nt, Artificial Sequence
  Description of Artificial Sequence: Synthetic oligonucleotide
cgugucaccuccuccgccg

SEQ ID NO: 1335968 - RNA, 19 nt, Artificial Sequence
  Description of Artificial Sequence: Synthetic oligonucleotide
gcggguacuaagaggcagg

SEQ ID NO: 1335969 - RNA, 19 nt, Artificial Sequence
  Description of Artificial Sequence: Synthetic oligonucleotide
agucgagucggaggggcgu

SEQ ID NO: 1335970 - RNA, 19 nt, Artificial Sequence
  Description of Artificial Sequence: Synthetic oligonucleotide
aggcccgacucuacgugcg

SEQ ID NO: 1335971 - RNA, 19 nt, Artificial Sequence
  Description of Artificial Sequence: Synthetic oligonucleotide
ccagcuuucccuaaauaua

SEQ ID NO: 1335972 - RNA, 19 nt, Artificial Sequence
  Description of Artificial Sequence: Synthetic oligonucleotide
gcuggauaaaggauccgca

SEQ ID NO: 1335973 - RNA, 19 nt, Artificial Sequence
  Description of Artificial Sequence: Synthetic oligonucleotide
ugucaccuccuccgccgac

SEQ ID NO: 1335974 - RNA, 19 nt, Artificial Sequence
  Description of Artificial Sequence: Synthetic oligonucleotide
acccacagacaaaggucuc

SEQ ID NO: 1335975 - RNA, 19 nt, Artificial Sequence
  Description of Artificial Sequence: Synthetic oligonucleotide
uggccgcauagccacgguu

SEQ ID NO: 1335976 - RNA, 19 nt, Artificial Sequence
  Description of Artificial Sequence: Synthetic oligonucleotide
ggugcuagggccagacuuc

SEQ ID NO: 1335977 - RNA, 19 nt, Artificial Sequence
  Description of Artificial Sequence: Synthetic oligonucleotide
cuacgaguucugcuuccca

SEQ ID NO: 1335978 - RNA, 19 nt, Artificial Sequence
  Description of Artificial Sequence: Synthetic oligonucleotide
gcacucaggcacuuuggga

SEQ ID NO: 1335979 - RNA, 19 nt, Artificial Sequence
  Description of Artificial Sequence: Synthetic oligonucleotide
cagaccgcgcagguuccgg

SEQ ID NO: 1335980 - RNA, 19 nt, Artificial Sequence
  Description of Artificial Sequence: Synthetic oligonucleotide
cgacagaccgcgcagguuc

SEQ ID NO: 1335981 - RNA, 19 nt, Artificial Sequence
  Description of Artificial Sequence: Synthetic oligonucleotide
acagaccgcgcagguuccg

SEQ ID NO: 1335982 - RNA, 19 nt, Artificial Sequence
  Description of Artificial Sequence: Synthetic oligonucleotide
gcgccucacacuugccgcg

SEQ ID NO: 1335983 - RNA, 19 nt, Artificial Sequence
  Description of Artificial Sequence: Synthetic oligonucleotide
caccgagcgcgcgaagccc

SEQ ID NO: 1335984 - RNA, 19 nt, Artificial Sequence
  Description of Artificial Sequence: Synthetic oligonucleotide
acuugccgcgcagcgcguc

SEQ ID NO: 1335985 - RNA, 19 nt, Artificial Sequence
  Description of Artificial Sequence: Synthetic oligonucleotide
cucgcgcuccagcucggac

SEQ ID NO: 1335986 - RNA, 19 nt, Artificial Sequence
  Description of Artificial Sequence: Synthetic oligonucleotide
uccgccaggcccgacucua

SEQ ID NO: 1335987 - RNA, 19 nt, Artificial Sequence
  Description of Artificial Sequence: Synthetic oligonucleotide
ggaccguagugucucucuc

SEQ ID NO: 1335988 - RNA, 19 nt, Artificial Sequence
  Description of Artificial Sequence: Synthetic oligonucleotide
ggccgcauagccacgguuc

SEQ ID NO: 1335989 - RNA, 19 nt, Artificial Sequence
  Description of Artificial Sequence: Synthetic oligonucleotide
auccgacaggugcggcgug

SEQ ID NO: 1335990 - RNA, 19 nt, Artificial Sequence
  Description of Artificial Sequence: Synthetic oligonucleotide
gcgcauggcggcguucucg

SEQ ID NO: 1335991 - RNA, 19 nt, Artificial Sequence
  Description of Artificial Sequence: Synthetic oligonucleotide
gcuggccgcauagccacgg

SEQ ID NO: 1335992 - RNA, 19 nt, Artificial Sequence
  Description of Artificial Sequence: Synthetic oligonucleotide
caggugcggcguguucucg

SEQ ID NO: 1335993 - RNA, 19 nt, Artificial Sequence
  Description of Artificial Sequence: Synthetic oligonucleotide
cccgacucuacgugcgcgc

SEQ ID NO: 1335994 - RNA, 19 nt, Artificial Sequence
  Description of Artificial Sequence: Synthetic oligonucleotide
cccuaaauauaagauuaaa

SEQ ID NO: 1335995 - RNA, 19 nt, Artificial Sequence
  Description of Artificial Sequence: Synthetic oligonucleotide
aaggauccgcagacauuuu

SEQ ID NO: 1335996 - RNA, 19 nt, Artificial Sequence
  Description of Artificial Sequence: Synthetic oligonucleotide
cuggugucgacuugacgau

SEQ ID NO: 1335997 - RNA, 19 nt, Artificial Sequence
  Description of Artificial Sequence: Synthetic oligonucleotide
acucuacgugcgcgcuugu

SEQ ID NO: 1335998 - RNA, 19 nt, Artificial Sequence
  Description of Artificial Sequence: Synthetic oligonucleotide
gcgcgcgaagcccugcagc

SEQ ID NO: 1335999 - RNA, 19 nt, Artificial Sequence
  Description of Artificial Sequence: Synthetic oligonucleotide
cucuacgugcgcgcuuguc

SEQ ID NO: 1336000 - RNA, 19 nt, Artificial Sequence
  Description of Artificial Sequence: Synthetic oligonucleotide
gguuccgguucagcucgcg

SEQ ID NO: 1336001 - RNA, 19 nt, Artificial Sequence
  Description of Artificial Sequence: Synthetic oligonucleotide
ccaucagcgccucauccga

SEQ ID NO: 1336002 - RNA, 19 nt, Artificial Sequence
  Description of Artificial Sequence: Synthetic oligonucleotide
ccguagugucucucucucc

SEQ ID NO: 1336003 - RNA, 19 nt, Artificial Sequence
  Description of Artificial Sequence: Synthetic oligonucleotide
ccaccagugcggugggccc

SEQ ID NO: 1336004 - RNA, 19 nt, Artificial Sequence
  Description of Artificial Sequence: Synthetic oligonucleotide
gugcggugggcccgcgggc

SEQ ID NO: 1336005 - RNA, 19 nt, Artificial Sequence
  Description of Artificial Sequence: Synthetic oligonucleotide
caggaccguagugucucuc

SEQ ID NO: 1336006 - RNA, 19 nt, Artificial Sequence
  Description of Artificial Sequence: Synthetic oligonucleotide
cgcgucgagcuccaggcgc

SEQ ID NO: 1336007 - RNA, 19 nt, Artificial Sequence
  Description of Artificial Sequence: Synthetic oligonucleotide
cagugcggugggcccgcgg

SEQ ID NO: 1336008 - RNA, 19 nt, Artificial Sequence
  Description of Artificial Sequence: Synthetic oligonucleotide
agaggcccuccuacgaguu

SEQ ID NO: 1336009 - RNA, 19 nt, Artificial Sequence
  Description of Artificial Sequence: Synthetic oligonucleotide
ccuccgccgacagaccgcg

SEQ ID NO: 1336010 - RNA, 19 nt, Artificial Sequence
  Description of Artificial Sequence: Synthetic oligonucleotide
cagaggcccuccuacgagu

SEQ ID NO: 1336011 - RNA, 19 nt, Artificial Sequence
  Description of Artificial Sequence: Synthetic oligonucleotide
gcccgacucuacgugcgcg

SEQ ID NO: 1336012 - RNA, 19 nt, Artificial Sequence
  Description of Artificial Sequence: Synthetic oligonucleotide
gcuauccagcuuucccuaa

SEQ ID NO: 1336013 - RNA, 19 nt, Artificial Sequence
  Description of Artificial Sequence: Synthetic oligonucleotide
cggguacuaagaggcaggg

SEQ ID NO: 1336014 - RNA, 19 nt, Artificial Sequence
  Description of Artificial Sequence: Synthetic oligonucleotide
acccaacgcccuccccgca

SEQ ID NO: 1336015 - RNA, 19 nt, Artificial Sequence
  Description of Artificial Sequence: Synthetic oligonucleotide
agcuggccgcauagccacg

SEQ ID NO: 1336016 - RNA, 19 nt, Artificial Sequence
  Description of Artificial Sequence: Synthetic oligonucleotide
cauccgacaggugcggcgu

SEQ ID NO: 1336017 - RNA, 19 nt, Artificial Sequence
  Description of Artificial Sequence: Synthetic oligonucleotide
gaggugcuagggccagacu

SEQ ID NO: 1336018 - RNA, 19 nt, Artificial Sequence
  Description of Artificial Sequence: Synthetic oligonucleotide
ucucgcgcgccagcuuguc

SEQ ID NO: 1336019 - RNA, 19 nt, Artificial Sequence
  Description of Artificial Sequence: Synthetic oligonucleotide
gcgcgucgagcuccaggcg

SEQ ID NO: 1336020 - RNA, 19 nt, Artificial Sequence
  Description of Artificial Sequence: Synthetic oligonucleotide
gucgagcuccaggcgcaug

SEQ ID NO: 1336021 - RNA, 19 nt, Artificial Sequence
  Description of Artificial Sequence: Synthetic oligonucleotide
ccgugucaccuccuccgcc

SEQ ID NO: 1336022 - RNA, 19 nt, Artificial Sequence
  Description of Artificial Sequence: Synthetic oligonucleotide
cagcucgcgcaccgacaac

SEQ ID NO: 1336023 - RNA, 19 nt, Artificial Sequence
  Description of Artificial Sequence: Synthetic oligonucleotide
ggcccgacucuacgugcgc

SEQ ID NO: 1336024 - RNA, 19 nt, Artificial Sequence
  Description of Artificial Sequence: Synthetic oligonucleotide
caucccauugugucaccuu

SEQ ID NO: 1336025 - RNA, 19 nt, Artificial Sequence
  Description of Artificial Sequence: Synthetic oligonucleotide
guucagcuguauacaguau

SEQ ID NO: 1336026 - RNA, 19 nt, Artificial Sequence
  Description of Artificial Sequence: Synthetic oligonucleotide
gugucgacuugacgauggu

SEQ ID NO: 1336027 - RNA, 19 nt, Artificial Sequence
  Description of Artificial Sequence: Synthetic oligonucleotide
uggcggcguucucgcgcgc

SEQ ID NO: 1336028 - RNA, 19 nt, Artificial Sequence
  Description of Artificial Sequence: Synthetic oligonucleotide
gugcggcguguucucgcuc

SEQ ID NO: 1336029 - RNA, 19 nt, Artificial Sequence
  Description of Artificial Sequence: Synthetic oligonucleotide
ggaccaaauuagaagccuu

SEQ ID NO: 1336030 - RNA, 19 nt, Artificial Sequence
  Description of Artificial Sequence: Synthetic oligonucleotide
cgaugguaaugacgcuggc

SEQ ID NO: 1336031 - RNA, 19 nt, Artificial Sequence
  Description of Artificial Sequence: Synthetic oligonucleotide
gcucgacuuuauucagaaa

SEQ ID NO: 1336032 - RNA, 19 nt, Artificial Sequence
  Description of Artificial Sequence: Synthetic oligonucleotide
agcucagggcccacauauu

SEQ ID NO: 1336033 - RNA, 19 nt, Artificial Sequence
  Description of Artificial Sequence: Synthetic oligonucleotide
cucuccgccaggcccgacu

SEQ ID NO: 1336034 - RNA, 19 nt, Artificial Sequence
  Description of Artificial Sequence: Synthetic oligonucleotide
ggguucagcuguauacagu

SEQ ID NO: 1336035 - RNA, 19 nt, Artificial Sequence
  Description of Artificial Sequence: Synthetic oligonucleotide
gccagacuucccaggggac

SEQ ID NO: 1336036 - RNA, 19 nt, Artificial Sequence
  Description of Artificial Sequence: Synthetic oligonucleotide
ggugcggcguguucucgcu

SEQ ID NO: 1336037 - RNA, 19 nt, Artificial Sequence
  Description of Artificial Sequence: Synthetic oligonucleotide
cuccgccgacagaccgcgc

SEQ ID NO: 1336038 - RNA, 19 nt, Artificial Sequence
  Description of Artificial Sequence: Synthetic oligonucleotide
gcggcguguucucgcucag

SEQ ID NO: 1336039 - RNA, 19 nt, Artificial Sequence
  Description of Artificial Sequence: Synthetic oligonucleotide
ccuccccgcaacuuagcaa

SEQ ID NO: 1336040 - RNA, 19 nt, Artificial Sequence
  Description of Artificial Sequence: Synthetic oligonucleotide
ccgccgacagaccgcgcag

SEQ ID NO: 1336041 - RNA, 19 nt, Artificial Sequence
  Description of Artificial Sequence: Synthetic oligonucleotide
gaccgcgcagguuccgguu

SEQ ID NO: 1336042 - RNA, 19 nt, Artificial Sequence
  Description of Artificial Sequence: Synthetic oligonucleotide
gccgcauagccacgguucu

SEQ ID NO: 1336043 - RNA, 19 nt, Artificial Sequence
  Description of Artificial Sequence: Synthetic oligonucleotide
cgcccuccccgcaacuuag

SEQ ID NO: 1336044 - RNA, 19 nt, Artificial Sequence
  Description of Artificial Sequence: Synthetic oligonucleotide
gcgacgccgcugcuucagc

SEQ ID NO: 1336045 - RNA, 19 nt, Artificial Sequence
  Description of Artificial Sequence: Synthetic oligonucleotide
ggaaggucggaaggacaua

SEQ ID NO: 1336046 - RNA, 19 nt, Artificial Sequence
  Description of Artificial Sequence: Synthetic oligonucleotide
gcgcgcuugucgcagcugu

SEQ ID NO: 1336047 - RNA, 19 nt, Artificial Sequence
  Description of Artificial Sequence: Synthetic oligonucleotide
ggugggcccgcgggcggcg

SEQ ID NO: 1336048 - RNA, 19 nt, Artificial Sequence
  Description of Artificial Sequence: Synthetic oligonucleotide
cccuccccgcaacuuagca

SEQ ID NO: 1336049 - RNA, 19 nt, Artificial Sequence
  Description of Artificial Sequence: Synthetic oligonucleotide
gcgucgagcuccaggcgca

SEQ ID NO: 1336050 - RNA, 19 nt, Artificial Sequence
  Description of Artificial Sequence: Synthetic oligonucleotide
ggggucugcaagaguuaaa

SEQ ID NO: 1336051 - RNA, 19 nt, Artificial Sequence
  Description of Artificial Sequence: Synthetic oligonucleotide
gccaggcccgacucuacgu

SEQ ID NO: 1336052 - RNA, 19 nt, Artificial Sequence
  Description of Artificial Sequence: Synthetic oligonucleotide
gugcgcgcuugucgcagcu

SEQ ID NO: 1336053 - RNA, 19 nt, Artificial Sequence
  Description of Artificial Sequence: Synthetic oligonucleotide
gcgggguccgggagcgggg

SEQ ID NO: 1336054 - RNA, 19 nt, Artificial Sequence
  Description of Artificial Sequence: Synthetic oligonucleotide
cgggcggcggccaccgagc

SEQ ID NO: 1336055 - RNA, 19 nt, Artificial Sequence
  Description of Artificial Sequence: Synthetic oligonucleotide
gcccuccuacgaguucugc

SEQ ID NO: 1336056 - RNA, 19 nt, Artificial Sequence
  Description of Artificial Sequence: Synthetic oligonucleotide
cuagggccaucagguccca

SEQ ID NO: 1336057 - RNA, 19 nt, Artificial Sequence
  Description of Artificial Sequence: Synthetic oligonucleotide
ggcccuccuacgaguucug

SEQ ID NO: 1336058 - RNA, 19 nt, Artificial Sequence
  Description of Artificial Sequence: Synthetic oligonucleotide
gcgcagguuccgguucagc

SEQ ID NO: 1336059 - RNA, 19 nt, Artificial Sequence
  Description of Artificial Sequence: Synthetic oligonucleotide
ccucaccucaucccauugu

SEQ ID NO: 1336060 - RNA, 19 nt, Artificial Sequence
  Description of Artificial Sequence: Synthetic oligonucleotide
gccgacagaccgcgcaggu

SEQ ID NO: 1336061 - RNA, 19 nt, Artificial Sequence
  Description of Artificial Sequence: Synthetic oligonucleotide
cuucagggcuuugcuggau

SEQ ID NO: 1336062 - RNA, 19 nt, Artificial Sequence
  Description of Artificial Sequence: Synthetic oligonucleotide
gggaaggggcggguacuaa

SEQ ID NO: 1336063 - RNA, 19 nt, Artificial Sequence
  Description of Artificial Sequence: Synthetic oligonucleotide
gggcggguacuaagaggca

SEQ ID NO: 1336064 - RNA, 19 nt, Artificial Sequence
  Description of Artificial Sequence: Synthetic oligonucleotide
ccuaagguccugggaaggu

SEQ ID NO: 1336065 - RNA, 19 nt, Artificial Sequence
  Description of Artificial Sequence: Synthetic oligonucleotide
cucucuccgccaggcccga

SEQ ID NO: 1336066 - RNA, 19 nt, Artificial Sequence
  Description of Artificial Sequence: Synthetic oligonucleotide
ccacacuaccacagauacu

SEQ ID NO: 1336067 - RNA, 19 nt, Artificial Sequence
  Description of Artificial Sequence: Synthetic oligonucleotide
caacgcccuccccgcaacu

SEQ ID NO: 1336068 - RNA, 19 nt, Artificial Sequence
  Description of Artificial Sequence: Synthetic oligonucleotide
ccgccaggcccgacucuac

SEQ ID NO: 1336069 - RNA, 19 nt, Artificial Sequence
  Description of Artificial Sequence: Synthetic oligonucleotide
gcccuccccgcaacuuagc

SEQ ID NO: 1336070 - RNA, 19 nt, Artificial Sequence
  Description of Artificial Sequence: Synthetic oligonucleotide
cuggccgcauagccacggu

SEQ ID NO: 1336071 - RNA, 19 nt, Artificial Sequence
  Description of Artificial Sequence: Synthetic oligonucleotide
gccgcgcagcgcgucgagc

SEQ ID NO: 1336072 - RNA, 19 nt, Artificial Sequence
  Description of Artificial Sequence: Synthetic oligonucleotide
cgccucacacuugccgcgc

SEQ ID NO: 1336073 - RNA, 19 nt, Artificial Sequence
  Description of Artificial Sequence: Synthetic oligonucleotide
gucgagucggaggggcguu

SEQ ID NO: 1336074 - RNA, 19 nt, Artificial Sequence
  Description of Artificial Sequence: Synthetic oligonucleotide
cccaacgcccuccccgcaa

SEQ ID NO: 1336075 - RNA, 19 nt, Artificial Sequence
  Description of Artificial Sequence: Synthetic oligonucleotide
ccgcgcagguuccgguuca

SEQ ID NO: 1336076 - RNA, 19 nt, Artificial Sequence
  Description of Artificial Sequence: Synthetic oligonucleotide
cacuugccgcgcagcgcgu

SEQ ID NO: 1336077 - RNA, 19 nt, Artificial Sequence
  Description of Artificial Sequence: Synthetic oligonucleotide
cuccgccaggcccgacucu

SEQ ID NO: 1336078 - RNA, 19 nt, Artificial Sequence
  Description of Artificial Sequence: Synthetic oligonucleotide
cgagcgcgcgaagcccugc

SEQ ID NO: 1336079 - RNA, 19 nt, Artificial Sequence
  Description of Artificial Sequence: Synthetic oligonucleotide
cggcguguucucgcucagc

SEQ ID NO: 1336080 - RNA, 19 nt, Artificial Sequence
  Description of Artificial Sequence: Synthetic oligonucleotide
ccccgcaacuuagcaaagu

SEQ ID NO: 1336081 - RNA, 19 nt, Artificial Sequence
  Description of Artificial Sequence: Synthetic oligonucleotide
cgcuugaccuucagggcuu

SEQ ID NO: 1336082 - RNA, 19 nt, Artificial Sequence
  Description of Artificial Sequence: Synthetic oligonucleotide
ccgacucuacgugcgcgcu

SEQ ID NO: 1336083 - RNA, 19 nt, Artificial Sequence
  Description of Artificial Sequence: Synthetic oligonucleotide
cgcgcuucacacggcagcu

SEQ ID NO: 1336084 - RNA, 19 nt, Artificial Sequence
  Description of Artificial Sequence: Synthetic oligonucleotide
gccccucccuagggccauc

SEQ ID NO: 1336085 - RNA, 19 nt, Artificial Sequence
  Description of Artificial Sequence: Synthetic oligonucleotide
cgacucuacgugcgcgcuu

SEQ ID NO: 1336086 - RNA, 19 nt, Artificial Sequence
  Description of Artificial Sequence: Synthetic oligonucleotide
ccgacaggugcggcguguu

SEQ ID NO: 1336087 - RNA, 19 nt, Artificial Sequence
  Description of Artificial Sequence: Synthetic oligonucleotide
ccgcauagccacgguucuu

SEQ ID NO: 1336088 - RNA, 19 nt, Artificial Sequence
  Description of Artificial Sequence: Synthetic oligonucleotide
aaauugauucucuaguucc

SEQ ID NO: 1336089 - RNA, 19 nt, Artificial Sequence
  Description of Artificial Sequence: Synthetic oligonucleotide
uuuaacaaggcacacauca

SEQ ID NO: 1336090 - RNA, 19 nt, Artificial Sequence
  Description of Artificial Sequence: Synthetic oligonucleotide
aauuacauuuccucaagac

SEQ ID NO: 1336091 - RNA, 19 nt, Artificial Sequence
  Description of Artificial Sequence: Synthetic oligonucleotide
aauaagaucacaaagccca

SEQ ID NO: 1336092 - RNA, 19 nt, Artificial Sequence
  Description of Artificial Sequence: Synthetic oligonucleotide
gauacauuuauccuaguag

SEQ ID NO: 1336093 - RNA, 19 nt, Artificial Sequence
  Description of Artificial Sequence: Synthetic oligonucleotide
ucaaaaucuacaaagacua

SEQ ID NO: 1336094 - RNA, 19 nt, Artificial Sequence
  Description of Artificial Sequence: Synthetic oligonucleotide
aaaucaagaauuccuuuuc

SEQ ID NO: 1336095 - RNA, 19 nt, Artificial Sequence
  Description of Artificial Sequence: Synthetic oligonucleotide
aagacuauaugagucaugg

SEQ ID NO: 1336096 - RNA, 19 nt, Artificial Sequence
  Description of Artificial Sequence: Synthetic oligonucleotide
uuuacuacagcgaggauga

SEQ ID NO: 1336097 - RNA, 19 nt, Artificial Sequence
  Description of Artificial Sequence: Synthetic oligonucleotide
ucucuauuauuuuaaauca

SEQ ID NO: 1336098 - RNA, 19 nt, Artificial Sequence
  Description of Artificial Sequence: Synthetic oligonucleotide
uuuaauuugagguuuuagu

SEQ ID NO: 1336099 - RNA, 19 nt, Artificial Sequence
  Description of Artificial Sequence: Synthetic oligonucleotide
uaauuauagaccuuacagc

SEQ ID NO: 1336100 - RNA, 19 nt, Artificial Sequence
  Description of Artificial Sequence: Synthetic oligonucleotide
uauaaugacucagaaaugc

SEQ ID NO: 1336101 - RNA, 19 nt, Artificial Sequence
  Description of Artificial Sequence: Synthetic oligonucleotide
aauuccacauccucugugg

SEQ ID NO: 1336102 - RNA, 19 nt, Artificial Sequence
  Description of Artificial Sequence: Synthetic oligonucleotide
aaauaagaucacaaagccc

SEQ ID NO: 1336103 - RNA, 19 nt, Artificial Sequence
  Description of Artificial Sequence: Synthetic oligonucleotide
uaugcuauuuaacaaggca

SEQ ID NO: 1336104 - RNA, 19 nt, Artificial Sequence
  Description of Artificial Sequence: Synthetic oligonucleotide
uucaaguaauuauagaccu

SEQ ID NO: 1336105 - RNA, 19 nt, Artificial Sequence
  Description of Artificial Sequence: Synthetic oligonucleotide
uugaccuuuaucuagcaug

SEQ ID NO: 1336106 - RNA, 19 nt, Artificial Sequence
  Description of Artificial Sequence: Synthetic oligonucleotide
ucuagcaugaucugaagac

SEQ ID NO: 1336107 - RNA, 19 nt, Artificial Sequence
  Description of Artificial Sequence: Synthetic oligonucleotide
caguuguucaucuagucgg

SEQ ID NO: 1336108 - RNA, 19 nt, Artificial Sequence
  Description of Artificial Sequence: Synthetic oligonucleotide
uuuaauuacauuuccucaa

SEQ ID NO: 1336109 - RNA, 19 nt, Artificial Sequence
  Description of Artificial Sequence: Synthetic oligonucleotide
uuacaaaucacuagucucu

SEQ ID NO: 1336110 - RNA, 19 nt, Artificial Sequence
  Description of Artificial Sequence: Synthetic oligonucleotide
cuuauaaugacucagaaau

SEQ ID NO: 1336111 - RNA, 19 nt, Artificial Sequence
  Description of Artificial Sequence: Synthetic oligonucleotide
aaaaucaagaauuccuuuu

SEQ ID NO: 1336112 - RNA, 19 nt, Artificial Sequence
  Description of Artificial Sequence: Synthetic oligonucleotide
ugugguaauaacuuuaauu

SEQ ID NO: 1336113 - RNA, 19 nt, Artificial Sequence
  Description of Artificial Sequence: Synthetic oligonucleotide
uauuauuuuaaaucauccu

SEQ ID NO: 1336114 - RNA, 19 nt, Artificial Sequence
  Description of Artificial Sequence: Synthetic oligonucleotide
uuaauuugagguuuuaguu

SEQ ID NO: 1336115 - RNA, 19 nt, Artificial Sequence
  Description of Artificial Sequence: Synthetic oligonucleotide
auacauuuauccuaguaga

SEQ ID NO: 1336116 - RNA, 19 nt, Artificial Sequence
  Description of Artificial Sequence: Synthetic oligonucleotide
aaucaaacauaucuucaca

SEQ ID NO: 1336117 - RNA, 19 nt, Artificial Sequence
  Description of Artificial Sequence: Synthetic oligonucleotide
ugaaagccccaaauaaacg

SEQ ID NO: 1336118 - RNA, 19 nt, Artificial Sequence
  Description of Artificial Sequence: Synthetic oligonucleotide
aauaaacguuccuugauua

SEQ ID NO: 1336119 - RNA, 19 nt, Artificial Sequence
  Description of Artificial Sequence: Synthetic oligonucleotide
auguguaaacgcaugaccc

SEQ ID NO: 1336120 - RNA, 19 nt, Artificial Sequence
  Description of Artificial Sequence: Synthetic oligonucleotide
uuaaccuugaucucauugu

SEQ ID NO: 1336121 - RNA, 19 nt, Artificial Sequence
  Description of Artificial Sequence: Synthetic oligonucleotide
cuuacaaaucacuagucuc

SEQ ID NO: 1336122 - RNA, 19 nt, Artificial Sequence
  Description of Artificial Sequence: Synthetic oligonucleotide
uuuuacacauuccugggaa

SEQ ID NO: 1336123 - RNA, 19 nt, Artificial Sequence
  Description of Artificial Sequence: Synthetic oligonucleotide
aaaaguucgaccaguuauc

SEQ ID NO: 1336124 - RNA, 19 nt, Artificial Sequence
  Description of Artificial Sequence: Synthetic oligonucleotide
gaaucaaacauaucuucac

SEQ ID NO: 1336125 - RNA, 19 nt, Artificial Sequence
  Description of Artificial Sequence: Synthetic oligonucleotide
gugguaauaacuuuaauua

SEQ ID NO: 1336126 - RNA, 19 nt, Artificial Sequence
  Description of Artificial Sequence: Synthetic oligonucleotide
acuauaugagucaugguuc

SEQ ID NO: 1336127 - RNA, 19 nt, Artificial Sequence
  Description of Artificial Sequence: Synthetic oligonucleotide
uuuuaugaaaagucuuucu

SEQ ID NO: 1336128 - RNA, 19 nt, Artificial Sequence
  Description of Artificial Sequence: Synthetic oligonucleotide
aagacuucuucuaauagcu

SEQ ID NO: 1336129 - RNA, 19 nt, Artificial Sequence
  Description of Artificial Sequence: Synthetic oligonucleotide
aaacuggugacuugucaag

SEQ ID NO: 1336130 - RNA, 19 nt, Artificial Sequence
  Description of Artificial Sequence: Synthetic oligonucleotide
aaaucuacaaagacuauau

SEQ ID NO: 1336131 - RNA, 19 nt, Artificial Sequence
  Description of Artificial Sequence: Synthetic oligonucleotide
uuaucuagcaugaucugaa

SEQ ID NO: 1336132 - RNA, 19 nt, Artificial Sequence
  Description of Artificial Sequence: Synthetic oligonucleotide
cuauaugagucaugguucg

SEQ ID NO: 1336133 - RNA, 19 nt, Artificial Sequence
  Description of Artificial Sequence: Synthetic oligonucleotide
caagacuucuucuaauagc

SEQ ID NO: 1336134 - RNA, 19 nt, Artificial Sequence
  Description of Artificial Sequence: Synthetic oligonucleotide
uuauaaugacucagaaaug

SEQ ID NO: 1336135 - RNA, 19 nt, Artificial Sequence
  Description of Artificial Sequence: Synthetic oligonucleotide
auacauauggcaaaaucag

SEQ ID NO: 1336136 - RNA, 19 nt, Artificial Sequence
  Description of Artificial Sequence: Synthetic oligonucleotide
uguaacucucaugacaacc

SEQ ID NO: 1336137 - RNA, 19 nt, Artificial Sequence
  Description of Artificial Sequence: Synthetic oligonucleotide
cauguguaaacgcaugacc

SEQ ID NO: 1336138 - RNA, 19 nt, Artificial Sequence
  Description of Artificial Sequence: Synthetic oligonucleotide
ugaaaaccggcucaugugu

SEQ ID NO: 1336139 - RNA, 19 nt, Artificial Sequence
  Description of Artificial Sequence: Synthetic oligonucleotide
uugguaguaucagauaugc

SEQ ID NO: 1336140 - RNA, 19 nt, Artificial Sequence
  Description of Artificial Sequence: Synthetic oligonucleotide
uucugaaacgcuguggugc

SEQ ID NO: 1336141 - RNA, 19 nt, Artificial Sequence
  Description of Artificial Sequence: Synthetic oligonucleotide
gaggguucaguauaugagc

SEQ ID NO: 1336142 - RNA, 19 nt, Artificial Sequence
  Description of Artificial Sequence: Synthetic oligonucleotide
uuugguaguaucagauaug

SEQ ID NO: 1336143 - RNA, 19 nt, Artificial Sequence
  Description of Artificial Sequence: Synthetic oligonucleotide
ugaccuuuaucuagcauga

SEQ ID NO: 1336144 - RNA, 19 nt, Artificial Sequence
  Description of Artificial Sequence: Synthetic oligonucleotide
gaccuuacagcugaguggg

SEQ ID NO: 1336145 - RNA, 19 nt, Artificial Sequence
  Description of Artificial Sequence: Synthetic oligonucleotide
uguugugugguaauaacuu

SEQ ID NO: 1336146 - RNA, 19 nt, Artificial Sequence
  Description of Artificial Sequence: Synthetic oligonucleotide
uggagugccuuucacacca

SEQ ID NO: 1336147 - RNA, 19 nt, Artificial Sequence
  Description of Artificial Sequence: Synthetic oligonucleotide
acaaagacuauaugaguca

SEQ ID NO: 1336148 - RNA, 19 nt, Artificial Sequence
  Description of Artificial Sequence: Synthetic oligonucleotide
gauccuuauaaugacucag

SEQ ID NO: 1336149 - RNA, 19 nt, Artificial Sequence
  Description of Artificial Sequence: Synthetic oligonucleotide
aaaucacuagucucuauua

SEQ ID NO: 1336150 - RNA, 19 nt, Artificial Sequence
  Description of Artificial Sequence: Synthetic oligonucleotide
aguucgaccaguuaucaaa

SEQ ID NO: 1336151 - RNA, 19 nt, Artificial Sequence
  Description of Artificial Sequence: Synthetic oligonucleotide
ugggcaguuguucaucuag

SEQ ID NO: 1336152 - RNA, 19 nt, Artificial Sequence
  Description of Artificial Sequence: Synthetic oligonucleotide
ugguaauaacuuuaauuac

SEQ ID NO: 1336153 - RNA, 19 nt, Artificial Sequence
  Description of Artificial Sequence: Synthetic oligonucleotide
uuaaauugauucucuaguu

SEQ ID NO: 1336154 - RNA, 19 nt, Artificial Sequence
  Description of Artificial Sequence: Synthetic oligonucleotide
uguguaaacgcaugacccc

SEQ ID NO: 1336155 - RNA, 19 nt, Artificial Sequence
  Description of Artificial Sequence: Synthetic oligonucleotide
gaucacauacugcuguccc

SEQ ID NO: 1336156 - RNA, 19 nt, Artificial Sequence
  Description of Artificial Sequence: Synthetic oligonucleotide
gauguugugugguaauaac

SEQ ID NO: 1336157 - RNA, 19 nt, Artificial Sequence
  Description of Artificial Sequence: Synthetic oligonucleotide
ugucagauccaccauuagu

SEQ ID NO: 1336158 - RNA, 19 nt, Artificial Sequence
  Description of Artificial Sequence: Synthetic oligonucleotide
uuuaucuagcaugaucuga

SEQ ID NO: 1336159 - RNA, 19 nt, Artificial Sequence
  Description of Artificial Sequence: Synthetic oligonucleotide
ucuccugagaggauaguga

SEQ ID NO: 1336160 - RNA, 19 nt, Artificial Sequence
  Description of Artificial Sequence: Synthetic oligonucleotide
aaucacuagucucuauuau

SEQ ID NO: 1336161 - RNA, 19 nt, Artificial Sequence
  Description of Artificial Sequence: Synthetic oligonucleotide
ucgcagguaguccacaucu

SEQ ID NO: 1336162 - RNA, 19 nt, Artificial Sequence
  Description of Artificial Sequence: Synthetic oligonucleotide
uaugagucaugguucgcag

SEQ ID NO: 1336163 - RNA, 19 nt, Artificial Sequence
  Description of Artificial Sequence: Synthetic oligonucleotide
cacacuugaucacauacug

SEQ ID NO: 1336164 - RNA, 19 nt, Artificial Sequence
  Description of Artificial Sequence: Synthetic oligonucleotide
aauugguguuuccuccuug

SEQ ID NO: 1336165 - RNA, 19 nt, Artificial Sequence
  Description of Artificial Sequence: Synthetic oligonucleotide
aaguaauuauagaccuuac

SEQ ID NO: 1336166 - RNA, 19 nt, Artificial Sequence
  Description of Artificial Sequence: Synthetic oligonucleotide
ugugugguaauaacuuuaa

SEQ ID NO: 1336167 - RNA, 19 nt, Artificial Sequence
  Description of Artificial Sequence: Synthetic oligonucleotide
uccuguucaaguaauuaua

SEQ ID NO: 1336168 - RNA, 19 nt, Artificial Sequence
  Description of Artificial Sequence: Synthetic oligonucleotide
gguaguaucagauaugcua

SEQ ID NO: 1336169 - RNA, 19 nt, Artificial Sequence
  Description of Artificial Sequence: Synthetic oligonucleotide
gaagacaucugucguaauc

SEQ ID NO: 1336170 - RNA, 19 nt, Artificial Sequence
  Description of Artificial Sequence: Synthetic oligonucleotide
aaggcacacaucaugucuc

SEQ ID NO: 1336171 - RNA, 19 nt, Artificial Sequence
  Description of Artificial Sequence: Synthetic oligonucleotide
ucggcauucugaaacgcug

SEQ ID NO: 1336172 - RNA, 19 nt, Artificial Sequence
  Description of Artificial Sequence: Synthetic oligonucleotide
augaaaaccggcucaugug

SEQ ID NO: 1336173 - RNA, 19 nt, Artificial Sequence
  Description of Artificial Sequence: Synthetic oligonucleotide
ucgaccaguuaucaaaauc

SEQ ID NO: 1336174 - RNA, 19 nt, Artificial Sequence
  Description of Artificial Sequence: Synthetic oligonucleotide
aacaaggcacacaucaugu

SEQ ID NO: 1336175 - RNA, 19 nt, Artificial Sequence
  Description of Artificial Sequence: Synthetic oligonucleotide
uugacguuacagauguaac

SEQ ID NO: 1336176 - RNA, 19 nt, Artificial Sequence
  Description of Artificial Sequence: Synthetic oligonucleotide
gaaguacuuaaccuugauc

SEQ ID NO: 1336177 - RNA, 19 nt, Artificial Sequence
  Description of Artificial Sequence: Synthetic oligonucleotide
uccuuauaaugacucagaa

SEQ ID NO: 1336178 - RNA, 19 nt, Artificial Sequence
  Description of Artificial Sequence: Synthetic oligonucleotide
acuacagcgaggaugaaga

SEQ ID NO: 1336179 - RNA, 19 nt, Artificial Sequence
  Description of Artificial Sequence: Synthetic oligonucleotide
gacguuacagauguaacuc

SEQ ID NO: 1336180 - RNA, 19 nt, Artificial Sequence
  Description of Artificial Sequence: Synthetic oligonucleotide
uuauccuaguagauuucug

SEQ ID NO: 1336181 - RNA, 19 nt, Artificial Sequence
  Description of Artificial Sequence: Synthetic oligonucleotide
ugauaguuugucugcuuug

SEQ ID NO: 1336182 - RNA, 19 nt, Artificial Sequence
  Description of Artificial Sequence: Synthetic oligonucleotide
aaccggcucauguguaaac

SEQ ID NO: 1336183 - RNA, 19 nt, Artificial Sequence
  Description of Artificial Sequence: Synthetic oligonucleotide
gauuccgaacauaggaaag

SEQ ID NO: 1336184 - RNA, 19 nt, Artificial Sequence
  Description of Artificial Sequence: Synthetic oligonucleotide
agucaugguucgcagguag

SEQ ID NO: 1336185 - RNA, 19 nt, Artificial Sequence
  Description of Artificial Sequence: Synthetic oligonucleotide
auaugcuauuuaacaaggc

SEQ ID NO: 1336186 - RNA, 19 nt, Artificial Sequence
  Description of Artificial Sequence: Synthetic oligonucleotide
uuuauccuaguagauuucu

SEQ ID NO: 1336187 - RNA, 19 nt, Artificial Sequence
  Description of Artificial Sequence: Synthetic oligonucleotide
uugugugguaauaacuuua

SEQ ID NO: 1336188 - RNA, 19 nt, Artificial Sequence
  Description of Artificial Sequence: Synthetic oligonucleotide
gugaagggaauuugcuugg

SEQ ID NO: 1336189 - RNA, 19 nt, Artificial Sequence
  Description of Artificial Sequence: Synthetic oligonucleotide
aaaguucgaccaguuauca

SEQ ID NO: 1336190 - RNA, 19 nt, Artificial Sequence
  Description of Artificial Sequence: Synthetic oligonucleotide
gguucaguauaugagcugg

SEQ ID NO: 1336191 - RNA, 19 nt, Artificial Sequence
  Description of Artificial Sequence: Synthetic oligonucleotide
caucuagucggccagcaug

SEQ ID NO: 1336192 - RNA, 19 nt, Artificial Sequence
  Description of Artificial Sequence: Synthetic oligonucleotide
uauaugagcuggccgcuga

SEQ ID NO: 1336193 - RNA, 19 nt, Artificial Sequence
  Description of Artificial Sequence: Synthetic oligonucleotide
gcugagucuucuuaaauug

SEQ ID NO: 1336194 - RNA, 19 nt, Artificial Sequence
  Description of Artificial Sequence: Synthetic oligonucleotide
agaaaugcuucuuccuugu

SEQ ID NO: 1336195 - RNA, 19 nt, Artificial Sequence
  Description of Artificial Sequence: Synthetic oligonucleotide
aacuugcccaugcuuccuc

SEQ ID NO: 1336196 - RNA, 19 nt, Artificial Sequence
  Description of Artificial Sequence: Synthetic oligonucleotide
gucguaaucuuccuuucug

SEQ ID NO: 1336197 - RNA, 19 nt, Artificial Sequence
  Description of Artificial Sequence: Synthetic oligonucleotide
cuccucuauauucuggcag

SEQ ID NO: 1336198 - RNA, 19 nt, Artificial Sequence
  Description of Artificial Sequence: Synthetic oligonucleotide
auaaucugugcugugguga

SEQ ID NO: 1336199 - RNA, 19 nt, Artificial Sequence
  Description of Artificial Sequence: Synthetic oligonucleotide
gguaauaacuuuaauuaca

SEQ ID NO: 1336200 - RNA, 19 nt, Artificial Sequence
  Description of Artificial Sequence: Synthetic oligonucleotide
ucggccagcaugcauacau

SEQ ID NO: 1336201 - RNA, 19 nt, Artificial Sequence
  Description of Artificial Sequence: Synthetic oligonucleotide
aaaucauccucaguuuuaa

SEQ ID NO: 1336202 - RNA, 19 nt, Artificial Sequence
  Description of Artificial Sequence: Synthetic oligonucleotide
uauucuggcagcuggcguc

SEQ ID NO: 1336203 - RNA, 19 nt, Artificial Sequence
  Description of Artificial Sequence: Synthetic oligonucleotide
ugauccuuauaaugacuca

SEQ ID NO: 1336204 - RNA, 19 nt, Artificial Sequence
  Description of Artificial Sequence: Synthetic oligonucleotide
auccuaguagauuucuggu

SEQ ID NO: 1336205 - RNA, 19 nt, Artificial Sequence
  Description of Artificial Sequence: Synthetic oligonucleotide
ugugcuguggugauccuua

SEQ ID NO: 1336206 - RNA, 19 nt, Artificial Sequence
  Description of Artificial Sequence: Synthetic oligonucleotide
gaagggaauuugcuugggc

SEQ ID NO: 1336207 - RNA, 19 nt, Artificial Sequence
  Description of Artificial Sequence: Synthetic oligonucleotide
auccuguucaaguaauuau

SEQ ID NO: 1336208 - RNA, 19 nt, Artificial Sequence
  Description of Artificial Sequence: Synthetic oligonucleotide
agauacauuuauccuagua

SEQ ID NO: 1336209 - RNA, 19 nt, Artificial Sequence
  Description of Artificial Sequence: Synthetic oligonucleotide
uucuaaguggugaggguuc

SEQ ID NO: 1336210 - RNA, 19 nt, Artificial Sequence
  Description of Artificial Sequence: Synthetic oligonucleotide
aagccccaaauaaacguuc

SEQ ID NO: 1336211 - RNA, 19 nt, Artificial Sequence
  Description of Artificial Sequence: Synthetic oligonucleotide
auuagucccaccggguuuc

SEQ ID NO: 1336212 - RNA, 19 nt, Artificial Sequence
  Description of Artificial Sequence: Synthetic oligonucleotide
ucguaaucuuccuuucugu

SEQ ID NO: 1336213 - RNA, 19 nt, Artificial Sequence
  Description of Artificial Sequence: Synthetic oligonucleotide
caugugacacacuggcagc

SEQ ID NO: 1336214 - RNA, 19 nt, Artificial Sequence
  Description of Artificial Sequence: Synthetic oligonucleotide
aucugaagacaucugucgu

SEQ ID NO: 1336215 - RNA, 19 nt, Artificial Sequence
  Description of Artificial Sequence: Synthetic oligonucleotide
aaaaccggcucauguguaa

SEQ ID NO: 1336216 - RNA, 19 nt, Artificial Sequence
  Description of Artificial Sequence: Synthetic oligonucleotide
uacuacagcgaggaugaag

SEQ ID NO: 1336217 - RNA, 19 nt, Artificial Sequence
  Description of Artificial Sequence: Synthetic oligonucleotide
caccauuagucccaccggg

SEQ ID NO: 1336218 - RNA, 19 nt, Artificial Sequence
  Description of Artificial Sequence: Synthetic oligonucleotide
cuuuaucuagcaugaucug

SEQ ID NO: 1336219 - RNA, 19 nt, Artificial Sequence
  Description of Artificial Sequence: Synthetic oligonucleotide
uggcaaugucgguacaaag

SEQ ID NO: 1336220 - RNA, 19 nt, Artificial Sequence
  Description of Artificial Sequence: Synthetic oligonucleotide
uccuugauuaaggugccca

SEQ ID NO: 1336221 - RNA, 19 nt, Artificial Sequence
  Description of Artificial Sequence: Synthetic oligonucleotide
uaacucucaugacaaccac

SEQ ID NO: 1336222 - RNA, 19 nt, Artificial Sequence
  Description of Artificial Sequence: Synthetic oligonucleotide
uccucaagacuucuucuaa

SEQ ID NO: 1336223 - RNA, 19 nt, Artificial Sequence
  Description of Artificial Sequence: Synthetic oligonucleotide
cuugaaagccccaaauaaa

SEQ ID NO: 1336224 - RNA, 19 nt, Artificial Sequence
  Description of Artificial Sequence: Synthetic oligonucleotide
aucacuagucucuauuauu

SEQ ID NO: 1336225 - RNA, 19 nt, Artificial Sequence
  Description of Artificial Sequence: Synthetic oligonucleotide
aaagacuauaugagucaug

SEQ ID NO: 1336226 - RNA, 19 nt, Artificial Sequence
  Description of Artificial Sequence: Synthetic oligonucleotide
auguaacucucaugacaac

SEQ ID NO: 1336227 - RNA, 19 nt, Artificial Sequence
  Description of Artificial Sequence: Synthetic oligonucleotide
ugcuuucuguggaagugcu

SEQ ID NO: 1336228 - RNA, 19 nt, Artificial Sequence
  Description of Artificial Sequence: Synthetic oligonucleotide
auuuauccuaguagauuuc

SEQ ID NO: 1336229 - RNA, 19 nt, Artificial Sequence
  Description of Artificial Sequence: Synthetic oligonucleotide
auaugagucaugguucgca

SEQ ID NO: 1336230 - RNA, 19 nt, Artificial Sequence
  Description of Artificial Sequence: Synthetic oligonucleotide
cauaaucugugcuguggug

SEQ ID NO: 1336231 - RNA, 19 nt, Artificial Sequence
  Description of Artificial Sequence: Synthetic oligonucleotide
acguuacagauguaacucu

SEQ ID NO: 1336232 - RNA, 19 nt, Artificial Sequence
  Description of Artificial Sequence: Synthetic oligonucleotide
agcuuacaaaucacuaguc

SEQ ID NO: 1336233 - RNA, 19 nt, Artificial Sequence
  Description of Artificial Sequence: Synthetic oligonucleotide
gugauccuuauaaugacuc

SEQ ID NO: 1336234 - RNA, 19 nt, Artificial Sequence
  Description of Artificial Sequence: Synthetic oligonucleotide
ugauguugugugguaauaa

SEQ ID NO: 1336235 - RNA, 19 nt, Artificial Sequence
  Description of Artificial Sequence: Synthetic oligonucleotide
ucaaguaauuauagaccuu

SEQ ID NO: 1336236 - RNA, 19 nt, Artificial Sequence
  Description of Artificial Sequence: Synthetic oligonucleotide
ucuuugguaguaucagaua

SEQ ID NO: 1336237 - RNA, 19 nt, Artificial Sequence
  Description of Artificial Sequence: Synthetic oligonucleotide
auuauagaccuuacagcug

SEQ ID NO: 1336238 - RNA, 19 nt, Artificial Sequence
  Description of Artificial Sequence: Synthetic oligonucleotide
guugacguuacagauguaa

SEQ ID NO: 1336239 - RNA, 19 nt, Artificial Sequence
  Description of Artificial Sequence: Synthetic oligonucleotide
acguuccuugauuaaggug

SEQ ID NO: 1336240 - RNA, 19 nt, Artificial Sequence
  Description of Artificial Sequence: Synthetic oligonucleotide
uuucuccacgucugaaugu

SEQ ID NO: 1336241 - RNA, 19 nt, Artificial Sequence
  Description of Artificial Sequence: Synthetic oligonucleotide
auaagaucacaaagcccac

SEQ ID NO: 1336242 - RNA, 19 nt, Artificial Sequence
  Description of Artificial Sequence: Synthetic oligonucleotide
guaacucucaugacaacca

SEQ ID NO: 1336243 - RNA, 19 nt, Artificial Sequence
  Description of Artificial Sequence: Synthetic oligonucleotide
auauucuggcagcuggcgu

SEQ ID NO: 1336244 - RNA, 19 nt, Artificial Sequence
  Description of Artificial Sequence: Synthetic oligonucleotide
uggaucugagcuccucuac

SEQ ID NO: 1336245 - RNA, 19 nt, Artificial Sequence
  Description of Artificial Sequence: Synthetic oligonucleotide
caaguaauuauagaccuua

SEQ ID NO: 1336246 - RNA, 19 nt, Artificial Sequence
  Description of Artificial Sequence: Synthetic oligonucleotide
guacuuaaccuugaucuca

SEQ ID NO: 1336247 - RNA, 19 nt, Artificial Sequence
  Description of Artificial Sequence: Synthetic oligonucleotide
uccuaguagauuucugguu

SEQ ID NO: 1336248 - RNA, 19 nt, Artificial Sequence
  Description of Artificial Sequence: Synthetic oligonucleotide
agccccaaauaaacguucc

SEQ ID NO: 1336249 - RNA, 19 nt, Artificial Sequence
  Description of Artificial Sequence: Synthetic oligonucleotide
aaggccacuugauguugug

SEQ ID NO: 1336250 - RNA, 19 nt, Artificial Sequence
  Description of Artificial Sequence: Synthetic oligonucleotide
uaguagauuucugguuucc

SEQ ID NO: 1336251 - RNA, 19 nt, Artificial Sequence
  Description of Artificial Sequence: Synthetic oligonucleotide
auguugugugguaauaacu

SEQ ID NO: 1336252 - RNA, 19 nt, Artificial Sequence
  Description of Artificial Sequence: Synthetic oligonucleotide
uuccucaagacuucuucua

SEQ ID NO: 1336253 - RNA, 19 nt, Artificial Sequence
  Description of Artificial Sequence: Synthetic oligonucleotide
cauuccugggaaucaaaca

SEQ ID NO: 1336254 - RNA, 19 nt, Artificial Sequence
  Description of Artificial Sequence: Synthetic oligonucleotide
cuuugguaguaucagauau

SEQ ID NO: 1336255 - RNA, 19 nt, Artificial Sequence
  Description of Artificial Sequence: Synthetic oligonucleotide
cuugucaaggacaugcagu

SEQ ID NO: 1336256 - RNA, 19 nt, Artificial Sequence
  Description of Artificial Sequence: Synthetic oligonucleotide
accggcucauguguaaacg

SEQ ID NO: 1336257 - RNA, 19 nt, Artificial Sequence
  Description of Artificial Sequence: Synthetic oligonucleotide
gcuguggugauccuuauaa

SEQ ID NO: 1336258 - RNA, 19 nt, Artificial Sequence
  Description of Artificial Sequence: Synthetic oligonucleotide
cuggugacuugucaaggac

SEQ ID NO: 1336259 - RNA, 19 nt, Artificial Sequence
  Description of Artificial Sequence: Synthetic oligonucleotide
ugauuaaggugcccaggua

SEQ ID NO: 1336260 - RNA, 19 nt, Artificial Sequence
  Description of Artificial Sequence: Synthetic oligonucleotide
uccgaacauaggaaagaau

SEQ ID NO: 1336261 - RNA, 19 nt, Artificial Sequence
  Description of Artificial Sequence: Synthetic oligonucleotide
ugaaacgcuguggugcaga

SEQ ID NO: 1336262 - RNA, 19 nt, Artificial Sequence
  Description of Artificial Sequence: Synthetic oligonucleotide
agacgccacacuugaucac

SEQ ID NO: 1336263 - RNA, 19 nt, Artificial Sequence
  Description of Artificial Sequence: Synthetic oligonucleotide
aaguucgaccaguuaucaa

SEQ ID NO: 1336264 - RNA, 19 nt, Artificial Sequence
  Description of Artificial Sequence: Synthetic oligonucleotide
uauaugagucaugguucgc

SEQ ID NO: 1336265 - RNA, 19 nt, Artificial Sequence
  Description of Artificial Sequence: Synthetic oligonucleotide
ugguaguaucagauaugcu

SEQ ID NO: 1336266 - RNA, 19 nt, Artificial Sequence
  Description of Artificial Sequence: Synthetic oligonucleotide
ggcgccaugcuuucugugg

SEQ ID NO: 1336267 - RNA, 19 nt, Artificial Sequence
  Description of Artificial Sequence: Synthetic oligonucleotide
auaugagcuggccgcugag

SEQ ID NO: 1336268 - RNA, 19 nt, Artificial Sequence
  Description of Artificial Sequence: Synthetic oligonucleotide
ggccacuugauguugugug

SEQ ID NO: 1336269 - RNA, 19 nt, Artificial Sequence
  Description of Artificial Sequence: Synthetic oligonucleotide
aaucugugcuguggugauc

SEQ ID NO: 1336270 - RNA, 19 nt, Artificial Sequence
  Description of Artificial Sequence: Synthetic oligonucleotide
gccacacuugaucacauac

SEQ ID NO: 1336271 - RNA, 19 nt, Artificial Sequence
  Description of Artificial Sequence: Synthetic oligonucleotide
aggguucaguauaugagcu

SEQ ID NO: 1336272 - RNA, 19 nt, Artificial Sequence
  Description of Artificial Sequence: Synthetic oligonucleotide
ucaugguucgcagguaguc

SEQ ID NO: 1336273 - RNA, 19 nt, Artificial Sequence
  Description of Artificial Sequence: Synthetic oligonucleotide
auuaaggugcccagguaga

SEQ ID NO: 1336274 - RNA, 19 nt, Artificial Sequence
  Description of Artificial Sequence: Synthetic oligonucleotide
ucuaaguggugaggguuca

SEQ ID NO: 1336275 - RNA, 19 nt, Artificial Sequence
  Description of Artificial Sequence: Synthetic oligonucleotide
cucauguguaaacgcauga

SEQ ID NO: 1336276 - RNA, 19 nt, Artificial Sequence
  Description of Artificial Sequence: Synthetic oligonucleotide
cuauuuaacaaggcacaca

SEQ ID NO: 1336277 - RNA, 19 nt, Artificial Sequence
  Description of Artificial Sequence: Synthetic oligonucleotide
agaucacaaagcccacaga

SEQ ID NO: 1336278 - RNA, 19 nt, Artificial Sequence
  Description of Artificial Sequence: Synthetic oligonucleotide
cagacgccacacuugauca

SEQ ID NO: 1336279 - RNA, 19 nt, Artificial Sequence
  Description of Artificial Sequence: Synthetic oligonucleotide
aguagauuucugguuuccu

SEQ ID NO: 1336280 - RNA, 19 nt, Artificial Sequence
  Description of Artificial Sequence: Synthetic oligonucleotide
auccuuauaaugacucaga

SEQ ID NO: 1336281 - RNA, 19 nt, Artificial Sequence
  Description of Artificial Sequence: Synthetic oligonucleotide
ucugauaguuugucugcuu

SEQ ID NO: 1336282 - RNA, 19 nt, Artificial Sequence
  Description of Artificial Sequence: Synthetic oligonucleotide
accuaugaaacuggugacu

SEQ ID NO: 1336283 - RNA, 19 nt, Artificial Sequence
  Description of Artificial Sequence: Synthetic oligonucleotide
ccgaacauaggaaagaaua

SEQ ID NO: 1336284 - RNA, 19 nt, Artificial Sequence
  Description of Artificial Sequence: Synthetic oligonucleotide
agacuauaugagucauggu

SEQ ID NO: 1336285 - RNA, 19 nt, Artificial Sequence
  Description of Artificial Sequence: Synthetic oligonucleotide
acgucugaauguuucugau

SEQ ID NO: 1336286 - RNA, 19 nt, Artificial Sequence
  Description of Artificial Sequence: Synthetic oligonucleotide
cucaagacuucuucuaaua

SEQ ID NO: 1336287 - RNA, 19 nt, Artificial Sequence
  Description of Artificial Sequence: Synthetic oligonucleotide
agcaugaucugaagacauc

SEQ ID NO: 1336288 - RNA, 19 nt, Artificial Sequence
  Description of Artificial Sequence: Synthetic oligonucleotide
aguauaugagcuggccgcu

SEQ ID NO: 1336289 - RNA, 19 nt, Artificial Sequence
  Description of Artificial Sequence: Synthetic oligonucleotide
guaguaucagauaugcuau

SEQ ID NO: 1336290 - RNA, 19 nt, Artificial Sequence
  Description of Artificial Sequence: Synthetic oligonucleotide
gccacuugauguugugugg

SEQ ID NO: 1336291 - RNA, 19 nt, Artificial Sequence
  Description of Artificial Sequence: Synthetic oligonucleotide
ucucggcauucugaaacgc

SEQ ID NO: 1336292 - RNA, 19 nt, Artificial Sequence
  Description of Artificial Sequence: Synthetic oligonucleotide
cugucguaaucuuccuuuc

SEQ ID NO: 1336293 - RNA, 19 nt, Artificial Sequence
  Description of Artificial Sequence: Synthetic oligonucleotide
uugauguugugugguaaua

SEQ ID NO: 1336294 - RNA, 19 nt, Artificial Sequence
  Description of Artificial Sequence: Synthetic oligonucleotide
acacaucaugucuccuucu

SEQ ID NO: 1336295 - RNA, 19 nt, Artificial Sequence
  Description of Artificial Sequence: Synthetic oligonucleotide
ggauagugaagggaauuug

SEQ ID NO: 1336296 - RNA, 19 nt, Artificial Sequence
  Description of Artificial Sequence: Synthetic oligonucleotide
acuugauguugugugguaa

SEQ ID NO: 1336297 - RNA, 19 nt, Artificial Sequence
  Description of Artificial Sequence: Synthetic oligonucleotide
aggauagugaagggaauuu

SEQ ID NO: 1336298 - RNA, 19 nt, Artificial Sequence
  Description of Artificial Sequence: Synthetic oligonucleotide
gacgccacacuugaucaca

SEQ ID NO: 1336299 - RNA, 19 nt, Artificial Sequence
  Description of Artificial Sequence: Synthetic oligonucleotide
uucuccacgucugaauguu

SEQ ID NO: 1336300 - RNA, 19 nt, Artificial Sequence
  Description of Artificial Sequence: Synthetic oligonucleotide
gcaacuugcccaugcuucc

SEQ ID NO: 1336301 - RNA, 19 nt, Artificial Sequence
  Description of Artificial Sequence: Synthetic oligonucleotide
cuccugagaggauagugaa

SEQ ID NO: 1336302 - RNA, 19 nt, Artificial Sequence
  Description of Artificial Sequence: Synthetic oligonucleotide
uuggucuccugagaggaua

SEQ ID NO: 1336303 - RNA, 19 nt, Artificial Sequence
  Description of Artificial Sequence: Synthetic oligonucleotide
aaaccggcucauguguaaa

SEQ ID NO: 1336304 - RNA, 19 nt, Artificial Sequence
  Description of Artificial Sequence: Synthetic oligonucleotide
auagaccuuacagcugagu

SEQ ID NO: 1336305 - RNA, 19 nt, Artificial Sequence
  Description of Artificial Sequence: Synthetic oligonucleotide
cuguggaagugcugcugag

SEQ ID NO: 1336306 - RNA, 19 nt, Artificial Sequence
  Description of Artificial Sequence: Synthetic oligonucleotide
ccaaauaaacguuccuuga

SEQ ID NO: 1336307 - RNA, 19 nt, Artificial Sequence
  Description of Artificial Sequence: Synthetic oligonucleotide
gcagacgccacacuugauc

SEQ ID NO: 1336308 - RNA, 19 nt, Artificial Sequence
  Description of Artificial Sequence: Synthetic oligonucleotide
guucaguauaugagcuggc

SEQ ID NO: 1336309 - RNA, 19 nt, Artificial Sequence
  Description of Artificial Sequence: Synthetic oligonucleotide
ucauccuggcaaugucggu

SEQ ID NO: 1336310 - RNA, 19 nt, Artificial Sequence
  Description of Artificial Sequence: Synthetic oligonucleotide
uccucuacuggagugccuu

SEQ ID NO: 1336311 - RNA, 19 nt, Artificial Sequence
  Description of Artificial Sequence: Synthetic oligonucleotide
ccuugauuaaggugcccag

SEQ ID NO: 1336312 - RNA, 19 nt, Artificial Sequence
  Description of Artificial Sequence: Synthetic oligonucleotide
ugcauacauauggcaaaau

SEQ ID NO: 1336313 - RNA, 19 nt, Artificial Sequence
  Description of Artificial Sequence: Synthetic oligonucleotide
gcuuacaaaucacuagucu

SEQ ID NO: 1336314 - RNA, 19 nt, Artificial Sequence
  Description of Artificial Sequence: Synthetic oligonucleotide
ggcauucugaaacgcugug

SEQ ID NO: 1336315 - RNA, 19 nt, Artificial Sequence
  Description of Artificial Sequence: Synthetic oligonucleotide
caaaucacuagucucuauu

SEQ ID NO: 1336316 - RNA, 19 nt, Artificial Sequence
  Description of Artificial Sequence: Synthetic oligonucleotide
ggguucaguauaugagcug

SEQ ID NO: 1336317 - RNA, 19 nt, Artificial Sequence
  Description of Artificial Sequence: Synthetic oligonucleotide
uggccgcugagucuucuua

SEQ ID NO: 1336318 - RNA, 19 nt, Artificial Sequence
  Description of Artificial Sequence: Synthetic oligonucleotide
ggcaguuguucaucuaguc

SEQ ID NO: 1336319 - RNA, 19 nt, Artificial Sequence
  Description of Artificial Sequence: Synthetic oligonucleotide
ugacucagaaaugcuucuu

SEQ ID NO: 1336320 - RNA, 19 nt, Artificial Sequence
  Description of Artificial Sequence: Synthetic oligonucleotide
guucgaccaguuaucaaaa

SEQ ID NO: 1336321 - RNA, 19 nt, Artificial Sequence
  Description of Artificial Sequence: Synthetic oligonucleotide
cugaauguuucugauaguu

SEQ ID NO: 1336322 - RNA, 19 nt, Artificial Sequence
  Description of Artificial Sequence: Synthetic oligonucleotide
guauaugagcuggccgcug

SEQ ID NO: 1336323 - RNA, 19 nt, Artificial Sequence
  Description of Artificial Sequence: Synthetic oligonucleotide
cucuacuggagugccuuuc

SEQ ID NO: 1336324 - RNA, 19 nt, Artificial Sequence
  Description of Artificial Sequence: Synthetic oligonucleotide
gaaaaccggcucaugugua

SEQ ID NO: 1336325 - RNA, 19 nt, Artificial Sequence
  Description of Artificial Sequence: Synthetic oligonucleotide
ccaccauuagucccaccgg

SEQ ID NO: 1336326 - RNA, 19 nt, Artificial Sequence
  Description of Artificial Sequence: Synthetic oligonucleotide
guucaucuagucggccagc

SEQ ID NO: 1336327 - RNA, 19 nt, Artificial Sequence
  Description of Artificial Sequence: Synthetic oligonucleotide
gcauccaauccuguucaag

SEQ ID NO: 1336328 - RNA, 19 nt, Artificial Sequence
  Description of Artificial Sequence: Synthetic oligonucleotide
ccggcucauguguaaacgc

SEQ ID NO: 1336329 - RNA, 19 nt, Artificial Sequence
  Description of Artificial Sequence: Synthetic oligonucleotide
agaggauagugaagggaau

SEQ ID NO: 1336330 - RNA, 19 nt, Artificial Sequence
  Description of Artificial Sequence: Synthetic oligonucleotide
gcaaugucgguacaaaguu

SEQ ID NO: 1336331 - RNA, 19 nt, Artificial Sequence
  Description of Artificial Sequence: Synthetic oligonucleotide
gcuuccaauugguguuucc

SEQ ID NO: 1336332 - RNA, 19 nt, Artificial Sequence
  Description of Artificial Sequence: Synthetic oligonucleotide
cguuacagauguaacucuc

SEQ ID NO: 1336333 - RNA, 19 nt, Artificial Sequence
  Description of Artificial Sequence: Synthetic oligonucleotide
cuggcgucaugcucagcuc

SEQ ID NO: 1336334 - RNA, 19 nt, Artificial Sequence
  Description of Artificial Sequence: Synthetic oligonucleotide
gauccaccauuagucccac

SEQ ID NO: 1336335 - RNA, 19 nt, Artificial Sequence
  Description of Artificial Sequence: Synthetic oligonucleotide
ucuagucggccagcaugca

SEQ ID NO: 1336336 - RNA, 19 nt, Artificial Sequence
  Description of Artificial Sequence: Synthetic oligonucleotide
aggcgccaugcuuucugug

SEQ ID NO: 1336337 - RNA, 19 nt, Artificial Sequence
  Description of Artificial Sequence: Synthetic oligonucleotide
cgaccaguuaucaaaaucu

SEQ ID NO: 1336338 - RNA, 19 nt, Artificial Sequence
  Description of Artificial Sequence: Synthetic oligonucleotide
ggcaaugucgguacaaagu

SEQ ID NO: 1336339 - RNA, 19 nt, Artificial Sequence
  Description of Artificial Sequence: Synthetic oligonucleotide
cugauaguuugucugcuuu

SEQ ID NO: 1336340 - RNA, 19 nt, Artificial Sequence
  Description of Artificial Sequence: Synthetic oligonucleotide
gaggauagugaagggaauu

SEQ ID NO: 1336341 - RNA, 19 nt, Artificial Sequence
  Description of Artificial Sequence: Synthetic oligonucleotide
aggccacuugauguugugu

SEQ ID NO: 1336342 - RNA, 19 nt, Artificial Sequence
  Description of Artificial Sequence: Synthetic oligonucleotide
acuuaaccuugaucucauu

SEQ ID NO: 1336343 - RNA, 19 nt, Artificial Sequence
  Description of Artificial Sequence: Synthetic oligonucleotide
gaagugcugcugagcacuc

SEQ ID NO: 1336344 - RNA, 19 nt, Artificial Sequence
  Description of Artificial Sequence: Synthetic oligonucleotide
ccccgaaucuucacacacc

SEQ ID NO: 1336345 - RNA, 19 nt, Artificial Sequence
  Description of Artificial Sequence: Synthetic oligonucleotide
caaagacuauaugagucau

SEQ ID NO: 1336346 - RNA, 19 nt, Artificial Sequence
  Description of Artificial Sequence: Synthetic oligonucleotide
cucggcauucugaaacgcu

SEQ ID NO: 1336347 - RNA, 19 nt, Artificial Sequence
  Description of Artificial Sequence: Synthetic oligonucleotide
ccacagaaguacuuaaccu

SEQ ID NO: 1336348 - RNA, 19 nt, Artificial Sequence
  Description of Artificial Sequence: Synthetic oligonucleotide
accggguuucuggcaggcg

SEQ ID NO: 1336349 - RNA, 19 nt, Artificial Sequence
  Description of Artificial Sequence: Synthetic oligonucleotide
cuacagcgaggaugaagaa

SEQ ID NO: 1336350 - RNA, 19 nt, Artificial Sequence
  Description of Artificial Sequence: Synthetic oligonucleotide
cugaaacgcuguggugcag

SEQ ID NO: 1336351 - RNA, 19 nt, Artificial Sequence
  Description of Artificial Sequence: Synthetic oligonucleotide
caccggguuucuggcaggc

SEQ ID NO: 1336352 - RNA, 19 nt, Artificial Sequence
  Description of Artificial Sequence: Synthetic oligonucleotide
ccuaguagauuucugguuu

SEQ ID NO: 1336353 - RNA, 19 nt, Artificial Sequence
  Description of Artificial Sequence: Synthetic oligonucleotide
accuuacagcugagugggg

SEQ ID NO: 1336354 - RNA, 19 nt, Artificial Sequence
  Description of Artificial Sequence: Synthetic oligonucleotide
ggugauccuuauaaugacu

SEQ ID NO: 1336355 - RNA, 19 nt, Artificial Sequence
  Description of Artificial Sequence: Synthetic oligonucleotide
uuagucccaccggguuucu

SEQ ID NO: 1336356 - RNA, 19 nt, Artificial Sequence
  Description of Artificial Sequence: Synthetic oligonucleotide
gugugguaauaacuuuaau

SEQ ID NO: 1336357 - RNA, 19 nt, Artificial Sequence
  Description of Artificial Sequence: Synthetic oligonucleotide
caucugucguaaucuuccu

SEQ ID NO: 1336358 - RNA, 19 nt, Artificial Sequence
  Description of Artificial Sequence: Synthetic oligonucleotide
cauuagucccaccggguuu

SEQ ID NO: 1336359 - RNA, 19 nt, Artificial Sequence
  Description of Artificial Sequence: Synthetic oligonucleotide
cagcuguaccuaugaaacu

SEQ ID NO: 1336360 - RNA, 19 nt, Artificial Sequence
  Description of Artificial Sequence: Synthetic oligonucleotide
uuacuacagcgaggaugaa

SEQ ID NO: 1336361 - RNA, 19 nt, Artificial Sequence
  Description of Artificial Sequence: Synthetic oligonucleotide
cuguggugauccuuauaau

SEQ ID NO: 1336362 - RNA, 19 nt, Artificial Sequence
  Description of Artificial Sequence: Synthetic oligonucleotide
ggccgcugagucuucuuaa

SEQ ID NO: 1336363 - RNA, 19 nt, Artificial Sequence
  Description of Artificial Sequence: Synthetic oligonucleotide
cccgaaucuucacacaccu

SEQ ID NO: 1336364 - RNA, 19 nt, Artificial Sequence
  Description of Artificial Sequence: Synthetic oligonucleotide
gccgcugagucuucuuaaa

SEQ ID NO: 1336365 - RNA, 19 nt, Artificial Sequence
  Description of Artificial Sequence: Synthetic oligonucleotide
gguucgcagguaguccaca

SEQ ID NO: 1336366 - RNA, 19 nt, Artificial Sequence
  Description of Artificial Sequence: Synthetic oligonucleotide
gucaugguucgcagguagu

SEQ ID NO: 1336367 - RNA, 19 nt, Artificial Sequence
  Description of Artificial Sequence: Synthetic oligonucleotide
uggcagcaacuugcccaug

SEQ ID NO: 1336368 - RNA, 19 nt, Artificial Sequence
  Description of Artificial Sequence: Synthetic oligonucleotide
ccaugaaaaccggcucaug

SEQ ID NO: 1336369 - RNA, 19 nt, Artificial Sequence
  Description of Artificial Sequence: Synthetic oligonucleotide
caauugguguuuccuccuu

SEQ ID NO: 1336370 - RNA, 19 nt, Artificial Sequence
  Description of Artificial Sequence: Synthetic oligonucleotide
ggcucauguguaaacgcau

SEQ ID NO: 1336371 - RNA, 19 nt, Artificial Sequence
  Description of Artificial Sequence: Synthetic oligonucleotide
caggcgccaugcuuucugu

SEQ ID NO: 1336372 - RNA, 19 nt, Artificial Sequence
  Description of Artificial Sequence: Synthetic oligonucleotide
caacuugcccaugcuuccu

SEQ ID NO: 1336373 - RNA, 19 nt, Artificial Sequence
  Description of Artificial Sequence: Synthetic oligonucleotide
gggcaguuguucaucuagu

SEQ ID NO: 1336374 - RNA, 19 nt, Artificial Sequence
  Description of Artificial Sequence: Synthetic oligonucleotide
caacuuccuccucuauauu

SEQ ID NO: 1336375 - RNA, 19 nt, Artificial Sequence
  Description of Artificial Sequence: Synthetic oligonucleotide
ggaauuugcuugggcaguu

SEQ ID NO: 1336376 - RNA, 19 nt, Artificial Sequence
  Description of Artificial Sequence: Synthetic oligonucleotide
cuccucuacuggagugccu

SEQ ID NO: 1336377 - RNA, 19 nt, Artificial Sequence
  Description of Artificial Sequence: Synthetic oligonucleotide
ccauuagucccaccggguu

SEQ ID NO: 1336378 - RNA, 19 nt, Artificial Sequence
  Description of Artificial Sequence: Synthetic oligonucleotide
ggcgucaugcucagcuccu

SEQ ID NO: 1336379 - RNA, 19 nt, Artificial Sequence
  Description of Artificial Sequence: Synthetic oligonucleotide
cugugcuguggugauccuu

SEQ ID NO: 1336380 - RNA, 19 nt, Artificial Sequence
  Description of Artificial Sequence: Synthetic oligonucleotide
cggccagcaugcauacaua

SEQ ID NO: 1336381 - RNA, 19 nt, Artificial Sequence
  Description of Artificial Sequence: Synthetic oligonucleotide
ccgaaucuucacacaccuu

SEQ ID NO: 1336382 - RNA, 19 nt, Artificial Sequence
  Description of Artificial Sequence: Synthetic oligonucleotide
aagaauucgauacaaaagg

SEQ ID NO: 1336383 - RNA, 19 nt, Artificial Sequence
  Description of Artificial Sequence: Synthetic oligonucleotide
aauggauaaauauaugcac

SEQ ID NO: 1336384 - RNA, 19 nt, Artificial Sequence
  Description of Artificial Sequence: Synthetic oligonucleotide
uuagaauuaacucaucccg

SEQ ID NO: 1336385 - RNA, 19 nt, Artificial Sequence
  Description of Artificial Sequence: Synthetic oligonucleotide
aaccacauagauuuaaggc

SEQ ID NO: 1336386 - RNA, 19 nt, Artificial Sequence
  Description of Artificial Sequence: Synthetic oligonucleotide
aauuaacucaucccgugcc

SEQ ID NO: 1336387 - RNA, 19 nt, Artificial Sequence
  Description of Artificial Sequence: Synthetic oligonucleotide
aauucgauacaaaaggccc

SEQ ID NO: 1336388 - RNA, 19 nt, Artificial Sequence
  Description of Artificial Sequence: Synthetic oligonucleotide
aauaacggcagucucauca

SEQ ID NO: 1336389 - RNA, 19 nt, Artificial Sequence
  Description of Artificial Sequence: Synthetic oligonucleotide
cuaauggauaaauauaugc

SEQ ID NO: 1336390 - RNA, 19 nt, Artificial Sequence
  Description of Artificial Sequence: Synthetic oligonucleotide
acguaaacccuuuaaaggc

SEQ ID NO: 1336391 - RNA, 19 nt, Artificial Sequence
  Description of Artificial Sequence: Synthetic oligonucleotide
gaacauaugcuucauauug

SEQ ID NO: 1336392 - RNA, 19 nt, Artificial Sequence
  Description of Artificial Sequence: Synthetic oligonucleotide
ucuucuucggaauaguccg

SEQ ID NO: 1336393 - RNA, 19 nt, Artificial Sequence
  Description of Artificial Sequence: Synthetic oligonucleotide
uucauuuugggcuuguucc

SEQ ID NO: 1336394 - RNA, 19 nt, Artificial Sequence
  Description of Artificial Sequence: Synthetic oligonucleotide
ucuaguugugaaaugaaug

SEQ ID NO: 1336395 - RNA, 19 nt, Artificial Sequence
  Description of Artificial Sequence: Synthetic oligonucleotide
ugauuuaaaaccucuaggu

SEQ ID NO: 1336396 - RNA, 19 nt, Artificial Sequence
  Description of Artificial Sequence: Synthetic oligonucleotide
uaauggauaaauauaugca

SEQ ID NO: 1336397 - RNA, 19 nt, Artificial Sequence
  Description of Artificial Sequence: Synthetic oligonucleotide
aagucuguuucacucagac

SEQ ID NO: 1336398 - RNA, 19 nt, Artificial Sequence
  Description of Artificial Sequence: Synthetic oligonucleotide
uccacaaccauucaaagaa

SEQ ID NO: 1336399 - RNA, 19 nt, Artificial Sequence
  Description of Artificial Sequence: Synthetic oligonucleotide
uuuaacaugugccugcuga

SEQ ID NO: 1336400 - RNA, 19 nt, Artificial Sequence
  Description of Artificial Sequence: Synthetic oligonucleotide
aauacaaugaaggaacaca

SEQ ID NO: 1336401 - RNA, 19 nt, Artificial Sequence
  Description of Artificial Sequence: Synthetic oligonucleotide
ucuuagaauuaacucaucc

SEQ ID NO: 1336402 - RNA, 19 nt, Artificial Sequence
  Description of Artificial Sequence: Synthetic oligonucleotide
auaacugauguacaguguc

SEQ ID NO: 1336403 - RNA, 19 nt, Artificial Sequence
  Description of Artificial Sequence: Synthetic oligonucleotide
aucauuugaauuaagaucu

SEQ ID NO: 1336404 - RNA, 19 nt, Artificial Sequence
  Description of Artificial Sequence: Synthetic oligonucleotide
guucuuagcacguaaaccc

SEQ ID NO: 1336405 - RNA, 19 nt, Artificial Sequence
  Description of Artificial Sequence: Synthetic oligonucleotide
uuaagagcgaugcauauuc

SEQ ID NO: 1336406 - RNA, 19 nt, Artificial Sequence
  Description of Artificial Sequence: Synthetic oligonucleotide
aauguuuucccuucgugca

SEQ ID NO: 1336407 - RNA, 19 nt, Artificial Sequence
  Description of Artificial Sequence: Synthetic oligonucleotide
aauaccuuauacaaucuag

SEQ ID NO: 1336408 - RNA, 19 nt, Artificial Sequence
  Description of Artificial Sequence: Synthetic oligonucleotide
ugucugaagacacagugug

SEQ ID NO: 1336409 - RNA, 19 nt, Artificial Sequence
  Description of Artificial Sequence: Synthetic oligonucleotide
caucauuugaauuaagauc

SEQ ID NO: 1336410 - RNA, 19 nt, Artificial Sequence
  Description of Artificial Sequence: Synthetic oligonucleotide
aguggaaacgaguacuugg

SEQ ID NO: 1336411 - RNA, 19 nt, Artificial Sequence
  Description of Artificial Sequence: Synthetic oligonucleotide
auauaugcacuacuuguac

SEQ ID NO: 1336412 - RNA, 19 nt, Artificial Sequence
  Description of Artificial Sequence: Synthetic oligonucleotide
cacguaaacccuuuaaagg

SEQ ID NO: 1336413 - RNA, 19 nt, Artificial Sequence
  Description of Artificial Sequence: Synthetic oligonucleotide
uugaguaguacacucuugc

SEQ ID NO: 1336414 - RNA, 19 nt, Artificial Sequence
  Description of Artificial Sequence: Synthetic oligonucleotide
uuuagucuguuccaguuca

SEQ ID NO: 1336415 - RNA, 19 nt, Artificial Sequence
  Description of Artificial Sequence: Synthetic oligonucleotide
uuaguggaauuuuacaugu

SEQ ID NO: 1336416 - RNA, 19 nt, Artificial Sequence
  Description of Artificial Sequence: Synthetic oligonucleotide
gaggguuuacuaaauaacg

SEQ ID NO: 1336417 - RNA, 19 nt, Artificial Sequence
  Description of Artificial Sequence: Synthetic oligonucleotide
agagcuaauggauaaauau

SEQ ID NO: 1336418 - RNA, 19 nt, Artificial Sequence
  Description of Artificial Sequence: Synthetic oligonucleotide
uagagcucagagcuaaugg

SEQ ID NO: 1336419 - RNA, 19 nt, Artificial Sequence
  Description of Artificial Sequence: Synthetic oligonucleotide
uuauuggcauaacugaugu

SEQ ID NO: 1336420 - RNA, 19 nt, Artificial Sequence
  Description of Artificial Sequence: Synthetic oligonucleotide
cuucagauucccuuaagcc

SEQ ID NO: 1336421 - RNA, 19 nt, Artificial Sequence
  Description of Artificial Sequence: Synthetic oligonucleotide
gaauguuuucccuucgugc

SEQ ID NO: 1336422 - RNA, 19 nt, Artificial Sequence
  Description of Artificial Sequence: Synthetic oligonucleotide
acucaguucauuuugggcu

SEQ ID NO: 1336423 - RNA, 19 nt, Artificial Sequence
  Description of Artificial Sequence: Synthetic oligonucleotide
uucagauucccuuaagcca

SEQ ID NO: 1336424 - RNA, 19 nt, Artificial Sequence
  Description of Artificial Sequence: Synthetic oligonucleotide
acuaaauaacggcagucuc

SEQ ID NO: 1336425 - RNA, 19 nt, Artificial Sequence
  Description of Artificial Sequence: Synthetic oligonucleotide
cauauuguuuccaucuuag

SEQ ID NO: 1336426 - RNA, 19 nt, Artificial Sequence
  Description of Artificial Sequence: Synthetic oligonucleotide
ucaagguuaagagcgaugc

SEQ ID NO: 1336427 - RNA, 19 nt, Artificial Sequence
  Description of Artificial Sequence: Synthetic oligonucleotide
ucuucguuggucaucuugc

SEQ ID NO: 1336428 - RNA, 19 nt, Artificial Sequence
  Description of Artificial Sequence: Synthetic oligonucleotide
agaauucgauacaaaaggc

SEQ ID NO: 1336429 - RNA, 19 nt, Artificial Sequence
  Description of Artificial Sequence: Synthetic oligonucleotide
acuuaagacuucuguuucc

SEQ ID NO: 1336430 - RNA, 19 nt, Artificial Sequence
  Description of Artificial Sequence: Synthetic oligonucleotide
accuuauacaaucuaguug

SEQ ID NO: 1336431 - RNA, 19 nt, Artificial Sequence
  Description of Artificial Sequence: Synthetic oligonucleotide
uuaccuaucaggcguaaac

SEQ ID NO: 1336432 - RNA, 19 nt, Artificial Sequence
  Description of Artificial Sequence: Synthetic oligonucleotide
uaaucgcaugaccagaaug

SEQ ID NO: 1336433 - RNA, 19 nt, Artificial Sequence
  Description of Artificial Sequence: Synthetic oligonucleotide
auaugcacuacuuguacug

SEQ ID NO: 1336434 - RNA, 19 nt, Artificial Sequence
  Description of Artificial Sequence: Synthetic oligonucleotide
uugaguuuugacccaguag

SEQ ID NO: 1336435 - RNA, 19 nt, Artificial Sequence
  Description of Artificial Sequence: Synthetic oligonucleotide
augcucaagguuaagagcg

SEQ ID NO: 1336436 - RNA, 19 nt, Artificial Sequence
  Description of Artificial Sequence: Synthetic oligonucleotide
uccaucuuagaauuaacuc

SEQ ID NO: 1336437 - RNA, 19 nt, Artificial Sequence
  Description of Artificial Sequence: Synthetic oligonucleotide
gaauucgauacaaaaggcc

SEQ ID NO: 1336438 - RNA, 19 nt, Artificial Sequence
  Description of Artificial Sequence: Synthetic oligonucleotide
uccucgguaaagauuaucu

SEQ ID NO: 1336439 - RNA, 19 nt, Artificial Sequence
  Description of Artificial Sequence: Synthetic oligonucleotide
ucguuggucaucuugcacc

SEQ ID NO: 1336440 - RNA, 19 nt, Artificial Sequence
  Description of Artificial Sequence: Synthetic oligonucleotide
aacgacaaugcuguuuaac

SEQ ID NO: 1336441 - RNA, 19 nt, Artificial Sequence
  Description of Artificial Sequence: Synthetic oligonucleotide
ucuaccauuguugaucuca

SEQ ID NO: 1336442 - RNA, 19 nt, Artificial Sequence
  Description of Artificial Sequence: Synthetic oligonucleotide
ugucucuaagucacuaugc

SEQ ID NO: 1336443 - RNA, 19 nt, Artificial Sequence
  Description of Artificial Sequence: Synthetic oligonucleotide
caaugaaggaacacauucc

SEQ ID NO: 1336444 - RNA, 19 nt, Artificial Sequence
  Description of Artificial Sequence: Synthetic oligonucleotide
cuaucaggcguaaacuucc

SEQ ID NO: 1336445 - RNA, 19 nt, Artificial Sequence
  Description of Artificial Sequence: Synthetic oligonucleotide
uaaggcuccauuauguaau

SEQ ID NO: 1336446 - RNA, 19 nt, Artificial Sequence
  Description of Artificial Sequence: Synthetic oligonucleotide
cuggauuugaguaguacac

SEQ ID NO: 1336447 - RNA, 19 nt, Artificial Sequence
  Description of Artificial Sequence: Synthetic oligonucleotide
uauguaauauagagcucag

SEQ ID NO: 1336448 - RNA, 19 nt, Artificial Sequence
  Description of Artificial Sequence: Synthetic oligonucleotide
gguagcuaugacuugauug

SEQ ID NO: 1336449 - RNA, 19 nt, Artificial Sequence
  Description of Artificial Sequence: Synthetic oligonucleotide
cuucggaauaguccgacgg

SEQ ID NO: 1336450 - RNA, 19 nt, Artificial Sequence
  Description of Artificial Sequence: Synthetic oligonucleotide
aaucgcaugaccagaaugu

SEQ ID NO: 1336451 - RNA, 19 nt, Artificial Sequence
  Description of Artificial Sequence: Synthetic oligonucleotide
acuugauugucucauggcu

SEQ ID NO: 1336452 - RNA, 19 nt, Artificial Sequence
  Description of Artificial Sequence: Synthetic oligonucleotide
cuuauuggcauaacugaug

SEQ ID NO: 1336453 - RNA, 19 nt, Artificial Sequence
  Description of Artificial Sequence: Synthetic oligonucleotide
aacugauguacagugucuc

SEQ ID NO: 1336454 - RNA, 19 nt, Artificial Sequence
  Description of Artificial Sequence: Synthetic oligonucleotide
ugcuuauaaugcuucaaac

SEQ ID NO: 1336455 - RNA, 19 nt, Artificial Sequence
  Description of Artificial Sequence: Synthetic oligonucleotide
acuggauuugaguaguaca

SEQ ID NO: 1336456 - RNA, 19 nt, Artificial Sequence
  Description of Artificial Sequence: Synthetic oligonucleotide
uugguugcuaaucgcauga

SEQ ID NO: 1336457 - RNA, 19 nt, Artificial Sequence
  Description of Artificial Sequence: Synthetic oligonucleotide
ugagaccacaccuucacgu

SEQ ID NO: 1336458 - RNA, 19 nt, Artificial Sequence
  Description of Artificial Sequence: Synthetic oligonucleotide
uagaauuaacucaucccgu

SEQ ID NO: 1336459 - RNA, 19 nt, Artificial Sequence
  Description of Artificial Sequence: Synthetic oligonucleotide
ugacccaguaguucaacag

SEQ ID NO: 1336460 - RNA, 19 nt, Artificial Sequence
  Description of Artificial Sequence: Synthetic oligonucleotide
acgaguacuuggcuguccc

SEQ ID NO: 1336461 - RNA, 19 nt, Artificial Sequence
  Description of Artificial Sequence: Synthetic oligonucleotide
aguccgacggcaucaggcc

SEQ ID NO: 1336462 - RNA, 19 nt, Artificial Sequence
  Description of Artificial Sequence: Synthetic oligonucleotide
uagauuuaaggcuccauua

SEQ ID NO: 1336463 - RNA, 19 nt, Artificial Sequence
  Description of Artificial Sequence: Synthetic oligonucleotide
ucuuauuggcauaacugau

SEQ ID NO: 1336464 - RNA, 19 nt, Artificial Sequence
  Description of Artificial Sequence: Synthetic oligonucleotide
agucuuauuggcauaacug

SEQ ID NO: 1336465 - RNA, 19 nt, Artificial Sequence
  Description of Artificial Sequence: Synthetic oligonucleotide
ugagguacuggauuugagu

SEQ ID NO: 1336466 - RNA, 19 nt, Artificial Sequence
  Description of Artificial Sequence: Synthetic oligonucleotide
uuuaaaccugaagugugag

SEQ ID NO: 1336467 - RNA, 19 nt, Artificial Sequence
  Description of Artificial Sequence: Synthetic oligonucleotide
ugagucuuggaguggaaac

SEQ ID NO: 1336468 - RNA, 19 nt, Artificial Sequence
  Description of Artificial Sequence: Synthetic oligonucleotide
aagagguucuucguugguc

SEQ ID NO: 1336469 - RNA, 19 nt, Artificial Sequence
  Description of Artificial Sequence: Synthetic oligonucleotide
uaguccgacggcaucaggc

SEQ ID NO: 1336470 - RNA, 19 nt, Artificial Sequence
  Description of Artificial Sequence: Synthetic oligonucleotide
caggcguaaacuuccaggc

SEQ ID NO: 1336471 - RNA, 19 nt, Artificial Sequence
  Description of Artificial Sequence: Synthetic oligonucleotide
ugacuggggaguaugauuu

SEQ ID NO: 1336472 - RNA, 19 nt, Artificial Sequence
  Description of Artificial Sequence: Synthetic oligonucleotide
ugcuguuuaacaugugccu

SEQ ID NO: 1336473 - RNA, 19 nt, Artificial Sequence
  Description of Artificial Sequence: Synthetic oligonucleotide
gacuuaagacuucuguuuc

SEQ ID NO: 1336474 - RNA, 19 nt, Artificial Sequence
  Description of Artificial Sequence: Synthetic oligonucleotide
uacuaaauaacggcagucu

SEQ ID NO: 1336475 - RNA, 19 nt, Artificial Sequence
  Description of Artificial Sequence: Synthetic oligonucleotide
uccuugguugcuaaucgca

SEQ ID NO: 1336476 - RNA, 19 nt, Artificial Sequence
  Description of Artificial Sequence: Synthetic oligonucleotide
uguacaguccucgguaaag

SEQ ID NO: 1336477 - RNA, 19 nt, Artificial Sequence
  Description of Artificial Sequence: Synthetic oligonucleotide
gugaaaugaaugcuuauaa

SEQ ID NO: 1336478 - RNA, 19 nt, Artificial Sequence
  Description of Artificial Sequence: Synthetic oligonucleotide
agagguucuucguugguca

SEQ ID NO: 1336479 - RNA, 19 nt, Artificial Sequence
  Description of Artificial Sequence: Synthetic oligonucleotide
agagcucagagcuaaugga

SEQ ID NO: 1336480 - RNA, 19 nt, Artificial Sequence
  Description of Artificial Sequence: Synthetic oligonucleotide
ucauauuguuuccaucuua

SEQ ID NO: 1336481 - RNA, 19 nt, Artificial Sequence
  Description of Artificial Sequence: Synthetic oligonucleotide
agcuaauggauaaauauau

SEQ ID NO: 1336482 - RNA, 19 nt, Artificial Sequence
  Description of Artificial Sequence: Synthetic oligonucleotide
uucaccuguaaguuuuaca

SEQ ID NO: 1336483 - RNA, 19 nt, Artificial Sequence
  Description of Artificial Sequence: Synthetic oligonucleotide
uucggaauaguccgacggc

SEQ ID NO: 1336484 - RNA, 19 nt, Artificial Sequence
  Description of Artificial Sequence: Synthetic oligonucleotide
guugcuaaucgcaugacca

SEQ ID NO: 1336485 - RNA, 19 nt, Artificial Sequence
  Description of Artificial Sequence: Synthetic oligonucleotide
uaauaucaagaauucgaua

SEQ ID NO: 1336486 - RNA, 19 nt, Artificial Sequence
  Description of Artificial Sequence: Synthetic oligonucleotide
uugcuaaucgcaugaccag

SEQ ID NO: 1336487 - RNA, 19 nt, Artificial Sequence
  Description of Artificial Sequence: Synthetic oligonucleotide
uuaaaccugaagugugaga

SEQ ID NO: 1336488 - RNA, 19 nt, Artificial Sequence
  Description of Artificial Sequence: Synthetic oligonucleotide
uaacugauguacagugucu

SEQ ID NO: 1336489 - RNA, 19 nt, Artificial Sequence
  Description of Artificial Sequence: Synthetic oligonucleotide
uaucaagaauucgauacaa

SEQ ID NO: 1336490 - RNA, 19 nt, Artificial Sequence
  Description of Artificial Sequence: Synthetic oligonucleotide
uucuuagcacguaaacccu

SEQ ID NO: 1336491 - RNA, 19 nt, Artificial Sequence
  Description of Artificial Sequence: Synthetic oligonucleotide
agguacuggauuugaguag

SEQ ID NO: 1336492 - RNA, 19 nt, Artificial Sequence
  Description of Artificial Sequence: Synthetic oligonucleotide
auggauaaauauaugcacu

SEQ ID NO: 1336493 - RNA, 19 nt, Artificial Sequence
  Description of Artificial Sequence: Synthetic oligonucleotide
aguaugauuuguuuaccua

SEQ ID NO: 1336494 - RNA, 19 nt, Artificial Sequence
  Description of Artificial Sequence: Synthetic oligonucleotide
ugguucuuagcacguaaac

SEQ ID NO: 1336495 - RNA, 19 nt, Artificial Sequence
  Description of Artificial Sequence: Synthetic oligonucleotide
uuguugaucucaguugggc

SEQ ID NO: 1336496 - RNA, 19 nt, Artificial Sequence
  Description of Artificial Sequence: Synthetic oligonucleotide
auuugaguaguacacucuu

SEQ ID NO: 1336497 - RNA, 19 nt, Artificial Sequence
  Description of Artificial Sequence: Synthetic oligonucleotide
ucauuugaauuaagaucug

SEQ ID NO: 1336498 - RNA, 19 nt, Artificial Sequence
  Description of Artificial Sequence: Synthetic oligonucleotide
acaaucuaguugugaaaug

SEQ ID NO: 1336499 - RNA, 19 nt, Artificial Sequence
  Description of Artificial Sequence: Synthetic oligonucleotide
uuacauuuuaguggaauuu

SEQ ID NO: 1336500 - RNA, 19 nt, Artificial Sequence
  Description of Artificial Sequence: Synthetic oligonucleotide
uugauugucucauggcuau

SEQ ID NO: 1336501 - RNA, 19 nt, Artificial Sequence
  Description of Artificial Sequence: Synthetic oligonucleotide
acuacuuguacugguagcu

SEQ ID NO: 1336502 - RNA, 19 nt, Artificial Sequence
  Description of Artificial Sequence: Synthetic oligonucleotide
aguacacucuugcauuucu

SEQ ID NO: 1336503 - RNA, 19 nt, Artificial Sequence
  Description of Artificial Sequence: Synthetic oligonucleotide
uuugaguuuugacccagua

SEQ ID NO: 1336504 - RNA, 19 nt, Artificial Sequence
  Description of Artificial Sequence: Synthetic oligonucleotide
gcacguaaacccuuuaaag

SEQ ID NO: 1336505 - RNA, 19 nt, Artificial Sequence
  Description of Artificial Sequence: Synthetic oligonucleotide
gccaauaccuuauacaauc

SEQ ID NO: 1336506 - RNA, 19 nt, Artificial Sequence
  Description of Artificial Sequence: Synthetic oligonucleotide
ucucuaagucacuaugcuc

SEQ ID NO: 1336507 - RNA, 19 nt, Artificial Sequence
  Description of Artificial Sequence: Synthetic oligonucleotide
ggcuauuagaaguugguuc

SEQ ID NO: 1336508 - RNA, 19 nt, Artificial Sequence
  Description of Artificial Sequence: Synthetic oligonucleotide
gagaugaggguuuacuaaa

SEQ ID NO: 1336509 - RNA, 19 nt, Artificial Sequence
  Description of Artificial Sequence: Synthetic oligonucleotide
ucuucggaauaguccgacg

SEQ ID NO: 1336510 - RNA, 19 nt, Artificial Sequence
  Description of Artificial Sequence: Synthetic oligonucleotide
gagguacuggauuugagua

SEQ ID NO: 1336511 - RNA, 19 nt, Artificial Sequence
  Description of Artificial Sequence: Synthetic oligonucleotide
guugaucucaguugggcga

SEQ ID NO: 1336512 - RNA, 19 nt, Artificial Sequence
  Description of Artificial Sequence: Synthetic oligonucleotide
aguugggcgacacucggcu

SEQ ID NO: 1336513 - RNA, 19 nt, Artificial Sequence
  Description of Artificial Sequence: Synthetic oligonucleotide
agcacguaaacccuuuaaa

SEQ ID NO: 1336514 - RNA, 19 nt, Artificial Sequence
  Description of Artificial Sequence: Synthetic oligonucleotide
uaagagcgaugcauauucc

SEQ ID NO: 1336515 - RNA, 19 nt, Artificial Sequence
  Description of Artificial Sequence: Synthetic oligonucleotide
auuaacucaucccgugcca

SEQ ID NO: 1336516 - RNA, 19 nt, Artificial Sequence
  Description of Artificial Sequence: Synthetic oligonucleotide
agguuuucaauccuccaaa

SEQ ID NO: 1336517 - RNA, 19 nt, Artificial Sequence
  Description of Artificial Sequence: Synthetic oligonucleotide
gaaacgaguacuuggcugu

SEQ ID NO: 1336518 - RNA, 19 nt, Artificial Sequence
  Description of Artificial Sequence: Synthetic oligonucleotide
aaauaacggcagucucauc

SEQ ID NO: 1336519 - RNA, 19 nt, Artificial Sequence
  Description of Artificial Sequence: Synthetic oligonucleotide
ccauuauguaauauagagc

SEQ ID NO: 1336520 - RNA, 19 nt, Artificial Sequence
  Description of Artificial Sequence: Synthetic oligonucleotide
gggaguaugauuuguuuac

SEQ ID NO: 1336521 - RNA, 19 nt, Artificial Sequence
  Description of Artificial Sequence: Synthetic oligonucleotide
uggacaguauaagaaugug

SEQ ID NO: 1336522 - RNA, 19 nt, Artificial Sequence
  Description of Artificial Sequence: Synthetic oligonucleotide
ggaaacgaguacuuggcug

SEQ ID NO: 1336523 - RNA, 19 nt, Artificial Sequence
  Description of Artificial Sequence: Synthetic oligonucleotide
cacauagauuuaaggcucc

SEQ ID NO: 1336524 - RNA, 19 nt, Artificial Sequence
  Description of Artificial Sequence: Synthetic oligonucleotide
uuaacaugugccugcugaa

SEQ ID NO: 1336525 - RNA, 19 nt, Artificial Sequence
  Description of Artificial Sequence: Synthetic oligonucleotide
uuggaguggaaacgaguac

SEQ ID NO: 1336526 - RNA, 19 nt, Artificial Sequence
  Description of Artificial Sequence: Synthetic oligonucleotide
acccuuuaaaggcaaaauu

SEQ ID NO: 1336527 - RNA, 19 nt, Artificial Sequence
  Description of Artificial Sequence: Synthetic oligonucleotide
aauaguccgacggcaucag

SEQ ID NO: 1336528 - RNA, 19 nt, Artificial Sequence
  Description of Artificial Sequence: Synthetic oligonucleotide
auacaaucuaguugugaaa

SEQ ID NO: 1336529 - RNA, 19 nt, Artificial Sequence
  Description of Artificial Sequence: Synthetic oligonucleotide
acuaugcucaagguuaaga

SEQ ID NO: 1336530 - RNA, 19 nt, Artificial Sequence
  Description of Artificial Sequence: Synthetic oligonucleotide
ucuugacuggggaguauga

SEQ ID NO: 1336531 - RNA, 19 nt, Artificial Sequence
  Description of Artificial Sequence: Synthetic oligonucleotide
auaccuuauacaaucuagu

SEQ ID NO: 1336532 - RNA, 19 nt, Artificial Sequence
  Description of Artificial Sequence: Synthetic oligonucleotide
cacuacuuguacugguagc

SEQ ID NO: 1336533 - RNA, 19 nt, Artificial Sequence
  Description of Artificial Sequence: Synthetic oligonucleotide
cagccaauaccuuauacaa

SEQ ID NO: 1336534 - RNA, 19 nt, Artificial Sequence
  Description of Artificial Sequence: Synthetic oligonucleotide
acaugugccugcugaauga

SEQ ID NO: 1336535 - RNA, 19 nt, Artificial Sequence
  Description of Artificial Sequence: Synthetic oligonucleotide
uggaaacgaguacuuggcu

SEQ ID NO: 1336536 - RNA, 19 nt, Artificial Sequence
  Description of Artificial Sequence: Synthetic oligonucleotide
aaucuaguugugaaaugaa

SEQ ID NO: 1336537 - RNA, 19 nt, Artificial Sequence
  Description of Artificial Sequence: Synthetic oligonucleotide
caaucuaguugugaaauga

SEQ ID NO: 1336538 - RNA, 19 nt, Artificial Sequence
  Description of Artificial Sequence: Synthetic oligonucleotide
caguaguucaacagucaug

SEQ ID NO: 1336539 - RNA, 19 nt, Artificial Sequence
  Description of Artificial Sequence: Synthetic oligonucleotide
ugaccagaauguuuucccu

SEQ ID NO: 1336540 - RNA, 19 nt, Artificial Sequence
  Description of Artificial Sequence: Synthetic oligonucleotide
cuggacuugcuugagguac

SEQ ID NO: 1336541 - RNA, 19 nt, Artificial Sequence
  Description of Artificial Sequence: Synthetic oligonucleotide
uucguuggucaucuugcac

SEQ ID NO: 1336542 - RNA, 19 nt, Artificial Sequence
  Description of Artificial Sequence: Synthetic oligonucleotide
uucauauuguuuccaucuu

SEQ ID NO: 1336543 - RNA, 19 nt, Artificial Sequence
  Description of Artificial Sequence: Synthetic oligonucleotide
ggcacauuuaauuuaauau

SEQ ID NO: 1336544 - RNA, 19 nt, Artificial Sequence
  Description of Artificial Sequence: Synthetic oligonucleotide
caaagcuugaacauaugcu

SEQ ID NO: 1336545 - RNA, 19 nt, Artificial Sequence
  Description of Artificial Sequence: Synthetic oligonucleotide
guuuguacaguccucggua

SEQ ID NO: 1336546 - RNA, 19 nt, Artificial Sequence
  Description of Artificial Sequence: Synthetic oligonucleotide
uaccuaucaggcguaaacu

SEQ ID NO: 1336547 - RNA, 19 nt, Artificial Sequence
  Description of Artificial Sequence: Synthetic oligonucleotide
gguucuuagcacguaaacc

SEQ ID NO: 1336548 - RNA, 19 nt, Artificial Sequence
  Description of Artificial Sequence: Synthetic oligonucleotide
cucgaggugggacugucag

SEQ ID NO: 1336549 - RNA, 19 nt, Artificial Sequence
  Description of Artificial Sequence: Synthetic oligonucleotide
cuuauacaaucuaguugug

SEQ ID NO: 1336550 - RNA, 19 nt, Artificial Sequence
  Description of Artificial Sequence: Synthetic oligonucleotide
ggauuugaguaguacacuc

SEQ ID NO: 1336551 - RNA, 19 nt, Artificial Sequence
  Description of Artificial Sequence: Synthetic oligonucleotide
guggaaacgaguacuuggc

SEQ ID NO: 1336552 - RNA, 19 nt, Artificial Sequence
  Description of Artificial Sequence: Synthetic oligonucleotide
uugacuggggaguaugauu

SEQ ID NO: 1336553 - RNA, 19 nt, Artificial Sequence
  Description of Artificial Sequence: Synthetic oligonucleotide
uagcacguaaacccuuuaa

SEQ ID NO: 1336554 - RNA, 19 nt, Artificial Sequence
  Description of Artificial Sequence: Synthetic oligonucleotide
uggauuugaguaguacacu

SEQ ID NO: 1336555 - RNA, 19 nt, Artificial Sequence
  Description of Artificial Sequence: Synthetic oligonucleotide
ucggaauaguccgacggca

SEQ ID NO: 1336556 - RNA, 19 nt, Artificial Sequence
  Description of Artificial Sequence: Synthetic oligonucleotide
aagguucaccuguaaguuu

SEQ ID NO: 1336557 - RNA, 19 nt, Artificial Sequence
  Description of Artificial Sequence: Synthetic oligonucleotide
cuuggaguggaaacgagua

SEQ ID NO: 1336558 - RNA, 19 nt, Artificial Sequence
  Description of Artificial Sequence: Synthetic oligonucleotide
ugcuguugcugcuuuaauu

SEQ ID NO: 1336559 - RNA, 19 nt, Artificial Sequence
  Description of Artificial Sequence: Synthetic oligonucleotide
gaauaguccgacggcauca

SEQ ID NO: 1336560 - RNA, 19 nt, Artificial Sequence
  Description of Artificial Sequence: Synthetic oligonucleotide
gguuuacuaaauaacggca

SEQ ID NO: 1336561 - RNA, 19 nt, Artificial Sequence
  Description of Artificial Sequence: Synthetic oligonucleotide
cucaagguuaagagcgaug

SEQ ID NO: 1336562 - RNA, 19 nt, Artificial Sequence
  Description of Artificial Sequence: Synthetic oligonucleotide
uuuugacccaguaguucaa

SEQ ID NO: 1336563 - RNA, 19 nt, Artificial Sequence
  Description of Artificial Sequence: Synthetic oligonucleotide
acguuuguacaguccucgg

SEQ ID NO: 1336564 - RNA, 19 nt, Artificial Sequence
  Description of Artificial Sequence: Synthetic oligonucleotide
uugaucgcugggucuacca

SEQ ID NO: 1336565 - RNA, 19 nt, Artificial Sequence
  Description of Artificial Sequence: Synthetic oligonucleotide
caguccucgguaaagauua

SEQ ID NO: 1336566 - RNA, 19 nt, Artificial Sequence
  Description of Artificial Sequence: Synthetic oligonucleotide
aaacgaguacuuggcuguc

SEQ ID NO: 1336567 - RNA, 19 nt, Artificial Sequence
  Description of Artificial Sequence: Synthetic oligonucleotide
ugcacuacuuguacuggua

SEQ ID NO: 1336568 - RNA, 19 nt, Artificial Sequence
  Description of Artificial Sequence: Synthetic oligonucleotide
agcgaugcauauuccauuu

SEQ ID NO: 1336569 - RNA, 19 nt, Artificial Sequence
  Description of Artificial Sequence: Synthetic oligonucleotide
ucuaagucacuaugcucaa

SEQ ID NO: 1336570 - RNA, 19 nt, Artificial Sequence
  Description of Artificial Sequence: Synthetic oligonucleotide
cauuugaguuuugacccag

SEQ ID NO: 1336571 - RNA, 19 nt, Artificial Sequence
  Description of Artificial Sequence: Synthetic oligonucleotide
ucacuaugcucaagguuaa

SEQ ID NO: 1336572 - RNA, 19 nt, Artificial Sequence
  Description of Artificial Sequence: Synthetic oligonucleotide
uucgauacaaaaggcccaa

SEQ ID NO: 1336573 - RNA, 19 nt, Artificial Sequence
  Description of Artificial Sequence: Synthetic oligonucleotide
ugcuaaucgcaugaccaga

SEQ ID NO: 1336574 - RNA, 19 nt, Artificial Sequence
  Description of Artificial Sequence: Synthetic oligonucleotide
gaguaugauuuguuuaccu

SEQ ID NO: 1336575 - RNA, 19 nt, Artificial Sequence
  Description of Artificial Sequence: Synthetic oligonucleotide
uguuuaccuaucaggcgua

SEQ ID NO: 1336576 - RNA, 19 nt, Artificial Sequence
  Description of Artificial Sequence: Synthetic oligonucleotide
ucuuagcacguaaacccuu

SEQ ID NO: 1336577 - RNA, 19 nt, Artificial Sequence
  Description of Artificial Sequence: Synthetic oligonucleotide
cacagccaauaccuuauac

SEQ ID NO: 1336578 - RNA, 19 nt, Artificial Sequence
  Description of Artificial Sequence: Synthetic oligonucleotide
accuaucaggcguaaacuu

SEQ ID NO: 1336579 - RNA, 19 nt, Artificial Sequence
  Description of Artificial Sequence: Synthetic oligonucleotide
ugcucaagguuaagagcga

SEQ ID NO: 1336580 - RNA, 19 nt, Artificial Sequence
  Description of Artificial Sequence: Synthetic oligonucleotide
gaguacuuggcugucccac

SEQ ID NO: 1336581 - RNA, 19 nt, Artificial Sequence
  Description of Artificial Sequence: Synthetic oligonucleotide
uaucaggcguaaacuucca

SEQ ID NO: 1336582 - RNA, 19 nt, Artificial Sequence
  Description of Artificial Sequence: Synthetic oligonucleotide
auucgauacaaaaggccca

SEQ ID NO: 1336583 - RNA, 19 nt, Artificial Sequence
  Description of Artificial Sequence: Synthetic oligonucleotide
gaguaguacacucuugcau

SEQ ID NO: 1336584 - RNA, 19 nt, Artificial Sequence
  Description of Artificial Sequence: Synthetic oligonucleotide
ggaagucuugacuggggag

SEQ ID NO: 1336585 - RNA, 19 nt, Artificial Sequence
  Description of Artificial Sequence: Synthetic oligonucleotide
uucccuucgugcagacucc

SEQ ID NO: 1336586 - RNA, 19 nt, Artificial Sequence
  Description of Artificial Sequence: Synthetic oligonucleotide
uaacaccaacgacaaugcu

SEQ ID NO: 1336587 - RNA, 19 nt, Artificial Sequence
  Description of Artificial Sequence: Synthetic oligonucleotide
aucaggcguaaacuuccag

SEQ ID NO: 1336588 - RNA, 19 nt, Artificial Sequence
  Description of Artificial Sequence: Synthetic oligonucleotide
agucucaucacagccaaua

SEQ ID NO: 1336589 - RNA, 19 nt, Artificial Sequence
  Description of Artificial Sequence: Synthetic oligonucleotide
cugaagugugagaccacac

SEQ ID NO: 1336590 - RNA, 19 nt, Artificial Sequence
  Description of Artificial Sequence: Synthetic oligonucleotide
uggacuugcuugagguacu

SEQ ID NO: 1336591 - RNA, 19 nt, Artificial Sequence
  Description of Artificial Sequence: Synthetic oligonucleotide
gguugcuaaucgcaugacc

SEQ ID NO: 1336592 - RNA, 19 nt, Artificial Sequence
  Description of Artificial Sequence: Synthetic oligonucleotide
gauucccuuaagccaguca

SEQ ID NO: 1336593 - RNA, 19 nt, Artificial Sequence
  Description of Artificial Sequence: Synthetic oligonucleotide
uggggaguaugauuuguuu

SEQ ID NO: 1336594 - RNA, 19 nt, Artificial Sequence
  Description of Artificial Sequence: Synthetic oligonucleotide
aaguugaucgcugggucua

SEQ ID NO: 1336595 - RNA, 19 nt, Artificial Sequence
  Description of Artificial Sequence: Synthetic oligonucleotide
auaguccgacggcaucagg

SEQ ID NO: 1336596 - RNA, 19 nt, Artificial Sequence
  Description of Artificial Sequence: Synthetic oligonucleotide
guugguucuuagcacguaa

SEQ ID NO: 1336597 - RNA, 19 nt, Artificial Sequence
  Description of Artificial Sequence: Synthetic oligonucleotide
auggcuauuagaaguuggu

SEQ ID NO: 1336598 - RNA, 19 nt, Artificial Sequence
  Description of Artificial Sequence: Synthetic oligonucleotide
acugucagggaagucuuga

SEQ ID NO: 1336599 - RNA, 19 nt, Artificial Sequence
  Description of Artificial Sequence: Synthetic oligonucleotide
uuuugggcuuguuccaguu

SEQ ID NO: 1336600 - RNA, 19 nt, Artificial Sequence
  Description of Artificial Sequence: Synthetic oligonucleotide
uacugguagcuaugacuug

SEQ ID NO: 1336601 - RNA, 19 nt, Artificial Sequence
  Description of Artificial Sequence: Synthetic oligonucleotide
gacggcaucaggccucuga

SEQ ID NO: 1336602 - RNA, 19 nt, Artificial Sequence
  Description of Artificial Sequence: Synthetic oligonucleotide
uuagcacguaaacccuuua

SEQ ID NO: 1336603 - RNA, 19 nt, Artificial Sequence
  Description of Artificial Sequence: Synthetic oligonucleotide
gcuaugacuugauugucuc

SEQ ID NO: 1336604 - RNA, 19 nt, Artificial Sequence
  Description of Artificial Sequence: Synthetic oligonucleotide
ucgcaugaccagaauguuu

SEQ ID NO: 1336605 - RNA, 19 nt, Artificial Sequence
  Description of Artificial Sequence: Synthetic oligonucleotide
uuaacucaucccgugccau

SEQ ID NO: 1336606 - RNA, 19 nt, Artificial Sequence
  Description of Artificial Sequence: Synthetic oligonucleotide
cgugccauaacuuugaagu

SEQ ID NO: 1336607 - RNA, 19 nt, Artificial Sequence
  Description of Artificial Sequence: Synthetic oligonucleotide
gcacuacuuguacugguag

SEQ ID NO: 1336608 - RNA, 19 nt, Artificial Sequence
  Description of Artificial Sequence: Synthetic oligonucleotide
gaguggaaacgaguacuug

SEQ ID NO: 1336609 - RNA, 19 nt, Artificial Sequence
  Description of Artificial Sequence: Synthetic oligonucleotide
agcuaugacuugauugucu

SEQ ID NO: 1336610 - RNA, 19 nt, Artificial Sequence
  Description of Artificial Sequence: Synthetic oligonucleotide
gauuugaguaguacacucu

SEQ ID NO: 1336611 - RNA, 19 nt, Artificial Sequence
  Description of Artificial Sequence: Synthetic oligonucleotide
aucgcugggucuaccauug

SEQ ID NO: 1336612 - RNA, 19 nt, Artificial Sequence
  Description of Artificial Sequence: Synthetic oligonucleotide
gacuggggaguaugauuug

SEQ ID NO: 1336613 - RNA, 19 nt, Artificial Sequence
  Description of Artificial Sequence: Synthetic oligonucleotide
agagcgaugcauauuccau

SEQ ID NO: 1336614 - RNA, 19 nt, Artificial Sequence
  Description of Artificial Sequence: Synthetic oligonucleotide
cugggucuaccauuguuga

SEQ ID NO: 1336615 - RNA, 19 nt, Artificial Sequence
  Description of Artificial Sequence: Synthetic oligonucleotide
guucaacagucaugaaguc

SEQ ID NO: 1336616 - RNA, 19 nt, Artificial Sequence
  Description of Artificial Sequence: Synthetic oligonucleotide
auguaauauagagcucaga

SEQ ID NO: 1336617 - RNA, 19 nt, Artificial Sequence
  Description of Artificial Sequence: Synthetic oligonucleotide
uccgacggcaucaggccuc

SEQ ID NO: 1336618 - RNA, 19 nt, Artificial Sequence
  Description of Artificial Sequence: Synthetic oligonucleotide
acauguucuagaaggggaa

SEQ ID NO: 1336619 - RNA, 19 nt, Artificial Sequence
  Description of Artificial Sequence: Synthetic oligonucleotide
uaacaugugccugcugaau

SEQ ID NO: 1336620 - RNA, 19 nt, Artificial Sequence
  Description of Artificial Sequence: Synthetic oligonucleotide
cuuucucgaggugggacug

SEQ ID NO: 1336621 - RNA, 19 nt, Artificial Sequence
  Description of Artificial Sequence: Synthetic oligonucleotide
gucuugacuggggaguaug

SEQ ID NO: 1336622 - RNA, 19 nt, Artificial Sequence
  Description of Artificial Sequence: Synthetic oligonucleotide
gggucuaccauuguugauc

SEQ ID NO: 1336623 - RNA, 19 nt, Artificial Sequence
  Description of Artificial Sequence: Synthetic oligonucleotide
uauagagcucagagcuaau

SEQ ID NO: 1336624 - RNA, 19 nt, Artificial Sequence
  Description of Artificial Sequence: Synthetic oligonucleotide
aagugugagaccacaccuu

SEQ ID NO: 1336625 - RNA, 19 nt, Artificial Sequence
  Description of Artificial Sequence: Synthetic oligonucleotide
ggaguaugauuuguuuacc

SEQ ID NO: 1336626 - RNA, 19 nt, Artificial Sequence
  Description of Artificial Sequence: Synthetic oligonucleotide
agguucaccuguaaguuuu

SEQ ID NO: 1336627 - RNA, 19 nt, Artificial Sequence
  Description of Artificial Sequence: Synthetic oligonucleotide
ucucgaggugggacuguca

SEQ ID NO: 1336628 - RNA, 19 nt, Artificial Sequence
  Description of Artificial Sequence: Synthetic oligonucleotide
caugugccugcugaaugag

SEQ ID NO: 1336629 - RNA, 19 nt, Artificial Sequence
  Description of Artificial Sequence: Synthetic oligonucleotide
aguugaucgcugggucuac

SEQ ID NO: 1336630 - RNA, 19 nt, Artificial Sequence
  Description of Artificial Sequence: Synthetic oligonucleotide
uggcuauuagaaguugguu

SEQ ID NO: 1336631 - RNA, 19 nt, Artificial Sequence
  Description of Artificial Sequence: Synthetic oligonucleotide
guacuuggcugucccacca

SEQ ID NO: 1336632 - RNA, 19 nt, Artificial Sequence
  Description of Artificial Sequence: Synthetic oligonucleotide
caauaccuuauacaaucua

SEQ ID NO: 1336633 - RNA, 19 nt, Artificial Sequence
  Description of Artificial Sequence: Synthetic oligonucleotide
cuggacaguauaagaaugu

SEQ ID NO: 1336634 - RNA, 19 nt, Artificial Sequence
  Description of Artificial Sequence: Synthetic oligonucleotide
cacccuuuccagcccgagg

SEQ ID NO: 1336635 - RNA, 19 nt, Artificial Sequence
  Description of Artificial Sequence: Synthetic oligonucleotide
guaaacccuuuaaaggcaa

SEQ ID NO: 1336636 - RNA, 19 nt, Artificial Sequence
  Description of Artificial Sequence: Synthetic oligonucleotide
cuugagguacuggauuuga

SEQ ID NO: 1336637 - RNA, 19 nt, Artificial Sequence
  Description of Artificial Sequence: Synthetic oligonucleotide
uagcuaugacuugauuguc

SEQ ID NO: 1336638 - RNA, 19 nt, Artificial Sequence
  Description of Artificial Sequence: Synthetic oligonucleotide
auuuaacaccaacgacaau

SEQ ID NO: 1336639 - RNA, 19 nt, Artificial Sequence
  Description of Artificial Sequence: Synthetic oligonucleotide
auguucuagaaggggaauu

SEQ ID NO: 1336640 - RNA, 19 nt, Artificial Sequence
  Description of Artificial Sequence: Synthetic oligonucleotide
caguugggcgacacucggc

SEQ ID NO: 1336641 - RNA, 19 nt, Artificial Sequence
  Description of Artificial Sequence: Synthetic oligonucleotide
cauaacugauguacagugu

SEQ ID NO: 1336642 - RNA, 19 nt, Artificial Sequence
  Description of Artificial Sequence: Synthetic oligonucleotide
guacugguagcuaugacuu

SEQ ID NO: 1336643 - RNA, 19 nt, Artificial Sequence
  Description of Artificial Sequence: Synthetic oligonucleotide
ugguagcuaugacuugauu

SEQ ID NO: 1336644 - RNA, 19 nt, Artificial Sequence
  Description of Artificial Sequence: Synthetic oligonucleotide
accaacgacaaugcuguuu

SEQ ID NO: 1336645 - RNA, 19 nt, Artificial Sequence
  Description of Artificial Sequence: Synthetic oligonucleotide
agguuaagagcgaugcaua

SEQ ID NO: 1336646 - RNA, 19 nt, Artificial Sequence
  Description of Artificial Sequence: Synthetic oligonucleotide
ugggucuaccauuguugau

SEQ ID NO: 1336647 - RNA, 19 nt, Artificial Sequence
  Description of Artificial Sequence: Synthetic oligonucleotide
ggggaguaugauuuguuua

SEQ ID NO: 1336648 - RNA, 19 nt, Artificial Sequence
  Description of Artificial Sequence: Synthetic oligonucleotide
ucggagguggccucuucuu

SEQ ID NO: 1336649 - RNA, 19 nt, Artificial Sequence
  Description of Artificial Sequence: Synthetic oligonucleotide
ugguugcuaaucgcaugac

SEQ ID NO: 1336650 - RNA, 19 nt, Artificial Sequence
  Description of Artificial Sequence: Synthetic oligonucleotide
cagucuuauuggcauaacu

SEQ ID NO: 1336651 - RNA, 19 nt, Artificial Sequence
  Description of Artificial Sequence: Synthetic oligonucleotide
cuuugaagucuguuucacu

SEQ ID NO: 1336652 - RNA, 19 nt, Artificial Sequence
  Description of Artificial Sequence: Synthetic oligonucleotide
acaguccucgguaaagauu

SEQ ID NO: 1336653 - RNA, 19 nt, Artificial Sequence
  Description of Artificial Sequence: Synthetic oligonucleotide
uggucaucuugcacccuuu

SEQ ID NO: 1336654 - RNA, 19 nt, Artificial Sequence
  Description of Artificial Sequence: Synthetic oligonucleotide
guugggcgacacucggcug

SEQ ID NO: 1336655 - RNA, 19 nt, Artificial Sequence
  Description of Artificial Sequence: Synthetic oligonucleotide
cauuugaauuaagaucugu

SEQ ID NO: 1336656 - RNA, 19 nt, Artificial Sequence
  Description of Artificial Sequence: Synthetic oligonucleotide
auuugaguuuugacccagu

SEQ ID NO: 1336657 - RNA, 19 nt, Artificial Sequence
  Description of Artificial Sequence: Synthetic oligonucleotide
ccccauuuaacaccaacga

SEQ ID NO: 1336658 - RNA, 19 nt, Artificial Sequence
  Description of Artificial Sequence: Synthetic oligonucleotide
gaagucuguuucacucaga

SEQ ID NO: 1336659 - RNA, 19 nt, Artificial Sequence
  Description of Artificial Sequence: Synthetic oligonucleotide
uccccucuauuuucuucaa

SEQ ID NO: 1336660 - RNA, 19 nt, Artificial Sequence
  Description of Artificial Sequence: Synthetic oligonucleotide
ccaacgacaaugcuguuua

SEQ ID NO: 1336661 - RNA, 19 nt, Artificial Sequence
  Description of Artificial Sequence: Synthetic oligonucleotide
agccaauaccuuauacaau

SEQ ID NO: 1336662 - RNA, 19 nt, Artificial Sequence
  Description of Artificial Sequence: Synthetic oligonucleotide
guugaucgcugggucuacc

SEQ ID NO: 1336663 - RNA, 19 nt, Artificial Sequence
  Description of Artificial Sequence: Synthetic oligonucleotide
uucucgaggugggacuguc

SEQ ID NO: 1336664 - RNA, 19 nt, Artificial Sequence
  Description of Artificial Sequence: Synthetic oligonucleotide
aucgcaugaccagaauguu

SEQ ID NO: 1336665 - RNA, 19 nt, Artificial Sequence
  Description of Artificial Sequence: Synthetic oligonucleotide
ggucuaccauuguugaucu

SEQ ID NO: 1336666 - RNA, 19 nt, Artificial Sequence
  Description of Artificial Sequence: Synthetic oligonucleotide
gagcgaugcauauuccauu

SEQ ID NO: 1336667 - RNA, 19 nt, Artificial Sequence
  Description of Artificial Sequence: Synthetic oligonucleotide
gguacuggauuugaguagu

SEQ ID NO: 1336668 - RNA, 19 nt, Artificial Sequence
  Description of Artificial Sequence: Synthetic oligonucleotide
acaggccgaggccgcgccg

SEQ ID NO: 1336669 - RNA, 19 nt, Artificial Sequence
  Description of Artificial Sequence: Synthetic oligonucleotide
uuucucgaggugggacugu

SEQ ID NO: 1336670 - RNA, 19 nt, Artificial Sequence
  Description of Artificial Sequence: Synthetic oligonucleotide
guaguacacucuugcauuu

SEQ ID NO: 1336671 - RNA, 19 nt, Artificial Sequence
  Description of Artificial Sequence: Synthetic oligonucleotide
ccgugccauaacuuugaag

SEQ ID NO: 1336672 - RNA, 19 nt, Artificial Sequence
  Description of Artificial Sequence: Synthetic oligonucleotide
gguuaagagcgaugcauau

SEQ ID NO: 1336673 - RNA, 19 nt, Artificial Sequence
  Description of Artificial Sequence: Synthetic oligonucleotide
cuuagcacguaaacccuuu

SEQ ID NO: 1336674 - RNA, 19 nt, Artificial Sequence
  Description of Artificial Sequence: Synthetic oligonucleotide
aguugguucuuagcacgua

SEQ ID NO: 1336675 - RNA, 19 nt, Artificial Sequence
  Description of Artificial Sequence: Synthetic oligonucleotide
gcuaaucgcaugaccagaa

SEQ ID NO: 1336676 - RNA, 19 nt, Artificial Sequence
  Description of Artificial Sequence: Synthetic oligonucleotide
gugugagaccacaccuuca

SEQ ID NO: 1336677 - RNA, 19 nt, Artificial Sequence
  Description of Artificial Sequence: Synthetic oligonucleotide
uuuucggagguggccucuu

SEQ ID NO: 1336678 - RNA, 19 nt, Artificial Sequence
  Description of Artificial Sequence: Synthetic oligonucleotide
cagaauguuuucccuucgu

SEQ ID NO: 1336679 - RNA, 19 nt, Artificial Sequence
  Description of Artificial Sequence: Synthetic oligonucleotide
gaguuuugacccaguaguu

SEQ ID NO: 1336680 - RNA, 19 nt, Artificial Sequence
  Description of Artificial Sequence: Synthetic oligonucleotide
guuaagagcgaugcauauu

SEQ ID NO: 1336681 - RNA, 19 nt, Artificial Sequence
  Description of Artificial Sequence: Synthetic oligonucleotide
ugauugucucauggcuauu

SEQ ID NO: 1336682 - RNA, 19 nt, Artificial Sequence
  Description of Artificial Sequence: Synthetic oligonucleotide
ucgcugggucuaccauugu

SEQ ID NO: 1336683 - RNA, 19 nt, Artificial Sequence
  Description of Artificial Sequence: Synthetic oligonucleotide
cuacuuguacugguagcua

SEQ ID NO: 1336684 - RNA, 19 nt, Artificial Sequence
  Description of Artificial Sequence: Synthetic oligonucleotide
guuuaccuaucaggcguaa

SEQ ID NO: 1336685 - RNA, 19 nt, Artificial Sequence
  Description of Artificial Sequence: Synthetic oligonucleotide
gcuuucucgaggugggacu

SEQ ID NO: 1336686 - RNA, 19 nt, Artificial Sequence
  Description of Artificial Sequence: Synthetic oligonucleotide
cccaguaguucaacaguca

SEQ ID NO: 1336687 - RNA, 19 nt, Artificial Sequence
  Description of Artificial Sequence: Synthetic oligonucleotide
ccuguaaguuuuacauuaa

SEQ ID NO: 1336688 - RNA, 19 nt, Artificial Sequence
  Description of Artificial Sequence: Synthetic oligonucleotide
gccagucacaucauuugaa

SEQ ID NO: 1336689 - RNA, 19 nt, Artificial Sequence
  Description of Artificial Sequence: Synthetic oligonucleotide
gagguucuucguuggucau

SEQ ID NO: 1336690 - RNA, 19 nt, Artificial Sequence
  Description of Artificial Sequence: Synthetic oligonucleotide
cuaaucgcaugaccagaau

SEQ ID NO: 1336691 - RNA, 19 nt, Artificial Sequence
  Description of Artificial Sequence: Synthetic oligonucleotide
ugggacugucagggaaguc

SEQ ID NO: 1336692 - RNA, 19 nt, Artificial Sequence
  Description of Artificial Sequence: Synthetic oligonucleotide
ccaauaccuuauacaaucu

SEQ ID NO: 1336693 - RNA, 19 nt, Artificial Sequence
  Description of Artificial Sequence: Synthetic oligonucleotide
caacgacaaugcuguuuaa

SEQ ID NO: 1336694 - RNA, 19 nt, Artificial Sequence
  Description of Artificial Sequence: Synthetic oligonucleotide
cuugacuggggaguaugau

SEQ ID NO: 1336695 - RNA, 19 nt, Artificial Sequence
  Description of Artificial Sequence: Synthetic oligonucleotide
cauguucuagaaggggaau

SEQ ID NO: 1336696 - RNA, 19 nt, Artificial Sequence
  Description of Artificial Sequence: Synthetic oligonucleotide
guccgacggcaucaggccu

SEQ ID NO: 1336697 - RNA, 19 nt, Artificial Sequence
  Description of Artificial Sequence: Synthetic oligonucleotide
gcuggacuugcuugaggua

SEQ ID NO: 1336698 - RNA, 19 nt, Artificial Sequence
  Description of Artificial Sequence: Synthetic oligonucleotide
aguccucgguaaagauuau

SEQ ID NO: 1336699 - RNA, 19 nt, Artificial Sequence
  Description of Artificial Sequence: Synthetic oligonucleotide
ccaguaguucaacagucau

SEQ ID NO: 1336700 - RNA, 19 nt, Artificial Sequence
  Description of Artificial Sequence: Synthetic oligonucleotide
gcgacacucggcugcugga

SEQ ID NO: 1336701 - RNA, 19 nt, Artificial Sequence
  Description of Artificial Sequence: Synthetic oligonucleotide
gugggacugucagggaagu

SEQ ID NO: 1336702 - RNA, 19 nt, Artificial Sequence
  Description of Artificial Sequence: Synthetic oligonucleotide
ggaguggaaacgaguacuu

SEQ ID NO: 1336703 - RNA, 19 nt, Artificial Sequence
  Description of Artificial Sequence: Synthetic oligonucleotide
ccuugguugcuaaucgcau

SEQ ID NO: 1336704 - RNA, 19 nt, Artificial Sequence
  Description of Artificial Sequence: Synthetic oligonucleotide
cccuucgugcagacuccug

SEQ ID NO: 1336705 - RNA, 19 nt, Artificial Sequence
  Description of Artificial Sequence: Synthetic oligonucleotide
gcguaaacuuccaggcacu

SEQ ID NO: 1336706 - RNA, 19 nt, Artificial Sequence
  Description of Artificial Sequence: Synthetic oligonucleotide
cguuuguacaguccucggu

SEQ ID NO: 1336707 - RNA, 19 nt, Artificial Sequence
  Description of Artificial Sequence: Synthetic oligonucleotide
gcucaagguuaagagcgau

SEQ ID NO: 1336708 - RNA, 19 nt, Artificial Sequence
  Description of Artificial Sequence: Synthetic oligonucleotide
cgaguacuuggcuguccca

SEQ ID NO: 1336709 - RNA, 19 nt, Artificial Sequence
  Description of Artificial Sequence: Synthetic oligonucleotide
ccccucuauuuucuucaaa

SEQ ID NO: 1336710 - RNA, 19 nt, Artificial Sequence
  Description of Artificial Sequence: Synthetic oligonucleotide
gcgccgccagucacacagg

SEQ ID NO: 1336711 - RNA, 19 nt, Artificial Sequence
  Description of Artificial Sequence: Synthetic oligonucleotide
gcgaugcauauuccauuuu

SEQ ID NO: 1336712 - RNA, 19 nt, Artificial Sequence
  Description of Artificial Sequence: Synthetic oligonucleotide
gcgggcgccgccagucaca

SEQ ID NO: 1336713 - RNA, 19 nt, Artificial Sequence
  Description of Artificial Sequence: Synthetic oligonucleotide
ccgaggcugcgcgggcgcc

SEQ ID NO: 1336714 - RNA, 19 nt, Artificial Sequence
  Description of Artificial Sequence: Synthetic oligonucleotide
cgcgggcgccgccagucac

SEQ ID NO: 1336715 - RNA, 19 nt, Artificial Sequence
  Description of Artificial Sequence: Synthetic oligonucleotide
caccaacgacaaugcuguu

SEQ ID NO: 1336716 - RNA, 19 nt, Artificial Sequence
  Description of Artificial Sequence: Synthetic oligonucleotide
cgggcgccgccagucacac

SEQ ID NO: 1336717 - RNA, 19 nt, Artificial Sequence
  Description of Artificial Sequence: Synthetic oligonucleotide
ccauuacaagcuggacagu

SEQ ID NO: 1336718 - RNA, 19 nt, Artificial Sequence
  Description of Artificial Sequence: Synthetic oligonucleotide
gggcgccgccagucacaca

SEQ ID NO: 1336719 - RNA, 19 nt, Artificial Sequence
  Description of Artificial Sequence: Synthetic oligonucleotide
aauagugcaaaauguauac

SEQ ID NO: 1336720 - RNA, 19 nt, Artificial Sequence
  Description of Artificial Sequence: Synthetic oligonucleotide
uuacuauaaauucagaagc

SEQ ID NO: 1336721 - RNA, 19 nt, Artificial Sequence
  Description of Artificial Sequence: Synthetic oligonucleotide
uuuuacuugaauauggacc

SEQ ID NO: 1336722 - RNA, 19 nt, Artificial Sequence
  Description of Artificial Sequence: Synthetic oligonucleotide
aaauauucaccucaucuac

SEQ ID NO: 1336723 - RNA, 19 nt, Artificial Sequence
  Description of Artificial Sequence: Synthetic oligonucleotide
uugaacaugaauaaaaccu

SEQ ID NO: 1336724 - RNA, 19 nt, Artificial Sequence
  Description of Artificial Sequence: Synthetic oligonucleotide
ucuaauucguagaucaugg

SEQ ID NO: 1336725 - RNA, 19 nt, Artificial Sequence
  Description of Artificial Sequence: Synthetic oligonucleotide
aaugcaaauauucaccuca

SEQ ID NO: 1336726 - RNA, 19 nt, Artificial Sequence
  Description of Artificial Sequence: Synthetic oligonucleotide
uuuacuugaauauggaccc

SEQ ID NO: 1336727 - RNA, 19 nt, Artificial Sequence
  Description of Artificial Sequence: Synthetic oligonucleotide
uuaagucucaguaacaaca

SEQ ID NO: 1336728 - RNA, 19 nt, Artificial Sequence
  Description of Artificial Sequence: Synthetic oligonucleotide
auauacaacaauuggcuac

SEQ ID NO: 1336729 - RNA, 19 nt, Artificial Sequence
  Description of Artificial Sequence: Synthetic oligonucleotide
uugaauauggaccccagag

SEQ ID NO: 1336730 - RNA, 19 nt, Artificial Sequence
  Description of Artificial Sequence: Synthetic oligonucleotide
aaucugacggcauaacagg

SEQ ID NO: 1336731 - RNA, 19 nt, Artificial Sequence
  Description of Artificial Sequence: Synthetic oligonucleotide
uuuaugaggcuacuguugg

SEQ ID NO: 1336732 - RNA, 19 nt, Artificial Sequence
  Description of Artificial Sequence: Synthetic oligonucleotide
uuaggcacaauuauuaagu

SEQ ID NO: 1336733 - RNA, 19 nt, Artificial Sequence
  Description of Artificial Sequence: Synthetic oligonucleotide
aucauaaccagguagauaa

SEQ ID NO: 1336734 - RNA, 19 nt, Artificial Sequence
  Description of Artificial Sequence: Synthetic oligonucleotide
ugcuaguagcaucagaacg

SEQ ID NO: 1336735 - RNA, 19 nt, Artificial Sequence
  Description of Artificial Sequence: Synthetic oligonucleotide
agcauuauuaugcugaacu

SEQ ID NO: 1336736 - RNA, 19 nt, Artificial Sequence
  Description of Artificial Sequence: Synthetic oligonucleotide
ugcauauacaacaauuggc

SEQ ID NO: 1336737 - RNA, 19 nt, Artificial Sequence
  Description of Artificial Sequence: Synthetic oligonucleotide
uaaucugacggcauaacag

SEQ ID NO: 1336738 - RNA, 19 nt, Artificial Sequence
  Description of Artificial Sequence: Synthetic oligonucleotide
uugcauauacaacaauugg

SEQ ID NO: 1336739 - RNA, 19 nt, Artificial Sequence
  Description of Artificial Sequence: Synthetic oligonucleotide
uuuauuaaaugugagcuca

SEQ ID NO: 1336740 - RNA, 19 nt, Artificial Sequence
  Description of Artificial Sequence: Synthetic oligonucleotide
uuaaaugugagcucacuca

SEQ ID NO: 1336741 - RNA, 19 nt, Artificial Sequence
  Description of Artificial Sequence: Synthetic oligonucleotide
auuaaaugugagcucacuc

SEQ ID NO: 1336742 - RNA, 19 nt, Artificial Sequence
  Description of Artificial Sequence: Synthetic oligonucleotide
agcguuaagucucaguaac

SEQ ID NO: 1336743 - RNA, 19 nt, Artificial Sequence
  Description of Artificial Sequence: Synthetic oligonucleotide
uaugcugaacucaguaugg

SEQ ID NO: 1336744 - RNA, 19 nt, Artificial Sequence
  Description of Artificial Sequence: Synthetic oligonucleotide
aaugcauauaguuugcaua

SEQ ID NO: 1336745 - RNA, 19 nt, Artificial Sequence
  Description of Artificial Sequence: Synthetic oligonucleotide
cauacuuugaacaugaaua

SEQ ID NO: 1336746 - RNA, 19 nt, Artificial Sequence
  Description of Artificial Sequence: Synthetic oligonucleotide
aaguguuggguacucuggc

SEQ ID NO: 1336747 - RNA, 19 nt, Artificial Sequence
  Description of Artificial Sequence: Synthetic oligonucleotide
uauaguuugcauauacaac

SEQ ID NO: 1336748 - RNA, 19 nt, Artificial Sequence
  Description of Artificial Sequence: Synthetic oligonucleotide
acguagauguucuugcccc

SEQ ID NO: 1336749 - RNA, 19 nt, Artificial Sequence
  Description of Artificial Sequence: Synthetic oligonucleotide
uacucuguugagaugaggc

SEQ ID NO: 1336750 - RNA, 19 nt, Artificial Sequence
  Description of Artificial Sequence: Synthetic oligonucleotide
agcaaaauuaugcauacau

SEQ ID NO: 1336751 - RNA, 19 nt, Artificial Sequence
  Description of Artificial Sequence: Synthetic oligonucleotide
auauaguuugcauauacaa

SEQ ID NO: 1336752 - RNA, 19 nt, Artificial Sequence
  Description of Artificial Sequence: Synthetic oligonucleotide
gaguaucauaaccagguag

SEQ ID NO: 1336753 - RNA, 19 nt, Artificial Sequence
  Description of Artificial Sequence: Synthetic oligonucleotide
uuuagugacgguuacucac

SEQ ID NO: 1336754 - RNA, 19 nt, Artificial Sequence
  Description of Artificial Sequence: Synthetic oligonucleotide
ucguagaucauggaaaugc

SEQ ID NO: 1336755 - RNA, 19 nt, Artificial Sequence
  Description of Artificial Sequence: Synthetic oligonucleotide
uuuucuagcucaagaaaca

SEQ ID NO: 1336756 - RNA, 19 nt, Artificial Sequence
  Description of Artificial Sequence: Synthetic oligonucleotide
ugagggauuccuuaaaagu

SEQ ID NO: 1336757 - RNA, 19 nt, Artificial Sequence
  Description of Artificial Sequence: Synthetic oligonucleotide
uacuuuaugaggcuacugu

SEQ ID NO: 1336758 - RNA, 19 nt, Artificial Sequence
  Description of Artificial Sequence: Synthetic oligonucleotide
uccuacaaccacuugguag

SEQ ID NO: 1336759 - RNA, 19 nt, Artificial Sequence
  Description of Artificial Sequence: Synthetic oligonucleotide
uacuauaaauucagaagca

SEQ ID NO: 1336760 - RNA, 19 nt, Artificial Sequence
  Description of Artificial Sequence: Synthetic oligonucleotide
ugugauuuccuacaaccac

SEQ ID NO: 1336761 - RNA, 19 nt, Artificial Sequence
  Description of Artificial Sequence: Synthetic oligonucleotide
uaauucguagaucauggaa

SEQ ID NO: 1336762 - RNA, 19 nt, Artificial Sequence
  Description of Artificial Sequence: Synthetic oligonucleotide
uagaucauggaaaugcaaa

SEQ ID NO: 1336763 - RNA, 19 nt, Artificial Sequence
  Description of Artificial Sequence: Synthetic oligonucleotide
cuaguggucagccucauac

SEQ ID NO: 1336764 - RNA, 19 nt, Artificial Sequence
  Description of Artificial Sequence: Synthetic oligonucleotide
agaacuccccucuaauucg

SEQ ID NO: 1336765 - RNA, 19 nt, Artificial Sequence
  Description of Artificial Sequence: Synthetic oligonucleotide
accccagaguaucauaacc

SEQ ID NO: 1336766 - RNA, 19 nt, Artificial Sequence
  Description of Artificial Sequence: Synthetic oligonucleotide
aaccccaugacacuaaaua

SEQ ID NO: 1336767 - RNA, 19 nt, Artificial Sequence
  Description of Artificial Sequence: Synthetic oligonucleotide
ucuccuaggggcaaaagaa

SEQ ID NO: 1336768 - RNA, 19 nt, Artificial Sequence
  Description of Artificial Sequence: Synthetic oligonucleotide
augaauaaaaccugucagu

SEQ ID NO: 1336769 - RNA, 19 nt, Artificial Sequence
  Description of Artificial Sequence: Synthetic oligonucleotide
aauucguagaucauggaaa

SEQ ID NO: 1336770 - RNA, 19 nt, Artificial Sequence
  Description of Artificial Sequence: Synthetic oligonucleotide
cauagaugccuuuagugac

SEQ ID NO: 1336771 - RNA, 19 nt, Artificial Sequence
  Description of Artificial Sequence: Synthetic oligonucleotide
auauguuguucuucuaaag

SEQ ID NO: 1336772 - RNA, 19 nt, Artificial Sequence
  Description of Artificial Sequence: Synthetic oligonucleotide
uacaaugggagcucuacac

SEQ ID NO: 1336773 - RNA, 19 nt, Artificial Sequence
  Description of Artificial Sequence: Synthetic oligonucleotide
cuacuguuggcauauguug

SEQ ID NO: 1336774 - RNA, 19 nt, Artificial Sequence
  Description of Artificial Sequence: Synthetic oligonucleotide
acaacaauuggcuacuuuu

SEQ ID NO: 1336775 - RNA, 19 nt, Artificial Sequence
  Description of Artificial Sequence: Synthetic oligonucleotide
aacaugaauaaaaccuguc

SEQ ID NO: 1336776 - RNA, 19 nt, Artificial Sequence
  Description of Artificial Sequence: Synthetic oligonucleotide
aaccugucaguaccggugg

SEQ ID NO: 1336777 - RNA, 19 nt, Artificial Sequence
  Description of Artificial Sequence: Synthetic oligonucleotide
cugggaagaccccugaacg

SEQ ID NO: 1336778 - RNA, 19 nt, Artificial Sequence
  Description of Artificial Sequence: Synthetic oligonucleotide
auguauacuggcuucaaaa

SEQ ID NO: 1336779 - RNA, 19 nt, Artificial Sequence
  Description of Artificial Sequence: Synthetic oligonucleotide
agugcaaaauguauacugg

SEQ ID NO: 1336780 - RNA, 19 nt, Artificial Sequence
  Description of Artificial Sequence: Synthetic oligonucleotide
uaaaagcauuauuaugcug

SEQ ID NO: 1336781 - RNA, 19 nt, Artificial Sequence
  Description of Artificial Sequence: Synthetic oligonucleotide
uuacucacuggcuuucucc

SEQ ID NO: 1336782 - RNA, 19 nt, Artificial Sequence
  Description of Artificial Sequence: Synthetic oligonucleotide
uagcucaagaaacauuaga

SEQ ID NO: 1336783 - RNA, 19 nt, Artificial Sequence
  Description of Artificial Sequence: Synthetic oligonucleotide
auacuuugaacaugaauaa

SEQ ID NO: 1336784 - RNA, 19 nt, Artificial Sequence
  Description of Artificial Sequence: Synthetic oligonucleotide
accauacaaccuuuauuac

SEQ ID NO: 1336785 - RNA, 19 nt, Artificial Sequence
  Description of Artificial Sequence: Synthetic oligonucleotide
uauacaacaauuggcuacu

SEQ ID NO: 1336786 - RNA, 19 nt, Artificial Sequence
  Description of Artificial Sequence: Synthetic oligonucleotide
augcauauaguuugcauau

SEQ ID NO: 1336787 - RNA, 19 nt, Artificial Sequence
  Description of Artificial Sequence: Synthetic oligonucleotide
acagcguuaagucucagua

SEQ ID NO: 1336788 - RNA, 19 nt, Artificial Sequence
  Description of Artificial Sequence: Synthetic oligonucleotide
uucuccuaggggcaaaaga

SEQ ID NO: 1336789 - RNA, 19 nt, Artificial Sequence
  Description of Artificial Sequence: Synthetic oligonucleotide
gguagauaaguucacaaga

SEQ ID NO: 1336790 - RNA, 19 nt, Artificial Sequence
  Description of Artificial Sequence: Synthetic oligonucleotide
uacuuuacacuaucugccc

SEQ ID NO: 1336791 - RNA, 19 nt, Artificial Sequence
  Description of Artificial Sequence: Synthetic oligonucleotide
aguaucauaaccagguaga

SEQ ID NO: 1336792 - RNA, 19 nt, Artificial Sequence
  Description of Artificial Sequence: Synthetic oligonucleotide
aaaaccugucaguaccggu

SEQ ID NO: 1336793 - RNA, 19 nt, Artificial Sequence
  Description of Artificial Sequence: Synthetic oligonucleotide
caugacacuaaauauccga

SEQ ID NO: 1336794 - RNA, 19 nt, Artificial Sequence
  Description of Artificial Sequence: Synthetic oligonucleotide
gaaguguuggguacucugg

SEQ ID NO: 1336795 - RNA, 19 nt, Artificial Sequence
  Description of Artificial Sequence: Synthetic oligonucleotide
acuuugaacaugaauaaaa

SEQ ID NO: 1336796 - RNA, 19 nt, Artificial Sequence
  Description of Artificial Sequence: Synthetic oligonucleotide
uagauaaguucacaagaau

SEQ ID NO: 1336797 - RNA, 19 nt, Artificial Sequence
  Description of Artificial Sequence: Synthetic oligonucleotide
ugcugucagguuuugaccu

SEQ ID NO: 1336798 - RNA, 19 nt, Artificial Sequence
  Description of Artificial Sequence: Synthetic oligonucleotide
cacuaaauauccgaucuag

SEQ ID NO: 1336799 - RNA, 19 nt, Artificial Sequence
  Description of Artificial Sequence: Synthetic oligonucleotide
uugagaugaggcauagccu

SEQ ID NO: 1336800 - RNA, 19 nt, Artificial Sequence
  Description of Artificial Sequence: Synthetic oligonucleotide
uuagugacgguuacucacu

SEQ ID NO: 1336801 - RNA, 19 nt, Artificial Sequence
  Description of Artificial Sequence: Synthetic oligonucleotide
gugacgguuacucacuggc

SEQ ID NO: 1336802 - RNA, 19 nt, Artificial Sequence
  Description of Artificial Sequence: Synthetic oligonucleotide
aaaccugucaguaccggug

SEQ ID NO: 1336803 - RNA, 19 nt, Artificial Sequence
  Description of Artificial Sequence: Synthetic oligonucleotide
  modified_base (4)..(4): a, c, u, g, unknown or other
cugnuguggguucugcugc

SEQ ID NO: 1336804 - RNA, 19 nt, Artificial Sequence
  Description of Artificial Sequence: Synthetic oligonucleotide
acauacuuugaacaugaau

SEQ ID NO: 1336805 - RNA, 19 nt, Artificial Sequence
  Description of Artificial Sequence: Synthetic oligonucleotide
uaugaggcuacuguuggca

SEQ ID NO: 1336806 - RNA, 19 nt, Artificial Sequence
  Description of Artificial Sequence: Synthetic oligonucleotide
gugcaaaauguauacuggc

SEQ ID NO: 1336807 - RNA, 19 nt, Artificial Sequence
  Description of Artificial Sequence: Synthetic oligonucleotide
accucaucuacuuuacacu

SEQ ID NO: 1336808 - RNA, 19 nt, Artificial Sequence
  Description of Artificial Sequence: Synthetic oligonucleotide
acaguaucacaucaauagu

SEQ ID NO: 1336809 - RNA, 19 nt, Artificial Sequence
  Description of Artificial Sequence: Synthetic oligonucleotide
accacuugguagaaugugc

SEQ ID NO: 1336810 - RNA, 19 nt, Artificial Sequence
  Description of Artificial Sequence: Synthetic oligonucleotide
auauggaccccagaguauc

SEQ ID NO: 1336811 - RNA, 19 nt, Artificial Sequence
  Description of Artificial Sequence: Synthetic oligonucleotide
ugguaauucaggcgggaac

SEQ ID NO: 1336812 - RNA, 19 nt, Artificial Sequence
  Description of Artificial Sequence: Synthetic oligonucleotide
uuugcaagggccacccagu

SEQ ID NO: 1336813 - RNA, 19 nt, Artificial Sequence
  Description of Artificial Sequence: Synthetic oligonucleotide
acuaucugcccauaguuuu

SEQ ID NO: 1336814 - RNA, 19 nt, Artificial Sequence
  Description of Artificial Sequence: Synthetic oligonucleotide
uucgugggauccaugguga

SEQ ID NO: 1336815 - RNA, 19 nt, Artificial Sequence
  Description of Artificial Sequence: Synthetic oligonucleotide
uaaaaccugucaguaccgg

SEQ ID NO: 1336816 - RNA, 19 nt, Artificial Sequence
  Description of Artificial Sequence: Synthetic oligonucleotide
uucuaauaucuucccaguc

SEQ ID NO: 1336817 - RNA, 19 nt, Artificial Sequence
  Description of Artificial Sequence: Synthetic oligonucleotide
aguggucagccucauaccu

SEQ ID NO: 1336818 - RNA, 19 nt, Artificial Sequence
  Description of Artificial Sequence: Synthetic oligonucleotide
cucaguaacaacagcaaaa

SEQ ID NO: 1336819 - RNA, 19 nt, Artificial Sequence
  Description of Artificial Sequence: Synthetic oligonucleotide
cuuugguaauucaggcggg

SEQ ID NO: 1336820 - RNA, 19 nt, Artificial Sequence
  Description of Artificial Sequence: Synthetic oligonucleotide
ugaggugauccucuucgug

SEQ ID NO: 1336821 - RNA, 19 nt, Artificial Sequence
  Description of Artificial Sequence: Synthetic oligonucleotide
uggcauauguuguucuucu

SEQ ID NO: 1336822 - RNA, 19 nt, Artificial Sequence
  Description of Artificial Sequence: Synthetic oligonucleotide
uuacuacuuaaaagcauua

SEQ ID NO: 1336823 - RNA, 19 nt, Artificial Sequence
  Description of Artificial Sequence: Synthetic oligonucleotide
aguagcaucagaacguaga

SEQ ID NO: 1336824 - RNA, 19 nt, Artificial Sequence
  Description of Artificial Sequence: Synthetic oligonucleotide
uaauucaggcgggaacugg

SEQ ID NO: 1336825 - RNA, 19 nt, Artificial Sequence
  Description of Artificial Sequence: Synthetic oligonucleotide
cccaugacacuaaauaucc

SEQ ID NO: 1336826 - RNA, 19 nt, Artificial Sequence
  Description of Artificial Sequence: Synthetic oligonucleotide
gaacguagauguucuugcc

SEQ ID NO: 1336827 - RNA, 19 nt, Artificial Sequence
  Description of Artificial Sequence: Synthetic oligonucleotide
agauaaguucacaagaaua

SEQ ID NO: 1336828 - RNA, 19 nt, Artificial Sequence
  Description of Artificial Sequence: Synthetic oligonucleotide
aaccacuugguagaaugug

SEQ ID NO: 1336829 - RNA, 19 nt, Artificial Sequence
  Description of Artificial Sequence: Synthetic oligonucleotide
uagccuagugugcucuggg

SEQ ID NO: 1336830 - RNA, 19 nt, Artificial Sequence
  Description of Artificial Sequence: Synthetic oligonucleotide
uggcuacaguaucacauca

SEQ ID NO: 1336831 - RNA, 19 nt, Artificial Sequence
  Description of Artificial Sequence: Synthetic oligonucleotide
guuaagucucaguaacaac

SEQ ID NO: 1336832 - RNA, 19 nt, Artificial Sequence
  Description of Artificial Sequence: Synthetic oligonucleotide
aagggugguacuguguacu

SEQ ID NO: 1336833 - RNA, 19 nt, Artificial Sequence
  Description of Artificial Sequence: Synthetic oligonucleotide
uguccaaguggguucagaa

SEQ ID NO: 1336834 - RNA, 19 nt, Artificial Sequence
  Description of Artificial Sequence: Synthetic oligonucleotide
auauucaccucaucuacuu

SEQ ID NO: 1336835 - RNA, 19 nt, Artificial Sequence
  Description of Artificial Sequence: Synthetic oligonucleotide
auagaugccuuuagugacg

SEQ ID NO: 1336836 - RNA, 19 nt, Artificial Sequence
  Description of Artificial Sequence: Synthetic oligonucleotide
ucauaaccagguagauaag

SEQ ID NO: 1336837 - RNA, 19 nt, Artificial Sequence
  Description of Artificial Sequence: Synthetic oligonucleotide
cucuaauucguagaucaug

SEQ ID NO: 1336838 - RNA, 19 nt, Artificial Sequence
  Description of Artificial Sequence: Synthetic oligonucleotide
cuucccauaacacuguuua

SEQ ID NO: 1336839 - RNA, 19 nt, Artificial Sequence
  Description of Artificial Sequence: Synthetic oligonucleotide
auguacuuuaugaggcuac

SEQ ID NO: 1336840 - RNA, 19 nt, Artificial Sequence
  Description of Artificial Sequence: Synthetic oligonucleotide
cuauaaauucagaagcaua

SEQ ID NO: 1336841 - RNA, 19 nt, Artificial Sequence
  Description of Artificial Sequence: Synthetic oligonucleotide
uagaugccuuuagugacgg

SEQ ID NO: 1336842 - RNA, 19 nt, Artificial Sequence
  Description of Artificial Sequence: Synthetic oligonucleotide
ucuguugagaugaggcaua

SEQ ID NO: 1336843 - RNA, 19 nt, Artificial Sequence
  Description of Artificial Sequence: Synthetic oligonucleotide
aucugacggcauaacaggc

SEQ ID NO: 1336844 - RNA, 19 nt, Artificial Sequence
  Description of Artificial Sequence: Synthetic oligonucleotide
auaaauucagaagcauagu

SEQ ID NO: 1336845 - RNA, 19 nt, Artificial Sequence
  Description of Artificial Sequence: Synthetic oligonucleotide
cagaguaucauaaccaggu

SEQ ID NO: 1336846 - RNA, 19 nt, Artificial Sequence
  Description of Artificial Sequence: Synthetic oligonucleotide
ugauuuccuacaaccacuu

SEQ ID NO: 1336847 - RNA, 19 nt, Artificial Sequence
  Description of Artificial Sequence: Synthetic oligonucleotide
ugggaagaccccugaacgc

SEQ ID NO: 1336848 - RNA, 19 nt, Artificial Sequence
  Description of Artificial Sequence: Synthetic oligonucleotide
gagugcugauaaucugacg

SEQ ID NO: 1336849 - RNA, 19 nt, Artificial Sequence
  Description of Artificial Sequence: Synthetic oligonucleotide
uuucugugauuuccuacaa

SEQ ID NO: 1336850 - RNA, 19 nt, Artificial Sequence
  Description of Artificial Sequence: Synthetic oligonucleotide
agugacgguuacucacugg

SEQ ID NO: 1336851 - RNA, 19 nt, Artificial Sequence
  Description of Artificial Sequence: Synthetic oligonucleotide
aauucaggcgggaacugga

SEQ ID NO: 1336852 - RNA, 19 nt, Artificial Sequence
  Description of Artificial Sequence: Synthetic oligonucleotide
agaagggugguacugugua

SEQ ID NO: 1336853 - RNA, 19 nt, Artificial Sequence
  Description of Artificial Sequence: Synthetic oligonucleotide
guguacucuguugagauga

SEQ ID NO: 1336854 - RNA, 19 nt, Artificial Sequence
  Description of Artificial Sequence: Synthetic oligonucleotide
aaauaugcauagaugccuu

SEQ ID NO: 1336855 - RNA, 19 nt, Artificial Sequence
  Description of Artificial Sequence: Synthetic oligonucleotide
auccuugacagcguuaagu

SEQ ID NO: 1336856 - RNA, 19 nt, Artificial Sequence
  Description of Artificial Sequence: Synthetic oligonucleotide
agaacagagcuuauuuucu

SEQ ID NO: 1336857 - RNA, 19 nt, Artificial Sequence
  Description of Artificial Sequence: Synthetic oligonucleotide
uuaugaggcuacuguuggc

SEQ ID NO: 1336858 - RNA, 19 nt, Artificial Sequence
  Description of Artificial Sequence: Synthetic oligonucleotide
ucauaccugcuucccauaa

SEQ ID NO: 1336859 - RNA, 19 nt, Artificial Sequence
  Description of Artificial Sequence: Synthetic oligonucleotide
gugcugauaaucugacggc

SEQ ID NO: 1336860 - RNA, 19 nt, Artificial Sequence
  Description of Artificial Sequence: Synthetic oligonucleotide
uguguacucuguugagaug

SEQ ID NO: 1336861 - RNA, 19 nt, Artificial Sequence
  Description of Artificial Sequence: Synthetic oligonucleotide
uugacagcguuaagucuca

SEQ ID NO: 1336862 - RNA, 19 nt, Artificial Sequence
  Description of Artificial Sequence: Synthetic oligonucleotide
gcuaaugucuuuuauuaaa

SEQ ID NO: 1336863 - RNA, 19 nt, Artificial Sequence
  Description of Artificial Sequence: Synthetic oligonucleotide
accccaugacacuaaauau

SEQ ID NO: 1336864 - RNA, 19 nt, Artificial Sequence
  Description of Artificial Sequence: Synthetic oligonucleotide
uuuugaaguguuggguacu

SEQ ID NO: 1336865 - RNA, 19 nt, Artificial Sequence
  Description of Artificial Sequence: Synthetic oligonucleotide
uccgaucuaguugaucaug

SEQ ID NO: 1336866 - RNA, 19 nt, Artificial Sequence
  Description of Artificial Sequence: Synthetic oligonucleotide
uaguggucagccucauacc

SEQ ID NO: 1336867 - RNA, 19 nt, Artificial Sequence
  Description of Artificial Sequence: Synthetic oligonucleotide
aaaagauccuugacagcgu

SEQ ID NO: 1336868 - RNA, 19 nt, Artificial Sequence
  Description of Artificial Sequence: Synthetic oligonucleotide
guccaaguggguucagaag

SEQ ID NO: 1336869 - RNA, 19 nt, Artificial Sequence
  Description of Artificial Sequence: Synthetic oligonucleotide
uguacuuuaugaggcuacu

SEQ ID NO: 1336870 - RNA, 19 nt, Artificial Sequence
  Description of Artificial Sequence: Synthetic oligonucleotide
cuaaauauccgaucuaguu

SEQ ID NO: 1336871 - RNA, 19 nt, Artificial Sequence
  Description of Artificial Sequence: Synthetic oligonucleotide
aguguuggguacucuggca

SEQ ID NO: 1336872 - RNA, 19 nt, Artificial Sequence
  Description of Artificial Sequence: Synthetic oligonucleotide
ggugguacuguguacucug

SEQ ID NO: 1336873 - RNA, 19 nt, Artificial Sequence
  Description of Artificial Sequence: Synthetic oligonucleotide
agcucuacaccuuuacauu

SEQ ID NO: 1336874 - RNA, 19 nt, Artificial Sequence
  Description of Artificial Sequence: Synthetic oligonucleotide
aguuugcauauacaacaau

SEQ ID NO: 1336875 - RNA, 19 nt, Artificial Sequence
  Description of Artificial Sequence: Synthetic oligonucleotide
uuucuagcucaagaaacau

SEQ ID NO: 1336876 - RNA, 19 nt, Artificial Sequence
  Description of Artificial Sequence: Synthetic oligonucleotide
uauggaccccagaguauca

SEQ ID NO: 1336877 - RNA, 19 nt, Artificial Sequence
  Description of Artificial Sequence: Synthetic oligonucleotide
uagugacgguuacucacug

SEQ ID NO: 1336878 - RNA, 19 nt, Artificial Sequence
  Description of Artificial Sequence: Synthetic oligonucleotide
ugcaaauauucaccucauc

SEQ ID NO: 1336879 - RNA, 19 nt, Artificial Sequence
  Description of Artificial Sequence: Synthetic oligonucleotide
cugaacgcugcuuugguaa

SEQ ID NO: 1336880 - RNA, 19 nt, Artificial Sequence
  Description of Artificial Sequence: Synthetic oligonucleotide
aucaccauacaaccuuuau

SEQ ID NO: 1336881 - RNA, 19 nt, Artificial Sequence
  Description of Artificial Sequence: Synthetic oligonucleotide
uacuacuuaaaagcauuau

SEQ ID NO: 1336882 - RNA, 19 nt, Artificial Sequence
  Description of Artificial Sequence: Synthetic oligonucleotide
uacaacaauuggcuacuuu

SEQ ID NO: 1336883 - RNA, 19 nt, Artificial Sequence
  Description of Artificial Sequence: Synthetic oligonucleotide
aauauggaccccagaguau

SEQ ID NO: 1336884 - RNA, 19 nt, Artificial Sequence
  Description of Artificial Sequence: Synthetic oligonucleotide
aaauguauacuggcuucaa

SEQ ID NO: 1336885 - RNA, 19 nt, Artificial Sequence
  Description of Artificial Sequence: Synthetic oligonucleotide
gagcucuacaccuuuacau

SEQ ID NO: 1336886 - RNA, 19 nt, Artificial Sequence
  Description of Artificial Sequence: Synthetic oligonucleotide
guaccggugggucugguga

SEQ ID NO: 1336887 - RNA, 19 nt, Artificial Sequence
  Description of Artificial Sequence: Synthetic oligonucleotide
auaguuguccaaguggguu

SEQ ID NO: 1336888 - RNA, 19 nt, Artificial Sequence
  Description of Artificial Sequence: Synthetic oligonucleotide
cuggcuacaguaucacauc

SEQ ID NO: 1336889 - RNA, 19 nt, Artificial Sequence
  Description of Artificial Sequence: Synthetic oligonucleotide
aggcacaauuauuaaguuu

SEQ ID NO: 1336890 - RNA, 19 nt, Artificial Sequence
  Description of Artificial Sequence: Synthetic oligonucleotide
uagcaucagaacguagaug

SEQ ID NO: 1336891 - RNA, 19 nt, Artificial Sequence
  Description of Artificial Sequence: Synthetic oligonucleotide
agggcaagaacagagcuua

SEQ ID NO: 1336892 - RNA, 19 nt, Artificial Sequence
  Description of Artificial Sequence: Synthetic oligonucleotide
uccccucuaauucguagau

SEQ ID NO: 1336893 - RNA, 19 nt, Artificial Sequence
  Description of Artificial Sequence: Synthetic oligonucleotide
uaucauaaccagguagaua

SEQ ID NO: 1336894 - RNA, 19 nt, Artificial Sequence
  Description of Artificial Sequence: Synthetic oligonucleotide
augaggcauagccuagugu

SEQ ID NO: 1336895 - RNA, 19 nt, Artificial Sequence
  Description of Artificial Sequence: Synthetic oligonucleotide
auagugcaaaauguauacu

SEQ ID NO: 1336896 - RNA, 19 nt, Artificial Sequence
  Description of Artificial Sequence: Synthetic oligonucleotide
agggugguacuguguacuc

SEQ ID NO: 1336897 - RNA, 19 nt, Artificial Sequence
  Description of Artificial Sequence: Synthetic oligonucleotide
ugacgguuacucacuggcu

SEQ ID NO: 1336898 - RNA, 19 nt, Artificial Sequence
  Description of Artificial Sequence: Synthetic oligonucleotide
  modified_base (5)..(5): a, c, u, g, unknown or other
gcugnuguggguucugcug

SEQ ID NO: 1336899 - RNA, 19 nt, Artificial Sequence
  Description of Artificial Sequence: Synthetic oligonucleotide
acuaaauauccgaucuagu

SEQ ID NO: 1336900 - RNA, 19 nt, Artificial Sequence
  Description of Artificial Sequence: Synthetic oligonucleotide
gaagggugguacuguguac

SEQ ID NO: 1336901 - RNA, 19 nt, Artificial Sequence
  Description of Artificial Sequence: Synthetic oligonucleotide
ugcaagggccacccaguug

SEQ ID NO: 1336902 - RNA, 19 nt, Artificial Sequence
  Description of Artificial Sequence: Synthetic oligonucleotide
agaaugugcucuguuugca

SEQ ID NO: 1336903 - RNA, 19 nt, Artificial Sequence
  Description of Artificial Sequence: Synthetic oligonucleotide
auagccuagugugcucugg

SEQ ID NO: 1336904 - RNA, 19 nt, Artificial Sequence
  Description of Artificial Sequence: Synthetic oligonucleotide
acuguuggcauauguuguu

SEQ ID NO: 1336905 - RNA, 19 nt, Artificial Sequence
  Description of Artificial Sequence: Synthetic oligonucleotide
auaaccagguagauaaguu

SEQ ID NO: 1336906 - RNA, 19 nt, Artificial Sequence
  Description of Artificial Sequence: Synthetic oligonucleotide
ccuacaaccacuugguaga

SEQ ID NO: 1336907 - RNA, 19 nt, Artificial Sequence
  Description of Artificial Sequence: Synthetic oligonucleotide
cauauacaacaauuggcua

SEQ ID NO: 1336908 - RNA, 19 nt, Artificial Sequence
  Description of Artificial Sequence: Synthetic oligonucleotide
cauugguuuggcacugcuc

SEQ ID NO: 1336909 - RNA, 19 nt, Artificial Sequence
  Description of Artificial Sequence: Synthetic oligonucleotide
uucccauaacacuguuuac

SEQ ID NO: 1336910 - RNA, 19 nt, Artificial Sequence
  Description of Artificial Sequence: Synthetic oligonucleotide
gagaugaggcauagccuag

SEQ ID NO: 1336911 - RNA, 19 nt, Artificial Sequence
  Description of Artificial Sequence: Synthetic oligonucleotide
ugucaguaccggugggucu

SEQ ID NO: 1336912 - RNA, 19 nt, Artificial Sequence
  Description of Artificial Sequence: Synthetic oligonucleotide
uucguagaucauggaaaug

SEQ ID NO: 1336913 - RNA, 19 nt, Artificial Sequence
  Description of Artificial Sequence: Synthetic oligonucleotide
gagcuugcaccagaaggcc

SEQ ID NO: 1336914 - RNA, 19 nt, Artificial Sequence
  Description of Artificial Sequence: Synthetic oligonucleotide
uguuuggaggcaccugauu

SEQ ID NO: 1336915 - RNA, 19 nt, Artificial Sequence
  Description of Artificial Sequence: Synthetic oligonucleotide
  modified_base (3)..(3): a, c, u, g, unknown or other
ugnuguggguucugcugcu

SEQ ID NO: 1336916 - RNA, 19 nt, Artificial Sequence
  Description of Artificial Sequence: Synthetic oligonucleotide
agcuugcaccagaaggccc

SEQ ID NO: 1336917 - RNA, 19 nt, Artificial Sequence
  Description of Artificial Sequence: Synthetic oligonucleotide
gaacaugaauaaaaccugu

SEQ ID NO: 1336918 - RNA, 19 nt, Artificial Sequence
  Description of Artificial Sequence: Synthetic oligonucleotide
uaggggcaaaagaaagcau

SEQ ID NO: 1336919 - RNA, 19 nt, Artificial Sequence
  Description of Artificial Sequence: Synthetic oligonucleotide
ccuaggggcaaaagaaagc

SEQ ID NO: 1336920 - RNA, 19 nt, Artificial Sequence
  Description of Artificial Sequence: Synthetic oligonucleotide
ugcacuacaaugggagcuc

SEQ ID NO: 1336921 - RNA, 19 nt, Artificial Sequence
  Description of Artificial Sequence: Synthetic oligonucleotide
  modified_base (6)..(6): a, c, u, g, unknown or other
ugcugnuguggguucugcu

SEQ ID NO: 1336922 - RNA, 19 nt, Artificial Sequence
  Description of Artificial Sequence: Synthetic oligonucleotide
acacuaaauauccgaucua

SEQ ID NO: 1336923 - RNA, 19 nt, Artificial Sequence
  Description of Artificial Sequence: Synthetic oligonucleotide
cuaauucguagaucaugga

SEQ ID NO: 1336924 - RNA, 19 nt, Artificial Sequence
  Description of Artificial Sequence: Synthetic oligonucleotide
uggagggugagggauuccu

SEQ ID NO: 1336925 - RNA, 19 nt, Artificial Sequence
  Description of Artificial Sequence: Synthetic oligonucleotide
uuucuccuaggggcaaaag

SEQ ID NO: 1336926 - RNA, 19 nt, Artificial Sequence
  Description of Artificial Sequence: Synthetic oligonucleotide
ugguagaaugugcucuguu

SEQ ID NO: 1336927 - RNA, 19 nt, Artificial Sequence
  Description of Artificial Sequence: Synthetic oligonucleotide
uacauacuuugaacaugaa

SEQ ID NO: 1336928 - RNA, 19 nt, Artificial Sequence
  Description of Artificial Sequence: Synthetic oligonucleotide
ugaacgcugcuuugguaau

SEQ ID NO: 1336929 - RNA, 19 nt, Artificial Sequence
  Description of Artificial Sequence: Synthetic oligonucleotide
aguaccggugggucuggug

SEQ ID NO: 1336930 - RNA, 19 nt, Artificial Sequence
  Description of Artificial Sequence: Synthetic oligonucleotide
gaccccagaguaucauaac

SEQ ID NO: 1336931 - RNA, 19 nt, Artificial Sequence
  Description of Artificial Sequence: Synthetic oligonucleotide
uaccggugggucuggugag

SEQ ID NO: 1336932 - RNA, 19 nt, Artificial Sequence
  Description of Artificial Sequence: Synthetic oligonucleotide
auaugcauagaugccuuua

SEQ ID NO: 1336933 - RNA, 19 nt, Artificial Sequence
  Description of Artificial Sequence: Synthetic oligonucleotide
guaauucaggcgggaacug

SEQ ID NO: 1336934 - RNA, 19 nt, Artificial Sequence
  Description of Artificial Sequence: Synthetic oligonucleotide
cuugaauauggaccccaga

SEQ ID NO: 1336935 - RNA, 19 nt, Artificial Sequence
  Description of Artificial Sequence: Synthetic oligonucleotide
uugguaauucaggcgggaa

SEQ ID NO: 1336936 - RNA, 19 nt, Artificial Sequence
  Description of Artificial Sequence: Synthetic oligonucleotide
ccuuuagugacgguuacuc

SEQ ID NO: 1336937 - RNA, 19 nt, Artificial Sequence
  Description of Artificial Sequence: Synthetic oligonucleotide
gaccuucaucaccauacaa

SEQ ID NO: 1336938 - RNA, 19 nt, Artificial Sequence
  Description of Artificial Sequence: Synthetic oligonucleotide
accugucaguaccgguggg

SEQ ID NO: 1336939 - RNA, 19 nt, Artificial Sequence
  Description of Artificial Sequence: Synthetic oligonucleotide
aaguggguucagaaguaaa

SEQ ID NO: 1336940 - RNA, 19 nt, Artificial Sequence
  Description of Artificial Sequence: Synthetic oligonucleotide
cugcagucccauugguuug

SEQ ID NO: 1336941 - RNA, 19 nt, Artificial Sequence
  Description of Artificial Sequence: Synthetic oligonucleotide
gaugccuuuagugacgguu

SEQ ID NO: 1336942 - RNA, 19 nt, Artificial Sequence
  Description of Artificial Sequence: Synthetic oligonucleotide
caaugggagcucuacaccu

SEQ ID NO: 1336943 - RNA, 19 nt, Artificial Sequence
  Description of Artificial Sequence: Synthetic oligonucleotide
ucgugggauccauggugag

SEQ ID NO: 1336944 - RNA, 19 nt, Artificial Sequence
  Description of Artificial Sequence: Synthetic oligonucleotide
uguugagaugaggcauagc

SEQ ID NO: 1336945 - RNA, 19 nt, Artificial Sequence
  Description of Artificial Sequence: Synthetic oligonucleotide
cuguugagaugaggcauag

SEQ ID NO: 1336946 - RNA, 19 nt, Artificial Sequence
  Description of Artificial Sequence: Synthetic oligonucleotide
gaagaccccugaacgcugc

SEQ ID NO: 1336947 - RNA, 19 nt, Artificial Sequence
  Description of Artificial Sequence: Synthetic oligonucleotide
ggugagaagggugguacug

SEQ ID NO: 1336948 - RNA, 19 nt, Artificial Sequence
  Description of Artificial Sequence: Synthetic oligonucleotide
uuuacacuaucugcccaua

SEQ ID NO: 1336949 - RNA, 19 nt, Artificial Sequence
  Description of Artificial Sequence: Synthetic oligonucleotide
aggcauagccuagugugcu

SEQ ID NO: 1336950 - RNA, 19 nt, Artificial Sequence
  Description of Artificial Sequence: Synthetic oligonucleotide
acgguuacucacuggcuuu

SEQ ID NO: 1336951 - RNA, 19 nt, Artificial Sequence
  Description of Artificial Sequence: Synthetic oligonucleotide
guagaucauggaaaugcaa

SEQ ID NO: 1336952 - RNA, 19 nt, Artificial Sequence
  Description of Artificial Sequence: Synthetic oligonucleotide
aagaccccugaacgcugcu

SEQ ID NO: 1336953 - RNA, 19 nt, Artificial Sequence
  Description of Artificial Sequence: Synthetic oligonucleotide
auucaggcgggaacuggag

SEQ ID NO: 1336954 - RNA, 19 nt, Artificial Sequence
  Description of Artificial Sequence: Synthetic oligonucleotide
  modified_base (11)..(11): a, c, u, g, unknown or other
ugggcugcugnuguggguu

SEQ ID NO: 1336955 - RNA, 19 nt, Artificial Sequence
  Description of Artificial Sequence: Synthetic oligonucleotide
uuccuacaaccacuuggua

SEQ ID NO: 1336956 - RNA, 19 nt, Artificial Sequence
  Description of Artificial Sequence: Synthetic oligonucleotide
agccuagugugcucuggga

SEQ ID NO: 1336957 - RNA, 19 nt, Artificial Sequence
  Description of Artificial Sequence: Synthetic oligonucleotide
gugauuuccuacaaccacu

SEQ ID NO: 1336958 - RNA, 19 nt, Artificial Sequence
  Description of Artificial Sequence: Synthetic oligonucleotide
uugaaguguuggguacucu

SEQ ID NO: 1336959 - RNA, 19 nt, Artificial Sequence
  Description of Artificial Sequence: Synthetic oligonucleotide
cauagccuagugugcucug

SEQ ID NO: 1336960 - RNA, 19 nt, Artificial Sequence
  Description of Artificial Sequence: Synthetic oligonucleotide
guagcaucagaacguagau

SEQ ID NO: 1336961 - RNA, 19 nt, Artificial Sequence
  Description of Artificial Sequence: Synthetic oligonucleotide
cuccccucuaauucguaga

SEQ ID NO: 1336962 - RNA, 19 nt, Artificial Sequence
  Description of Artificial Sequence: Synthetic oligonucleotide
uugguagaaugugcucugu

SEQ ID NO: 1336963 - RNA, 19 nt, Artificial Sequence
  Description of Artificial Sequence: Synthetic oligonucleotide
gguguugggcugcugucug

SEQ ID NO: 1336964 - RNA, 19 nt, Artificial Sequence
  Description of Artificial Sequence: Synthetic oligonucleotide
ccaugacacuaaauauccg

SEQ ID NO: 1336965 - RNA, 19 nt, Artificial Sequence
  Description of Artificial Sequence: Synthetic oligonucleotide
  modified_base (2)..(2): a, c, u, g, unknown or other
gnuguggguucugcugcug

SEQ ID NO: 1336966 - RNA, 19 nt, Artificial Sequence
  Description of Artificial Sequence: Synthetic oligonucleotide
agaugaggcauagccuagu

SEQ ID NO: 1336967 - RNA, 19 nt, Artificial Sequence
  Description of Artificial Sequence: Synthetic oligonucleotide
gacgguuacucacuggcuu

SEQ ID NO: 1336968 - RNA, 19 nt, Artificial Sequence
  Description of Artificial Sequence: Synthetic oligonucleotide
aauauccgaucuaguugau

SEQ ID NO: 1336969 - RNA, 19 nt, Artificial Sequence
  Description of Artificial Sequence: Synthetic oligonucleotide
cugucaguaccgguggguc

SEQ ID NO: 1336970 - RNA, 19 nt, Artificial Sequence
  Description of Artificial Sequence: Synthetic oligonucleotide
gggauuccuuaaaaguagc

SEQ ID NO: 1336971 - RNA, 19 nt, Artificial Sequence
  Description of Artificial Sequence: Synthetic oligonucleotide
cuccuaggggcaaaagaaa

SEQ ID NO: 1336972 - RNA, 19 nt, Artificial Sequence
  Description of Artificial Sequence: Synthetic oligonucleotide
cauaaccagguagauaagu

SEQ ID NO: 1336973 - RNA, 19 nt, Artificial Sequence
  Description of Artificial Sequence: Synthetic oligonucleotide
cauuucaaauaugcauaga

SEQ ID NO: 1336974 - RNA, 19 nt, Artificial Sequence
  Description of Artificial Sequence: Synthetic oligonucleotide
acggcauaacaggcccgcc

SEQ ID NO: 1336975 - RNA, 19 nt, Artificial Sequence
  Description of Artificial Sequence: Synthetic oligonucleotide
uugcaagggccacccaguu

SEQ ID NO: 1336976 - RNA, 19 nt, Artificial Sequence
  Description of Artificial Sequence: Synthetic oligonucleotide
aguaugguccuggcuggcu

SEQ ID NO: 1336977 - RNA, 19 nt, Artificial Sequence
  Description of Artificial Sequence: Synthetic oligonucleotide
ggagugcugauaaucugac

SEQ ID NO: 1336978 - RNA, 19 nt, Artificial Sequence
  Description of Artificial Sequence: Synthetic oligonucleotide
gacagcguuaagucucagu

SEQ ID NO: 1336979 - RNA, 19 nt, Artificial Sequence
  Description of Artificial Sequence: Synthetic oligonucleotide
gcaaaauguauacuggcuu

SEQ ID NO: 1336980 - RNA, 19 nt, Artificial Sequence
  Description of Artificial Sequence: Synthetic oligonucleotide
ucuaguggucagccucaua

SEQ ID NO: 1336981 - RNA, 19 nt, Artificial Sequence
  Description of Artificial Sequence: Synthetic oligonucleotide
cuuuacacuaucugcccau

SEQ ID NO: 1336982 - RNA, 19 nt, Artificial Sequence
  Description of Artificial Sequence: Synthetic oligonucleotide
gcaagaacagagcuuauuu

SEQ ID NO: 1336983 - RNA, 19 nt, Artificial Sequence
  Description of Artificial Sequence: Synthetic oligonucleotide
cucuguuugcaagggccac

SEQ ID NO: 1336984 - RNA, 19 nt, Artificial Sequence
  Description of Artificial Sequence: Synthetic oligonucleotide
gugcucuguuugcaagggc

SEQ ID NO: 1336985 - RNA, 19 nt, Artificial Sequence
  Description of Artificial Sequence: Synthetic oligonucleotide
gccuagugugcucugggac

SEQ ID NO: 1336986 - RNA, 19 nt, Artificial Sequence
  Description of Artificial Sequence: Synthetic oligonucleotide
gcuaguagcaucagaacgu

SEQ ID NO: 1336987 - RNA, 19 nt, Artificial Sequence
  Description of Artificial Sequence: Synthetic oligonucleotide
augcaaauauucaccucau

SEQ ID NO: 1336988 - RNA, 19 nt, Artificial Sequence
  Description of Artificial Sequence: Synthetic oligonucleotide
cagcguuaagucucaguaa

SEQ ID NO: 1336989 - RNA, 19 nt, Artificial Sequence
  Description of Artificial Sequence: Synthetic oligonucleotide
cuucaucaccauacaaccu

SEQ ID NO: 1336990 - RNA, 19 nt, Artificial Sequence
  Description of Artificial Sequence: Synthetic oligonucleotide
cauguacuuuaugaggcua

SEQ ID NO: 1336991 - RNA, 19 nt, Artificial Sequence
  Description of Artificial Sequence: Synthetic oligonucleotide
augccuuuagugacgguua

SEQ ID NO: 1336992 - RNA, 19 nt, Artificial Sequence
  Description of Artificial Sequence: Synthetic oligonucleotide
guaugguccuggcuggcua

SEQ ID NO: 1336993 - RNA, 19 nt, Artificial Sequence
  Description of Artificial Sequence: Synthetic oligonucleotide
gguagaaugugcucuguuu

SEQ ID NO: 1336994 - RNA, 19 nt, Artificial Sequence
  Description of Artificial Sequence: Synthetic oligonucleotide
ugggagcucuacaccuuua

SEQ ID NO: 1336995 - RNA, 19 nt, Artificial Sequence
  Description of Artificial Sequence: Synthetic oligonucleotide
uccucuucgugggauccau

SEQ ID NO: 1336996 - RNA, 19 nt, Artificial Sequence
  Description of Artificial Sequence: Synthetic oligonucleotide
guguuggguacucuggcau

SEQ ID NO: 1336997 - RNA, 19 nt, Artificial Sequence
  Description of Artificial Sequence: Synthetic oligonucleotide
cuaguagcaucagaacgua

SEQ ID NO: 1336998 - RNA, 19 nt, Artificial Sequence
  Description of Artificial Sequence: Synthetic oligonucleotide
gagcucacucaagggcaag

SEQ ID NO: 1336999 - RNA, 19 nt, Artificial Sequence
  Description of Artificial Sequence: Synthetic oligonucleotide
gacugggaagaccccugaa

SEQ ID NO: 1337000 - RNA, 19 nt, Artificial Sequence
  Description of Artificial Sequence: Synthetic oligonucleotide
ccauacaaccuuuauuacu

SEQ ID NO: 1337001 - RNA, 19 nt, Artificial Sequence
  Description of Artificial Sequence: Synthetic oligonucleotide
ccucaucuacuuuacacua

SEQ ID NO: 1337002 - RNA, 19 nt, Artificial Sequence
  Description of Artificial Sequence: Synthetic oligonucleotide
cccauaacacuguuuacua

SEQ ID NO: 1337003 - RNA, 19 nt, Artificial Sequence
  Description of Artificial Sequence: Synthetic oligonucleotide
ggaccuucaucaccauaca

SEQ ID NO: 1337004 - RNA, 19 nt, Artificial Sequence
  Description of Artificial Sequence: Synthetic oligonucleotide
guaucauaaccagguagau

SEQ ID NO: 1337005 - RNA, 19 nt, Artificial Sequence
  Description of Artificial Sequence: Synthetic oligonucleotide
agaugccuuuagugacggu

SEQ ID NO: 1337006 - RNA, 19 nt, Artificial Sequence
  Description of Artificial Sequence: Synthetic oligonucleotide
cucaucuacuuuacacuau

SEQ ID NO: 1337007 - RNA, 19 nt, Artificial Sequence
  Description of Artificial Sequence: Synthetic oligonucleotide
gcuggcuacaguaucacau

SEQ ID NO: 1337008 - RNA, 19 nt, Artificial Sequence
  Description of Artificial Sequence: Synthetic oligonucleotide
caucaccauacaaccuuua

SEQ ID NO: 1337009 - RNA, 19 nt, Artificial Sequence
  Description of Artificial Sequence: Synthetic oligonucleotide
cguagaucauggaaaugca

SEQ ID NO: 1337010 - RNA, 19 nt, Artificial Sequence
  Description of Artificial Sequence: Synthetic oligonucleotide
cagaagcauaguuguccaa

SEQ ID NO: 1337011 - RNA, 19 nt, Artificial Sequence
  Description of Artificial Sequence: Synthetic oligonucleotide
caggaaaccccaugacacu

SEQ ID NO: 1337012 - RNA, 19 nt, Artificial Sequence
  Description of Artificial Sequence: Synthetic oligonucleotide
gaacuccccucuaauucgu

SEQ ID NO: 1337013 - RNA, 19 nt, Artificial Sequence
  Description of Artificial Sequence: Synthetic oligonucleotide
caccuuuacauuuccucuu

SEQ ID NO: 1337014 - RNA, 19 nt, Artificial Sequence
  Description of Artificial Sequence: Synthetic oligonucleotide
cucauaccugcuucccaua

SEQ ID NO: 1337015 - RNA, 19 nt, Artificial Sequence
  Description of Artificial Sequence: Synthetic oligonucleotide
ggcauagccuagugugcuc

SEQ ID NO: 1337016 - RNA, 19 nt, Artificial Sequence
  Description of Artificial Sequence: Synthetic oligonucleotide
ggcuacuguuggcauaugu

SEQ ID NO: 1337017 - RNA, 19 nt, Artificial Sequence
  Description of Artificial Sequence: Synthetic oligonucleotide
aggcccaauccggggcuuc

SEQ ID NO: 1337018 - RNA, 19 nt, Artificial Sequence
  Description of Artificial Sequence: Synthetic oligonucleotide
ggauuccuuaaaaguagcu

SEQ ID NO: 1337019 - RNA, 19 nt, Artificial Sequence
  Description of Artificial Sequence: Synthetic oligonucleotide
aacuccccucuaauucgua

SEQ ID NO: 1337020 - RNA, 19 nt, Artificial Sequence
  Description of Artificial Sequence: Synthetic oligonucleotide
gguuuugaccuuuguguuu

SEQ ID NO: 1337021 - RNA, 19 nt, Artificial Sequence
  Description of Artificial Sequence: Synthetic oligonucleotide
gcucuacaccuuuacauuu

SEQ ID NO: 1337022 - RNA, 19 nt, Artificial Sequence
  Description of Artificial Sequence: Synthetic oligonucleotide
ggugauccucuucguggga

SEQ ID NO: 1337023 - RNA, 19 nt, Artificial Sequence
  Description of Artificial Sequence: Synthetic oligonucleotide
ccucuaguggucagccuca

SEQ ID NO: 1337024 - RNA, 19 nt, Artificial Sequence
  Description of Artificial Sequence: Synthetic oligonucleotide
gggaagaccccugaacgcu

SEQ ID NO: 1337025 - RNA, 19 nt, Artificial Sequence
  Description of Artificial Sequence: Synthetic oligonucleotide
ccuagugugcucugggacu

SEQ ID NO: 1337026 - RNA, 19 nt, Artificial Sequence
  Description of Artificial Sequence: Synthetic oligonucleotide
gcguuaagucucaguaaca

SEQ ID NO: 1337027 - RNA, 19 nt, Artificial Sequence
  Description of Artificial Sequence: Synthetic oligonucleotide
gugcugcuaguagcaucag

SEQ ID NO: 1337028 - RNA, 19 nt, Artificial Sequence
  Description of Artificial Sequence: Synthetic oligonucleotide
aaggcccaauccggggcuu

SEQ ID NO: 1337029 - RNA, 19 nt, Artificial Sequence
  Description of Artificial Sequence: Synthetic oligonucleotide
cuacaaccacuugguagaa

SEQ ID NO: 1337030 - RNA, 19 nt, Artificial Sequence
  Description of Artificial Sequence: Synthetic oligonucleotide
ccauggugaggaguuucug

SEQ ID NO: 1337031 - RNA, 19 nt, Artificial Sequence
  Description of Artificial Sequence: Synthetic oligonucleotide
ccucauaccugcuucccau

SEQ ID NO: 1337032 - RNA, 19 nt, Artificial Sequence
  Description of Artificial Sequence: Synthetic oligonucleotide
gcugauaaucugacggcau

SEQ ID NO: 1337033 - RNA, 19 nt, Artificial Sequence
  Description of Artificial Sequence: Synthetic oligonucleotide
gaacgcugcuuugguaauu

SEQ ID NO: 1337034 - RNA, 19 nt, Artificial Sequence
  Description of Artificial Sequence: Synthetic oligonucleotide
ccauaacacuguuuacuau

SEQ ID NO: 1337035 - RNA, 19 nt, Artificial Sequence
  Description of Artificial Sequence: Synthetic oligonucleotide
ccugaacgcugcuuuggua

SEQ ID NO: 1337036 - RNA, 19 nt, Artificial Sequence
  Description of Artificial Sequence: Synthetic oligonucleotide
ccccucuaauucguagauc

SEQ ID NO: 1337037 - RNA, 19 nt, Artificial Sequence
  Description of Artificial Sequence: Synthetic oligonucleotide
gguuacucacuggcuuucu

SEQ ID NO: 1337038 - RNA, 19 nt, Artificial Sequence
  Description of Artificial Sequence: Synthetic oligonucleotide
ccauugguuuggcacugcu

SEQ ID NO: 1337039 - RNA, 19 nt, Artificial Sequence
  Description of Artificial Sequence: Synthetic oligonucleotide
cgguuacucacuggcuuuc

SEQ ID NO: 1337040 - RNA, 19 nt, Artificial Sequence
  Description of Artificial Sequence: Synthetic oligonucleotide
ggcccgccugagcuugcac

SEQ ID NO: 1337041 - RNA, 19 nt, Artificial Sequence
  Description of Artificial Sequence: Synthetic oligonucleotide
ccucuaauucguagaucau

SEQ ID NO: 1337042 - RNA, 19 nt, Artificial Sequence
  Description of Artificial Sequence: Synthetic oligonucleotide
gcacuacaaugggagcucu

SEQ ID NO: 1337043 - RNA, 19 nt, Artificial Sequence
  Description of Artificial Sequence: Synthetic oligonucleotide
cccugaacgcugcuuuggu

SEQ ID NO: 1337044 - RNA, 19 nt, Artificial Sequence
  Description of Artificial Sequence: Synthetic oligonucleotide
cucuaguggucagccucau

SEQ ID NO: 1337045 - RNA, 19 nt, Artificial Sequence
  Description of Artificial Sequence: Synthetic oligonucleotide
ccacccaguugcuguugaa

SEQ ID NO: 1337046 - RNA, 19 nt, Artificial Sequence
  Description of Artificial Sequence: Synthetic oligonucleotide
cgaucuaguugaucaugau

SEQ ID NO: 1337047 - RNA, 19 nt, Artificial Sequence
  Description of Artificial Sequence: Synthetic oligonucleotide
cggcauaacaggcccgccu

SEQ ID NO: 1337048 - RNA, 19 nt, Artificial Sequence
  Description of Artificial Sequence: Synthetic oligonucleotide
ccggugggucuggugagaa

SEQ ID NO: 1337049 - RNA, 19 nt, Artificial Sequence
  Description of Artificial Sequence: Synthetic oligonucleotide
caguaccggugggucuggu

SEQ ID NO: 1337050 - RNA, 19 nt, Artificial Sequence
  Description of Artificial Sequence: Synthetic oligonucleotide
auaccaaagaaauaggagg

SEQ ID NO: 1337051 - RNA, 19 nt, Artificial Sequence
  Description of Artificial Sequence: Synthetic oligonucleotide
aaugaguguaucuuauuuc

SEQ ID NO: 1337052 - RNA, 19 nt, Artificial Sequence
  Description of Artificial Sequence: Synthetic oligonucleotide
aguuuaguuagguuugucc

SEQ ID NO: 1337053 - RNA, 19 nt, Artificial Sequence
  Description of Artificial Sequence: Synthetic oligonucleotide
gaugcuaaggaacuuucgg

SEQ ID NO: 1337054 - RNA, 19 nt, Artificial Sequence
  Description of Artificial Sequence: Synthetic oligonucleotide
uuucuuaacccauuucagg

SEQ ID NO: 1337055 - RNA, 19 nt, Artificial Sequence
  Description of Artificial Sequence: Synthetic oligonucleotide
aucuaguccagucagugcg

SEQ ID NO: 1337056 - RNA, 19 nt, Artificial Sequence
  Description of Artificial Sequence: Synthetic oligonucleotide
uuguugauuccaaagagac

SEQ ID NO: 1337057 - RNA, 19 nt, Artificial Sequence
  Description of Artificial Sequence: Synthetic oligonucleotide
gauucagagaaucucgacc

SEQ ID NO: 1337058 - RNA, 19 nt, Artificial Sequence
  Description of Artificial Sequence: Synthetic oligonucleotide
aucucgacccuauuaaggc

SEQ ID NO: 1337059 - RNA, 19 nt, Artificial Sequence
  Description of Artificial Sequence: Synthetic oligonucleotide
uuuaugggaaaccaccuga

SEQ ID NO: 1337060 - RNA, 19 nt, Artificial Sequence
  Description of Artificial Sequence: Synthetic oligonucleotide
aauaggagagaugcuaagg

SEQ ID NO: 1337061 - RNA, 19 nt, Artificial Sequence
  Description of Artificial Sequence: Synthetic oligonucleotide
uccucuuaaccccugauug

SEQ ID NO: 1337062 - RNA, 19 nt, Artificial Sequence
  Description of Artificial Sequence: Synthetic oligonucleotide
aaagaaauaggagguggcg

SEQ ID NO: 1337063 - RNA, 19 nt, Artificial Sequence
  Description of Artificial Sequence: Synthetic oligonucleotide
gcaaaacagaacuugaagg

SEQ ID NO: 1337064 - RNA, 19 nt, Artificial Sequence
  Description of Artificial Sequence: Synthetic oligonucleotide
cuggcaaacuuauuuaagg

SEQ ID NO: 1337065 - RNA, 19 nt, Artificial Sequence
  Description of Artificial Sequence: Synthetic oligonucleotide
aaaugaguguaucuuauuu

SEQ ID NO: 1337066 - RNA, 19 nt, Artificial Sequence
  Description of Artificial Sequence: Synthetic oligonucleotide
aacauaaucaccagacaag

SEQ ID NO: 1337067 - RNA, 19 nt, Artificial Sequence
  Description of Artificial Sequence: Synthetic oligonucleotide
guaucuuauuucuuaaccc

SEQ ID NO: 1337068 - RNA, 19 nt, Artificial Sequence
  Description of Artificial Sequence: Synthetic oligonucleotide
uaucuauuuaaagccaggg

SEQ ID NO: 1337069 - RNA, 19 nt, Artificial Sequence
  Description of Artificial Sequence: Synthetic oligonucleotide
aaaccauuaugucucuuug

SEQ ID NO: 1337070 - RNA, 19 nt, Artificial Sequence
  Description of Artificial Sequence: Synthetic oligonucleotide
agcaaaacagaacuugaag

SEQ ID NO: 1337071 - RNA, 19 nt, Artificial Sequence
  Description of Artificial Sequence: Synthetic oligonucleotide
augugucaaaagucgagcc

SEQ ID NO: 1337072 - RNA, 19 nt, Artificial Sequence
  Description of Artificial Sequence: Synthetic oligonucleotide
uuccccuuuacccugaugu

SEQ ID NO: 1337073 - RNA, 19 nt, Artificial Sequence
  Description of Artificial Sequence: Synthetic oligonucleotide
uugaugaugaaaugcgcag

SEQ ID NO: 1337074 - RNA, 19 nt, Artificial Sequence
  Description of Artificial Sequence: Synthetic oligonucleotide
uaggaagauauacauugcc

SEQ ID NO: 1337075 - RNA, 19 nt, Artificial Sequence
  Description of Artificial Sequence: Synthetic oligonucleotide
uguauguaggaagauauac

SEQ ID NO: 1337076 - RNA, 19 nt, Artificial Sequence
  Description of Artificial Sequence: Synthetic oligonucleotide
cacuuuaugggaaaccacc

SEQ ID NO: 1337077 - RNA, 19 nt, Artificial Sequence
  Description of Artificial Sequence: Synthetic oligonucleotide
uucacuguauguaggaaga

SEQ ID NO: 1337078 - RNA, 19 nt, Artificial Sequence
  Description of Artificial Sequence: Synthetic oligonucleotide
agaaauaggagguggcgag

SEQ ID NO: 1337079 - RNA, 19 nt, Artificial Sequence
  Description of Artificial Sequence: Synthetic oligonucleotide
ucuuaacccauuucagggg

SEQ ID NO: 1337080 - RNA, 19 nt, Artificial Sequence
  Description of Artificial Sequence: Synthetic oligonucleotide
agacuuaugcccugugccc

SEQ ID NO: 1337081 - RNA, 19 nt, Artificial Sequence
  Description of Artificial Sequence: Synthetic oligonucleotide
uuuguccuauuucucaggc

SEQ ID NO: 1337082 - RNA, 19 nt, Artificial Sequence
  Description of Artificial Sequence: Synthetic oligonucleotide
gacgauguaggccagccag

SEQ ID NO: 1337083 - RNA, 19 nt, Artificial Sequence
  Description of Artificial Sequence: Synthetic oligonucleotide
aauuggggcagcuuaggca

SEQ ID NO: 1337084 - RNA, 19 nt, Artificial Sequence
  Description of Artificial Sequence: Synthetic oligonucleotide
uguugauuccaaagagacg

SEQ ID NO: 1337085 - RNA, 19 nt, Artificial Sequence
  Description of Artificial Sequence: Synthetic oligonucleotide
aaucucgacccuauuaagg

SEQ ID NO: 1337086 - RNA, 19 nt, Artificial Sequence
  Description of Artificial Sequence: Synthetic oligonucleotide
uugguauagaagcuggcca

SEQ ID NO: 1337087 - RNA, 19 nt, Artificial Sequence
  Description of Artificial Sequence: Synthetic oligonucleotide
uuaaaugaguguaucuuau

SEQ ID NO: 1337088 - RNA, 19 nt, Artificial Sequence
  Description of Artificial Sequence: Synthetic oligonucleotide
aagauauacauugccaagu

SEQ ID NO: 1337089 - RNA, 19 nt, Artificial Sequence
  Description of Artificial Sequence: Synthetic oligonucleotide
uuuaaaugaguguaucuua

SEQ ID NO: 1337090 - RNA, 19 nt, Artificial Sequence
  Description of Artificial Sequence: Synthetic oligonucleotide
augaguguaucuuauuucu

SEQ ID NO: 1337091 - RNA, 19 nt, Artificial Sequence
  Description of Artificial Sequence: Synthetic oligonucleotide
accaagacgauguaggcca

SEQ ID NO: 1337092 - RNA, 19 nt, Artificial Sequence
  Description of Artificial Sequence: Synthetic oligonucleotide
uuggucaggggucucaaag

SEQ ID NO: 1337093 - RNA, 19 nt, Artificial Sequence
  Description of Artificial Sequence: Synthetic oligonucleotide
uuuguucauauuuguaugu

SEQ ID NO: 1337094 - RNA, 19 nt, Artificial Sequence
  Description of Artificial Sequence: Synthetic oligonucleotide
uggaguuuaguuagguuug

SEQ ID NO: 1337095 - RNA, 19 nt, Artificial Sequence
  Description of Artificial Sequence: Synthetic oligonucleotide
guagaguacaauaggagag

SEQ ID NO: 1337096 - RNA, 19 nt, Artificial Sequence
  Description of Artificial Sequence: Synthetic oligonucleotide
ucagaguggaaacugaauu

SEQ ID NO: 1337097 - RNA, 19 nt, Artificial Sequence
  Description of Artificial Sequence: Synthetic oligonucleotide
uuggagauacagaauucag

SEQ ID NO: 1337098 - RNA, 19 nt, Artificial Sequence
  Description of Artificial Sequence: Synthetic oligonucleotide
gaugaaaugcgcagcgucg

SEQ ID NO: 1337099 - RNA, 19 nt, Artificial Sequence
  Description of Artificial Sequence: Synthetic oligonucleotide
auauauaacuggcaaacuu

SEQ ID NO: 1337100 - RNA, 19 nt, Artificial Sequence
  Description of Artificial Sequence: Synthetic oligonucleotide
auaggagagaugcuaagga

SEQ ID NO: 1337101 - RNA, 19 nt, Artificial Sequence
  Description of Artificial Sequence: Synthetic oligonucleotide
uguagcccuaauuuuggag

SEQ ID NO: 1337102 - RNA, 19 nt, Artificial Sequence
  Description of Artificial Sequence: Synthetic oligonucleotide
accuauacucccuccuucc

SEQ ID NO: 1337103 - RNA, 19 nt, Artificial Sequence
  Description of Artificial Sequence: Synthetic oligonucleotide
ugacuuucacuuuauggga

SEQ ID NO: 1337104 - RNA, 19 nt, Artificial Sequence
  Description of Artificial Sequence: Synthetic oligonucleotide
uucagagcaaaugaaacuc

SEQ ID NO: 1337105 - RNA, 19 nt, Artificial Sequence
  Description of Artificial Sequence: Synthetic oligonucleotide
uuuggagauacagaauuca

SEQ ID NO: 1337106 - RNA, 19 nt, Artificial Sequence
  Description of Artificial Sequence: Synthetic oligonucleotide
uuuacccugauguacuagu

SEQ ID NO: 1337107 - RNA, 19 nt, Artificial Sequence
  Description of Artificial Sequence: Synthetic oligonucleotide
aaguuauggaugacguugg

SEQ ID NO: 1337108 - RNA, 19 nt, Artificial Sequence
  Description of Artificial Sequence: Synthetic oligonucleotide
gaauuguaguccauagucc

SEQ ID NO: 1337109 - RNA, 19 nt, Artificial Sequence
  Description of Artificial Sequence: Synthetic oligonucleotide
agaaucucgacccuauuaa

SEQ ID NO: 1337110 - RNA, 19 nt, Artificial Sequence
  Description of Artificial Sequence: Synthetic oligonucleotide
ugaugaaaugcgcagcguc

SEQ ID NO: 1337111 - RNA, 19 nt, Artificial Sequence
  Description of Artificial Sequence: Synthetic oligonucleotide
uucauccugccacagugag

SEQ ID NO: 1337112 - RNA, 19 nt, Artificial Sequence
  Description of Artificial Sequence: Synthetic oligonucleotide
aaagcauguagcccuaauu

SEQ ID NO: 1337113 - RNA, 19 nt, Artificial Sequence
  Description of Artificial Sequence: Synthetic oligonucleotide
cuaaggaacuuucgggagg

SEQ ID NO: 1337114 - RNA, 19 nt, Artificial Sequence
  Description of Artificial Sequence: Synthetic oligonucleotide
aggaaccccauuuuccaac

SEQ ID NO: 1337115 - RNA, 19 nt, Artificial Sequence
  Description of Artificial Sequence: Synthetic oligonucleotide
cagacuuaugcccugugcc

SEQ ID NO: 1337116 - RNA, 19 nt, Artificial Sequence
  Description of Artificial Sequence: Synthetic oligonucleotide
aaaagcagacuuaugcccu

SEQ ID NO: 1337117 - RNA, 19 nt, Artificial Sequence
  Description of Artificial Sequence: Synthetic oligonucleotide
aggagagaugcuaaggaac

SEQ ID NO: 1337118 - RNA, 19 nt, Artificial Sequence
  Description of Artificial Sequence: Synthetic oligonucleotide
agugguguggccccuuaac

SEQ ID NO: 1337119 - RNA, 19 nt, Artificial Sequence
  Description of Artificial Sequence: Synthetic oligonucleotide
ugguauguuuggaagacau

SEQ ID NO: 1337120 - RNA, 19 nt, Artificial Sequence
  Description of Artificial Sequence: Synthetic oligonucleotide
aagaaauaggagguggcga

SEQ ID NO: 1337121 - RNA, 19 nt, Artificial Sequence
  Description of Artificial Sequence: Synthetic oligonucleotide
cuaauuuuggagauacaga

SEQ ID NO: 1337122 - RNA, 19 nt, Artificial Sequence
  Description of Artificial Sequence: Synthetic oligonucleotide
uuuuggagauacagaauuc

SEQ ID NO: 1337123 - RNA, 19 nt, Artificial Sequence
  Description of Artificial Sequence: Synthetic oligonucleotide
gaaucucgacccuauuaag

SEQ ID NO: 1337124 - RNA, 19 nt, Artificial Sequence
  Description of Artificial Sequence: Synthetic oligonucleotide
ccuaccaagacgauguagg

SEQ ID NO: 1337125 - RNA, 19 nt, Artificial Sequence
  Description of Artificial Sequence: Synthetic oligonucleotide
ugagcagugaggcaguguu

SEQ ID NO: 1337126 - RNA, 19 nt, Artificial Sequence
  Description of Artificial Sequence: Synthetic oligonucleotide
gaggaggugaauuguaguc

SEQ ID NO: 1337127 - RNA, 19 nt, Artificial Sequence
  Description of Artificial Sequence: Synthetic oligonucleotide
ugccaaguuauggaugacg

SEQ ID NO: 1337128 - RNA, 19 nt, Artificial Sequence
  Description of Artificial Sequence: Synthetic oligonucleotide
auuaaggcugggcucagga

SEQ ID NO: 1337129 - RNA, 19 nt, Artificial Sequence
  Description of Artificial Sequence: Synthetic oligonucleotide
uuaugggaaaccaccugac

SEQ ID NO: 1337130 - RNA, 19 nt, Artificial Sequence
  Description of Artificial Sequence: Synthetic oligonucleotide
aaaugaaacucacccuuuu

SEQ ID NO: 1337131 - RNA, 19 nt, Artificial Sequence
  Description of Artificial Sequence: Synthetic oligonucleotide
aaagcagacuuaugcccug

SEQ ID NO: 1337132 - RNA, 19 nt, Artificial Sequence
  Description of Artificial Sequence: Synthetic oligonucleotide
ugcgcagcgucguauuugg

SEQ ID NO: 1337133 - RNA, 19 nt, Artificial Sequence
  Description of Artificial Sequence: Synthetic oligonucleotide
aggagagugguguggcccc

SEQ ID NO: 1337134 - RNA, 19 nt, Artificial Sequence
  Description of Artificial Sequence: Synthetic oligonucleotide
ggugaauuguaguccauag

SEQ ID NO: 1337135 - RNA, 19 nt, Artificial Sequence
  Description of Artificial Sequence: Synthetic oligonucleotide
guagcccuaauuuuggaga

SEQ ID NO: 1337136 - RNA, 19 nt, Artificial Sequence
  Description of Artificial Sequence: Synthetic oligonucleotide
agcaaaugaaacucacccu

SEQ ID NO: 1337137 - RNA, 19 nt, Artificial Sequence
  Description of Artificial Sequence: Synthetic oligonucleotide
acuguauguaggaagauau

SEQ ID NO: 1337138 - RNA, 19 nt, Artificial Sequence
  Description of Artificial Sequence: Synthetic oligonucleotide
uuucacuuuaugggaaacc

SEQ ID NO: 1337139 - RNA, 19 nt, Artificial Sequence
  Description of Artificial Sequence: Synthetic oligonucleotide
aguccuaccaagacgaugu

SEQ ID NO: 1337140 - RNA, 19 nt, Artificial Sequence
  Description of Artificial Sequence: Synthetic oligonucleotide
uuuacuucgcugugugcca

SEQ ID NO: 1337141 - RNA, 19 nt, Artificial Sequence
  Description of Artificial Sequence: Synthetic oligonucleotide
aguguaucuuauuucuuaa

SEQ ID NO: 1337142 - RNA, 19 nt, Artificial Sequence
  Description of Artificial Sequence: Synthetic oligonucleotide
ccugauucagagaaucucg

SEQ ID NO: 1337143 - RNA, 19 nt, Artificial Sequence
  Description of Artificial Sequence: Synthetic oligonucleotide
ugaugaugaaaugcgcagc

SEQ ID NO: 1337144 - RNA, 19 nt, Artificial Sequence
  Description of Artificial Sequence: Synthetic oligonucleotide
auaucuauuuaaagccagg

SEQ ID NO: 1337145 - RNA, 19 nt, Artificial Sequence
  Description of Artificial Sequence: Synthetic oligonucleotide
auguuuggaagacauggaa

SEQ ID NO: 1337146 - RNA, 19 nt, Artificial Sequence
  Description of Artificial Sequence: Synthetic oligonucleotide
acccuauuaaggcugggcu

SEQ ID NO: 1337147 - RNA, 19 nt, Artificial Sequence
  Description of Artificial Sequence: Synthetic oligonucleotide
ucacuuuaugggaaaccac

SEQ ID NO: 1337148 - RNA, 19 nt, Artificial Sequence
  Description of Artificial Sequence: Synthetic oligonucleotide
auauaucuauuuaaagcca

SEQ ID NO: 1337149 - RNA, 19 nt, Artificial Sequence
  Description of Artificial Sequence: Synthetic oligonucleotide
aaaagcauguagcccuaau

SEQ ID NO: 1337150 - RNA, 19 nt, Artificial Sequence
  Description of Artificial Sequence: Synthetic oligonucleotide
guuuaguuagguuuguccu

SEQ ID NO: 1337151 - RNA, 19 nt, Artificial Sequence
  Description of Artificial Sequence: Synthetic oligonucleotide
agcagguagaguacaauag

SEQ ID NO: 1337152 - RNA, 19 nt, Artificial Sequence
  Description of Artificial Sequence: Synthetic oligonucleotide
ccuaauuuuggagauacag

SEQ ID NO: 1337153 - RNA, 19 nt, Artificial Sequence
  Description of Artificial Sequence: Synthetic oligonucleotide
gaauuggggcagcuuaggc

SEQ ID NO: 1337154 - RNA, 19 nt, Artificial Sequence
  Description of Artificial Sequence: Synthetic oligonucleotide
ugcaaggauggccaaaauu

SEQ ID NO: 1337155 - RNA, 19 nt, Artificial Sequence
  Description of Artificial Sequence: Synthetic oligonucleotide
aaacuuauuuaaggaaaau

SEQ ID NO: 1337156 - RNA, 19 nt, Artificial Sequence
  Description of Artificial Sequence: Synthetic oligonucleotide
gaucuaguccagucagugc

SEQ ID NO: 1337157 - RNA, 19 nt, Artificial Sequence
  Description of Artificial Sequence: Synthetic oligonucleotide
auuugguauagaagcuggc

SEQ ID NO: 1337158 - RNA, 19 nt, Artificial Sequence
  Description of Artificial Sequence: Synthetic oligonucleotide
uaugggaaaccaccugacu

SEQ ID NO: 1337159 - RNA, 19 nt, Artificial Sequence
  Description of Artificial Sequence: Synthetic oligonucleotide
cuaccaagacgauguaggc

SEQ ID NO: 1337160 - RNA, 19 nt, Artificial Sequence
  Description of Artificial Sequence: Synthetic oligonucleotide
augggaaaccaccugacuu

SEQ ID NO: 1337161 - RNA, 19 nt, Artificial Sequence
  Description of Artificial Sequence: Synthetic oligonucleotide
ucuuaaccccugauugagc

SEQ ID NO: 1337162 - RNA, 19 nt, Artificial Sequence
  Description of Artificial Sequence: Synthetic oligonucleotide
cucgacccuauuaaggcug

SEQ ID NO: 1337163 - RNA, 19 nt, Artificial Sequence
  Description of Artificial Sequence: Synthetic oligonucleotide
uggccaaaauuaauuaauu

SEQ ID NO: 1337164 - RNA, 19 nt, Artificial Sequence
  Description of Artificial Sequence: Synthetic oligonucleotide
gaguguaucuuauuucuua

SEQ ID NO: 1337165 - RNA, 19 nt, Artificial Sequence
  Description of Artificial Sequence: Synthetic oligonucleotide
uguaguccauaguccaucu

SEQ ID NO: 1337166 - RNA, 19 nt, Artificial Sequence
  Description of Artificial Sequence: Synthetic oligonucleotide
uaaggaacuuucgggagga

SEQ ID NO: 1337167 - RNA, 19 nt, Artificial Sequence
  Description of Artificial Sequence: Synthetic oligonucleotide
uucagaguggaaacugaau

SEQ ID NO: 1337168 - RNA, 19 nt, Artificial Sequence
  Description of Artificial Sequence: Synthetic oligonucleotide
uauacucccuccuucccaa

SEQ ID NO: 1337169 - RNA, 19 nt, Artificial Sequence
  Description of Artificial Sequence: Synthetic oligonucleotide
aagaacguagggucuggau

SEQ ID NO: 1337170 - RNA, 19 nt, Artificial Sequence
  Description of Artificial Sequence: Synthetic oligonucleotide
agcaguccuaccaagacga

SEQ ID NO: 1337171 - RNA, 19 nt, Artificial Sequence
  Description of Artificial Sequence: Synthetic oligonucleotide
uccaaagagacggacccca

SEQ ID NO: 1337172 - RNA, 19 nt, Artificial Sequence
  Description of Artificial Sequence: Synthetic oligonucleotide
agauauacauugccaaguu

SEQ ID NO: 1337173 - RNA, 19 nt, Artificial Sequence
  Description of Artificial Sequence: Synthetic oligonucleotide
caaacuuauuuaaggaaaa

SEQ ID NO: 1337174 - RNA, 19 nt, Artificial Sequence
  Description of Artificial Sequence: Synthetic oligonucleotide
guugaugaugaaaugcgca

SEQ ID NO: 1337175 - RNA, 19 nt, Artificial Sequence
  Description of Artificial Sequence: Synthetic oligonucleotide
ucgacccuauuaaggcugg

SEQ ID NO: 1337176 - RNA, 19 nt, Artificial Sequence
  Description of Artificial Sequence: Synthetic oligonucleotide
cucuuaaccccugauugag

SEQ ID NO: 1337177 - RNA, 19 nt, Artificial Sequence
  Description of Artificial Sequence: Synthetic oligonucleotide
ugacaauaccaaagaaaua

SEQ ID NO: 1337178 - RNA, 19 nt, Artificial Sequence
  Description of Artificial Sequence: Synthetic oligonucleotide
gggaaaaccauuaugucuc

SEQ ID NO: 1337179 - RNA, 19 nt, Artificial Sequence
  Description of Artificial Sequence: Synthetic oligonucleotide
uaccaagacgauguaggcc

SEQ ID NO: 1337180 - RNA, 19 nt, Artificial Sequence
  Description of Artificial Sequence: Synthetic oligonucleotide
auagagggguucccagagg

SEQ ID NO: 1337181 - RNA, 19 nt, Artificial Sequence
  Description of Artificial Sequence: Synthetic oligonucleotide
uggccccuuaaccucaucu

SEQ ID NO: 1337182 - RNA, 19 nt, Artificial Sequence
  Description of Artificial Sequence: Synthetic oligonucleotide
cagcuuaggcagcaguacg

SEQ ID NO: 1337183 - RNA, 19 nt, Artificial Sequence
  Description of Artificial Sequence: Synthetic oligonucleotide
agggaauuaucuuucuaua

SEQ ID NO: 1337184 - RNA, 19 nt, Artificial Sequence
  Description of Artificial Sequence: Synthetic oligonucleotide
uauucaucacucgaguguu

SEQ ID NO: 1337185 - RNA, 19 nt, Artificial Sequence
  Description of Artificial Sequence: Synthetic oligonucleotide
cagguagaguacaauagga

SEQ ID NO: 1337186 - RNA, 19 nt, Artificial Sequence
  Description of Artificial Sequence: Synthetic oligonucleotide
uccugauucagagaaucuc

SEQ ID NO: 1337187 - RNA, 19 nt, Artificial Sequence
  Description of Artificial Sequence: Synthetic oligonucleotide
guauguaggaagauauaca

SEQ ID NO: 1337188 - RNA, 19 nt, Artificial Sequence
  Description of Artificial Sequence: Synthetic oligonucleotide
guagaggagaguggugugg

SEQ ID NO: 1337189 - RNA, 19 nt, Artificial Sequence
  Description of Artificial Sequence: Synthetic oligonucleotide
augaccuauacucccuccu

SEQ ID NO: 1337190 - RNA, 19 nt, Artificial Sequence
  Description of Artificial Sequence: Synthetic oligonucleotide
guucuguaugccuuuaucu

SEQ ID NO: 1337191 - RNA, 19 nt, Artificial Sequence
  Description of Artificial Sequence: Synthetic oligonucleotide
uaugucucuuuguuccagu

SEQ ID NO: 1337192 - RNA, 19 nt, Artificial Sequence
  Description of Artificial Sequence: Synthetic oligonucleotide
cuuguuccccacuugucuc

SEQ ID NO: 1337193 - RNA, 19 nt, Artificial Sequence
  Description of Artificial Sequence: Synthetic oligonucleotide
caggcuuguuguugcaagg

SEQ ID NO: 1337194 - RNA, 19 nt, Artificial Sequence
  Description of Artificial Sequence: Synthetic oligonucleotide
gagaaucucgacccuauua

SEQ ID NO: 1337195 - RNA, 19 nt, Artificial Sequence
  Description of Artificial Sequence: Synthetic oligonucleotide
auauaacuggcaaacuuau

SEQ ID NO: 1337196 - RNA, 19 nt, Artificial Sequence
  Description of Artificial Sequence: Synthetic oligonucleotide
caugaccuauacucccucc

SEQ ID NO: 1337197 - RNA, 19 nt, Artificial Sequence
  Description of Artificial Sequence: Synthetic oligonucleotide
ucucgacccuauuaaggcu

SEQ ID NO: 1337198 - RNA, 19 nt, Artificial Sequence
  Description of Artificial Sequence: Synthetic oligonucleotide
uccuaccaagacgauguag

SEQ ID NO: 1337199 - RNA, 19 nt, Artificial Sequence
  Description of Artificial Sequence: Synthetic oligonucleotide
gugguguggccccuuaacc

SEQ ID NO: 1337200 - RNA, 19 nt, Artificial Sequence
  Description of Artificial Sequence: Synthetic oligonucleotide
guaggaagauauacauugc

SEQ ID NO: 1337201 - RNA, 19 nt, Artificial Sequence
  Description of Artificial Sequence: Synthetic oligonucleotide
uagaggagagugguguggc

SEQ ID NO: 1337202 - RNA, 19 nt, Artificial Sequence
  Description of Artificial Sequence: Synthetic oligonucleotide
aagauacagaagauaguuu

SEQ ID NO: 1337203 - RNA, 19 nt, Artificial Sequence
  Description of Artificial Sequence: Synthetic oligonucleotide
guacgcugagcagugaggc

SEQ ID NO: 1337204 - RNA, 19 nt, Artificial Sequence
  Description of Artificial Sequence: Synthetic oligonucleotide
gcuaaggaacuuucgggag

SEQ ID NO: 1337205 - RNA, 19 nt, Artificial Sequence
  Description of Artificial Sequence: Synthetic oligonucleotide
uucagagaaucucgacccu

SEQ ID NO: 1337206 - RNA, 19 nt, Artificial Sequence
  Description of Artificial Sequence: Synthetic oligonucleotide
aaaugcgcagcgucguauu

SEQ ID NO: 1337207 - RNA, 19 nt, Artificial Sequence
  Description of Artificial Sequence: Synthetic oligonucleotide
aguacgcugagcagugagg

SEQ ID NO: 1337208 - RNA, 19 nt, Artificial Sequence
  Description of Artificial Sequence: Synthetic oligonucleotide
acuuucacuuuaugggaaa

SEQ ID NO: 1337209 - RNA, 19 nt, Artificial Sequence
  Description of Artificial Sequence: Synthetic oligonucleotide
ccagacaacaggaaugcug

SEQ ID NO: 1337210 - RNA, 19 nt, Artificial Sequence
  Description of Artificial Sequence: Synthetic oligonucleotide
uuccucuuaaccccugauu

SEQ ID NO: 1337211 - RNA, 19 nt, Artificial Sequence
  Description of Artificial Sequence: Synthetic oligonucleotide
agcagugaggcaguguuga

SEQ ID NO: 1337212 - RNA, 19 nt, Artificial Sequence
  Description of Artificial Sequence: Synthetic oligonucleotide
uuguaguccauaguccauc

SEQ ID NO: 1337213 - RNA, 19 nt, Artificial Sequence
  Description of Artificial Sequence: Synthetic oligonucleotide
gacccuauuaaggcugggc

SEQ ID NO: 1337214 - RNA, 19 nt, Artificial Sequence
  Description of Artificial Sequence: Synthetic oligonucleotide
uaaccucaucuaacuuucc

SEQ ID NO: 1337215 - RNA, 19 nt, Artificial Sequence
  Description of Artificial Sequence: Synthetic oligonucleotide
gaccuauacucccuccuuc

SEQ ID NO: 1337216 - RNA, 19 nt, Artificial Sequence
  Description of Artificial Sequence: Synthetic oligonucleotide
agccuuuccuuggucaggg

SEQ ID NO: 1337217 - RNA, 19 nt, Artificial Sequence
  Description of Artificial Sequence: Synthetic oligonucleotide
uuguucauauuuguaugua

SEQ ID NO: 1337218 - RNA, 19 nt, Artificial Sequence
  Description of Artificial Sequence: Synthetic oligonucleotide
gagaugcuaaggaacuuuc

SEQ ID NO: 1337219 - RNA, 19 nt, Artificial Sequence
  Description of Artificial Sequence: Synthetic oligonucleotide
uuaaggcugggcucaggaa

SEQ ID NO: 1337220 - RNA, 19 nt, Artificial Sequence
  Description of Artificial Sequence: Synthetic oligonucleotide
uagcccuaauuuuggagau

SEQ ID NO: 1337221 - RNA, 19 nt, Artificial Sequence
  Description of Artificial Sequence: Synthetic oligonucleotide
cugaagagcucucaaccca

SEQ ID NO: 1337222 - RNA, 19 nt, Artificial Sequence
  Description of Artificial Sequence: Synthetic oligonucleotide
gcuauucaucacucgagug

SEQ ID NO: 1337223 - RNA, 19 nt, Artificial Sequence
  Description of Artificial Sequence: Synthetic oligonucleotide
caguacgcugagcagugag

SEQ ID NO: 1337224 - RNA, 19 nt, Artificial Sequence
  Description of Artificial Sequence: Synthetic oligonucleotide
gaguacaauaggagagaug

SEQ ID NO: 1337225 - RNA, 19 nt, Artificial Sequence
  Description of Artificial Sequence: Synthetic oligonucleotide
cuuaaccccugauugagcu

SEQ ID NO: 1337226 - RNA, 19 nt, Artificial Sequence
  Description of Artificial Sequence: Synthetic oligonucleotide
gcaaggauggccaaaauua

SEQ ID NO: 1337227 - RNA, 19 nt, Artificial Sequence
  Description of Artificial Sequence: Synthetic oligonucleotide
agagacggaccccauggaa

SEQ ID NO: 1337228 - RNA, 19 nt, Artificial Sequence
  Description of Artificial Sequence: Synthetic oligonucleotide
aagcguggauggcuucuug

SEQ ID NO: 1337229 - RNA, 19 nt, Artificial Sequence
  Description of Artificial Sequence: Synthetic oligonucleotide
uuaugcccugugcccuugg

SEQ ID NO: 1337230 - RNA, 19 nt, Artificial Sequence
  Description of Artificial Sequence: Synthetic oligonucleotide
uauuaaggcugggcucagg

SEQ ID NO: 1337231 - RNA, 19 nt, Artificial Sequence
  Description of Artificial Sequence: Synthetic oligonucleotide
caaagaacguagggucugg

SEQ ID NO: 1337232 - RNA, 19 nt, Artificial Sequence
  Description of Artificial Sequence: Synthetic oligonucleotide
cuuaggcagcaguacgcug

SEQ ID NO: 1337233 - RNA, 19 nt, Artificial Sequence
  Description of Artificial Sequence: Synthetic oligonucleotide
ugaccuauacucccuccuu

SEQ ID NO: 1337234 - RNA, 19 nt, Artificial Sequence
  Description of Artificial Sequence: Synthetic oligonucleotide
aaagaacguagggucugga

SEQ ID NO: 1337235 - RNA, 19 nt, Artificial Sequence
  Description of Artificial Sequence: Synthetic oligonucleotide
uuacccugauguacuaguu

SEQ ID NO: 1337236 - RNA, 19 nt, Artificial Sequence
  Description of Artificial Sequence: Synthetic oligonucleotide
gauguaggccagccagaug

SEQ ID NO: 1337237 - RNA, 19 nt, Artificial Sequence
  Description of Artificial Sequence: Synthetic oligonucleotide
guagggucuggaucuaguc

SEQ ID NO: 1337238 - RNA, 19 nt, Artificial Sequence
  Description of Artificial Sequence: Synthetic oligonucleotide
uggaucuaguccagucagu

SEQ ID NO: 1337239 - RNA, 19 nt, Artificial Sequence
  Description of Artificial Sequence: Synthetic oligonucleotide
caaagagacggaccccaug

SEQ ID NO: 1337240 - RNA, 19 nt, Artificial Sequence
  Description of Artificial Sequence: Synthetic oligonucleotide
gucagugcguuccugaggu

SEQ ID NO: 1337241 - RNA, 19 nt, Artificial Sequence
  Description of Artificial Sequence: Synthetic oligonucleotide
aaugcgcagcgucguauuu

SEQ ID NO: 1337242 - RNA, 19 nt, Artificial Sequence
  Description of Artificial Sequence: Synthetic oligonucleotide
agagaugcuaaggaacuuu

SEQ ID NO: 1337243 - RNA, 19 nt, Artificial Sequence
  Description of Artificial Sequence: Synthetic oligonucleotide
gcauguagcccuaauuuug

SEQ ID NO: 1337244 - RNA, 19 nt, Artificial Sequence
  Description of Artificial Sequence: Synthetic oligonucleotide
aguuauggaugacguuggu

SEQ ID NO: 1337245 - RNA, 19 nt, Artificial Sequence
  Description of Artificial Sequence: Synthetic oligonucleotide
ggaucuaguccagucagug

SEQ ID NO: 1337246 - RNA, 19 nt, Artificial Sequence
  Description of Artificial Sequence: Synthetic oligonucleotide
cuuuacccugauguacuag

SEQ ID NO: 1337247 - RNA, 19 nt, Artificial Sequence
  Description of Artificial Sequence: Synthetic oligonucleotide
cagucagugcguuccugag

SEQ ID NO: 1337248 - RNA, 19 nt, Artificial Sequence
  Description of Artificial Sequence: Synthetic oligonucleotide
gguucuguaugccuuuauc

SEQ ID NO: 1337249 - RNA, 19 nt, Artificial Sequence
  Description of Artificial Sequence: Synthetic oligonucleotide
ggaggugaauuguagucca

SEQ ID NO: 1337250 - RNA, 19 nt, Artificial Sequence
  Description of Artificial Sequence: Synthetic oligonucleotide
ggaccguccggcuuggggc

SEQ ID NO: 1337251 - RNA, 19 nt, Artificial Sequence
  Description of Artificial Sequence: Synthetic oligonucleotide
cuauacucccuccuuccca

SEQ ID NO: 1337252 - RNA, 19 nt, Artificial Sequence
  Description of Artificial Sequence: Synthetic oligonucleotide
uccagugccuucccucagu

SEQ ID NO: 1337253 - RNA, 19 nt, Artificial Sequence
  Description of Artificial Sequence: Synthetic oligonucleotide
augaaaugcgcagcgucgu

SEQ ID NO: 1337254 - RNA, 19 nt, Artificial Sequence
  Description of Artificial Sequence: Synthetic oligonucleotide
gcgagagcaaagaacguag

SEQ ID NO: 1337255 - RNA, 19 nt, Artificial Sequence
  Description of Artificial Sequence: Synthetic oligonucleotide
agacggaccccauggaauu

SEQ ID NO: 1337256 - RNA, 19 nt, Artificial Sequence
  Description of Artificial Sequence: Synthetic oligonucleotide
ucagagaaucucgacccua

SEQ ID NO: 1337257 - RNA, 19 nt, Artificial Sequence
  Description of Artificial Sequence: Synthetic oligonucleotide
gaacuuucgggaggaggug

SEQ ID NO: 1337258 - RNA, 19 nt, Artificial Sequence
  Description of Artificial Sequence: Synthetic oligonucleotide
auguagcccuaauuuugga

SEQ ID NO: 1337259 - RNA, 19 nt, Artificial Sequence
  Description of Artificial Sequence: Synthetic oligonucleotide
ugaaaugcgcagcgucgua

SEQ ID NO: 1337260 - RNA, 19 nt, Artificial Sequence
  Description of Artificial Sequence: Synthetic oligonucleotide
uacgcugagcagugaggca

SEQ ID NO: 1337261 - RNA, 19 nt, Artificial Sequence
  Description of Artificial Sequence: Synthetic oligonucleotide
acggaccccauggaauugg

SEQ ID NO: 1337262 - RNA, 19 nt, Artificial Sequence
  Description of Artificial Sequence: Synthetic oligonucleotide
gaaauaggagguggcgaga

SEQ ID NO: 1337263 - RNA, 19 nt, Artificial Sequence
  Description of Artificial Sequence: Synthetic oligonucleotide
agcagacuuaugcccugug

SEQ ID NO: 1337264 - RNA, 19 nt, Artificial Sequence
  Description of Artificial Sequence: Synthetic oligonucleotide
gcucccaaugugucaaaag

SEQ ID NO: 1337265 - RNA, 19 nt, Artificial Sequence
  Description of Artificial Sequence: Synthetic oligonucleotide
agaagcccggaccguccgg

SEQ ID NO: 1337266 - RNA, 19 nt, Artificial Sequence
  Description of Artificial Sequence: Synthetic oligonucleotide
gguggcgagagcaaagaac

SEQ ID NO: 1337267 - RNA, 19 nt, Artificial Sequence
  Description of Artificial Sequence: Synthetic oligonucleotide
auucagaguggaaacugaa

SEQ ID NO: 1337268 - RNA, 19 nt, Artificial Sequence
  Description of Artificial Sequence: Synthetic oligonucleotide
ggauggccaaaauuaauua

SEQ ID NO: 1337269 - RNA, 19 nt, Artificial Sequence
  Description of Artificial Sequence: Synthetic oligonucleotide
gaagcccggaccguccggc

SEQ ID NO: 1337270 - RNA, 19 nt, Artificial Sequence
  Description of Artificial Sequence: Synthetic oligonucleotide
uggcgagagcaaagaacgu

SEQ ID NO: 1337271 - RNA, 19 nt, Artificial Sequence
  Description of Artificial Sequence: Synthetic oligonucleotide
uguaugccuuuaucuuauc

SEQ ID NO: 1337272 - RNA, 19 nt, Artificial Sequence
  Description of Artificial Sequence: Synthetic oligonucleotide
guauagaagcuggccagca

SEQ ID NO: 1337273 - RNA, 19 nt, Artificial Sequence
  Description of Artificial Sequence: Synthetic oligonucleotide
gcccuaauuuuggagauac

SEQ ID NO: 1337274 - RNA, 19 nt, Artificial Sequence
  Description of Artificial Sequence: Synthetic oligonucleotide
uuacuucgcugugugccac

SEQ ID NO: 1337275 - RNA, 19 nt, Artificial Sequence
  Description of Artificial Sequence: Synthetic oligonucleotide
gaugccccggcuauucauc

SEQ ID NO: 1337276 - RNA, 19 nt, Artificial Sequence
  Description of Artificial Sequence: Synthetic oligonucleotide
gaguuuaguuagguuuguc

SEQ ID NO: 1337277 - RNA, 19 nt, Artificial Sequence
  Description of Artificial Sequence: Synthetic oligonucleotide
gaacuugaaggugguaugu

SEQ ID NO: 1337278 - RNA, 19 nt, Artificial Sequence
  Description of Artificial Sequence: Synthetic oligonucleotide
agucgagccuuuccuuggu

SEQ ID NO: 1337279 - RNA, 19 nt, Artificial Sequence
  Description of Artificial Sequence: Synthetic oligonucleotide
aagcagacuuaugcccugu

SEQ ID NO: 1337280 - RNA, 19 nt, Artificial Sequence
  Description of Artificial Sequence: Synthetic oligonucleotide
caguccuaccaagacgaug

SEQ ID NO: 1337281 - RNA, 19 nt, Artificial Sequence
  Description of Artificial Sequence: Synthetic oligonucleotide
uugcaaggauggccaaaau

SEQ ID NO: 1337282 - RNA, 19 nt, Artificial Sequence
  Description of Artificial Sequence: Synthetic oligonucleotide
cauaaucaccagacaagcu

SEQ ID NO: 1337283 - RNA, 19 nt, Artificial Sequence
  Description of Artificial Sequence: Synthetic oligonucleotide
gcuuggggcacagcgagag

SEQ ID NO: 1337284 - RNA, 19 nt, Artificial Sequence
  Description of Artificial Sequence: Synthetic oligonucleotide
gguuuacuucgcugugugc

SEQ ID NO: 1337285 - RNA, 19 nt, Artificial Sequence
  Description of Artificial Sequence: Synthetic oligonucleotide
uccccuuuacccugaugua

SEQ ID NO: 1337286 - RNA, 19 nt, Artificial Sequence
  Description of Artificial Sequence: Synthetic oligonucleotide
gcaaagaacguagggucug

SEQ ID NO: 1337287 - RNA, 19 nt, Artificial Sequence
  Description of Artificial Sequence: Synthetic oligonucleotide
ugccaagcguggauggcuu

SEQ ID NO: 1337288 - RNA, 19 nt, Artificial Sequence
  Description of Artificial Sequence: Synthetic oligonucleotide
gguauguuuggaagacaug

SEQ ID NO: 1337289 - RNA, 19 nt, Artificial Sequence
  Description of Artificial Sequence: Synthetic oligonucleotide
augcgcagcgucguauuug

SEQ ID NO: 1337290 - RNA, 19 nt, Artificial Sequence
  Description of Artificial Sequence: Synthetic oligonucleotide
gcagcaguacgcugagcag

SEQ ID NO: 1337291 - RNA, 19 nt, Artificial Sequence
  Description of Artificial Sequence: Synthetic oligonucleotide
gaguccaacucaauuuccu

SEQ ID NO: 1337292 - RNA, 19 nt, Artificial Sequence
  Description of Artificial Sequence: Synthetic oligonucleotide
agagaaucucgacccuauu

SEQ ID NO: 1337293 - RNA, 19 nt, Artificial Sequence
  Description of Artificial Sequence: Synthetic oligonucleotide
cuauuaaggcugggcucag

SEQ ID NO: 1337294 - RNA, 19 nt, Artificial Sequence
  Description of Artificial Sequence: Synthetic oligonucleotide
uccagucagugcguuccug

SEQ ID NO: 1337295 - RNA, 19 nt, Artificial Sequence
  Description of Artificial Sequence: Synthetic oligonucleotide
ucagugcguuccugaggug

SEQ ID NO: 1337296 - RNA, 19 nt, Artificial Sequence
  Description of Artificial Sequence: Synthetic oligonucleotide
ugacguuggucagggucca

SEQ ID NO: 1337297 - RNA, 19 nt, Artificial Sequence
  Description of Artificial Sequence: Synthetic oligonucleotide
agacaacaggaaugcugaa

SEQ ID NO: 1337298 - RNA, 19 nt, Artificial Sequence
  Description of Artificial Sequence: Synthetic oligonucleotide
ggaacuuucgggaggaggu

SEQ ID NO: 1337299 - RNA, 19 nt, Artificial Sequence
  Description of Artificial Sequence: Synthetic oligonucleotide
cuguauguaggaagauaua

SEQ ID NO: 1337300 - RNA, 19 nt, Artificial Sequence
  Description of Artificial Sequence: Synthetic oligonucleotide
uccagacaacaggaaugcu

SEQ ID NO: 1337301 - RNA, 19 nt, Artificial Sequence
  Description of Artificial Sequence: Synthetic oligonucleotide
ccuauuaaggcugggcuca

SEQ ID NO: 1337302 - RNA, 19 nt, Artificial Sequence
  Description of Artificial Sequence: Synthetic oligonucleotide
ugcucccaaugugucaaaa

SEQ ID NO: 1337303 - RNA, 19 nt, Artificial Sequence
  Description of Artificial Sequence: Synthetic oligonucleotide
caagacgauguaggccagc

SEQ ID NO: 1337304 - RNA, 19 nt, Artificial Sequence
  Description of Artificial Sequence: Synthetic oligonucleotide
uaguccagucagugcguuc

SEQ ID NO: 1337305 - RNA, 19 nt, Artificial Sequence
  Description of Artificial Sequence: Synthetic oligonucleotide
ccuuucacuguauguagga

SEQ ID NO: 1337306 - RNA, 19 nt, Artificial Sequence
  Description of Artificial Sequence: Synthetic oligonucleotide
gacggaccccauggaauug

SEQ ID NO: 1337307 - RNA, 19 nt, Artificial Sequence
  Description of Artificial Sequence: Synthetic oligonucleotide
gacuuaugcccugugcccu

SEQ ID NO: 1337308 - RNA, 19 nt, Artificial Sequence
  Description of Artificial Sequence: Synthetic oligonucleotide
gggucucaaaggguguucc

SEQ ID NO: 1337309 - RNA, 19 nt, Artificial Sequence
  Description of Artificial Sequence: Synthetic oligonucleotide
acguuggucaggguccaga

SEQ ID NO: 1337310 - RNA, 19 nt, Artificial Sequence
  Description of Artificial Sequence: Synthetic oligonucleotide
ccuauacucccuccuuccc

SEQ ID NO: 1337311 - RNA, 19 nt, Artificial Sequence
  Description of Artificial Sequence: Synthetic oligonucleotide
ccccuuaaccucaucuaac

SEQ ID NO: 1337312 - RNA, 19 nt, Artificial Sequence
  Description of Artificial Sequence: Synthetic oligonucleotide
acuuaugcccugugcccuu

SEQ ID NO: 1337313 - RNA, 19 nt, Artificial Sequence
  Description of Artificial Sequence: Synthetic oligonucleotide
ggagagaugcuaaggaacu

SEQ ID NO: 1337314 - RNA, 19 nt, Artificial Sequence
  Description of Artificial Sequence: Synthetic oligonucleotide
cgagagcaaagaacguagg

SEQ ID NO: 1337315 - RNA, 19 nt, Artificial Sequence
  Description of Artificial Sequence: Synthetic oligonucleotide
cacuguauguaggaagaua

SEQ ID NO: 1337316 - RNA, 19 nt, Artificial Sequence
  Description of Artificial Sequence: Synthetic oligonucleotide
gaaaugcgcagcgucguau

SEQ ID NO: 1337317 - RNA, 19 nt, Artificial Sequence
  Description of Artificial Sequence: Synthetic oligonucleotide
gugcguuccugaggugugg

SEQ ID NO: 1337318 - RNA, 19 nt, Artificial Sequence
  Description of Artificial Sequence: Synthetic oligonucleotide
guccuauuucucaggcuuc

SEQ ID NO: 1337319 - RNA, 19 nt, Artificial Sequence
  Description of Artificial Sequence: Synthetic oligonucleotide
gagacggaccccauggaau

SEQ ID NO: 1337320 - RNA, 19 nt, Artificial Sequence
  Description of Artificial Sequence: Synthetic oligonucleotide
gcagcuuaggcagcaguac

SEQ ID NO: 1337321 - RNA, 19 nt, Artificial Sequence
  Description of Artificial Sequence: Synthetic oligonucleotide
ggcuauucaucacucgagu

SEQ ID NO: 1337322 - RNA, 19 nt, Artificial Sequence
  Description of Artificial Sequence: Synthetic oligonucleotide
uugccaaguuauggaugac

SEQ ID NO: 1337323 - RNA, 19 nt, Artificial Sequence
  Description of Artificial Sequence: Synthetic oligonucleotide
acgauguaggccagccaga

SEQ ID NO: 1337324 - RNA, 19 nt, Artificial Sequence
  Description of Artificial Sequence: Synthetic oligonucleotide
ccugauguacuaguuaaaa

SEQ ID NO: 1337325 - RNA, 19 nt, Artificial Sequence
  Description of Artificial Sequence: Synthetic oligonucleotide
cggcuauucaucacucgag

SEQ ID NO: 1337326 - RNA, 19 nt, Artificial Sequence
  Description of Artificial Sequence: Synthetic oligonucleotide
cuuggaguuuaguuagguu

SEQ ID NO: 1337327 - RNA, 19 nt, Artificial Sequence
  Description of Artificial Sequence: Synthetic oligonucleotide
gcagcgucguauuugguau

SEQ ID NO: 1337328 - RNA, 19 nt, Artificial Sequence
  Description of Artificial Sequence: Synthetic oligonucleotide
cgucguauuugguauagaa

SEQ ID NO: 1337329 - RNA, 19 nt, Artificial Sequence
  Description of Artificial Sequence: Synthetic oligonucleotide
acuuucgggaggaggugaa

SEQ ID NO: 1337330 - RNA, 19 nt, Artificial Sequence
  Description of Artificial Sequence: Synthetic oligonucleotide
ccauuucagggguuccuuc

SEQ ID NO: 1337331 - RNA, 19 nt, Artificial Sequence
  Description of Artificial Sequence: Synthetic oligonucleotide
ccccuuuacccugauguac

SEQ ID NO: 1337332 - RNA, 19 nt, Artificial Sequence
  Description of Artificial Sequence: Synthetic oligonucleotide
gccaaguuauggaugacgu

SEQ ID NO: 1337333 - RNA, 19 nt, Artificial Sequence
  Description of Artificial Sequence: Synthetic oligonucleotide
gccccuuaaccucaucuaa

SEQ ID NO: 1337334 - RNA, 19 nt, Artificial Sequence
  Description of Artificial Sequence: Synthetic oligonucleotide
cccggcuauucaucacucg

SEQ ID NO: 1337335 - RNA, 19 nt, Artificial Sequence
  Description of Artificial Sequence: Synthetic oligonucleotide
ccggcuauucaucacucga

SEQ ID NO: 1337336 - RNA, 19 nt, Artificial Sequence
  Description of Artificial Sequence: Synthetic oligonucleotide
cagagaaucucgacccuau

SEQ ID NO: 1337337 - RNA, 19 nt, Artificial Sequence
  Description of Artificial Sequence: Synthetic oligonucleotide
ccuaggaacuguaucuugu

SEQ ID NO: 1337338 - RNA, 19 nt, Artificial Sequence
  Description of Artificial Sequence: Synthetic oligonucleotide
uggguucuguaugccuuua

SEQ ID NO: 1337339 - RNA, 19 nt, Artificial Sequence
  Description of Artificial Sequence: Synthetic oligonucleotide
cucaucuaacuuuccugau

SEQ ID NO: 1337340 - RNA, 19 nt, Artificial Sequence
  Description of Artificial Sequence: Synthetic oligonucleotide
ggcgagagcaaagaacgua

SEQ ID NO: 1337341 - RNA, 19 nt, Artificial Sequence
  Description of Artificial Sequence: Synthetic oligonucleotide
acagaacuugaagguggua

SEQ ID NO: 1337342 - RNA, 19 nt, Artificial Sequence
  Description of Artificial Sequence: Synthetic oligonucleotide
ccagucagugcguuccuga

SEQ ID NO: 1337343 - RNA, 19 nt, Artificial Sequence
  Description of Artificial Sequence: Synthetic oligonucleotide
gacguuggucaggguccag

SEQ ID NO: 1337344 - RNA, 19 nt, Artificial Sequence
  Description of Artificial Sequence: Synthetic oligonucleotide
aggggucucaaaggguguu

SEQ ID NO: 1337345 - RNA, 19 nt, Artificial Sequence
  Description of Artificial Sequence: Synthetic oligonucleotide
ccaugaccuauacucccuc

SEQ ID NO: 1337346 - RNA, 19 nt, Artificial Sequence
  Description of Artificial Sequence: Synthetic oligonucleotide
cagcaguacgcugagcagu

SEQ ID NO: 1337347 - RNA, 19 nt, Artificial Sequence
  Description of Artificial Sequence: Synthetic oligonucleotide
ggccccuuaaccucaucua

SEQ ID NO: 1337348 - RNA, 19 nt, Artificial Sequence
  Description of Artificial Sequence: Synthetic oligonucleotide
ggaaaccaccugacuucag

SEQ ID NO: 1337349 - RNA, 19 nt, Artificial Sequence
  Description of Artificial Sequence: Synthetic oligonucleotide
cccuuaaccucaucuaacu

SEQ ID NO: 1337350 - RNA, 19 nt, Artificial Sequence
  Description of Artificial Sequence: Synthetic oligonucleotide
cagugcguuccugaggugu

SEQ ID NO: 1337351 - RNA, 19 nt, Artificial Sequence
  Description of Artificial Sequence: Synthetic oligonucleotide
ggguccagacaacaggaau

SEQ ID NO: 1337352 - RNA, 19 nt, Artificial Sequence
  Description of Artificial Sequence: Synthetic oligonucleotide
agcccuaauuuuggagaua

SEQ ID NO: 1337353 - RNA, 19 nt, Artificial Sequence
  Description of Artificial Sequence: Synthetic oligonucleotide
ccccauggaauuggggcag

SEQ ID NO: 1337354 - RNA, 19 nt, Artificial Sequence
  Description of Artificial Sequence: Synthetic oligonucleotide
gagagaugcuaaggaacuu

SEQ ID NO: 1337355 - RNA, 19 nt, Artificial Sequence
  Description of Artificial Sequence: Synthetic oligonucleotide
gucaggggucucaaagggu

SEQ ID NO: 1337356 - RNA, 19 nt, Artificial Sequence
  Description of Artificial Sequence: Synthetic oligonucleotide
gcugccaagcguggauggc

SEQ ID NO: 1337357 - RNA, 19 nt, Artificial Sequence
  Description of Artificial Sequence: Synthetic oligonucleotide
gcccggaccguccggcuug

SEQ ID NO: 1337358 - RNA, 19 nt, Artificial Sequence
  Description of Artificial Sequence: Synthetic oligonucleotide
ccaacaccuaggaacugua

SEQ ID NO: 1337359 - RNA, 19 nt, Artificial Sequence
  Description of Artificial Sequence: Synthetic oligonucleotide
cugccaagcguggauggcu

SEQ ID NO: 1337360 - RNA, 19 nt, Artificial Sequence
  Description of Artificial Sequence: Synthetic oligonucleotide
guccuaccaagacgaugua

SEQ ID NO: 1337361 - RNA, 19 nt, Artificial Sequence
  Description of Artificial Sequence: Synthetic oligonucleotide
ggaguuuaguuagguuugu

SEQ ID NO: 1337362 - RNA, 19 nt, Artificial Sequence
  Description of Artificial Sequence: Synthetic oligonucleotide
cagcgucguauuugguaua

SEQ ID NO: 1337363 - RNA, 19 nt, Artificial Sequence
  Description of Artificial Sequence: Synthetic oligonucleotide
ccccggcuauucaucacuc

SEQ ID NO: 1337364 - RNA, 19 nt, Artificial Sequence
  Description of Artificial Sequence: Synthetic oligonucleotide
gcuuaggcagcaguacgcu

SEQ ID NO: 1337365 - RNA, 19 nt, Artificial Sequence
  Description of Artificial Sequence: Synthetic oligonucleotide
cccuaauuuuggagauaca

SEQ ID NO: 1337366 - RNA, 19 nt, Artificial Sequence
  Description of Artificial Sequence: Synthetic oligonucleotide
gccccggcuauucaucacu

SEQ ID NO: 1337367 - RNA, 19 nt, Artificial Sequence
  Description of Artificial Sequence: Synthetic oligonucleotide
gccaagcguggauggcuuc

SEQ ID NO: 1337368 - RNA, 19 nt, Artificial Sequence
  Description of Artificial Sequence: Synthetic oligonucleotide
gcguuccugagguguggga

SEQ ID NO: 1337369 - RNA, 19 nt, Artificial Sequence
  Description of Artificial Sequence: Synthetic oligonucleotide
cgcagcgucguauuuggua

SEQ ID NO: 1337370 - RNA, 19 nt, Artificial Sequence
  Description of Artificial Sequence: Synthetic oligonucleotide
caccuaggaacuguaucuu

SEQ ID NO: 1337371 - RNA, 19 nt, Artificial Sequence
  Description of Artificial Sequence: Synthetic oligonucleotide
gcgagagcucucacaccug

SEQ ID NO: 1337372 - RNA, 19 nt, Artificial Sequence
  Description of Artificial Sequence: Synthetic oligonucleotide
ccuuuacccugauguacua

SEQ ID NO: 1337373 - RNA, 19 nt, Artificial Sequence
  Description of Artificial Sequence: Synthetic oligonucleotide
cgaguguugggguuuacuu

SEQ ID NO: 1337374 - RNA, 19 nt, Artificial Sequence
  Description of Artificial Sequence: Synthetic oligonucleotide
ccggcuuggggcacagcga

SEQ ID NO: 1337375 - RNA, 19 nt, Artificial Sequence
  Description of Artificial Sequence: Synthetic oligonucleotide
cccaacaccuaggaacugu

SEQ ID NO: 1337376 - RNA, 19 nt, Artificial Sequence
  Description of Artificial Sequence: Synthetic oligonucleotide
cuuucgggaggaggugaau

SEQ ID NO: 1337377 - RNA, 19 nt, Artificial Sequence
  Description of Artificial Sequence: Synthetic oligonucleotide
gcaguacgcugagcaguga

SEQ ID NO: 1337378 - RNA, 19 nt, Artificial Sequence
  Description of Artificial Sequence: Synthetic oligonucleotide
cgacccuauuaaggcuggg

SEQ ID NO: 1337379 - RNA, 19 nt, Artificial Sequence
  Description of Artificial Sequence: Synthetic oligonucleotide
ccaaagagacggaccccau

SEQ ID NO: 1337380 - RNA, 19 nt, Artificial Sequence
  Description of Artificial Sequence: Synthetic oligonucleotide
cccggaccguccggcuugg

SEQ ID NO: 1337381 - RNA, 19 nt, Artificial Sequence
  Description of Artificial Sequence: Synthetic oligonucleotide
ccauggaauuggggcagcu

SEQ ID NO: 1337382 - RNA, 19 nt, Artificial Sequence
  Description of Artificial Sequence: Synthetic oligonucleotide
cguccggcuuggggcacag

SEQ ID NO: 1337383 - RNA, 19 nt, Artificial Sequence
  Description of Artificial Sequence: Synthetic oligonucleotide
ccggaccguccggcuuggg

SEQ ID NO: 1337384 - RNA, 19 nt, Artificial Sequence
  Description of Artificial Sequence: Synthetic oligonucleotide
gcgcagcgucguauuuggu

SEQ ID NO: 1337385 - RNA, 19 nt, Artificial Sequence
  Description of Artificial Sequence: Synthetic oligonucleotide
ccguccggcuuggggcaca

SEQ ID NO: 1337386 - RNA, 19 nt, Artificial Sequence
  Description of Artificial Sequence: Synthetic oligonucleotide
ucaaauacggcaaagagcg

SEQ ID NO: 1337387 - RNA, 19 nt, Artificial Sequence
  Description of Artificial Sequence: Synthetic oligonucleotide
aauggagaccuucaaauac

SEQ ID NO: 1337388 - RNA, 19 nt, Artificial Sequence
  Description of Artificial Sequence: Synthetic oligonucleotide
uaaagaaagcuccaguugg

SEQ ID NO: 1337389 - RNA, 19 nt, Artificial Sequence
  Description of Artificial Sequence: Synthetic oligonucleotide
uagguaaacaugaagaggc

SEQ ID NO: 1337390 - RNA, 19 nt, Artificial Sequence
  Description of Artificial Sequence: Synthetic oligonucleotide
acuauaaauaaaucuacuc

SEQ ID NO: 1337391 - RNA, 19 nt, Artificial Sequence
  Description of Artificial Sequence: Synthetic oligonucleotide
uuaucugccucucagagcc

SEQ ID NO: 1337392 - RNA, 19 nt, Artificial Sequence
  Description of Artificial Sequence: Synthetic oligonucleotide
aaauuuaucugccucucag

SEQ ID NO: 1337393 - RNA, 19 nt, Artificial Sequence
  Description of Artificial Sequence: Synthetic oligonucleotide
gaaggugaugccuauagag

SEQ ID NO: 1337394 - RNA, 19 nt, Artificial Sequence
  Description of Artificial Sequence: Synthetic oligonucleotide
uucaaauacggcaaagagc

SEQ ID NO: 1337395 - RNA, 19 nt, Artificial Sequence
  Description of Artificial Sequence: Synthetic oligonucleotide
cagacuuccuuaaagaugc

SEQ ID NO: 1337396 - RNA, 19 nt, Artificial Sequence
  Description of Artificial Sequence: Synthetic oligonucleotide
uguacagugacacagugau

SEQ ID NO: 1337397 - RNA, 19 nt, Artificial Sequence
  Description of Artificial Sequence: Synthetic oligonucleotide
aacccaauaaccugagauc

SEQ ID NO: 1337398 - RNA, 19 nt, Artificial Sequence
  Description of Artificial Sequence: Synthetic oligonucleotide
gaugagaaggaccaccagg

SEQ ID NO: 1337399 - RNA, 19 nt, Artificial Sequence
  Description of Artificial Sequence: Synthetic oligonucleotide
aaauacggcaaagagcggg

SEQ ID NO: 1337400 - RNA, 19 nt, Artificial Sequence
  Description of Artificial Sequence: Synthetic oligonucleotide
acacgucaaauuuaucugc

SEQ ID NO: 1337401 - RNA, 19 nt, Artificial Sequence
  Description of Artificial Sequence: Synthetic oligonucleotide
gaagcaguaguagaggagg

SEQ ID NO: 1337402 - RNA, 19 nt, Artificial Sequence
  Description of Artificial Sequence: Synthetic oligonucleotide
cacagugauguaaagaaag

SEQ ID NO: 1337403 - RNA, 19 nt, Artificial Sequence
  Description of Artificial Sequence: Synthetic oligonucleotide
uagaaucccgccaaggaag

SEQ ID NO: 1337404 - RNA, 19 nt, Artificial Sequence
  Description of Artificial Sequence: Synthetic oligonucleotide
uaaucaguccagcugagca

SEQ ID NO: 1337405 - RNA, 19 nt, Artificial Sequence
  Description of Artificial Sequence: Synthetic oligonucleotide
agaagcccagaccaaaggc

SEQ ID NO: 1337406 - RNA, 19 nt, Artificial Sequence
  Description of Artificial Sequence: Synthetic oligonucleotide
ugaagagcacggcagauga

SEQ ID NO: 1337407 - RNA, 19 nt, Artificial Sequence
  Description of Artificial Sequence: Synthetic oligonucleotide
uuuuggaccaagcaccaca

SEQ ID NO: 1337408 - RNA, 19 nt, Artificial Sequence
  Description of Artificial Sequence: Synthetic oligonucleotide
gagaccuucaaauacggca

SEQ ID NO: 1337409 - RNA, 19 nt, Artificial Sequence
  Description of Artificial Sequence: Synthetic oligonucleotide
gaagaucacggccaggugc

SEQ ID NO: 1337410 - RNA, 19 nt, Artificial Sequence
  Description of Artificial Sequence: Synthetic oligonucleotide
cagaccaaaggcuagaauc

SEQ ID NO: 1337411 - RNA, 19 nt, Artificial Sequence
  Description of Artificial Sequence: Synthetic oligonucleotide
uaaccugagaucuaccaca

SEQ ID NO: 1337412 - RNA, 19 nt, Artificial Sequence
  Description of Artificial Sequence: Synthetic oligonucleotide
aaagaugccggcgauggag

SEQ ID NO: 1337413 - RNA, 19 nt, Artificial Sequence
  Description of Artificial Sequence: Synthetic oligonucleotide
uauagagaagcaguaguag

SEQ ID NO: 1337414 - RNA, 19 nt, Artificial Sequence
  Description of Artificial Sequence: Synthetic oligonucleotide
auuacuucaacuauaaaua

SEQ ID NO: 1337415 - RNA, 19 nt, Artificial Sequence
  Description of Artificial Sequence: Synthetic oligonucleotide
ucuaccacacgucaaauuu

SEQ ID NO: 1337416 - RNA, 19 nt, Artificial Sequence
  Description of Artificial Sequence: Synthetic oligonucleotide
augccagagaggcagaggg

SEQ ID NO: 1337417 - RNA, 19 nt, Artificial Sequence
  Description of Artificial Sequence: Synthetic oligonucleotide
uuugucagccauuuguugu

SEQ ID NO: 1337418 - RNA, 19 nt, Artificial Sequence
  Description of Artificial Sequence: Synthetic oligonucleotide
uguaaagaaagcuccaguu

SEQ ID NO: 1337419 - RNA, 19 nt, Artificial Sequence
  Description of Artificial Sequence: Synthetic oligonucleotide
ucugagguggacaaaugga

SEQ ID NO: 1337420 - RNA, 19 nt, Artificial Sequence
  Description of Artificial Sequence: Synthetic oligonucleotide
uacucucugaggaagcugc

SEQ ID NO: 1337421 - RNA, 19 nt, Artificial Sequence
  Description of Artificial Sequence: Synthetic oligonucleotide
aauuuaucugccucucaga

SEQ ID NO: 1337422 - RNA, 19 nt, Artificial Sequence
  Description of Artificial Sequence: Synthetic oligonucleotide
uggacuuauagguaaacau

SEQ ID NO: 1337423 - RNA, 19 nt, Artificial Sequence
  Description of Artificial Sequence: Synthetic oligonucleotide
ucuguguaaggguccagcg

SEQ ID NO: 1337424 - RNA, 19 nt, Artificial Sequence
  Description of Artificial Sequence: Synthetic oligonucleotide
aggaaaucauuacuucaac

SEQ ID NO: 1337425 - RNA, 19 nt, Artificial Sequence
  Description of Artificial Sequence: Synthetic oligonucleotide
guaaagaaagcuccaguug

SEQ ID NO: 1337426 - RNA, 19 nt, Artificial Sequence
  Description of Artificial Sequence: Synthetic oligonucleotide
aaucuacucucugaggaag

SEQ ID NO: 1337427 - RNA, 19 nt, Artificial Sequence
  Description of Artificial Sequence: Synthetic oligonucleotide
gaagaggcucccaagaacc

SEQ ID NO: 1337428 - RNA, 19 nt, Artificial Sequence
  Description of Artificial Sequence: Synthetic oligonucleotide
aaaggcuagaaucccgcca

SEQ ID NO: 1337429 - RNA, 19 nt, Artificial Sequence
  Description of Artificial Sequence: Synthetic oligonucleotide
uggagaccuucaaauacgg

SEQ ID NO: 1337430 - RNA, 19 nt, Artificial Sequence
  Description of Artificial Sequence: Synthetic oligonucleotide
gagguaaucaguccagcug

SEQ ID NO: 1337431 - RNA, 19 nt, Artificial Sequence
  Description of Artificial Sequence: Synthetic oligonucleotide
auagagaagcaguaguaga

SEQ ID NO: 1337432 - RNA, 19 nt, Artificial Sequence
  Description of Artificial Sequence: Synthetic oligonucleotide
aggaggaaaucauuacuuc

SEQ ID NO: 1337433 - RNA, 19 nt, Artificial Sequence
  Description of Artificial Sequence: Synthetic oligonucleotide
acaagcccacaucaagugc

SEQ ID NO: 1337434 - RNA, 19 nt, Artificial Sequence
  Description of Artificial Sequence: Synthetic oligonucleotide
acuucaacuauaaauaaau

SEQ ID NO: 1337435 - RNA, 19 nt, Artificial Sequence
  Description of Artificial Sequence: Synthetic oligonucleotide
gacuuauagguaaacauga

SEQ ID NO: 1337436 - RNA, 19 nt, Artificial Sequence
  Description of Artificial Sequence: Synthetic oligonucleotide
uguguggacuuauagguaa

SEQ ID NO: 1337437 - RNA, 19 nt, Artificial Sequence
  Description of Artificial Sequence: Synthetic oligonucleotide
aaggcaaagcccuccacgu

SEQ ID NO: 1337438 - RNA, 19 nt, Artificial Sequence
  Description of Artificial Sequence: Synthetic oligonucleotide
acagugauguaaagaaagc

SEQ ID NO: 1337439 - RNA, 19 nt, Artificial Sequence
  Description of Artificial Sequence: Synthetic oligonucleotide
cugagguggacaaauggag

SEQ ID NO: 1337440 - RNA, 19 nt, Artificial Sequence
  Description of Artificial Sequence: Synthetic oligonucleotide
aaucccgccaaggaagagg

SEQ ID NO: 1337441 - RNA, 19 nt, Artificial Sequence
  Description of Artificial Sequence: Synthetic oligonucleotide
agguaaucaguccagcuga

SEQ ID NO: 1337442 - RNA, 19 nt, Artificial Sequence
  Description of Artificial Sequence: Synthetic oligonucleotide
guagaggaggaccaggccc

SEQ ID NO: 1337443 - RNA, 19 nt, Artificial Sequence
  Description of Artificial Sequence: Synthetic oligonucleotide
cuaggucacaaaauaauca

SEQ ID NO: 1337444 - RNA, 19 nt, Artificial Sequence
  Description of Artificial Sequence: Synthetic oligonucleotide
uaggucacaaaauaaucau

SEQ ID NO: 1337445 - RNA, 19 nt, Artificial Sequence
  Description of Artificial Sequence: Synthetic oligonucleotide
cacacgucaaauuuaucug

SEQ ID NO: 1337446 - RNA, 19 nt, Artificial Sequence
  Description of Artificial Sequence: Synthetic oligonucleotide
uaguagaggaggaccaggc

SEQ ID NO: 1337447 - RNA, 19 nt, Artificial Sequence
  Description of Artificial Sequence: Synthetic oligonucleotide
uccuuaaagaugccggcga

SEQ ID NO: 1337448 - RNA, 19 nt, Artificial Sequence
  Description of Artificial Sequence: Synthetic oligonucleotide
aaggcuagaaucccgccaa

SEQ ID NO: 1337449 - RNA, 19 nt, Artificial Sequence
  Description of Artificial Sequence: Synthetic oligonucleotide
aaauggagaccuucaaaua

SEQ ID NO: 1337450 - RNA, 19 nt, Artificial Sequence
  Description of Artificial Sequence: Synthetic oligonucleotide
aaaucuacucucugaggaa

SEQ ID NO: 1337451 - RNA, 19 nt, Artificial Sequence
  Description of Artificial Sequence: Synthetic oligonucleotide
guucugaaggcccagguca

SEQ ID NO: 1337452 - RNA, 19 nt, Artificial Sequence
  Description of Artificial Sequence: Synthetic oligonucleotide
cucugagguggacaaaugg

SEQ ID NO: 1337453 - RNA, 19 nt, Artificial Sequence
  Description of Artificial Sequence: Synthetic oligonucleotide
ugcagucugaacccaauaa

SEQ ID NO: 1337454 - RNA, 19 nt, Artificial Sequence
  Description of Artificial Sequence: Synthetic oligonucleotide
gagacccagaaacaugagc

SEQ ID NO: 1337455 - RNA, 19 nt, Artificial Sequence
  Description of Artificial Sequence: Synthetic oligonucleotide
caaggaggaacucagagaa

SEQ ID NO: 1337456 - RNA, 19 nt, Artificial Sequence
  Description of Artificial Sequence: Synthetic oligonucleotide
cacgucaaauuuaucugcc

SEQ ID NO: 1337457 - RNA, 19 nt, Artificial Sequence
  Description of Artificial Sequence: Synthetic oligonucleotide
cuuccuuaaagaugccggc

SEQ ID NO: 1337458 - RNA, 19 nt, Artificial Sequence
  Description of Artificial Sequence: Synthetic oligonucleotide
cauggugucgauaggguuc

SEQ ID NO: 1337459 - RNA, 19 nt, Artificial Sequence
  Description of Artificial Sequence: Synthetic oligonucleotide
ugaagaucagagagaagau

SEQ ID NO: 1337460 - RNA, 19 nt, Artificial Sequence
  Description of Artificial Sequence: Synthetic oligonucleotide
ugaucacccagcaggugag

SEQ ID NO: 1337461 - RNA, 19 nt, Artificial Sequence
  Description of Artificial Sequence: Synthetic oligonucleotide
gaaccagcgcccuggacag

SEQ ID NO: 1337462 - RNA, 19 nt, Artificial Sequence
  Description of Artificial Sequence: Synthetic oligonucleotide
agcagcucgaggucagcgc

SEQ ID NO: 1337463 - RNA, 19 nt, Artificial Sequence
  Description of Artificial Sequence: Synthetic oligonucleotide
uuuguuguagaaggugaug

SEQ ID NO: 1337464 - RNA, 19 nt, Artificial Sequence
  Description of Artificial Sequence: Synthetic oligonucleotide
auggagaccuucaaauacg

SEQ ID NO: 1337465 - RNA, 19 nt, Artificial Sequence
  Description of Artificial Sequence: Synthetic oligonucleotide
aaggugaugccuauagaga

SEQ ID NO: 1337466 - RNA, 19 nt, Artificial Sequence
  Description of Artificial Sequence: Synthetic oligonucleotide
aggugaugccuauagagaa

SEQ ID NO: 1337467 - RNA, 19 nt, Artificial Sequence
  Description of Artificial Sequence: Synthetic oligonucleotide
caucaagugcuguugccag

SEQ ID NO: 1337468 - RNA, 19 nt, Artificial Sequence
  Description of Artificial Sequence: Synthetic oligonucleotide
acccagaaacaugagcggc

SEQ ID NO: 1337469 - RNA, 19 nt, Artificial Sequence
  Description of Artificial Sequence: Synthetic oligonucleotide
uccgugacuccuuccagag

SEQ ID NO: 1337470 - RNA, 19 nt, Artificial Sequence
  Description of Artificial Sequence: Synthetic oligonucleotide
ucagccauuuguuguagaa

SEQ ID NO: 1337471 - RNA, 19 nt, Artificial Sequence
  Description of Artificial Sequence: Synthetic oligonucleotide
gaugccaccgaugaacgac

SEQ ID NO: 1337472 - RNA, 19 nt, Artificial Sequence
  Description of Artificial Sequence: Synthetic oligonucleotide
ucugaggaagcugcggucc

SEQ ID NO: 1337473 - RNA, 19 nt, Artificial Sequence
  Description of Artificial Sequence: Synthetic oligonucleotide
aagaggcucccaagaaccc

SEQ ID NO: 1337474 - RNA, 19 nt, Artificial Sequence
  Description of Artificial Sequence: Synthetic oligonucleotide
uugccuugugcucaugccu

SEQ ID NO: 1337475 - RNA, 19 nt, Artificial Sequence
  Description of Artificial Sequence: Synthetic oligonucleotide
cuuugucagccauuuguug

SEQ ID NO: 1337476 - RNA, 19 nt, Artificial Sequence
  Description of Artificial Sequence: Synthetic oligonucleotide
uuguagaaggugaugccua

SEQ ID NO: 1337477 - RNA, 19 nt, Artificial Sequence
  Description of Artificial Sequence: Synthetic oligonucleotide
ugcaucuuggaagcggaag

SEQ ID NO: 1337478 - RNA, 19 nt, Artificial Sequence
  Description of Artificial Sequence: Synthetic oligonucleotide
gaagagacccagaaacaug

SEQ ID NO: 1337479 - RNA, 19 nt, Artificial Sequence
  Description of Artificial Sequence: Synthetic oligonucleotide
guaaggguccagcggaugc

SEQ ID NO: 1337480 - RNA, 19 nt, Artificial Sequence
  Description of Artificial Sequence: Synthetic oligonucleotide
agcacggcagaugauuugg

SEQ ID NO: 1337481 - RNA, 19 nt, Artificial Sequence
  Description of Artificial Sequence: Synthetic oligonucleotide
agguggacaaauggagacc

SEQ ID NO: 1337482 - RNA, 19 nt, Artificial Sequence
  Description of Artificial Sequence: Synthetic oligonucleotide
uacggcaaagagcgggaag

SEQ ID NO: 1337483 - RNA, 19 nt, Artificial Sequence
  Description of Artificial Sequence: Synthetic oligonucleotide
gugaugccuauagagaagc

SEQ ID NO: 1337484 - RNA, 19 nt, Artificial Sequence
  Description of Artificial Sequence: Synthetic oligonucleotide
caaagagcgggaagagacc

SEQ ID NO: 1337485 - RNA, 19 nt, Artificial Sequence
  Description of Artificial Sequence: Synthetic oligonucleotide
ggacuuauagguaaacaug

SEQ ID NO: 1337486 - RNA, 19 nt, Artificial Sequence
  Description of Artificial Sequence: Synthetic oligonucleotide
aaagaaagcuccaguugga

SEQ ID NO: 1337487 - RNA, 19 nt, Artificial Sequence
  Description of Artificial Sequence: Synthetic oligonucleotide
aucccgccaaggaagaggc

SEQ ID NO: 1337488 - RNA, 19 nt, Artificial Sequence
  Description of Artificial Sequence: Synthetic oligonucleotide
agguaaacaugaagaggcc

SEQ ID NO: 1337489 - RNA, 19 nt, Artificial Sequence
  Description of Artificial Sequence: Synthetic oligonucleotide
uggaagcucuuugucagcc

SEQ ID NO: 1337490 - RNA, 19 nt, Artificial Sequence
  Description of Artificial Sequence: Synthetic oligonucleotide
aagaucacggccaggugca

SEQ ID NO: 1337491 - RNA, 19 nt, Artificial Sequence
  Description of Artificial Sequence: Synthetic oligonucleotide
cuuagggccaccaucaccu

SEQ ID NO: 1337492 - RNA, 19 nt, Artificial Sequence
  Description of Artificial Sequence: Synthetic oligonucleotide
guaguagaggaggaccagg

SEQ ID NO: 1337493 - RNA, 19 nt, Artificial Sequence
  Description of Artificial Sequence: Synthetic oligonucleotide
uccaguuggacaagcccac

SEQ ID NO: 1337494 - RNA, 19 nt, Artificial Sequence
  Description of Artificial Sequence: Synthetic oligonucleotide
caaggaagaggcucccaag

SEQ ID NO: 1337495 - RNA, 19 nt, Artificial Sequence
  Description of Artificial Sequence: Synthetic oligonucleotide
ucuggacacaaggaggaac

SEQ ID NO: 1337496 - RNA, 19 nt, Artificial Sequence
  Description of Artificial Sequence: Synthetic oligonucleotide
ugauuuggucauuguguac

SEQ ID NO: 1337497 - RNA, 19 nt, Artificial Sequence
  Description of Artificial Sequence: Synthetic oligonucleotide
agcaguaguagaggaggac

SEQ ID NO: 1337498 - RNA, 19 nt, Artificial Sequence
  Description of Artificial Sequence: Synthetic oligonucleotide
uggucauuguugccccuag

SEQ ID NO: 1337499 - RNA, 19 nt, Artificial Sequence
  Description of Artificial Sequence: Synthetic oligonucleotide
augccuauagagaagcagu

SEQ ID NO: 1337500 - RNA, 19 nt, Artificial Sequence
  Description of Artificial Sequence: Synthetic oligonucleotide
ucaccggcucccuucacug

SEQ ID NO: 1337501 - RNA, 19 nt, Artificial Sequence
  Description of Artificial Sequence: Synthetic oligonucleotide
aagagcacggcagaugauu

SEQ ID NO: 1337502 - RNA, 19 nt, Artificial Sequence
  Description of Artificial Sequence: Synthetic oligonucleotide
uggacaaauggagaccuuc

SEQ ID NO: 1337503 - RNA, 19 nt, Artificial Sequence
  Description of Artificial Sequence: Synthetic oligonucleotide
cuauagagaagcaguagua

SEQ ID NO: 1337504 - RNA, 19 nt, Artificial Sequence
  Description of Artificial Sequence: Synthetic oligonucleotide
ugccuauagagaagcagua

SEQ ID NO: 1337505 - RNA, 19 nt, Artificial Sequence
  Description of Artificial Sequence: Synthetic oligonucleotide
acuaaggcaaagcccucca

SEQ ID NO: 1337506 - RNA, 19 nt, Artificial Sequence
  Description of Artificial Sequence: Synthetic oligonucleotide
ucccuucacugccaguuca

SEQ ID NO: 1337507 - RNA, 19 nt, Artificial Sequence
  Description of Artificial Sequence: Synthetic oligonucleotide
uugccccuaggucacaaaa

SEQ ID NO: 1337508 - RNA, 19 nt, Artificial Sequence
  Description of Artificial Sequence: Synthetic oligonucleotide
ugccuugugcucaugccuc

SEQ ID NO: 1337509 - RNA, 19 nt, Artificial Sequence
  Description of Artificial Sequence: Synthetic oligonucleotide
augccggcgauggagagag

SEQ ID NO: 1337510 - RNA, 19 nt, Artificial Sequence
  Description of Artificial Sequence: Synthetic oligonucleotide
gacagggcugagaagagga

SEQ ID NO: 1337511 - RNA, 19 nt, Artificial Sequence
  Description of Artificial Sequence: Synthetic oligonucleotide
ccuucgggagcuuagggcc

SEQ ID NO: 1337512 - RNA, 19 nt, Artificial Sequence
  Description of Artificial Sequence: Synthetic oligonucleotide
ggucauuguguacagugac

SEQ ID NO: 1337513 - RNA, 19 nt, Artificial Sequence
  Description of Artificial Sequence: Synthetic oligonucleotide
agagaagaucaggaugaag

SEQ ID NO: 1337514 - RNA, 19 nt, Artificial Sequence
  Description of Artificial Sequence: Synthetic oligonucleotide
uggugagccugucauucac

SEQ ID NO: 1337515 - RNA, 19 nt, Artificial Sequence
  Description of Artificial Sequence: Synthetic oligonucleotide
gaggcugaucugaucaccc

SEQ ID NO: 1337516 - RNA, 19 nt, Artificial Sequence
  Description of Artificial Sequence: Synthetic oligonucleotide
gguaaacaugaagaggccc

SEQ ID NO: 1337517 - RNA, 19 nt, Artificial Sequence
  Description of Artificial Sequence: Synthetic oligonucleotide
gccucucagagccagagug

SEQ ID NO: 1337518 - RNA, 19 nt, Artificial Sequence
  Description of Artificial Sequence: Synthetic oligonucleotide
uguggacuuauagguaaac

SEQ ID NO: 1337519 - RNA, 19 nt, Artificial Sequence
  Description of Artificial Sequence: Synthetic oligonucleotide
gacaaauggagaccuucaa

SEQ ID NO: 1337520 - RNA, 19 nt, Artificial Sequence
  Description of Artificial Sequence: Synthetic oligonucleotide
accaaaggcuagaaucccg

SEQ ID NO: 1337521 - RNA, 19 nt, Artificial Sequence
  Description of Artificial Sequence: Synthetic oligonucleotide
uugucagccauuuguugua

SEQ ID NO: 1337522 - RNA, 19 nt, Artificial Sequence
  Description of Artificial Sequence: Synthetic oligonucleotide
aguaguagaggaggaccag

SEQ ID NO: 1337523 - RNA, 19 nt, Artificial Sequence
  Description of Artificial Sequence: Synthetic oligonucleotide
ugaugccuauagagaagca

SEQ ID NO: 1337524 - RNA, 19 nt, Artificial Sequence
  Description of Artificial Sequence: Synthetic oligonucleotide
caaauacggcaaagagcgg

SEQ ID NO: 1337525 - RNA, 19 nt, Artificial Sequence
  Description of Artificial Sequence: Synthetic oligonucleotide
ccuaggucacaaaauaauc

SEQ ID NO: 1337526 - RNA, 19 nt, Artificial Sequence
  Description of Artificial Sequence: Synthetic oligonucleotide
agugacacagugauguaaa

SEQ ID NO: 1337527 - RNA, 19 nt, Artificial Sequence
  Description of Artificial Sequence: Synthetic oligonucleotide
agcgggaagagacccagaa

SEQ ID NO: 1337528 - RNA, 19 nt, Artificial Sequence
  Description of Artificial Sequence: Synthetic oligonucleotide
uuccacacaaaggccaagu

SEQ ID NO: 1337529 - RNA, 19 nt, Artificial Sequence
  Description of Artificial Sequence: Synthetic oligonucleotide
ggcaaagcccuccacguug

SEQ ID NO: 1337530 - RNA, 19 nt, Artificial Sequence
  Description of Artificial Sequence: Synthetic oligonucleotide
agaccuucaaauacggcaa

SEQ ID NO: 1337531 - RNA, 19 nt, Artificial Sequence
  Description of Artificial Sequence: Synthetic oligonucleotide
cgugacuccuuccagaggc

SEQ ID NO: 1337532 - RNA, 19 nt, Artificial Sequence
  Description of Artificial Sequence: Synthetic oligonucleotide
cuccugagguaaucagucc

SEQ ID NO: 1337533 - RNA, 19 nt, Artificial Sequence
  Description of Artificial Sequence: Synthetic oligonucleotide
caguaguagaggaggacca

SEQ ID NO: 1337534 - RNA, 19 nt, Artificial Sequence
  Description of Artificial Sequence: Synthetic oligonucleotide
agcggaagauuuucucuga

SEQ ID NO: 1337535 - RNA, 19 nt, Artificial Sequence
  Description of Artificial Sequence: Synthetic oligonucleotide
cuagaaucccgccaaggaa

SEQ ID NO: 1337536 - RNA, 19 nt, Artificial Sequence
  Description of Artificial Sequence: Synthetic oligonucleotide
agagcgggaagagacccag

SEQ ID NO: 1337537 - RNA, 19 nt, Artificial Sequence
  Description of Artificial Sequence: Synthetic oligonucleotide
gcagucugaacccaauaac

SEQ ID NO: 1337538 - RNA, 19 nt, Artificial Sequence
  Description of Artificial Sequence: Synthetic oligonucleotide
caucaccucuggaaugcag

SEQ ID NO: 1337539 - RNA, 19 nt, Artificial Sequence
  Description of Artificial Sequence: Synthetic oligonucleotide
ugucagccauuuguuguag

SEQ ID NO: 1337540 - RNA, 19 nt, Artificial Sequence
  Description of Artificial Sequence: Synthetic oligonucleotide
cucgaggucagcgcugggg

SEQ ID NO: 1337541 - RNA, 19 nt, Artificial Sequence
  Description of Artificial Sequence: Synthetic oligonucleotide
ccaaaggcuagaaucccgc

SEQ ID NO: 1337542 - RNA, 19 nt, Artificial Sequence
  Description of Artificial Sequence: Synthetic oligonucleotide
acguugaacuguguggacu

SEQ ID NO: 1337543 - RNA, 19 nt, Artificial Sequence
  Description of Artificial Sequence: Synthetic oligonucleotide
caccgaugaacgacgcccc

SEQ ID NO: 1337544 - RNA, 19 nt, Artificial Sequence
  Description of Artificial Sequence: Synthetic oligonucleotide
uguaaggguccagcggaug

SEQ ID NO: 1337545 - RNA, 19 nt, Artificial Sequence
  Description of Artificial Sequence: Synthetic oligonucleotide
cagagugacaguggagaag

SEQ ID NO: 1337546 - RNA, 19 nt, Artificial Sequence
  Description of Artificial Sequence: Synthetic oligonucleotide
aagaugccggcgauggaga

SEQ ID NO: 1337547 - RNA, 19 nt, Artificial Sequence
  Description of Artificial Sequence: Synthetic oligonucleotide
ugccccuaggucacaaaau

SEQ ID NO: 1337548 - RNA, 19 nt, Artificial Sequence
  Description of Artificial Sequence: Synthetic oligonucleotide
ugcucaugccucaggcaac

SEQ ID NO: 1337549 - RNA, 19 nt, Artificial Sequence
  Description of Artificial Sequence: Synthetic oligonucleotide
agugaggcuggauguucug

SEQ ID NO: 1337550 - RNA, 19 nt, Artificial Sequence
  Description of Artificial Sequence: Synthetic oligonucleotide
acauggugucgauaggguu

SEQ ID NO: 1337551 - RNA, 19 nt, Artificial Sequence
  Description of Artificial Sequence: Synthetic oligonucleotide
cacuaaggcaaagcccucc

SEQ ID NO: 1337552 - RNA, 19 nt, Artificial Sequence
  Description of Artificial Sequence: Synthetic oligonucleotide
gcgauggagagagugaggc

SEQ ID NO: 1337553 - RNA, 19 nt, Artificial Sequence
  Description of Artificial Sequence: Synthetic oligonucleotide
gagcacggcagaugauuug

SEQ ID NO: 1337554 - RNA, 19 nt, Artificial Sequence
  Description of Artificial Sequence: Synthetic oligonucleotide
gagccugucauucacuuuu

SEQ ID NO: 1337555 - RNA, 19 nt, Artificial Sequence
  Description of Artificial Sequence: Synthetic oligonucleotide
ccauccgugggccagcagg

SEQ ID NO: 1337556 - RNA, 19 nt, Artificial Sequence
  Description of Artificial Sequence: Synthetic oligonucleotide
uccgugggccagcaggaac

SEQ ID NO: 1337557 - RNA, 19 nt, Artificial Sequence
  Description of Artificial Sequence: Synthetic oligonucleotide
gugagccgccaacagcagg

SEQ ID NO: 1337558 - RNA, 19 nt, Artificial Sequence
  Description of Artificial Sequence: Synthetic oligonucleotide
augccaccgaugaacgacg

SEQ ID NO: 1337559 - RNA, 19 nt, Artificial Sequence
  Description of Artificial Sequence: Synthetic oligonucleotide
aagcaguaguagaggagga

SEQ ID NO: 1337560 - RNA, 19 nt, Artificial Sequence
  Description of Artificial Sequence: Synthetic oligonucleotide
accugagaucuaccacacg

SEQ ID NO: 1337561 - RNA, 19 nt, Artificial Sequence
  Description of Artificial Sequence: Synthetic oligonucleotide
agguggaacauggugucga

SEQ ID NO: 1337562 - RNA, 19 nt, Artificial Sequence
  Description of Artificial Sequence: Synthetic oligonucleotide
aucuaccacacgucaaauu

SEQ ID NO: 1337563 - RNA, 19 nt, Artificial Sequence
  Description of Artificial Sequence: Synthetic oligonucleotide
agaugccggcgauggagag

SEQ ID NO: 1337564 - RNA, 19 nt, Artificial Sequence
  Description of Artificial Sequence: Synthetic oligonucleotide
caccaucaccucuggaaug

SEQ ID NO: 1337565 - RNA, 19 nt, Artificial Sequence
  Description of Artificial Sequence: Synthetic oligonucleotide
agucaagggcccaccuccc

SEQ ID NO: 1337566 - RNA, 19 nt, Artificial Sequence
  Description of Artificial Sequence: Synthetic oligonucleotide
cacggcagaugauuugguc

SEQ ID NO: 1337567 - RNA, 19 nt, Artificial Sequence
  Description of Artificial Sequence: Synthetic oligonucleotide
cccaagaacccgcaggagc

SEQ ID NO: 1337568 - RNA, 19 nt, Artificial Sequence
  Description of Artificial Sequence: Synthetic oligonucleotide
cuaaggcaaagcccuccac

SEQ ID NO: 1337569 - RNA, 19 nt, Artificial Sequence
  Description of Artificial Sequence: Synthetic oligonucleotide
gcuagaaucccgccaagga

SEQ ID NO: 1337570 - RNA, 19 nt, Artificial Sequence
  Description of Artificial Sequence: Synthetic oligonucleotide
guaaucaguccagcugagc

SEQ ID NO: 1337571 - RNA, 19 nt, Artificial Sequence
  Description of Artificial Sequence: Synthetic oligonucleotide
ggaaaucauuacuucaacu

SEQ ID NO: 1337572 - RNA, 19 nt, Artificial Sequence
  Description of Artificial Sequence: Synthetic oligonucleotide
cucccaagaacccgcagga

SEQ ID NO: 1337573 - RNA, 19 nt, Artificial Sequence
  Description of Artificial Sequence: Synthetic oligonucleotide
guggacuuauagguaaaca

SEQ ID NO: 1337574 - RNA, 19 nt, Artificial Sequence
  Description of Artificial Sequence: Synthetic oligonucleotide
gugucgauaggguucugaa

SEQ ID NO: 1337575 - RNA, 19 nt, Artificial Sequence
  Description of Artificial Sequence: Synthetic oligonucleotide
gaagcccagaccaaaggcu

SEQ ID NO: 1337576 - RNA, 19 nt, Artificial Sequence
  Description of Artificial Sequence: Synthetic oligonucleotide
auggucaugaagaggggaa

SEQ ID NO: 1337577 - RNA, 19 nt, Artificial Sequence
  Description of Artificial Sequence: Synthetic oligonucleotide
caagcccacaucaagugcu

SEQ ID NO: 1337578 - RNA, 19 nt, Artificial Sequence
  Description of Artificial Sequence: Synthetic oligonucleotide
cagcauggucaugaagagg

SEQ ID NO: 1337579 - RNA, 19 nt, Artificial Sequence
  Description of Artificial Sequence: Synthetic oligonucleotide
ccaccgaugaacgacgccc

SEQ ID NO: 1337580 - RNA, 19 nt, Artificial Sequence
  Description of Artificial Sequence: Synthetic oligonucleotide
gcuugaagaucagagagaa

SEQ ID NO: 1337581 - RNA, 19 nt, Artificial Sequence
  Description of Artificial Sequence: Synthetic oligonucleotide
cuggacacaaggaggaacu

SEQ ID NO: 1337582 - RNA, 19 nt, Artificial Sequence
  Description of Artificial Sequence: Synthetic oligonucleotide
agggcuugccuugugcuca

SEQ ID NO: 1337583 - RNA, 19 nt, Artificial Sequence
  Description of Artificial Sequence: Synthetic oligonucleotide
gauuuucucugagguggac

SEQ ID NO: 1337584 - RNA, 19 nt, Artificial Sequence
  Description of Artificial Sequence: Synthetic oligonucleotide
agcucgaggucagcgcugg

SEQ ID NO: 1337585 - RNA, 19 nt, Artificial Sequence
  Description of Artificial Sequence: Synthetic oligonucleotide
ggaaagagcaggagccucc

SEQ ID NO: 1337586 - RNA, 19 nt, Artificial Sequence
  Description of Artificial Sequence: Synthetic oligonucleotide
ggugaugccuauagagaag

SEQ ID NO: 1337587 - RNA, 19 nt, Artificial Sequence
  Description of Artificial Sequence: Synthetic oligonucleotide
gaagcucuuugucagccau

SEQ ID NO: 1337588 - RNA, 19 nt, Artificial Sequence
  Description of Artificial Sequence: Synthetic oligonucleotide
ugccaccgaugaacgacgc

SEQ ID NO: 1337589 - RNA, 19 nt, Artificial Sequence
  Description of Artificial Sequence: Synthetic oligonucleotide
agaugccagagaggcagag

SEQ ID NO: 1337590 - RNA, 19 nt, Artificial Sequence
  Description of Artificial Sequence: Synthetic oligonucleotide
cugaucugaucacccagca

SEQ ID NO: 1337591 - RNA, 19 nt, Artificial Sequence
  Description of Artificial Sequence: Synthetic oligonucleotide
cacccagcaggugagccgc

SEQ ID NO: 1337592 - RNA, 19 nt, Artificial Sequence
  Description of Artificial Sequence: Synthetic oligonucleotide
agcucuuugucagccauuu

SEQ ID NO: 1337593 - RNA, 19 nt, Artificial Sequence
  Description of Artificial Sequence: Synthetic oligonucleotide
cacguugaacuguguggac

SEQ ID NO: 1337594 - RNA, 19 nt, Artificial Sequence
  Description of Artificial Sequence: Synthetic oligonucleotide
cauuguguacagugacaca

SEQ ID NO: 1337595 - RNA, 19 nt, Artificial Sequence
  Description of Artificial Sequence: Synthetic oligonucleotide
ucccggacuggucauuguu

SEQ ID NO: 1337596 - RNA, 19 nt, Artificial Sequence
  Description of Artificial Sequence: Synthetic oligonucleotide
gccaccaucaccucuggaa

SEQ ID NO: 1337597 - RNA, 19 nt, Artificial Sequence
  Description of Artificial Sequence: Synthetic oligonucleotide
caggaccagggcugcacgc

SEQ ID NO: 1337598 - RNA, 19 nt, Artificial Sequence
  Description of Artificial Sequence: Synthetic oligonucleotide
cccagcgaugagaaggacc

SEQ ID NO: 1337599 - RNA, 19 nt, Artificial Sequence
  Description of Artificial Sequence: Synthetic oligonucleotide
gcuugccuugugcucaugc

SEQ ID NO: 1337600 - RNA, 19 nt, Artificial Sequence
  Description of Artificial Sequence: Synthetic oligonucleotide
ccacacgucaaauuuaucu

SEQ ID NO: 1337601 - RNA, 19 nt, Artificial Sequence
  Description of Artificial Sequence: Synthetic oligonucleotide
ggucauuguugccccuagg

SEQ ID NO: 1337602 - RNA, 19 nt, Artificial Sequence
  Description of Artificial Sequence: Synthetic oligonucleotide
cuaccacacgucaaauuua

SEQ ID NO: 1337603 - RNA, 19 nt, Artificial Sequence
  Description of Artificial Sequence: Synthetic oligonucleotide
ggcuagaaucccgccaagg

SEQ ID NO: 1337604 - RNA, 19 nt, Artificial Sequence
  Description of Artificial Sequence: Synthetic oligonucleotide
cagcagcucgaggucagcg

SEQ ID NO: 1337605 - RNA, 19 nt, Artificial Sequence
  Description of Artificial Sequence: Synthetic oligonucleotide
agaaucccgccaaggaaga

SEQ ID NO: 1337606 - RNA, 19 nt, Artificial Sequence
  Description of Artificial Sequence: Synthetic oligonucleotide
agggugcagacuuccuuaa

SEQ ID NO: 1337607 - RNA, 19 nt, Artificial Sequence
  Description of Artificial Sequence: Synthetic oligonucleotide
ggcccugcagucugaaccc

SEQ ID NO: 1337608 - RNA, 19 nt, Artificial Sequence
  Description of Artificial Sequence: Synthetic oligonucleotide
ccggacuggucauuguugc

SEQ ID NO: 1337609 - RNA, 19 nt, Artificial Sequence
  Description of Artificial Sequence: Synthetic oligonucleotide
ucccaagaacccgcaggag

SEQ ID NO: 1337610 - RNA, 19 nt, Artificial Sequence
  Description of Artificial Sequence: Synthetic oligonucleotide
gaccuucaaauacggcaaa

SEQ ID NO: 1337611 - RNA, 19 nt, Artificial Sequence
  Description of Artificial Sequence: Synthetic oligonucleotide
gccuauagagaagcaguag

SEQ ID NO: 1337612 - RNA, 19 nt, Artificial Sequence
  Description of Artificial Sequence: Synthetic oligonucleotide
gagaucuaccacacgucaa

SEQ ID NO: 1337613 - RNA, 19 nt, Artificial Sequence
  Description of Artificial Sequence: Synthetic oligonucleotide
gcggaugccaccgaugaac

SEQ ID NO: 1337614 - RNA, 19 nt, Artificial Sequence
  Description of Artificial Sequence: Synthetic oligonucleotide
ugccucucagagccagagu

SEQ ID NO: 1337615 - RNA, 19 nt, Artificial Sequence
  Description of Artificial Sequence: Synthetic oligonucleotide
cauccgugggccagcagga

SEQ ID NO: 1337616 - RNA, 19 nt, Artificial Sequence
  Description of Artificial Sequence: Synthetic oligonucleotide
agcacugaaccagcgcccu

SEQ ID NO: 1337617 - RNA, 19 nt, Artificial Sequence
  Description of Artificial Sequence: Synthetic oligonucleotide
cuucacugccaguucagcu

SEQ ID NO: 1337618 - RNA, 19 nt, Artificial Sequence
  Description of Artificial Sequence: Synthetic oligonucleotide
cagguggaacauggugucg

SEQ ID NO: 1337619 - RNA, 19 nt, Artificial Sequence
  Description of Artificial Sequence: Synthetic oligonucleotide
ccaacagcagggugcagac

SEQ ID NO: 1337620 - RNA, 19 nt, Artificial Sequence
  Description of Artificial Sequence: Synthetic oligonucleotide
caguggagaagaggucacc

SEQ ID NO: 1337621 - RNA, 19 nt, Artificial Sequence
  Description of Artificial Sequence: Synthetic oligonucleotide
cuccgugacuccuuccaga

SEQ ID NO: 1337622 - RNA, 19 nt, Artificial Sequence
  Description of Artificial Sequence: Synthetic oligonucleotide
ugaggcccagucucuccgu

SEQ ID NO: 1337623 - RNA, 19 nt, Artificial Sequence
  Description of Artificial Sequence: Synthetic oligonucleotide
cagggugcagacuuccuua

SEQ ID NO: 1337624 - RNA, 19 nt, Artificial Sequence
  Description of Artificial Sequence: Synthetic oligonucleotide
acagugacacagugaugua

SEQ ID NO: 1337625 - RNA, 19 nt, Artificial Sequence
  Description of Artificial Sequence: Synthetic oligonucleotide
accacacgucaaauuuauc

SEQ ID NO: 1337626 - RNA, 19 nt, Artificial Sequence
  Description of Artificial Sequence: Synthetic oligonucleotide
gaacccgcaggagcagccc

SEQ ID NO: 1337627 - RNA, 19 nt, Artificial Sequence
  Description of Artificial Sequence: Synthetic oligonucleotide
ccuauagagaagcaguagu

SEQ ID NO: 1337628 - RNA, 19 nt, Artificial Sequence
  Description of Artificial Sequence: Synthetic oligonucleotide
uggggcccaggcccuucgg

SEQ ID NO: 1337629 - RNA, 19 nt, Artificial Sequence
  Description of Artificial Sequence: Synthetic oligonucleotide
gccgccaacagcagggugc

SEQ ID NO: 1337630 - RNA, 19 nt, Artificial Sequence
  Description of Artificial Sequence: Synthetic oligonucleotide
ggacaaauggagaccuuca

SEQ ID NO: 1337631 - RNA, 19 nt, Artificial Sequence
  Description of Artificial Sequence: Synthetic oligonucleotide
cuguguggacuuauaggua

SEQ ID NO: 1337632 - RNA, 19 nt, Artificial Sequence
  Description of Artificial Sequence: Synthetic oligonucleotide
uguugccccuaggucacaa

SEQ ID NO: 1337633 - RNA, 19 nt, Artificial Sequence
  Description of Artificial Sequence: Synthetic oligonucleotide
cucuccugagguaaucagu

SEQ ID NO: 1337634 - RNA, 19 nt, Artificial Sequence
  Description of Artificial Sequence: Synthetic oligonucleotide
agagcacggcagaugauuu

SEQ ID NO: 1337635 - RNA, 19 nt, Artificial Sequence
  Description of Artificial Sequence: Synthetic oligonucleotide
uuagggccaccaucaccuc

SEQ ID NO: 1337636 - RNA, 19 nt, Artificial Sequence
  Description of Artificial Sequence: Synthetic oligonucleotide
gguggacaaauggagaccu

SEQ ID NO: 1337637 - RNA, 19 nt, Artificial Sequence
  Description of Artificial Sequence: Synthetic oligonucleotide
cuucgggagcuuagggcca

SEQ ID NO: 1337638 - RNA, 19 nt, Artificial Sequence
  Description of Artificial Sequence: Synthetic oligonucleotide
caggcaacacugggcagug

SEQ ID NO: 1337639 - RNA, 19 nt, Artificial Sequence
  Description of Artificial Sequence: Synthetic oligonucleotide
gaugccggcgauggagaga

SEQ ID NO: 1337640 - RNA, 19 nt, Artificial Sequence
  Description of Artificial Sequence: Synthetic oligonucleotide
gucucuccgugacuccuuc

SEQ ID NO: 1337641 - RNA, 19 nt, Artificial Sequence
  Description of Artificial Sequence: Synthetic oligonucleotide
cagugacacagugauguaa

SEQ ID NO: 1337642 - RNA, 19 nt, Artificial Sequence
  Description of Artificial Sequence: Synthetic oligonucleotide
agccgccaacagcagggug

SEQ ID NO: 1337643 - RNA, 19 nt, Artificial Sequence
  Description of Artificial Sequence: Synthetic oligonucleotide
gcccuucgggagcuuaggg

SEQ ID NO: 1337644 - RNA, 19 nt, Artificial Sequence
  Description of Artificial Sequence: Synthetic oligonucleotide
uucgggagcuuagggccac

SEQ ID NO: 1337645 - RNA, 19 nt, Artificial Sequence
  Description of Artificial Sequence: Synthetic oligonucleotide
cggaugccaccgaugaacg

SEQ ID NO: 1337646 - RNA, 19 nt, Artificial Sequence
  Description of Artificial Sequence: Synthetic oligonucleotide
gugacuccuuccagaggcc

SEQ ID NO: 1337647 - RNA, 19 nt, Artificial Sequence
  Description of Artificial Sequence: Synthetic oligonucleotide
ggagaccuucaaauacggc

SEQ ID NO: 1337648 - RNA, 19 nt, Artificial Sequence
  Description of Artificial Sequence: Synthetic oligonucleotide
cacucuccugagguaauca

SEQ ID NO: 1337649 - RNA, 19 nt, Artificial Sequence
  Description of Artificial Sequence: Synthetic oligonucleotide
cuggggcccaggcccuucg

SEQ ID NO: 1337650 - RNA, 19 nt, Artificial Sequence
  Description of Artificial Sequence: Synthetic oligonucleotide
cccggacuggucauuguug

SEQ ID NO: 1337651 - RNA, 19 nt, Artificial Sequence
  Description of Artificial Sequence: Synthetic oligonucleotide
ggcgauggagagagugagg

SEQ ID NO: 1337652 - RNA, 19 nt, Artificial Sequence
  Description of Artificial Sequence: Synthetic oligonucleotide
aggaccaggcccagcguca

SEQ ID NO: 1337653 - RNA, 19 nt, Artificial Sequence
  Description of Artificial Sequence: Synthetic oligonucleotide
cagcucgaggucagcgcug

SEQ ID NO: 1337654 - RNA, 19 nt, Artificial Sequence
  Description of Artificial Sequence: Synthetic oligonucleotide
cugaaccagcgcccuggac

SEQ ID NO: 1337655 - RNA, 19 nt, Artificial Sequence
  Description of Artificial Sequence: Synthetic oligonucleotide
aggcaaagcccuccacguu

SEQ ID NO: 1337656 - RNA, 19 nt, Artificial Sequence
  Description of Artificial Sequence: Synthetic oligonucleotide
caucuguguaaggguccag

SEQ ID NO: 1337657 - RNA, 19 nt, Artificial Sequence
  Description of Artificial Sequence: Synthetic oligonucleotide
caggagccucccagcagug

SEQ ID NO: 1337658 - RNA, 19 nt, Artificial Sequence
  Description of Artificial Sequence: Synthetic oligonucleotide
acgcgggcccuguggcugg

SEQ ID NO: 1337659 - RNA, 19 nt, Artificial Sequence
  Description of Artificial Sequence: Synthetic oligonucleotide
gccccuaggucacaaaaua

SEQ ID NO: 1337660 - RNA, 19 nt, Artificial Sequence
  Description of Artificial Sequence: Synthetic oligonucleotide
ccaagcaccacaggaaaga

SEQ ID NO: 1337661 - RNA, 19 nt, Artificial Sequence
  Description of Artificial Sequence: Synthetic oligonucleotide
gccggcgauggagagagug

SEQ ID NO: 1337662 - RNA, 19 nt, Artificial Sequence
  Description of Artificial Sequence: Synthetic oligonucleotide
cccugcaucuuggaagcgg

SEQ ID NO: 1337663 - RNA, 19 nt, Artificial Sequence
  Description of Artificial Sequence: Synthetic oligonucleotide
cacgcgggcccuguggcug

SEQ ID NO: 1337664 - RNA, 19 nt, Artificial Sequence
  Description of Artificial Sequence: Synthetic oligonucleotide
ggguccagcggaugccacc

SEQ ID NO: 1337665 - RNA, 19 nt, Artificial Sequence
  Description of Artificial Sequence: Synthetic oligonucleotide
gcgaugagaaggaccacca

SEQ ID NO: 1337666 - RNA, 19 nt, Artificial Sequence
  Description of Artificial Sequence: Synthetic oligonucleotide
gggcccaccuccccauccg

SEQ ID NO: 1337667 - RNA, 19 nt, Artificial Sequence
  Description of Artificial Sequence: Synthetic oligonucleotide
ggugucgauaggguucuga

SEQ ID NO: 1337668 - RNA, 19 nt, Artificial Sequence
  Description of Artificial Sequence: Synthetic oligonucleotide
agcggaugccaccgaugaa

SEQ ID NO: 1337669 - RNA, 19 nt, Artificial Sequence
  Description of Artificial Sequence: Synthetic oligonucleotide
cccuucacugccaguucag

SEQ ID NO: 1337670 - RNA, 19 nt, Artificial Sequence
  Description of Artificial Sequence: Synthetic oligonucleotide
gucaccggcucccuucacu

SEQ ID NO: 1337671 - RNA, 19 nt, Artificial Sequence
  Description of Artificial Sequence: Synthetic oligonucleotide
ucccgccaaggaagaggcu

SEQ ID NO: 1337672 - RNA, 19 nt, Artificial Sequence
  Description of Artificial Sequence: Synthetic oligonucleotide
gcgguccaggugaugaggc

SEQ ID NO: 1337673 - RNA, 19 nt, Artificial Sequence
  Description of Artificial Sequence: Synthetic oligonucleotide
cccgccaaggaagaggcuc

SEQ ID NO: 1337674 - RNA, 19 nt, Artificial Sequence
  Description of Artificial Sequence: Synthetic oligonucleotide
cugcagucugaacccaaua

SEQ ID NO: 1337675 - RNA, 19 nt, Artificial Sequence
  Description of Artificial Sequence: Synthetic oligonucleotide
guugccccuaggucacaaa

SEQ ID NO: 1337676 - RNA, 19 nt, Artificial Sequence
  Description of Artificial Sequence: Synthetic oligonucleotide
ccgcuggcugcucuggagc

SEQ ID NO: 1337677 - RNA, 19 nt, Artificial Sequence
  Description of Artificial Sequence: Synthetic oligonucleotide
gcucuuugucagccauuug

SEQ ID NO: 1337678 - RNA, 19 nt, Artificial Sequence
  Description of Artificial Sequence: Synthetic oligonucleotide
ccagcggaugccaccgaug

SEQ ID NO: 1337679 - RNA, 19 nt, Artificial Sequence
  Description of Artificial Sequence: Synthetic oligonucleotide
guagaaggugaugccuaua

SEQ ID NO: 1337680 - RNA, 19 nt, Artificial Sequence
  Description of Artificial Sequence: Synthetic oligonucleotide
gccaccgaugaacgacgcc

SEQ ID NO: 1337681 - RNA, 19 nt, Artificial Sequence
  Description of Artificial Sequence: Synthetic oligonucleotide
cccuaggucacaaaauaau

SEQ ID NO: 1337682 - RNA, 19 nt, Artificial Sequence
  Description of Artificial Sequence: Synthetic oligonucleotide
caucuuggaagcggaagau

SEQ ID NO: 1337683 - RNA, 19 nt, Artificial Sequence
  Description of Artificial Sequence: Synthetic oligonucleotide
ccgugggccagcaggaaca

SEQ ID NO: 1337684 - RNA, 19 nt, Artificial Sequence
  Description of Artificial Sequence: Synthetic oligonucleotide
gcagcucgaggucagcgcu

SEQ ID NO: 1337685 - RNA, 19 nt, Artificial Sequence
  Description of Artificial Sequence: Synthetic oligonucleotide
caguccagcugagcaccac

SEQ ID NO: 1337686 - RNA, 19 nt, Artificial Sequence
  Description of Artificial Sequence: Synthetic oligonucleotide
ggaugccaccgaugaacga

SEQ ID NO: 1337687 - RNA, 19 nt, Artificial Sequence
  Description of Artificial Sequence: Synthetic oligonucleotide
agcaccacgcgggcccugu

SEQ ID NO: 1337688 - RNA, 19 nt, Artificial Sequence
  Description of Artificial Sequence: Synthetic oligonucleotide
ggugagccgccaacagcag

SEQ ID NO: 1337689 - RNA, 19 nt, Artificial Sequence
  Description of Artificial Sequence: Synthetic oligonucleotide
gcucaugccucaggcaaca

SEQ ID NO: 1337690 - RNA, 19 nt, Artificial Sequence
  Description of Artificial Sequence: Synthetic oligonucleotide
gacuccuuccagaggcccu

SEQ ID NO: 1337691 - RNA, 19 nt, Artificial Sequence
  Description of Artificial Sequence: Synthetic oligonucleotide
ccccuaggucacaaaauaa

SEQ ID NO: 1337692 - RNA, 19 nt, Artificial Sequence
  Description of Artificial Sequence: Synthetic oligonucleotide
ccgugacuccuuccagagg

SEQ ID NO: 1337693 - RNA, 19 nt, Artificial Sequence
  Description of Artificial Sequence: Synthetic oligonucleotide
ggccacucuccugagguaa

SEQ ID NO: 1337694 - RNA, 19 nt, Artificial Sequence
  Description of Artificial Sequence: Synthetic oligonucleotide
gcaaagcccuccacguuga

SEQ ID NO: 1337695 - RNA, 19 nt, Artificial Sequence
  Description of Artificial Sequence: Synthetic oligonucleotide
aggccaagucaagggccca

SEQ ID NO: 1337696 - RNA, 19 nt, Artificial Sequence
  Description of Artificial Sequence: Synthetic oligonucleotide
gcucccggacuggucauug

SEQ ID NO: 1337697 - RNA, 19 nt, Artificial Sequence
  Description of Artificial Sequence: Synthetic oligonucleotide
cagcgucagcacugccuuc

SEQ ID NO: 1337698 - RNA, 19 nt, Artificial Sequence
  Description of Artificial Sequence: Synthetic oligonucleotide
gcgggaagagacccagaaa

SEQ ID NO: 1337699 - RNA, 19 nt, Artificial Sequence
  Description of Artificial Sequence: Synthetic oligonucleotide
gagagugaggcuggauguu

SEQ ID NO: 1337700 - RNA, 19 nt, Artificial Sequence
  Description of Artificial Sequence: Synthetic oligonucleotide
cggcgauggagagagugag

SEQ ID NO: 1337701 - RNA, 19 nt, Artificial Sequence
  Description of Artificial Sequence: Synthetic oligonucleotide
gcugagcaccacgcgggcc

SEQ ID NO: 1337702 - RNA, 19 nt, Artificial Sequence
  Description of Artificial Sequence: Synthetic oligonucleotide
aagcugcgguccaggugau

SEQ ID NO: 1337703 - RNA, 19 nt, Artificial Sequence
  Description of Artificial Sequence: Synthetic oligonucleotide
gaagagcacggcagaugau

SEQ ID NO: 1337704 - RNA, 19 nt, Artificial Sequence
  Description of Artificial Sequence: Synthetic oligonucleotide
ggccaagucaagggcccac

SEQ ID NO: 1337705 - RNA, 19 nt, Artificial Sequence
  Description of Artificial Sequence: Synthetic oligonucleotide
ccggcgauggagagaguga

SEQ ID NO: 1337706 - RNA, 19 nt, Artificial Sequence
  Description of Artificial Sequence: Synthetic oligonucleotide
gggugcagacuuccuuaaa

SEQ ID NO: 1337707 - RNA, 19 nt, Artificial Sequence
  Description of Artificial Sequence: Synthetic oligonucleotide
ugcucccggacuggucauu

SEQ ID NO: 1337708 - RNA, 19 nt, Artificial Sequence
  Description of Artificial Sequence: Synthetic oligonucleotide
auccgugggccagcaggaa

SEQ ID NO: 1337709 - RNA, 19 nt, Artificial Sequence
  Description of Artificial Sequence: Synthetic oligonucleotide
gcucgaggucagcgcuggg

SEQ ID NO: 1337710 - RNA, 19 nt, Artificial Sequence
  Description of Artificial Sequence: Synthetic oligonucleotide
caaagcccuccacguugaa

SEQ ID NO: 1337711 - RNA, 19 nt, Artificial Sequence
  Description of Artificial Sequence: Synthetic oligonucleotide
ggugagccugucauucacu

SEQ ID NO: 1337712 - RNA, 19 nt, Artificial Sequence
  Description of Artificial Sequence: Synthetic oligonucleotide
gggagaugccagagaggca

SEQ ID NO: 1337713 - RNA, 19 nt, Artificial Sequence
  Description of Artificial Sequence: Synthetic oligonucleotide
ccacucuccugagguaauc

SEQ ID NO: 1337714 - RNA, 19 nt, Artificial Sequence
  Description of Artificial Sequence: Synthetic oligonucleotide
ccuuaaagaugccggcgau

SEQ ID NO: 1337715 - RNA, 19 nt, Artificial Sequence
  Description of Artificial Sequence: Synthetic oligonucleotide
gagccgccaacagcagggu

SEQ ID NO: 1337716 - RNA, 19 nt, Artificial Sequence
  Description of Artificial Sequence: Synthetic oligonucleotide
cucccggacuggucauugu

SEQ ID NO: 1337717 - RNA, 19 nt, Artificial Sequence
  Description of Artificial Sequence: Synthetic oligonucleotide
caggcccuucgggagcuua

SEQ ID NO: 1337718 - RNA, 19 nt, Artificial Sequence
  Description of Artificial Sequence: Synthetic oligonucleotide
gcgcccuggacagggcuga

SEQ ID NO: 1337719 - RNA, 19 nt, Artificial Sequence
  Description of Artificial Sequence: Synthetic oligonucleotide
gcaccacgcgggcccugug

SEQ ID NO: 1337720 - RNA, 19 nt, Artificial Sequence
  Description of Artificial Sequence: Synthetic oligonucleotide
guggacaaauggagaccuu

SEQ ID NO: 1337721 - RNA, 19 nt, Artificial Sequence
  Description of Artificial Sequence: Synthetic oligonucleotide
ggagagagugaggcuggau

SEQ ID NO: 1337722 - RNA, 19 nt, Artificial Sequence
  Description of Artificial Sequence: Synthetic oligonucleotide
ccagcaggugagccgccaa

SEQ ID NO: 1337723 - RNA, 19 nt, Artificial Sequence
  Description of Artificial Sequence: Synthetic oligonucleotide
ggcuugccuugugcucaug

SEQ ID NO: 1337724 - RNA, 19 nt, Artificial Sequence
  Description of Artificial Sequence: Synthetic oligonucleotide
cccauccgugggccagcag

SEQ ID NO: 1337725 - RNA, 19 nt, Artificial Sequence
  Description of Artificial Sequence: Synthetic oligonucleotide
cugcucccggacuggucau

SEQ ID NO: 1337726 - RNA, 19 nt, Artificial Sequence
  Description of Artificial Sequence: Synthetic oligonucleotide
ccccagcgaugagaaggac

SEQ ID NO: 1337727 - RNA, 19 nt, Artificial Sequence
  Description of Artificial Sequence: Synthetic oligonucleotide
gcggcugcagguggaacau

SEQ ID NO: 1337728 - RNA, 19 nt, Artificial Sequence
  Description of Artificial Sequence: Synthetic oligonucleotide
gggcuugccuugugcucau

SEQ ID NO: 1337729 - RNA, 19 nt, Artificial Sequence
  Description of Artificial Sequence: Synthetic oligonucleotide
ccacgcgggcccuguggcu

SEQ ID NO: 1337730 - RNA, 19 nt, Artificial Sequence
  Description of Artificial Sequence: Synthetic oligonucleotide
gccccagggcuugccuugu

SEQ ID NO: 1337731 - RNA, 19 nt, Artificial Sequence
  Description of Artificial Sequence: Synthetic oligonucleotide
aaagaaaagaaguccuugc

SEQ ID NO: 1337732 - RNA, 19 nt, Artificial Sequence
  Description of Artificial Sequence: Synthetic oligonucleotide
uacaauauaguuuauucgg

SEQ ID NO: 1337733 - RNA, 19 nt, Artificial Sequence
  Description of Artificial Sequence: Synthetic oligonucleotide
aagaaaagaaguccuugcc

SEQ ID NO: 1337734 - RNA, 19 nt, Artificial Sequence
  Description of Artificial Sequence: Synthetic oligonucleotide
agcaccaacaacuggagcc

SEQ ID NO: 1337735 - RNA, 19 nt, Artificial Sequence
  Description of Artificial Sequence: Synthetic oligonucleotide
acuguggucagccacaccg

SEQ ID NO: 1337736 - RNA, 19 nt, Artificial Sequence
  Description of Artificial Sequence: Synthetic oligonucleotide
ucuucauugagugaguugc

SEQ ID NO: 1337737 - RNA, 19 nt, Artificial Sequence
  Description of Artificial Sequence: Synthetic oligonucleotide
ugcuugaaagaaaagaagu

SEQ ID NO: 1337738 - RNA, 19 nt, Artificial Sequence
  Description of Artificial Sequence: Synthetic oligonucleotide
augaaauguugacagcucc

SEQ ID NO: 1337739 - RNA, 19 nt, Artificial Sequence
  Description of Artificial Sequence: Synthetic oligonucleotide
aguacuugccgccauggcc

SEQ ID NO: 1337740 - RNA, 19 nt, Artificial Sequence
  Description of Artificial Sequence: Synthetic oligonucleotide
uuugcuuuacaauauaguu

SEQ ID NO: 1337741 - RNA, 19 nt, Artificial Sequence
  Description of Artificial Sequence: Synthetic oligonucleotide
ugcuuuacaauauaguuua

SEQ ID NO: 1337742 - RNA, 19 nt, Artificial Sequence
  Description of Artificial Sequence: Synthetic oligonucleotide
aaugacuccaguuccuucu

SEQ ID NO: 1337743 - RNA, 19 nt, Artificial Sequence
  Description of Artificial Sequence: Synthetic oligonucleotide
uguauuuaaggacucugga

SEQ ID NO: 1337744 - RNA, 19 nt, Artificial Sequence
  Description of Artificial Sequence: Synthetic oligonucleotide
agaucuaucacucggggcu

SEQ ID NO: 1337745 - RNA, 19 nt, Artificial Sequence
  Description of Artificial Sequence: Synthetic oligonucleotide
auaacauuuccagugacag

SEQ ID NO: 1337746 - RNA, 19 nt, Artificial Sequence
  Description of Artificial Sequence: Synthetic oligonucleotide
ucuagcaacaggcacuucu

SEQ ID NO: 1337747 - RNA, 19 nt, Artificial Sequence
  Description of Artificial Sequence: Synthetic oligonucleotide
ucuuguaucuucaggucag

SEQ ID NO: 1337748 - RNA, 19 nt, Artificial Sequence
  Description of Artificial Sequence: Synthetic oligonucleotide
cuucaggucagaauggagc

SEQ ID NO: 1337749 - RNA, 19 nt, Artificial Sequence
  Description of Artificial Sequence: Synthetic oligonucleotide
aauguugacagcucccagu

SEQ ID NO: 1337750 - RNA, 19 nt, Artificial Sequence
  Description of Artificial Sequence: Synthetic oligonucleotide
ucauauuucacugguagcu

SEQ ID NO: 1337751 - RNA, 19 nt, Artificial Sequence
  Description of Artificial Sequence: Synthetic oligonucleotide
acaauauaguuuauucggc

SEQ ID NO: 1337752 - RNA, 19 nt, Artificial Sequence
  Description of Artificial Sequence: Synthetic oligonucleotide
ucucauaaccuucuucagc

SEQ ID NO: 1337753 - RNA, 19 nt, Artificial Sequence
  Description of Artificial Sequence: Synthetic oligonucleotide
guuuauucggcagaacugg

SEQ ID NO: 1337754 - RNA, 19 nt, Artificial Sequence
  Description of Artificial Sequence: Synthetic oligonucleotide
ugugucuagcagcacauug

SEQ ID NO: 1337755 - RNA, 19 nt, Artificial Sequence
  Description of Artificial Sequence: Synthetic oligonucleotide
ucuggacugcuacuggugg

SEQ ID NO: 1337756 - RNA, 19 nt, Artificial Sequence
  Description of Artificial Sequence: Synthetic oligonucleotide
uucagcucugcuuagugug

SEQ ID NO: 1337757 - RNA, 19 nt, Artificial Sequence
  Description of Artificial Sequence: Synthetic oligonucleotide
caccuuguagccuagcucc

SEQ ID NO: 1337758 - RNA, 19 nt, Artificial Sequence
  Description of Artificial Sequence: Synthetic oligonucleotide
uucaguguaaacugugcug

SEQ ID NO: 1337759 - RNA, 19 nt, Artificial Sequence
  Description of Artificial Sequence: Synthetic oligonucleotide
agcauagagacccucucuc

SEQ ID NO: 1337760 - RNA, 19 nt, Artificial Sequence
  Description of Artificial Sequence: Synthetic oligonucleotide
cucuuuguggugcagaaac

SEQ ID NO: 1337761 - RNA, 19 nt, Artificial Sequence
  Description of Artificial Sequence: Synthetic oligonucleotide
uauucggcagaacuggaga

SEQ ID NO: 1337762 - RNA, 19 nt, Artificial Sequence
  Description of Artificial Sequence: Synthetic oligonucleotide
acauaacauuuccagugac

SEQ ID NO: 1337763 - RNA, 19 nt, Artificial Sequence
  Description of Artificial Sequence: Synthetic oligonucleotide
agacucuagcaacaggcac

SEQ ID NO: 1337764 - RNA, 19 nt, Artificial Sequence
  Description of Artificial Sequence: Synthetic oligonucleotide
ggacauaacauuuccagug

SEQ ID NO: 1337765 - RNA, 19 nt, Artificial Sequence
  Description of Artificial Sequence: Synthetic oligonucleotide
augcagaugaaauguugac

SEQ ID NO: 1337766 - RNA, 19 nt, Artificial Sequence
  Description of Artificial Sequence: Synthetic oligonucleotide
uaucauacugguguguuca

SEQ ID NO: 1337767 - RNA, 19 nt, Artificial Sequence
  Description of Artificial Sequence: Synthetic oligonucleotide
uauuucuccuuguugcggc

SEQ ID NO: 1337768 - RNA, 19 nt, Artificial Sequence
  Description of Artificial Sequence: Synthetic oligonucleotide
uuauucggcagaacuggag

SEQ ID NO: 1337769 - RNA, 19 nt, Artificial Sequence
  Description of Artificial Sequence: Synthetic oligonucleotide
acagaucuaucacucgggg

SEQ ID NO: 1337770 - RNA, 19 nt, Artificial Sequence
  Description of Artificial Sequence: Synthetic oligonucleotide
uugcuuuacaauauaguuu

SEQ ID NO: 1337771 - RNA, 19 nt, Artificial Sequence
  Description of Artificial Sequence: Synthetic oligonucleotide
guauuuaaggacucuggac

SEQ ID NO: 1337772 - RNA, 19 nt, Artificial Sequence
  Description of Artificial Sequence: Synthetic oligonucleotide
agaugaaauguugacagcu

SEQ ID NO: 1337773 - RNA, 19 nt, Artificial Sequence
  Description of Artificial Sequence: Synthetic oligonucleotide
cagggcgucacuuuugagg

SEQ ID NO: 1337774 - RNA, 19 nt, Artificial Sequence
  Description of Artificial Sequence: Synthetic oligonucleotide
uggagaacagucauauuuc

SEQ ID NO: 1337775 - RNA, 19 nt, Artificial Sequence
  Description of Artificial Sequence: Synthetic oligonucleotide
acagucauauuucacuggu

SEQ ID NO: 1337776 - RNA, 19 nt, Artificial Sequence
  Description of Artificial Sequence: Synthetic oligonucleotide
cagauuuauguaauuucag

SEQ ID NO: 1337777 - RNA, 19 nt, Artificial Sequence
  Description of Artificial Sequence: Synthetic oligonucleotide
ucacuuuugaggugguuca

SEQ ID NO: 1337778 - RNA, 19 nt, Artificial Sequence
  Description of Artificial Sequence: Synthetic oligonucleotide
uuccaguugaguucguccc

SEQ ID NO: 1337779 - RNA, 19 nt, Artificial Sequence
  Description of Artificial Sequence: Synthetic oligonucleotide
ugcuuagugugucuagcag

SEQ ID NO: 1337780 - RNA, 19 nt, Artificial Sequence
  Description of Artificial Sequence: Synthetic oligonucleotide
agccacacuugcuugaaag

SEQ ID NO: 1337781 - RNA, 19 nt, Artificial Sequence
  Description of Artificial Sequence: Synthetic oligonucleotide
uugaggugguucaugucag

SEQ ID NO: 1337782 - RNA, 19 nt, Artificial Sequence
  Description of Artificial Sequence: Synthetic oligonucleotide
auugagugaguugcugugc

SEQ ID NO: 1337783 - RNA, 19 nt, Artificial Sequence
  Description of Artificial Sequence: Synthetic oligonucleotide
agagcugagacucuagcaa

SEQ ID NO: 1337784 - RNA, 19 nt, Artificial Sequence
  Description of Artificial Sequence: Synthetic oligonucleotide
ucuucagcucugcuuagug

SEQ ID NO: 1337785 - RNA, 19 nt, Artificial Sequence
  Description of Artificial Sequence: Synthetic oligonucleotide
aaacucccgccauagcuug

SEQ ID NO: 1337786 - RNA, 19 nt, Artificial Sequence
  Description of Artificial Sequence: Synthetic oligonucleotide
gagggcucaaaauuccgcc

SEQ ID NO: 1337787 - RNA, 19 nt, Artificial Sequence
  Description of Artificial Sequence: Synthetic oligonucleotide
acaacuggagccgaggcag

SEQ ID NO: 1337788 - RNA, 19 nt, Artificial Sequence
  Description of Artificial Sequence: Synthetic oligonucleotide
uagugugucuagcagcaca

SEQ ID NO: 1337789 - RNA, 19 nt, Artificial Sequence
  Description of Artificial Sequence: Synthetic oligonucleotide
aacuucacaggagacagau

SEQ ID NO: 1337790 - RNA, 19 nt, Artificial Sequence
  Description of Artificial Sequence: Synthetic oligonucleotide
uguaucuucaggucagaau

SEQ ID NO: 1337791 - RNA, 19 nt, Artificial Sequence
  Description of Artificial Sequence: Synthetic oligonucleotide
ggugucuucauugagugag

SEQ ID NO: 1337792 - RNA, 19 nt, Artificial Sequence
  Description of Artificial Sequence: Synthetic oligonucleotide
aacaacuggagccgaggca

SEQ ID NO: 1337793 - RNA, 19 nt, Artificial Sequence
  Description of Artificial Sequence: Synthetic oligonucleotide
guacuugccgccauggccg

SEQ ID NO: 1337794 - RNA, 19 nt, Artificial Sequence
  Description of Artificial Sequence: Synthetic oligonucleotide
auguauuuaaggacucugg

SEQ ID NO: 1337795 - RNA, 19 nt, Artificial Sequence
  Description of Artificial Sequence: Synthetic oligonucleotide
auguugacagcucccagug

SEQ ID NO: 1337796 - RNA, 19 nt, Artificial Sequence
  Description of Artificial Sequence: Synthetic oligonucleotide
ugguuccugguccucagag

SEQ ID NO: 1337797 - RNA, 19 nt, Artificial Sequence
  Description of Artificial Sequence: Synthetic oligonucleotide
uucucauaaccuucuucag

SEQ ID NO: 1337798 - RNA, 19 nt, Artificial Sequence
  Description of Artificial Sequence: Synthetic oligonucleotide
cacagaucuaucacucggg

SEQ ID NO: 1337799 - RNA, 19 nt, Artificial Sequence
  Description of Artificial Sequence: Synthetic oligonucleotide
auauuucacugguagcugu

SEQ ID NO: 1337800 - RNA, 19 nt, Artificial Sequence
  Description of Artificial Sequence: Synthetic oligonucleotide
auucggcagaacuggagag

SEQ ID NO: 1337801 - RNA, 19 nt, Artificial Sequence
  Description of Artificial Sequence: Synthetic oligonucleotide
uuuauucggcagaacugga

SEQ ID NO: 1337802 - RNA, 19 nt, Artificial Sequence
  Description of Artificial Sequence: Synthetic oligonucleotide
agugguuaugcuuuucaau

SEQ ID NO: 1337803 - RNA, 19 nt, Artificial Sequence
  Description of Artificial Sequence: Synthetic oligonucleotide
cuuagugugucuagcagca

SEQ ID NO: 1337804 - RNA, 19 nt, Artificial Sequence
  Description of Artificial Sequence: Synthetic oligonucleotide
gacauaacauuuccaguga

SEQ ID NO: 1337805 - RNA, 19 nt, Artificial Sequence
  Description of Artificial Sequence: Synthetic oligonucleotide
cucucaaccaggaugguga

SEQ ID NO: 1337806 - RNA, 19 nt, Artificial Sequence
  Description of Artificial Sequence: Synthetic oligonucleotide
cagcacauuguacucgugg

SEQ ID NO: 1337807 - RNA, 19 nt, Artificial Sequence
  Description of Artificial Sequence: Synthetic oligonucleotide
augucagagggacugagaa

SEQ ID NO: 1337808 - RNA, 19 nt, Artificial Sequence
  Description of Artificial Sequence: Synthetic oligonucleotide
cuuugcggcgccaucuucc

SEQ ID NO: 1337809 - RNA, 19 nt, Artificial Sequence
  Description of Artificial Sequence: Synthetic oligonucleotide
agggcgucacuuuugaggu

SEQ ID NO: 1337810 - RNA, 19 nt, Artificial Sequence
  Description of Artificial Sequence: Synthetic oligonucleotide
cauugagugaguugcugug

SEQ ID NO: 1337811 - RNA, 19 nt, Artificial Sequence
  Description of Artificial Sequence: Synthetic oligonucleotide
ucacugguagcuguaacca

SEQ ID NO: 1337812 - RNA, 19 nt, Artificial Sequence
  Description of Artificial Sequence: Synthetic oligonucleotide
aguuuauucggcagaacug

SEQ ID NO: 1337813 - RNA, 19 nt, Artificial Sequence
  Description of Artificial Sequence: Synthetic oligonucleotide
uuaaggacucuggacauaa

SEQ ID NO: 1337814 - RNA, 19 nt, Artificial Sequence
  Description of Artificial Sequence: Synthetic oligonucleotide
agaucccacagaucuauca

SEQ ID NO: 1337815 - RNA, 19 nt, Artificial Sequence
  Description of Artificial Sequence: Synthetic oligonucleotide
cugguagcuguaaccaagg

SEQ ID NO: 1337816 - RNA, 19 nt, Artificial Sequence
  Description of Artificial Sequence: Synthetic oligonucleotide
guucaacuucuccaugcgg

SEQ ID NO: 1337817 - RNA, 19 nt, Artificial Sequence
  Description of Artificial Sequence: Synthetic oligonucleotide
gucauauuucacugguagc

SEQ ID NO: 1337818 - RNA, 19 nt, Artificial Sequence
  Description of Artificial Sequence: Synthetic oligonucleotide
ucuaggcccugguugauac

SEQ ID NO: 1337819 - RNA, 19 nt, Artificial Sequence
  Description of Artificial Sequence: Synthetic oligonucleotide
agcacauuguacucgugga

SEQ ID NO: 1337820 - RNA, 19 nt, Artificial Sequence
  Description of Artificial Sequence: Synthetic oligonucleotide
uguggaccaguuuugcuuc

SEQ ID NO: 1337821 - RNA, 19 nt, Artificial Sequence
  Description of Artificial Sequence: Synthetic oligonucleotide
uuccgccauguauuuaagg

SEQ ID NO: 1337822 - RNA, 19 nt, Artificial Sequence
  Description of Artificial Sequence: Synthetic oligonucleotide
gugaaguuggcagucuggg

SEQ ID NO: 1337823 - RNA, 19 nt, Artificial Sequence
  Description of Artificial Sequence: Synthetic oligonucleotide
ucauacugguguguucacg

SEQ ID NO: 1337824 - RNA, 19 nt, Artificial Sequence
  Description of Artificial Sequence: Synthetic oligonucleotide
ucaccuuguagccuagcuc

SEQ ID NO: 1337825 - RNA, 19 nt, Artificial Sequence
  Description of Artificial Sequence: Synthetic oligonucleotide
ucccauagcugguucaacu

SEQ ID NO: 1337826 - RNA, 19 nt, Artificial Sequence
  Description of Artificial Sequence: Synthetic oligonucleotide
ugucuagcagcacauugua

SEQ ID NO: 1337827 - RNA, 19 nt, Artificial Sequence
  Description of Artificial Sequence: Synthetic oligonucleotide
uuucacugguagcuguaac

SEQ ID NO: 1337828 - RNA, 19 nt, Artificial Sequence
  Description of Artificial Sequence: Synthetic oligonucleotide
guugcggcugaugugcucg

SEQ ID NO: 1337829 - RNA, 19 nt, Artificial Sequence
  Description of Artificial Sequence: Synthetic oligonucleotide
uugagacccugcuggacag

SEQ ID NO: 1337830 - RNA, 19 nt, Artificial Sequence
  Description of Artificial Sequence: Synthetic oligonucleotide
gaaauguugacagcuccca

SEQ ID NO: 1337831 - RNA, 19 nt, Artificial Sequence
  Description of Artificial Sequence: Synthetic oligonucleotide
cauaacauuuccagugaca

SEQ ID NO: 1337832 - RNA, 19 nt, Artificial Sequence
  Description of Artificial Sequence: Synthetic oligonucleotide
uucggcagaacuggagagg

SEQ ID NO: 1337833 - RNA, 19 nt, Artificial Sequence
  Description of Artificial Sequence: Synthetic oligonucleotide
ggcaguaucauacuggugu

SEQ ID NO: 1337834 - RNA, 19 nt, Artificial Sequence
  Description of Artificial Sequence: Synthetic oligonucleotide
aucauacugguguguucac

SEQ ID NO: 1337835 - RNA, 19 nt, Artificial Sequence
  Description of Artificial Sequence: Synthetic oligonucleotide
ucaaacucagugguaggac

SEQ ID NO: 1337836 - RNA, 19 nt, Artificial Sequence
  Description of Artificial Sequence: Synthetic oligonucleotide
gaagguucucauaaccuuc

SEQ ID NO: 1337837 - RNA, 19 nt, Artificial Sequence
  Description of Artificial Sequence: Synthetic oligonucleotide
agugaguugcugugcacca

SEQ ID NO: 1337838 - RNA, 19 nt, Artificial Sequence
  Description of Artificial Sequence: Synthetic oligonucleotide
cagaucuaucacucggggc

SEQ ID NO: 1337839 - RNA, 19 nt, Artificial Sequence
  Description of Artificial Sequence: Synthetic oligonucleotide
agcagcaccaacaacugga

SEQ ID NO: 1337840 - RNA, 19 nt, Artificial Sequence
  Description of Artificial Sequence: Synthetic oligonucleotide
cagaugaaauguugacagc

SEQ ID NO: 1337841 - RNA, 19 nt, Artificial Sequence
  Description of Artificial Sequence: Synthetic oligonucleotide
cuagcaacaggcacuucuc

SEQ ID NO: 1337842 - RNA, 19 nt, Artificial Sequence
  Description of Artificial Sequence: Synthetic oligonucleotide
ugguugauacuccgcaguc

SEQ ID NO: 1337843 - RNA, 19 nt, Artificial Sequence
  Description of Artificial Sequence: Synthetic oligonucleotide
agccacaccgguuaccaca

SEQ ID NO: 1337844 - RNA, 19 nt, Artificial Sequence
  Description of Artificial Sequence: Synthetic oligonucleotide
uagcagcacauuguacucg

SEQ ID NO: 1337845 - RNA, 19 nt, Artificial Sequence
  Description of Artificial Sequence: Synthetic oligonucleotide
gaggugguucaugucagag

SEQ ID NO: 1337846 - RNA, 19 nt, Artificial Sequence
  Description of Artificial Sequence: Synthetic oligonucleotide
gguucaacuucuccaugcg

SEQ ID NO: 1337847 - RNA, 19 nt, Artificial Sequence
  Description of Artificial Sequence: Synthetic oligonucleotide
uggucagccacaccgguua

SEQ ID NO: 1337848 - RNA, 19 nt, Artificial Sequence
  Description of Artificial Sequence: Synthetic oligonucleotide
cucccauccaguccguacc

SEQ ID NO: 1337849 - RNA, 19 nt, Artificial Sequence
  Description of Artificial Sequence: Synthetic oligonucleotide
caacaacuggagccgaggc

SEQ ID NO: 1337850 - RNA, 19 nt, Artificial Sequence
  Description of Artificial Sequence: Synthetic oligonucleotide
ugcggaacuccuccccggg

SEQ ID NO: 1337851 - RNA, 19 nt, Artificial Sequence
  Description of Artificial Sequence: Synthetic oligonucleotide
cuggugggaaaucuccagc

SEQ ID NO: 1337852 - RNA, 19 nt, Artificial Sequence
  Description of Artificial Sequence: Synthetic oligonucleotide
cauauuucacugguagcug

SEQ ID NO: 1337853 - RNA, 19 nt, Artificial Sequence
  Description of Artificial Sequence: Synthetic oligonucleotide
acuggagagguagagcuga

SEQ ID NO: 1337854 - RNA, 19 nt, Artificial Sequence
  Description of Artificial Sequence: Synthetic oligonucleotide
caugcggaacuccuccccg

SEQ ID NO: 1337855 - RNA, 19 nt, Artificial Sequence
  Description of Artificial Sequence: Synthetic oligonucleotide
ugacagccacacuugcuug

SEQ ID NO: 1337856 - RNA, 19 nt, Artificial Sequence
  Description of Artificial Sequence: Synthetic oligonucleotide
ucucccgggaguacuugcc

SEQ ID NO: 1337857 - RNA, 19 nt, Artificial Sequence
  Description of Artificial Sequence: Synthetic oligonucleotide
ugguuaugcuuuucaauuu

SEQ ID NO: 1337858 - RNA, 19 nt, Artificial Sequence
  Description of Artificial Sequence: Synthetic oligonucleotide
ugguagcuguaaccaaggc

SEQ ID NO: 1337859 - RNA, 19 nt, Artificial Sequence
  Description of Artificial Sequence: Synthetic oligonucleotide
agaugaagccgcugggccu

SEQ ID NO: 1337860 - RNA, 19 nt, Artificial Sequence
  Description of Artificial Sequence: Synthetic oligonucleotide
ugagcucuugagacccugc

SEQ ID NO: 1337861 - RNA, 19 nt, Artificial Sequence
  Description of Artificial Sequence: Synthetic oligonucleotide
cugagacucuagcaacagg

SEQ ID NO: 1337862 - RNA, 19 nt, Artificial Sequence
  Description of Artificial Sequence: Synthetic oligonucleotide
gagaacagucauauuucac

SEQ ID NO: 1337863 - RNA, 19 nt, Artificial Sequence
  Description of Artificial Sequence: Synthetic oligonucleotide
cucucuuguaucuucaggu

SEQ ID NO: 1337864 - RNA, 19 nt, Artificial Sequence
  Description of Artificial Sequence: Synthetic oligonucleotide
ggcagaacuggagagguag

SEQ ID NO: 1337865 - RNA, 19 nt, Artificial Sequence
  Description of Artificial Sequence: Synthetic oligonucleotide
ucguucuucucccgggagu

SEQ ID NO: 1337866 - RNA, 19 nt, Artificial Sequence
  Description of Artificial Sequence: Synthetic oligonucleotide
ucucuuugcggcgccaucu

SEQ ID NO: 1337867 - RNA, 19 nt, Artificial Sequence
  Description of Artificial Sequence: Synthetic oligonucleotide
aguguaaacugugcugcug

SEQ ID NO: 1337868 - RNA, 19 nt, Artificial Sequence
  Description of Artificial Sequence: Synthetic oligonucleotide
auacuccgcagucuguccu

SEQ ID NO: 1337869 - RNA, 19 nt, Artificial Sequence
  Description of Artificial Sequence: Synthetic oligonucleotide
uacucguggaucuucucuu

SEQ ID NO: 1337870 - RNA, 19 nt, Artificial Sequence
  Description of Artificial Sequence: Synthetic oligonucleotide
ggccuucucccauagcugg

SEQ ID NO: 1337871 - RNA, 19 nt, Artificial Sequence
  Description of Artificial Sequence: Synthetic oligonucleotide
auagagacccucucucuuu

SEQ ID NO: 1337872 - RNA, 19 nt, Artificial Sequence
  Description of Artificial Sequence: Synthetic oligonucleotide
uucucccauagcugguuca

SEQ ID NO: 1337873 - RNA, 19 nt, Artificial Sequence
  Description of Artificial Sequence: Synthetic oligonucleotide
ucggcagaacuggagaggu

SEQ ID NO: 1337874 - RNA, 19 nt, Artificial Sequence
  Description of Artificial Sequence: Synthetic oligonucleotide
ccacagaucuaucacucgg

SEQ ID NO: 1337875 - RNA, 19 nt, Artificial Sequence
  Description of Artificial Sequence: Synthetic oligonucleotide
aguaucauacugguguguu

SEQ ID NO: 1337876 - RNA, 19 nt, Artificial Sequence
  Description of Artificial Sequence: Synthetic oligonucleotide
cauccaguccguaccuggc

SEQ ID NO: 1337877 - RNA, 19 nt, Artificial Sequence
  Description of Artificial Sequence: Synthetic oligonucleotide
uguguucacggauccuccu

SEQ ID NO: 1337878 - RNA, 19 nt, Artificial Sequence
  Description of Artificial Sequence: Synthetic oligonucleotide
ggcgucacuuuugaggugg

SEQ ID NO: 1337879 - RNA, 19 nt, Artificial Sequence
  Description of Artificial Sequence: Synthetic oligonucleotide
gagguuguggaccaguuuu

SEQ ID NO: 1337880 - RNA, 19 nt, Artificial Sequence
  Description of Artificial Sequence: Synthetic oligonucleotide
acuuuugaggugguucaug

SEQ ID NO: 1337881 - RNA, 19 nt, Artificial Sequence
  Description of Artificial Sequence: Synthetic oligonucleotide
gcugaccuuccucaggcgg

SEQ ID NO: 1337882 - RNA, 19 nt, Artificial Sequence
  Description of Artificial Sequence: Synthetic oligonucleotide
cucugcuuagugugucuag

SEQ ID NO: 1337883 - RNA, 19 nt, Artificial Sequence
  Description of Artificial Sequence: Synthetic oligonucleotide
ucgucccucucuuguaucu

SEQ ID NO: 1337884 - RNA, 19 nt, Artificial Sequence
  Description of Artificial Sequence: Synthetic oligonucleotide
auaaccuucuucagcucug

SEQ ID NO: 1337885 - RNA, 19 nt, Artificial Sequence
  Description of Artificial Sequence: Synthetic oligonucleotide
guagccuagcuccuugguc

SEQ ID NO: 1337886 - RNA, 19 nt, Artificial Sequence
  Description of Artificial Sequence: Synthetic oligonucleotide
augcggaacuccuccccgg

SEQ ID NO: 1337887 - RNA, 19 nt, Artificial Sequence
  Description of Artificial Sequence: Synthetic oligonucleotide
uagcuguaaccaaggcucu

SEQ ID NO: 1337888 - RNA, 19 nt, Artificial Sequence
  Description of Artificial Sequence: Synthetic oligonucleotide
uccaugcggaacuccuccc

SEQ ID NO: 1337889 - RNA, 19 nt, Artificial Sequence
  Description of Artificial Sequence: Synthetic oligonucleotide
ucacucggggcucuucaaa

SEQ ID NO: 1337890 - RNA, 19 nt, Artificial Sequence
  Description of Artificial Sequence: Synthetic oligonucleotide
ugagugaguugcugugcac

SEQ ID NO: 1337891 - RNA, 19 nt, Artificial Sequence
  Description of Artificial Sequence: Synthetic oligonucleotide
uugagguuguggaccaguu

SEQ ID NO: 1337892 - RNA, 19 nt, Artificial Sequence
  Description of Artificial Sequence: Synthetic oligonucleotide
accaaggcucucaaccagg

SEQ ID NO: 1337893 - RNA, 19 nt, Artificial Sequence
  Description of Artificial Sequence: Synthetic oligonucleotide
gaguacuugccgccauggc

SEQ ID NO: 1337894 - RNA, 19 nt, Artificial Sequence
  Description of Artificial Sequence: Synthetic oligonucleotide
gauccuccuugccacguca

SEQ ID NO: 1337895 - RNA, 19 nt, Artificial Sequence
  Description of Artificial Sequence: Synthetic oligonucleotide
cuuuugaggugguucaugu

SEQ ID NO: 1337896 - RNA, 19 nt, Artificial Sequence
  Description of Artificial Sequence: Synthetic oligonucleotide
guaucauacugguguguuc

SEQ ID NO: 1337897 - RNA, 19 nt, Artificial Sequence
  Description of Artificial Sequence: Synthetic oligonucleotide
gaugugcucgggguccccg

SEQ ID NO: 1337898 - RNA, 19 nt, Artificial Sequence
  Description of Artificial Sequence: Synthetic oligonucleotide
acaccgguuaccacagguc

SEQ ID NO: 1337899 - RNA, 19 nt, Artificial Sequence
  Description of Artificial Sequence: Synthetic oligonucleotide
gacagccacacuugcuuga

SEQ ID NO: 1337900 - RNA, 19 nt, Artificial Sequence
  Description of Artificial Sequence: Synthetic oligonucleotide
acagcagauuuauguaauu

SEQ ID NO: 1337901 - RNA, 19 nt, Artificial Sequence
  Description of Artificial Sequence: Synthetic oligonucleotide
ugagguuguggaccaguuu

SEQ ID NO: 1337902 - RNA, 19 nt, Artificial Sequence
  Description of Artificial Sequence: Synthetic oligonucleotide
ggagaacagucauauuuca

SEQ ID NO: 1337903 - RNA, 19 nt, Artificial Sequence
  Description of Artificial Sequence: Synthetic oligonucleotide
ggugaaguuggcagucugg

SEQ ID NO: 1337904 - RNA, 19 nt, Artificial Sequence
  Description of Artificial Sequence: Synthetic oligonucleotide
guucacggauccuccuugc

SEQ ID NO: 1337905 - RNA, 19 nt, Artificial Sequence
  Description of Artificial Sequence: Synthetic oligonucleotide
acucggggcucuucaaacu

SEQ ID NO: 1337906 - RNA, 19 nt, Artificial Sequence
  Description of Artificial Sequence: Synthetic oligonucleotide
acuggugguuccugguccu

SEQ ID NO: 1337907 - RNA, 19 nt, Artificial Sequence
  Description of Artificial Sequence: Synthetic oligonucleotide
cucccgggaguacuugccg

SEQ ID NO: 1337908 - RNA, 19 nt, Artificial Sequence
  Description of Artificial Sequence: Synthetic oligonucleotide
ucccauccaguccguaccu

SEQ ID NO: 1337909 - RNA, 19 nt, Artificial Sequence
  Description of Artificial Sequence: Synthetic oligonucleotide
ucagggcgucacuuuugag

SEQ ID NO: 1337910 - RNA, 19 nt, Artificial Sequence
  Description of Artificial Sequence: Synthetic oligonucleotide
uaaggacucuggacauaac

SEQ ID NO: 1337911 - RNA, 19 nt, Artificial Sequence
  Description of Artificial Sequence: Synthetic oligonucleotide
uacuugccgccauggccgg

SEQ ID NO: 1337912 - RNA, 19 nt, Artificial Sequence
  Description of Artificial Sequence: Synthetic oligonucleotide
ggaguacuugccgccaugg

SEQ ID NO: 1337913 - RNA, 19 nt, Artificial Sequence
  Description of Artificial Sequence: Synthetic oligonucleotide
cucggggcucuucaaacuc

SEQ ID NO: 1337914 - RNA, 19 nt, Artificial Sequence
  Description of Artificial Sequence: Synthetic oligonucleotide
ucuuugcggcgccaucuuc

SEQ ID NO: 1337915 - RNA, 19 nt, Artificial Sequence
  Description of Artificial Sequence: Synthetic oligonucleotide
gacucuagcaacaggcacu

SEQ ID NO: 1337916 - RNA, 19 nt, Artificial Sequence
  Description of Artificial Sequence: Synthetic oligonucleotide
ggccagaucccacagaucu

SEQ ID NO: 1337917 - RNA, 19 nt, Artificial Sequence
  Description of Artificial Sequence: Synthetic oligonucleotide
gcaguaucauacuggugug

SEQ ID NO: 1337918 - RNA, 19 nt, Artificial Sequence
  Description of Artificial Sequence: Synthetic oligonucleotide
ucccgccauagcuugucca

SEQ ID NO: 1337919 - RNA, 19 nt, Artificial Sequence
  Description of Artificial Sequence: Synthetic oligonucleotide
ccggaaugacuccaguucc

SEQ ID NO: 1337920 - RNA, 19 nt, Artificial Sequence
  Description of Artificial Sequence: Synthetic oligonucleotide
ugcucagggcgucacuuuu

SEQ ID NO: 1337921 - RNA, 19 nt, Artificial Sequence
  Description of Artificial Sequence: Synthetic oligonucleotide
aggucuacacaugcagaug

SEQ ID NO: 1337922 - RNA, 19 nt, Artificial Sequence
  Description of Artificial Sequence: Synthetic oligonucleotide
gagacagaugaagccgcug

SEQ ID NO: 1337923 - RNA, 19 nt, Artificial Sequence
  Description of Artificial Sequence: Synthetic oligonucleotide
uuuaaggacucuggacaua

SEQ ID NO: 1337924 - RNA, 19 nt, Artificial Sequence
  Description of Artificial Sequence: Synthetic oligonucleotide
cugcuuagugugucuagca

SEQ ID NO: 1337925 - RNA, 19 nt, Artificial Sequence
  Description of Artificial Sequence: Synthetic oligonucleotide
agcuucuggugggaaaucu

SEQ ID NO: 1337926 - RNA, 19 nt, Artificial Sequence
  Description of Artificial Sequence: Synthetic oligonucleotide
uccuccuugccacgucacu

SEQ ID NO: 1337927 - RNA, 19 nt, Artificial Sequence
  Description of Artificial Sequence: Synthetic oligonucleotide
gcggucuaggcccugguug

SEQ ID NO: 1337928 - RNA, 19 nt, Artificial Sequence
  Description of Artificial Sequence: Synthetic oligonucleotide
gguagcuguaaccaaggcu

SEQ ID NO: 1337929 - RNA, 19 nt, Artificial Sequence
  Description of Artificial Sequence: Synthetic oligonucleotide
ccauccaguccguaccugg

SEQ ID NO: 1337930 - RNA, 19 nt, Artificial Sequence
  Description of Artificial Sequence: Synthetic oligonucleotide
guguguucacggauccucc

SEQ ID NO: 1337931 - RNA, 19 nt, Artificial Sequence
  Description of Artificial Sequence: Synthetic oligonucleotide
uucgucccucucuuguauc

SEQ ID NO: 1337932 - RNA, 19 nt, Artificial Sequence
  Description of Artificial Sequence: Synthetic oligonucleotide
uugcggcugaugugcucgg

SEQ ID NO: 1337933 - RNA, 19 nt, Artificial Sequence
  Description of Artificial Sequence: Synthetic oligonucleotide
ucccggaaugacuccaguu

SEQ ID NO: 1337934 - RNA, 19 nt, Artificial Sequence
  Description of Artificial Sequence: Synthetic oligonucleotide
uguccaagccuuccaccuu

SEQ ID NO: 1337935 - RNA, 19 nt, Artificial Sequence
  Description of Artificial Sequence: Synthetic oligonucleotide
gguguguucacggauccuc

SEQ ID NO: 1337936 - RNA, 19 nt, Artificial Sequence
  Description of Artificial Sequence: Synthetic oligonucleotide
acucccgccauagcuuguc

SEQ ID NO: 1337937 - RNA, 19 nt, Artificial Sequence
  Description of Artificial Sequence: Synthetic oligonucleotide
gacucuggacauaacauuu

SEQ ID NO: 1337938 - RNA, 19 nt, Artificial Sequence
  Description of Artificial Sequence: Synthetic oligonucleotide
uucuucagcucugcuuagu

SEQ ID NO: 1337939 - RNA, 19 nt, Artificial Sequence
  Description of Artificial Sequence: Synthetic oligonucleotide
gaucuaucacucggggcuc

SEQ ID NO: 1337940 - RNA, 19 nt, Artificial Sequence
  Description of Artificial Sequence: Synthetic oligonucleotide
cuugccacgucacuguggu

SEQ ID NO: 1337941 - RNA, 19 nt, Artificial Sequence
  Description of Artificial Sequence: Synthetic oligonucleotide
ccgccauguauuuaaggac

SEQ ID NO: 1337942 - RNA, 19 nt, Artificial Sequence
  Description of Artificial Sequence: Synthetic oligonucleotide
cagaaacucccgccauagc

SEQ ID NO: 1337943 - RNA, 19 nt, Artificial Sequence
  Description of Artificial Sequence: Synthetic oligonucleotide
ugagacccugcuggacagg

SEQ ID NO: 1337944 - RNA, 19 nt, Artificial Sequence
  Description of Artificial Sequence: Synthetic oligonucleotide
agguuguggaccaguuuug

SEQ ID NO: 1337945 - RNA, 19 nt, Artificial Sequence
  Description of Artificial Sequence: Synthetic oligonucleotide
cccggaaugacuccaguuc

SEQ ID NO: 1337946 - RNA, 19 nt, Artificial Sequence
  Description of Artificial Sequence: Synthetic oligonucleotide
ugccaaccauggcaguauc

SEQ ID NO: 1337947 - RNA, 19 nt, Artificial Sequence
  Description of Artificial Sequence: Synthetic oligonucleotide
ucaggucagaauggagcuc

SEQ ID NO: 1337948 - RNA, 19 nt, Artificial Sequence
  Description of Artificial Sequence: Synthetic oligonucleotide
ucucuuuguggugcagaaa

SEQ ID NO: 1337949 - RNA, 19 nt, Artificial Sequence
  Description of Artificial Sequence: Synthetic oligonucleotide
aggagccucucuggacugc

SEQ ID NO: 1337950 - RNA, 19 nt, Artificial Sequence
  Description of Artificial Sequence: Synthetic oligonucleotide
ggcccugguugauacuccg

SEQ ID NO: 1337951 - RNA, 19 nt, Artificial Sequence
  Description of Artificial Sequence: Synthetic oligonucleotide
gguuguggaccaguuuugc

SEQ ID NO: 1337952 - RNA, 19 nt, Artificial Sequence
  Description of Artificial Sequence: Synthetic oligonucleotide
caacuggagccgaggcagc

SEQ ID NO: 1337953 - RNA, 19 nt, Artificial Sequence
  Description of Artificial Sequence: Synthetic oligonucleotide
gcugaugugcucggggucc

SEQ ID NO: 1337954 - RNA, 19 nt, Artificial Sequence
  Description of Artificial Sequence: Synthetic oligonucleotide
auuccgccauguauuuaag

SEQ ID NO: 1337955 - RNA, 19 nt, Artificial Sequence
  Description of Artificial Sequence: Synthetic oligonucleotide
cucagggcgucacuuuuga

SEQ ID NO: 1337956 - RNA, 19 nt, Artificial Sequence
  Description of Artificial Sequence: Synthetic oligonucleotide
aggcacuucucugggccuc

SEQ ID NO: 1337957 - RNA, 19 nt, Artificial Sequence
  Description of Artificial Sequence: Synthetic oligonucleotide
guaccuggccaagaugaca

SEQ ID NO: 1337958 - RNA, 19 nt, Artificial Sequence
  Description of Artificial Sequence: Synthetic oligonucleotide
cugggugucuucauugagu

SEQ ID NO: 1337959 - RNA, 19 nt, Artificial Sequence
  Description of Artificial Sequence: Synthetic oligonucleotide
gguagagcugagacucuag

SEQ ID NO: 1337960 - RNA, 19 nt, Artificial Sequence
  Description of Artificial Sequence: Synthetic oligonucleotide
gguggcugaccuuccucag

SEQ ID NO: 1337961 - RNA, 19 nt, Artificial Sequence
  Description of Artificial Sequence: Synthetic oligonucleotide
cucggccaacuucacagga

SEQ ID NO: 1337962 - RNA, 19 nt, Artificial Sequence
  Description of Artificial Sequence: Synthetic oligonucleotide
ugugcucgggguccccgau

SEQ ID NO: 1337963 - RNA, 19 nt, Artificial Sequence
  Description of Artificial Sequence: Synthetic oligonucleotide
auccuccuugccacgucac

SEQ ID NO: 1337964 - RNA, 19 nt, Artificial Sequence
  Description of Artificial Sequence: Synthetic oligonucleotide
ccauagcugguucaacuuc

SEQ ID NO: 1337965 - RNA, 19 nt, Artificial Sequence
  Description of Artificial Sequence: Synthetic oligonucleotide
agucugggccagaucccac

SEQ ID NO: 1337966 - RNA, 19 nt, Artificial Sequence
  Description of Artificial Sequence: Synthetic oligonucleotide
ggcucaaaauuccgccaug

SEQ ID NO: 1337967 - RNA, 19 nt, Artificial Sequence
  Description of Artificial Sequence: Synthetic oligonucleotide
accaacaacuggagccgag

SEQ ID NO: 1337968 - RNA, 19 nt, Artificial Sequence
  Description of Artificial Sequence: Synthetic oligonucleotide
ucggugaaguuggcagucu

SEQ ID NO: 1337969 - RNA, 19 nt, Artificial Sequence
  Description of Artificial Sequence: Synthetic oligonucleotide
gggacugagaagguucuca

SEQ ID NO: 1337970 - RNA, 19 nt, Artificial Sequence
  Description of Artificial Sequence: Synthetic oligonucleotide
cucaaaauuccgccaugua

SEQ ID NO: 1337971 - RNA, 19 nt, Artificial Sequence
  Description of Artificial Sequence: Synthetic oligonucleotide
ugcggcugaugugcucggg

SEQ ID NO: 1337972 - RNA, 19 nt, Artificial Sequence
  Description of Artificial Sequence: Synthetic oligonucleotide
cugagcucuugagacccug

SEQ ID NO: 1337973 - RNA, 19 nt, Artificial Sequence
  Description of Artificial Sequence: Synthetic oligonucleotide
gugucuagcagcacauugu

SEQ ID NO: 1337974 - RNA, 19 nt, Artificial Sequence
  Description of Artificial Sequence: Synthetic oligonucleotide
ccauggcaguaucauacug

SEQ ID NO: 1337975 - RNA, 19 nt, Artificial Sequence
  Description of Artificial Sequence: Synthetic oligonucleotide
gcucggccaacuucacagg

SEQ ID NO: 1337976 - RNA, 19 nt, Artificial Sequence
  Description of Artificial Sequence: Synthetic oligonucleotide
cccgccauagcuuguccag

SEQ ID NO: 1337977 - RNA, 19 nt, Artificial Sequence
  Description of Artificial Sequence: Synthetic oligonucleotide
cagacacugcugagggcuc

SEQ ID NO: 1337978 - RNA, 19 nt, Artificial Sequence
  Description of Artificial Sequence: Synthetic oligonucleotide
uacuccgcagucuguccuu

SEQ ID NO: 1337979 - RNA, 19 nt, Artificial Sequence
  Description of Artificial Sequence: Synthetic oligonucleotide
gccacacuugcuugaaaga

SEQ ID NO: 1337980 - RNA, 19 nt, Artificial Sequence
  Description of Artificial Sequence: Synthetic oligonucleotide
cuucagcucugcuuagugu

SEQ ID NO: 1337981 - RNA, 19 nt, Artificial Sequence
  Description of Artificial Sequence: Synthetic oligonucleotide
caccgguuaccacaggucu

SEQ ID NO: 1337982 - RNA, 19 nt, Artificial Sequence
  Description of Artificial Sequence: Synthetic oligonucleotide
gugguaggacuguagcccu

SEQ ID NO: 1337983 - RNA, 19 nt, Artificial Sequence
  Description of Artificial Sequence: Synthetic oligonucleotide
cucccgccauagcuugucc

SEQ ID NO: 1337984 - RNA, 19 nt, Artificial Sequence
  Description of Artificial Sequence: Synthetic oligonucleotide
ccugggugucuucauugag

SEQ ID NO: 1337985 - RNA, 19 nt, Artificial Sequence
  Description of Artificial Sequence: Synthetic oligonucleotide
augugcucgggguccccga

SEQ ID NO: 1337986 - RNA, 19 nt, Artificial Sequence
  Description of Artificial Sequence: Synthetic oligonucleotide
uccuccccgggcucgcgcu

SEQ ID NO: 1337987 - RNA, 19 nt, Artificial Sequence
  Description of Artificial Sequence: Synthetic oligonucleotide
caaccauggcaguaucaua

SEQ ID NO: 1337988 - RNA, 19 nt, Artificial Sequence
  Description of Artificial Sequence: Synthetic oligonucleotide
cuugccaaccauggcagua

SEQ ID NO: 1337989 - RNA, 19 nt, Artificial Sequence
  Description of Artificial Sequence: Synthetic oligonucleotide
cucucuuugcggcgccauc

SEQ ID NO: 1337990 - RNA, 19 nt, Artificial Sequence
  Description of Artificial Sequence: Synthetic oligonucleotide
acagccacacuugcuugaa

SEQ ID NO: 1337991 - RNA, 19 nt, Artificial Sequence
  Description of Artificial Sequence: Synthetic oligonucleotide
uuuccagccuggggucccc

SEQ ID NO: 1337992 - RNA, 19 nt, Artificial Sequence
  Description of Artificial Sequence: Synthetic oligonucleotide
cacaccgguuaccacaggu

SEQ ID NO: 1337993 - RNA, 19 nt, Artificial Sequence
  Description of Artificial Sequence: Synthetic oligonucleotide
ccaugcggaacuccucccc

SEQ ID NO: 1337994 - RNA, 19 nt, Artificial Sequence
  Description of Artificial Sequence: Synthetic oligonucleotide
agcauggagaacagucaua

SEQ ID NO: 1337995 - RNA, 19 nt, Artificial Sequence
  Description of Artificial Sequence: Synthetic oligonucleotide
aggucagaauggagcucgg

SEQ ID NO: 1337996 - RNA, 19 nt, Artificial Sequence
  Description of Artificial Sequence: Synthetic oligonucleotide
gaauggagcucggccaacu

SEQ ID NO: 1337997 - RNA, 19 nt, Artificial Sequence
  Description of Artificial Sequence: Synthetic oligonucleotide
gagggacugagaagguucu

SEQ ID NO: 1337998 - RNA, 19 nt, Artificial Sequence
  Description of Artificial Sequence: Synthetic oligonucleotide
gggaguacuugccgccaug

SEQ ID NO: 1337999 - RNA, 19 nt, Artificial Sequence
  Description of Artificial Sequence: Synthetic oligonucleotide
gcucucaaccaggauggug

SEQ ID NO: 1338000 - RNA, 19 nt, Artificial Sequence
  Description of Artificial Sequence: Synthetic oligonucleotide
agacacugcugagggcuca

SEQ ID NO: 1338001 - RNA, 19 nt, Artificial Sequence
  Description of Artificial Sequence: Synthetic oligonucleotide
agguagagcugagacucua

SEQ ID NO: 1338002 - RNA, 19 nt, Artificial Sequence
  Description of Artificial Sequence: Synthetic oligonucleotide
cagucauauuucacuggua

SEQ ID NO: 1338003 - RNA, 19 nt, Artificial Sequence
  Description of Artificial Sequence: Synthetic oligonucleotide
cucccauagcugguucaac

SEQ ID NO: 1338004 - RNA, 19 nt, Artificial Sequence
  Description of Artificial Sequence: Synthetic oligonucleotide
ccgggcucgcgcuuggcgg

SEQ ID NO: 1338005 - RNA, 19 nt, Artificial Sequence
  Description of Artificial Sequence: Synthetic oligonucleotide
cacuguggucagccacacc

SEQ ID NO: 1338006 - RNA, 19 nt, Artificial Sequence
  Description of Artificial Sequence: Synthetic oligonucleotide
gcuccucccggaaugacuc

SEQ ID NO: 1338007 - RNA, 19 nt, Artificial Sequence
  Description of Artificial Sequence: Synthetic oligonucleotide
cuaucacucggggcucuuc

SEQ ID NO: 1338008 - RNA, 19 nt, Artificial Sequence
  Description of Artificial Sequence: Synthetic oligonucleotide
ccucccauccaguccguac

SEQ ID NO: 1338009 - RNA, 19 nt, Artificial Sequence
  Description of Artificial Sequence: Synthetic oligonucleotide
acuugccgccauggccggc

SEQ ID NO: 1338010 - RNA, 19 nt, Artificial Sequence
  Description of Artificial Sequence: Synthetic oligonucleotide
agacccugcuggacagguc

SEQ ID NO: 1338011 - RNA, 19 nt, Artificial Sequence
  Description of Artificial Sequence: Synthetic oligonucleotide
cccgggaguacuugccgcc

SEQ ID NO: 1338012 - RNA, 19 nt, Artificial Sequence
  Description of Artificial Sequence: Synthetic oligonucleotide
gccauguauuuaaggacuc

SEQ ID NO: 1338013 - RNA, 19 nt, Artificial Sequence
  Description of Artificial Sequence: Synthetic oligonucleotide
ggucagaauggagcucggc

SEQ ID NO: 1338014 - RNA, 19 nt, Artificial Sequence
  Description of Artificial Sequence: Synthetic oligonucleotide
guucgucccucucuuguau

SEQ ID NO: 1338015 - RNA, 19 nt, Artificial Sequence
  Description of Artificial Sequence: Synthetic oligonucleotide
ccgguuaccacaggucuac

SEQ ID NO: 1338016 - RNA, 19 nt, Artificial Sequence
  Description of Artificial Sequence: Synthetic oligonucleotide
ggacucuggacauaacauu

SEQ ID NO: 1338017 - RNA, 19 nt, Artificial Sequence
  Description of Artificial Sequence: Synthetic oligonucleotide
caggcggucuaggcccugg

SEQ ID NO: 1338018 - RNA, 19 nt, Artificial Sequence
  Description of Artificial Sequence: Synthetic oligonucleotide
uguagcccugguggcugac

SEQ ID NO: 1338019 - RNA, 19 nt, Artificial Sequence
  Description of Artificial Sequence: Synthetic oligonucleotide
aacucccgccauagcuugu

SEQ ID NO: 1338020 - RNA, 19 nt, Artificial Sequence
  Description of Artificial Sequence: Synthetic oligonucleotide
gugcucgggguccccgaug

SEQ ID NO: 1338021 - RNA, 19 nt, Artificial Sequence
  Description of Artificial Sequence: Synthetic oligonucleotide
accuuguagccuagcuccu

SEQ ID NO: 1338022 - RNA, 19 nt, Artificial Sequence
  Description of Artificial Sequence: Synthetic oligonucleotide
gucuacacaugcagaugaa

SEQ ID NO: 1338023 - RNA, 19 nt, Artificial Sequence
  Description of Artificial Sequence: Synthetic oligonucleotide
cugcuucugguagugguua

SEQ ID NO: 1338024 - RNA, 19 nt, Artificial Sequence
  Description of Artificial Sequence: Synthetic oligonucleotide
accuuccucaggcggucua

SEQ ID NO: 1338025 - RNA, 19 nt, Artificial Sequence
  Description of Artificial Sequence: Synthetic oligonucleotide
cugggccuucucccauagc

SEQ ID NO: 1338026 - RNA, 19 nt, Artificial Sequence
  Description of Artificial Sequence: Synthetic oligonucleotide
uggaccaguuuugcuucuu

SEQ ID NO: 1338027 - RNA, 19 nt, Artificial Sequence
  Description of Artificial Sequence: Synthetic oligonucleotide
gccauagcuuguccaguuc

SEQ ID NO: 1338028 - RNA, 19 nt, Artificial Sequence
  Description of Artificial Sequence: Synthetic oligonucleotide
cagccacaccgguuaccac

SEQ ID NO: 1338029 - RNA, 19 nt, Artificial Sequence
  Description of Artificial Sequence: Synthetic oligonucleotide
ucuaucacucggggcucuu

SEQ ID NO: 1338030 - RNA, 19 nt, Artificial Sequence
  Description of Artificial Sequence: Synthetic oligonucleotide
cuccuccccgggcucgcgc

SEQ ID NO: 1338031 - RNA, 19 nt, Artificial Sequence
  Description of Artificial Sequence: Synthetic oligonucleotide
acuggagccgaggcagcau

SEQ ID NO: 1338032 - RNA, 19 nt, Artificial Sequence
  Description of Artificial Sequence: Synthetic oligonucleotide
cugggccucagacacugcu

SEQ ID NO: 1338033 - RNA, 19 nt, Artificial Sequence
  Description of Artificial Sequence: Synthetic oligonucleotide
cacaugcagaugaaauguu

SEQ ID NO: 1338034 - RNA, 19 nt, Artificial Sequence
  Description of Artificial Sequence: Synthetic oligonucleotide
gcauagagacccucucucu

SEQ ID NO: 1338035 - RNA, 19 nt, Artificial Sequence
  Description of Artificial Sequence: Synthetic oligonucleotide
aggcggucuaggcccuggu

SEQ ID NO: 1338036 - RNA, 19 nt, Artificial Sequence
  Description of Artificial Sequence: Synthetic oligonucleotide
gccggcgacgggcuggggc

SEQ ID NO: 1338037 - RNA, 19 nt, Artificial Sequence
  Description of Artificial Sequence: Synthetic oligonucleotide
gugguucaugucagaggga

SEQ ID NO: 1338038 - RNA, 19 nt, Artificial Sequence
  Description of Artificial Sequence: Synthetic oligonucleotide
ccaaggcucucaaccagga

SEQ ID NO: 1338039 - RNA, 19 nt, Artificial Sequence
  Description of Artificial Sequence: Synthetic oligonucleotide
augaagccgcugggccuuc

SEQ ID NO: 1338040 - RNA, 19 nt, Artificial Sequence
  Description of Artificial Sequence: Synthetic oligonucleotide
accgguuaccacaggucua

SEQ ID NO: 1338041 - RNA, 19 nt, Artificial Sequence
  Description of Artificial Sequence: Synthetic oligonucleotide
gguccucagagcucauugu

SEQ ID NO: 1338042 - RNA, 19 nt, Artificial Sequence
  Description of Artificial Sequence: Synthetic oligonucleotide
accuggccaagaugacauu

SEQ ID NO: 1338043 - RNA, 19 nt, Artificial Sequence
  Description of Artificial Sequence: Synthetic oligonucleotide
gacacugcugagggcucaa

SEQ ID NO: 1338044 - RNA, 19 nt, Artificial Sequence
  Description of Artificial Sequence: Synthetic oligonucleotide
gcucaaaauuccgccaugu

SEQ ID NO: 1338045 - RNA, 19 nt, Artificial Sequence
  Description of Artificial Sequence: Synthetic oligonucleotide
uugccacgucacugugguc

SEQ ID NO: 1338046 - RNA, 19 nt, Artificial Sequence
  Description of Artificial Sequence: Synthetic oligonucleotide
ccauagcuuguccaguucu

SEQ ID NO: 1338047 - RNA, 19 nt, Artificial Sequence
  Description of Artificial Sequence: Synthetic oligonucleotide
gguugauacuccgcagucu

SEQ ID NO: 1338048 - RNA, 19 nt, Artificial Sequence
  Description of Artificial Sequence: Synthetic oligonucleotide
cgccauguauuuaaggacu

SEQ ID NO: 1338049 - RNA, 19 nt, Artificial Sequence
  Description of Artificial Sequence: Synthetic oligonucleotide
guccguaccuggccaagau

SEQ ID NO: 1338050 - RNA, 19 nt, Artificial Sequence
  Description of Artificial Sequence: Synthetic oligonucleotide
caguguccucaggagccuc

SEQ ID NO: 1338051 - RNA, 19 nt, Artificial Sequence
  Description of Artificial Sequence: Synthetic oligonucleotide
gcggaacuccuccccgggc

SEQ ID NO: 1338052 - RNA, 19 nt, Artificial Sequence
  Description of Artificial Sequence: Synthetic oligonucleotide
gggcgucacuuuugaggug

SEQ ID NO: 1338053 - RNA, 19 nt, Artificial Sequence
  Description of Artificial Sequence: Synthetic oligonucleotide
caguaucauacuggugugu

SEQ ID NO: 1338054 - RNA, 19 nt, Artificial Sequence
  Description of Artificial Sequence: Synthetic oligonucleotide
cccgggcucgcgcuuggcg

SEQ ID NO: 1338055 - RNA, 19 nt, Artificial Sequence
  Description of Artificial Sequence: Synthetic oligonucleotide
gagguagagcugagacucu

SEQ ID NO: 1338056 - RNA, 19 nt, Artificial Sequence
  Description of Artificial Sequence: Synthetic oligonucleotide
gcccugguggcugaccuuc

SEQ ID NO: 1338057 - RNA, 19 nt, Artificial Sequence
  Description of Artificial Sequence: Synthetic oligonucleotide
gccaaccauggcaguauca

SEQ ID NO: 1338058 - RNA, 19 nt, Artificial Sequence
  Description of Artificial Sequence: Synthetic oligonucleotide
caccaacaacuggagccga

SEQ ID NO: 1338059 - RNA, 19 nt, Artificial Sequence
  Description of Artificial Sequence: Synthetic oligonucleotide
caguugaguucgucccucu

SEQ ID NO: 1338060 - RNA, 19 nt, Artificial Sequence
  Description of Artificial Sequence: Synthetic oligonucleotide
ggcagcauagagacccucu

SEQ ID NO: 1338061 - RNA, 19 nt, Artificial Sequence
  Description of Artificial Sequence: Synthetic oligonucleotide
guaggacuguagcccuggu

SEQ ID NO: 1338062 - RNA, 19 nt, Artificial Sequence
  Description of Artificial Sequence: Synthetic oligonucleotide
gucuaggcccugguugaua

SEQ ID NO: 1338063 - RNA, 19 nt, Artificial Sequence
  Description of Artificial Sequence: Synthetic oligonucleotide
uccucccauccaguccgua

SEQ ID NO: 1338064 - RNA, 19 nt, Artificial Sequence
  Description of Artificial Sequence: Synthetic oligonucleotide
cucuagcaacaggcacuuc

SEQ ID NO: 1338065 - RNA, 19 nt, Artificial Sequence
  Description of Artificial Sequence: Synthetic oligonucleotide
gcagcacauuguacucgug

SEQ ID NO: 1338066 - RNA, 19 nt, Artificial Sequence
  Description of Artificial Sequence: Synthetic oligonucleotide
cuaggcccugguugauacu

SEQ ID NO: 1338067 - RNA, 19 nt, Artificial Sequence
  Description of Artificial Sequence: Synthetic oligonucleotide
cggucuaggcccugguuga

SEQ ID NO: 1338068 - RNA, 19 nt, Artificial Sequence
  Description of Artificial Sequence: Synthetic oligonucleotide
ccggcgacgggcuggggca

SEQ ID NO: 1338069 - RNA, 19 nt, Artificial Sequence
  Description of Artificial Sequence: Synthetic oligonucleotide
caaggcucucaaccaggau

SEQ ID NO: 1338070 - RNA, 19 nt, Artificial Sequence
  Description of Artificial Sequence: Synthetic oligonucleotide
ggagacagaugaagccgcu

SEQ ID NO: 1338071 - RNA, 19 nt, Artificial Sequence
  Description of Artificial Sequence: Synthetic oligonucleotide
ccacaccgguuaccacagg

SEQ ID NO: 1338072 - RNA, 19 nt, Artificial Sequence
  Description of Artificial Sequence: Synthetic oligonucleotide
gguccccgaugcucuccac

SEQ ID NO: 1338073 - RNA, 19 nt, Artificial Sequence
  Description of Artificial Sequence: Synthetic oligonucleotide
cucaggcggucuaggcccu

SEQ ID NO: 1338074 - RNA, 19 nt, Artificial Sequence
  Description of Artificial Sequence: Synthetic oligonucleotide
cucuuugcggcgccaucuu

SEQ ID NO: 1338075 - RNA, 19 nt, Artificial Sequence
  Description of Artificial Sequence: Synthetic oligonucleotide
cacuuuugaggugguucau

SEQ ID NO: 1338076 - RNA, 19 nt, Artificial Sequence
  Description of Artificial Sequence: Synthetic oligonucleotide
ccccgaugcucuccacaug

SEQ ID NO: 1338077 - RNA, 19 nt, Artificial Sequence
  Description of Artificial Sequence: Synthetic oligonucleotide
cccauccaguccguaccug

SEQ ID NO: 1338078 - RNA, 19 nt, Artificial Sequence
  Description of Artificial Sequence: Synthetic oligonucleotide
gggccagaucccacagauc

SEQ ID NO: 1338079 - RNA, 19 nt, Artificial Sequence
  Description of Artificial Sequence: Synthetic oligonucleotide
guggucagccacaccgguu

SEQ ID NO: 1338080 - RNA, 19 nt, Artificial Sequence
  Description of Artificial Sequence: Synthetic oligonucleotide
gcuuuacaauauaguuuau

SEQ ID NO: 1338081 - RNA, 19 nt, Artificial Sequence
  Description of Artificial Sequence: Synthetic oligonucleotide
gccagaucccacagaucua

SEQ ID NO: 1338082 - RNA, 19 nt, Artificial Sequence
  Description of Artificial Sequence: Synthetic oligonucleotide
gggcucgcgcuuggcggcc

SEQ ID NO: 1338083 - RNA, 19 nt, Artificial Sequence
  Description of Artificial Sequence: Synthetic oligonucleotide
gccuagcuccuuggucuuc

SEQ ID NO: 1338084 - RNA, 19 nt, Artificial Sequence
  Description of Artificial Sequence: Synthetic oligonucleotide
ggcggucuaggcccugguu

SEQ ID NO: 1338085 - RNA, 19 nt, Artificial Sequence
  Description of Artificial Sequence: Synthetic oligonucleotide
ccgggaguacuugccgcca

SEQ ID NO: 1338086 - RNA, 19 nt, Artificial Sequence
  Description of Artificial Sequence: Synthetic oligonucleotide
ccgaugcucuccacaugcu

SEQ ID NO: 1338087 - RNA, 19 nt, Artificial Sequence
  Description of Artificial Sequence: Synthetic oligonucleotide
ggcucucaaccaggauggu

SEQ ID NO: 1338088 - RNA, 19 nt, Artificial Sequence
  Description of Artificial Sequence: Synthetic oligonucleotide
ggcucgcgcuuggcggcca

SEQ ID NO: 1338089 - RNA, 19 nt, Artificial Sequence
  Description of Artificial Sequence: Synthetic oligonucleotide
gcgucacuuuugagguggu

SEQ ID NO: 1338090 - RNA, 19 nt, Artificial Sequence
  Description of Artificial Sequence: Synthetic oligonucleotide
cgguuaccacaggucuaca

SEQ ID NO: 1338091 - RNA, 19 nt, Artificial Sequence
  Description of Artificial Sequence: Synthetic oligonucleotide
ccugguccucagagcucau

SEQ ID NO: 1338092 - RNA, 19 nt, Artificial Sequence
  Description of Artificial Sequence: Synthetic oligonucleotide
ccuccccgggcucgcgcuu

SEQ ID NO: 1338093 - RNA, 19 nt, Artificial Sequence
  Description of Artificial Sequence: Synthetic oligonucleotide
aauggugugaguuguuucc

SEQ ID NO: 1338094 - RNA, 19 nt, Artificial Sequence
  Description of Artificial Sequence: Synthetic oligonucleotide
uuuagugaagugaugaacu

SEQ ID NO: 1338095 - RNA, 19 nt, Artificial Sequence
  Description of Artificial Sequence: Synthetic oligonucleotide
gaagugaugaacucgguac

SEQ ID NO: 1338096 - RNA, 19 nt, Artificial Sequence
  Description of Artificial Sequence: Synthetic oligonucleotide
ucgauauuguaaauuuggg

SEQ ID NO: 1338097 - RNA, 19 nt, Artificial Sequence
  Description of Artificial Sequence: Synthetic oligonucleotide
gaugaucgcaggcaggucg

SEQ ID NO: 1338098 - RNA, 19 nt, Artificial Sequence
  Description of Artificial Sequence: Synthetic oligonucleotide
gauauuguaaauuugggau

SEQ ID NO: 1338099 - RNA, 19 nt, Artificial Sequence
  Description of Artificial Sequence: Synthetic oligonucleotide
augauauacagacggcggc

SEQ ID NO: 1338100 - RNA, 19 nt, Artificial Sequence
  Description of Artificial Sequence: Synthetic oligonucleotide
ucaacuuuagugaagugau

SEQ ID NO: 1338101 - RNA, 19 nt, Artificial Sequence
  Description of Artificial Sequence: Synthetic oligonucleotide
auaucgaggguccuucugc

SEQ ID NO: 1338102 - RNA, 19 nt, Artificial Sequence
  Description of Artificial Sequence: Synthetic oligonucleotide
ucgaacuugcgauaggcgg

SEQ ID NO: 1338103 - RNA, 19 nt, Artificial Sequence
  Description of Artificial Sequence: Synthetic oligonucleotide
gguaaaguugaccaggccg

SEQ ID NO: 1338104 - RNA, 19 nt, Artificial Sequence
  Description of Artificial Sequence: Synthetic oligonucleotide
uugguuuaccaccagggcc

SEQ ID NO: 1338105 - RNA, 19 nt, Artificial Sequence
  Description of Artificial Sequence: Synthetic oligonucleotide
ugccacguggagaugaucg

SEQ ID NO: 1338106 - RNA, 19 nt, Artificial Sequence
  Description of Artificial Sequence: Synthetic oligonucleotide
gucgauauuguaaauuugg

SEQ ID NO: 1338107 - RNA, 19 nt, Artificial Sequence
  Description of Artificial Sequence: Synthetic oligonucleotide
agacacgugggacaggcgc

SEQ ID NO: 1338108 - RNA, 19 nt, Artificial Sequence
  Description of Artificial Sequence: Synthetic oligonucleotide
guuguuuccggauuucccg

SEQ ID NO: 1338109 - RNA, 19 nt, Artificial Sequence
  Description of Artificial Sequence: Synthetic oligonucleotide
caugauauacagacggcgg

SEQ ID NO: 1338110 - RNA, 19 nt, Artificial Sequence
  Description of Artificial Sequence: Synthetic oligonucleotide
caagccguggcauucaccg

SEQ ID NO: 1338111 - RNA, 19 nt, Artificial Sequence
  Description of Artificial Sequence: Synthetic oligonucleotide
ugguuuaccaccagggccc

SEQ ID NO: 1338112 - RNA, 19 nt, Artificial Sequence
  Description of Artificial Sequence: Synthetic oligonucleotide
ugaugaacucgguacaacc

SEQ ID NO: 1338113 - RNA, 19 nt, Artificial Sequence
  Description of Artificial Sequence: Synthetic oligonucleotide
cuucugucggauaaugucc

SEQ ID NO: 1338114 - RNA, 19 nt, Artificial Sequence
  Description of Artificial Sequence: Synthetic oligonucleotide
ucggauaauguccaguuuc

SEQ ID NO: 1338115 - RNA, 19 nt, Artificial Sequence
  Description of Artificial Sequence: Synthetic oligonucleotide
aacaugauauacagacggc

SEQ ID NO: 1338116 - RNA, 19 nt, Artificial Sequence
  Description of Artificial Sequence: Synthetic oligonucleotide
aaugucgaacuugcgauag

SEQ ID NO: 1338117 - RNA, 19 nt, Artificial Sequence
  Description of Artificial Sequence: Synthetic oligonucleotide
agucaagaucuccaccugc

SEQ ID NO: 1338118 - RNA, 19 nt, Artificial Sequence
  Description of Artificial Sequence: Synthetic oligonucleotide
uguaaauuugggauggguu

SEQ ID NO: 1338119 - RNA, 19 nt, Artificial Sequence
  Description of Artificial Sequence: Synthetic oligonucleotide
acaugauauacagacggcg

SEQ ID NO: 1338120 - RNA, 19 nt, Artificial Sequence
  Description of Artificial Sequence: Synthetic oligonucleotide
gagaaaaccggcuugucuc

SEQ ID NO: 1338121 - RNA, 19 nt, Artificial Sequence
  Description of Artificial Sequence: Synthetic oligonucleotide
guacuggagaggcacaugg

SEQ ID NO: 1338122 - RNA, 19 nt, Artificial Sequence
  Description of Artificial Sequence: Synthetic oligonucleotide
agugaagugaugaacucgg

SEQ ID NO: 1338123 - RNA, 19 nt, Artificial Sequence
  Description of Artificial Sequence: Synthetic oligonucleotide
uugagaucuuugaaucggg

SEQ ID NO: 1338124 - RNA, 19 nt, Artificial Sequence
  Description of Artificial Sequence: Synthetic oligonucleotide
uuugaaucgggaggggucg

SEQ ID NO: 1338125 - RNA, 19 nt, Artificial Sequence
  Description of Artificial Sequence: Synthetic oligonucleotide
ugguccaugaaguauccug

SEQ ID NO: 1338126 - RNA, 19 nt, Artificial Sequence
  Description of Artificial Sequence: Synthetic oligonucleotide
ucucccacuacacggagca

SEQ ID NO: 1338127 - RNA, 19 nt, Artificial Sequence
  Description of Artificial Sequence: Synthetic oligonucleotide
ugaaguauccugccagccc

SEQ ID NO: 1338128 - RNA, 19 nt, Artificial Sequence
  Description of Artificial Sequence: Synthetic oligonucleotide
cagacccugauaucgaggg

SEQ ID NO: 1338129 - RNA, 19 nt, Artificial Sequence
  Description of Artificial Sequence: Synthetic oligonucleotide
cucgcagguaauaggaccg

SEQ ID NO: 1338130 - RNA, 19 nt, Artificial Sequence
  Description of Artificial Sequence: Synthetic oligonucleotide
aagugaugaacucgguaca

SEQ ID NO: 1338131 - RNA, 19 nt, Artificial Sequence
  Description of Artificial Sequence: Synthetic oligonucleotide
ucggggaacagcacaagcc

SEQ ID NO: 1338132 - RNA, 19 nt, Artificial Sequence
  Description of Artificial Sequence: Synthetic oligonucleotide
cucgccaauuuccaggugg

SEQ ID NO: 1338133 - RNA, 19 nt, Artificial Sequence
  Description of Artificial Sequence: Synthetic oligonucleotide
gauggguuggcguuuggug

SEQ ID NO: 1338134 - RNA, 19 nt, Artificial Sequence
  Description of Artificial Sequence: Synthetic oligonucleotide
aaaguugaccaggccgugc

SEQ ID NO: 1338135 - RNA, 19 nt, Artificial Sequence
  Description of Artificial Sequence: Synthetic oligonucleotide
ucgaagaaggucuggaauc

SEQ ID NO: 1338136 - RNA, 19 nt, Artificial Sequence
  Description of Artificial Sequence: Synthetic oligonucleotide
aaacacggcuccucgaaga

SEQ ID NO: 1338137 - RNA, 19 nt, Artificial Sequence
  Description of Artificial Sequence: Synthetic oligonucleotide
cucaacuccugccacgugg

SEQ ID NO: 1338138 - RNA, 19 nt, Artificial Sequence
  Description of Artificial Sequence: Synthetic oligonucleotide
cacggcuccucgaagaagg

SEQ ID NO: 1338139 - RNA, 19 nt, Artificial Sequence
  Description of Artificial Sequence: Synthetic oligonucleotide
aguuguuuccggauuuccc

SEQ ID NO: 1338140 - RNA, 19 nt, Artificial Sequence
  Description of Artificial Sequence: Synthetic oligonucleotide
cugugauccggucagugcc

SEQ ID NO: 1338141 - RNA, 19 nt, Artificial Sequence
  Description of Artificial Sequence: Synthetic oligonucleotide
aaguugaccaggccgugcu

SEQ ID NO: 1338142 - RNA, 19 nt, Artificial Sequence
  Description of Artificial Sequence: Synthetic oligonucleotide
aaggacggaagcucgcugu

SEQ ID NO: 1338143 - RNA, 19 nt, Artificial Sequence
  Description of Artificial Sequence: Synthetic oligonucleotide
aagaaggucuggaaucguc

SEQ ID NO: 1338144 - RNA, 19 nt, Artificial Sequence
  Description of Artificial Sequence: Synthetic oligonucleotide
ucaaacacggcuccucgaa

SEQ ID NO: 1338145 - RNA, 19 nt, Artificial Sequence
  Description of Artificial Sequence: Synthetic oligonucleotide
agguaauaggaccgguguc

SEQ ID NO: 1338146 - RNA, 19 nt, Artificial Sequence
  Description of Artificial Sequence: Synthetic oligonucleotide
uccgcggcgaaacuucucc

SEQ ID NO: 1338147 - RNA, 19 nt, Artificial Sequence
  Description of Artificial Sequence: Synthetic oligonucleotide
agagcaaugaggacucggg

SEQ ID NO: 1338148 - RNA, 19 nt, Artificial Sequence
  Description of Artificial Sequence: Synthetic oligonucleotide
ggaaccauccuuuugcuga

SEQ ID NO: 1338149 - RNA, 19 nt, Artificial Sequence
  Description of Artificial Sequence: Synthetic oligonucleotide
acggaagcucgcuguagcc

SEQ ID NO: 1338150 - RNA, 19 nt, Artificial Sequence
  Description of Artificial Sequence: Synthetic oligonucleotide
auaggaccgguguccagac

SEQ ID NO: 1338151 - RNA, 19 nt, Artificial Sequence
  Description of Artificial Sequence: Synthetic oligonucleotide
cuuugaaucgggagggguc

SEQ ID NO: 1338152 - RNA, 19 nt, Artificial Sequence
  Description of Artificial Sequence: Synthetic oligonucleotide
aaucgggaggggucgauau

SEQ ID NO: 1338153 - RNA, 19 nt, Artificial Sequence
  Description of Artificial Sequence: Synthetic oligonucleotide
gauaucgaggguccuucug

SEQ ID NO: 1338154 - RNA, 19 nt, Artificial Sequence
  Description of Artificial Sequence: Synthetic oligonucleotide
gguugagaucuuugaaucg

SEQ ID NO: 1338155 - RNA, 19 nt, Artificial Sequence
  Description of Artificial Sequence: Synthetic oligonucleotide
cucgcuguagcccucgcgc

SEQ ID NO: 1338156 - RNA, 19 nt, Artificial Sequence
  Description of Artificial Sequence: Synthetic oligonucleotide
aucgcaggcaggucggccg

SEQ ID NO: 1338157 - RNA, 19 nt, Artificial Sequence
  Description of Artificial Sequence: Synthetic oligonucleotide
cugauugcucuccagaaga

SEQ ID NO: 1338158 - RNA, 19 nt, Artificial Sequence
  Description of Artificial Sequence: Synthetic oligonucleotide
aggguaaaguugaccaggc

SEQ ID NO: 1338159 - RNA, 19 nt, Artificial Sequence
  Description of Artificial Sequence: Synthetic oligonucleotide
acacggagcacucuagccu

SEQ ID NO: 1338160 - RNA, 19 nt, Artificial Sequence
  Description of Artificial Sequence: Synthetic oligonucleotide
gauuucccggccucgggcc

SEQ ID NO: 1338161 - RNA, 19 nt, Artificial Sequence
  Description of Artificial Sequence: Synthetic oligonucleotide
ugugaguuguuuccggauu

SEQ ID NO: 1338162 - RNA, 19 nt, Artificial Sequence
  Description of Artificial Sequence: Synthetic oligonucleotide
gguaauaggaccggugucc

SEQ ID NO: 1338163 - RNA, 19 nt, Artificial Sequence
  Description of Artificial Sequence: Synthetic oligonucleotide
ugauauacagacggcggcu

SEQ ID NO: 1338164 - RNA, 19 nt, Artificial Sequence
  Description of Artificial Sequence: Synthetic oligonucleotide
uucucgucccuccaggcuc

SEQ ID NO: 1338165 - RNA, 19 nt, Artificial Sequence
  Description of Artificial Sequence: Synthetic oligonucleotide
gacggaagcucgcuguagc

SEQ ID NO: 1338166 - RNA, 19 nt, Artificial Sequence
  Description of Artificial Sequence: Synthetic oligonucleotide
uuguaaauuugggaugggu

SEQ ID NO: 1338167 - RNA, 19 nt, Artificial Sequence
  Description of Artificial Sequence: Synthetic oligonucleotide
cauacaggagguuccgcac

SEQ ID NO: 1338168 - RNA, 19 nt, Artificial Sequence
  Description of Artificial Sequence: Synthetic oligonucleotide
aaugaggacucggggaaca

SEQ ID NO: 1338169 - RNA, 19 nt, Artificial Sequence
  Description of Artificial Sequence: Synthetic oligonucleotide
ucuagagcagacaguuguc

SEQ ID NO: 1338170 - RNA, 19 nt, Artificial Sequence
  Description of Artificial Sequence: Synthetic oligonucleotide
caucucaacuuuagugaag

SEQ ID NO: 1338171 - RNA, 19 nt, Artificial Sequence
  Description of Artificial Sequence: Synthetic oligonucleotide
uucucgccaauuuccaggu

SEQ ID NO: 1338172 - RNA, 19 nt, Artificial Sequence
  Description of Artificial Sequence: Synthetic oligonucleotide
cucagucaagaucuccacc

SEQ ID NO: 1338173 - RNA, 19 nt, Artificial Sequence
  Description of Artificial Sequence: Synthetic oligonucleotide
guugggcaaucucagugcc

SEQ ID NO: 1338174 - RNA, 19 nt, Artificial Sequence
  Description of Artificial Sequence: Synthetic oligonucleotide
gaagccccuguugauaagc

SEQ ID NO: 1338175 - RNA, 19 nt, Artificial Sequence
  Description of Artificial Sequence: Synthetic oligonucleotide
ugaccucuccguauccgcc

SEQ ID NO: 1338176 - RNA, 19 nt, Artificial Sequence
  Description of Artificial Sequence: Synthetic oligonucleotide
gaggggucgauauuguaaa

SEQ ID NO: 1338177 - RNA, 19 nt, Artificial Sequence
  Description of Artificial Sequence: Synthetic oligonucleotide
ggucggaaggagaaaaccg

SEQ ID NO: 1338178 - RNA, 19 nt, Artificial Sequence
  Description of Artificial Sequence: Synthetic oligonucleotide
ucgccaauuuccagguggc

SEQ ID NO: 1338179 - RNA, 19 nt, Artificial Sequence
  Description of Artificial Sequence: Synthetic oligonucleotide
uaucgaggguccuucugca

SEQ ID NO: 1338180 - RNA, 19 nt, Artificial Sequence
  Description of Artificial Sequence: Synthetic oligonucleotide
uuuaccaccagggcccgca

SEQ ID NO: 1338181 - RNA, 19 nt, Artificial Sequence
  Description of Artificial Sequence: Synthetic oligonucleotide
aaaaccggcuugucuccca

SEQ ID NO: 1338182 - RNA, 19 nt, Artificial Sequence
  Description of Artificial Sequence: Synthetic oligonucleotide
ucgggaggggucgauauug

SEQ ID NO: 1338183 - RNA, 19 nt, Artificial Sequence
  Description of Artificial Sequence: Synthetic oligonucleotide
uuccgcacucgcuucuccg

SEQ ID NO: 1338184 - RNA, 19 nt, Artificial Sequence
  Description of Artificial Sequence: Synthetic oligonucleotide
cacguggagaugaucgcag

SEQ ID NO: 1338185 - RNA, 19 nt, Artificial Sequence
  Description of Artificial Sequence: Synthetic oligonucleotide
guuugguugggcaaucuca

SEQ ID NO: 1338186 - RNA, 19 nt, Artificial Sequence
  Description of Artificial Sequence: Synthetic oligonucleotide
cuccguauccgccucggcc

SEQ ID NO: 1338187 - RNA, 19 nt, Artificial Sequence
  Description of Artificial Sequence: Synthetic oligonucleotide
ucguugucuugguuuacca

SEQ ID NO: 1338188 - RNA, 19 nt, Artificial Sequence
  Description of Artificial Sequence: Synthetic oligonucleotide
ucuuugaaucgggaggggu

SEQ ID NO: 1338189 - RNA, 19 nt, Artificial Sequence
  Description of Artificial Sequence: Synthetic oligonucleotide
ugucucccacuacacggag

SEQ ID NO: 1338190 - RNA, 19 nt, Artificial Sequence
  Description of Artificial Sequence: Synthetic oligonucleotide
uggcucucauccccaacag

SEQ ID NO: 1338191 - RNA, 19 nt, Artificial Sequence
  Description of Artificial Sequence: Synthetic oligonucleotide
acaaggacggaaccauccu

SEQ ID NO: 1338192 - RNA, 19 nt, Artificial Sequence
  Description of Artificial Sequence: Synthetic oligonucleotide
cauguccaaggacggaagc

SEQ ID NO: 1338193 - RNA, 19 nt, Artificial Sequence
  Description of Artificial Sequence: Synthetic oligonucleotide
agugccuacguagggcugg

SEQ ID NO: 1338194 - RNA, 19 nt, Artificial Sequence
  Description of Artificial Sequence: Synthetic oligonucleotide
auuguaaauuugggauggg

SEQ ID NO: 1338195 - RNA, 19 nt, Artificial Sequence
  Description of Artificial Sequence: Synthetic oligonucleotide
gacccugauaucgaggguc

SEQ ID NO: 1338196 - RNA, 19 nt, Artificial Sequence
  Description of Artificial Sequence: Synthetic oligonucleotide
gagcacucuagccuggcuc

SEQ ID NO: 1338197 - RNA, 19 nt, Artificial Sequence
  Description of Artificial Sequence: Synthetic oligonucleotide
aggccgugcuguaagaggg

SEQ ID NO: 1338198 - RNA, 19 nt, Artificial Sequence
  Description of Artificial Sequence: Synthetic oligonucleotide
aacacggcuccucgaagaa

SEQ ID NO: 1338199 - RNA, 19 nt, Artificial Sequence
  Description of Artificial Sequence: Synthetic oligonucleotide
uucuccgcggcgaaacuuc

SEQ ID NO: 1338200 - RNA, 19 nt, Artificial Sequence
  Description of Artificial Sequence: Synthetic oligonucleotide
ucucaacuuuagugaagug

SEQ ID NO: 1338201 - RNA, 19 nt, Artificial Sequence
  Description of Artificial Sequence: Synthetic oligonucleotide
uggcguuuggugucauucc

SEQ ID NO: 1338202 - RNA, 19 nt, Artificial Sequence
  Description of Artificial Sequence: Synthetic oligonucleotide
auacaggagguuccgcacu

SEQ ID NO: 1338203 - RNA, 19 nt, Artificial Sequence
  Description of Artificial Sequence: Synthetic oligonucleotide
uucaaacacggcuccucga

SEQ ID NO: 1338204 - RNA, 19 nt, Artificial Sequence
  Description of Artificial Sequence: Synthetic oligonucleotide
cacggagcacucuagccug

SEQ ID NO: 1338205 - RNA, 19 nt, Artificial Sequence
  Description of Artificial Sequence: Synthetic oligonucleotide
gguugggcaaucucagugc

SEQ ID NO: 1338206 - RNA, 19 nt, Artificial Sequence
  Description of Artificial Sequence: Synthetic oligonucleotide
gggacaggcgcuucugucg

SEQ ID NO: 1338207 - RNA, 19 nt, Artificial Sequence
  Description of Artificial Sequence: Synthetic oligonucleotide
guggcuuccgggcaugcgc

SEQ ID NO: 1338208 - RNA, 19 nt, Artificial Sequence
  Description of Artificial Sequence: Synthetic oligonucleotide
gaguuguuuccggauuucc

SEQ ID NO: 1338209 - RNA, 19 nt, Artificial Sequence
  Description of Artificial Sequence: Synthetic oligonucleotide
acguggagaugaucgcagg

SEQ ID NO: 1338210 - RNA, 19 nt, Artificial Sequence
  Description of Artificial Sequence: Synthetic oligonucleotide
uccaaggacggaagcucgc

SEQ ID NO: 1338211 - RNA, 19 nt, Artificial Sequence
  Description of Artificial Sequence: Synthetic oligonucleotide
aucgaggguccuucugcac

SEQ ID NO: 1338212 - RNA, 19 nt, Artificial Sequence
  Description of Artificial Sequence: Synthetic oligonucleotide
acccugauaucgagggucc

SEQ ID NO: 1338213 - RNA, 19 nt, Artificial Sequence
  Description of Artificial Sequence: Synthetic oligonucleotide
ucgcuguagcccucgcgcg

SEQ ID NO: 1338214 - RNA, 19 nt, Artificial Sequence
  Description of Artificial Sequence: Synthetic oligonucleotide
cgcguguucauacaggagg

SEQ ID NO: 1338215 - RNA, 19 nt, Artificial Sequence
  Description of Artificial Sequence: Synthetic oligonucleotide
ccaauuuccagguggcccc

SEQ ID NO: 1338216 - RNA, 19 nt, Artificial Sequence
  Description of Artificial Sequence: Synthetic oligonucleotide
gucucggcccgguagcagg

SEQ ID NO: 1338217 - RNA, 19 nt, Artificial Sequence
  Description of Artificial Sequence: Synthetic oligonucleotide
uaauaggaccgguguccag

SEQ ID NO: 1338218 - RNA, 19 nt, Artificial Sequence
  Description of Artificial Sequence: Synthetic oligonucleotide
ucccacuacacggagcacu

SEQ ID NO: 1338219 - RNA, 19 nt, Artificial Sequence
  Description of Artificial Sequence: Synthetic oligonucleotide
caacuuuagugaagugaug

SEQ ID NO: 1338220 - RNA, 19 nt, Artificial Sequence
  Description of Artificial Sequence: Synthetic oligonucleotide
gucgaacuugcgauaggcg

SEQ ID NO: 1338221 - RNA, 19 nt, Artificial Sequence
  Description of Artificial Sequence: Synthetic oligonucleotide
ugcgagcucugcuccagcc

SEQ ID NO: 1338222 - RNA, 19 nt, Artificial Sequence
  Description of Artificial Sequence: Synthetic oligonucleotide
gauauacagacggcggcuc

SEQ ID NO: 1338223 - RNA, 19 nt, Artificial Sequence
  Description of Artificial Sequence: Synthetic oligonucleotide
uuuccggauuucccggccu

SEQ ID NO: 1338224 - RNA, 19 nt, Artificial Sequence
  Description of Artificial Sequence: Synthetic oligonucleotide
cacgcagcguccucgggcc

SEQ ID NO: 1338225 - RNA, 19 nt, Artificial Sequence
  Description of Artificial Sequence: Synthetic oligonucleotide
caaacacggcuccucgaag

SEQ ID NO: 1338226 - RNA, 19 nt, Artificial Sequence
  Description of Artificial Sequence: Synthetic oligonucleotide
acuccauguccaaggacgg

SEQ ID NO: 1338227 - RNA, 19 nt, Artificial Sequence
  Description of Artificial Sequence: Synthetic oligonucleotide
aaggacggaaccauccuuu

SEQ ID NO: 1338228 - RNA, 19 nt, Artificial Sequence
  Description of Artificial Sequence: Synthetic oligonucleotide
caacaggcgugucugggug

SEQ ID NO: 1338229 - RNA, 19 nt, Artificial Sequence
  Description of Artificial Sequence: Synthetic oligonucleotide
agagugguccaugaaguau

SEQ ID NO: 1338230 - RNA, 19 nt, Artificial Sequence
  Description of Artificial Sequence: Synthetic oligonucleotide
gucuccgacucaaacauga

SEQ ID NO: 1338231 - RNA, 19 nt, Artificial Sequence
  Description of Artificial Sequence: Synthetic oligonucleotide
uaaaguugaccaggccgug

SEQ ID NO: 1338232 - RNA, 19 nt, Artificial Sequence
  Description of Artificial Sequence: Synthetic oligonucleotide
gugaccucuccguauccgc

SEQ ID NO: 1338233 - RNA, 19 nt, Artificial Sequence
  Description of Artificial Sequence: Synthetic oligonucleotide
ucugggcgcccacgcagcg

SEQ ID NO: 1338234 - RNA, 19 nt, Artificial Sequence
  Description of Artificial Sequence: Synthetic oligonucleotide
ggcacuggugaccucuccg

SEQ ID NO: 1338235 - RNA, 19 nt, Artificial Sequence
  Description of Artificial Sequence: Synthetic oligonucleotide
guaaaguugaccaggccgu

SEQ ID NO: 1338236 - RNA, 19 nt, Artificial Sequence
  Description of Artificial Sequence: Synthetic oligonucleotide
uccgcacucgcuucuccgc

SEQ ID NO: 1338237 - RNA, 19 nt, Artificial Sequence
  Description of Artificial Sequence: Synthetic oligonucleotide
ugauaucgaggguccuucu

SEQ ID NO: 1338238 - RNA, 19 nt, Artificial Sequence
  Description of Artificial Sequence: Synthetic oligonucleotide
guccaaggacggaagcucg

SEQ ID NO: 1338239 - RNA, 19 nt, Artificial Sequence
  Description of Artificial Sequence: Synthetic oligonucleotide
caggcacaaggacggaacc

SEQ ID NO: 1338240 - RNA, 19 nt, Artificial Sequence
  Description of Artificial Sequence: Synthetic oligonucleotide
uuggggccgauguacugga

SEQ ID NO: 1338241 - RNA, 19 nt, Artificial Sequence
  Description of Artificial Sequence: Synthetic oligonucleotide
uucugggcgcccacgcagc

SEQ ID NO: 1338242 - RNA, 19 nt, Artificial Sequence
  Description of Artificial Sequence: Synthetic oligonucleotide
acuacacggagcacucuag

SEQ ID NO: 1338243 - RNA, 19 nt, Artificial Sequence
  Description of Artificial Sequence: Synthetic oligonucleotide
gggccgauguacuggagag

SEQ ID NO: 1338244 - RNA, 19 nt, Artificial Sequence
  Description of Artificial Sequence: Synthetic oligonucleotide
gcugauugcucuccagaag

SEQ ID NO: 1338245 - RNA, 19 nt, Artificial Sequence
  Description of Artificial Sequence: Synthetic oligonucleotide
acaagccguggcauucacc

SEQ ID NO: 1338246 - RNA, 19 nt, Artificial Sequence
  Description of Artificial Sequence: Synthetic oligonucleotide
aguuucucgccaauuucca

SEQ ID NO: 1338247 - RNA, 19 nt, Artificial Sequence
  Description of Artificial Sequence: Synthetic oligonucleotide
gcuugucucccacuacacg

SEQ ID NO: 1338248 - RNA, 19 nt, Artificial Sequence
  Description of Artificial Sequence: Synthetic oligonucleotide
augaucgcaggcaggucgg

SEQ ID NO: 1338249 - RNA, 19 nt, Artificial Sequence
  Description of Artificial Sequence: Synthetic oligonucleotide
aagugcaagcccagcucag

SEQ ID NO: 1338250 - RNA, 19 nt, Artificial Sequence
  Description of Artificial Sequence: Synthetic oligonucleotide
ggacaggcgcuucugucgg

SEQ ID NO: 1338251 - RNA, 19 nt, Artificial Sequence
  Description of Artificial Sequence: Synthetic oligonucleotide
auaggcgggaaggcccagc

SEQ ID NO: 1338252 - RNA, 19 nt, Artificial Sequence
  Description of Artificial Sequence: Synthetic oligonucleotide
ccgguguccagacacgugg

SEQ ID NO: 1338253 - RNA, 19 nt, Artificial Sequence
  Description of Artificial Sequence: Synthetic oligonucleotide
uggugaccucuccguaucc

SEQ ID NO: 1338254 - RNA, 19 nt, Artificial Sequence
  Description of Artificial Sequence: Synthetic oligonucleotide
gcggcgaaacuucuccucg

SEQ ID NO: 1338255 - RNA, 19 nt, Artificial Sequence
  Description of Artificial Sequence: Synthetic oligonucleotide
gucguugucuugguuuacc

SEQ ID NO: 1338256 - RNA, 19 nt, Artificial Sequence
  Description of Artificial Sequence: Synthetic oligonucleotide
gucaagaucuccaccugca

SEQ ID NO: 1338257 - RNA, 19 nt, Artificial Sequence
  Description of Artificial Sequence: Synthetic oligonucleotide
agugaugaacucgguacaa

SEQ ID NO: 1338258 - RNA, 19 nt, Artificial Sequence
  Description of Artificial Sequence: Synthetic oligonucleotide
cucgcgcgcguguucauac

SEQ ID NO: 1338259 - RNA, 19 nt, Artificial Sequence
  Description of Artificial Sequence: Synthetic oligonucleotide
ugaguuguuuccggauuuc

SEQ ID NO: 1338260 - RNA, 19 nt, Artificial Sequence
  Description of Artificial Sequence: Synthetic oligonucleotide
aagcucgcuguagcccucg

SEQ ID NO: 1338261 - RNA, 19 nt, Artificial Sequence
  Description of Artificial Sequence: Synthetic oligonucleotide
ggucagugccuacguaggg

SEQ ID NO: 1338262 - RNA, 19 nt, Artificial Sequence
  Description of Artificial Sequence: Synthetic oligonucleotide
cuggugaccucuccguauc

SEQ ID NO: 1338263 - RNA, 19 nt, Artificial Sequence
  Description of Artificial Sequence: Synthetic oligonucleotide
ccuguugauaagcuugcug

SEQ ID NO: 1338264 - RNA, 19 nt, Artificial Sequence
  Description of Artificial Sequence: Synthetic oligonucleotide
gccaauuuccagguggccc

SEQ ID NO: 1338265 - RNA, 19 nt, Artificial Sequence
  Description of Artificial Sequence: Synthetic oligonucleotide
caaggacggaagcucgcug

SEQ ID NO: 1338266 - RNA, 19 nt, Artificial Sequence
  Description of Artificial Sequence: Synthetic oligonucleotide
cagucaagaucuccaccug

SEQ ID NO: 1338267 - RNA, 19 nt, Artificial Sequence
  Description of Artificial Sequence: Synthetic oligonucleotide
uggcauucaccgugugugu

SEQ ID NO: 1338268 - RNA, 19 nt, Artificial Sequence
  Description of Artificial Sequence: Synthetic oligonucleotide
ggucgauauuguaaauuug

SEQ ID NO: 1338269 - RNA, 19 nt, Artificial Sequence
  Description of Artificial Sequence: Synthetic oligonucleotide
cccgcagacccugauaucg

SEQ ID NO: 1338270 - RNA, 19 nt, Artificial Sequence
  Description of Artificial Sequence: Synthetic oligonucleotide
gaacuugcgauaggcggga

SEQ ID NO: 1338271 - RNA, 19 nt, Artificial Sequence
  Description of Artificial Sequence: Synthetic oligonucleotide
aggcgcuucugucggauaa

SEQ ID NO: 1338272 - RNA, 19 nt, Artificial Sequence
  Description of Artificial Sequence: Synthetic oligonucleotide
gcugugauccggucagugc

SEQ ID NO: 1338273 - RNA, 19 nt, Artificial Sequence
  Description of Artificial Sequence: Synthetic oligonucleotide
uugcgauaggcgggaaggc

SEQ ID NO: 1338274 - RNA, 19 nt, Artificial Sequence
  Description of Artificial Sequence: Synthetic oligonucleotide
auaagcuugcugaggguaa

SEQ ID NO: 1338275 - RNA, 19 nt, Artificial Sequence
  Description of Artificial Sequence: Synthetic oligonucleotide
ccggucagugccuacguag

SEQ ID NO: 1338276 - RNA, 19 nt, Artificial Sequence
  Description of Artificial Sequence: Synthetic oligonucleotide
gcaaugaggacucggggaa

SEQ ID NO: 1338277 - RNA, 19 nt, Artificial Sequence
  Description of Artificial Sequence: Synthetic oligonucleotide
cuuccgggcaugcgcacac

SEQ ID NO: 1338278 - RNA, 19 nt, Artificial Sequence
  Description of Artificial Sequence: Synthetic oligonucleotide
ucucgccaauuuccaggug

SEQ ID NO: 1338279 - RNA, 19 nt, Artificial Sequence
  Description of Artificial Sequence: Synthetic oligonucleotide
agaugaucgcaggcagguc

SEQ ID NO: 1338280 - RNA, 19 nt, Artificial Sequence
  Description of Artificial Sequence: Synthetic oligonucleotide
uuccggauuucccggccuc

SEQ ID NO: 1338281 - RNA, 19 nt, Artificial Sequence
  Description of Artificial Sequence: Synthetic oligonucleotide
cgauauuguaaauuuggga

SEQ ID NO: 1338282 - RNA, 19 nt, Artificial Sequence
  Description of Artificial Sequence: Synthetic oligonucleotide
aagccccuguugauaagcu

SEQ ID NO: 1338283 - RNA, 19 nt, Artificial Sequence
  Description of Artificial Sequence: Synthetic oligonucleotide
ucuccgcggcgaaacuucu

SEQ ID NO: 1338284 - RNA, 19 nt, Artificial Sequence
  Description of Artificial Sequence: Synthetic oligonucleotide
uccgccucggccaggcauc

SEQ ID NO: 1338285 - RNA, 19 nt, Artificial Sequence
  Description of Artificial Sequence: Synthetic oligonucleotide
cuacguagggcuggaggac

SEQ ID NO: 1338286 - RNA, 19 nt, Artificial Sequence
  Description of Artificial Sequence: Synthetic oligonucleotide
gaucgcaggcaggucggcc

SEQ ID NO: 1338287 - RNA, 19 nt, Artificial Sequence
  Description of Artificial Sequence: Synthetic oligonucleotide
gccccuguugauaagcuug

SEQ ID NO: 1338288 - RNA, 19 nt, Artificial Sequence
  Description of Artificial Sequence: Synthetic oligonucleotide
ucuccguauccgccucggc

SEQ ID NO: 1338289 - RNA, 19 nt, Artificial Sequence
  Description of Artificial Sequence: Synthetic oligonucleotide
gucccagccagguugagau

SEQ ID NO: 1338290 - RNA, 19 nt, Artificial Sequence
  Description of Artificial Sequence: Synthetic oligonucleotide
caauuuccagguggccccg

SEQ ID NO: 1338291 - RNA, 19 nt, Artificial Sequence
  Description of Artificial Sequence: Synthetic oligonucleotide
ucucggcccgguagcaggu

SEQ ID NO: 1338292 - RNA, 19 nt, Artificial Sequence
  Description of Artificial Sequence: Synthetic oligonucleotide
gaaggucuggaaucgucau

SEQ ID NO: 1338293 - RNA, 19 nt, Artificial Sequence
  Description of Artificial Sequence: Synthetic oligonucleotide
agccccucgcagguaauag

SEQ ID NO: 1338294 - RNA, 19 nt, Artificial Sequence
  Description of Artificial Sequence: Synthetic oligonucleotide
ggugugaguuguuuccgga

SEQ ID NO: 1338295 - RNA, 19 nt, Artificial Sequence
  Description of Artificial Sequence: Synthetic oligonucleotide
ccuacguagggcuggagga

SEQ ID NO: 1338296 - RNA, 19 nt, Artificial Sequence
  Description of Artificial Sequence: Synthetic oligonucleotide
guuccgcacucgcuucucc

SEQ ID NO: 1338297 - RNA, 19 nt, Artificial Sequence
  Description of Artificial Sequence: Synthetic oligonucleotide
gguuugguugggcaaucuc

SEQ ID NO: 1338298 - RNA, 19 nt, Artificial Sequence
  Description of Artificial Sequence: Synthetic oligonucleotide
cagucuccgacucaaacau

SEQ ID NO: 1338299 - RNA, 19 nt, Artificial Sequence
  Description of Artificial Sequence: Synthetic oligonucleotide
agugcaagcccagcucagu

SEQ ID NO: 1338300 - RNA, 19 nt, Artificial Sequence
  Description of Artificial Sequence: Synthetic oligonucleotide
ggguaaaguugaccaggcc

SEQ ID NO: 1338301 - RNA, 19 nt, Artificial Sequence
  Description of Artificial Sequence: Synthetic oligonucleotide
ccagacacgugggacaggc

SEQ ID NO: 1338302 - RNA, 19 nt, Artificial Sequence
  Description of Artificial Sequence: Synthetic oligonucleotide
guauccugccagccccacc

SEQ ID NO: 1338303 - RNA, 19 nt, Artificial Sequence
  Description of Artificial Sequence: Synthetic oligonucleotide
cucuccguauccgccucgg

SEQ ID NO: 1338304 - RNA, 19 nt, Artificial Sequence
  Description of Artificial Sequence: Synthetic oligonucleotide
ggcguuuggugucauucca

SEQ ID NO: 1338305 - RNA, 19 nt, Artificial Sequence
  Description of Artificial Sequence: Synthetic oligonucleotide
augaggacucggggaacag

SEQ ID NO: 1338306 - RNA, 19 nt, Artificial Sequence
  Description of Artificial Sequence: Synthetic oligonucleotide
agguuccgcacucgcuucu

SEQ ID NO: 1338307 - RNA, 19 nt, Artificial Sequence
  Description of Artificial Sequence: Synthetic oligonucleotide
cgacucaaacaugauauac

SEQ ID NO: 1338308 - RNA, 19 nt, Artificial Sequence
  Description of Artificial Sequence: Synthetic oligonucleotide
guauccgccucggccaggc

SEQ ID NO: 1338309 - RNA, 19 nt, Artificial Sequence
  Description of Artificial Sequence: Synthetic oligonucleotide
gcagacccugauaucgagg

SEQ ID NO: 1338310 - RNA, 19 nt, Artificial Sequence
  Description of Artificial Sequence: Synthetic oligonucleotide
aggggucgauauuguaaau

SEQ ID NO: 1338311 - RNA, 19 nt, Artificial Sequence
  Description of Artificial Sequence: Synthetic oligonucleotide
ggacggaaccauccuuuug

SEQ ID NO: 1338312 - RNA, 19 nt, Artificial Sequence
  Description of Artificial Sequence: Synthetic oligonucleotide
gcgauaggcgggaaggccc

SEQ ID NO: 1338313 - RNA, 19 nt, Artificial Sequence
  Description of Artificial Sequence: Synthetic oligonucleotide
ggaggggucgauauuguaa

SEQ ID NO: 1338314 - RNA, 19 nt, Artificial Sequence
  Description of Artificial Sequence: Synthetic oligonucleotide
cuccgacucaaacaugaua

SEQ ID NO: 1338315 - RNA, 19 nt, Artificial Sequence
  Description of Artificial Sequence: Synthetic oligonucleotide
gggucgauauuguaaauuu

SEQ ID NO: 1338316 - RNA, 19 nt, Artificial Sequence
  Description of Artificial Sequence: Synthetic oligonucleotide
caaugucgaacuugcgaua

SEQ ID NO: 1338317 - RNA, 19 nt, Artificial Sequence
  Description of Artificial Sequence: Synthetic oligonucleotide
uccagacacgugggacagg

SEQ ID NO: 1338318 - RNA, 19 nt, Artificial Sequence
  Description of Artificial Sequence: Synthetic oligonucleotide
cacaagccguggcauucac

SEQ ID NO: 1338319 - RNA, 19 nt, Artificial Sequence
  Description of Artificial Sequence: Synthetic oligonucleotide
uugaaucgggaggggucga

SEQ ID NO: 1338320 - RNA, 19 nt, Artificial Sequence
  Description of Artificial Sequence: Synthetic oligonucleotide
uggggccgauguacuggag

SEQ ID NO: 1338321 - RNA, 19 nt, Artificial Sequence
  Description of Artificial Sequence: Synthetic oligonucleotide
ggcaugcgcacaccgacuc

SEQ ID NO: 1338322 - RNA, 19 nt, Artificial Sequence
  Description of Artificial Sequence: Synthetic oligonucleotide
ugauccggucagugccuac

SEQ ID NO: 1338323 - RNA, 19 nt, Artificial Sequence
  Description of Artificial Sequence: Synthetic oligonucleotide
gccccucgcagguaauagg

SEQ ID NO: 1338324 - RNA, 19 nt, Artificial Sequence
  Description of Artificial Sequence: Synthetic oligonucleotide
cacuacacggagcacucua

SEQ ID NO: 1338325 - RNA, 19 nt, Artificial Sequence
  Description of Artificial Sequence: Synthetic oligonucleotide
gguggguuugguugggcaa

SEQ ID NO: 1338326 - RNA, 19 nt, Artificial Sequence
  Description of Artificial Sequence: Synthetic oligonucleotide
acgugggacaggcgcuucu

SEQ ID NO: 1338327 - RNA, 19 nt, Artificial Sequence
  Description of Artificial Sequence: Synthetic oligonucleotide
aggacggaagcucgcugua

SEQ ID NO: 1338328 - RNA, 19 nt, Artificial Sequence
  Description of Artificial Sequence: Synthetic oligonucleotide
gauaggcgggaaggcccag

SEQ ID NO: 1338329 - RNA, 19 nt, Artificial Sequence
  Description of Artificial Sequence: Synthetic oligonucleotide
caguugucagcuggcagca

SEQ ID NO: 1338330 - RNA, 19 nt, Artificial Sequence
  Description of Artificial Sequence: Synthetic oligonucleotide
cccagucuccgacucaaac

SEQ ID NO: 1338331 - RNA, 19 nt, Artificial Sequence
  Description of Artificial Sequence: Synthetic oligonucleotide
uggguuugguugggcaauc

SEQ ID NO: 1338332 - RNA, 19 nt, Artificial Sequence
  Description of Artificial Sequence: Synthetic oligonucleotide
ugaucgcaggcaggucggc

SEQ ID NO: 1338333 - RNA, 19 nt, Artificial Sequence
  Description of Artificial Sequence: Synthetic oligonucleotide
gcaggcacaaggacggaac

SEQ ID NO: 1338334 - RNA, 19 nt, Artificial Sequence
  Description of Artificial Sequence: Synthetic oligonucleotide
uccgugcaguuggaggcac

SEQ ID NO: 1338335 - RNA, 19 nt, Artificial Sequence
  Description of Artificial Sequence: Synthetic oligonucleotide
agcaggcacaaggacggaa

SEQ ID NO: 1338336 - RNA, 19 nt, Artificial Sequence
  Description of Artificial Sequence: Synthetic oligonucleotide
ggcauucaccgugugugug

SEQ ID NO: 1338337 - RNA, 19 nt, Artificial Sequence
  Description of Artificial Sequence: Synthetic oligonucleotide
agccccuguugauaagcuu

SEQ ID NO: 1338338 - RNA, 19 nt, Artificial Sequence
  Description of Artificial Sequence: Synthetic oligonucleotide
gcuguagcccucgcgcgcg

SEQ ID NO: 1338339 - RNA, 19 nt, Artificial Sequence
  Description of Artificial Sequence: Synthetic oligonucleotide
gugaguuguuuccggauuu

SEQ ID NO: 1338340 - RNA, 19 nt, Artificial Sequence
  Description of Artificial Sequence: Synthetic oligonucleotide
ggaagcucgcuguagcccu

SEQ ID NO: 1338341 - RNA, 19 nt, Artificial Sequence
  Description of Artificial Sequence: Synthetic oligonucleotide
agucuccgacucaaacaug

SEQ ID NO: 1338342 - RNA, 19 nt, Artificial Sequence
  Description of Artificial Sequence: Synthetic oligonucleotide
gucucccacuacacggagc

SEQ ID NO: 1338343 - RNA, 19 nt, Artificial Sequence
  Description of Artificial Sequence: Synthetic oligonucleotide
cccgguguccgucucggcc

SEQ ID NO: 1338344 - RNA, 19 nt, Artificial Sequence
  Description of Artificial Sequence: Synthetic oligonucleotide
gcacaccgacuccaugucc

SEQ ID NO: 1338345 - RNA, 19 nt, Artificial Sequence
  Description of Artificial Sequence: Synthetic oligonucleotide
cacucgcuucuccgcggcg

SEQ ID NO: 1338346 - RNA, 19 nt, Artificial Sequence
  Description of Artificial Sequence: Synthetic oligonucleotide
cggucagugccuacguagg

SEQ ID NO: 1338347 - RNA, 19 nt, Artificial Sequence
  Description of Artificial Sequence: Synthetic oligonucleotide
agcccucgcgcgcguguuc

SEQ ID NO: 1338348 - RNA, 19 nt, Artificial Sequence
  Description of Artificial Sequence: Synthetic oligonucleotide
ggggccgauguacuggaga

SEQ ID NO: 1338349 - RNA, 19 nt, Artificial Sequence
  Description of Artificial Sequence: Synthetic oligonucleotide
ucgcgcgcguguucauaca

SEQ ID NO: 1338350 - RNA, 19 nt, Artificial Sequence
  Description of Artificial Sequence: Synthetic oligonucleotide
gguuuaccaccagggcccg

SEQ ID NO: 1338351 - RNA, 19 nt, Artificial Sequence
  Description of Artificial Sequence: Synthetic oligonucleotide
aucgggaggggucgauauu

SEQ ID NO: 1338352 - RNA, 19 nt, Artificial Sequence
  Description of Artificial Sequence: Synthetic oligonucleotide
ggguucugggcgcccacgc

SEQ ID NO: 1338353 - RNA, 19 nt, Artificial Sequence
  Description of Artificial Sequence: Synthetic oligonucleotide
cugcgagcucugcuccagc

SEQ ID NO: 1338354 - RNA, 19 nt, Artificial Sequence
  Description of Artificial Sequence: Synthetic oligonucleotide
gaagaaggucuggaaucgu

SEQ ID NO: 1338355 - RNA, 19 nt, Artificial Sequence
  Description of Artificial Sequence: Synthetic oligonucleotide
uguagcccucgcgcgcgug

SEQ ID NO: 1338356 - RNA, 19 nt, Artificial Sequence
  Description of Artificial Sequence: Synthetic oligonucleotide
ggaccgguguccagacacg

SEQ ID NO: 1338357 - RNA, 19 nt, Artificial Sequence
  Description of Artificial Sequence: Synthetic oligonucleotide
ggcugugauccggucagug

SEQ ID NO: 1338358 - RNA, 19 nt, Artificial Sequence
  Description of Artificial Sequence: Synthetic oligonucleotide
caccgacuccauguccaag

SEQ ID NO: 1338359 - RNA, 19 nt, Artificial Sequence
  Description of Artificial Sequence: Synthetic oligonucleotide
ggacggaagcucgcuguag

SEQ ID NO: 1338360 - RNA, 19 nt, Artificial Sequence
  Description of Artificial Sequence: Synthetic oligonucleotide
gaaucgggaggggucgaua

SEQ ID NO: 1338361 - RNA, 19 nt, Artificial Sequence
  Description of Artificial Sequence: Synthetic oligonucleotide
ccccucgcagguaauagga

SEQ ID NO: 1338362 - RNA, 19 nt, Artificial Sequence
  Description of Artificial Sequence: Synthetic oligonucleotide
accgguguccagacacgug

SEQ ID NO: 1338363 - RNA, 19 nt, Artificial Sequence
  Description of Artificial Sequence: Synthetic oligonucleotide
gaagcucgcuguagcccuc

SEQ ID NO: 1338364 - RNA, 19 nt, Artificial Sequence
  Description of Artificial Sequence: Synthetic oligonucleotide
gccgugcuguaagagggcc

SEQ ID NO: 1338365 - RNA, 19 nt, Artificial Sequence
  Description of Artificial Sequence: Synthetic oligonucleotide
uguccgucucggcccggua

SEQ ID NO: 1338366 - RNA, 19 nt, Artificial Sequence
  Description of Artificial Sequence: Synthetic oligonucleotide
aacuugcgauaggcgggaa

SEQ ID NO: 1338367 - RNA, 19 nt, Artificial Sequence
  Description of Artificial Sequence: Synthetic oligonucleotide
gcaugcgcacaccgacucc

SEQ ID NO: 1338368 - RNA, 19 nt, Artificial Sequence
  Description of Artificial Sequence: Synthetic oligonucleotide
ccgugcuguaagagggccc

SEQ ID NO: 1338369 - RNA, 19 nt, Artificial Sequence
  Description of Artificial Sequence: Synthetic oligonucleotide
cuccgcggcgaaacuucuc

SEQ ID NO: 1338370 - RNA, 19 nt, Artificial Sequence
  Description of Artificial Sequence: Synthetic oligonucleotide
ggagguuccgcacucgcuu

SEQ ID NO: 1338371 - RNA, 19 nt, Artificial Sequence
  Description of Artificial Sequence: Synthetic oligonucleotide
ccgcacucgcuucuccgcg

SEQ ID NO: 1338372 - RNA, 19 nt, Artificial Sequence
  Description of Artificial Sequence: Synthetic oligonucleotide
uuccgggcaugcgcacacc

SEQ ID NO: 1338373 - RNA, 19 nt, Artificial Sequence
  Description of Artificial Sequence: Synthetic oligonucleotide
ggguacaauggugugaguu

SEQ ID NO: 1338374 - RNA, 19 nt, Artificial Sequence
  Description of Artificial Sequence: Synthetic oligonucleotide
ucgucccuccaggcuccgg

SEQ ID NO: 1338375 - RNA, 19 nt, Artificial Sequence
  Description of Artificial Sequence: Synthetic oligonucleotide
ucccgguguccgucucggc

SEQ ID NO: 1338376 - RNA, 19 nt, Artificial Sequence
  Description of Artificial Sequence: Synthetic oligonucleotide
ccccuugcggagcuccagg

SEQ ID NO: 1338377 - RNA, 19 nt, Artificial Sequence
  Description of Artificial Sequence: Synthetic oligonucleotide
gcugcgagcucugcuccag

SEQ ID NO: 1338378 - RNA, 19 nt, Artificial Sequence
  Description of Artificial Sequence: Synthetic oligonucleotide
gggauggguuggcguuugg

SEQ ID NO: 1338379 - RNA, 19 nt, Artificial Sequence
  Description of Artificial Sequence: Synthetic oligonucleotide
gcgcuucugucggauaaug

SEQ ID NO: 1338380 - RNA, 19 nt, Artificial Sequence
  Description of Artificial Sequence: Synthetic oligonucleotide
cccucgcagguaauaggac

SEQ ID NO: 1338381 - RNA, 19 nt, Artificial Sequence
  Description of Artificial Sequence: Synthetic oligonucleotide
gcgcgcguguucauacagg

SEQ ID NO: 1338382 - RNA, 19 nt, Artificial Sequence
  Description of Artificial Sequence: Synthetic oligonucleotide
gcgcacaccgacuccaugu

SEQ ID NO: 1338383 - RNA, 19 nt, Artificial Sequence
  Description of Artificial Sequence: Synthetic oligonucleotide
ggggucggaaggagaaaac

SEQ ID NO: 1338384 - RNA, 19 nt, Artificial Sequence
  Description of Artificial Sequence: Synthetic oligonucleotide
cugucggauaauguccagu

SEQ ID NO: 1338385 - RNA, 19 nt, Artificial Sequence
  Description of Artificial Sequence: Synthetic oligonucleotide
caaggacggaaccauccuu

SEQ ID NO: 1338386 - RNA, 19 nt, Artificial Sequence
  Description of Artificial Sequence: Synthetic oligonucleotide
guccgugcaguuggaggca

SEQ ID NO: 1338387 - RNA, 19 nt, Artificial Sequence
  Description of Artificial Sequence: Synthetic oligonucleotide
gaccgguguccagacacgu

SEQ ID NO: 1338388 - RNA, 19 nt, Artificial Sequence
  Description of Artificial Sequence: Synthetic oligonucleotide
ggcacaaggacggaaccau

SEQ ID NO: 1338389 - RNA, 19 nt, Artificial Sequence
  Description of Artificial Sequence: Synthetic oligonucleotide
cacuggugaccucuccgua

SEQ ID NO: 1338390 - RNA, 19 nt, Artificial Sequence
  Description of Artificial Sequence: Synthetic oligonucleotide
ggcugucaccccaaacauc

SEQ ID NO: 1338391 - RNA, 19 nt, Artificial Sequence
  Description of Artificial Sequence: Synthetic oligonucleotide
cgggcaugcgcacaccgac

SEQ ID NO: 1338392 - RNA, 19 nt, Artificial Sequence
  Description of Artificial Sequence: Synthetic oligonucleotide
cugccacguggagaugauc

SEQ ID NO: 1338393 - RNA, 19 nt, Artificial Sequence
  Description of Artificial Sequence: Synthetic oligonucleotide
guggguuugguugggcaau

SEQ ID NO: 1338394 - RNA, 19 nt, Artificial Sequence
  Description of Artificial Sequence: Synthetic oligonucleotide
gcacuggugaccucuccgu

SEQ ID NO: 1338395 - RNA, 19 nt, Artificial Sequence
  Description of Artificial Sequence: Synthetic oligonucleotide
cgcgccguggcuuccgggc

SEQ ID NO: 1338396 - RNA, 19 nt, Artificial Sequence
  Description of Artificial Sequence: Synthetic oligonucleotide
gcgcguguucauacaggag

SEQ ID NO: 1338397 - RNA, 19 nt, Artificial Sequence
  Description of Artificial Sequence: Synthetic oligonucleotide
gcccgguagcaggugcugg

SEQ ID NO: 1338398 - RNA, 19 nt, Artificial Sequence
  Description of Artificial Sequence: Synthetic oligonucleotide
cgcgcguguucauacagga

SEQ ID NO: 1338399 - RNA, 19 nt, Artificial Sequence
  Description of Artificial Sequence: Synthetic oligonucleotide
cucccacuacacggagcac

SEQ ID NO: 1338400 - RNA, 19 nt, Artificial Sequence
  Description of Artificial Sequence: Synthetic oligonucleotide
ccggauuucccggccucgg

SEQ ID NO: 1338401 - RNA, 19 nt, Artificial Sequence
  Description of Artificial Sequence: Synthetic oligonucleotide
cgcgcgcguguucauacag

SEQ ID NO: 1338402 - RNA, 19 nt, Artificial Sequence
  Description of Artificial Sequence: Synthetic oligonucleotide
guagcccucgcgcgcgugu

SEQ ID NO: 1338403 - RNA, 19 nt, Artificial Sequence
  Description of Artificial Sequence: Synthetic oligonucleotide
ggucguugucuugguuuac

SEQ ID NO: 1338404 - RNA, 19 nt, Artificial Sequence
  Description of Artificial Sequence: Synthetic oligonucleotide
ggggucgauauuguaaauu

SEQ ID NO: 1338405 - RNA, 19 nt, Artificial Sequence
  Description of Artificial Sequence: Synthetic oligonucleotide
gcguguucauacaggaggu

SEQ ID NO: 1338406 - RNA, 19 nt, Artificial Sequence
  Description of Artificial Sequence: Synthetic oligonucleotide
cgugcaguuggaggcacug

SEQ ID NO: 1338407 - RNA, 19 nt, Artificial Sequence
  Description of Artificial Sequence: Synthetic oligonucleotide
ggccgugcuguaagagggc

SEQ ID NO: 1338408 - RNA, 19 nt, Artificial Sequence
  Description of Artificial Sequence: Synthetic oligonucleotide
ccuggcucucauccccaac

SEQ ID NO: 1338409 - RNA, 19 nt, Artificial Sequence
  Description of Artificial Sequence: Synthetic oligonucleotide
gcgaaacuucuccucgggu

SEQ ID NO: 1338410 - RNA, 19 nt, Artificial Sequence
  Description of Artificial Sequence: Synthetic oligonucleotide
cucgucccuccaggcuccg

SEQ ID NO: 1338411 - RNA, 19 nt, Artificial Sequence
  Description of Artificial Sequence: Synthetic oligonucleotide
gcacaaggacggaaccauc

SEQ ID NO: 1338412 - RNA, 19 nt, Artificial Sequence
  Description of Artificial Sequence: Synthetic oligonucleotide
cacgugggacaggcgcuuc

SEQ ID NO: 1338413 - RNA, 19 nt, Artificial Sequence
  Description of Artificial Sequence: Synthetic oligonucleotide
cccggggucggaaggagaa

SEQ ID NO: 1338414 - RNA, 19 nt, Artificial Sequence
  Description of Artificial Sequence: Synthetic oligonucleotide
ggaaguccgugcaguugga

SEQ ID NO: 1338415 - RNA, 19 nt, Artificial Sequence
  Description of Artificial Sequence: Synthetic oligonucleotide
ccguauccgccucggccag

SEQ ID NO: 1338416 - RNA, 19 nt, Artificial Sequence
  Description of Artificial Sequence: Synthetic oligonucleotide
gugccuacguagggcugga

SEQ ID NO: 1338417 - RNA, 19 nt, Artificial Sequence
  Description of Artificial Sequence: Synthetic oligonucleotide
uagcccucgcgcgcguguu

SEQ ID NO: 1338418 - RNA, 19 nt, Artificial Sequence
  Description of Artificial Sequence: Synthetic oligonucleotide
ccggcuugucucccacuac

SEQ ID NO: 1338419 - RNA, 19 nt, Artificial Sequence
  Description of Artificial Sequence: Synthetic oligonucleotide
ggauggguuggcguuuggu

SEQ ID NO: 1338420 - RNA, 19 nt, Artificial Sequence
  Description of Artificial Sequence: Synthetic oligonucleotide
gguuccgcacucgcuucuc

SEQ ID NO: 1338421 - RNA, 19 nt, Artificial Sequence
  Description of Artificial Sequence: Synthetic oligonucleotide
cauccccaacaggcguguc

SEQ ID NO: 1338422 - RNA, 19 nt, Artificial Sequence
  Description of Artificial Sequence: Synthetic oligonucleotide
gcacaagccguggcauuca

SEQ ID NO: 1338423 - RNA, 19 nt, Artificial Sequence
  Description of Artificial Sequence: Synthetic oligonucleotide
ggagcacucuagccuggcu

SEQ ID NO: 1338424 - RNA, 19 nt, Artificial Sequence
  Description of Artificial Sequence: Synthetic oligonucleotide
ccgauguacuggagaggca

SEQ ID NO: 1338425 - RNA, 19 nt, Artificial Sequence
  Description of Artificial Sequence: Synthetic oligonucleotide
cgauaggcgggaaggccca

SEQ ID NO: 1338426 - RNA, 19 nt, Artificial Sequence
  Description of Artificial Sequence: Synthetic oligonucleotide
gcgcgccguggcuuccggg

SEQ ID NO: 1338427 - RNA, 19 nt, Artificial Sequence
  Description of Artificial Sequence: Synthetic oligonucleotide
ccgcagacccugauaucga

SEQ ID NO: 1338428 - RNA, 19 nt, Artificial Sequence
  Description of Artificial Sequence: Synthetic oligonucleotide
caggcgcuucugucggaua

SEQ ID NO: 1338429 - RNA, 19 nt, Artificial Sequence
  Description of Artificial Sequence: Synthetic oligonucleotide
gcuuccgggcaugcgcaca

SEQ ID NO: 1338430 - RNA, 19 nt, Artificial Sequence
  Description of Artificial Sequence: Synthetic oligonucleotide
cguggcuuccgggcaugcg

SEQ ID NO: 1338431 - RNA, 19 nt, Artificial Sequence
  Description of Artificial Sequence: Synthetic oligonucleotide
cgccaauuuccagguggcc

SEQ ID NO: 1338432 - RNA, 19 nt, Artificial Sequence
  Description of Artificial Sequence: Synthetic oligonucleotide
cgguguccgucucggcccg

SEQ ID NO: 1338433 - RNA, 19 nt, Artificial Sequence
  Description of Artificial Sequence: Synthetic oligonucleotide
gcgccguggcuuccgggca

SEQ ID NO: 1338434 - RNA, 19 nt, Artificial Sequence
  Description of Artificial Sequence: Synthetic oligonucleotide
gcuucuccgcggcgaaacu

SEQ ID NO: 1338435 - RNA, 19 nt, Artificial Sequence
  Description of Artificial Sequence: Synthetic oligonucleotide
ccgggcaugcgcacaccga

SEQ ID NO: 1338436 - RNA, 19 nt, Artificial Sequence
  Description of Artificial Sequence: Synthetic oligonucleotide
cccagccccucgcagguaa

SEQ ID NO: 1338437 - RNA, 19 nt, Artificial Sequence
  Description of Artificial Sequence: Synthetic oligonucleotide
gcccucgcgcgcguguuca

SEQ ID NO: 1338438 - RNA, 19 nt, Artificial Sequence
  Description of Artificial Sequence: Synthetic oligonucleotide
ggguuugguugggcaaucu

SEQ ID NO: 1338439 - RNA, 19 nt, Artificial Sequence
  Description of Artificial Sequence: Synthetic oligonucleotide
gccguggcuuccgggcaug

SEQ ID NO: 1338440 - RNA, 19 nt, Artificial Sequence
  Description of Artificial Sequence: Synthetic oligonucleotide
cagccccucgcagguaaua

SEQ ID NO: 1338441 - RNA, 19 nt, Artificial Sequence
  Description of Artificial Sequence: Synthetic oligonucleotide
gggcccgcagacccugaua

SEQ ID NO: 1338442 - RNA, 19 nt, Artificial Sequence
  Description of Artificial Sequence: Synthetic oligonucleotide
ccgguagcaggugcuggca

SEQ ID NO: 1338443 - RNA, 19 nt, Artificial Sequence
  Description of Artificial Sequence: Synthetic oligonucleotide
cggagcacucuagccuggc

SEQ ID NO: 1338444 - RNA, 19 nt, Artificial Sequence
  Description of Artificial Sequence: Synthetic oligonucleotide
ccaaggacggaagcucgcu

SEQ ID NO: 1338445 - RNA, 19 nt, Artificial Sequence
  Description of Artificial Sequence: Synthetic oligonucleotide
ggccccggggucggaagga

SEQ ID NO: 1338446 - RNA, 19 nt, Artificial Sequence
  Description of Artificial Sequence: Synthetic oligonucleotide
guguccgucucggcccggu

SEQ ID NO: 1338447 - RNA, 19 nt, Artificial Sequence
  Description of Artificial Sequence: Synthetic oligonucleotide
cgucucggcccgguagcag

SEQ ID NO: 1338448 - RNA, 19 nt, Artificial Sequence
  Description of Artificial Sequence: Synthetic oligonucleotide
ccgccucggccaggcaucc

SEQ ID NO: 1338449 - RNA, 19 nt, Artificial Sequence
  Description of Artificial Sequence: Synthetic oligonucleotide
cguauccgccucggccagg

SEQ ID NO: 1338450 - RNA, 19 nt, Artificial Sequence
  Description of Artificial Sequence: Synthetic oligonucleotide
gcgcgcgccguggcuuccg

SEQ ID NO: 1338451 - RNA, 19 nt, Artificial Sequence
  Description of Artificial Sequence: Synthetic oligonucleotide
ccguggcuuccgggcaugc

SEQ ID NO: 1338452 - RNA, 19 nt, Artificial Sequence
  Description of Artificial Sequence: Synthetic oligonucleotide
cuguagcccucgcgcgcgu

SEQ ID NO: 1338453 - RNA, 19 nt, Artificial Sequence
  Description of Artificial Sequence: Synthetic oligonucleotide
cgcgcgccguggcuuccgg

SEQ ID NO: 1338454 - RNA, 19 nt, Artificial Sequence
  Description of Artificial Sequence: Synthetic oligonucleotide
ggcgcgcgccguggcuucc

SEQ ID NO: 1338455 - RNA, 19 nt, Artificial Sequence
  Description of Artificial Sequence: Synthetic oligonucleotide
cugggcgcccacgcagcgu

SEQ ID NO: 1338456 - RNA, 19 nt, Artificial Sequence
  Description of Artificial Sequence: Synthetic oligonucleotide
gcgggaaggcccagcuccu

SEQ ID NO: 1338457 - RNA, 19 nt, Artificial Sequence
  Description of Artificial Sequence: Synthetic oligonucleotide
cgggaaggcccagcuccug

SEQ ID NO: 1338458 - RNA, 19 nt, Artificial Sequence
  Description of Artificial Sequence: Synthetic oligonucleotide
ucccggccucgggcccgca

SEQ ID NO: 1338459 - RNA, 19 nt, Artificial Sequence
  Description of Artificial Sequence: Synthetic oligonucleotide
ccgcggcgaaacuucuccu

SEQ ID NO: 1338460 - RNA, 19 nt, Artificial Sequence
  Description of Artificial Sequence: Synthetic oligonucleotide
ccgucucggcccgguagca

SEQ ID NO: 1338461 - RNA, 19 nt, Artificial Sequence
  Description of Artificial Sequence: Synthetic oligonucleotide
gguuggcguuuggugucau

SEQ ID NO: 1338462 - RNA, 19 nt, Artificial Sequence
  Description of Artificial Sequence: Synthetic oligonucleotide
cccuguugauaagcuugcu

SEQ ID NO: 1338463 - RNA, 19 nt, Artificial Sequence
  Description of Artificial Sequence: Synthetic oligonucleotide
cgcagguaauaggaccggu

SEQ ID NO: 1338464 - RNA, 19 nt, Artificial Sequence
  Description of Artificial Sequence: Synthetic oligonucleotide
ccggggucggaaggagaaa

SEQ ID NO: 1338465 - RNA, 19 nt, Artificial Sequence
  Description of Artificial Sequence: Synthetic oligonucleotide
caggcgugucugggugggu

SEQ ID NO: 1338466 - RNA, 19 nt, Artificial Sequence
  Description of Artificial Sequence: Synthetic oligonucleotide
ccgugcaguuggaggcacu

SEQ ID NO: 1338467 - RNA, 19 nt, Artificial Sequence
  Description of Artificial Sequence: Synthetic oligonucleotide
ccucgcgcgcguguucaua

SEQ ID NO: 1338468 - RNA, 19 nt, Artificial Sequence
  Description of Artificial Sequence: Synthetic oligonucleotide
ccacuacacggagcacucu

SEQ ID NO: 1338469 - RNA, 19 nt, Artificial Sequence
  Description of Artificial Sequence: Synthetic oligonucleotide
gggcugugauccggucagu

SEQ ID NO: 1338470 - RNA, 19 nt, Artificial Sequence
  Description of Artificial Sequence: Synthetic oligonucleotide
cccugauaucgaggguccu

SEQ ID NO: 1338471 - RNA, 19 nt, Artificial Sequence
  Description of Artificial Sequence: Synthetic oligonucleotide
cagcguccucgggcccgga

SEQ ID NO: 1338472 - RNA, 19 nt, Artificial Sequence
  Description of Artificial Sequence: Synthetic oligonucleotide
ccagccccucgcagguaau

SEQ ID NO: 1338473 - RNA, 19 nt, Artificial Sequence
  Description of Artificial Sequence: Synthetic oligonucleotide
cgccguggcuuccgggcau

SEQ ID NO: 1338474 - RNA, 19 nt, Artificial Sequence
  Description of Artificial Sequence: Synthetic oligonucleotide
cccucgcgcgcguguucau

SEQ ID NO: 1338475 - RNA, 19 nt, Artificial Sequence
  Description of Artificial Sequence: Synthetic oligonucleotide
ccgcugucccagccagguu

SEQ ID NO: 1338476 - RNA, 19 nt, Artificial Sequence
  Description of Artificial Sequence: Synthetic oligonucleotide
cgggcccgcagacccugau

SEQ ID NO: 1338477 - RNA, 19 nt, Artificial Sequence
  Description of Artificial Sequence: Synthetic oligonucleotide
uuugauacagguaaggcag

SEQ ID NO: 1338478 - RNA, 19 nt, Artificial Sequence
  Description of Artificial Sequence: Synthetic oligonucleotide
uucaaguuuauucauagca

SEQ ID NO: 1338479 - RNA, 19 nt, Artificial Sequence
  Description of Artificial Sequence: Synthetic oligonucleotide
aaaguugcucaucacauuc

SEQ ID NO: 1338480 - RNA, 19 nt, Artificial Sequence
  Description of Artificial Sequence: Synthetic oligonucleotide
uaggcauagaaucaggagg

SEQ ID NO: 1338481 - RNA, 19 nt, Artificial Sequence
  Description of Artificial Sequence: Synthetic oligonucleotide
  modified_base (7)..(7): a, c, u, g, unknown or other
cauuccnuaaucuuugggc

SEQ ID NO: 1338482 - RNA, 19 nt, Artificial Sequence
  Description of Artificial Sequence: Synthetic oligonucleotide
ucaaguuuauucauagcag

SEQ ID NO: 1338483 - RNA, 19 nt, Artificial Sequence
  Description of Artificial Sequence: Synthetic oligonucleotide
gaccauaauaggaaaaugg

SEQ ID NO: 1338484 - RNA, 19 nt, Artificial Sequence
  Description of Artificial Sequence: Synthetic oligonucleotide
gaaaauggcguauagguga

SEQ ID NO: 1338485 - RNA, 19 nt, Artificial Sequence
  Description of Artificial Sequence: Synthetic oligonucleotide
  modified_base (19)..(19): a, c, u, g, unknown or other
ugaagaugcaaacauuccn

SEQ ID NO: 1338486 - RNA, 19 nt, Artificial Sequence
  Description of Artificial Sequence: Synthetic oligonucleotide
uuagauuucaguacacgcu

SEQ ID NO: 1338487 - RNA, 19 nt, Artificial Sequence
  Description of Artificial Sequence: Synthetic oligonucleotide
auuauaauguaacagcuuu

SEQ ID NO: 1338488 - RNA, 19 nt, Artificial Sequence
  Description of Artificial Sequence: Synthetic oligonucleotide
agguuuuagauuucaguac

SEQ ID NO: 1338489 - RNA, 19 nt, Artificial Sequence
  Description of Artificial Sequence: Synthetic oligonucleotide
gucgguauugaacagaggc

SEQ ID NO: 1338490 - RNA, 19 nt, Artificial Sequence
  Description of Artificial Sequence: Synthetic oligonucleotide
uaaggcaggaacuaggcga

SEQ ID NO: 1338491 - RNA, 19 nt, Artificial Sequence
  Description of Artificial Sequence: Synthetic oligonucleotide
aguaagugacagucuaugc

SEQ ID NO: 1338492 - RNA, 19 nt, Artificial Sequence
  Description of Artificial Sequence: Synthetic oligonucleotide
uaauguaacagcuuuuaaa

SEQ ID NO: 1338493 - RNA, 19 nt, Artificial Sequence
  Description of Artificial Sequence: Synthetic oligonucleotide
accauaauaggaaaauggc

SEQ ID NO: 1338494 - RNA, 19 nt, Artificial Sequence
  Description of Artificial Sequence: Synthetic oligonucleotide
  modified_base (10)..(10): a, c, u, g, unknown or other
aaacauuccnuaaucuuug

SEQ ID NO: 1338495 - RNA, 19 nt, Artificial Sequence
  Description of Artificial Sequence: Synthetic oligonucleotide
uuuagcuuuucaucugacg

SEQ ID NO: 1338496 - RNA, 19 nt, Artificial Sequence
  Description of Artificial Sequence: Synthetic oligonucleotide
uccaguagaauucaugaaa

SEQ ID NO: 1338497 - RNA, 19 nt, Artificial Sequence
  Description of Artificial Sequence: Synthetic oligonucleotide
caaguuuauucauagcagc

SEQ ID NO: 1338498 - RNA, 19 nt, Artificial Sequence
  Description of Artificial Sequence: Synthetic oligonucleotide
aaaccagaauaguacaagu

SEQ ID NO: 1338499 - RNA, 19 nt, Artificial Sequence
  Description of Artificial Sequence: Synthetic oligonucleotide
agcguuuugauacagguaa

SEQ ID NO: 1338500 - RNA, 19 nt, Artificial Sequence
  Description of Artificial Sequence: Synthetic oligonucleotide
aacucauuauaauguaaca

SEQ ID NO: 1338501 - RNA, 19 nt, Artificial Sequence
  Description of Artificial Sequence: Synthetic oligonucleotide
caaauugcuuuuaaggaug

SEQ ID NO: 1338502 - RNA, 19 nt, Artificial Sequence
  Description of Artificial Sequence: Synthetic oligonucleotide
uuaggcauagaaucaggag

SEQ ID NO: 1338503 - RNA, 19 nt, Artificial Sequence
  Description of Artificial Sequence: Synthetic oligonucleotide
uugugcuuuauauuuauaa

SEQ ID NO: 1338504 - RNA, 19 nt, Artificial Sequence
  Description of Artificial Sequence: Synthetic oligonucleotide
agauaagucuacucgcuuc

SEQ ID NO: 1338505 - RNA, 19 nt, Artificial Sequence
  Description of Artificial Sequence: Synthetic oligonucleotide
gacagucuaugcuuguugg

SEQ ID NO: 1338506 - RNA, 19 nt, Artificial Sequence
  Description of Artificial Sequence: Synthetic oligonucleotide
uaguacaagugucacacga

SEQ ID NO: 1338507 - RNA, 19 nt, Artificial Sequence
  Description of Artificial Sequence: Synthetic oligonucleotide
uuuaggcauagaaucagga

SEQ ID NO: 1338508 - RNA, 19 nt, Artificial Sequence
  Description of Artificial Sequence: Synthetic oligonucleotide
auacagaggaccauaauag

SEQ ID NO: 1338509 - RNA, 19 nt, Artificial Sequence
  Description of Artificial Sequence: Synthetic oligonucleotide
gauaagucuacucgcuucc

SEQ ID NO: 1338510 - RNA, 19 nt, Artificial Sequence
  Description of Artificial Sequence: Synthetic oligonucleotide
accagaauaguacaagugu

SEQ ID NO: 1338511 - RNA, 19 nt, Artificial Sequence
  Description of Artificial Sequence: Synthetic oligonucleotide
cagagcagcguuuugauac

SEQ ID NO: 1338512 - RNA, 19 nt, Artificial Sequence
  Description of Artificial Sequence: Synthetic oligonucleotide
  modified_base (6)..(6): a, c, u, g, unknown or other
auuccnuaaucuuugggcu

SEQ ID NO: 1338513 - RNA, 19 nt, Artificial Sequence
  Description of Artificial Sequence: Synthetic oligonucleotide
acucauuauaauguaacag

SEQ ID NO: 1338514 - RNA, 19 nt, Artificial Sequence
  Description of Artificial Sequence: Synthetic oligonucleotide
aguaauggacacuugucug

SEQ ID NO: 1338515 - RNA, 19 nt, Artificial Sequence
  Description of Artificial Sequence: Synthetic oligonucleotide
aaagauugugcuuuauauu

SEQ ID NO: 1338516 - RNA, 19 nt, Artificial Sequence
  Description of Artificial Sequence: Synthetic oligonucleotide
ucaguuuuaggcauagaau

SEQ ID NO: 1338517 - RNA, 19 nt, Artificial Sequence
  Description of Artificial Sequence: Synthetic oligonucleotide
ucugacgaacauuuaaaac

SEQ ID NO: 1338518 - RNA, 19 nt, Artificial Sequence
  Description of Artificial Sequence: Synthetic oligonucleotide
agauuugugggcgucaggg

SEQ ID NO: 1338519 - RNA, 19 nt, Artificial Sequence
  Description of Artificial Sequence: Synthetic oligonucleotide
guaauucucaaaugaauuc

SEQ ID NO: 1338520 - RNA, 19 nt, Artificial Sequence
  Description of Artificial Sequence: Synthetic oligonucleotide
cuguauggcacuaaacuug

SEQ ID NO: 1338521 - RNA, 19 nt, Artificial Sequence
  Description of Artificial Sequence: Synthetic oligonucleotide
uagucgguauugaacagag

SEQ ID NO: 1338522 - RNA, 19 nt, Artificial Sequence
  Description of Artificial Sequence: Synthetic oligonucleotide
gacugagggagcuugauuc

SEQ ID NO: 1338523 - RNA, 19 nt, Artificial Sequence
  Description of Artificial Sequence: Synthetic oligonucleotide
cauaauaggaaaauggcgu

SEQ ID NO: 1338524 - RNA, 19 nt, Artificial Sequence
  Description of Artificial Sequence: Synthetic oligonucleotide
ucgguauugaacagaggcc

SEQ ID NO: 1338525 - RNA, 19 nt, Artificial Sequence
  Description of Artificial Sequence: Synthetic oligonucleotide
ucagauaagucuacucgcu

SEQ ID NO: 1338526 - RNA, 19 nt, Artificial Sequence
  Description of Artificial Sequence: Synthetic oligonucleotide
uguacugaugucaccuuca

SEQ ID NO: 1338527 - RNA, 19 nt, Artificial Sequence
  Description of Artificial Sequence: Synthetic oligonucleotide
uguccguucugaauaagac

SEQ ID NO: 1338528 - RNA, 19 nt, Artificial Sequence
  Description of Artificial Sequence: Synthetic oligonucleotide
auaggaaaauggcguauag

SEQ ID NO: 1338529 - RNA, 19 nt, Artificial Sequence
  Description of Artificial Sequence: Synthetic oligonucleotide
aguguggcaguauggacag

SEQ ID NO: 1338530 - RNA, 19 nt, Artificial Sequence
  Description of Artificial Sequence: Synthetic oligonucleotide
  modified_base (8)..(8): a, c, u, g, unknown or other
acauuccnuaaucuuuggg

SEQ ID NO: 1338531 - RNA, 19 nt, Artificial Sequence
  Description of Artificial Sequence: Synthetic oligonucleotide
cuaggcgggucaaagauug

SEQ ID NO: 1338532 - RNA, 19 nt, Artificial Sequence
  Description of Artificial Sequence: Synthetic oligonucleotide
uauaauguaacagcuuuua

SEQ ID NO: 1338533 - RNA, 19 nt, Artificial Sequence
  Description of Artificial Sequence: Synthetic oligonucleotide
ccauaauaggaaaauggcg

SEQ ID NO: 1338534 - RNA, 19 nt, Artificial Sequence
  Description of Artificial Sequence: Synthetic oligonucleotide
ugacagucuaugcuuguug

SEQ ID NO: 1338535 - RNA, 19 nt, Artificial Sequence
  Description of Artificial Sequence: Synthetic oligonucleotide
uacagguaaggcaggaacu

SEQ ID NO: 1338536 - RNA, 19 nt, Artificial Sequence
  Description of Artificial Sequence: Synthetic oligonucleotide
aaguuuauucauagcagcu

SEQ ID NO: 1338537 - RNA, 19 nt, Artificial Sequence
  Description of Artificial Sequence: Synthetic oligonucleotide
cauccaguagaauucauga

SEQ ID NO: 1338538 - RNA, 19 nt, Artificial Sequence
  Description of Artificial Sequence: Synthetic oligonucleotide
gaacuaggcgaacuuacac

SEQ ID NO: 1338539 - RNA, 19 nt, Artificial Sequence
  Description of Artificial Sequence: Synthetic oligonucleotide
aaccagaauaguacaagug

SEQ ID NO: 1338540 - RNA, 19 nt, Artificial Sequence
  Description of Artificial Sequence: Synthetic oligonucleotide
auaaacucauuauaaugua

SEQ ID NO: 1338541 - RNA, 19 nt, Artificial Sequence
  Description of Artificial Sequence: Synthetic oligonucleotide
aacaagauuugugggcguc

SEQ ID NO: 1338542 - RNA, 19 nt, Artificial Sequence
  Description of Artificial Sequence: Synthetic oligonucleotide
aguaagaaguggugaccac

SEQ ID NO: 1338543 - RNA, 19 nt, Artificial Sequence
  Description of Artificial Sequence: Synthetic oligonucleotide
uaagaaguggugaccacau

SEQ ID NO: 1338544 - RNA, 19 nt, Artificial Sequence
  Description of Artificial Sequence: Synthetic oligonucleotide
gauuugauugcucaaacuu

SEQ ID NO: 1338545 - RNA, 19 nt, Artificial Sequence
  Description of Artificial Sequence: Synthetic oligonucleotide
gauuugugggcgucagggg

SEQ ID NO: 1338546 - RNA, 19 nt, Artificial Sequence
  Description of Artificial Sequence: Synthetic oligonucleotide
cagcauuuacuucuucugg

SEQ ID NO: 1338547 - RNA, 19 nt, Artificial Sequence
  Description of Artificial Sequence: Synthetic oligonucleotide
  modified_base (4)..(4): a, c, u, g, unknown or other
uccnuaaucuuugggcugc

SEQ ID NO: 1338548 - RNA, 19 nt, Artificial Sequence
  Description of Artificial Sequence: Synthetic oligonucleotide
uaagucuacucgcuucccc

SEQ ID NO: 1338549 - RNA, 19 nt, Artificial Sequence
  Description of Artificial Sequence: Synthetic oligonucleotide
ugcuaucggacugagggag

SEQ ID NO: 1338550 - RNA, 19 nt, Artificial Sequence
  Description of Artificial Sequence: Synthetic oligonucleotide
aauucuccuaggcggguca

SEQ ID NO: 1338551 - RNA, 19 nt, Artificial Sequence
  Description of Artificial Sequence: Synthetic oligonucleotide
  modified_base (5)..(5): a, c, u, g, unknown or other
uuccnuaaucuuugggcug

SEQ ID NO: 1338552 - RNA, 19 nt, Artificial Sequence
  Description of Artificial Sequence: Synthetic oligonucleotide
aucacacaaguucacagaa

SEQ ID NO: 1338553 - RNA, 19 nt, Artificial Sequence
  Description of Artificial Sequence: Synthetic oligonucleotide
uaggcgaacuuacacagua

SEQ ID NO: 1338554 - RNA, 19 nt, Artificial Sequence
  Description of Artificial Sequence: Synthetic oligonucleotide
aaaauggcguauaggugag

SEQ ID NO: 1338555 - RNA, 19 nt, Artificial Sequence
  Description of Artificial Sequence: Synthetic oligonucleotide
acuguauggcacuaaacuu

SEQ ID NO: 1338556 - RNA, 19 nt, Artificial Sequence
  Description of Artificial Sequence: Synthetic oligonucleotide
aaaaguugcucaucacauu

SEQ ID NO: 1338557 - RNA, 19 nt, Artificial Sequence
  Description of Artificial Sequence: Synthetic oligonucleotide
aguggucccuuucuugggg

SEQ ID NO: 1338558 - RNA, 19 nt, Artificial Sequence
  Description of Artificial Sequence: Synthetic oligonucleotide
aaacuuucuagaagcugag

SEQ ID NO: 1338559 - RNA, 19 nt, Artificial Sequence
  Description of Artificial Sequence: Synthetic oligonucleotide
agucuaugcuuguuggucu

SEQ ID NO: 1338560 - RNA, 19 nt, Artificial Sequence
  Description of Artificial Sequence: Synthetic oligonucleotide
acgauucacucucguagac

SEQ ID NO: 1338561 - RNA, 19 nt, Artificial Sequence
  Description of Artificial Sequence: Synthetic oligonucleotide
auuucaguacacgcuuucg

SEQ ID NO: 1338562 - RNA, 19 nt, Artificial Sequence
  Description of Artificial Sequence: Synthetic oligonucleotide
gcacgauucacucucguag

SEQ ID NO: 1338563 - RNA, 19 nt, Artificial Sequence
  Description of Artificial Sequence: Synthetic oligonucleotide
uccuaggcgggucaaagau

SEQ ID NO: 1338564 - RNA, 19 nt, Artificial Sequence
  Description of Artificial Sequence: Synthetic oligonucleotide
aauaggaaaauggcguaua

SEQ ID NO: 1338565 - RNA, 19 nt, Artificial Sequence
  Description of Artificial Sequence: Synthetic oligonucleotide
  modified_base (3)..(3): a, c, u, g, unknown or other
ccnguuuggaggcaggugg

SEQ ID NO: 1338566 - RNA, 19 nt, Artificial Sequence
  Description of Artificial Sequence: Synthetic oligonucleotide
auaguacaagugucacacg

SEQ ID NO: 1338567 - RNA, 19 nt, Artificial Sequence
  Description of Artificial Sequence: Synthetic oligonucleotide
cagaauaguacaaguguca

SEQ ID NO: 1338568 - RNA, 19 nt, Artificial Sequence
  Description of Artificial Sequence: Synthetic oligonucleotide
agguuuucgguuuccuuug

SEQ ID NO: 1338569 - RNA, 19 nt, Artificial Sequence
  Description of Artificial Sequence: Synthetic oligonucleotide
uggcguauaggugagugga

SEQ ID NO: 1338570 - RNA, 19 nt, Artificial Sequence
  Description of Artificial Sequence: Synthetic oligonucleotide
ggcaguauggacaggagag

SEQ ID NO: 1338571 - RNA, 19 nt, Artificial Sequence
  Description of Artificial Sequence: Synthetic oligonucleotide
uauaggugaguggagccca

SEQ ID NO: 1338572 - RNA, 19 nt, Artificial Sequence
  Description of Artificial Sequence: Synthetic oligonucleotide
gggagcuugauucuucucc

SEQ ID NO: 1338573 - RNA, 19 nt, Artificial Sequence
  Description of Artificial Sequence: Synthetic oligonucleotide
uucuagaagcugaggacuc

SEQ ID NO: 1338574 - RNA, 19 nt, Artificial Sequence
  Description of Artificial Sequence: Synthetic oligonucleotide
ucucucacuacugcaaccu

SEQ ID NO: 1338575 - RNA, 19 nt, Artificial Sequence
  Description of Artificial Sequence: Synthetic oligonucleotide
caaccuuguggcacgaaug

SEQ ID NO: 1338576 - RNA, 19 nt, Artificial Sequence
  Description of Artificial Sequence: Synthetic oligonucleotide
uucucucacuacugcaacc

SEQ ID NO: 1338577 - RNA, 19 nt, Artificial Sequence
  Description of Artificial Sequence: Synthetic oligonucleotide
ugauugcucaaacuuucua

SEQ ID NO: 1338578 - RNA, 19 nt, Artificial Sequence
  Description of Artificial Sequence: Synthetic oligonucleotide
gcuuuauauuuauaaacuc

SEQ ID NO: 1338579 - RNA, 19 nt, Artificial Sequence
  Description of Artificial Sequence: Synthetic oligonucleotide
uucaguacacgcuuucguu

SEQ ID NO: 1338580 - RNA, 19 nt, Artificial Sequence
  Description of Artificial Sequence: Synthetic oligonucleotide
uugauugcucaaacuuucu

SEQ ID NO: 1338581 - RNA, 19 nt, Artificial Sequence
  Description of Artificial Sequence: Synthetic oligonucleotide
  modified_base (7)..(7): a, c, u, g, unknown or other
gaagccnguuuggaggcag

SEQ ID NO: 1338582 - RNA, 19 nt, Artificial Sequence
  Description of Artificial Sequence: Synthetic oligonucleotide
auaagucuacucgcuuccc

SEQ ID NO: 1338583 - RNA, 19 nt, Artificial Sequence
  Description of Artificial Sequence: Synthetic oligonucleotide
aaauugcuuuuaaggaugu

SEQ ID NO: 1338584 - RNA, 19 nt, Artificial Sequence
  Description of Artificial Sequence: Synthetic oligonucleotide
ggaccauggccauuggugg

SEQ ID NO: 1338585 - RNA, 19 nt, Artificial Sequence
  Description of Artificial Sequence: Synthetic oligonucleotide
acacaaguucacagaauac

SEQ ID NO: 1338586 - RNA, 19 nt, Artificial Sequence
  Description of Artificial Sequence: Synthetic oligonucleotide
guaagugacagucuaugcu

SEQ ID NO: 1338587 - RNA, 19 nt, Artificial Sequence
  Description of Artificial Sequence: Synthetic oligonucleotide
uugguucaaguuuauucau

SEQ ID NO: 1338588 - RNA, 19 nt, Artificial Sequence
  Description of Artificial Sequence: Synthetic oligonucleotide
ucuaggugacucccuuuug

SEQ ID NO: 1338589 - RNA, 19 nt, Artificial Sequence
  Description of Artificial Sequence: Synthetic oligonucleotide
gaguaagaaguggugacca

SEQ ID NO: 1338590 - RNA, 19 nt, Artificial Sequence
  Description of Artificial Sequence: Synthetic oligonucleotide
ggcgaacuuacacaguaag

SEQ ID NO: 1338591 - RNA, 19 nt, Artificial Sequence
  Description of Artificial Sequence: Synthetic oligonucleotide
cugugcacgauucacucuc

SEQ ID NO: 1338592 - RNA, 19 nt, Artificial Sequence
  Description of Artificial Sequence: Synthetic oligonucleotide
ucaguacacgcuuucguuu

SEQ ID NO: 1338593 - RNA, 19 nt, Artificial Sequence
  Description of Artificial Sequence: Synthetic oligonucleotide
cuguacacauggacgcugg

SEQ ID NO: 1338594 - RNA, 19 nt, Artificial Sequence
  Description of Artificial Sequence: Synthetic oligonucleotide
  modified_base (15)..(15): a, c, u, g, unknown or other
gaugcaaacauuccnuaau

SEQ ID NO: 1338595 - RNA, 19 nt, Artificial Sequence
  Description of Artificial Sequence: Synthetic oligonucleotide
acgaacauuuaaaacauuu

SEQ ID NO: 1338596 - RNA, 19 nt, Artificial Sequence
  Description of Artificial Sequence: Synthetic oligonucleotide
augaauucuccuaggcggg

SEQ ID NO: 1338597 - RNA, 19 nt, Artificial Sequence
  Description of Artificial Sequence: Synthetic oligonucleotide
ugucauagucgguauugaa

SEQ ID NO: 1338598 - RNA, 19 nt, Artificial Sequence
  Description of Artificial Sequence: Synthetic oligonucleotide
cacacuugcugccugaaga

SEQ ID NO: 1338599 - RNA, 19 nt, Artificial Sequence
  Description of Artificial Sequence: Synthetic oligonucleotide
ucuccuaggcgggucaaag

SEQ ID NO: 1338600 - RNA, 19 nt, Artificial Sequence
  Description of Artificial Sequence: Synthetic oligonucleotide
caguaagugacagucuaug

SEQ ID NO: 1338601 - RNA, 19 nt, Artificial Sequence
  Description of Artificial Sequence: Synthetic oligonucleotide
aauguccguucugaauaag

SEQ ID NO: 1338602 - RNA, 19 nt, Artificial Sequence
  Description of Artificial Sequence: Synthetic oligonucleotide
agaggaccauaauaggaaa

SEQ ID NO: 1338603 - RNA, 19 nt, Artificial Sequence
  Description of Artificial Sequence: Synthetic oligonucleotide
ugguucaaguuuauucaua

SEQ ID NO: 1338604 - RNA, 19 nt, Artificial Sequence
  Description of Artificial Sequence: Synthetic oligonucleotide
ucacuaugcagcccucuuc

SEQ ID NO: 1338605 - RNA, 19 nt, Artificial Sequence
  Description of Artificial Sequence: Synthetic oligonucleotide
uggcacuaaacuugcugca

SEQ ID NO: 1338606 - RNA, 19 nt, Artificial Sequence
  Description of Artificial Sequence: Synthetic oligonucleotide
ucacacuugcugccugaag

SEQ ID NO: 1338607 - RNA, 19 nt, Artificial Sequence
  Description of Artificial Sequence: Synthetic oligonucleotide
uaauaggaaaauggcguau

SEQ ID NO: 1338608 - RNA, 19 nt, Artificial Sequence
  Description of Artificial Sequence: Synthetic oligonucleotide
auagaaucaggagguggag

SEQ ID NO: 1338609 - RNA, 19 nt, Artificial Sequence
  Description of Artificial Sequence: Synthetic oligonucleotide
ucaguucacuggcuugugu

SEQ ID NO: 1338610 - RNA, 19 nt, Artificial Sequence
  Description of Artificial Sequence: Synthetic oligonucleotide
caucugacgaacauuuaaa

SEQ ID NO: 1338611 - RNA, 19 nt, Artificial Sequence
  Description of Artificial Sequence: Synthetic oligonucleotide
cuugaacucuugacaggag

SEQ ID NO: 1338612 - RNA, 19 nt, Artificial Sequence
  Description of Artificial Sequence: Synthetic oligonucleotide
cagaggaccauaauaggaa

SEQ ID NO: 1338613 - RNA, 19 nt, Artificial Sequence
  Description of Artificial Sequence: Synthetic oligonucleotide
cacuguauggcacuaaacu

SEQ ID NO: 1338614 - RNA, 19 nt, Artificial Sequence
  Description of Artificial Sequence: Synthetic oligonucleotide
acauccaguagaauucaug

SEQ ID NO: 1338615 - RNA, 19 nt, Artificial Sequence
  Description of Artificial Sequence: Synthetic oligonucleotide
agugucacacgauggcaga

SEQ ID NO: 1338616 - RNA, 19 nt, Artificial Sequence
  Description of Artificial Sequence: Synthetic oligonucleotide
auagucgguauugaacaga

SEQ ID NO: 1338617 - RNA, 19 nt, Artificial Sequence
  Description of Artificial Sequence: Synthetic oligonucleotide
guauaggugaguggagccc

SEQ ID NO: 1338618 - RNA, 19 nt, Artificial Sequence
  Description of Artificial Sequence: Synthetic oligonucleotide
acugagggagcuugauucu

SEQ ID NO: 1338619 - RNA, 19 nt, Artificial Sequence
  Description of Artificial Sequence: Synthetic oligonucleotide
uguacacauggacgcuggc

SEQ ID NO: 1338620 - RNA, 19 nt, Artificial Sequence
  Description of Artificial Sequence: Synthetic oligonucleotide
aguuuauucauagcagcuu

SEQ ID NO: 1338621 - RNA, 19 nt, Artificial Sequence
  Description of Artificial Sequence: Synthetic oligonucleotide
ugucacacgauggcagagc

SEQ ID NO: 1338622 - RNA, 19 nt, Artificial Sequence
  Description of Artificial Sequence: Synthetic oligonucleotide
acgaauguccguucugaau

SEQ ID NO: 1338623 - RNA, 19 nt, Artificial Sequence
  Description of Artificial Sequence: Synthetic oligonucleotide
guaagaaguggugaccaca

SEQ ID NO: 1338624 - RNA, 19 nt, Artificial Sequence
  Description of Artificial Sequence: Synthetic oligonucleotide
agcuuucuggaugcuguac

SEQ ID NO: 1338625 - RNA, 19 nt, Artificial Sequence
  Description of Artificial Sequence: Synthetic oligonucleotide
ucacacgauggcagagcag

SEQ ID NO: 1338626 - RNA, 19 nt, Artificial Sequence
  Description of Artificial Sequence: Synthetic oligonucleotide
acagucuaugcuuguuggu

SEQ ID NO: 1338627 - RNA, 19 nt, Artificial Sequence
  Description of Artificial Sequence: Synthetic oligonucleotide
gcauagaaucaggaggugg

SEQ ID NO: 1338628 - RNA, 19 nt, Artificial Sequence
  Description of Artificial Sequence: Synthetic oligonucleotide
gucugugcacgauucacuc

SEQ ID NO: 1338629 - RNA, 19 nt, Artificial Sequence
  Description of Artificial Sequence: Synthetic oligonucleotide
ucugugcacgauucacucu

SEQ ID NO: 1338630 - RNA, 19 nt, Artificial Sequence
  Description of Artificial Sequence: Synthetic oligonucleotide
auccaguagaauucaugaa

SEQ ID NO: 1338631 - RNA, 19 nt, Artificial Sequence
  Description of Artificial Sequence: Synthetic oligonucleotide
guaauggacacuugucugu

SEQ ID NO: 1338632 - RNA, 19 nt, Artificial Sequence
  Description of Artificial Sequence: Synthetic oligonucleotide
uguggcacgaauguccguu

SEQ ID NO: 1338633 - RNA, 19 nt, Artificial Sequence
  Description of Artificial Sequence: Synthetic oligonucleotide
cuaugcagcccucuucauc

SEQ ID NO: 1338634 - RNA, 19 nt, Artificial Sequence
  Description of Artificial Sequence: Synthetic oligonucleotide
cagucuaugcuuguugguc

SEQ ID NO: 1338635 - RNA, 19 nt, Artificial Sequence
  Description of Artificial Sequence: Synthetic oligonucleotide
agagcagcguuuugauaca

SEQ ID NO: 1338636 - RNA, 19 nt, Artificial Sequence
  Description of Artificial Sequence: Synthetic oligonucleotide
uucacucucguagacuuuu

SEQ ID NO: 1338637 - RNA, 19 nt, Artificial Sequence
  Description of Artificial Sequence: Synthetic oligonucleotide
uucaucuuacucuccucuu

SEQ ID NO: 1338638 - RNA, 19 nt, Artificial Sequence
  Description of Artificial Sequence: Synthetic oligonucleotide
acgcuuucguuuucuuuug

SEQ ID NO: 1338639 - RNA, 19 nt, Artificial Sequence
  Description of Artificial Sequence: Synthetic oligonucleotide
cauagcuuucuggaugcug

SEQ ID NO: 1338640 - RNA, 19 nt, Artificial Sequence
  Description of Artificial Sequence: Synthetic oligonucleotide
aaggcaggaacuaggcgaa

SEQ ID NO: 1338641 - RNA, 19 nt, Artificial Sequence
  Description of Artificial Sequence: Synthetic oligonucleotide
aucggacugagggagcuug

SEQ ID NO: 1338642 - RNA, 19 nt, Artificial Sequence
  Description of Artificial Sequence: Synthetic oligonucleotide
uccugcuucuaggugacuc

SEQ ID NO: 1338643 - RNA, 19 nt, Artificial Sequence
  Description of Artificial Sequence: Synthetic oligonucleotide
ucuagaagcugaggacucu

SEQ ID NO: 1338644 - RNA, 19 nt, Artificial Sequence
  Description of Artificial Sequence: Synthetic oligonucleotide
ugugucacacuugcugccu

SEQ ID NO: 1338645 - RNA, 19 nt, Artificial Sequence
  Description of Artificial Sequence: Synthetic oligonucleotide
agaauacagaggaccauaa

SEQ ID NO: 1338646 - RNA, 19 nt, Artificial Sequence
  Description of Artificial Sequence: Synthetic oligonucleotide
gucacacgauggcagagca

SEQ ID NO: 1338647 - RNA, 19 nt, Artificial Sequence
  Description of Artificial Sequence: Synthetic oligonucleotide
  modified_base (9)..(9): a, c, u, g, unknown or other
gggaagccnguuuggaggc

SEQ ID NO: 1338648 - RNA, 19 nt, Artificial Sequence
  Description of Artificial Sequence: Synthetic oligonucleotide
guguacugaugucaccuuc

SEQ ID NO: 1338649 - RNA, 19 nt, Artificial Sequence
  Description of Artificial Sequence: Synthetic oligonucleotide
aggggacgagaaguguggc

SEQ ID NO: 1338650 - RNA, 19 nt, Artificial Sequence
  Description of Artificial Sequence: Synthetic oligonucleotide
caguaauggacacuugucu

SEQ ID NO: 1338651 - RNA, 19 nt, Artificial Sequence
  Description of Artificial Sequence: Synthetic oligonucleotide
cuuuuaaggaugucauagu

SEQ ID NO: 1338652 - RNA, 19 nt, Artificial Sequence
  Description of Artificial Sequence: Synthetic oligonucleotide
cacgauucacucucguaga

SEQ ID NO: 1338653 - RNA, 19 nt, Artificial Sequence
  Description of Artificial Sequence: Synthetic oligonucleotide
guauugaacagaggcccac

SEQ ID NO: 1338654 - RNA, 19 nt, Artificial Sequence
  Description of Artificial Sequence: Synthetic oligonucleotide
ugcuucuaggugacucccu

SEQ ID NO: 1338655 - RNA, 19 nt, Artificial Sequence
  Description of Artificial Sequence: Synthetic oligonucleotide
  modified_base (6)..(6): a, c, u, g, unknown or other
aagccnguuuggaggcagg

SEQ ID NO: 1338656 - RNA, 19 nt, Artificial Sequence
  Description of Artificial Sequence: Synthetic oligonucleotide
ggaccauaauaggaaaaug

SEQ ID NO: 1338657 - RNA, 19 nt, Artificial Sequence
  Description of Artificial Sequence: Synthetic oligonucleotide
uggcacgaauguccguucu

SEQ ID NO: 1338658 - RNA, 19 nt, Artificial Sequence
  Description of Artificial Sequence: Synthetic oligonucleotide
uucagguuuucgguuuccu

SEQ ID NO: 1338659 - RNA, 19 nt, Artificial Sequence
  Description of Artificial Sequence: Synthetic oligonucleotide
auguccguucugaauaaga

SEQ ID NO: 1338660 - RNA, 19 nt, Artificial Sequence
  Description of Artificial Sequence: Synthetic oligonucleotide
acaagauuugugggcguca

SEQ ID NO: 1338661 - RNA, 19 nt, Artificial Sequence
  Description of Artificial Sequence: Synthetic oligonucleotide
aguggugaccacauccagu

SEQ ID NO: 1338662 - RNA, 19 nt, Artificial Sequence
  Description of Artificial Sequence: Synthetic oligonucleotide
gucuguguacugaugucac

SEQ ID NO: 1338663 - RNA, 19 nt, Artificial Sequence
  Description of Artificial Sequence: Synthetic oligonucleotide
cagguaaggcaggaacuag

SEQ ID NO: 1338664 - RNA, 19 nt, Artificial Sequence
  Description of Artificial Sequence: Synthetic oligonucleotide
agcagcguuuugauacagg

SEQ ID NO: 1338665 - RNA, 19 nt, Artificial Sequence
  Description of Artificial Sequence: Synthetic oligonucleotide
ccaguaauggacacuuguc

SEQ ID NO: 1338666 - RNA, 19 nt, Artificial Sequence
  Description of Artificial Sequence: Synthetic oligonucleotide
aggcgggucaaagauugug

SEQ ID NO: 1338667 - RNA, 19 nt, Artificial Sequence
  Description of Artificial Sequence: Synthetic oligonucleotide
uugugggcgucaggggacg

SEQ ID NO: 1338668 - RNA, 19 nt, Artificial Sequence
  Description of Artificial Sequence: Synthetic oligonucleotide
accuuguggcacgaauguc

SEQ ID NO: 1338669 - RNA, 19 nt, Artificial Sequence
  Description of Artificial Sequence: Synthetic oligonucleotide
ugaauucuccuaggcgggu

SEQ ID NO: 1338670 - RNA, 19 nt, Artificial Sequence
  Description of Artificial Sequence: Synthetic oligonucleotide
gaggaccauaauaggaaaa

SEQ ID NO: 1338671 - RNA, 19 nt, Artificial Sequence
  Description of Artificial Sequence: Synthetic oligonucleotide
cgguauugaacagaggccc

SEQ ID NO: 1338672 - RNA, 19 nt, Artificial Sequence
  Description of Artificial Sequence: Synthetic oligonucleotide
cguauaggugaguggagcc

SEQ ID NO: 1338673 - RNA, 19 nt, Artificial Sequence
  Description of Artificial Sequence: Synthetic oligonucleotide
gugacucugcuucauacau

SEQ ID NO: 1338674 - RNA, 19 nt, Artificial Sequence
  Description of Artificial Sequence: Synthetic oligonucleotide
ggcacuaaacuugcugcag

SEQ ID NO: 1338675 - RNA, 19 nt, Artificial Sequence
  Description of Artificial Sequence: Synthetic oligonucleotide
cguuuugauacagguaagg

SEQ ID NO: 1338676 - RNA, 19 nt, Artificial Sequence
  Description of Artificial Sequence: Synthetic oligonucleotide
gagcagcguuuugauacag

SEQ ID NO: 1338677 - RNA, 19 nt, Artificial Sequence
  Description of Artificial Sequence: Synthetic oligonucleotide
gguaauucucaaaugaauu

SEQ ID NO: 1338678 - RNA, 19 nt, Artificial Sequence
  Description of Artificial Sequence: Synthetic oligonucleotide
gaauucuccuaggcggguc

SEQ ID NO: 1338679 - RNA, 19 nt, Artificial Sequence
  Description of Artificial Sequence: Synthetic oligonucleotide
ggugacucugcuucauaca

SEQ ID NO: 1338680 - RNA, 19 nt, Artificial Sequence
  Description of Artificial Sequence: Synthetic oligonucleotide
ucggacugagggagcuuga

SEQ ID NO: 1338681 - RNA, 19 nt, Artificial Sequence
  Description of Artificial Sequence: Synthetic oligonucleotide
uggccauugguggucaguu

SEQ ID NO: 1338682 - RNA, 19 nt, Artificial Sequence
  Description of Artificial Sequence: Synthetic oligonucleotide
aaauggcguauaggugagu

SEQ ID NO: 1338683 - RNA, 19 nt, Artificial Sequence
  Description of Artificial Sequence: Synthetic oligonucleotide
ggcgggucaaagauugugc

SEQ ID NO: 1338684 - RNA, 19 nt, Artificial Sequence
  Description of Artificial Sequence: Synthetic oligonucleotide
cauggacgcuggcagucac

SEQ ID NO: 1338685 - RNA, 19 nt, Artificial Sequence
  Description of Artificial Sequence: Synthetic oligonucleotide
agucgguauugaacagagg

SEQ ID NO: 1338686 - RNA, 19 nt, Artificial Sequence
  Description of Artificial Sequence: Synthetic oligonucleotide
cacugcuaucggacugagg

SEQ ID NO: 1338687 - RNA, 19 nt, Artificial Sequence
  Description of Artificial Sequence: Synthetic oligonucleotide
gugucacacgauggcagag

SEQ ID NO: 1338688 - RNA, 19 nt, Artificial Sequence
  Description of Artificial Sequence: Synthetic oligonucleotide
  modified_base (2)..(2): a, c, u, g, unknown or other
cnuaaucuuugggcugcug

SEQ ID NO: 1338689 - RNA, 19 nt, Artificial Sequence
  Description of Artificial Sequence: Synthetic oligonucleotide
acaguaagugacagucuau

SEQ ID NO: 1338690 - RNA, 19 nt, Artificial Sequence
  Description of Artificial Sequence: Synthetic oligonucleotide
acuaugcagcccucuucau

SEQ ID NO: 1338691 - RNA, 19 nt, Artificial Sequence
  Description of Artificial Sequence: Synthetic oligonucleotide
  modified_base (2)..(2): a, c, u, g, unknown or other
cnguuuggaggcaggugga

SEQ ID NO: 1338692 - RNA, 19 nt, Artificial Sequence
  Description of Artificial Sequence: Synthetic oligonucleotide
ugggcgucaggggacgaga

SEQ ID NO: 1338693 - RNA, 19 nt, Artificial Sequence
  Description of Artificial Sequence: Synthetic oligonucleotide
gcguauaggugaguggagc

SEQ ID NO: 1338694 - RNA, 19 nt, Artificial Sequence
  Description of Artificial Sequence: Synthetic oligonucleotide
gcagcguuuugauacaggu

SEQ ID NO: 1338695 - RNA, 19 nt, Artificial Sequence
  Description of Artificial Sequence: Synthetic oligonucleotide
gguuuucgguuuccuuugc

SEQ ID NO: 1338696 - RNA, 19 nt, Artificial Sequence
  Description of Artificial Sequence: Synthetic oligonucleotide
agucacuaugcagcccucu

SEQ ID NO: 1338697 - RNA, 19 nt, Artificial Sequence
  Description of Artificial Sequence: Synthetic oligonucleotide
uacacgcuuucguuuucuu

SEQ ID NO: 1338698 - RNA, 19 nt, Artificial Sequence
  Description of Artificial Sequence: Synthetic oligonucleotide
gagggagcuugauucuucu

SEQ ID NO: 1338699 - RNA, 19 nt, Artificial Sequence
  Description of Artificial Sequence: Synthetic oligonucleotide
cugcuaucggacugaggga

SEQ ID NO: 1338700 - RNA, 19 nt, Artificial Sequence
  Description of Artificial Sequence: Synthetic oligonucleotide
ggcucaguuuuaggcauag

SEQ ID NO: 1338701 - RNA, 19 nt, Artificial Sequence
  Description of Artificial Sequence: Synthetic oligonucleotide
ggcacgaauguccguucug

SEQ ID NO: 1338702 - RNA, 19 nt, Artificial Sequence
  Description of Artificial Sequence: Synthetic oligonucleotide
uaggcgggucaaagauugu

SEQ ID NO: 1338703 - RNA, 19 nt, Artificial Sequence
  Description of Artificial Sequence: Synthetic oligonucleotide
  modified_base (5)..(5): a, c, u, g, unknown or other
agccnguuuggaggcaggu

SEQ ID NO: 1338704 - RNA, 19 nt, Artificial Sequence
  Description of Artificial Sequence: Synthetic oligonucleotide
guuuucgguuuccuuugcu

SEQ ID NO: 1338705 - RNA, 19 nt, Artificial Sequence
  Description of Artificial Sequence: Synthetic oligonucleotide
caguauggacaggagagua

SEQ ID NO: 1338706 - RNA, 19 nt, Artificial Sequence
  Description of Artificial Sequence: Synthetic oligonucleotide
gacgagaaguguggcagua

SEQ ID NO: 1338707 - RNA, 19 nt, Artificial Sequence
  Description of Artificial Sequence: Synthetic oligonucleotide
cucugugaccacuccaagu

SEQ ID NO: 1338708 - RNA, 19 nt, Artificial Sequence
  Description of Artificial Sequence: Synthetic oligonucleotide
cgaauguccguucugaaua

SEQ ID NO: 1338709 - RNA, 19 nt, Artificial Sequence
  Description of Artificial Sequence: Synthetic oligonucleotide
ggaacuaggcgaacuuaca

SEQ ID NO: 1338710 - RNA, 19 nt, Artificial Sequence
  Description of Artificial Sequence: Synthetic oligonucleotide
ggggucuguguacugaugu

SEQ ID NO: 1338711 - RNA, 19 nt, Artificial Sequence
  Description of Artificial Sequence: Synthetic oligonucleotide
gugaccacuccaaguccug

SEQ ID NO: 1338712 - RNA, 19 nt, Artificial Sequence
  Description of Artificial Sequence: Synthetic oligonucleotide
acauggacgcuggcaguca

SEQ ID NO: 1338713 - RNA, 19 nt, Artificial Sequence
  Description of Artificial Sequence: Synthetic oligonucleotide
cacgaauguccguucugaa

SEQ ID NO: 1338714 - RNA, 19 nt, Artificial Sequence
  Description of Artificial Sequence: Synthetic oligonucleotide
cauggccauugguggucag

SEQ ID NO: 1338715 - RNA, 19 nt, Artificial Sequence
  Description of Artificial Sequence: Synthetic oligonucleotide
cagcguuuugauacaggua

SEQ ID NO: 1338716 - RNA, 19 nt, Artificial Sequence
  Description of Artificial Sequence: Synthetic oligonucleotide
gcguuuugauacagguaag

SEQ ID NO: 1338717 - RNA, 19 nt, Artificial Sequence
  Description of Artificial Sequence: Synthetic oligonucleotide
ggcguauaggugaguggag

SEQ ID NO: 1338718 - RNA, 19 nt, Artificial Sequence
  Description of Artificial Sequence: Synthetic oligonucleotide
aggcaggaacuaggcgaac

SEQ ID NO: 1338719 - RNA, 19 nt, Artificial Sequence
  Description of Artificial Sequence: Synthetic oligonucleotide
gguggaccauggccauugg

SEQ ID NO: 1338720 - RNA, 19 nt, Artificial Sequence
  Description of Artificial Sequence: Synthetic oligonucleotide
gggucuguguacugauguc

SEQ ID NO: 1338721 - RNA, 19 nt, Artificial Sequence
  Description of Artificial Sequence: Synthetic oligonucleotide
gcacgaauguccguucuga

SEQ ID NO: 1338722 - RNA, 19 nt, Artificial Sequence
  Description of Artificial Sequence: Synthetic oligonucleotide
acgagaaguguggcaguau

SEQ ID NO: 1338723 - RNA, 19 nt, Artificial Sequence
  Description of Artificial Sequence: Synthetic oligonucleotide
uucuccuaggcgggucaaa

SEQ ID NO: 1338724 - RNA, 19 nt, Artificial Sequence
  Description of Artificial Sequence: Synthetic oligonucleotide
  modified_base (4)..(4): a, c, u, g, unknown or other
gccnguuuggaggcaggug

SEQ ID NO: 1338725 - RNA, 19 nt, Artificial Sequence
  Description of Artificial Sequence: Synthetic oligonucleotide
ggggacgagaaguguggca

SEQ ID NO: 1338726 - RNA, 19 nt, Artificial Sequence
  Description of Artificial Sequence: Synthetic oligonucleotide
gugggcgucaggggacgag

SEQ ID NO: 1338727 - RNA, 19 nt, Artificial Sequence
  Description of Artificial Sequence: Synthetic oligonucleotide
caguacacgcuuucguuuu

SEQ ID NO: 1338728 - RNA, 19 nt, Artificial Sequence
  Description of Artificial Sequence: Synthetic oligonucleotide
caggaacuaggcgaacuua

SEQ ID NO: 1338729 - RNA, 19 nt, Artificial Sequence
  Description of Artificial Sequence: Synthetic oligonucleotide
aggcgaacuuacacaguaa

SEQ ID NO: 1338730 - RNA, 19 nt, Artificial Sequence
  Description of Artificial Sequence: Synthetic oligonucleotide
guggucaguucacuggcuu

SEQ ID NO: 1338731 - RNA, 19 nt, Artificial Sequence
  Description of Artificial Sequence: Synthetic oligonucleotide
cagcuagcuuggacuucac

SEQ ID NO: 1338732 - RNA, 19 nt, Artificial Sequence
  Description of Artificial Sequence: Synthetic oligonucleotide
gcuaucggacugagggagc

SEQ ID NO: 1338733 - RNA, 19 nt, Artificial Sequence
  Description of Artificial Sequence: Synthetic oligonucleotide
auucuccuaggcgggucaa

SEQ ID NO: 1338734 - RNA, 19 nt, Artificial Sequence
  Description of Artificial Sequence: Synthetic oligonucleotide
gcgggucaaagauugugcu

SEQ ID NO: 1338735 - RNA, 19 nt, Artificial Sequence
  Description of Artificial Sequence: Synthetic oligonucleotide
cuaggcgaacuuacacagu

SEQ ID NO: 1338736 - RNA, 19 nt, Artificial Sequence
  Description of Artificial Sequence: Synthetic oligonucleotide
agcuuugguucaaguuuau

SEQ ID NO: 1338737 - RNA, 19 nt, Artificial Sequence
  Description of Artificial Sequence: Synthetic oligonucleotide
cagauaagucuacucgcuu

SEQ ID NO: 1338738 - RNA, 19 nt, Artificial Sequence
  Description of Artificial Sequence: Synthetic oligonucleotide
ugcaaccuuguggcacgaa

SEQ ID NO: 1338739 - RNA, 19 nt, Artificial Sequence
  Description of Artificial Sequence: Synthetic oligonucleotide
uaucggacugagggagcuu

SEQ ID NO: 1338740 - RNA, 19 nt, Artificial Sequence
  Description of Artificial Sequence: Synthetic oligonucleotide
uggagcccagcagguaauu

SEQ ID NO: 1338741 - RNA, 19 nt, Artificial Sequence
  Description of Artificial Sequence: Synthetic oligonucleotide
ggacacuugucuguuggcu

SEQ ID NO: 1338742 - RNA, 19 nt, Artificial Sequence
  Description of Artificial Sequence: Synthetic oligonucleotide
gcaaccuuguggcacgaau

SEQ ID NO: 1338743 - RNA, 19 nt, Artificial Sequence
  Description of Artificial Sequence: Synthetic oligonucleotide
gucuaugcuuguuggucuu

SEQ ID NO: 1338744 - RNA, 19 nt, Artificial Sequence
  Description of Artificial Sequence: Synthetic oligonucleotide
guacacgcuuucguuuucu

SEQ ID NO: 1338745 - RNA, 19 nt, Artificial Sequence
  Description of Artificial Sequence: Synthetic oligonucleotide
ggccauugguggucaguuc

SEQ ID NO: 1338746 - RNA, 19 nt, Artificial Sequence
  Description of Artificial Sequence: Synthetic oligonucleotide
gacgaacauuuaaaacauu

SEQ ID NO: 1338747 - RNA, 19 nt, Artificial Sequence
  Description of Artificial Sequence: Synthetic oligonucleotide
ggcagagcagcguuuugau

SEQ ID NO: 1338748 - RNA, 19 nt, Artificial Sequence
  Description of Artificial Sequence: Synthetic oligonucleotide
gacucccuuuugguugaaa

SEQ ID NO: 1338749 - RNA, 19 nt, Artificial Sequence
  Description of Artificial Sequence: Synthetic oligonucleotide
ggagcccagcagguaauuc

SEQ ID NO: 1338750 - RNA, 19 nt, Artificial Sequence
  Description of Artificial Sequence: Synthetic oligonucleotide
gcgaacuuacacaguaagu

SEQ ID NO: 1338751 - RNA, 19 nt, Artificial Sequence
  Description of Artificial Sequence: Synthetic oligonucleotide
uuggggcccuuucguucuu

SEQ ID NO: 1338752 - RNA, 19 nt, Artificial Sequence
  Description of Artificial Sequence: Synthetic oligonucleotide
gugcacgauucacucucgu

SEQ ID NO: 1338753 - RNA, 19 nt, Artificial Sequence
  Description of Artificial Sequence: Synthetic oligonucleotide
ggcaggaacuaggcgaacu

SEQ ID NO: 1338754 - RNA, 19 nt, Artificial Sequence
  Description of Artificial Sequence: Synthetic oligonucleotide
cacauccaguagaauucau

SEQ ID NO: 1338755 - RNA, 19 nt, Artificial Sequence
  Description of Artificial Sequence: Synthetic oligonucleotide
cacgauggcagagcagcgu

SEQ ID NO: 1338756 - RNA, 19 nt, Artificial Sequence
  Description of Artificial Sequence: Synthetic oligonucleotide
ugacucccuuuugguugaa

SEQ ID NO: 1338757 - RNA, 19 nt, Artificial Sequence
  Description of Artificial Sequence: Synthetic oligonucleotide
ggacgagaaguguggcagu

SEQ ID NO: 1338758 - RNA, 19 nt, Artificial Sequence
  Description of Artificial Sequence: Synthetic oligonucleotide
guauggcacuaaacuugcu

SEQ ID NO: 1338759 - RNA, 19 nt, Artificial Sequence
  Description of Artificial Sequence: Synthetic oligonucleotide
  modified_base (8)..(8): a, c, u, g, unknown or other
ggaagccnguuuggaggca

SEQ ID NO: 1338760 - RNA, 19 nt, Artificial Sequence
  Description of Artificial Sequence: Synthetic oligonucleotide
acgcuggcagucacagcua

SEQ ID NO: 1338761 - RNA, 19 nt, Artificial Sequence
  Description of Artificial Sequence: Synthetic oligonucleotide
cugcaaccuuguggcacga

SEQ ID NO: 1338762 - RNA, 19 nt, Artificial Sequence
  Description of Artificial Sequence: Synthetic oligonucleotide
gcucaguuuuaggcauaga

SEQ ID NO: 1338763 - RNA, 19 nt, Artificial Sequence
  Description of Artificial Sequence: Synthetic oligonucleotide
gguggucaguucacuggcu

SEQ ID NO: 1338764 - RNA, 19 nt, Artificial Sequence
  Description of Artificial Sequence: Synthetic oligonucleotide
ccuaggcgggucaaagauu

SEQ ID NO: 1338765 - RNA, 19 nt, Artificial Sequence
  Description of Artificial Sequence: Synthetic oligonucleotide
gggcgucaggggacgagaa

SEQ ID NO: 1338766 - RNA, 19 nt, Artificial Sequence
  Description of Artificial Sequence: Synthetic oligonucleotide
cgggucaaagauugugcuu

SEQ ID NO: 1338767 - RNA, 19 nt, Artificial Sequence
  Description of Artificial Sequence: Synthetic oligonucleotide
  modified_base (3)..(3): a, c, u, g, unknown or other
ccnuaaucuuugggcugcu

SEQ ID NO: 1338768 - RNA, 19 nt, Artificial Sequence
  Description of Artificial Sequence: Synthetic oligonucleotide
aauguacucaccuugaaca

SEQ ID NO: 1338769 - RNA, 19 nt, Artificial Sequence
  Description of Artificial Sequence: Synthetic oligonucleotide
uacuuuaaccccuagacag

SEQ ID NO: 1338770 - RNA, 19 nt, Artificial Sequence
  Description of Artificial Sequence: Synthetic oligonucleotide
aacucgaaugcacucuugc

SEQ ID NO: 1338771 - RNA, 19 nt, Artificial Sequence
  Description of Artificial Sequence: Synthetic oligonucleotide
aggucucggaaauagaggc

SEQ ID NO: 1338772 - RNA, 19 nt, Artificial Sequence
  Description of Artificial Sequence: Synthetic oligonucleotide
cuguguagcagaaagacag

SEQ ID NO: 1338773 - RNA, 19 nt, Artificial Sequence
  Description of Artificial Sequence: Synthetic oligonucleotide
ucuacaaugugcuggaucu

SEQ ID NO: 1338774 - RNA, 19 nt, Artificial Sequence
  Description of Artificial Sequence: Synthetic oligonucleotide
uuccugucaaagaaggugg

SEQ ID NO: 1338775 - RNA, 19 nt, Artificial Sequence
  Description of Artificial Sequence: Synthetic oligonucleotide
agugccuucaaaacaaucc

SEQ ID NO: 1338776 - RNA, 19 nt, Artificial Sequence
  Description of Artificial Sequence: Synthetic oligonucleotide
aaauagaggcugcuggcgg

SEQ ID NO: 1338777 - RNA, 19 nt, Artificial Sequence
  Description of Artificial Sequence: Synthetic oligonucleotide
uuaugaugcuacuuuaacc

SEQ ID NO: 1338778 - RNA, 19 nt, Artificial Sequence
  Description of Artificial Sequence: Synthetic oligonucleotide
aauagaggcugcuggcggc

SEQ ID NO: 1338779 - RNA, 19 nt, Artificial Sequence
  Description of Artificial Sequence: Synthetic oligonucleotide
uuucuaacagucaugaguu

SEQ ID NO: 1338780 - RNA, 19 nt, Artificial Sequence
  Description of Artificial Sequence: Synthetic oligonucleotide
cuugcuauuaccacugaag

SEQ ID NO: 1338781 - RNA, 19 nt, Artificial Sequence
  Description of Artificial Sequence: Synthetic oligonucleotide
aacaugaggucugugcccc

SEQ ID NO: 1338782 - RNA, 19 nt, Artificial Sequence
  Description of Artificial Sequence: Synthetic oligonucleotide
aaugcacucuugcuauuac

SEQ ID NO: 1338783 - RNA, 19 nt, Artificial Sequence
  Description of Artificial Sequence: Synthetic oligonucleotide
auagaugcgcugcucaaac

SEQ ID NO: 1338784 - RNA, 19 nt, Artificial Sequence
  Description of Artificial Sequence: Synthetic oligonucleotide
uugcuauuaccacugaaga

SEQ ID NO: 1338785 - RNA, 19 nt, Artificial Sequence
  Description of Artificial Sequence: Synthetic oligonucleotide
cucagaucgacguucacag

SEQ ID NO: 1338786 - RNA, 19 nt, Artificial Sequence
  Description of Artificial Sequence: Synthetic oligonucleotide
ucaugaguuaugaugcuac

SEQ ID NO: 1338787 - RNA, 19 nt, Artificial Sequence
  Description of Artificial Sequence: Synthetic oligonucleotide
uuaaccccuagacagugcc

SEQ ID NO: 1338788 - RNA, 19 nt, Artificial Sequence
  Description of Artificial Sequence: Synthetic oligonucleotide
cagcauuugagacauggcg

SEQ ID NO: 1338789 - RNA, 19 nt, Artificial Sequence
  Description of Artificial Sequence: Synthetic oligonucleotide
ugaguuaugaugcuacuuu

SEQ ID NO: 1338790 - RNA, 19 nt, Artificial Sequence
  Description of Artificial Sequence: Synthetic oligonucleotide
ugcacacacacacacacac

SEQ ID NO: 1338791 - RNA, 19 nt, Artificial Sequence
  Description of Artificial Sequence: Synthetic oligonucleotide
cacacaugcacacacacac

SEQ ID NO: 1338792 - RNA, 19 nt, Artificial Sequence
  Description of Artificial Sequence: Synthetic oligonucleotide
ugcucauucagacagccaa

SEQ ID NO: 1338793 - RNA, 19 nt, Artificial Sequence
  Description of Artificial Sequence: Synthetic oligonucleotide
gacgguacgguacaucucc

SEQ ID NO: 1338794 - RNA, 19 nt, Artificial Sequence
  Description of Artificial Sequence: Synthetic oligonucleotide
cucaacgugggacagacug

SEQ ID NO: 1338795 - RNA, 19 nt, Artificial Sequence
  Description of Artificial Sequence: Synthetic oligonucleotide
ucuugcacugcauaguuuc

SEQ ID NO: 1338796 - RNA, 19 nt, Artificial Sequence
  Description of Artificial Sequence: Synthetic oligonucleotide
uaauguacucaccuugaac

SEQ ID NO: 1338797 - RNA, 19 nt, Artificial Sequence
  Description of Artificial Sequence: Synthetic oligonucleotide
auuaccacugaagaggucu

SEQ ID NO: 1338798 - RNA, 19 nt, Artificial Sequence
  Description of Artificial Sequence: Synthetic oligonucleotide
cacacacacacacacacgc

SEQ ID NO: 1338799 - RNA, 19 nt, Artificial Sequence
  Description of Artificial Sequence: Synthetic oligonucleotide
aacugauuuuauuaacuua

SEQ ID NO: 1338800 - RNA, 19 nt, Artificial Sequence
  Description of Artificial Sequence: Synthetic oligonucleotide
cauucagacagccaagcac

SEQ ID NO: 1338801 - RNA, 19 nt, Artificial Sequence
  Description of Artificial Sequence: Synthetic oligonucleotide
gaaauagaggcugcuggcg

SEQ ID NO: 1338802 - RNA, 19 nt, Artificial Sequence
  Description of Artificial Sequence: Synthetic oligonucleotide
caugcacacacacacacac

SEQ ID NO: 1338803 - RNA, 19 nt, Artificial Sequence
  Description of Artificial Sequence: Synthetic oligonucleotide
agcgaucacguucaucucg

SEQ ID NO: 1338804 - RNA, 19 nt, Artificial Sequence
  Description of Artificial Sequence: Synthetic oligonucleotide
acugcauaguuuccugugg

SEQ ID NO: 1338805 - RNA, 19 nt, Artificial Sequence
  Description of Artificial Sequence: Synthetic oligonucleotide
agcauuugagacauggcgg

SEQ ID NO: 1338806 - RNA, 19 nt, Artificial Sequence
  Description of Artificial Sequence: Synthetic oligonucleotide
ucacccuccgaguagagcu

SEQ ID NO: 1338807 - RNA, 19 nt, Artificial Sequence
  Description of Artificial Sequence: Synthetic oligonucleotide
uccucacuagccucaaagg

SEQ ID NO: 1338808 - RNA, 19 nt, Artificial Sequence
  Description of Artificial Sequence: Synthetic oligonucleotide
gcuacuuuaaccccuagac

SEQ ID NO: 1338809 - RNA, 19 nt, Artificial Sequence
  Description of Artificial Sequence: Synthetic oligonucleotide
ucaacgugggacagacugg

SEQ ID NO: 1338810 - RNA, 19 nt, Artificial Sequence
  Description of Artificial Sequence: Synthetic oligonucleotide
uagacagugccuucaaaac

SEQ ID NO: 1338811 - RNA, 19 nt, Artificial Sequence
  Description of Artificial Sequence: Synthetic oligonucleotide
aaacaucccacugaaggga

SEQ ID NO: 1338812 - RNA, 19 nt, Artificial Sequence
  Description of Artificial Sequence: Synthetic oligonucleotide
augcacucuugcuauuacc

SEQ ID NO: 1338813 - RNA, 19 nt, Artificial Sequence
  Description of Artificial Sequence: Synthetic oligonucleotide
uuugagacauggcgggugc

SEQ ID NO: 1338814 - RNA, 19 nt, Artificial Sequence
  Description of Artificial Sequence: Synthetic oligonucleotide
cacacacacacacacacac

SEQ ID NO: 1338815 - RNA, 19 nt, Artificial Sequence
  Description of Artificial Sequence: Synthetic oligonucleotide
ugugauguagaccccggaa

SEQ ID NO: 1338816 - RNA, 19 nt, Artificial Sequence
  Description of Artificial Sequence: Synthetic oligonucleotide
uccgaguagagcuuugggu

SEQ ID NO: 1338817 - RNA, 19 nt, Artificial Sequence
  Description of Artificial Sequence: Synthetic oligonucleotide
cucaccuugaacaugaggu

SEQ ID NO: 1338818 - RNA, 19 nt, Artificial Sequence
  Description of Artificial Sequence: Synthetic oligonucleotide
ccacgugugauguagaccc

SEQ ID NO: 1338819 - RNA, 19 nt, Artificial Sequence
  Description of Artificial Sequence: Synthetic oligonucleotide
acguucacagcaucaguuc

SEQ ID NO: 1338820 - RNA, 19 nt, Artificial Sequence
  Description of Artificial Sequence: Synthetic oligonucleotide
agaggucucggaaauagag

SEQ ID NO: 1338821 - RNA, 19 nt, Artificial Sequence
  Description of Artificial Sequence: Synthetic oligonucleotide
ucgaaugcacucuugcuau

SEQ ID NO: 1338822 - RNA, 19 nt, Artificial Sequence
  Description of Artificial Sequence: Synthetic oligonucleotide
cacaugcacacacacacac

SEQ ID NO: 1338823 - RNA, 19 nt, Artificial Sequence
  Description of Artificial Sequence: Synthetic oligonucleotide
uggauaaccgagccugccc

SEQ ID NO: 1338824 - RNA, 19 nt, Artificial Sequence
  Description of Artificial Sequence: Synthetic oligonucleotide
ucuaacagucaugaguuau

SEQ ID NO: 1338825 - RNA, 19 nt, Artificial Sequence
  Description of Artificial Sequence: Synthetic oligonucleotide
gaggucucggaaauagagg

SEQ ID NO: 1338826 - RNA, 19 nt, Artificial Sequence
  Description of Artificial Sequence: Synthetic oligonucleotide
uguacaugaccacgagcug

SEQ ID NO: 1338827 - RNA, 19 nt, Artificial Sequence
  Description of Artificial Sequence: Synthetic oligonucleotide
cuuaauguacucaccuuga

SEQ ID NO: 1338828 - RNA, 19 nt, Artificial Sequence
  Description of Artificial Sequence: Synthetic oligonucleotide
gacggaugaggacacagga

SEQ ID NO: 1338829 - RNA, 19 nt, Artificial Sequence
  Description of Artificial Sequence: Synthetic oligonucleotide
cuagacagugccuucaaaa

SEQ ID NO: 1338830 - RNA, 19 nt, Artificial Sequence
  Description of Artificial Sequence: Synthetic oligonucleotide
uccuuguacccacagccac

SEQ ID NO: 1338831 - RNA, 19 nt, Artificial Sequence
  Description of Artificial Sequence: Synthetic oligonucleotide
cucacuagccucaaaggca

SEQ ID NO: 1338832 - RNA, 19 nt, Artificial Sequence
  Description of Artificial Sequence: Synthetic oligonucleotide
uuuaaccccuagacagugc

SEQ ID NO: 1338833 - RNA, 19 nt, Artificial Sequence
  Description of Artificial Sequence: Synthetic oligonucleotide
agcauagaugcgcugcuca

SEQ ID NO: 1338834 - RNA, 19 nt, Artificial Sequence
  Description of Artificial Sequence: Synthetic oligonucleotide
cagccaagcacuguguucc

SEQ ID NO: 1338835 - RNA, 19 nt, Artificial Sequence
  Description of Artificial Sequence: Synthetic oligonucleotide
cucagugguucugugaagc

SEQ ID NO: 1338836 - RNA, 19 nt, Artificial Sequence
  Description of Artificial Sequence: Synthetic oligonucleotide
uuguuguuccugucaaaga

SEQ ID NO: 1338837 - RNA, 19 nt, Artificial Sequence
  Description of Artificial Sequence: Synthetic oligonucleotide
gugccuggcaacucgaaug

SEQ ID NO: 1338838 - RNA, 19 nt, Artificial Sequence
  Description of Artificial Sequence: Synthetic oligonucleotide
guacgguacaucuccacac

SEQ ID NO: 1338839 - RNA, 19 nt, Artificial Sequence
  Description of Artificial Sequence: Synthetic oligonucleotide
ucuugcuauuaccacugaa

SEQ ID NO: 1338840 - RNA, 19 nt, Artificial Sequence
  Description of Artificial Sequence: Synthetic oligonucleotide
aggcgcugcucauucagac

SEQ ID NO: 1338841 - RNA, 19 nt, Artificial Sequence
  Description of Artificial Sequence: Synthetic oligonucleotide
aggcgggcggcacagugcc

SEQ ID NO: 1338842 - RNA, 19 nt, Artificial Sequence
  Description of Artificial Sequence: Synthetic oligonucleotide
uguacucaccuugaacaug

SEQ ID NO: 1338843 - RNA, 19 nt, Artificial Sequence
  Description of Artificial Sequence: Synthetic oligonucleotide
guacaugaccacgagcugc

SEQ ID NO: 1338844 - RNA, 19 nt, Artificial Sequence
  Description of Artificial Sequence: Synthetic oligonucleotide
cagaucgacguucacagca

SEQ ID NO: 1338845 - RNA, 19 nt, Artificial Sequence
  Description of Artificial Sequence: Synthetic oligonucleotide
ucagugguucugugaagcc

SEQ ID NO: 1338846 - RNA, 19 nt, Artificial Sequence
  Description of Artificial Sequence: Synthetic oligonucleotide
gguacacaugucugcagcg

SEQ ID NO: 1338847 - RNA, 19 nt, Artificial Sequence
  Description of Artificial Sequence: Synthetic oligonucleotide
ggcugaggcacccaugacg

SEQ ID NO: 1338848 - RNA, 19 nt, Artificial Sequence
  Description of Artificial Sequence: Synthetic oligonucleotide
gugaagcccuccuuagagg

SEQ ID NO: 1338849 - RNA, 19 nt, Artificial Sequence
  Description of Artificial Sequence: Synthetic oligonucleotide
ucgacguucacagcaucag

SEQ ID NO: 1338850 - RNA, 19 nt, Artificial Sequence
  Description of Artificial Sequence: Synthetic oligonucleotide
aagggacgaauguucuccu

SEQ ID NO: 1338851 - RNA, 19 nt, Artificial Sequence
  Description of Artificial Sequence: Synthetic oligonucleotide
ucucggaaauagaggcugc

SEQ ID NO: 1338852 - RNA, 19 nt, Artificial Sequence
  Description of Artificial Sequence: Synthetic oligonucleotide
gucucggaaauagaggcug

SEQ ID NO: 1338853 - RNA, 19 nt, Artificial Sequence
  Description of Artificial Sequence: Synthetic oligonucleotide
ugccguguacaugaccacg

SEQ ID NO: 1338854 - RNA, 19 nt, Artificial Sequence
  Description of Artificial Sequence: Synthetic oligonucleotide
ccuuaauguacucaccuug

SEQ ID NO: 1338855 - RNA, 19 nt, Artificial Sequence
  Description of Artificial Sequence: Synthetic oligonucleotide
gacucaacgugggacagac

SEQ ID NO: 1338856 - RNA, 19 nt, Artificial Sequence
  Description of Artificial Sequence: Synthetic oligonucleotide
ucgacggaugaggacacag

SEQ ID NO: 1338857 - RNA, 19 nt, Artificial Sequence
  Description of Artificial Sequence: Synthetic oligonucleotide
aggaucacccuccgaguag

SEQ ID NO: 1338858 - RNA, 19 nt, Artificial Sequence
  Description of Artificial Sequence: Synthetic oligonucleotide
uacacaugucugcagcgau

SEQ ID NO: 1338859 - RNA, 19 nt, Artificial Sequence
  Description of Artificial Sequence: Synthetic oligonucleotide
ugcucuagcucagugguuc

SEQ ID NO: 1338860 - RNA, 19 nt, Artificial Sequence
  Description of Artificial Sequence: Synthetic oligonucleotide
ggaaccugcuacaagcucc

SEQ ID NO: 1338861 - RNA, 19 nt, Artificial Sequence
  Description of Artificial Sequence: Synthetic oligonucleotide
uguucccaaaguuggggau

SEQ ID NO: 1338862 - RNA, 19 nt, Artificial Sequence
  Description of Artificial Sequence: Synthetic oligonucleotide
cuacuuuaaccccuagaca

SEQ ID NO: 1338863 - RNA, 19 nt, Artificial Sequence
  Description of Artificial Sequence: Synthetic oligonucleotide
ccgaguagagcuuugggug

SEQ ID NO: 1338864 - RNA, 19 nt, Artificial Sequence
  Description of Artificial Sequence: Synthetic oligonucleotide
acccaugacgguacgguac

SEQ ID NO: 1338865 - RNA, 19 nt, Artificial Sequence
  Description of Artificial Sequence: Synthetic oligonucleotide
ggauaaccgagccugcccc

SEQ ID NO: 1338866 - RNA, 19 nt, Artificial Sequence
  Description of Artificial Sequence: Synthetic oligonucleotide
guacucaccuugaacauga

SEQ ID NO: 1338867 - RNA, 19 nt, Artificial Sequence
  Description of Artificial Sequence: Synthetic oligonucleotide
acacacacacacacacgcc

SEQ ID NO: 1338868 - RNA, 19 nt, Artificial Sequence
  Description of Artificial Sequence: Synthetic oligonucleotide
gaguuaugaugcuacuuua

SEQ ID NO: 1338869 - RNA, 19 nt, Artificial Sequence
  Description of Artificial Sequence: Synthetic oligonucleotide
cuccgaguagagcuuuggg

SEQ ID NO: 1338870 - RNA, 19 nt, Artificial Sequence
  Description of Artificial Sequence: Synthetic oligonucleotide
auguacucaccuugaacau

SEQ ID NO: 1338871 - RNA, 19 nt, Artificial Sequence
  Description of Artificial Sequence: Synthetic oligonucleotide
gcagcgaucacguucaucu

SEQ ID NO: 1338872 - RNA, 19 nt, Artificial Sequence
  Description of Artificial Sequence: Synthetic oligonucleotide
agucaugaguuaugaugcu

SEQ ID NO: 1338873 - RNA, 19 nt, Artificial Sequence
  Description of Artificial Sequence: Synthetic oligonucleotide
ucggaaauagaggcugcug

SEQ ID NO: 1338874 - RNA, 19 nt, Artificial Sequence
  Description of Artificial Sequence: Synthetic oligonucleotide
aucacccuccgaguagagc

SEQ ID NO: 1338875 - RNA, 19 nt, Artificial Sequence
  Description of Artificial Sequence: Synthetic oligonucleotide
ggagcuauuggccaguugu

SEQ ID NO: 1338876 - RNA, 19 nt, Artificial Sequence
  Description of Artificial Sequence: Synthetic oligonucleotide
ucgucgcugcucagcauag

SEQ ID NO: 1338877 - RNA, 19 nt, Artificial Sequence
  Description of Artificial Sequence: Synthetic oligonucleotide
ucucgacggaugaggacac

SEQ ID NO: 1338878 - RNA, 19 nt, Artificial Sequence
  Description of Artificial Sequence: Synthetic oligonucleotide
cacacacacacacacgcca

SEQ ID NO: 1338879 - RNA, 19 nt, Artificial Sequence
  Description of Artificial Sequence: Synthetic oligonucleotide
gauguggcaucugcucuag

SEQ ID NO: 1338880 - RNA, 19 nt, Artificial Sequence
  Description of Artificial Sequence: Synthetic oligonucleotide
ccucacuagccucaaaggc

SEQ ID NO: 1338881 - RNA, 19 nt, Artificial Sequence
  Description of Artificial Sequence: Synthetic oligonucleotide
uaccacugaagaggucucg

SEQ ID NO: 1338882 - RNA, 19 nt, Artificial Sequence
  Description of Artificial Sequence: Synthetic oligonucleotide
ugaagggacgaauguucuc

SEQ ID NO: 1338883 - RNA, 19 nt, Artificial Sequence
  Description of Artificial Sequence: Synthetic oligonucleotide
caggacugcacggugggcc

SEQ ID NO: 1338884 - RNA, 19 nt, Artificial Sequence
  Description of Artificial Sequence: Synthetic oligonucleotide
cuggccacgugugauguag

SEQ ID NO: 1338885 - RNA, 19 nt, Artificial Sequence
  Description of Artificial Sequence: Synthetic oligonucleotide
ucagaucgacguucacagc

SEQ ID NO: 1338886 - RNA, 19 nt, Artificial Sequence
  Description of Artificial Sequence: Synthetic oligonucleotide
uggcugcaucacuucgucg

SEQ ID NO: 1338887 - RNA, 19 nt, Artificial Sequence
  Description of Artificial Sequence: Synthetic oligonucleotide
cacggugggccuugaaggc

SEQ ID NO: 1338888 - RNA, 19 nt, Artificial Sequence
  Description of Artificial Sequence: Synthetic oligonucleotide
accugcuacaagcuccagu

SEQ ID NO: 1338889 - RNA, 19 nt, Artificial Sequence
  Description of Artificial Sequence: Synthetic oligonucleotide
uagaugcgcugcucaaaca

SEQ ID NO: 1338890 - RNA, 19 nt, Artificial Sequence
  Description of Artificial Sequence: Synthetic oligonucleotide
aaccccuagacagugccuu

SEQ ID NO: 1338891 - RNA, 19 nt, Artificial Sequence
  Description of Artificial Sequence: Synthetic oligonucleotide
cucgaaugcacucuugcua

SEQ ID NO: 1338892 - RNA, 19 nt, Artificial Sequence
  Description of Artificial Sequence: Synthetic oligonucleotide
acacacacacacacacacg

SEQ ID NO: 1338893 - RNA, 19 nt, Artificial Sequence
  Description of Artificial Sequence: Synthetic oligonucleotide
cuauuaccacugaagaggu

SEQ ID NO: 1338894 - RNA, 19 nt, Artificial Sequence
  Description of Artificial Sequence: Synthetic oligonucleotide
cuagcucagugguucugug

SEQ ID NO: 1338895 - RNA, 19 nt, Artificial Sequence
  Description of Artificial Sequence: Synthetic oligonucleotide
cuuucggacacggcgagca

SEQ ID NO: 1338896 - RNA, 19 nt, Artificial Sequence
  Description of Artificial Sequence: Synthetic oligonucleotide
uaaccccuagacagugccu

SEQ ID NO: 1338897 - RNA, 19 nt, Artificial Sequence
  Description of Artificial Sequence: Synthetic oligonucleotide
ugaggcacccaugacggua

SEQ ID NO: 1338898 - RNA, 19 nt, Artificial Sequence
  Description of Artificial Sequence: Synthetic oligonucleotide
uaggggagcaacugauuuu

SEQ ID NO: 1338899 - RNA, 19 nt, Artificial Sequence
  Description of Artificial Sequence: Synthetic oligonucleotide
agauguggcaucugcucua

SEQ ID NO: 1338900 - RNA, 19 nt, Artificial Sequence
  Description of Artificial Sequence: Synthetic oligonucleotide
acacacacacacgccauca

SEQ ID NO: 1338901 - RNA, 19 nt, Artificial Sequence
  Description of Artificial Sequence: Synthetic oligonucleotide
gugccaccaggucucgacg

SEQ ID NO: 1338902 - RNA, 19 nt, Artificial Sequence
  Description of Artificial Sequence: Synthetic oligonucleotide
uggcggccaggacugcacg

SEQ ID NO: 1338903 - RNA, 19 nt, Artificial Sequence
  Description of Artificial Sequence: Synthetic oligonucleotide
agugccuggcaacucgaau

SEQ ID NO: 1338904 - RNA, 19 nt, Artificial Sequence
  Description of Artificial Sequence: Synthetic oligonucleotide
gaguagagcuuuggguggc

SEQ ID NO: 1338905 - RNA, 19 nt, Artificial Sequence
  Description of Artificial Sequence: Synthetic oligonucleotide
acacaugucugcagcgauc

SEQ ID NO: 1338906 - RNA, 19 nt, Artificial Sequence
  Description of Artificial Sequence: Synthetic oligonucleotide
aaacaccugugaagcagca

SEQ ID NO: 1338907 - RNA, 19 nt, Artificial Sequence
  Description of Artificial Sequence: Synthetic oligonucleotide
gauaaccgagccugcccca

SEQ ID NO: 1338908 - RNA, 19 nt, Artificial Sequence
  Description of Artificial Sequence: Synthetic oligonucleotide
gugccuucaaaacaauccu

SEQ ID NO: 1338909 - RNA, 19 nt, Artificial Sequence
  Description of Artificial Sequence: Synthetic oligonucleotide
ggagcggcuuuccaggggc

SEQ ID NO: 1338910 - RNA, 19 nt, Artificial Sequence
  Description of Artificial Sequence: Synthetic oligonucleotide
uacucaccuugaacaugag

SEQ ID NO: 1338911 - RNA, 19 nt, Artificial Sequence
  Description of Artificial Sequence: Synthetic oligonucleotide
gguacgguacaucuccaca

SEQ ID NO: 1338912 - RNA, 19 nt, Artificial Sequence
  Description of Artificial Sequence: Synthetic oligonucleotide
aagaggucucggaaauaga

SEQ ID NO: 1338913 - RNA, 19 nt, Artificial Sequence
  Description of Artificial Sequence: Synthetic oligonucleotide
augaguuaugaugcuacuu

SEQ ID NO: 1338914 - RNA, 19 nt, Artificial Sequence
  Description of Artificial Sequence: Synthetic oligonucleotide
ugacgguacgguacaucuc

SEQ ID NO: 1338915 - RNA, 19 nt, Artificial Sequence
  Description of Artificial Sequence: Synthetic oligonucleotide
acggaugaggacacaggag

SEQ ID NO: 1338916 - RNA, 19 nt, Artificial Sequence
  Description of Artificial Sequence: Synthetic oligonucleotide
cuugugcuucaccccugcg

SEQ ID NO: 1338917 - RNA, 19 nt, Artificial Sequence
  Description of Artificial Sequence: Synthetic oligonucleotide
ggccuugaaggccuggccc

SEQ ID NO: 1338918 - RNA, 19 nt, Artificial Sequence
  Description of Artificial Sequence: Synthetic oligonucleotide
cuggauaaccgagccugcc

SEQ ID NO: 1338919 - RNA, 19 nt, Artificial Sequence
  Description of Artificial Sequence: Synthetic oligonucleotide
agccagcgcuuucggacac

SEQ ID NO: 1338920 - RNA, 19 nt, Artificial Sequence
  Description of Artificial Sequence: Synthetic oligonucleotide
gaucgacguucacagcauc

SEQ ID NO: 1338921 - RNA, 19 nt, Artificial Sequence
  Description of Artificial Sequence: Synthetic oligonucleotide
aggggagcaacugauuuua

SEQ ID NO: 1338922 - RNA, 19 nt, Artificial Sequence
  Description of Artificial Sequence: Synthetic oligonucleotide
cacaugucugcagcgauca

SEQ ID NO: 1338923 - RNA, 19 nt, Artificial Sequence
  Description of Artificial Sequence: Synthetic oligonucleotide
ggugagcuugccuguguag

SEQ ID NO: 1338924 - RNA, 19 nt, Artificial Sequence
  Description of Artificial Sequence: Synthetic oligonucleotide
cagcgguacccaaucuggc

SEQ ID NO: 1338925 - RNA, 19 nt, Artificial Sequence
  Description of Artificial Sequence: Synthetic oligonucleotide
uggugagcuugccugugua

SEQ ID NO: 1338926 - RNA, 19 nt, Artificial Sequence
  Description of Artificial Sequence: Synthetic oligonucleotide
accccuagacagugccuuc

SEQ ID NO: 1338927 - RNA, 19 nt, Artificial Sequence
  Description of Artificial Sequence: Synthetic oligonucleotide
agcauucaagucaacuuuu

SEQ ID NO: 1338928 - RNA, 19 nt, Artificial Sequence
  Description of Artificial Sequence: Synthetic oligonucleotide
aggacugcacggugggccu

SEQ ID NO: 1338929 - RNA, 19 nt, Artificial Sequence
  Description of Artificial Sequence: Synthetic oligonucleotide
ccugccguguacaugacca

SEQ ID NO: 1338930 - RNA, 19 nt, Artificial Sequence
  Description of Artificial Sequence: Synthetic oligonucleotide
guggcugcaucacuucguc

SEQ ID NO: 1338931 - RNA, 19 nt, Artificial Sequence
  Description of Artificial Sequence: Synthetic oligonucleotide
gaaugcacucuugcuauua

SEQ ID NO: 1338932 - RNA, 19 nt, Artificial Sequence
  Description of Artificial Sequence: Synthetic oligonucleotide
aucgacguucacagcauca

SEQ ID NO: 1338933 - RNA, 19 nt, Artificial Sequence
  Description of Artificial Sequence: Synthetic oligonucleotide
guggcagcgguacccaauc

SEQ ID NO: 1338934 - RNA, 19 nt, Artificial Sequence
  Description of Artificial Sequence: Synthetic oligonucleotide
gggaucucgaugugcagca

SEQ ID NO: 1338935 - RNA, 19 nt, Artificial Sequence
  Description of Artificial Sequence: Synthetic oligonucleotide
cagacucaacgugggacag

SEQ ID NO: 1338936 - RNA, 19 nt, Artificial Sequence
  Description of Artificial Sequence: Synthetic oligonucleotide
ccuggcaacucgaaugcac

SEQ ID NO: 1338937 - RNA, 19 nt, Artificial Sequence
  Description of Artificial Sequence: Synthetic oligonucleotide
cgaguagagcuuugggugg

SEQ ID NO: 1338938 - RNA, 19 nt, Artificial Sequence
  Description of Artificial Sequence: Synthetic oligonucleotide
cacgugugauguagacccc

SEQ ID NO: 1338939 - RNA, 19 nt, Artificial Sequence
  Description of Artificial Sequence: Synthetic oligonucleotide
ugaggucugugccccgcuc

SEQ ID NO: 1338940 - RNA, 19 nt, Artificial Sequence
  Description of Artificial Sequence: Synthetic oligonucleotide
ggaccuugugcuucacccc

SEQ ID NO: 1338941 - RNA, 19 nt, Artificial Sequence
  Description of Artificial Sequence: Synthetic oligonucleotide
cugaggugcucagaucgac

SEQ ID NO: 1338942 - RNA, 19 nt, Artificial Sequence
  Description of Artificial Sequence: Synthetic oligonucleotide
gaugcuacuuuaaccccua

SEQ ID NO: 1338943 - RNA, 19 nt, Artificial Sequence
  Description of Artificial Sequence: Synthetic oligonucleotide
caucacuucgucgcugcuc

SEQ ID NO: 1338944 - RNA, 19 nt, Artificial Sequence
  Description of Artificial Sequence: Synthetic oligonucleotide
caccaggucucgacggaug

SEQ ID NO: 1338945 - RNA, 19 nt, Artificial Sequence
  Description of Artificial Sequence: Synthetic oligonucleotide
guaggggagcaacugauuu

SEQ ID NO: 1338946 - RNA, 19 nt, Artificial Sequence
  Description of Artificial Sequence: Synthetic oligonucleotide
caugacgguacgguacauc

SEQ ID NO: 1338947 - RNA, 19 nt, Artificial Sequence
  Description of Artificial Sequence: Synthetic oligonucleotide
cccaaaguuggggaucucg

SEQ ID NO: 1338948 - RNA, 19 nt, Artificial Sequence
  Description of Artificial Sequence: Synthetic oligonucleotide
aucucgaugugcagcauuu

SEQ ID NO: 1338949 - RNA, 19 nt, Artificial Sequence
  Description of Artificial Sequence: Synthetic oligonucleotide
cacacacacacacgccauc

SEQ ID NO: 1338950 - RNA, 19 nt, Artificial Sequence
  Description of Artificial Sequence: Synthetic oligonucleotide
agcggcuuuccaggggcac

SEQ ID NO: 1338951 - RNA, 19 nt, Artificial Sequence
  Description of Artificial Sequence: Synthetic oligonucleotide
aguggagcuauuggccagu

SEQ ID NO: 1338952 - RNA, 19 nt, Artificial Sequence
  Description of Artificial Sequence: Synthetic oligonucleotide
uugagacauggcgggugcc

SEQ ID NO: 1338953 - RNA, 19 nt, Artificial Sequence
  Description of Artificial Sequence: Synthetic oligonucleotide
gacguucacagcaucaguu

SEQ ID NO: 1338954 - RNA, 19 nt, Artificial Sequence
  Description of Artificial Sequence: Synthetic oligonucleotide
ccgcucuacaaugugcugg

SEQ ID NO: 1338955 - RNA, 19 nt, Artificial Sequence
  Description of Artificial Sequence: Synthetic oligonucleotide
ggggaucucgaugugcagc

SEQ ID NO: 1338956 - RNA, 19 nt, Artificial Sequence
  Description of Artificial Sequence: Synthetic oligonucleotide
caacgugggacagacugga

SEQ ID NO: 1338957 - RNA, 19 nt, Artificial Sequence
  Description of Artificial Sequence: Synthetic oligonucleotide
gauguagaccccggaaccu

SEQ ID NO: 1338958 - RNA, 19 nt, Artificial Sequence
  Description of Artificial Sequence: Synthetic oligonucleotide
gcaacugauuuuauuaacu

SEQ ID NO: 1338959 - RNA, 19 nt, Artificial Sequence
  Description of Artificial Sequence: Synthetic oligonucleotide
ugguucugugaagcccucc

SEQ ID NO: 1338960 - RNA, 19 nt, Artificial Sequence
  Description of Artificial Sequence: Synthetic oligonucleotide
ugcucagaucgacguucac

SEQ ID NO: 1338961 - RNA, 19 nt, Artificial Sequence
  Description of Artificial Sequence: Synthetic oligonucleotide
ggccuuaauguacucaccu

SEQ ID NO: 1338962 - RNA, 19 nt, Artificial Sequence
  Description of Artificial Sequence: Synthetic oligonucleotide
cucggcuguccaguggagc

SEQ ID NO: 1338963 - RNA, 19 nt, Artificial Sequence
  Description of Artificial Sequence: Synthetic oligonucleotide
gaccccggaaccugcuaca

SEQ ID NO: 1338964 - RNA, 19 nt, Artificial Sequence
  Description of Artificial Sequence: Synthetic oligonucleotide
acaugcacacacacacaca

SEQ ID NO: 1338965 - RNA, 19 nt, Artificial Sequence
  Description of Artificial Sequence: Synthetic oligonucleotide
cuacaaugugcuggaucug

SEQ ID NO: 1338966 - RNA, 19 nt, Artificial Sequence
  Description of Artificial Sequence: Synthetic oligonucleotide
cugaagggacgaauguucu

SEQ ID NO: 1338967 - RNA, 19 nt, Artificial Sequence
  Description of Artificial Sequence: Synthetic oligonucleotide
cugccguguacaugaccac

SEQ ID NO: 1338968 - RNA, 19 nt, Artificial Sequence
  Description of Artificial Sequence: Synthetic oligonucleotide
gaucacccuccgaguagag

SEQ ID NO: 1338969 - RNA, 19 nt, Artificial Sequence
  Description of Artificial Sequence: Synthetic oligonucleotide
uuucggacacggcgagcau

SEQ ID NO: 1338970 - RNA, 19 nt, Artificial Sequence
  Description of Artificial Sequence: Synthetic oligonucleotide
uggcagcgguacccaaucu

SEQ ID NO: 1338971 - RNA, 19 nt, Artificial Sequence
  Description of Artificial Sequence: Synthetic oligonucleotide
aggaagccugccguguaca

SEQ ID NO: 1338972 - RNA, 19 nt, Artificial Sequence
  Description of Artificial Sequence: Synthetic oligonucleotide
gacgaauguucuccuugua

SEQ ID NO: 1338973 - RNA, 19 nt, Artificial Sequence
  Description of Artificial Sequence: Synthetic oligonucleotide
cuggcaacucgaaugcacu

SEQ ID NO: 1338974 - RNA, 19 nt, Artificial Sequence
  Description of Artificial Sequence: Synthetic oligonucleotide
agaucgacguucacagcau

SEQ ID NO: 1338975 - RNA, 19 nt, Artificial Sequence
  Description of Artificial Sequence: Synthetic oligonucleotide
acgccaucagcaggcagug

SEQ ID NO: 1338976 - RNA, 19 nt, Artificial Sequence
  Description of Artificial Sequence: Synthetic oligonucleotide
acacacacacacacacaca

SEQ ID NO: 1338977 - RNA, 19 nt, Artificial Sequence
  Description of Artificial Sequence: Synthetic oligonucleotide
ucacuucgucgcugcucag

SEQ ID NO: 1338978 - RNA, 19 nt, Artificial Sequence
  Description of Artificial Sequence: Synthetic oligonucleotide
gucaugaguuaugaugcua

SEQ ID NO: 1338979 - RNA, 19 nt, Artificial Sequence
  Description of Artificial Sequence: Synthetic oligonucleotide
gcuauuggccaguuguugu

SEQ ID NO: 1338980 - RNA, 19 nt, Artificial Sequence
  Description of Artificial Sequence: Synthetic oligonucleotide
uucggacacggcgagcauu

SEQ ID NO: 1338981 - RNA, 19 nt, Artificial Sequence
  Description of Artificial Sequence: Synthetic oligonucleotide
ggacucggcuguccagugg

SEQ ID NO: 1338982 - RNA, 19 nt, Artificial Sequence
  Description of Artificial Sequence: Synthetic oligonucleotide
acacaugcacacacacaca

SEQ ID NO: 1338983 - RNA, 19 nt, Artificial Sequence
  Description of Artificial Sequence: Synthetic oligonucleotide
aaccugcuacaagcuccag

SEQ ID NO: 1338984 - RNA, 19 nt, Artificial Sequence
  Description of Artificial Sequence: Synthetic oligonucleotide
gaucucgaugugcagcauu

SEQ ID NO: 1338985 - RNA, 19 nt, Artificial Sequence
  Description of Artificial Sequence: Synthetic oligonucleotide
cuuuccaggggcaccggcu

SEQ ID NO: 1338986 - RNA, 19 nt, Artificial Sequence
  Description of Artificial Sequence: Synthetic oligonucleotide
aggucucgacggaugagga

SEQ ID NO: 1338987 - RNA, 19 nt, Artificial Sequence
  Description of Artificial Sequence: Synthetic oligonucleotide
cugugaagcccuccuuaga

SEQ ID NO: 1338988 - RNA, 19 nt, Artificial Sequence
  Description of Artificial Sequence: Synthetic oligonucleotide
ugcagcgaucacguucauc

SEQ ID NO: 1338989 - RNA, 19 nt, Artificial Sequence
  Description of Artificial Sequence: Synthetic oligonucleotide
acacacacacacacgccau

SEQ ID NO: 1338990 - RNA, 19 nt, Artificial Sequence
  Description of Artificial Sequence: Synthetic oligonucleotide
gcauucaggacucggcugu

SEQ ID NO: 1338991 - RNA, 19 nt, Artificial Sequence
  Description of Artificial Sequence: Synthetic oligonucleotide
cagcgaucacguucaucuc

SEQ ID NO: 1338992 - RNA, 19 nt, Artificial Sequence
  Description of Artificial Sequence: Synthetic oligonucleotide
acuggccgccauggugagc

SEQ ID NO: 1338993 - RNA, 19 nt, Artificial Sequence
  Description of Artificial Sequence: Synthetic oligonucleotide
cgugugauguagaccccgg

SEQ ID NO: 1338994 - RNA, 19 nt, Artificial Sequence
  Description of Artificial Sequence: Synthetic oligonucleotide
gucgcugcucagcauagau

SEQ ID NO: 1338995 - RNA, 19 nt, Artificial Sequence
  Description of Artificial Sequence: Synthetic oligonucleotide
augcacacacacacacaca

SEQ ID NO: 1338996 - RNA, 19 nt, Artificial Sequence
  Description of Artificial Sequence: Synthetic oligonucleotide
ugaccacaauggacacauc

SEQ ID NO: 1338997 - RNA, 19 nt, Artificial Sequence
  Description of Artificial Sequence: Synthetic oligonucleotide
ggccacgugugauguagac

SEQ ID NO: 1338998 - RNA, 19 nt, Artificial Sequence
  Description of Artificial Sequence: Synthetic oligonucleotide
caggaucacccuccgagua

SEQ ID NO: 1338999 - RNA, 19 nt, Artificial Sequence
  Description of Artificial Sequence: Synthetic oligonucleotide
ggucucgacggaugaggac

SEQ ID NO: 1339000 - RNA, 19 nt, Artificial Sequence
  Description of Artificial Sequence: Synthetic oligonucleotide
ccuggauaaccgagccugc

SEQ ID NO: 1339001 - RNA, 19 nt, Artificial Sequence
  Description of Artificial Sequence: Synthetic oligonucleotide
gccacgugugauguagacc

SEQ ID NO: 1339002 - RNA, 19 nt, Artificial Sequence
  Description of Artificial Sequence: Synthetic oligonucleotide
ggcaguucaugagcuggcc

SEQ ID NO: 1339003 - RNA, 19 nt, Artificial Sequence
  Description of Artificial Sequence: Synthetic oligonucleotide
cgacggaugaggacacagg

SEQ ID NO: 1339004 - RNA, 19 nt, Artificial Sequence
  Description of Artificial Sequence: Synthetic oligonucleotide
caagcacuguguucccaaa

SEQ ID NO: 1339005 - RNA, 19 nt, Artificial Sequence
  Description of Artificial Sequence: Synthetic oligonucleotide
aguuuccuguggccuuaau

SEQ ID NO: 1339006 - RNA, 19 nt, Artificial Sequence
  Description of Artificial Sequence: Synthetic oligonucleotide
ggcccuugaccacaaugga

SEQ ID NO: 1339007 - RNA, 19 nt, Artificial Sequence
  Description of Artificial Sequence: Synthetic oligonucleotide
guacccaaucuggcugaug

SEQ ID NO: 1339008 - RNA, 19 nt, Artificial Sequence
  Description of Artificial Sequence: Synthetic oligonucleotide
ggaucacccuccgaguaga

SEQ ID NO: 1339009 - RNA, 19 nt, Artificial Sequence
  Description of Artificial Sequence: Synthetic oligonucleotide
cuauuggccaguuguuguu

SEQ ID NO: 1339010 - RNA, 19 nt, Artificial Sequence
  Description of Artificial Sequence: Synthetic oligonucleotide
agccacccagagcauucaa

SEQ ID NO: 1339011 - RNA, 19 nt, Artificial Sequence
  Description of Artificial Sequence: Synthetic oligonucleotide
gcccuugaccacaauggac

SEQ ID NO: 1339012 - RNA, 19 nt, Artificial Sequence
  Description of Artificial Sequence: Synthetic oligonucleotide
cccagagcauucaagucaa

SEQ ID NO: 1339013 - RNA, 19 nt, Artificial Sequence
  Description of Artificial Sequence: Synthetic oligonucleotide
acauggcgggugccguggu

SEQ ID NO: 1339014 - RNA, 19 nt, Artificial Sequence
  Description of Artificial Sequence: Synthetic oligonucleotide
caccugugaagcagcaggu

SEQ ID NO: 1339015 - RNA, 19 nt, Artificial Sequence
  Description of Artificial Sequence: Synthetic oligonucleotide
cagcgcuuucggacacggc

SEQ ID NO: 1339016 - RNA, 19 nt, Artificial Sequence
  Description of Artificial Sequence: Synthetic oligonucleotide
ggcgcugcucauucagaca

SEQ ID NO: 1339017 - RNA, 19 nt, Artificial Sequence
  Description of Artificial Sequence: Synthetic oligonucleotide
ccuccgaguagagcuuugg

SEQ ID NO: 1339018 - RNA, 19 nt, Artificial Sequence
  Description of Artificial Sequence: Synthetic oligonucleotide
gugcucagaucgacguuca

SEQ ID NO: 1339019 - RNA, 19 nt, Artificial Sequence
  Description of Artificial Sequence: Synthetic oligonucleotide
ccguguacaugaccacgag

SEQ ID NO: 1339020 - RNA, 19 nt, Artificial Sequence
  Description of Artificial Sequence: Synthetic oligonucleotide
acucggcuguccaguggag

SEQ ID NO: 1339021 - RNA, 19 nt, Artificial Sequence
  Description of Artificial Sequence: Synthetic oligonucleotide
gccguguacaugaccacga

SEQ ID NO: 1339022 - RNA, 19 nt, Artificial Sequence
  Description of Artificial Sequence: Synthetic oligonucleotide
ggugggaacucagggucca

SEQ ID NO: 1339023 - RNA, 19 nt, Artificial Sequence
  Description of Artificial Sequence: Synthetic oligonucleotide
gccugccguguacaugacc

SEQ ID NO: 1339024 - RNA, 19 nt, Artificial Sequence
  Description of Artificial Sequence: Synthetic oligonucleotide
ggcaacucgaaugcacucu

SEQ ID NO: 1339025 - RNA, 19 nt, Artificial Sequence
  Description of Artificial Sequence: Synthetic oligonucleotide
cuugccuguguagcagaaa

SEQ ID NO: 1339026 - RNA, 19 nt, Artificial Sequence
  Description of Artificial Sequence: Synthetic oligonucleotide
ugcgcacagguggcaguuc

SEQ ID NO: 1339027 - RNA, 19 nt, Artificial Sequence
  Description of Artificial Sequence: Synthetic oligonucleotide
gccccgcucuacaaugugc

SEQ ID NO: 1339028 - RNA, 19 nt, Artificial Sequence
  Description of Artificial Sequence: Synthetic oligonucleotide
gagcuauuggccaguuguu

SEQ ID NO: 1339029 - RNA, 19 nt, Artificial Sequence
  Description of Artificial Sequence: Synthetic oligonucleotide
accccggaaccugcuacaa

SEQ ID NO: 1339030 - RNA, 19 nt, Artificial Sequence
  Description of Artificial Sequence: Synthetic oligonucleotide
cucggaaauagaggcugcu

SEQ ID NO: 1339031 - RNA, 19 nt, Artificial Sequence
  Description of Artificial Sequence: Synthetic oligonucleotide
acucaacgugggacagacu

SEQ ID NO: 1339032 - RNA, 19 nt, Artificial Sequence
  Description of Artificial Sequence: Synthetic oligonucleotide
gcacacacacacacacaca

SEQ ID NO: 1339033 - RNA, 19 nt, Artificial Sequence
  Description of Artificial Sequence: Synthetic oligonucleotide
cgcucuacaaugugcugga

SEQ ID NO: 1339034 - RNA, 19 nt, Artificial Sequence
  Description of Artificial Sequence: Synthetic oligonucleotide
ccuuagagguaggggagca

SEQ ID NO: 1339035 - RNA, 19 nt, Artificial Sequence
  Description of Artificial Sequence: Synthetic oligonucleotide
acccuccgaguagagcuuu

SEQ ID NO: 1339036 - RNA, 19 nt, Artificial Sequence
  Description of Artificial Sequence: Synthetic oligonucleotide
auccucucuuagguccuuu

SEQ ID NO: 1339037 - RNA, 19 nt, Artificial Sequence
  Description of Artificial Sequence: Synthetic oligonucleotide
cccgcucuacaaugugcug

SEQ ID NO: 1339038 - RNA, 19 nt, Artificial Sequence
  Description of Artificial Sequence: Synthetic oligonucleotide
gcaacucgaaugcacucuu

SEQ ID NO: 1339039 - RNA, 19 nt, Artificial Sequence
  Description of Artificial Sequence: Synthetic oligonucleotide
gcgcuuucggacacggcga

SEQ ID NO: 1339040 - RNA, 19 nt, Artificial Sequence
  Description of Artificial Sequence: Synthetic oligonucleotide
cuggaucugcaggaagccu

SEQ ID NO: 1339041 - RNA, 19 nt, Artificial Sequence
  Description of Artificial Sequence: Synthetic oligonucleotide
ggaagccaagauguggcau

SEQ ID NO: 1339042 - RNA, 19 nt, Artificial Sequence
  Description of Artificial Sequence: Synthetic oligonucleotide
cgguacgguacaucuccac

SEQ ID NO: 1339043 - RNA, 19 nt, Artificial Sequence
  Description of Artificial Sequence: Synthetic oligonucleotide
ggucucggaaauagaggcu

SEQ ID NO: 1339044 - RNA, 19 nt, Artificial Sequence
  Description of Artificial Sequence: Synthetic oligonucleotide
ccccggaaccugcuacaag

SEQ ID NO: 1339045 - RNA, 19 nt, Artificial Sequence
  Description of Artificial Sequence: Synthetic oligonucleotide
cgcuuucggacacggcgag

SEQ ID NO: 1339046 - RNA, 19 nt, Artificial Sequence
  Description of Artificial Sequence: Synthetic oligonucleotide
gcuuucggacacggcgagc

SEQ ID NO: 1339047 - RNA, 19 nt, Artificial Sequence
  Description of Artificial Sequence: Synthetic oligonucleotide
acugcacggugggccuuga

SEQ ID NO: 1339048 - RNA, 19 nt, Artificial Sequence
  Description of Artificial Sequence: Synthetic oligonucleotide
guagaccccggaaccugcu

SEQ ID NO: 1339049 - RNA, 19 nt, Artificial Sequence
  Description of Artificial Sequence: Synthetic oligonucleotide
ccacugaagggacgaaugu

SEQ ID NO: 1339050 - RNA, 19 nt, Artificial Sequence
  Description of Artificial Sequence: Synthetic oligonucleotide
ccuagacagugccuucaaa

SEQ ID NO: 1339051 - RNA, 19 nt, Artificial Sequence
  Description of Artificial Sequence: Synthetic oligonucleotide
gccagcgcuuucggacacg

SEQ ID NO: 1339052 - RNA, 19 nt, Artificial Sequence
  Description of Artificial Sequence: Synthetic oligonucleotide
ggaagccugccguguacau

SEQ ID NO: 1339053 - RNA, 19 nt, Artificial Sequence
  Description of Artificial Sequence: Synthetic oligonucleotide
cccuccgaguagagcuuug

SEQ ID NO: 1339054 - RNA, 19 nt, Artificial Sequence
  Description of Artificial Sequence: Synthetic oligonucleotide
gccguggugggugggcuuc

SEQ ID NO: 1339055 - RNA, 19 nt, Artificial Sequence
  Description of Artificial Sequence: Synthetic oligonucleotide
cugugccccgcucuacaau

SEQ ID NO: 1339056 - RNA, 19 nt, Artificial Sequence
  Description of Artificial Sequence: Synthetic oligonucleotide
cagacuggaugaggcacau

SEQ ID NO: 1339057 - RNA, 19 nt, Artificial Sequence
  Description of Artificial Sequence: Synthetic oligonucleotide
cugaggcacccaugacggu

SEQ ID NO: 1339058 - RNA, 19 nt, Artificial Sequence
  Description of Artificial Sequence: Synthetic oligonucleotide
gguaggggagcaacugauu

SEQ ID NO: 1339059 - RNA, 19 nt, Artificial Sequence
  Description of Artificial Sequence: Synthetic oligonucleotide
cccuagacagugccuucaa

SEQ ID NO: 1339060 - RNA, 19 nt, Artificial Sequence
  Description of Artificial Sequence: Synthetic oligonucleotide
gugccccgcucuacaaugu

SEQ ID NO: 1339061 - RNA, 19 nt, Artificial Sequence
  Description of Artificial Sequence: Synthetic oligonucleotide
cugcacggugggccuugaa

SEQ ID NO: 1339062 - RNA, 19 nt, Artificial Sequence
  Description of Artificial Sequence: Synthetic oligonucleotide
ggguggcagcgguacccaa

SEQ ID NO: 1339063 - RNA, 19 nt, Artificial Sequence
  Description of Artificial Sequence: Synthetic oligonucleotide
cagugccaccaggucucga

SEQ ID NO: 1339064 - RNA, 19 nt, Artificial Sequence
  Description of Artificial Sequence: Synthetic oligonucleotide
cugcgcacagguggcaguu

SEQ ID NO: 1339065 - RNA, 19 nt, Artificial Sequence
  Description of Artificial Sequence: Synthetic oligonucleotide
ccuccgcagcaggaccuug

SEQ ID NO: 1339066 - RNA, 19 nt, Artificial Sequence
  Description of Artificial Sequence: Synthetic oligonucleotide
caccggcucuggcuucucu

SEQ ID NO: 1339067 - RNA, 19 nt, Artificial Sequence
  Description of Artificial Sequence: Synthetic oligonucleotide
ccugcgcacagguggcagu

SEQ ID NO: 1339068 - RNA, 19 nt, Artificial Sequence
  Description of Artificial Sequence: Synthetic oligonucleotide
gguacccaaucuggcugau

SEQ ID NO: 1339069 - RNA, 19 nt, Artificial Sequence
  Description of Artificial Sequence: Synthetic oligonucleotide
gcugcucacuggccgccau

SEQ ID NO: 1339070 - RNA, 19 nt, Artificial Sequence
  Description of Artificial Sequence: Synthetic oligonucleotide
ggaucucgaugugcagcau

SEQ ID NO: 1339071 - RNA, 19 nt, Artificial Sequence
  Description of Artificial Sequence: Synthetic oligonucleotide
gcucuacaaugugcuggau

SEQ ID NO: 1339072 - RNA, 19 nt, Artificial Sequence
  Description of Artificial Sequence: Synthetic oligonucleotide
cgaaugcacucuugcuauu

SEQ ID NO: 1339073 - RNA, 19 nt, Artificial Sequence
  Description of Artificial Sequence: Synthetic oligonucleotide
cgucgcugcucagcauaga

SEQ ID NO: 1339074 - RNA, 19 nt, Artificial Sequence
  Description of Artificial Sequence: Synthetic oligonucleotide
ccguggugggugggcuuca

SEQ ID NO: 1339075 - RNA, 19 nt, Artificial Sequence
  Description of Artificial Sequence: Synthetic oligonucleotide
ggcgggugccguggugggu

SEQ ID NO: 1339076 - RNA, 19 nt, Artificial Sequence
  Description of Artificial Sequence: Synthetic oligonucleotide
ccccugcgcacagguggca

SEQ ID NO: 1339077 - RNA, 19 nt, Artificial Sequence
  Description of Artificial Sequence: Synthetic oligonucleotide
ggacugcacggugggccuu

SEQ ID NO: 1339078 - RNA, 19 nt, Artificial Sequence
  Description of Artificial Sequence: Synthetic oligonucleotide
ccaugacgguacgguacau

SEQ ID NO: 1339079 - RNA, 19 nt, Artificial Sequence
  Description of Artificial Sequence: Synthetic oligonucleotide
gccuccgcagcaggaccuu

SEQ ID NO: 1339080 - RNA, 19 nt, Artificial Sequence
  Description of Artificial Sequence: Synthetic oligonucleotide
aauaacaccaccaaaacgg

SEQ ID NO: 1339081 - RNA, 19 nt, Artificial Sequence
  Description of Artificial Sequence: Synthetic oligonucleotide
uaagguaccagccauaggg

SEQ ID NO: 1339082 - RNA, 19 nt, Artificial Sequence
  Description of Artificial Sequence: Synthetic oligonucleotide
uucuauuuuaaauagacug

SEQ ID NO: 1339083 - RNA, 19 nt, Artificial Sequence
  Description of Artificial Sequence: Synthetic oligonucleotide
acucuuauaacagagaagc

SEQ ID NO: 1339084 - RNA, 19 nt, Artificial Sequence
  Description of Artificial Sequence: Synthetic oligonucleotide
aauagacugccucagugcc

SEQ ID NO: 1339085 - RNA, 19 nt, Artificial Sequence
  Description of Artificial Sequence: Synthetic oligonucleotide
auguauacaaaaccgaucg

SEQ ID NO: 1339086 - RNA, 19 nt, Artificial Sequence
  Description of Artificial Sequence: Synthetic oligonucleotide
uaaguauccauaaauuagg

SEQ ID NO: 1339087 - RNA, 19 nt, Artificial Sequence
  Description of Artificial Sequence: Synthetic oligonucleotide
ucuauuaggccaaauauug

SEQ ID NO: 1339088 - RNA, 19 nt, Artificial Sequence
  Description of Artificial Sequence: Synthetic oligonucleotide
aaauagacugccucagugc

SEQ ID NO: 1339089 - RNA, 19 nt, Artificial Sequence
  Description of Artificial Sequence: Synthetic oligonucleotide
  modified_base (16)..(16): a, c, u, g, unknown or other
uucaauaacaaauuunuua

SEQ ID NO: 1339090 - RNA, 19 nt, Artificial Sequence
  Description of Artificial Sequence: Synthetic oligonucleotide
aaauaugccaagcacaacu

SEQ ID NO: 1339091 - RNA, 19 nt, Artificial Sequence
  Description of Artificial Sequence: Synthetic oligonucleotide
uuuaucagauuguacaccg

SEQ ID NO: 1339092 - RNA, 19 nt, Artificial Sequence
  Description of Artificial Sequence: Synthetic oligonucleotide
aaaaccaucucagaguugg

SEQ ID NO: 1339093 - RNA, 19 nt, Artificial Sequence
  Description of Artificial Sequence: Synthetic oligonucleotide
  modified_base (10)..(10): a, c, u, g, unknown or other
aacaaauuunuuaaacauc

SEQ ID NO: 1339094 - RNA, 19 nt, Artificial Sequence
  Description of Artificial Sequence: Synthetic oligonucleotide
uuuaaucagggccagaaca

SEQ ID NO: 1339095 - RNA, 19 nt, Artificial Sequence
  Description of Artificial Sequence: Synthetic oligonucleotide
caaauauugaguagaaugc

SEQ ID NO: 1339096 - RNA, 19 nt, Artificial Sequence
  Description of Artificial Sequence: Synthetic oligonucleotide
ugaacguucccaaugacag

SEQ ID NO: 1339097 - RNA, 19 nt, Artificial Sequence
  Description of Artificial Sequence: Synthetic oligonucleotide
acuaagguaagguaccagc

SEQ ID NO: 1339098 - RNA, 19 nt, Artificial Sequence
  Description of Artificial Sequence: Synthetic oligonucleotide
uuguuuaucagauuguaca

SEQ ID NO: 1339099 - RNA, 19 nt, Artificial Sequence
  Description of Artificial Sequence: Synthetic oligonucleotide
auaaaugaaugcuauuuuc

SEQ ID NO: 1339100 - RNA, 19 nt, Artificial Sequence
  Description of Artificial Sequence: Synthetic oligonucleotide
uuugcuguaaacauugaga

SEQ ID NO: 1339101 - RNA, 19 nt, Artificial Sequence
  Description of Artificial Sequence: Synthetic oligonucleotide
aauugaugaaugauuauuc

SEQ ID NO: 1339102 - RNA, 19 nt, Artificial Sequence
  Description of Artificial Sequence: Synthetic oligonucleotide
acaggaaucaguuuugcag

SEQ ID NO: 1339103 - RNA, 19 nt, Artificial Sequence
  Description of Artificial Sequence: Synthetic oligonucleotide
uauuaggccaaauauugag

SEQ ID NO: 1339104 - RNA, 19 nt, Artificial Sequence
  Description of Artificial Sequence: Synthetic oligonucleotide
agagaagcaauuuaaauaa

SEQ ID NO: 1339105 - RNA, 19 nt, Artificial Sequence
  Description of Artificial Sequence: Synthetic oligonucleotide
ugaugaaugauuauucccu

SEQ ID NO: 1339106 - RNA, 19 nt, Artificial Sequence
  Description of Artificial Sequence: Synthetic oligonucleotide
ucgaguaugaauacaaaac

SEQ ID NO: 1339107 - RNA, 19 nt, Artificial Sequence
  Description of Artificial Sequence: Synthetic oligonucleotide
aaugagauuccaaaguauc

SEQ ID NO: 1339108 - RNA, 19 nt, Artificial Sequence
  Description of Artificial Sequence: Synthetic oligonucleotide
ucuccuuuuguccugaaug

SEQ ID NO: 1339109 - RNA, 19 nt, Artificial Sequence
  Description of Artificial Sequence: Synthetic oligonucleotide
ucuuugaacaaaaugccac

SEQ ID NO: 1339110 - RNA, 19 nt, Artificial Sequence
  Description of Artificial Sequence: Synthetic oligonucleotide
uaaaauuuggugcaaucgu

SEQ ID NO: 1339111 - RNA, 19 nt, Artificial Sequence
  Description of Artificial Sequence: Synthetic oligonucleotide
aaugguuuagcaaagaaua

SEQ ID NO: 1339112 - RNA, 19 nt, Artificial Sequence
  Description of Artificial Sequence: Synthetic oligonucleotide
aaggcguagccauagguuc

SEQ ID NO: 1339113 - RNA, 19 nt, Artificial Sequence
  Description of Artificial Sequence: Synthetic oligonucleotide
  modified_base (6)..(6): a, c, u, g, unknown or other
aauuunuuaaacaucuuaa

SEQ ID NO: 1339114 - RNA, 19 nt, Artificial Sequence
  Description of Artificial Sequence: Synthetic oligonucleotide
uauugaaacauguccuggg

SEQ ID NO: 1339115 - RNA, 19 nt, Artificial Sequence
  Description of Artificial Sequence: Synthetic oligonucleotide
  modified_base (9)..(9): a, c, u, g, unknown or other
acaaauuunuuaaacaucu

SEQ ID NO: 1339116 - RNA, 19 nt, Artificial Sequence
  Description of Artificial Sequence: Synthetic oligonucleotide
aacgaaaggacuaugguca

SEQ ID NO: 1339117 - RNA, 19 nt, Artificial Sequence
  Description of Artificial Sequence: Synthetic oligonucleotide
ugcccuacuacacagcccg

SEQ ID NO: 1339118 - RNA, 19 nt, Artificial Sequence
  Description of Artificial Sequence: Synthetic oligonucleotide
cauagcuuucuccugaacg

SEQ ID NO: 1339119 - RNA, 19 nt, Artificial Sequence
  Description of Artificial Sequence: Synthetic oligonucleotide
uuucucuagacuuuaaauc

SEQ ID NO: 1339120 - RNA, 19 nt, Artificial Sequence
  Description of Artificial Sequence: Synthetic oligonucleotide
gguucuuugaacaaaaugc

SEQ ID NO: 1339121 - RNA, 19 nt, Artificial Sequence
  Description of Artificial Sequence: Synthetic oligonucleotide
guaaguauccauaaauuag

SEQ ID NO: 1339122 - RNA, 19 nt, Artificial Sequence
  Description of Artificial Sequence: Synthetic oligonucleotide
uugaugaaugauuauuccc

SEQ ID NO: 1339123 - RNA, 19 nt, Artificial Sequence
  Description of Artificial Sequence: Synthetic oligonucleotide
aaauguucaggacacugcu

SEQ ID NO: 1339124 - RNA, 19 nt, Artificial Sequence
  Description of Artificial Sequence: Synthetic oligonucleotide
ugagcugaaguucuauuag

SEQ ID NO: 1339125 - RNA, 19 nt, Artificial Sequence
  Description of Artificial Sequence: Synthetic oligonucleotide
caaaccagaccauacauac

SEQ ID NO: 1339126 - RNA, 19 nt, Artificial Sequence
  Description of Artificial Sequence: Synthetic oligonucleotide
acaaaugagauuccaaagu

SEQ ID NO: 1339127 - RNA, 19 nt, Artificial Sequence
  Description of Artificial Sequence: Synthetic oligonucleotide
aaugcaaauugcacuaagg

SEQ ID NO: 1339128 - RNA, 19 nt, Artificial Sequence
  Description of Artificial Sequence: Synthetic oligonucleotide
uagaaaagcuauuaucaug

SEQ ID NO: 1339129 - RNA, 19 nt, Artificial Sequence
  Description of Artificial Sequence: Synthetic oligonucleotide
gauuccaaaguauccagug

SEQ ID NO: 1339130 - RNA, 19 nt, Artificial Sequence
  Description of Artificial Sequence: Synthetic oligonucleotide
ucgucaacugacuugaugu

SEQ ID NO: 1339131 - RNA, 19 nt, Artificial Sequence
  Description of Artificial Sequence: Synthetic oligonucleotide
acuagugcacgacaauccc

SEQ ID NO: 1339132 - RNA, 19 nt, Artificial Sequence
  Description of Artificial Sequence: Synthetic oligonucleotide
uuauaaaugaaugcuauuu

SEQ ID NO: 1339133 - RNA, 19 nt, Artificial Sequence
  Description of Artificial Sequence: Synthetic oligonucleotide
uguaaguauccauaaauua

SEQ ID NO: 1339134 - RNA, 19 nt, Artificial Sequence
  Description of Artificial Sequence: Synthetic oligonucleotide
aaaauguauacaaaaccga

SEQ ID NO: 1339135 - RNA, 19 nt, Artificial Sequence
  Description of Artificial Sequence: Synthetic oligonucleotide
aaugugaaugguuuagcaa

SEQ ID NO: 1339136 - RNA, 19 nt, Artificial Sequence
  Description of Artificial Sequence: Synthetic oligonucleotide
uucagguagcccaaggaag

SEQ ID NO: 1339137 - RNA, 19 nt, Artificial Sequence
  Description of Artificial Sequence: Synthetic oligonucleotide
ugucagauuaaaauuuggu

SEQ ID NO: 1339138 - RNA, 19 nt, Artificial Sequence
  Description of Artificial Sequence: Synthetic oligonucleotide
aagcacaacuaacaaacca

SEQ ID NO: 1339139 - RNA, 19 nt, Artificial Sequence
  Description of Artificial Sequence: Synthetic oligonucleotide
agugcccuacuacacagcc

SEQ ID NO: 1339140 - RNA, 19 nt, Artificial Sequence
  Description of Artificial Sequence: Synthetic oligonucleotide
aguacccacaguuagaaaa

SEQ ID NO: 1339141 - RNA, 19 nt, Artificial Sequence
  Description of Artificial Sequence: Synthetic oligonucleotide
aagauuuuaaucagggcca

SEQ ID NO: 1339142 - RNA, 19 nt, Artificial Sequence
  Description of Artificial Sequence: Synthetic oligonucleotide
aaagucaauugaugaauga

SEQ ID NO: 1339143 - RNA, 19 nt, Artificial Sequence
  Description of Artificial Sequence: Synthetic oligonucleotide
ugaaaugugaaugguuuag

SEQ ID NO: 1339144 - RNA, 19 nt, Artificial Sequence
  Description of Artificial Sequence: Synthetic oligonucleotide
ucuuauaacagagaagcaa

SEQ ID NO: 1339145 - RNA, 19 nt, Artificial Sequence
  Description of Artificial Sequence: Synthetic oligonucleotide
uugagaaauaugccaagca

SEQ ID NO: 1339146 - RNA, 19 nt, Artificial Sequence
  Description of Artificial Sequence: Synthetic oligonucleotide
aagguuguaacgcuuuccu

SEQ ID NO: 1339147 - RNA, 19 nt, Artificial Sequence
  Description of Artificial Sequence: Synthetic oligonucleotide
agcuuguuaaacuugcuga

SEQ ID NO: 1339148 - RNA, 19 nt, Artificial Sequence
  Description of Artificial Sequence: Synthetic oligonucleotide
uaaacgaaaggacuauggu

SEQ ID NO: 1339149 - RNA, 19 nt, Artificial Sequence
  Description of Artificial Sequence: Synthetic oligonucleotide
aaauauugaguagaaugca

SEQ ID NO: 1339150 - RNA, 19 nt, Artificial Sequence
  Description of Artificial Sequence: Synthetic oligonucleotide
aaucagucuugcaacacgg

SEQ ID NO: 1339151 - RNA, 19 nt, Artificial Sequence
  Description of Artificial Sequence: Synthetic oligonucleotide
ugcacacagagccagggag

SEQ ID NO: 1339152 - RNA, 19 nt, Artificial Sequence
  Description of Artificial Sequence: Synthetic oligonucleotide
uguuuaucagauuguacac

SEQ ID NO: 1339153 - RNA, 19 nt, Artificial Sequence
  Description of Artificial Sequence: Synthetic oligonucleotide
agggagaugagcaucacac

SEQ ID NO: 1339154 - RNA, 19 nt, Artificial Sequence
  Description of Artificial Sequence: Synthetic oligonucleotide
aaaccgaucgaguaugaau

SEQ ID NO: 1339155 - RNA, 19 nt, Artificial Sequence
  Description of Artificial Sequence: Synthetic oligonucleotide
ucaacugacuugaugugug

SEQ ID NO: 1339156 - RNA, 19 nt, Artificial Sequence
  Description of Artificial Sequence: Synthetic oligonucleotide
auaaacgaaaggacuaugg

SEQ ID NO: 1339157 - RNA, 19 nt, Artificial Sequence
  Description of Artificial Sequence: Synthetic oligonucleotide
aaaauuuggugcaaucgug

SEQ ID NO: 1339158 - RNA, 19 nt, Artificial Sequence
  Description of Artificial Sequence: Synthetic oligonucleotide
cuaagguaagguaccagcc

SEQ ID NO: 1339159 - RNA, 19 nt, Artificial Sequence
  Description of Artificial Sequence: Synthetic oligonucleotide
ugagcaucacaccugucag

SEQ ID NO: 1339160 - RNA, 19 nt, Artificial Sequence
  Description of Artificial Sequence: Synthetic oligonucleotide
uuuguuuaucagauuguac

SEQ ID NO: 1339161 - RNA, 19 nt, Artificial Sequence
  Description of Artificial Sequence: Synthetic oligonucleotide
aauugcacuaagguaaggu

SEQ ID NO: 1339162 - RNA, 19 nt, Artificial Sequence
  Description of Artificial Sequence: Synthetic oligonucleotide
aaaggacuauggucauugc

SEQ ID NO: 1339163 - RNA, 19 nt, Artificial Sequence
  Description of Artificial Sequence: Synthetic oligonucleotide
uguuugauaagcccauagu

SEQ ID NO: 1339164 - RNA, 19 nt, Artificial Sequence
  Description of Artificial Sequence: Synthetic oligonucleotide
aauuuggugcaaucgugcu

SEQ ID NO: 1339165 - RNA, 19 nt, Artificial Sequence
  Description of Artificial Sequence: Synthetic oligonucleotide
augcaaauugcacuaaggu

SEQ ID NO: 1339166 - RNA, 19 nt, Artificial Sequence
  Description of Artificial Sequence: Synthetic oligonucleotide
agacuuuaaaucauugguc

SEQ ID NO: 1339167 - RNA, 19 nt, Artificial Sequence
  Description of Artificial Sequence: Synthetic oligonucleotide
uuaaucagggccagaacaa

SEQ ID NO: 1339168 - RNA, 19 nt, Artificial Sequence
  Description of Artificial Sequence: Synthetic oligonucleotide
uagcauaacaggaaucagu

SEQ ID NO: 1339169 - RNA, 19 nt, Artificial Sequence
  Description of Artificial Sequence: Synthetic oligonucleotide
guagccauagguucgaaca

SEQ ID NO: 1339170 - RNA, 19 nt, Artificial Sequence
  Description of Artificial Sequence: Synthetic oligonucleotide
ugcaacacggucauuucca

SEQ ID NO: 1339171 - RNA, 19 nt, Artificial Sequence
  Description of Artificial Sequence: Synthetic oligonucleotide
ccaaagauuuuaaucaggg

SEQ ID NO: 1339172 - RNA, 19 nt, Artificial Sequence
  Description of Artificial Sequence: Synthetic oligonucleotide
uggucauugcuuuucuucc

SEQ ID NO: 1339173 - RNA, 19 nt, Artificial Sequence
  Description of Artificial Sequence: Synthetic oligonucleotide
uuuuggagggcacagugau

SEQ ID NO: 1339174 - RNA, 19 nt, Artificial Sequence
  Description of Artificial Sequence: Synthetic oligonucleotide
augauuauucccuuagaau

SEQ ID NO: 1339175 - RNA, 19 nt, Artificial Sequence
  Description of Artificial Sequence: Synthetic oligonucleotide
uuaggccaaauauugagua

SEQ ID NO: 1339176 - RNA, 19 nt, Artificial Sequence
  Description of Artificial Sequence: Synthetic oligonucleotide
ucaacuccuguaaguaucc

SEQ ID NO: 1339177 - RNA, 19 nt, Artificial Sequence
  Description of Artificial Sequence: Synthetic oligonucleotide
uuuggugcaaucgugcugu

SEQ ID NO: 1339178 - RNA, 19 nt, Artificial Sequence
  Description of Artificial Sequence: Synthetic oligonucleotide
ucaugcauacugcagcaga

SEQ ID NO: 1339179 - RNA, 19 nt, Artificial Sequence
  Description of Artificial Sequence: Synthetic oligonucleotide
aaggacuauggucauugcu

SEQ ID NO: 1339180 - RNA, 19 nt, Artificial Sequence
  Description of Artificial Sequence: Synthetic oligonucleotide
uucuauuaggccaaauauu

SEQ ID NO: 1339181 - RNA, 19 nt, Artificial Sequence
  Description of Artificial Sequence: Synthetic oligonucleotide
auacugccuuuauugaaac

SEQ ID NO: 1339182 - RNA, 19 nt, Artificial Sequence
  Description of Artificial Sequence: Synthetic oligonucleotide
augagcaucacaccuguca

SEQ ID NO: 1339183 - RNA, 19 nt, Artificial Sequence
  Description of Artificial Sequence: Synthetic oligonucleotide
auagugcccuacuacacag

SEQ ID NO: 1339184 - RNA, 19 nt, Artificial Sequence
  Description of Artificial Sequence: Synthetic oligonucleotide
auagguucgaacaggguuc

SEQ ID NO: 1339185 - RNA, 19 nt, Artificial Sequence
  Description of Artificial Sequence: Synthetic oligonucleotide
uaucagauuguacaccgau

SEQ ID NO: 1339186 - RNA, 19 nt, Artificial Sequence
  Description of Artificial Sequence: Synthetic oligonucleotide
cagauuaaaauuuggugca

SEQ ID NO: 1339187 - RNA, 19 nt, Artificial Sequence
  Description of Artificial Sequence: Synthetic oligonucleotide
agcacaacuaacaaaccag

SEQ ID NO: 1339188 - RNA, 19 nt, Artificial Sequence
  Description of Artificial Sequence: Synthetic oligonucleotide
gguuguaacgcuuuccuug

SEQ ID NO: 1339189 - RNA, 19 nt, Artificial Sequence
  Description of Artificial Sequence: Synthetic oligonucleotide
acaaaaccaucucagaguu

SEQ ID NO: 1339190 - RNA, 19 nt, Artificial Sequence
  Description of Artificial Sequence: Synthetic oligonucleotide
ggcuuuguuuaucagauug

SEQ ID NO: 1339191 - RNA, 19 nt, Artificial Sequence
  Description of Artificial Sequence: Synthetic oligonucleotide
uacaaaaccgaucgaguau

SEQ ID NO: 1339192 - RNA, 19 nt, Artificial Sequence
  Description of Artificial Sequence: Synthetic oligonucleotide
gaccauacauacugaaaug

SEQ ID NO: 1339193 - RNA, 19 nt, Artificial Sequence
  Description of Artificial Sequence: Synthetic oligonucleotide
uugggugggguaauucagg

SEQ ID NO: 1339194 - RNA, 19 nt, Artificial Sequence
  Description of Artificial Sequence: Synthetic oligonucleotide
gaaauguucaggacacugc

SEQ ID NO: 1339195 - RNA, 19 nt, Artificial Sequence
  Description of Artificial Sequence: Synthetic oligonucleotide
aauauugaguagaaugcaa

SEQ ID NO: 1339196 - RNA, 19 nt, Artificial Sequence
  Description of Artificial Sequence: Synthetic oligonucleotide
auuuauaaaugaaugcuau

SEQ ID NO: 1339197 - RNA, 19 nt, Artificial Sequence
  Description of Artificial Sequence: Synthetic oligonucleotide
gaaguguuugauaagccca

SEQ ID NO: 1339198 - RNA, 19 nt, Artificial Sequence
  Description of Artificial Sequence: Synthetic oligonucleotide
acuacacagcccgagcugc

SEQ ID NO: 1339199 - RNA, 19 nt, Artificial Sequence
  Description of Artificial Sequence: Synthetic oligonucleotide
cuuuaaaucauugguccac

SEQ ID NO: 1339200 - RNA, 19 nt, Artificial Sequence
  Description of Artificial Sequence: Synthetic oligonucleotide
aguucuauuaggccaaaua

SEQ ID NO: 1339201 - RNA, 19 nt, Artificial Sequence
  Description of Artificial Sequence: Synthetic oligonucleotide
aaucacaggauaauuuuau

SEQ ID NO: 1339202 - RNA, 19 nt, Artificial Sequence
  Description of Artificial Sequence: Synthetic oligonucleotide
aagucaauugaugaaugau

SEQ ID NO: 1339203 - RNA, 19 nt, Artificial Sequence
  Description of Artificial Sequence: Synthetic oligonucleotide
guuugauaagcccauagua

SEQ ID NO: 1339204 - RNA, 19 nt, Artificial Sequence
  Description of Artificial Sequence: Synthetic oligonucleotide
uuuuaaucagggccagaac

SEQ ID NO: 1339205 - RNA, 19 nt, Artificial Sequence
  Description of Artificial Sequence: Synthetic oligonucleotide
cacuagugcacgacaaucc

SEQ ID NO: 1339206 - RNA, 19 nt, Artificial Sequence
  Description of Artificial Sequence: Synthetic oligonucleotide
gauuauucccuuagaauuc

SEQ ID NO: 1339207 - RNA, 19 nt, Artificial Sequence
  Description of Artificial Sequence: Synthetic oligonucleotide
uuaaauagacugccucagu

SEQ ID NO: 1339208 - RNA, 19 nt, Artificial Sequence
  Description of Artificial Sequence: Synthetic oligonucleotide
uuuaugcccagcaccacaa

SEQ ID NO: 1339209 - RNA, 19 nt, Artificial Sequence
  Description of Artificial Sequence: Synthetic oligonucleotide
auugaaacauguccugggu

SEQ ID NO: 1339210 - RNA, 19 nt, Artificial Sequence
  Description of Artificial Sequence: Synthetic oligonucleotide
uguauacaaaaccgaucga

SEQ ID NO: 1339211 - RNA, 19 nt, Artificial Sequence
  Description of Artificial Sequence: Synthetic oligonucleotide
uuuauaaaugaaugcuauu

SEQ ID NO: 1339212 - RNA, 19 nt, Artificial Sequence
  Description of Artificial Sequence: Synthetic oligonucleotide
agacacaucugcaagguug

SEQ ID NO: 1339213 - RNA, 19 nt, Artificial Sequence
  Description of Artificial Sequence: Synthetic oligonucleotide
gaacaggguucuuugaaca

SEQ ID NO: 1339214 - RNA, 19 nt, Artificial Sequence
  Description of Artificial Sequence: Synthetic oligonucleotide
agauuguacaccgauggca

SEQ ID NO: 1339215 - RNA, 19 nt, Artificial Sequence
  Description of Artificial Sequence: Synthetic oligonucleotide
uauaaacgaaaggacuaug

SEQ ID NO: 1339216 - RNA, 19 nt, Artificial Sequence
  Description of Artificial Sequence: Synthetic oligonucleotide
ucagucuugcaacacgguc

SEQ ID NO: 1339217 - RNA, 19 nt, Artificial Sequence
  Description of Artificial Sequence: Synthetic oligonucleotide
acaaaaccgaucgaguaug

SEQ ID NO: 1339218 - RNA, 19 nt, Artificial Sequence
  Description of Artificial Sequence: Synthetic oligonucleotide
cuaggaagugcuuuccuuc

SEQ ID NO: 1339219 - RNA, 19 nt, Artificial Sequence
  Description of Artificial Sequence: Synthetic oligonucleotide
aguaugaauacaaaaccau

SEQ ID NO: 1339220 - RNA, 19 nt, Artificial Sequence
  Description of Artificial Sequence: Synthetic oligonucleotide
ucugcaagguuguaacgcu

SEQ ID NO: 1339221 - RNA, 19 nt, Artificial Sequence
  Description of Artificial Sequence: Synthetic oligonucleotide
acugccuuuauugaaacau

SEQ ID NO: 1339222 - RNA, 19 nt, Artificial Sequence
  Description of Artificial Sequence: Synthetic oligonucleotide
guguuugauaagcccauag

SEQ ID NO: 1339223 - RNA, 19 nt, Artificial Sequence
  Description of Artificial Sequence: Synthetic oligonucleotide
cagagaagcaauuuaaaua

SEQ ID NO: 1339224 - RNA, 19 nt, Artificial Sequence
  Description of Artificial Sequence: Synthetic oligonucleotide
uccugaacguucccaauga

SEQ ID NO: 1339225 - RNA, 19 nt, Artificial Sequence
  Description of Artificial Sequence: Synthetic oligonucleotide
auacaaaaccgaucgagua

SEQ ID NO: 1339226 - RNA, 19 nt, Artificial Sequence
  Description of Artificial Sequence: Synthetic oligonucleotide
auuuuaaucagggccagaa

SEQ ID NO: 1339227 - RNA, 19 nt, Artificial Sequence
  Description of Artificial Sequence: Synthetic oligonucleotide
uccugaaugagcugaaguu

SEQ ID NO: 1339228 - RNA, 19 nt, Artificial Sequence
  Description of Artificial Sequence: Synthetic oligonucleotide
aaacggaauggaaacaaaa

SEQ ID NO: 1339229 - RNA, 19 nt, Artificial Sequence
  Description of Artificial Sequence: Synthetic oligonucleotide
aaccgaucgaguaugaaua

SEQ ID NO: 1339230 - RNA, 19 nt, Artificial Sequence
  Description of Artificial Sequence: Synthetic oligonucleotide
cacucuuauaacagagaag

SEQ ID NO: 1339231 - RNA, 19 nt, Artificial Sequence
  Description of Artificial Sequence: Synthetic oligonucleotide
aacggaauggaaacaaaau

SEQ ID NO: 1339232 - RNA, 19 nt, Artificial Sequence
  Description of Artificial Sequence: Synthetic oligonucleotide
cuugggugggguaauucag

SEQ ID NO: 1339233 - RNA, 19 nt, Artificial Sequence
  Description of Artificial Sequence: Synthetic oligonucleotide
accgaucgaguaugaauac

SEQ ID NO: 1339234 - RNA, 19 nt, Artificial Sequence
  Description of Artificial Sequence: Synthetic oligonucleotide
ucccuuagaauucuauuuu

SEQ ID NO: 1339235 - RNA, 19 nt, Artificial Sequence
  Description of Artificial Sequence: Synthetic oligonucleotide
uuuaaaucauugguccacu

SEQ ID NO: 1339236 - RNA, 19 nt, Artificial Sequence
  Description of Artificial Sequence: Synthetic oligonucleotide
uauucccuuagaauucuau

SEQ ID NO: 1339237 - RNA, 19 nt, Artificial Sequence
  Description of Artificial Sequence: Synthetic oligonucleotide
uagugcacgacaaucccaa

SEQ ID NO: 1339238 - RNA, 19 nt, Artificial Sequence
  Description of Artificial Sequence: Synthetic oligonucleotide
uccacucuuauaacagaga

SEQ ID NO: 1339239 - RNA, 19 nt, Artificial Sequence
  Description of Artificial Sequence: Synthetic oligonucleotide
auugcacuaagguaaggua

SEQ ID NO: 1339240 - RNA, 19 nt, Artificial Sequence
  Description of Artificial Sequence: Synthetic oligonucleotide
aaauugcacuaagguaagg

SEQ ID NO: 1339241 - RNA, 19 nt, Artificial Sequence
  Description of Artificial Sequence: Synthetic oligonucleotide
aaguauccauaaauuaggu

SEQ ID NO: 1339242 - RNA, 19 nt, Artificial Sequence
  Description of Artificial Sequence: Synthetic oligonucleotide
auuuggugcaaucgugcug

SEQ ID NO: 1339243 - RNA, 19 nt, Artificial Sequence
  Description of Artificial Sequence: Synthetic oligonucleotide
uacuacacagcccgagcug

SEQ ID NO: 1339244 - RNA, 19 nt, Artificial Sequence
  Description of Artificial Sequence: Synthetic oligonucleotide
uuccuggaauuguugaacu

SEQ ID NO: 1339245 - RNA, 19 nt, Artificial Sequence
  Description of Artificial Sequence: Synthetic oligonucleotide
uguaacgcuuuccuugaau

SEQ ID NO: 1339246 - RNA, 19 nt, Artificial Sequence
  Description of Artificial Sequence: Synthetic oligonucleotide
ugguauucuucuccuuuug

SEQ ID NO: 1339247 - RNA, 19 nt, Artificial Sequence
  Description of Artificial Sequence: Synthetic oligonucleotide
guucgaacaggguucuuug

SEQ ID NO: 1339248 - RNA, 19 nt, Artificial Sequence
  Description of Artificial Sequence: Synthetic oligonucleotide
agggaaaagaggaaggcgu

SEQ ID NO: 1339249 - RNA, 19 nt, Artificial Sequence
  Description of Artificial Sequence: Synthetic oligonucleotide
aacgcuuuccuugaauaaa

SEQ ID NO: 1339250 - RNA, 19 nt, Artificial Sequence
  Description of Artificial Sequence: Synthetic oligonucleotide
cgaguaugaauacaaaacc

SEQ ID NO: 1339251 - RNA, 19 nt, Artificial Sequence
  Description of Artificial Sequence: Synthetic oligonucleotide
acuugggugggguaauuca

SEQ ID NO: 1339252 - RNA, 19 nt, Artificial Sequence
  Description of Artificial Sequence: Synthetic oligonucleotide
agacauacuuccuggaauu

SEQ ID NO: 1339253 - RNA, 19 nt, Artificial Sequence
  Description of Artificial Sequence: Synthetic oligonucleotide
gcacuguguaguuucauag

SEQ ID NO: 1339254 - RNA, 19 nt, Artificial Sequence
  Description of Artificial Sequence: Synthetic oligonucleotide
cagugaaauguucaggaca

SEQ ID NO: 1339255 - RNA, 19 nt, Artificial Sequence
  Description of Artificial Sequence: Synthetic oligonucleotide
ugcaaucgugcugucagcc

SEQ ID NO: 1339256 - RNA, 19 nt, Artificial Sequence
  Description of Artificial Sequence: Synthetic oligonucleotide
aagugcuuuccuucauacu

SEQ ID NO: 1339257 - RNA, 19 nt, Artificial Sequence
  Description of Artificial Sequence: Synthetic oligonucleotide
uuaucagauuguacaccga

SEQ ID NO: 1339258 - RNA, 19 nt, Artificial Sequence
  Description of Artificial Sequence: Synthetic oligonucleotide
ggguucuuugaacaaaaug

SEQ ID NO: 1339259 - RNA, 19 nt, Artificial Sequence
  Description of Artificial Sequence: Synthetic oligonucleotide
acaguuagaaaagcuauua

SEQ ID NO: 1339260 - RNA, 19 nt, Artificial Sequence
  Description of Artificial Sequence: Synthetic oligonucleotide
aacagagaagcaauuuaaa

SEQ ID NO: 1339261 - RNA, 19 nt, Artificial Sequence
  Description of Artificial Sequence: Synthetic oligonucleotide
uuggagggauucccaauca

SEQ ID NO: 1339262 - RNA, 19 nt, Artificial Sequence
  Description of Artificial Sequence: Synthetic oligonucleotide
gaaugauuauucccuuaga

SEQ ID NO: 1339263 - RNA, 19 nt, Artificial Sequence
  Description of Artificial Sequence: Synthetic oligonucleotide
caaaugagauuccaaagua

SEQ ID NO: 1339264 - RNA, 19 nt, Artificial Sequence
  Description of Artificial Sequence: Synthetic oligonucleotide
uacauacugaaaugugaau

SEQ ID NO: 1339265 - RNA, 19 nt, Artificial Sequence
  Description of Artificial Sequence: Synthetic oligonucleotide
acaccaccaaaacggaaug

SEQ ID NO: 1339266 - RNA, 19 nt, Artificial Sequence
  Description of Artificial Sequence: Synthetic oligonucleotide
auacauacugaaaugugaa

SEQ ID NO: 1339267 - RNA, 19 nt, Artificial Sequence
  Description of Artificial Sequence: Synthetic oligonucleotide
agugccuacacagucugug

SEQ ID NO: 1339268 - RNA, 19 nt, Artificial Sequence
  Description of Artificial Sequence: Synthetic oligonucleotide
auuauucccuuagaauucu

SEQ ID NO: 1339269 - RNA, 19 nt, Artificial Sequence
  Description of Artificial Sequence: Synthetic oligonucleotide
uaacgcuuuccuugaauaa

SEQ ID NO: 1339270 - RNA, 19 nt, Artificial Sequence
  Description of Artificial Sequence: Synthetic oligonucleotide
guuggagggauucccaauc

SEQ ID NO: 1339271 - RNA, 19 nt, Artificial Sequence
  Description of Artificial Sequence: Synthetic oligonucleotide
caucugcaagguuguaacg

SEQ ID NO: 1339272 - RNA, 19 nt, Artificial Sequence
  Description of Artificial Sequence: Synthetic oligonucleotide
ggguaaaccagaucaggcc

SEQ ID NO: 1339273 - RNA, 19 nt, Artificial Sequence
  Description of Artificial Sequence: Synthetic oligonucleotide
gagggauucccaaucaguc

SEQ ID NO: 1339274 - RNA, 19 nt, Artificial Sequence
  Description of Artificial Sequence: Synthetic oligonucleotide
ugauguguguugacauugu

SEQ ID NO: 1339275 - RNA, 19 nt, Artificial Sequence
  Description of Artificial Sequence: Synthetic oligonucleotide
uacaccgauggcaaucuua

SEQ ID NO: 1339276 - RNA, 19 nt, Artificial Sequence
  Description of Artificial Sequence: Synthetic oligonucleotide
auucccuuagaauucuauu

SEQ ID NO: 1339277 - RNA, 19 nt, Artificial Sequence
  Description of Artificial Sequence: Synthetic oligonucleotide
aaaccagaucaggccaagg

SEQ ID NO: 1339278 - RNA, 19 nt, Artificial Sequence
  Description of Artificial Sequence: Synthetic oligonucleotide
auaguacccacaguuagaa

SEQ ID NO: 1339279 - RNA, 19 nt, Artificial Sequence
  Description of Artificial Sequence: Synthetic oligonucleotide
gauuguacaccgauggcaa

SEQ ID NO: 1339280 - RNA, 19 nt, Artificial Sequence
  Description of Artificial Sequence: Synthetic oligonucleotide
aggccaaauauugaguaga

SEQ ID NO: 1339281 - RNA, 19 nt, Artificial Sequence
  Description of Artificial Sequence: Synthetic oligonucleotide
guacccacaguuagaaaag

SEQ ID NO: 1339282 - RNA, 19 nt, Artificial Sequence
  Description of Artificial Sequence: Synthetic oligonucleotide
auauugaguagaaugcaaa

SEQ ID NO: 1339283 - RNA, 19 nt, Artificial Sequence
  Description of Artificial Sequence: Synthetic oligonucleotide
auagggcuuaaagccuucc

SEQ ID NO: 1339284 - RNA, 19 nt, Artificial Sequence
  Description of Artificial Sequence: Synthetic oligonucleotide
augucgucaacugacuuga

SEQ ID NO: 1339285 - RNA, 19 nt, Artificial Sequence
  Description of Artificial Sequence: Synthetic oligonucleotide
auaucaacuccuguaagua

SEQ ID NO: 1339286 - RNA, 19 nt, Artificial Sequence
  Description of Artificial Sequence: Synthetic oligonucleotide
gucaauugaugaaugauua

SEQ ID NO: 1339287 - RNA, 19 nt, Artificial Sequence
  Description of Artificial Sequence: Synthetic oligonucleotide
aauaugccaagcacaacua

SEQ ID NO: 1339288 - RNA, 19 nt, Artificial Sequence
  Description of Artificial Sequence: Synthetic oligonucleotide
cagucuugcaacacgguca

SEQ ID NO: 1339289 - RNA, 19 nt, Artificial Sequence
  Description of Artificial Sequence: Synthetic oligonucleotide
agcauaacaggaaucaguu

SEQ ID NO: 1339290 - RNA, 19 nt, Artificial Sequence
  Description of Artificial Sequence: Synthetic oligonucleotide
uccuagcauaacaggaauc

SEQ ID NO: 1339291 - RNA, 19 nt, Artificial Sequence
  Description of Artificial Sequence: Synthetic oligonucleotide
agucaauugaugaaugauu

SEQ ID NO: 1339292 - RNA, 19 nt, Artificial Sequence
  Description of Artificial Sequence: Synthetic oligonucleotide
guccacucuuauaacagag

SEQ ID NO: 1339293 - RNA, 19 nt, Artificial Sequence
  Description of Artificial Sequence: Synthetic oligonucleotide
uagggcuuaaagccuucca

SEQ ID NO: 1339294 - RNA, 19 nt, Artificial Sequence
  Description of Artificial Sequence: Synthetic oligonucleotide
agauuuuaaucagggccag

SEQ ID NO: 1339295 - RNA, 19 nt, Artificial Sequence
  Description of Artificial Sequence: Synthetic oligonucleotide
agggauucccaaucagucu

SEQ ID NO: 1339296 - RNA, 19 nt, Artificial Sequence
  Description of Artificial Sequence: Synthetic oligonucleotide
uagcccaaggaaguguuug

SEQ ID NO: 1339297 - RNA, 19 nt, Artificial Sequence
  Description of Artificial Sequence: Synthetic oligonucleotide
guguguugacauugucugg

SEQ ID NO: 1339298 - RNA, 19 nt, Artificial Sequence
  Description of Artificial Sequence: Synthetic oligonucleotide
guaacgcuuuccuugaaua

SEQ ID NO: 1339299 - RNA, 19 nt, Artificial Sequence
  Description of Artificial Sequence: Synthetic oligonucleotide
gucgucaacugacuugaug

SEQ ID NO: 1339300 - RNA, 19 nt, Artificial Sequence
  Description of Artificial Sequence: Synthetic oligonucleotide
cugaacguucccaaugaca

SEQ ID NO: 1339301 - RNA, 19 nt, Artificial Sequence
  Description of Artificial Sequence: Synthetic oligonucleotide
gaagaugacuugggugggg

SEQ ID NO: 1339302 - RNA, 19 nt, Artificial Sequence
  Description of Artificial Sequence: Synthetic oligonucleotide
agccauagguucgaacagg

SEQ ID NO: 1339303 - RNA, 19 nt, Artificial Sequence
  Description of Artificial Sequence: Synthetic oligonucleotide
auguguguugacauugucu

SEQ ID NO: 1339304 - RNA, 19 nt, Artificial Sequence
  Description of Artificial Sequence: Synthetic oligonucleotide
guaagguaccagccauagg

SEQ ID NO: 1339305 - RNA, 19 nt, Artificial Sequence
  Description of Artificial Sequence: Synthetic oligonucleotide
agucuugcaacacggucau

SEQ ID NO: 1339306 - RNA, 19 nt, Artificial Sequence
  Description of Artificial Sequence: Synthetic oligonucleotide
cuagcauaacaggaaucag

SEQ ID NO: 1339307 - RNA, 19 nt, Artificial Sequence
  Description of Artificial Sequence: Synthetic oligonucleotide
aaaacuccuccuagcauaa

SEQ ID NO: 1339308 - RNA, 19 nt, Artificial Sequence
  Description of Artificial Sequence: Synthetic oligonucleotide
cuauuaggccaaauauuga

SEQ ID NO: 1339309 - RNA, 19 nt, Artificial Sequence
  Description of Artificial Sequence: Synthetic oligonucleotide
gaaucaguuuugcagcacu

SEQ ID NO: 1339310 - RNA, 19 nt, Artificial Sequence
  Description of Artificial Sequence: Synthetic oligonucleotide
uucgaacaggguucuuuga

SEQ ID NO: 1339311 - RNA, 19 nt, Artificial Sequence
  Description of Artificial Sequence: Synthetic oligonucleotide
cagauuguacaccgauggc

SEQ ID NO: 1339312 - RNA, 19 nt, Artificial Sequence
  Description of Artificial Sequence: Synthetic oligonucleotide
uaacaccaccaaaacggaa

SEQ ID NO: 1339313 - RNA, 19 nt, Artificial Sequence
  Description of Artificial Sequence: Synthetic oligonucleotide
auaugccaagcacaacuaa

SEQ ID NO: 1339314 - RNA, 19 nt, Artificial Sequence
  Description of Artificial Sequence: Synthetic oligonucleotide
aguccacuagugcacgaca

SEQ ID NO: 1339315 - RNA, 19 nt, Artificial Sequence
  Description of Artificial Sequence: Synthetic oligonucleotide
ugggguaauucagguagcc

SEQ ID NO: 1339316 - RNA, 19 nt, Artificial Sequence
  Description of Artificial Sequence: Synthetic oligonucleotide
ccauaguacccacaguuag

SEQ ID NO: 1339317 - RNA, 19 nt, Artificial Sequence
  Description of Artificial Sequence: Synthetic oligonucleotide
cauaguacccacaguuaga

SEQ ID NO: 1339318 - RNA, 19 nt, Artificial Sequence
  Description of Artificial Sequence: Synthetic oligonucleotide
agaacaaaugagauuccaa

SEQ ID NO: 1339319 - RNA, 19 nt, Artificial Sequence
  Description of Artificial Sequence: Synthetic oligonucleotide
gaaugguuuagcaaagaau

SEQ ID NO: 1339320 - RNA, 19 nt, Artificial Sequence
  Description of Artificial Sequence: Synthetic oligonucleotide
agaguuggaagcacugugu

SEQ ID NO: 1339321 - RNA, 19 nt, Artificial Sequence
  Description of Artificial Sequence: Synthetic oligonucleotide
acauacuuccuggaauugu

SEQ ID NO: 1339322 - RNA, 19 nt, Artificial Sequence
  Description of Artificial Sequence: Synthetic oligonucleotide
agugcacgacaaucccaac

SEQ ID NO: 1339323 - RNA, 19 nt, Artificial Sequence
  Description of Artificial Sequence: Synthetic oligonucleotide
gaugacuugggugggguaa

SEQ ID NO: 1339324 - RNA, 19 nt, Artificial Sequence
  Description of Artificial Sequence: Synthetic oligonucleotide
aucagauuguacaccgaug

SEQ ID NO: 1339325 - RNA, 19 nt, Artificial Sequence
  Description of Artificial Sequence: Synthetic oligonucleotide
gaaauaugccaagcacaac

SEQ ID NO: 1339326 - RNA, 19 nt, Artificial Sequence
  Description of Artificial Sequence: Synthetic oligonucleotide
gauucccaaucagucuugc

SEQ ID NO: 1339327 - RNA, 19 nt, Artificial Sequence
  Description of Artificial Sequence: Synthetic oligonucleotide
aaaccagaccauacauacu

SEQ ID NO: 1339328 - RNA, 19 nt, Artificial Sequence
  Description of Artificial Sequence: Synthetic oligonucleotide
uccacuagugcacgacaau

SEQ ID NO: 1339329 - RNA, 19 nt, Artificial Sequence
  Description of Artificial Sequence: Synthetic oligonucleotide
ccaaggaaguguuugauaa

SEQ ID NO: 1339330 - RNA, 19 nt, Artificial Sequence
  Description of Artificial Sequence: Synthetic oligonucleotide
ucccaacaaaauguauaca

SEQ ID NO: 1339331 - RNA, 19 nt, Artificial Sequence
  Description of Artificial Sequence: Synthetic oligonucleotide
cuuuggaaagucaauugau

SEQ ID NO: 1339332 - RNA, 19 nt, Artificial Sequence
  Description of Artificial Sequence: Synthetic oligonucleotide
cugaaugagcugaaguucu

SEQ ID NO: 1339333 - RNA, 19 nt, Artificial Sequence
  Description of Artificial Sequence: Synthetic oligonucleotide
uugacauugucuggguuuu

SEQ ID NO: 1339334 - RNA, 19 nt, Artificial Sequence
  Description of Artificial Sequence: Synthetic oligonucleotide
gaguuggaagcacugugua

SEQ ID NO: 1339335 - RNA, 19 nt, Artificial Sequence
  Description of Artificial Sequence: Synthetic oligonucleotide
agccaggguaaaccagauc

SEQ ID NO: 1339336 - RNA, 19 nt, Artificial Sequence
  Description of Artificial Sequence: Synthetic oligonucleotide
cuagugcacgacaauccca

SEQ ID NO: 1339337 - RNA, 19 nt, Artificial Sequence
  Description of Artificial Sequence: Synthetic oligonucleotide
cauagguucgaacaggguu

SEQ ID NO: 1339338 - RNA, 19 nt, Artificial Sequence
  Description of Artificial Sequence: Synthetic oligonucleotide
aaucaguuuugcagcacuu

SEQ ID NO: 1339339 - RNA, 19 nt, Artificial Sequence
  Description of Artificial Sequence: Synthetic oligonucleotide
agauuccaaaguauccagu

SEQ ID NO: 1339340 - RNA, 19 nt, Artificial Sequence
  Description of Artificial Sequence: Synthetic oligonucleotide
gaugaaugauuauucccuu

SEQ ID NO: 1339341 - RNA, 19 nt, Artificial Sequence
  Description of Artificial Sequence: Synthetic oligonucleotide
aacugacuugauguguguu

SEQ ID NO: 1339342 - RNA, 19 nt, Artificial Sequence
  Description of Artificial Sequence: Synthetic oligonucleotide
ccaaggcucaugcauacug

SEQ ID NO: 1339343 - RNA, 19 nt, Artificial Sequence
  Description of Artificial Sequence: Synthetic oligonucleotide
ccuggaauuguugaacuug

SEQ ID NO: 1339344 - RNA, 19 nt, Artificial Sequence
  Description of Artificial Sequence: Synthetic oligonucleotide
acaaucccaacaaaaugua

SEQ ID NO: 1339345 - RNA, 19 nt, Artificial Sequence
  Description of Artificial Sequence: Synthetic oligonucleotide
uauggucauugcuuuucuu

SEQ ID NO: 1339346 - RNA, 19 nt, Artificial Sequence
  Description of Artificial Sequence: Synthetic oligonucleotide
gccauagguucgaacaggg

SEQ ID NO: 1339347 - RNA, 19 nt, Artificial Sequence
  Description of Artificial Sequence: Synthetic oligonucleotide
uaguccacuagugcacgac

SEQ ID NO: 1339348 - RNA, 19 nt, Artificial Sequence
  Description of Artificial Sequence: Synthetic oligonucleotide
aggcguagccauagguucg

SEQ ID NO: 1339349 - RNA, 19 nt, Artificial Sequence
  Description of Artificial Sequence: Synthetic oligonucleotide
uuggaagcacuguguaguu

SEQ ID NO: 1339350 - RNA, 19 nt, Artificial Sequence
  Description of Artificial Sequence: Synthetic oligonucleotide
caggguucuuugaacaaaa

SEQ ID NO: 1339351 - RNA, 19 nt, Artificial Sequence
  Description of Artificial Sequence: Synthetic oligonucleotide
auuguacaccgauggcaau

SEQ ID NO: 1339352 - RNA, 19 nt, Artificial Sequence
  Description of Artificial Sequence: Synthetic oligonucleotide
acaaaccagaccauacaua

SEQ ID NO: 1339353 - RNA, 19 nt, Artificial Sequence
  Description of Artificial Sequence: Synthetic oligonucleotide
ccuagcauaacaggaauca

SEQ ID NO: 1339354 - RNA, 19 nt, Artificial Sequence
  Description of Artificial Sequence: Synthetic oligonucleotide
ggccuaguccacuagugca

SEQ ID NO: 1339355 - RNA, 19 nt, Artificial Sequence
  Description of Artificial Sequence: Synthetic oligonucleotide
acgaaaggacuauggucau

SEQ ID NO: 1339356 - RNA, 19 nt, Artificial Sequence
  Description of Artificial Sequence: Synthetic oligonucleotide
cauagggcuuaaagccuuc

SEQ ID NO: 1339357 - RNA, 19 nt, Artificial Sequence
  Description of Artificial Sequence: Synthetic oligonucleotide
gaucaggccaaggcucaug

SEQ ID NO: 1339358 - RNA, 19 nt, Artificial Sequence
  Description of Artificial Sequence: Synthetic oligonucleotide
aaguucuauuaggccaaau

SEQ ID NO: 1339359 - RNA, 19 nt, Artificial Sequence
  Description of Artificial Sequence: Synthetic oligonucleotide
gauuuuaaucagggccaga

SEQ ID NO: 1339360 - RNA, 19 nt, Artificial Sequence
  Description of Artificial Sequence: Synthetic oligonucleotide
guuuuggagggcacaguga

SEQ ID NO: 1339361 - RNA, 19 nt, Artificial Sequence
  Description of Artificial Sequence: Synthetic oligonucleotide
cucaugcauacugcagcag

SEQ ID NO: 1339362 - RNA, 19 nt, Artificial Sequence
  Description of Artificial Sequence: Synthetic oligonucleotide
agguuguaacgcuuuccuu

SEQ ID NO: 1339363 - RNA, 19 nt, Artificial Sequence
  Description of Artificial Sequence: Synthetic oligonucleotide
uuguaacgcuuuccuugaa

SEQ ID NO: 1339364 - RNA, 19 nt, Artificial Sequence
  Description of Artificial Sequence: Synthetic oligonucleotide
uaguacccacaguuagaaa

SEQ ID NO: 1339365 - RNA, 19 nt, Artificial Sequence
  Description of Artificial Sequence: Synthetic oligonucleotide
ggaaagucaauugaugaau

SEQ ID NO: 1339366 - RNA, 19 nt, Artificial Sequence
  Description of Artificial Sequence: Synthetic oligonucleotide
caaaaccgaucgaguauga

SEQ ID NO: 1339367 - RNA, 19 nt, Artificial Sequence
  Description of Artificial Sequence: Synthetic oligonucleotide
agggccuaguccacuagug

SEQ ID NO: 1339368 - RNA, 19 nt, Artificial Sequence
  Description of Artificial Sequence: Synthetic oligonucleotide
gugcaaucgugcugucagc

SEQ ID NO: 1339369 - RNA, 19 nt, Artificial Sequence
  Description of Artificial Sequence: Synthetic oligonucleotide
aggcucaugcauacugcag

SEQ ID NO: 1339370 - RNA, 19 nt, Artificial Sequence
  Description of Artificial Sequence: Synthetic oligonucleotide
aaguauccagugagggaaa

SEQ ID NO: 1339371 - RNA, 19 nt, Artificial Sequence
  Description of Artificial Sequence: Synthetic oligonucleotide
ccacucuuauaacagagaa

SEQ ID NO: 1339372 - RNA, 19 nt, Artificial Sequence
  Description of Artificial Sequence: Synthetic oligonucleotide
cuacuacacagcccgagcu

SEQ ID NO: 1339373 - RNA, 19 nt, Artificial Sequence
  Description of Artificial Sequence: Synthetic oligonucleotide
guaaaccagaucaggccaa

SEQ ID NO: 1339374 - RNA, 19 nt, Artificial Sequence
  Description of Artificial Sequence: Synthetic oligonucleotide
cauacuuccuggaauuguu

SEQ ID NO: 1339375 - RNA, 19 nt, Artificial Sequence
  Description of Artificial Sequence: Synthetic oligonucleotide
caccugucagauuaaaauu

SEQ ID NO: 1339376 - RNA, 19 nt, Artificial Sequence
  Description of Artificial Sequence: Synthetic oligonucleotide
aguauccagugagggaaaa

SEQ ID NO: 1339377 - RNA, 19 nt, Artificial Sequence
  Description of Artificial Sequence: Synthetic oligonucleotide
cacaucugcaagguuguaa

SEQ ID NO: 1339378 - RNA, 19 nt, Artificial Sequence
  Description of Artificial Sequence: Synthetic oligonucleotide
cuacacagucugugccaac

SEQ ID NO: 1339379 - RNA, 19 nt, Artificial Sequence
  Description of Artificial Sequence: Synthetic oligonucleotide
gucaacugacuugaugugu

SEQ ID NO: 1339380 - RNA, 19 nt, Artificial Sequence
  Description of Artificial Sequence: Synthetic oligonucleotide
gggguaauucagguagccc

SEQ ID NO: 1339381 - RNA, 19 nt, Artificial Sequence
  Description of Artificial Sequence: Synthetic oligonucleotide
cuucagauccuuugguuuu

SEQ ID NO: 1339382 - RNA, 19 nt, Artificial Sequence
  Description of Artificial Sequence: Synthetic oligonucleotide
ccuaguccacuagugcacg

SEQ ID NO: 1339383 - RNA, 19 nt, Artificial Sequence
  Description of Artificial Sequence: Synthetic oligonucleotide
ccucagugccuacacaguc

SEQ ID NO: 1339384 - RNA, 19 nt, Artificial Sequence
  Description of Artificial Sequence: Synthetic oligonucleotide
  modified_base (8)..(8): a, c, u, g, unknown or other
caaauuunuuaaacaucuu

SEQ ID NO: 1339385 - RNA, 19 nt, Artificial Sequence
  Description of Artificial Sequence: Synthetic oligonucleotide
cccacaguuagaaaagcua

SEQ ID NO: 1339386 - RNA, 19 nt, Artificial Sequence
  Description of Artificial Sequence: Synthetic oligonucleotide
ggccaaggcucaugcauac

SEQ ID NO: 1339387 - RNA, 19 nt, Artificial Sequence
  Description of Artificial Sequence: Synthetic oligonucleotide
uccugguauucuucuccuu

SEQ ID NO: 1339388 - RNA, 19 nt, Artificial Sequence
  Description of Artificial Sequence: Synthetic oligonucleotide
uggaagcacuguguaguuu

SEQ ID NO: 1339389 - RNA, 19 nt, Artificial Sequence
  Description of Artificial Sequence: Synthetic oligonucleotide
ggacacugcuaggaagugc

SEQ ID NO: 1339390 - RNA, 19 nt, Artificial Sequence
  Description of Artificial Sequence: Synthetic oligonucleotide
cuaguccacuagugcacga

SEQ ID NO: 1339391 - RNA, 19 nt, Artificial Sequence
  Description of Artificial Sequence: Synthetic oligonucleotide
cgaucgaguaugaauacaa

SEQ ID NO: 1339392 - RNA, 19 nt, Artificial Sequence
  Description of Artificial Sequence: Synthetic oligonucleotide
ccacuagugcacgacaauc

SEQ ID NO: 1339393 - RNA, 19 nt, Artificial Sequence
  Description of Artificial Sequence: Synthetic oligonucleotide
aguguuugauaagcccaua

SEQ ID NO: 1339394 - RNA, 19 nt, Artificial Sequence
  Description of Artificial Sequence: Synthetic oligonucleotide
ugucgucaacugacuugau

SEQ ID NO: 1339395 - RNA, 19 nt, Artificial Sequence
  Description of Artificial Sequence: Synthetic oligonucleotide
gcaagguuguaacgcuuuc

SEQ ID NO: 1339396 - RNA, 19 nt, Artificial Sequence
  Description of Artificial Sequence: Synthetic oligonucleotide
gcccauaguacccacaguu

SEQ ID NO: 1339397 - RNA, 19 nt, Artificial Sequence
  Description of Artificial Sequence: Synthetic oligonucleotide
ggauucccaaucagucuug

SEQ ID NO: 1339398 - RNA, 19 nt, Artificial Sequence
  Description of Artificial Sequence: Synthetic oligonucleotide
gccuacacagucugugcca

SEQ ID NO: 1339399 - RNA, 19 nt, Artificial Sequence
  Description of Artificial Sequence: Synthetic oligonucleotide
gugcccuacuacacagccc

SEQ ID NO: 1339400 - RNA, 19 nt, Artificial Sequence
  Description of Artificial Sequence: Synthetic oligonucleotide
gaaguucuauuaggccaaa

SEQ ID NO: 1339401 - RNA, 19 nt, Artificial Sequence
  Description of Artificial Sequence: Synthetic oligonucleotide
gggauucccaaucagucuu

SEQ ID NO: 1339402 - RNA, 19 nt, Artificial Sequence
  Description of Artificial Sequence: Synthetic oligonucleotide
guccacuagugcacgacaa

SEQ ID NO: 1339403 - RNA, 19 nt, Artificial Sequence
  Description of Artificial Sequence: Synthetic oligonucleotide
cagcaccacaaugucguca

SEQ ID NO: 1339404 - RNA, 19 nt, Artificial Sequence
  Description of Artificial Sequence: Synthetic oligonucleotide
gcaaucgugcugucagcca

SEQ ID NO: 1339405 - RNA, 19 nt, Artificial Sequence
  Description of Artificial Sequence: Synthetic oligonucleotide
cuacacagcccgagcugca

SEQ ID NO: 1339406 - RNA, 19 nt, Artificial Sequence
  Description of Artificial Sequence: Synthetic oligonucleotide
cuccuagcauaacaggaau

SEQ ID NO: 1339407 - RNA, 19 nt, Artificial Sequence
  Description of Artificial Sequence: Synthetic oligonucleotide
aggguucuuugaacaaaau

SEQ ID NO: 1339408 - RNA, 19 nt, Artificial Sequence
  Description of Artificial Sequence: Synthetic oligonucleotide
cgucaacugacuugaugug

SEQ ID NO: 1339409 - RNA, 19 nt, Artificial Sequence
  Description of Artificial Sequence: Synthetic oligonucleotide
gugccaacguccuugccuu

SEQ ID NO: 1339410 - RNA, 19 nt, Artificial Sequence
  Description of Artificial Sequence: Synthetic oligonucleotide
cguagccauagguucgaac

SEQ ID NO: 1339411 - RNA, 19 nt, Artificial Sequence
  Description of Artificial Sequence: Synthetic oligonucleotide
ggccaaauauugaguagaa

SEQ ID NO: 1339412 - RNA, 19 nt, Artificial Sequence
  Description of Artificial Sequence: Synthetic oligonucleotide
gcuuuguuuaucagauugu

SEQ ID NO: 1339413 - RNA, 19 nt, Artificial Sequence
  Description of Artificial Sequence: Synthetic oligonucleotide
agguaagguaccagccaua

SEQ ID NO: 1339414 - RNA, 19 nt, Artificial Sequence
  Description of Artificial Sequence: Synthetic oligonucleotide
ugacuugggugggguaauu

SEQ ID NO: 1339415 - RNA, 19 nt, Artificial Sequence
  Description of Artificial Sequence: Synthetic oligonucleotide
gggcuuaaagccuuccauu

SEQ ID NO: 1339416 - RNA, 19 nt, Artificial Sequence
  Description of Artificial Sequence: Synthetic oligonucleotide
cccuacuacacagcccgag

SEQ ID NO: 1339417 - RNA, 19 nt, Artificial Sequence
  Description of Artificial Sequence: Synthetic oligonucleotide
gggaaaagaggaaggcgua

SEQ ID NO: 1339418 - RNA, 19 nt, Artificial Sequence
  Description of Artificial Sequence: Synthetic oligonucleotide
gcuauuuucucuagacuuu

SEQ ID NO: 1339419 - RNA, 19 nt, Artificial Sequence
  Description of Artificial Sequence: Synthetic oligonucleotide
gguucgaacaggguucuuu

SEQ ID NO: 1339420 - RNA, 19 nt, Artificial Sequence
  Description of Artificial Sequence: Synthetic oligonucleotide
ggccagaacaaaugagauu

SEQ ID NO: 1339421 - RNA, 19 nt, Artificial Sequence
  Description of Artificial Sequence: Synthetic oligonucleotide
cagggccuaguccacuagu

SEQ ID NO: 1339422 - RNA, 19 nt, Artificial Sequence
  Description of Artificial Sequence: Synthetic oligonucleotide
ugccaacguccuugccuuu

SEQ ID NO: 1339423 - RNA, 19 nt, Artificial Sequence
  Description of Artificial Sequence: Synthetic oligonucleotide
ggcguagccauagguucga

SEQ ID NO: 1339424 - RNA, 19 nt, Artificial Sequence
  Description of Artificial Sequence: Synthetic oligonucleotide
ccgauggcaaucuuauuuu

SEQ ID NO: 1339425 - RNA, 19 nt, Artificial Sequence
  Description of Artificial Sequence: Synthetic oligonucleotide
ccgaucgaguaugaauaca

SEQ ID NO: 1339426 - RNA, 19 nt, Artificial Sequence
  Description of Artificial Sequence: Synthetic oligonucleotide
gccaaauauugaguagaau

SEQ ID NO: 1339427 - RNA, 19 nt, Artificial Sequence
  Description of Artificial Sequence: Synthetic oligonucleotide
cgauggcaaucuuauuuua

SEQ ID NO: 1339428 - RNA, 19 nt, Artificial Sequence
  Description of Artificial Sequence: Synthetic oligonucleotide
gccuuccauugaaaauauc

SEQ ID NO: 1339429 - RNA, 19 nt, Artificial Sequence
  Description of Artificial Sequence: Synthetic oligonucleotide
cagugccuacacagucugu

SEQ ID NO: 1339430 - RNA, 19 nt, Artificial Sequence
  Description of Artificial Sequence: Synthetic oligonucleotide
gcccgagcugcauguugga

SEQ ID NO: 1339431 - RNA, 19 nt, Artificial Sequence
  Description of Artificial Sequence: Synthetic oligonucleotide
guagcccaaggaaguguuu

SEQ ID NO: 1339432 - RNA, 19 nt, Artificial Sequence
  Description of Artificial Sequence: Synthetic oligonucleotide
agguucgaacaggguucuu

SEQ ID NO: 1339433 - RNA, 19 nt, Artificial Sequence
  Description of Artificial Sequence: Synthetic oligonucleotide
guacaccgauggcaaucuu

SEQ ID NO: 1339434 - RNA, 19 nt, Artificial Sequence
  Description of Artificial Sequence: Synthetic oligonucleotide
ggguguggacagcagccuu

SEQ ID NO: 1339435 - RNA, 19 nt, Artificial Sequence
  Description of Artificial Sequence: Synthetic oligonucleotide
gccaaggcucaugcauacu

SEQ ID NO: 1339436 - RNA, 19 nt, Artificial Sequence
  Description of Artificial Sequence: Synthetic oligonucleotide
gcccuacuacacagcccga

SEQ ID NO: 1339437 - RNA, 19 nt, Artificial Sequence
  Description of Artificial Sequence: Synthetic oligonucleotide
gucuugcaacacggucauu

SEQ ID NO: 1339438 - RNA, 19 nt, Artificial Sequence
  Description of Artificial Sequence: Synthetic oligonucleotide
ugaugaauaaucuucauca

SEQ ID NO: 1339439 - RNA, 19 nt, Artificial Sequence
  Description of Artificial Sequence: Synthetic oligonucleotide
uucaacaaaaccaaaagga

SEQ ID NO: 1339440 - RNA, 19 nt, Artificial Sequence
  Description of Artificial Sequence: Synthetic oligonucleotide
uguauuuuaggucacaaga

SEQ ID NO: 1339441 - RNA, 19 nt, Artificial Sequence
  Description of Artificial Sequence: Synthetic oligonucleotide
aauucaaaauaaucaaguc

SEQ ID NO: 1339442 - RNA, 19 nt, Artificial Sequence
  Description of Artificial Sequence: Synthetic oligonucleotide
aacccauaaacacaaacgg

SEQ ID NO: 1339443 - RNA, 19 nt, Artificial Sequence
  Description of Artificial Sequence: Synthetic oligonucleotide
aaaagucucaucuucgauc

SEQ ID NO: 1339444 - RNA, 19 nt, Artificial Sequence
  Description of Artificial Sequence: Synthetic oligonucleotide
ugucagaugaaaacaaacg

SEQ ID NO: 1339445 - RNA, 19 nt, Artificial Sequence
  Description of Artificial Sequence: Synthetic oligonucleotide
auaauuuuaguccaguuga

SEQ ID NO: 1339446 - RNA, 19 nt, Artificial Sequence
  Description of Artificial Sequence: Synthetic oligonucleotide
aaauaccaaagauagguug

SEQ ID NO: 1339447 - RNA, 19 nt, Artificial Sequence
  Description of Artificial Sequence: Synthetic oligonucleotide
ugaaauaccaaagauaggu

SEQ ID NO: 1339448 - RNA, 19 nt, Artificial Sequence
  Description of Artificial Sequence: Synthetic oligonucleotide
uucucuuaaagucacagca

SEQ ID NO: 1339449 - RNA, 19 nt, Artificial Sequence
  Description of Artificial Sequence: Synthetic oligonucleotide
auuuuaguccaguugaggg

SEQ ID NO: 1339450 - RNA, 19 nt, Artificial Sequence
  Description of Artificial Sequence: Synthetic oligonucleotide
aaacaaacgguaucgagug

SEQ ID NO: 1339451 - RNA, 19 nt, Artificial Sequence
  Description of Artificial Sequence: Synthetic oligonucleotide
aacuuaaagggacggaagg

SEQ ID NO: 1339452 - RNA, 19 nt, Artificial Sequence
  Description of Artificial Sequence: Synthetic oligonucleotide
aauaaucuucaucacuguc

SEQ ID NO: 1339453 - RNA, 19 nt, Artificial Sequence
  Description of Artificial Sequence: Synthetic oligonucleotide
aaagcugaucaucagaagu

SEQ ID NO: 1339454 - RNA, 19 nt, Artificial Sequence
  Description of Artificial Sequence: Synthetic oligonucleotide
aaagaauuguagaaauagc

SEQ ID NO: 1339455 - RNA, 19 nt, Artificial Sequence
  Description of Artificial Sequence: Synthetic oligonucleotide
cuugauggggucuagagag

SEQ ID NO: 1339456 - RNA, 19 nt, Artificial Sequence
  Description of Artificial Sequence: Synthetic oligonucleotide
aaacccauaaacacaaacg

SEQ ID NO: 1339457 - RNA, 19 nt, Artificial Sequence
  Description of Artificial Sequence: Synthetic oligonucleotide
aauggcauugaucauugug

SEQ ID NO: 1339458 - RNA, 19 nt, Artificial Sequence
  Description of Artificial Sequence: Synthetic oligonucleotide
uuaaagucacagcagagga

SEQ ID NO: 1339459 - RNA, 19 nt, Artificial Sequence
  Description of Artificial Sequence: Synthetic oligonucleotide
ucuugagaacuucagaucu

SEQ ID NO: 1339460 - RNA, 19 nt, Artificial Sequence
  Description of Artificial Sequence: Synthetic oligonucleotide
gucuucauaauuuuagucc

SEQ ID NO: 1339461 - RNA, 19 nt, Artificial Sequence
  Description of Artificial Sequence: Synthetic oligonucleotide
aagauagguugucagauga

SEQ ID NO: 1339462 - RNA, 19 nt, Artificial Sequence
  Description of Artificial Sequence: Synthetic oligonucleotide
ucagaucuggaacuuaaag

SEQ ID NO: 1339463 - RNA, 19 nt, Artificial Sequence
  Description of Artificial Sequence: Synthetic oligonucleotide
auaaaaucugagaagcccc

SEQ ID NO: 1339464 - RNA, 19 nt, Artificial Sequence
  Description of Artificial Sequence: Synthetic oligonucleotide
aacgguaucgagugggagg

SEQ ID NO: 1339465 - RNA, 19 nt, Artificial Sequence
  Description of Artificial Sequence: Synthetic oligonucleotide
uguggggccagaaacaugc

SEQ ID NO: 1339466 - RNA, 19 nt, Artificial Sequence
  Description of Artificial Sequence: Synthetic oligonucleotide
cucguaacggcuuucacgg

SEQ ID NO: 1339467 - RNA, 19 nt, Artificial Sequence
  Description of Artificial Sequence: Synthetic oligonucleotide
cugaacuauguacagaugc

SEQ ID NO: 1339468 - RNA, 19 nt, Artificial Sequence
  Description of Artificial Sequence: Synthetic oligonucleotide
augaaaacaaacgguaucg

SEQ ID NO: 1339469 - RNA, 19 nt, Artificial Sequence
  Description of Artificial Sequence: Synthetic oligonucleotide
uagaaauagcuaaugguca

SEQ ID NO: 1339470 - RNA, 19 nt, Artificial Sequence
  Description of Artificial Sequence: Synthetic oligonucleotide
uuuuaggucacaagaauuc

SEQ ID NO: 1339471 - RNA, 19 nt, Artificial Sequence
  Description of Artificial Sequence: Synthetic oligonucleotide
uuuaccacugucuugguaa

SEQ ID NO: 1339472 - RNA, 19 nt, Artificial Sequence
  Description of Artificial Sequence: Synthetic oligonucleotide
ucacaaucaucgcagagcc

SEQ ID NO: 1339473 - RNA, 19 nt, Artificial Sequence
  Description of Artificial Sequence: Synthetic oligonucleotide
aauggaucagcuccacuuc

SEQ ID NO: 1339474 - RNA, 19 nt, Artificial Sequence
  Description of Artificial Sequence: Synthetic oligonucleotide
aggacggcaagauaaaguc

SEQ ID NO: 1339475 - RNA, 19 nt, Artificial Sequence
  Description of Artificial Sequence: Synthetic oligonucleotide
uuaaagggacggaaggagg

SEQ ID NO: 1339476 - RNA, 19 nt, Artificial Sequence
  Description of Artificial Sequence: Synthetic oligonucleotide
gauuaaaagucucaucuuc

SEQ ID NO: 1339477 - RNA, 19 nt, Artificial Sequence
  Description of Artificial Sequence: Synthetic oligonucleotide
ucagcuuugaaauaccaaa

SEQ ID NO: 1339478 - RNA, 19 nt, Artificial Sequence
  Description of Artificial Sequence: Synthetic oligonucleotide
aagaucacaaucaucgcag

SEQ ID NO: 1339479 - RNA, 19 nt, Artificial Sequence
  Description of Artificial Sequence: Synthetic oligonucleotide
aucacaaucaucgcagagc

SEQ ID NO: 1339480 - RNA, 19 nt, Artificial Sequence
  Description of Artificial Sequence: Synthetic oligonucleotide
aacaguuucuaugucaugu

SEQ ID NO: 1339481 - RNA, 19 nt, Artificial Sequence
  Description of Artificial Sequence: Synthetic oligonucleotide
aaacacaaacggcaaaacu

SEQ ID NO: 1339482 - RNA, 19 nt, Artificial Sequence
  Description of Artificial Sequence: Synthetic oligonucleotide
ugaacuauguacagaugcc

SEQ ID NO: 1339483 - RNA, 19 nt, Artificial Sequence
  Description of Artificial Sequence: Synthetic oligonucleotide
cauagucauccucagaagg

SEQ ID NO: 1339484 - RNA, 19 nt, Artificial Sequence
  Description of Artificial Sequence: Synthetic oligonucleotide
aagaccagccaccuuguuc

SEQ ID NO: 1339485 - RNA, 19 nt, Artificial Sequence
  Description of Artificial Sequence: Synthetic oligonucleotide
ucugcagagagauuagagc

SEQ ID NO: 1339486 - RNA, 19 nt, Artificial Sequence
  Description of Artificial Sequence: Synthetic oligonucleotide
cuaauggucaguuuaccac

SEQ ID NO: 1339487 - RNA, 19 nt, Artificial Sequence
  Description of Artificial Sequence: Synthetic oligonucleotide
uccacuucauccaacguca

SEQ ID NO: 1339488 - RNA, 19 nt, Artificial Sequence
  Description of Artificial Sequence: Synthetic oligonucleotide
gagauuagagcagaggacc

SEQ ID NO: 1339489 - RNA, 19 nt, Artificial Sequence
  Description of Artificial Sequence: Synthetic oligonucleotide
uucaggugaaacuggaccc

SEQ ID NO: 1339490 - RNA, 19 nt, Artificial Sequence
  Description of Artificial Sequence: Synthetic oligonucleotide
agaaauagcuaauggucag

SEQ ID NO: 1339491 - RNA, 19 nt, Artificial Sequence
  Description of Artificial Sequence: Synthetic oligonucleotide
uauuuuaggucacaagaau

SEQ ID NO: 1339492 - RNA, 19 nt, Artificial Sequence
  Description of Artificial Sequence: Synthetic oligonucleotide
uccucagaaggauuaaaag

SEQ ID NO: 1339493 - RNA, 19 nt, Artificial Sequence
  Description of Artificial Sequence: Synthetic oligonucleotide
aucgcagagcccaagaacc

SEQ ID NO: 1339494 - RNA, 19 nt, Artificial Sequence
  Description of Artificial Sequence: Synthetic oligonucleotide
ucuggaacuuaaagggacg

SEQ ID NO: 1339495 - RNA, 19 nt, Artificial Sequence
  Description of Artificial Sequence: Synthetic oligonucleotide
uugucagaugaaaacaaac

SEQ ID NO: 1339496 - RNA, 19 nt, Artificial Sequence
  Description of Artificial Sequence: Synthetic oligonucleotide
accuuguucaaagaagccc

SEQ ID NO: 1339497 - RNA, 19 nt, Artificial Sequence
  Description of Artificial Sequence: Synthetic oligonucleotide
aaagauagguugucagaug

SEQ ID NO: 1339498 - RNA, 19 nt, Artificial Sequence
  Description of Artificial Sequence: Synthetic oligonucleotide
uuaggaguugucugcagag

SEQ ID NO: 1339499 - RNA, 19 nt, Artificial Sequence
  Description of Artificial Sequence: Synthetic oligonucleotide
gacuccuuggaauagucug

SEQ ID NO: 1339500 - RNA, 19 nt, Artificial Sequence
  Description of Artificial Sequence: Synthetic oligonucleotide
acuauguacagaugccuuc

SEQ ID NO: 1339501 - RNA, 19 nt, Artificial Sequence
  Description of Artificial Sequence: Synthetic oligonucleotide
uaauucagcuuugaaauac

SEQ ID NO: 1339502 - RNA, 19 nt, Artificial Sequence
  Description of Artificial Sequence: Synthetic oligonucleotide
uagagaggcaacuggaaug

SEQ ID NO: 1339503 - RNA, 19 nt, Artificial Sequence
  Description of Artificial Sequence: Synthetic oligonucleotide
acggaaggagggcugaacc

SEQ ID NO: 1339504 - RNA, 19 nt, Artificial Sequence
  Description of Artificial Sequence: Synthetic oligonucleotide
aguugagggacuguacucc

SEQ ID NO: 1339505 - RNA, 19 nt, Artificial Sequence
  Description of Artificial Sequence: Synthetic oligonucleotide
ucagaaggauuaaaagucu

SEQ ID NO: 1339506 - RNA, 19 nt, Artificial Sequence
  Description of Artificial Sequence: Synthetic oligonucleotide
uuaaaagucucaucuucga

SEQ ID NO: 1339507 - RNA, 19 nt, Artificial Sequence
  Description of Artificial Sequence: Synthetic oligonucleotide
augaauaaucuucaucacu

SEQ ID NO: 1339508 - RNA, 19 nt, Artificial Sequence
  Description of Artificial Sequence: Synthetic oligonucleotide
auagcuaauggucaguuua

SEQ ID NO: 1339509 - RNA, 19 nt, Artificial Sequence
  Description of Artificial Sequence: Synthetic oligonucleotide
aagugaccaacacaagaug

SEQ ID NO: 1339510 - RNA, 19 nt, Artificial Sequence
  Description of Artificial Sequence: Synthetic oligonucleotide
aacacaaacggcaaaacuu

SEQ ID NO: 1339511 - RNA, 19 nt, Artificial Sequence
  Description of Artificial Sequence: Synthetic oligonucleotide
uggaaccacgguuugagcc

SEQ ID NO: 1339512 - RNA, 19 nt, Artificial Sequence
  Description of Artificial Sequence: Synthetic oligonucleotide
uuuuaguccaguugaggga

SEQ ID NO: 1339513 - RNA, 19 nt, Artificial Sequence
  Description of Artificial Sequence: Synthetic oligonucleotide
ucuagcucaucccaguccu

SEQ ID NO: 1339514 - RNA, 19 nt, Artificial Sequence
  Description of Artificial Sequence: Synthetic oligonucleotide
uugccagccaucugaaacg

SEQ ID NO: 1339515 - RNA, 19 nt, Artificial Sequence
  Description of Artificial Sequence: Synthetic oligonucleotide
uaauccuuguagacaauca

SEQ ID NO: 1339516 - RNA, 19 nt, Artificial Sequence
  Description of Artificial Sequence: Synthetic oligonucleotide
accaaagauagguugucag

SEQ ID NO: 1339517 - RNA, 19 nt, Artificial Sequence
  Description of Artificial Sequence: Synthetic oligonucleotide
uagguugucagaugaaaac

SEQ ID NO: 1339518 - RNA, 19 nt, Artificial Sequence
  Description of Artificial Sequence: Synthetic oligonucleotide
uaaagucacagcagaggag

SEQ ID NO: 1339519 - RNA, 19 nt, Artificial Sequence
  Description of Artificial Sequence: Synthetic oligonucleotide
gucacaagaauucaaccac

SEQ ID NO: 1339520 - RNA, 19 nt, Artificial Sequence
  Description of Artificial Sequence: Synthetic oligonucleotide
ucaucuucgaucucagacu

SEQ ID NO: 1339521 - RNA, 19 nt, Artificial Sequence
  Description of Artificial Sequence: Synthetic oligonucleotide
uuuaggaguugucugcaga

SEQ ID NO: 1339522 - RNA, 19 nt, Artificial Sequence
  Description of Artificial Sequence: Synthetic oligonucleotide
gacggcaagauaaaguccc

SEQ ID NO: 1339523 - RNA, 19 nt, Artificial Sequence
  Description of Artificial Sequence: Synthetic oligonucleotide
acaugcuccagcuaagugu

SEQ ID NO: 1339524 - RNA, 19 nt, Artificial Sequence
  Description of Artificial Sequence: Synthetic oligonucleotide
guagacaaucaccauauca

SEQ ID NO: 1339525 - RNA, 19 nt, Artificial Sequence
  Description of Artificial Sequence: Synthetic oligonucleotide
uaauggucaguuuaccacu

SEQ ID NO: 1339526 - RNA, 19 nt, Artificial Sequence
  Description of Artificial Sequence: Synthetic oligonucleotide
cuugccagccaucugaaac

SEQ ID NO: 1339527 - RNA, 19 nt, Artificial Sequence
  Description of Artificial Sequence: Synthetic oligonucleotide
acaaacgguaucgaguggg

SEQ ID NO: 1339528 - RNA, 19 nt, Artificial Sequence
  Description of Artificial Sequence: Synthetic oligonucleotide
cacgguuugagccacggcc

SEQ ID NO: 1339529 - RNA, 19 nt, Artificial Sequence
  Description of Artificial Sequence: Synthetic oligonucleotide
agaaccuuucuugagaacu

SEQ ID NO: 1339530 - RNA, 19 nt, Artificial Sequence
  Description of Artificial Sequence: Synthetic oligonucleotide
aagaaccuuucuugagaac

SEQ ID NO: 1339531 - RNA, 19 nt, Artificial Sequence
  Description of Artificial Sequence: Synthetic oligonucleotide
gaugaauaaucuucaucac

SEQ ID NO: 1339532 - RNA, 19 nt, Artificial Sequence
  Description of Artificial Sequence: Synthetic oligonucleotide
ucaaguccuacugcuaagg

SEQ ID NO: 1339533 - RNA, 19 nt, Artificial Sequence
  Description of Artificial Sequence: Synthetic oligonucleotide
cuuaaagggacggaaggag

SEQ ID NO: 1339534 - RNA, 19 nt, Artificial Sequence
  Description of Artificial Sequence: Synthetic oligonucleotide
uuuaguccaguugagggac

SEQ ID NO: 1339535 - RNA, 19 nt, Artificial Sequence
  Description of Artificial Sequence: Synthetic oligonucleotide
ugguuuacagagacuagac

SEQ ID NO: 1339536 - RNA, 19 nt, Artificial Sequence
  Description of Artificial Sequence: Synthetic oligonucleotide
ucaaccacuccuugauggg

SEQ ID NO: 1339537 - RNA, 19 nt, Artificial Sequence
  Description of Artificial Sequence: Synthetic oligonucleotide
agagauuagagcagaggac

SEQ ID NO: 1339538 - RNA, 19 nt, Artificial Sequence
  Description of Artificial Sequence: Synthetic oligonucleotide
ucuggaaccacgguuugag

SEQ ID NO: 1339539 - RNA, 19 nt, Artificial Sequence
  Description of Artificial Sequence: Synthetic oligonucleotide
aacaaacgguaucgagugg

SEQ ID NO: 1339540 - RNA, 19 nt, Artificial Sequence
  Description of Artificial Sequence: Synthetic oligonucleotide
agagaggcaacuggaaugg

SEQ ID NO: 1339541 - RNA, 19 nt, Artificial Sequence
  Description of Artificial Sequence: Synthetic oligonucleotide
acacaaacggcaaaacuuc

SEQ ID NO: 1339542 - RNA, 19 nt, Artificial Sequence
  Description of Artificial Sequence: Synthetic oligonucleotide
aagcugaucaucagaagug

SEQ ID NO: 1339543 - RNA, 19 nt, Artificial Sequence
  Description of Artificial Sequence: Synthetic oligonucleotide
cuuugaaauaccaaagaua

SEQ ID NO: 1339544 - RNA, 19 nt, Artificial Sequence
  Description of Artificial Sequence: Synthetic oligonucleotide
agcccaagaaccuuucuug

SEQ ID NO: 1339545 - RNA, 19 nt, Artificial Sequence
  Description of Artificial Sequence: Synthetic oligonucleotide
caagaggauuacaaguuug

SEQ ID NO: 1339546 - RNA, 19 nt, Artificial Sequence
  Description of Artificial Sequence: Synthetic oligonucleotide
ucauacuucgacucuguuc

SEQ ID NO: 1339547 - RNA, 19 nt, Artificial Sequence
  Description of Artificial Sequence: Synthetic oligonucleotide
aguuucuaugucaugucgg

SEQ ID NO: 1339548 - RNA, 19 nt, Artificial Sequence
  Description of Artificial Sequence: Synthetic oligonucleotide
aggaccacgguucauauua

SEQ ID NO: 1339549 - RNA, 19 nt, Artificial Sequence
  Description of Artificial Sequence: Synthetic oligonucleotide
gcuugguccgcacaaaugg

SEQ ID NO: 1339550 - RNA, 19 nt, Artificial Sequence
  Description of Artificial Sequence: Synthetic oligonucleotide
ucacaagaauucaaccacu

SEQ ID NO: 1339551 - RNA, 19 nt, Artificial Sequence
  Description of Artificial Sequence: Synthetic oligonucleotide
uccccgaguagcuuggucc

SEQ ID NO: 1339552 - RNA, 19 nt, Artificial Sequence
  Description of Artificial Sequence: Synthetic oligonucleotide
caguuucuaugucaugucg

SEQ ID NO: 1339553 - RNA, 19 nt, Artificial Sequence
  Description of Artificial Sequence: Synthetic oligonucleotide
acccauaaacacaaacggc

SEQ ID NO: 1339554 - RNA, 19 nt, Artificial Sequence
  Description of Artificial Sequence: Synthetic oligonucleotide
cauacuucgacucuguucu

SEQ ID NO: 1339555 - RNA, 19 nt, Artificial Sequence
  Description of Artificial Sequence: Synthetic oligonucleotide
agcuccacuucauccaacg

SEQ ID NO: 1339556 - RNA, 19 nt, Artificial Sequence
  Description of Artificial Sequence: Synthetic oligonucleotide
ucuaugucaugucggauuu

SEQ ID NO: 1339557 - RNA, 19 nt, Artificial Sequence
  Description of Artificial Sequence: Synthetic oligonucleotide
cugaugaauaaucuucauc

SEQ ID NO: 1339558 - RNA, 19 nt, Artificial Sequence
  Description of Artificial Sequence: Synthetic oligonucleotide
gaauuccccgaguagcuug

SEQ ID NO: 1339559 - RNA, 19 nt, Artificial Sequence
  Description of Artificial Sequence: Synthetic oligonucleotide
gguaauucagcuuugaaau

SEQ ID NO: 1339560 - RNA, 19 nt, Artificial Sequence
  Description of Artificial Sequence: Synthetic oligonucleotide
gaacuuaaagggacggaag

SEQ ID NO: 1339561 - RNA, 19 nt, Artificial Sequence
  Description of Artificial Sequence: Synthetic oligonucleotide
ugugucuggaaccacgguu

SEQ ID NO: 1339562 - RNA, 19 nt, Artificial Sequence
  Description of Artificial Sequence: Synthetic oligonucleotide
ucaagaucacaaucaucgc

SEQ ID NO: 1339563 - RNA, 19 nt, Artificial Sequence
  Description of Artificial Sequence: Synthetic oligonucleotide
cuucucuuaaagucacagc

SEQ ID NO: 1339564 - RNA, 19 nt, Artificial Sequence
  Description of Artificial Sequence: Synthetic oligonucleotide
uaaaagucucaucuucgau

SEQ ID NO: 1339565 - RNA, 19 nt, Artificial Sequence
  Description of Artificial Sequence: Synthetic oligonucleotide
ucaguuuaccacugucuug

SEQ ID NO: 1339566 - RNA, 19 nt, Artificial Sequence
  Description of Artificial Sequence: Synthetic oligonucleotide
ucccuugccagccaucuga

SEQ ID NO: 1339567 - RNA, 19 nt, Artificial Sequence
  Description of Artificial Sequence: Synthetic oligonucleotide
uucuaugucaugucggauu

SEQ ID NO: 1339568 - RNA, 19 nt, Artificial Sequence
  Description of Artificial Sequence: Synthetic oligonucleotide
uauuuaucuuuuaguuacu

SEQ ID NO: 1339569 - RNA, 19 nt, Artificial Sequence
  Description of Artificial Sequence: Synthetic oligonucleotide
ucacgguccgcuuuucgag

SEQ ID NO: 1339570 - RNA, 19 nt, Artificial Sequence
  Description of Artificial Sequence: Synthetic oligonucleotide
ucuagagaggcaacuggaa

SEQ ID NO: 1339571 - RNA, 19 nt, Artificial Sequence
  Description of Artificial Sequence: Synthetic oligonucleotide
uuuuaggaguugucugcag

SEQ ID NO: 1339572 - RNA, 19 nt, Artificial Sequence
  Description of Artificial Sequence: Synthetic oligonucleotide
aacuggacccucucaaaau

SEQ ID NO: 1339573 - RNA, 19 nt, Artificial Sequence
  Description of Artificial Sequence: Synthetic oligonucleotide
uuguucaaagaagcccucg

SEQ ID NO: 1339574 - RNA, 19 nt, Artificial Sequence
  Description of Artificial Sequence: Synthetic oligonucleotide
gagaacuucagaucuggaa

SEQ ID NO: 1339575 - RNA, 19 nt, Artificial Sequence
  Description of Artificial Sequence: Synthetic oligonucleotide
aaauagcuaauggucaguu

SEQ ID NO: 1339576 - RNA, 19 nt, Artificial Sequence
  Description of Artificial Sequence: Synthetic oligonucleotide
ugaaacggggccacuggca

SEQ ID NO: 1339577 - RNA, 19 nt, Artificial Sequence
  Description of Artificial Sequence: Synthetic oligonucleotide
cuggaauuccccgaguagc

SEQ ID NO: 1339578 - RNA, 19 nt, Artificial Sequence
  Description of Artificial Sequence: Synthetic oligonucleotide
agggcugaaccuguggggc

SEQ ID NO: 1339579 - RNA, 19 nt, Artificial Sequence
  Description of Artificial Sequence: Synthetic oligonucleotide
acgguaucgagugggaggg

SEQ ID NO: 1339580 - RNA, 19 nt, Artificial Sequence
  Description of Artificial Sequence: Synthetic oligonucleotide
agcuaauggucaguuuacc

SEQ ID NO: 1339581 - RNA, 19 nt, Artificial Sequence
  Description of Artificial Sequence: Synthetic oligonucleotide
aucaccucccuugccagcc

SEQ ID NO: 1339582 - RNA, 19 nt, Artificial Sequence
  Description of Artificial Sequence: Synthetic oligonucleotide
aauagcuaauggucaguuu

SEQ ID NO: 1339583 - RNA, 19 nt, Artificial Sequence
  Description of Artificial Sequence: Synthetic oligonucleotide
ucaaaauaaucaaguccua

SEQ ID NO: 1339584 - RNA, 19 nt, Artificial Sequence
  Description of Artificial Sequence: Synthetic oligonucleotide
caagaucacaaucaucgca

SEQ ID NO: 1339585 - RNA, 19 nt, Artificial Sequence
  Description of Artificial Sequence: Synthetic oligonucleotide
cacgguucauauuacuuuc

SEQ ID NO: 1339586 - RNA, 19 nt, Artificial Sequence
  Description of Artificial Sequence: Synthetic oligonucleotide
uucgacucuguucuucuuc

SEQ ID NO: 1339587 - RNA, 19 nt, Artificial Sequence
  Description of Artificial Sequence: Synthetic oligonucleotide
uggaauagucugauucuuc

SEQ ID NO: 1339588 - RNA, 19 nt, Artificial Sequence
  Description of Artificial Sequence: Synthetic oligonucleotide
aauuccccgaguagcuugg

SEQ ID NO: 1339589 - RNA, 19 nt, Artificial Sequence
  Description of Artificial Sequence: Synthetic oligonucleotide
ugaaaacaaacgguaucga

SEQ ID NO: 1339590 - RNA, 19 nt, Artificial Sequence
  Description of Artificial Sequence: Synthetic oligonucleotide
caccauaucaaaguucuuc

SEQ ID NO: 1339591 - RNA, 19 nt, Artificial Sequence
  Description of Artificial Sequence: Synthetic oligonucleotide
auaccaaagauagguuguc

SEQ ID NO: 1339592 - RNA, 19 nt, Artificial Sequence
  Description of Artificial Sequence: Synthetic oligonucleotide
gaaacggggccacuggcac

SEQ ID NO: 1339593 - RNA, 19 nt, Artificial Sequence
  Description of Artificial Sequence: Synthetic oligonucleotide
ugguccgcacaaauggccc

SEQ ID NO: 1339594 - RNA, 19 nt, Artificial Sequence
  Description of Artificial Sequence: Synthetic oligonucleotide
uucgagcuucuucuucuag

SEQ ID NO: 1339595 - RNA, 19 nt, Artificial Sequence
  Description of Artificial Sequence: Synthetic oligonucleotide
ugaucauugugacuuucuu

SEQ ID NO: 1339596 - RNA, 19 nt, Artificial Sequence
  Description of Artificial Sequence: Synthetic oligonucleotide
uguguauuuuaggucacaa

SEQ ID NO: 1339597 - RNA, 19 nt, Artificial Sequence
  Description of Artificial Sequence: Synthetic oligonucleotide
cacggccugaacuauguac

SEQ ID NO: 1339598 - RNA, 19 nt, Artificial Sequence
  Description of Artificial Sequence: Synthetic oligonucleotide
ucgacucuguucuucuucu

SEQ ID NO: 1339599 - RNA, 19 nt, Artificial Sequence
  Description of Artificial Sequence: Synthetic oligonucleotide
ucucaaaauggaucagcuc

SEQ ID NO: 1339600 - RNA, 19 nt, Artificial Sequence
  Description of Artificial Sequence: Synthetic oligonucleotide
gagcaagaggauuacaagu

SEQ ID NO: 1339601 - RNA, 19 nt, Artificial Sequence
  Description of Artificial Sequence: Synthetic oligonucleotide
caucuucgaucucagacuc

SEQ ID NO: 1339602 - RNA, 19 nt, Artificial Sequence
  Description of Artificial Sequence: Synthetic oligonucleotide
agaauuguagaaauagcua

SEQ ID NO: 1339603 - RNA, 19 nt, Artificial Sequence
  Description of Artificial Sequence: Synthetic oligonucleotide
agaaggauuaaaagucuca

SEQ ID NO: 1339604 - RNA, 19 nt, Artificial Sequence
  Description of Artificial Sequence: Synthetic oligonucleotide
caaagcugaucaucagaag

SEQ ID NO: 1339605 - RNA, 19 nt, Artificial Sequence
  Description of Artificial Sequence: Synthetic oligonucleotide
aaacgguaucgagugggag

SEQ ID NO: 1339606 - RNA, 19 nt, Artificial Sequence
  Description of Artificial Sequence: Synthetic oligonucleotide
gaaacaugcuccagcuaag

SEQ ID NO: 1339607 - RNA, 19 nt, Artificial Sequence
  Description of Artificial Sequence: Synthetic oligonucleotide
uguagagaagcugcaggga

SEQ ID NO: 1339608 - RNA, 19 nt, Artificial Sequence
  Description of Artificial Sequence: Synthetic oligonucleotide
cagguggauguagagaagc

SEQ ID NO: 1339609 - RNA, 19 nt, Artificial Sequence
  Description of Artificial Sequence: Synthetic oligonucleotide
cuggaacuuaaagggacgg

SEQ ID NO: 1339610 - RNA, 19 nt, Artificial Sequence
  Description of Artificial Sequence: Synthetic oligonucleotide
caucgcagagcccaagaac

SEQ ID NO: 1339611 - RNA, 19 nt, Artificial Sequence
  Description of Artificial Sequence: Synthetic oligonucleotide
gauagguugucagaugaaa

SEQ ID NO: 1339612 - RNA, 19 nt, Artificial Sequence
  Description of Artificial Sequence: Synthetic oligonucleotide
ugagccacggccugaacua

SEQ ID NO: 1339613 - RNA, 19 nt, Artificial Sequence
  Description of Artificial Sequence: Synthetic oligonucleotide
uauguacagaugccuuccu

SEQ ID NO: 1339614 - RNA, 19 nt, Artificial Sequence
  Description of Artificial Sequence: Synthetic oligonucleotide
gaacuucagaucuggaacu

SEQ ID NO: 1339615 - RNA, 19 nt, Artificial Sequence
  Description of Artificial Sequence: Synthetic oligonucleotide
agucucaucuucgaucuca

SEQ ID NO: 1339616 - RNA, 19 nt, Artificial Sequence
  Description of Artificial Sequence: Synthetic oligonucleotide
uucacugcccagagacucc

SEQ ID NO: 1339617 - RNA, 19 nt, Artificial Sequence
  Description of Artificial Sequence: Synthetic oligonucleotide
cuccagcuaaguguggugg

SEQ ID NO: 1339618 - RNA, 19 nt, Artificial Sequence
  Description of Artificial Sequence: Synthetic oligonucleotide
uggucaguuuaccacuguc

SEQ ID NO: 1339619 - RNA, 19 nt, Artificial Sequence
  Description of Artificial Sequence: Synthetic oligonucleotide
gucugcagagagauuagag

SEQ ID NO: 1339620 - RNA, 19 nt, Artificial Sequence
  Description of Artificial Sequence: Synthetic oligonucleotide
ugagaacuucagaucugga

SEQ ID NO: 1339621 - RNA, 19 nt, Artificial Sequence
  Description of Artificial Sequence: Synthetic oligonucleotide
aaagugggacagguggaug

SEQ ID NO: 1339622 - RNA, 19 nt, Artificial Sequence
  Description of Artificial Sequence: Synthetic oligonucleotide
guauuuuaggucacaagaa

SEQ ID NO: 1339623 - RNA, 19 nt, Artificial Sequence
  Description of Artificial Sequence: Synthetic oligonucleotide
caccuuguucaaagaagcc

SEQ ID NO: 1339624 - RNA, 19 nt, Artificial Sequence
  Description of Artificial Sequence: Synthetic oligonucleotide
uggaauggcauugaucauu

SEQ ID NO: 1339625 - RNA, 19 nt, Artificial Sequence
  Description of Artificial Sequence: Synthetic oligonucleotide
acggcaaaacuucaacaaa

SEQ ID NO: 1339626 - RNA, 19 nt, Artificial Sequence
  Description of Artificial Sequence: Synthetic oligonucleotide
uccagcuaagugugguggc

SEQ ID NO: 1339627 - RNA, 19 nt, Artificial Sequence
  Description of Artificial Sequence: Synthetic oligonucleotide
gaugcugcagagaaaggaa

SEQ ID NO: 1339628 - RNA, 19 nt, Artificial Sequence
  Description of Artificial Sequence: Synthetic oligonucleotide
guaauccuuguagacaauc

SEQ ID NO: 1339629 - RNA, 19 nt, Artificial Sequence
  Description of Artificial Sequence: Synthetic oligonucleotide
guggguguggccuccuucc

SEQ ID NO: 1339630 - RNA, 19 nt, Artificial Sequence
  Description of Artificial Sequence: Synthetic oligonucleotide
ccucguaacggcuuucacg

SEQ ID NO: 1339631 - RNA, 19 nt, Artificial Sequence
  Description of Artificial Sequence: Synthetic oligonucleotide
ugucuggaaccacgguuug

SEQ ID NO: 1339632 - RNA, 19 nt, Artificial Sequence
  Description of Artificial Sequence: Synthetic oligonucleotide
aacuauguacagaugccuu

SEQ ID NO: 1339633 - RNA, 19 nt, Artificial Sequence
  Description of Artificial Sequence: Synthetic oligonucleotide
aaucaucgcagagcccaag

SEQ ID NO: 1339634 - RNA, 19 nt, Artificial Sequence
  Description of Artificial Sequence: Synthetic oligonucleotide
caagaaccuuucuugagaa

SEQ ID NO: 1339635 - RNA, 19 nt, Artificial Sequence
  Description of Artificial Sequence: Synthetic oligonucleotide
agggaggacggcaagauaa

SEQ ID NO: 1339636 - RNA, 19 nt, Artificial Sequence
  Description of Artificial Sequence: Synthetic oligonucleotide
gaagugaccaacacaagau

SEQ ID NO: 1339637 - RNA, 19 nt, Artificial Sequence
  Description of Artificial Sequence: Synthetic oligonucleotide
aucaucgcagagcccaaga

SEQ ID NO: 1339638 - RNA, 19 nt, Artificial Sequence
  Description of Artificial Sequence: Synthetic oligonucleotide
cugcuaaggagagaaaaca

SEQ ID NO: 1339639 - RNA, 19 nt, Artificial Sequence
  Description of Artificial Sequence: Synthetic oligonucleotide
uccggcucauacuucgacu

SEQ ID NO: 1339640 - RNA, 19 nt, Artificial Sequence
  Description of Artificial Sequence: Synthetic oligonucleotide
ucuugcuguaauccuugua

SEQ ID NO: 1339641 - RNA, 19 nt, Artificial Sequence
  Description of Artificial Sequence: Synthetic oligonucleotide
guaacggcuuucacggucc

SEQ ID NO: 1339642 - RNA, 19 nt, Artificial Sequence
  Description of Artificial Sequence: Synthetic oligonucleotide
aacggcuuucacgguccgc

SEQ ID NO: 1339643 - RNA, 19 nt, Artificial Sequence
  Description of Artificial Sequence: Synthetic oligonucleotide
uaccaaagauagguuguca

SEQ ID NO: 1339644 - RNA, 19 nt, Artificial Sequence
  Description of Artificial Sequence: Synthetic oligonucleotide
agaugaaaacaaacgguau

SEQ ID NO: 1339645 - RNA, 19 nt, Artificial Sequence
  Description of Artificial Sequence: Synthetic oligonucleotide
uacagaugccuuccucuuc

SEQ ID NO: 1339646 - RNA, 19 nt, Artificial Sequence
  Description of Artificial Sequence: Synthetic oligonucleotide
ucaggugaaacuggacccu

SEQ ID NO: 1339647 - RNA, 19 nt, Artificial Sequence
  Description of Artificial Sequence: Synthetic oligonucleotide
gaguccagccuugugggug

SEQ ID NO: 1339648 - RNA, 19 nt, Artificial Sequence
  Description of Artificial Sequence: Synthetic oligonucleotide
gguuccaggaaagaccagc

SEQ ID NO: 1339649 - RNA, 19 nt, Artificial Sequence
  Description of Artificial Sequence: Synthetic oligonucleotide
caguugagggacuguacuc

SEQ ID NO: 1339650 - RNA, 19 nt, Artificial Sequence
  Description of Artificial Sequence: Synthetic oligonucleotide
uuccggcucauacuucgac

SEQ ID NO: 1339651 - RNA, 19 nt, Artificial Sequence
  Description of Artificial Sequence: Synthetic oligonucleotide
cagccaucugaaacggggc

SEQ ID NO: 1339652 - RNA, 19 nt, Artificial Sequence
  Description of Artificial Sequence: Synthetic oligonucleotide
cacuucauccaacgucacc

SEQ ID NO: 1339653 - RNA, 19 nt, Artificial Sequence
  Description of Artificial Sequence: Synthetic oligonucleotide
cagagagauuagagcagag

SEQ ID NO: 1339654 - RNA, 19 nt, Artificial Sequence
  Description of Artificial Sequence: Synthetic oligonucleotide
uuacagagacuagacuguc

SEQ ID NO: 1339655 - RNA, 19 nt, Artificial Sequence
  Description of Artificial Sequence: Synthetic oligonucleotide
uagucauccucagaaggau

SEQ ID NO: 1339656 - RNA, 19 nt, Artificial Sequence
  Description of Artificial Sequence: Synthetic oligonucleotide
ggaauggcauugaucauug

SEQ ID NO: 1339657 - RNA, 19 nt, Artificial Sequence
  Description of Artificial Sequence: Synthetic oligonucleotide
uggaacuuaaagggacgga

SEQ ID NO: 1339658 - RNA, 19 nt, Artificial Sequence
  Description of Artificial Sequence: Synthetic oligonucleotide
gagcagaggaccacgguuc

SEQ ID NO: 1339659 - RNA, 19 nt, Artificial Sequence
  Description of Artificial Sequence: Synthetic oligonucleotide
uuggaauagucugauucuu

SEQ ID NO: 1339660 - RNA, 19 nt, Artificial Sequence
  Description of Artificial Sequence: Synthetic oligonucleotide
agcuaagugugguggcuca

SEQ ID NO: 1339661 - RNA, 19 nt, Artificial Sequence
  Description of Artificial Sequence: Synthetic oligonucleotide
agcugaucaucagaaguga

SEQ ID NO: 1339662 - RNA, 19 nt, Artificial Sequence
  Description of Artificial Sequence: Synthetic oligonucleotide
acggccugaacuauguaca

SEQ ID NO: 1339663 - RNA, 19 nt, Artificial Sequence
  Description of Artificial Sequence: Synthetic oligonucleotide
cugguuuacagagacuaga

SEQ ID NO: 1339664 - RNA, 19 nt, Artificial Sequence
  Description of Artificial Sequence: Synthetic oligonucleotide
cagaagugaccaacacaag

SEQ ID NO: 1339665 - RNA, 19 nt, Artificial Sequence
  Description of Artificial Sequence: Synthetic oligonucleotide
aaacggggccacuggcaca

SEQ ID NO: 1339666 - RNA, 19 nt, Artificial Sequence
  Description of Artificial Sequence: Synthetic oligonucleotide
gaacuauguacagaugccu

SEQ ID NO: 1339667 - RNA, 19 nt, Artificial Sequence
  Description of Artificial Sequence: Synthetic oligonucleotide
cauaaacacaaacggcaaa

SEQ ID NO: 1339668 - RNA, 19 nt, Artificial Sequence
  Description of Artificial Sequence: Synthetic oligonucleotide
accacuccuugaugggguc

SEQ ID NO: 1339669 - RNA, 19 nt, Artificial Sequence
  Description of Artificial Sequence: Synthetic oligonucleotide
ucgcagagcccaagaaccu

SEQ ID NO: 1339670 - RNA, 19 nt, Artificial Sequence
  Description of Artificial Sequence: Synthetic oligonucleotide
ugucugcagagagauuaga

SEQ ID NO: 1339671 - RNA, 19 nt, Artificial Sequence
  Description of Artificial Sequence: Synthetic oligonucleotide
uuaccacugucuugguaau

SEQ ID NO: 1339672 - RNA, 19 nt, Artificial Sequence
  Description of Artificial Sequence: Synthetic oligonucleotide
ucuuccucguaacggcuuu

SEQ ID NO: 1339673 - RNA, 19 nt, Artificial Sequence
  Description of Artificial Sequence: Synthetic oligonucleotide
acggcaagauaaagucccc

SEQ ID NO: 1339674 - RNA, 19 nt, Artificial Sequence
  Description of Artificial Sequence: Synthetic oligonucleotide
cucucaaaauggaucagcu

SEQ ID NO: 1339675 - RNA, 19 nt, Artificial Sequence
  Description of Artificial Sequence: Synthetic oligonucleotide
aaaaucugagaagccccuu

SEQ ID NO: 1339676 - RNA, 19 nt, Artificial Sequence
  Description of Artificial Sequence: Synthetic oligonucleotide
cacgguccgcuuuucgagc

SEQ ID NO: 1339677 - RNA, 19 nt, Artificial Sequence
  Description of Artificial Sequence: Synthetic oligonucleotide
aacuucagaucuggaacuu

SEQ ID NO: 1339678 - RNA, 19 nt, Artificial Sequence
  Description of Artificial Sequence: Synthetic oligonucleotide
cuucccgcuucucuucuug

SEQ ID NO: 1339679 - RNA, 19 nt, Artificial Sequence
  Description of Artificial Sequence: Synthetic oligonucleotide
ugcuccagcuaaguguggu

SEQ ID NO: 1339680 - RNA, 19 nt, Artificial Sequence
  Description of Artificial Sequence: Synthetic oligonucleotide
gagacuccuuggaauaguc

SEQ ID NO: 1339681 - RNA, 19 nt, Artificial Sequence
  Description of Artificial Sequence: Synthetic oligonucleotide
ggaacuuaaagggacggaa

SEQ ID NO: 1339682 - RNA, 19 nt, Artificial Sequence
  Description of Artificial Sequence: Synthetic oligonucleotide
gguggauguagagaagcug

SEQ ID NO: 1339683 - RNA, 19 nt, Artificial Sequence
  Description of Artificial Sequence: Synthetic oligonucleotide
gucuagagaggcaacugga

SEQ ID NO: 1339684 - RNA, 19 nt, Artificial Sequence
  Description of Artificial Sequence: Synthetic oligonucleotide
uucuuccucguaacggcuu

SEQ ID NO: 1339685 - RNA, 19 nt, Artificial Sequence
  Description of Artificial Sequence: Synthetic oligonucleotide
ucggcaucacuucccucac

SEQ ID NO: 1339686 - RNA, 19 nt, Artificial Sequence
  Description of Artificial Sequence: Synthetic oligonucleotide
ggacuguacuccuucugug

SEQ ID NO: 1339687 - RNA, 19 nt, Artificial Sequence
  Description of Artificial Sequence: Synthetic oligonucleotide
uguacuccuucuguguauu

SEQ ID NO: 1339688 - RNA, 19 nt, Artificial Sequence
  Description of Artificial Sequence: Synthetic oligonucleotide
uccucguaacggcuuucac

SEQ ID NO: 1339689 - RNA, 19 nt, Artificial Sequence
  Description of Artificial Sequence: Synthetic oligonucleotide
cacaaucaucgcagagccc

SEQ ID NO: 1339690 - RNA, 19 nt, Artificial Sequence
  Description of Artificial Sequence: Synthetic oligonucleotide
acuccuuggaauagucuga

SEQ ID NO: 1339691 - RNA, 19 nt, Artificial Sequence
  Description of Artificial Sequence: Synthetic oligonucleotide
caaaauggaucagcuccac

SEQ ID NO: 1339692 - RNA, 19 nt, Artificial Sequence
  Description of Artificial Sequence: Synthetic oligonucleotide
uaucgagugggaggggccu

SEQ ID NO: 1339693 - RNA, 19 nt, Artificial Sequence
  Description of Artificial Sequence: Synthetic oligonucleotide
accacgguuugagccacgg

SEQ ID NO: 1339694 - RNA, 19 nt, Artificial Sequence
  Description of Artificial Sequence: Synthetic oligonucleotide
gagacuagacugucucaaa

SEQ ID NO: 1339695 - RNA, 19 nt, Artificial Sequence
  Description of Artificial Sequence: Synthetic oligonucleotide
agagacuccuuggaauagu

SEQ ID NO: 1339696 - RNA, 19 nt, Artificial Sequence
  Description of Artificial Sequence: Synthetic oligonucleotide
uuccucguaacggcuuuca

SEQ ID NO: 1339697 - RNA, 19 nt, Artificial Sequence
  Description of Artificial Sequence: Synthetic oligonucleotide
uuacaaguuugaggccagc

SEQ ID NO: 1339698 - RNA, 19 nt, Artificial Sequence
  Description of Artificial Sequence: Synthetic oligonucleotide
auggggucuagagaggcaa

SEQ ID NO: 1339699 - RNA, 19 nt, Artificial Sequence
  Description of Artificial Sequence: Synthetic oligonucleotide
uucuucugcuucugaugaa

SEQ ID NO: 1339700 - RNA, 19 nt, Artificial Sequence
  Description of Artificial Sequence: Synthetic oligonucleotide
cagagacuccuuggaauag

SEQ ID NO: 1339701 - RNA, 19 nt, Artificial Sequence
  Description of Artificial Sequence: Synthetic oligonucleotide
aaagaccagccaccuuguu

SEQ ID NO: 1339702 - RNA, 19 nt, Artificial Sequence
  Description of Artificial Sequence: Synthetic oligonucleotide
ggauguagagaagcugcag

SEQ ID NO: 1339703 - RNA, 19 nt, Artificial Sequence
  Description of Artificial Sequence: Synthetic oligonucleotide
gguaucgagugggaggggc

SEQ ID NO: 1339704 - RNA, 19 nt, Artificial Sequence
  Description of Artificial Sequence: Synthetic oligonucleotide
ggugcagagcugugucugg

SEQ ID NO: 1339705 - RNA, 19 nt, Artificial Sequence
  Description of Artificial Sequence: Synthetic oligonucleotide
auggucaguuuaccacugu

SEQ ID NO: 1339706 - RNA, 19 nt, Artificial Sequence
  Description of Artificial Sequence: Synthetic oligonucleotide
uggggucuagagaggcaac

SEQ ID NO: 1339707 - RNA, 19 nt, Artificial Sequence
  Description of Artificial Sequence: Synthetic oligonucleotide
guaucgagugggaggggcc

SEQ ID NO: 1339708 - RNA, 19 nt, Artificial Sequence
  Description of Artificial Sequence: Synthetic oligonucleotide
gaggacggcaagauaaagu

SEQ ID NO: 1339709 - RNA, 19 nt, Artificial Sequence
  Description of Artificial Sequence: Synthetic oligonucleotide
acaaacggcaaaacuucaa

SEQ ID NO: 1339710 - RNA, 19 nt, Artificial Sequence
  Description of Artificial Sequence: Synthetic oligonucleotide
gguucauauuacuuucucu

SEQ ID NO: 1339711 - RNA, 19 nt, Artificial Sequence
  Description of Artificial Sequence: Synthetic oligonucleotide
caaguccuacugcuaagga

SEQ ID NO: 1339712 - RNA, 19 nt, Artificial Sequence
  Description of Artificial Sequence: Synthetic oligonucleotide
acgguccgcuuuucgagcu

SEQ ID NO: 1339713 - RNA, 19 nt, Artificial Sequence
  Description of Artificial Sequence: Synthetic oligonucleotide
caaacgguaucgaguggga

SEQ ID NO: 1339714 - RNA, 19 nt, Artificial Sequence
  Description of Artificial Sequence: Synthetic oligonucleotide
gaaauaccaaagauagguu

SEQ ID NO: 1339715 - RNA, 19 nt, Artificial Sequence
  Description of Artificial Sequence: Synthetic oligonucleotide
gcuaaggagagaaaacaaa

SEQ ID NO: 1339716 - RNA, 19 nt, Artificial Sequence
  Description of Artificial Sequence: Synthetic oligonucleotide
acgguuugagccacggccu

SEQ ID NO: 1339717 - RNA, 19 nt, Artificial Sequence
  Description of Artificial Sequence: Synthetic oligonucleotide
ccucagaaggauuaaaagu

SEQ ID NO: 1339718 - RNA, 19 nt, Artificial Sequence
  Description of Artificial Sequence: Synthetic oligonucleotide
gaaccuguggggccagaaa

SEQ ID NO: 1339719 - RNA, 19 nt, Artificial Sequence
  Description of Artificial Sequence: Synthetic oligonucleotide
gaaccacgguuugagccac

SEQ ID NO: 1339720 - RNA, 19 nt, Artificial Sequence
  Description of Artificial Sequence: Synthetic oligonucleotide
ccaagaaccuuucuugaga

SEQ ID NO: 1339721 - RNA, 19 nt, Artificial Sequence
  Description of Artificial Sequence: Synthetic oligonucleotide
accacgguucauauuacuu

SEQ ID NO: 1339722 - RNA, 19 nt, Artificial Sequence
  Description of Artificial Sequence: Synthetic oligonucleotide
ucccgcucucuucuucacu

SEQ ID NO: 1339723 - RNA, 19 nt, Artificial Sequence
  Description of Artificial Sequence: Synthetic oligonucleotide
gacggaaggagggcugaac

SEQ ID NO: 1339724 - RNA, 19 nt, Artificial Sequence
  Description of Artificial Sequence: Synthetic oligonucleotide
gggccacuggcacaugucc

SEQ ID NO: 1339725 - RNA, 19 nt, Artificial Sequence
  Description of Artificial Sequence: Synthetic oligonucleotide
ugaaccuguggggccagaa

SEQ ID NO: 1339726 - RNA, 19 nt, Artificial Sequence
  Description of Artificial Sequence: Synthetic oligonucleotide
ccuacugcuaaggagagaa

SEQ ID NO: 1339727 - RNA, 19 nt, Artificial Sequence
  Description of Artificial Sequence: Synthetic oligonucleotide
uuccccgaguagcuugguc

SEQ ID NO: 1339728 - RNA, 19 nt, Artificial Sequence
  Description of Artificial Sequence: Synthetic oligonucleotide
acagguggauguagagaag

SEQ ID NO: 1339729 - RNA, 19 nt, Artificial Sequence
  Description of Artificial Sequence: Synthetic oligonucleotide
ccaaagauagguugucaga

SEQ ID NO: 1339730 - RNA, 19 nt, Artificial Sequence
  Description of Artificial Sequence: Synthetic oligonucleotide
gugggaggggccuccugcc

SEQ ID NO: 1339731 - RNA, 19 nt, Artificial Sequence
  Description of Artificial Sequence: Synthetic oligonucleotide
ccuggaauuccccgaguag

SEQ ID NO: 1339732 - RNA, 19 nt, Artificial Sequence
  Description of Artificial Sequence: Synthetic oligonucleotide
ggacggcaagauaaagucc

SEQ ID NO: 1339733 - RNA, 19 nt, Artificial Sequence
  Description of Artificial Sequence: Synthetic oligonucleotide
guuuaccacugucuuggua

SEQ ID NO: 1339734 - RNA, 19 nt, Artificial Sequence
  Description of Artificial Sequence: Synthetic oligonucleotide
cuagagaggcaacuggaau

SEQ ID NO: 1339735 - RNA, 19 nt, Artificial Sequence
  Description of Artificial Sequence: Synthetic oligonucleotide
acgguucauauuacuuucu

SEQ ID NO: 1339736 - RNA, 19 nt, Artificial Sequence
  Description of Artificial Sequence: Synthetic oligonucleotide
ccugguuuacagagacuag

SEQ ID NO: 1339737 - RNA, 19 nt, Artificial Sequence
  Description of Artificial Sequence: Synthetic oligonucleotide
ccuuguucaaagaagcccu

SEQ ID NO: 1339738 - RNA, 19 nt, Artificial Sequence
  Description of Artificial Sequence: Synthetic oligonucleotide
ggaggacggcaagauaaag

SEQ ID NO: 1339739 - RNA, 19 nt, Artificial Sequence
  Description of Artificial Sequence: Synthetic oligonucleotide
gccugaacuauguacagau

SEQ ID NO: 1339740 - RNA, 19 nt, Artificial Sequence
  Description of Artificial Sequence: Synthetic oligonucleotide
cccgcucucuucuucacug

SEQ ID NO: 1339741 - RNA, 19 nt, Artificial Sequence
  Description of Artificial Sequence: Synthetic oligonucleotide
ggcucauacuucgacucug

SEQ ID NO: 1339742 - RNA, 19 nt, Artificial Sequence
  Description of Artificial Sequence: Synthetic oligonucleotide
agauagguugucagaugaa

SEQ ID NO: 1339743 - RNA, 19 nt, Artificial Sequence
  Description of Artificial Sequence: Synthetic oligonucleotide
guugagggacuguacuccu

SEQ ID NO: 1339744 - RNA, 19 nt, Artificial Sequence
  Description of Artificial Sequence: Synthetic oligonucleotide
ucguaacggcuuucacggu

SEQ ID NO: 1339745 - RNA, 19 nt, Artificial Sequence
  Description of Artificial Sequence: Synthetic oligonucleotide
ccggcucauacuucgacuc

SEQ ID NO: 1339746 - RNA, 19 nt, Artificial Sequence
  Description of Artificial Sequence: Synthetic oligonucleotide
ccccgaguagcuugguccg

SEQ ID NO: 1339747 - RNA, 19 nt, Artificial Sequence
  Description of Artificial Sequence: Synthetic oligonucleotide
caaucaccauaucaaaguu

SEQ ID NO: 1339748 - RNA, 19 nt, Artificial Sequence
  Description of Artificial Sequence: Synthetic oligonucleotide
acuucagaucuggaacuua

SEQ ID NO: 1339749 - RNA, 19 nt, Artificial Sequence
  Description of Artificial Sequence: Synthetic oligonucleotide
gaccacgguucauauuacu

SEQ ID NO: 1339750 - RNA, 19 nt, Artificial Sequence
  Description of Artificial Sequence: Synthetic oligonucleotide
ccugaacuauguacagaug

SEQ ID NO: 1339751 - RNA, 19 nt, Artificial Sequence
  Description of Artificial Sequence: Synthetic oligonucleotide
guggccuccuucccgcuuc

SEQ ID NO: 1339752 - RNA, 19 nt, Artificial Sequence
  Description of Artificial Sequence: Synthetic oligonucleotide
gaaagaccagccaccuugu

SEQ ID NO: 1339753 - RNA, 19 nt, Artificial Sequence
  Description of Artificial Sequence: Synthetic oligonucleotide
gggugcagagcugugucug

SEQ ID NO: 1339754 - RNA, 19 nt, Artificial Sequence
  Description of Artificial Sequence: Synthetic oligonucleotide
gggucuagagaggcaacug

SEQ ID NO: 1339755 - RNA, 19 nt, Artificial Sequence
  Description of Artificial Sequence: Synthetic oligonucleotide
aaccacgguuugagccacg

SEQ ID NO: 1339756 - RNA, 19 nt, Artificial Sequence
  Description of Artificial Sequence: Synthetic oligonucleotide
gggacuguacuccuucugu

SEQ ID NO: 1339757 - RNA, 19 nt, Artificial Sequence
  Description of Artificial Sequence: Synthetic oligonucleotide
aggaaagaccagccaccuu

SEQ ID NO: 1339758 - RNA, 19 nt, Artificial Sequence
  Description of Artificial Sequence: Synthetic oligonucleotide
gaaggagggcugaaccugu

SEQ ID NO: 1339759 - RNA, 19 nt, Artificial Sequence
  Description of Artificial Sequence: Synthetic oligonucleotide
aggugaaacuggacccucu

SEQ ID NO: 1339760 - RNA, 19 nt, Artificial Sequence
  Description of Artificial Sequence: Synthetic oligonucleotide
cguaacggcuuucacgguc

SEQ ID NO: 1339761 - RNA, 19 nt, Artificial Sequence
  Description of Artificial Sequence: Synthetic oligonucleotide
gaaccuuucuugagaacuu

SEQ ID NO: 1339762 - RNA, 19 nt, Artificial Sequence
  Description of Artificial Sequence: Synthetic oligonucleotide
guuugagccacggccugaa

SEQ ID NO: 1339763 - RNA, 19 nt, Artificial Sequence
  Description of Artificial Sequence: Synthetic oligonucleotide
gggcugaaccuguggggcc

SEQ ID NO: 1339764 - RNA, 19 nt, Artificial Sequence
  Description of Artificial Sequence: Synthetic oligonucleotide
cacuucccucacccucagg

SEQ ID NO: 1339765 - RNA, 19 nt, Artificial Sequence
  Description of Artificial Sequence: Synthetic oligonucleotide
cuacugcuaaggagagaaa

SEQ ID NO: 1339766 - RNA, 19 nt, Artificial Sequence
  Description of Artificial Sequence: Synthetic oligonucleotide
agugggacagguggaugua

SEQ ID NO: 1339767 - RNA, 19 nt, Artificial Sequence
  Description of Artificial Sequence: Synthetic oligonucleotide
guccaguugagggacugua

SEQ ID NO: 1339768 - RNA, 19 nt, Artificial Sequence
  Description of Artificial Sequence: Synthetic oligonucleotide
aucuucgaucucagacuca

SEQ ID NO: 1339769 - RNA, 19 nt, Artificial Sequence
  Description of Artificial Sequence: Synthetic oligonucleotide
ggccuccugcccuucaaca

SEQ ID NO: 1339770 - RNA, 19 nt, Artificial Sequence
  Description of Artificial Sequence: Synthetic oligonucleotide
cuuucacgguccgcuuuuc

SEQ ID NO: 1339771 - RNA, 19 nt, Artificial Sequence
  Description of Artificial Sequence: Synthetic oligonucleotide
gugucuggaaccacgguuu

SEQ ID NO: 1339772 - RNA, 19 nt, Artificial Sequence
  Description of Artificial Sequence: Synthetic oligonucleotide
ccgcuuuucgagcuucuuc

SEQ ID NO: 1339773 - RNA, 19 nt, Artificial Sequence
  Description of Artificial Sequence: Synthetic oligonucleotide
caaucaucgcagagcccaa

SEQ ID NO: 1339774 - RNA, 19 nt, Artificial Sequence
  Description of Artificial Sequence: Synthetic oligonucleotide
cucccuugccagccaucug

SEQ ID NO: 1339775 - RNA, 19 nt, Artificial Sequence
  Description of Artificial Sequence: Synthetic oligonucleotide
gccccuucucuuaaaguca

SEQ ID NO: 1339776 - RNA, 19 nt, Artificial Sequence
  Description of Artificial Sequence: Synthetic oligonucleotide
cccuaguuuauuuaucuuu

SEQ ID NO: 1339777 - RNA, 19 nt, Artificial Sequence
  Description of Artificial Sequence: Synthetic oligonucleotide
ggcauugaucauugugacu

SEQ ID NO: 1339778 - RNA, 19 nt, Artificial Sequence
  Description of Artificial Sequence: Synthetic oligonucleotide
agguuccaggaaagaccag

SEQ ID NO: 1339779 - RNA, 19 nt, Artificial Sequence
  Description of Artificial Sequence: Synthetic oligonucleotide
gcaagaggauuacaaguuu

SEQ ID NO: 1339780 - RNA, 19 nt, Artificial Sequence
  Description of Artificial Sequence: Synthetic oligonucleotide
agccacggccugaacuaug

SEQ ID NO: 1339781 - RNA, 19 nt, Artificial Sequence
  Description of Artificial Sequence: Synthetic oligonucleotide
accucccuugccagccauc

SEQ ID NO: 1339782 - RNA, 19 nt, Artificial Sequence
  Description of Artificial Sequence: Synthetic oligonucleotide
ccaguugagggacuguacu

SEQ ID NO: 1339783 - RNA, 19 nt, Artificial Sequence
  Description of Artificial Sequence: Synthetic oligonucleotide
agccugguuuacagagacu

SEQ ID NO: 1339784 - RNA, 19 nt, Artificial Sequence
  Description of Artificial Sequence: Synthetic oligonucleotide
ggaccacgguucauauuac

SEQ ID NO: 1339785 - RNA, 19 nt, Artificial Sequence
  Description of Artificial Sequence: Synthetic oligonucleotide
cauugaucauugugacuuu

SEQ ID NO: 1339786 - RNA, 19 nt, Artificial Sequence
  Description of Artificial Sequence: Synthetic oligonucleotide
auuccccgaguagcuuggu

SEQ ID NO: 1339787 - RNA, 19 nt, Artificial Sequence
  Description of Artificial Sequence: Synthetic oligonucleotide
caucccaguccuucccgcu

SEQ ID NO: 1339788 - RNA, 19 nt, Artificial Sequence
  Description of Artificial Sequence: Synthetic oligonucleotide
cacuccuugauggggucua

SEQ ID NO: 1339789 - RNA, 19 nt, Artificial Sequence
  Description of Artificial Sequence: Synthetic oligonucleotide
gguuugagccacggccuga

SEQ ID NO: 1339790 - RNA, 19 nt, Artificial Sequence
  Description of Artificial Sequence: Synthetic oligonucleotide
gcagagcaagaggauuaca

SEQ ID NO: 1339791 - RNA, 19 nt, Artificial Sequence
  Description of Artificial Sequence: Synthetic oligonucleotide
cuccuuggaauagucugau

SEQ ID NO: 1339792 - RNA, 19 nt, Artificial Sequence
  Description of Artificial Sequence: Synthetic oligonucleotide
cccucucaaaauggaucag

SEQ ID NO: 1339793 - RNA, 19 nt, Artificial Sequence
  Description of Artificial Sequence: Synthetic oligonucleotide
gaggaccacgguucauauu

SEQ ID NO: 1339794 - RNA, 19 nt, Artificial Sequence
  Description of Artificial Sequence: Synthetic oligonucleotide
gcccucggggucaucaaca

SEQ ID NO: 1339795 - RNA, 19 nt, Artificial Sequence
  Description of Artificial Sequence: Synthetic oligonucleotide
ccacgguuugagccacggc

SEQ ID NO: 1339796 - RNA, 19 nt, Artificial Sequence
  Description of Artificial Sequence: Synthetic oligonucleotide
ccacgguucauauuacuuu

SEQ ID NO: 1339797 - RNA, 19 nt, Artificial Sequence
  Description of Artificial Sequence: Synthetic oligonucleotide
cagggaggacggcaagaua

SEQ ID NO: 1339798 - RNA, 19 nt, Artificial Sequence
  Description of Artificial Sequence: Synthetic oligonucleotide
caacuggaauggcauugau

SEQ ID NO: 1339799 - RNA, 19 nt, Artificial Sequence
  Description of Artificial Sequence: Synthetic oligonucleotide
cccagagacuccuuggaau

SEQ ID NO: 1339800 - RNA, 19 nt, Artificial Sequence
  Description of Artificial Sequence: Synthetic oligonucleotide
gggaggacggcaagauaaa

SEQ ID NO: 1339801 - RNA, 19 nt, Artificial Sequence
  Description of Artificial Sequence: Synthetic oligonucleotide
cucauacuucgacucuguu

SEQ ID NO: 1339802 - RNA, 19 nt, Artificial Sequence
  Description of Artificial Sequence: Synthetic oligonucleotide
ggggucuagagaggcaacu

SEQ ID NO: 1339803 - RNA, 19 nt, Artificial Sequence
  Description of Artificial Sequence: Synthetic oligonucleotide
cgaguagcuugguccgcac

SEQ ID NO: 1339804 - RNA, 19 nt, Artificial Sequence
  Description of Artificial Sequence: Synthetic oligonucleotide
gcuccacuucauccaacgu

SEQ ID NO: 1339805 - RNA, 19 nt, Artificial Sequence
  Description of Artificial Sequence: Synthetic oligonucleotide
gcucauacuucgacucugu

SEQ ID NO: 1339806 - RNA, 19 nt, Artificial Sequence
  Description of Artificial Sequence: Synthetic oligonucleotide
cgguuugagccacggccug

SEQ ID NO: 1339807 - RNA, 19 nt, Artificial Sequence
  Description of Artificial Sequence: Synthetic oligonucleotide
caucaacaauggucuucau

SEQ ID NO: 1339808 - RNA, 19 nt, Artificial Sequence
  Description of Artificial Sequence: Synthetic oligonucleotide
gagccacggccugaacuau

SEQ ID NO: 1339809 - RNA, 19 nt, Artificial Sequence
  Description of Artificial Sequence: Synthetic oligonucleotide
cccgaguagcuugguccgc

SEQ ID NO: 1339810 - RNA, 19 nt, Artificial Sequence
  Description of Artificial Sequence: Synthetic oligonucleotide
ccgaguagcuugguccgca

SEQ ID NO: 1339811 - RNA, 19 nt, Artificial Sequence
  Description of Artificial Sequence: Synthetic oligonucleotide
cccucggggucaucaacaa

SEQ ID NO: 1339812 - RNA, 19 nt, Artificial Sequence
  Description of Artificial Sequence: Synthetic oligonucleotide
cugaaccuguggggccaga

SEQ ID NO: 1339813 - RNA, 19 nt, Artificial Sequence
  Description of Artificial Sequence: Synthetic oligonucleotide
ccagcuaagugugguggcu

SEQ ID NO: 1339814 - RNA, 19 nt, Artificial Sequence
  Description of Artificial Sequence: Synthetic oligonucleotide
ccuugccagccaucugaaa

SEQ ID NO: 1339815 - RNA, 19 nt, Artificial Sequence
  Description of Artificial Sequence: Synthetic oligonucleotide
guggggccagaaacaugcu

SEQ ID NO: 1339816 - RNA, 19 nt, Artificial Sequence
  Description of Artificial Sequence: Synthetic oligonucleotide
ggacggaaggagggcugaa

SEQ ID NO: 1339817 - RNA, 19 nt, Artificial Sequence
  Description of Artificial Sequence: Synthetic oligonucleotide
ccucccuugccagccaucu

SEQ ID NO: 1339818 - RNA, 19 nt, Artificial Sequence
  Description of Artificial Sequence: Synthetic oligonucleotide
acggggccacuggcacaug

SEQ ID NO: 1339819 - RNA, 19 nt, Artificial Sequence
  Description of Artificial Sequence: Synthetic oligonucleotide
cggcuuucacgguccgcuu

SEQ ID NO: 1339820 - RNA, 19 nt, Artificial Sequence
  Description of Artificial Sequence: Synthetic oligonucleotide
ucuaauuacucuaauauug

SEQ ID NO: 1339821 - RNA, 19 nt, Artificial Sequence
  Description of Artificial Sequence: Synthetic oligonucleotide
agauguaucuuccaaaggc

SEQ ID NO: 1339822 - RNA, 19 nt, Artificial Sequence
  Description of Artificial Sequence: Synthetic oligonucleotide
aguuagagcacacucaugc

SEQ ID NO: 1339823 - RNA, 19 nt, Artificial Sequence
  Description of Artificial Sequence: Synthetic oligonucleotide
agaaccuucaucaaaaucc

SEQ ID NO: 1339824 - RNA, 19 nt, Artificial Sequence
  Description of Artificial Sequence: Synthetic oligonucleotide
aauuuggaggucuaauuac

SEQ ID NO: 1339825 - RNA, 19 nt, Artificial Sequence
  Description of Artificial Sequence: Synthetic oligonucleotide
ucuuuaacucaucagaaag

SEQ ID NO: 1339826 - RNA, 19 nt, Artificial Sequence
  Description of Artificial Sequence: Synthetic oligonucleotide
accgacaacagccagaagc

SEQ ID NO: 1339827 - RNA, 19 nt, Artificial Sequence
  Description of Artificial Sequence: Synthetic oligonucleotide
ucugagaccauuuauaagu

SEQ ID NO: 1339828 - RNA, 19 nt, Artificial Sequence
  Description of Artificial Sequence: Synthetic oligonucleotide
aacaguagaacaaugugcg

SEQ ID NO: 1339829 - RNA, 19 nt, Artificial Sequence
  Description of Artificial Sequence: Synthetic oligonucleotide
aaucccaacauuaaggguc

SEQ ID NO: 1339830 - RNA, 19 nt, Artificial Sequence
  Description of Artificial Sequence: Synthetic oligonucleotide
uauguaucagcccuuuugg

SEQ ID NO: 1339831 - RNA, 19 nt, Artificial Sequence
  Description of Artificial Sequence: Synthetic oligonucleotide
aacagauuauuauuauuag

SEQ ID NO: 1339832 - RNA, 19 nt, Artificial Sequence
  Description of Artificial Sequence: Synthetic oligonucleotide
aacaaugugcguuucagcu

SEQ ID NO: 1339833 - RNA, 19 nt, Artificial Sequence
  Description of Artificial Sequence: Synthetic oligonucleotide
aguuauacugaguuuuagc

SEQ ID NO: 1339834 - RNA, 19 nt, Artificial Sequence
  Description of Artificial Sequence: Synthetic oligonucleotide
uuuugaucgaaagauagag

SEQ ID NO: 1339835 - RNA, 19 nt, Artificial Sequence
  Description of Artificial Sequence: Synthetic oligonucleotide
uuauaaguuauacugaguu

SEQ ID NO: 1339836 - RNA, 19 nt, Artificial Sequence
  Description of Artificial Sequence: Synthetic oligonucleotide
aaguccaccgacaacagcc

SEQ ID NO: 1339837 - RNA, 19 nt, Artificial Sequence
  Description of Artificial Sequence: Synthetic oligonucleotide
ucuguuagguaaaagugag

SEQ ID NO: 1339838 - RNA, 19 nt, Artificial Sequence
  Description of Artificial Sequence: Synthetic oligonucleotide
uguauggggauucuuauga

SEQ ID NO: 1339839 - RNA, 19 nt, Artificial Sequence
  Description of Artificial Sequence: Synthetic oligonucleotide
cuaacuaacuuacacaaac

SEQ ID NO: 1339840 - RNA, 19 nt, Artificial Sequence
  Description of Artificial Sequence: Synthetic oligonucleotide
augucuaacuaacuuacac

SEQ ID NO: 1339841 - RNA, 19 nt, Artificial Sequence
  Description of Artificial Sequence: Synthetic oligonucleotide
uacucuaauauugacauca

SEQ ID NO: 1339842 - RNA, 19 nt, Artificial Sequence
  Description of Artificial Sequence: Synthetic oligonucleotide
uaaaagaggcauauguagc

SEQ ID NO: 1339843 - RNA, 19 nt, Artificial Sequence
  Description of Artificial Sequence: Synthetic oligonucleotide
augaauacaacucagcuua

SEQ ID NO: 1339844 - RNA, 19 nt, Artificial Sequence
  Description of Artificial Sequence: Synthetic oligonucleotide
uauuauuauuagagaaggg

SEQ ID NO: 1339845 - RNA, 19 nt, Artificial Sequence
  Description of Artificial Sequence: Synthetic oligonucleotide
aagauacacaaguccaccg

SEQ ID NO: 1339846 - RNA, 19 nt, Artificial Sequence
  Description of Artificial Sequence: Synthetic oligonucleotide
ucuccauucauucuuauua

SEQ ID NO: 1339847 - RNA, 19 nt, Artificial Sequence
  Description of Artificial Sequence: Synthetic oligonucleotide
uccucuuuaacucaucaga

SEQ ID NO: 1339848 - RNA, 19 nt, Artificial Sequence
  Description of Artificial Sequence: Synthetic oligonucleotide
uuuagcauuugaaauacau

SEQ ID NO: 1339849 - RNA, 19 nt, Artificial Sequence
  Description of Artificial Sequence: Synthetic oligonucleotide
cuaauauugacaucaguuc

SEQ ID NO: 1339850 - RNA, 19 nt, Artificial Sequence
  Description of Artificial Sequence: Synthetic oligonucleotide
ucuuuuauugguccauucc

SEQ ID NO: 1339851 - RNA, 19 nt, Artificial Sequence
  Description of Artificial Sequence: Synthetic oligonucleotide
uuagagcacacucaugcag

SEQ ID NO: 1339852 - RNA, 19 nt, Artificial Sequence
  Description of Artificial Sequence: Synthetic oligonucleotide
guuauacugaguuuuagca

SEQ ID NO: 1339853 - RNA, 19 nt, Artificial Sequence
  Description of Artificial Sequence: Synthetic oligonucleotide
ucgaagauacacaagucca

SEQ ID NO: 1339854 - RNA, 19 nt, Artificial Sequence
  Description of Artificial Sequence: Synthetic oligonucleotide
uccauaggcaacaaaucag

SEQ ID NO: 1339855 - RNA, 19 nt, Artificial Sequence
  Description of Artificial Sequence: Synthetic oligonucleotide
acgauaacagaguaauuuc

SEQ ID NO: 1339856 - RNA, 19 nt, Artificial Sequence
  Description of Artificial Sequence: Synthetic oligonucleotide
cauucauucuuauuacagg

SEQ ID NO: 1339857 - RNA, 19 nt, Artificial Sequence
  Description of Artificial Sequence: Synthetic oligonucleotide
uucuguuagguaaaaguga

SEQ ID NO: 1339858 - RNA, 19 nt, Artificial Sequence
  Description of Artificial Sequence: Synthetic oligonucleotide
gaucgaaagauagagagca

SEQ ID NO: 1339859 - RNA, 19 nt, Artificial Sequence
  Description of Artificial Sequence: Synthetic oligonucleotide
cuuuaacucaucagaaagc

SEQ ID NO: 1339860 - RNA, 19 nt, Artificial Sequence
  Description of Artificial Sequence: Synthetic oligonucleotide
caacucauauguaucagcc

SEQ ID NO: 1339861 - RNA, 19 nt, Artificial Sequence
  Description of Artificial Sequence: Synthetic oligonucleotide
aguaucgccaagaauuugc

SEQ ID NO: 1339862 - RNA, 19 nt, Artificial Sequence
  Description of Artificial Sequence: Synthetic oligonucleotide
uuuaacucaucagaaagcu

SEQ ID NO: 1339863 - RNA, 19 nt, Artificial Sequence
  Description of Artificial Sequence: Synthetic oligonucleotide
gaaaucauagucuuguugu

SEQ ID NO: 1339864 - RNA, 19 nt, Artificial Sequence
  Description of Artificial Sequence: Synthetic oligonucleotide
ugucuaacuaacuuacaca

SEQ ID NO: 1339865 - RNA, 19 nt, Artificial Sequence
  Description of Artificial Sequence: Synthetic oligonucleotide
aaagauagagagcauccaa

SEQ ID NO: 1339866 - RNA, 19 nt, Artificial Sequence
  Description of Artificial Sequence: Synthetic oligonucleotide
acucauauguaucagcccu

SEQ ID NO: 1339867 - RNA, 19 nt, Artificial Sequence
  Description of Artificial Sequence: Synthetic oligonucleotide
ucuaagagaguccuuucca

SEQ ID NO: 1339868 - RNA, 19 nt, Artificial Sequence
  Description of Artificial Sequence: Synthetic oligonucleotide
gaacaguagaacaaugugc

SEQ ID NO: 1339869 - RNA, 19 nt, Artificial Sequence
  Description of Artificial Sequence: Synthetic oligonucleotide
agaaaucauagucuuguug

SEQ ID NO: 1339870 - RNA, 19 nt, Artificial Sequence
  Description of Artificial Sequence: Synthetic oligonucleotide
ucacauguccuguaugggg

SEQ ID NO: 1339871 - RNA, 19 nt, Artificial Sequence
  Description of Artificial Sequence: Synthetic oligonucleotide
acaaaucaguauuucauga

SEQ ID NO: 1339872 - RNA, 19 nt, Artificial Sequence
  Description of Artificial Sequence: Synthetic oligonucleotide
uguuagguaaaagugagau

SEQ ID NO: 1339873 - RNA, 19 nt, Artificial Sequence
  Description of Artificial Sequence: Synthetic oligonucleotide
aaacccucgcaccugcaac

SEQ ID NO: 1339874 - RNA, 19 nt, Artificial Sequence
  Description of Artificial Sequence: Synthetic oligonucleotide
auaacagaguaauuucuug

SEQ ID NO: 1339875 - RNA, 19 nt, Artificial Sequence
  Description of Artificial Sequence: Synthetic oligonucleotide
agguaguuagagcacacuc

SEQ ID NO: 1339876 - RNA, 19 nt, Artificial Sequence
  Description of Artificial Sequence: Synthetic oligonucleotide
agauuauuauuauuagaga

SEQ ID NO: 1339877 - RNA, 19 nt, Artificial Sequence
  Description of Artificial Sequence: Synthetic oligonucleotide
uugguaaaugcacuggagu

SEQ ID NO: 1339878 - RNA, 19 nt, Artificial Sequence
  Description of Artificial Sequence: Synthetic oligonucleotide
guacaagguaguuagagca

SEQ ID NO: 1339879 - RNA, 19 nt, Artificial Sequence
  Description of Artificial Sequence: Synthetic oligonucleotide
aauauugacaucaguucug

SEQ ID NO: 1339880 - RNA, 19 nt, Artificial Sequence
  Description of Artificial Sequence: Synthetic oligonucleotide
uaauguguaaaagaggcau

SEQ ID NO: 1339881 - RNA, 19 nt, Artificial Sequence
  Description of Artificial Sequence: Synthetic oligonucleotide
uuuauaaguuauacugagu

SEQ ID NO: 1339882 - RNA, 19 nt, Artificial Sequence
  Description of Artificial Sequence: Synthetic oligonucleotide
uucuaagagaguccuuucc

SEQ ID NO: 1339883 - RNA, 19 nt, Artificial Sequence
  Description of Artificial Sequence: Synthetic oligonucleotide
aagcaaucccaacauuaag

SEQ ID NO: 1339884 - RNA, 19 nt, Artificial Sequence
  Description of Artificial Sequence: Synthetic oligonucleotide
uauugguccauuccaucag

SEQ ID NO: 1339885 - RNA, 19 nt, Artificial Sequence
  Description of Artificial Sequence: Synthetic oligonucleotide
uuugaucgaaagauagaga

SEQ ID NO: 1339886 - RNA, 19 nt, Artificial Sequence
  Description of Artificial Sequence: Synthetic oligonucleotide
uuaauguguaaaagaggca

SEQ ID NO: 1339887 - RNA, 19 nt, Artificial Sequence
  Description of Artificial Sequence: Synthetic oligonucleotide
uguaucagcccuuuugggu

SEQ ID NO: 1339888 - RNA, 19 nt, Artificial Sequence
  Description of Artificial Sequence: Synthetic oligonucleotide
acagauuauuauuauuaga

SEQ ID NO: 1339889 - RNA, 19 nt, Artificial Sequence
  Description of Artificial Sequence: Synthetic oligonucleotide
uguugguaaaugcacugga

SEQ ID NO: 1339890 - RNA, 19 nt, Artificial Sequence
  Description of Artificial Sequence: Synthetic oligonucleotide
aacaucugagaccauuuau

SEQ ID NO: 1339891 - RNA, 19 nt, Artificial Sequence
  Description of Artificial Sequence: Synthetic oligonucleotide
uuucuuugggcggaggccg

SEQ ID NO: 1339892 - RNA, 19 nt, Artificial Sequence
  Description of Artificial Sequence: Synthetic oligonucleotide
aacauuaaggguccagcau

SEQ ID NO: 1339893 - RNA, 19 nt, Artificial Sequence
  Description of Artificial Sequence: Synthetic oligonucleotide
agaagggccacuuuaaaua

SEQ ID NO: 1339894 - RNA, 19 nt, Artificial Sequence
  Description of Artificial Sequence: Synthetic oligonucleotide
ugguggagcuuuaacgagg

SEQ ID NO: 1339895 - RNA, 19 nt, Artificial Sequence
  Description of Artificial Sequence: Synthetic oligonucleotide
uugcaaacgacacacuguc

SEQ ID NO: 1339896 - RNA, 19 nt, Artificial Sequence
  Description of Artificial Sequence: Synthetic oligonucleotide
uuauacugaguuuuagcaa

SEQ ID NO: 1339897 - RNA, 19 nt, Artificial Sequence
  Description of Artificial Sequence: Synthetic oligonucleotide
uucucauucuaagagaguc

SEQ ID NO: 1339898 - RNA, 19 nt, Artificial Sequence
  Description of Artificial Sequence: Synthetic oligonucleotide
uccaugaauacaacucagc

SEQ ID NO: 1339899 - RNA, 19 nt, Artificial Sequence
  Description of Artificial Sequence: Synthetic oligonucleotide
ugcguuucagcuacaaacu

SEQ ID NO: 1339900 - RNA, 19 nt, Artificial Sequence
  Description of Artificial Sequence: Synthetic oligonucleotide
gauagagagcauccaacug

SEQ ID NO: 1339901 - RNA, 19 nt, Artificial Sequence
  Description of Artificial Sequence: Synthetic oligonucleotide
ucagaaagcuguauggaua

SEQ ID NO: 1339902 - RNA, 19 nt, Artificial Sequence
  Description of Artificial Sequence: Synthetic oligonucleotide
aaggguccagcauaauuug

SEQ ID NO: 1339903 - RNA, 19 nt, Artificial Sequence
  Description of Artificial Sequence: Synthetic oligonucleotide
ucucauucuaagagagucc

SEQ ID NO: 1339904 - RNA, 19 nt, Artificial Sequence
  Description of Artificial Sequence: Synthetic oligonucleotide
uaauuacucuaauauugac

SEQ ID NO: 1339905 - RNA, 19 nt, Artificial Sequence
  Description of Artificial Sequence: Synthetic oligonucleotide
agauagagagcauccaacu

SEQ ID NO: 1339906 - RNA, 19 nt, Artificial Sequence
  Description of Artificial Sequence: Synthetic oligonucleotide
uuuaacgaggcgacggaac

SEQ ID NO: 1339907 - RNA, 19 nt, Artificial Sequence
  Description of Artificial Sequence: Synthetic oligonucleotide
acacaaacaucugagacca

SEQ ID NO: 1339908 - RNA, 19 nt, Artificial Sequence
  Description of Artificial Sequence: Synthetic oligonucleotide
aacgacacacugucuauga

SEQ ID NO: 1339909 - RNA, 19 nt, Artificial Sequence
  Description of Artificial Sequence: Synthetic oligonucleotide
uuuuggaggaaaguugaug

SEQ ID NO: 1339910 - RNA, 19 nt, Artificial Sequence
  Description of Artificial Sequence: Synthetic oligonucleotide
uuaacgaggcgacggaacu

SEQ ID NO: 1339911 - RNA, 19 nt, Artificial Sequence
  Description of Artificial Sequence: Synthetic oligonucleotide
gucuaacuaacuuacacaa

SEQ ID NO: 1339912 - RNA, 19 nt, Artificial Sequence
  Description of Artificial Sequence: Synthetic oligonucleotide
uuacaggucuuuuauuggu

SEQ ID NO: 1339913 - RNA, 19 nt, Artificial Sequence
  Description of Artificial Sequence: Synthetic oligonucleotide
caacagauuauuauuauua

SEQ ID NO: 1339914 - RNA, 19 nt, Artificial Sequence
  Description of Artificial Sequence: Synthetic oligonucleotide
agcacacucaugcagaaau

SEQ ID NO: 1339915 - RNA, 19 nt, Artificial Sequence
  Description of Artificial Sequence: Synthetic oligonucleotide
acucaugcagaaaucauag

SEQ ID NO: 1339916 - RNA, 19 nt, Artificial Sequence
  Description of Artificial Sequence: Synthetic oligonucleotide
ucuuauaugguuccacauu

SEQ ID NO: 1339917 - RNA, 19 nt, Artificial Sequence
  Description of Artificial Sequence: Synthetic oligonucleotide
acagaaugaaucagaaauc

SEQ ID NO: 1339918 - RNA, 19 nt, Artificial Sequence
  Description of Artificial Sequence: Synthetic oligonucleotide
gcaaucccaacauuaaggg

SEQ ID NO: 1339919 - RNA, 19 nt, Artificial Sequence
  Description of Artificial Sequence: Synthetic oligonucleotide
auaauuuggaggucuaauu

SEQ ID NO: 1339920 - RNA, 19 nt, Artificial Sequence
  Description of Artificial Sequence: Synthetic oligonucleotide
auagccaugguauuuugau

SEQ ID NO: 1339921 - RNA, 19 nt, Artificial Sequence
  Description of Artificial Sequence: Synthetic oligonucleotide
ucagcugaaaacccucgca

SEQ ID NO: 1339922 - RNA, 19 nt, Artificial Sequence
  Description of Artificial Sequence: Synthetic oligonucleotide
auguacaagguaguuagag

SEQ ID NO: 1339923 - RNA, 19 nt, Artificial Sequence
  Description of Artificial Sequence: Synthetic oligonucleotide
gaagauacacaaguccacc

SEQ ID NO: 1339924 - RNA, 19 nt, Artificial Sequence
  Description of Artificial Sequence: Synthetic oligonucleotide
agaguaauuucuuggugga

SEQ ID NO: 1339925 - RNA, 19 nt, Artificial Sequence
  Description of Artificial Sequence: Synthetic oligonucleotide
gcugaauucauguuuagca

SEQ ID NO: 1339926 - RNA, 19 nt, Artificial Sequence
  Description of Artificial Sequence: Synthetic oligonucleotide
ucuucaucggcuugcuugc

SEQ ID NO: 1339927 - RNA, 19 nt, Artificial Sequence
  Description of Artificial Sequence: Synthetic oligonucleotide
auaggcaacaaaucaguau

SEQ ID NO: 1339928 - RNA, 19 nt, Artificial Sequence
  Description of Artificial Sequence: Synthetic oligonucleotide
gaagacagauguaucuucc

SEQ ID NO: 1339929 - RNA, 19 nt, Artificial Sequence
  Description of Artificial Sequence: Synthetic oligonucleotide
uucaugauuuucuuuucuc

SEQ ID NO: 1339930 - RNA, 19 nt, Artificial Sequence
  Description of Artificial Sequence: Synthetic oligonucleotide
aaguuauacugaguuuuag

SEQ ID NO: 1339931 - RNA, 19 nt, Artificial Sequence
  Description of Artificial Sequence: Synthetic oligonucleotide
cugucugcgauccaccggg

SEQ ID NO: 1339932 - RNA, 19 nt, Artificial Sequence
  Description of Artificial Sequence: Synthetic oligonucleotide
augacgauaacagaguaau

SEQ ID NO: 1339933 - RNA, 19 nt, Artificial Sequence
  Description of Artificial Sequence: Synthetic oligonucleotide
uguuucauuucuauccaua

SEQ ID NO: 1339934 - RNA, 19 nt, Artificial Sequence
  Description of Artificial Sequence: Synthetic oligonucleotide
gaagaagacagauguaucu

SEQ ID NO: 1339935 - RNA, 19 nt, Artificial Sequence
  Description of Artificial Sequence: Synthetic oligonucleotide
agaacaaugugcguuucag

SEQ ID NO: 1339936 - RNA, 19 nt, Artificial Sequence
  Description of Artificial Sequence: Synthetic oligonucleotide
cacauaaaagcaccauacc

SEQ ID NO: 1339937 - RNA, 19 nt, Artificial Sequence
  Description of Artificial Sequence: Synthetic oligonucleotide
cauagucuuguuguuagag

SEQ ID NO: 1339938 - RNA, 19 nt, Artificial Sequence
  Description of Artificial Sequence: Synthetic oligonucleotide
caaugugcguuucagcuac

SEQ ID NO: 1339939 - RNA, 19 nt, Artificial Sequence
  Description of Artificial Sequence: Synthetic oligonucleotide
aguucugucugcgauccac

SEQ ID NO: 1339940 - RNA, 19 nt, Artificial Sequence
  Description of Artificial Sequence: Synthetic oligonucleotide
auuugaccagaugucauag

SEQ ID NO: 1339941 - RNA, 19 nt, Artificial Sequence
  Description of Artificial Sequence: Synthetic oligonucleotide
uugcuugcaaacgacacac

SEQ ID NO: 1339942 - RNA, 19 nt, Artificial Sequence
  Description of Artificial Sequence: Synthetic oligonucleotide
ugcuucuucgaagauacac

SEQ ID NO: 1339943 - RNA, 19 nt, Artificial Sequence
  Description of Artificial Sequence: Synthetic oligonucleotide
agcuuuaacgaggcgacgg

SEQ ID NO: 1339944 - RNA, 19 nt, Artificial Sequence
  Description of Artificial Sequence: Synthetic oligonucleotide
gagaucaacaacaaugucu

SEQ ID NO: 1339945 - RNA, 19 nt, Artificial Sequence
  Description of Artificial Sequence: Synthetic oligonucleotide
augguuccacauuugacca

SEQ ID NO: 1339946 - RNA, 19 nt, Artificial Sequence
  Description of Artificial Sequence: Synthetic oligonucleotide
caacaaguccaauuccagc

SEQ ID NO: 1339947 - RNA, 19 nt, Artificial Sequence
  Description of Artificial Sequence: Synthetic oligonucleotide
auguaucagcccuuuuggg

SEQ ID NO: 1339948 - RNA, 19 nt, Artificial Sequence
  Description of Artificial Sequence: Synthetic oligonucleotide
uugguggagcuuuaacgag

SEQ ID NO: 1339949 - RNA, 19 nt, Artificial Sequence
  Description of Artificial Sequence: Synthetic oligonucleotide
uacaagguaguuagagcac

SEQ ID NO: 1339950 - RNA, 19 nt, Artificial Sequence
  Description of Artificial Sequence: Synthetic oligonucleotide
guguaaaagaggcauaugu

SEQ ID NO: 1339951 - RNA, 19 nt, Artificial Sequence
  Description of Artificial Sequence: Synthetic oligonucleotide
gaacaaugugcguuucagc

SEQ ID NO: 1339952 - RNA, 19 nt, Artificial Sequence
  Description of Artificial Sequence: Synthetic oligonucleotide
uuugggcggaggccgaggg

SEQ ID NO: 1339953 - RNA, 19 nt, Artificial Sequence
  Description of Artificial Sequence: Synthetic oligonucleotide
gaauuugccagaaucugga

SEQ ID NO: 1339954 - RNA, 19 nt, Artificial Sequence
  Description of Artificial Sequence: Synthetic oligonucleotide
agauacacaaguccaccga

SEQ ID NO: 1339955 - RNA, 19 nt, Artificial Sequence
  Description of Artificial Sequence: Synthetic oligonucleotide
aaaucauagucuuguuguu

SEQ ID NO: 1339956 - RNA, 19 nt, Artificial Sequence
  Description of Artificial Sequence: Synthetic oligonucleotide
aguagaacaaugugcguuu

SEQ ID NO: 1339957 - RNA, 19 nt, Artificial Sequence
  Description of Artificial Sequence: Synthetic oligonucleotide
uugacugcuuccauggaua

SEQ ID NO: 1339958 - RNA, 19 nt, Artificial Sequence
  Description of Artificial Sequence: Synthetic oligonucleotide
ucuaacuaacuuacacaaa

SEQ ID NO: 1339959 - RNA, 19 nt, Artificial Sequence
  Description of Artificial Sequence: Synthetic oligonucleotide
cauggauauaguucacaug

SEQ ID NO: 1339960 - RNA, 19 nt, Artificial Sequence
  Description of Artificial Sequence: Synthetic oligonucleotide
uaaaagcaccauaccuaag

SEQ ID NO: 1339961 - RNA, 19 nt, Artificial Sequence
  Description of Artificial Sequence: Synthetic oligonucleotide
cauaccuaagguaacccca

SEQ ID NO: 1339962 - RNA, 19 nt, Artificial Sequence
  Description of Artificial Sequence: Synthetic oligonucleotide
aucagaaagcuguauggau

SEQ ID NO: 1339963 - RNA, 19 nt, Artificial Sequence
  Description of Artificial Sequence: Synthetic oligonucleotide
ugacuaaccuucucagaca

SEQ ID NO: 1339964 - RNA, 19 nt, Artificial Sequence
  Description of Artificial Sequence: Synthetic oligonucleotide
uucagcugaaaacccucgc

SEQ ID NO: 1339965 - RNA, 19 nt, Artificial Sequence
  Description of Artificial Sequence: Synthetic oligonucleotide
ugcagaaaucauagucuug

SEQ ID NO: 1339966 - RNA, 19 nt, Artificial Sequence
  Description of Artificial Sequence: Synthetic oligonucleotide
aaguuggagagcagugaac

SEQ ID NO: 1339967 - RNA, 19 nt, Artificial Sequence
  Description of Artificial Sequence: Synthetic oligonucleotide
aaggcuacaugguccauuu

SEQ ID NO: 1339968 - RNA, 19 nt, Artificial Sequence
  Description of Artificial Sequence: Synthetic oligonucleotide
agaucaacaacaaugucua

SEQ ID NO: 1339969 - RNA, 19 nt, Artificial Sequence
  Description of Artificial Sequence: Synthetic oligonucleotide
agcaccauaccuaagguaa

SEQ ID NO: 1339970 - RNA, 19 nt, Artificial Sequence
  Description of Artificial Sequence: Synthetic oligonucleotide
uccuguugguaaaugcacu

SEQ ID NO: 1339971 - RNA, 19 nt, Artificial Sequence
  Description of Artificial Sequence: Synthetic oligonucleotide
aguccaauuccagccacac

SEQ ID NO: 1339972 - RNA, 19 nt, Artificial Sequence
  Description of Artificial Sequence: Synthetic oligonucleotide
ucgaaagauagagagcauc

SEQ ID NO: 1339973 - RNA, 19 nt, Artificial Sequence
  Description of Artificial Sequence: Synthetic oligonucleotide
ugagaucaacaacaauguc

SEQ ID NO: 1339974 - RNA, 19 nt, Artificial Sequence
  Description of Artificial Sequence: Synthetic oligonucleotide
aaacgacacacugucuaug

SEQ ID NO: 1339975 - RNA, 19 nt, Artificial Sequence
  Description of Artificial Sequence: Synthetic oligonucleotide
uggaggucuaauuacucua

SEQ ID NO: 1339976 - RNA, 19 nt, Artificial Sequence
  Description of Artificial Sequence: Synthetic oligonucleotide
uuugaccagaugucauagc

SEQ ID NO: 1339977 - RNA, 19 nt, Artificial Sequence
  Description of Artificial Sequence: Synthetic oligonucleotide
uagaacaaugugcguuuca

SEQ ID NO: 1339978 - RNA, 19 nt, Artificial Sequence
  Description of Artificial Sequence: Synthetic oligonucleotide
gacagauguaucuuccaaa

SEQ ID NO: 1339979 - RNA, 19 nt, Artificial Sequence
  Description of Artificial Sequence: Synthetic oligonucleotide
cacaacaaguccaauucca

SEQ ID NO: 1339980 - RNA, 19 nt, Artificial Sequence
  Description of Artificial Sequence: Synthetic oligonucleotide
auaccuaagguaaccccac

SEQ ID NO: 1339981 - RNA, 19 nt, Artificial Sequence
  Description of Artificial Sequence: Synthetic oligonucleotide
uucuugguggagcuuuaac

SEQ ID NO: 1339982 - RNA, 19 nt, Artificial Sequence
  Description of Artificial Sequence: Synthetic oligonucleotide
aauuugccagaaucuggaa

SEQ ID NO: 1339983 - RNA, 19 nt, Artificial Sequence
  Description of Artificial Sequence: Synthetic oligonucleotide
agaaaucuuuccauguaca

SEQ ID NO: 1339984 - RNA, 19 nt, Artificial Sequence
  Description of Artificial Sequence: Synthetic oligonucleotide
acugaguuuuagcaacaga

SEQ ID NO: 1339985 - RNA, 19 nt, Artificial Sequence
  Description of Artificial Sequence: Synthetic oligonucleotide
accugcaacucauauguau

SEQ ID NO: 1339986 - RNA, 19 nt, Artificial Sequence
  Description of Artificial Sequence: Synthetic oligonucleotide
ucugcgauccaccgggcaa

SEQ ID NO: 1339987 - RNA, 19 nt, Artificial Sequence
  Description of Artificial Sequence: Synthetic oligonucleotide
gacuaaccuucucagacaa

SEQ ID NO: 1339988 - RNA, 19 nt, Artificial Sequence
  Description of Artificial Sequence: Synthetic oligonucleotide
aacuagaaacagaaugaau

SEQ ID NO: 1339989 - RNA, 19 nt, Artificial Sequence
  Description of Artificial Sequence: Synthetic oligonucleotide
gcugcaaaugcccauccag

SEQ ID NO: 1339990 - RNA, 19 nt, Artificial Sequence
  Description of Artificial Sequence: Synthetic oligonucleotide
uguguaaaagaggcauaug

SEQ ID NO: 1339991 - RNA, 19 nt, Artificial Sequence
  Description of Artificial Sequence: Synthetic oligonucleotide
guauggggauucuuaugag

SEQ ID NO: 1339992 - RNA, 19 nt, Artificial Sequence
  Description of Artificial Sequence: Synthetic oligonucleotide
aagcaccauaccuaaggua

SEQ ID NO: 1339993 - RNA, 19 nt, Artificial Sequence
  Description of Artificial Sequence: Synthetic oligonucleotide
gauauaguucacauguccu

SEQ ID NO: 1339994 - RNA, 19 nt, Artificial Sequence
  Description of Artificial Sequence: Synthetic oligonucleotide
accuaagguaaccccacca

SEQ ID NO: 1339995 - RNA, 19 nt, Artificial Sequence
  Description of Artificial Sequence: Synthetic oligonucleotide
cuucuucgaagauacacaa

SEQ ID NO: 1339996 - RNA, 19 nt, Artificial Sequence
  Description of Artificial Sequence: Synthetic oligonucleotide
gacgauaacagaguaauuu

SEQ ID NO: 1339997 - RNA, 19 nt, Artificial Sequence
  Description of Artificial Sequence: Synthetic oligonucleotide
augcagaaaucauagucuu

SEQ ID NO: 1339998 - RNA, 19 nt, Artificial Sequence
  Description of Artificial Sequence: Synthetic oligonucleotide
cauuucuauccauaggcaa

SEQ ID NO: 1339999 - RNA, 19 nt, Artificial Sequence
  Description of Artificial Sequence: Synthetic oligonucleotide
guagcagcuucacauaaaa

SEQ ID NO: 1340000 - RNA, 19 nt, Artificial Sequence
  Description of Artificial Sequence: Synthetic oligonucleotide
cagaugucauagcaaguac

SEQ ID NO: 1340001 - RNA, 19 nt, Artificial Sequence
  Description of Artificial Sequence: Synthetic oligonucleotide
gaaagauagagagcaucca

SEQ ID NO: 1340002 - RNA, 19 nt, Artificial Sequence
  Description of Artificial Sequence: Synthetic oligonucleotide
uggauauaguucacauguc

SEQ ID NO: 1340003 - RNA, 19 nt, Artificial Sequence
  Description of Artificial Sequence: Synthetic oligonucleotide
uaucgccaagaauuugcca

SEQ ID NO: 1340004 - RNA, 19 nt, Artificial Sequence
  Description of Artificial Sequence: Synthetic oligonucleotide
uuccuuuuggaggaaaguu

SEQ ID NO: 1340005 - RNA, 19 nt, Artificial Sequence
  Description of Artificial Sequence: Synthetic oligonucleotide
uccaccgacaacagccaga

SEQ ID NO: 1340006 - RNA, 19 nt, Artificial Sequence
  Description of Artificial Sequence: Synthetic oligonucleotide
cgaaagauagagagcaucc

SEQ ID NO: 1340007 - RNA, 19 nt, Artificial Sequence
  Description of Artificial Sequence: Synthetic oligonucleotide
ugcaaaugcccauccaguu

SEQ ID NO: 1340008 - RNA, 19 nt, Artificial Sequence
  Description of Artificial Sequence: Synthetic oligonucleotide
aggucuaauuacucuaaua

SEQ ID NO: 1340009 - RNA, 19 nt, Artificial Sequence
  Description of Artificial Sequence: Synthetic oligonucleotide
acaagguaguuagagcaca

SEQ ID NO: 1340010 - RNA, 19 nt, Artificial Sequence
  Description of Artificial Sequence: Synthetic oligonucleotide
aucggcuugcuugcaaacg

SEQ ID NO: 1340011 - RNA, 19 nt, Artificial Sequence
  Description of Artificial Sequence: Synthetic oligonucleotide
aauguguaaaagaggcaua

SEQ ID NO: 1340012 - RNA, 19 nt, Artificial Sequence
  Description of Artificial Sequence: Synthetic oligonucleotide
gcuugcaaacgacacacug

SEQ ID NO: 1340013 - RNA, 19 nt, Artificial Sequence
  Description of Artificial Sequence: Synthetic oligonucleotide
agccagaagcaaucccaac

SEQ ID NO: 1340014 - RNA, 19 nt, Artificial Sequence
  Description of Artificial Sequence: Synthetic oligonucleotide
aagguaguuagagcacacu

SEQ ID NO: 1340015 - RNA, 19 nt, Artificial Sequence
  Description of Artificial Sequence: Synthetic oligonucleotide
ucgccaagaauuugccaga

SEQ ID NO: 1340016 - RNA, 19 nt, Artificial Sequence
  Description of Artificial Sequence: Synthetic oligonucleotide
aggcgacggaacuugucuc

SEQ ID NO: 1340017 - RNA, 19 nt, Artificial Sequence
  Description of Artificial Sequence: Synthetic oligonucleotide
cuguauggggauucuuaug

SEQ ID NO: 1340018 - RNA, 19 nt, Artificial Sequence
  Description of Artificial Sequence: Synthetic oligonucleotide
caugguauuuugaucgaaa

SEQ ID NO: 1340019 - RNA, 19 nt, Artificial Sequence
  Description of Artificial Sequence: Synthetic oligonucleotide
uaccuaagguaaccccacc

SEQ ID NO: 1340020 - RNA, 19 nt, Artificial Sequence
  Description of Artificial Sequence: Synthetic oligonucleotide
uauuagagaagggccacuu

SEQ ID NO: 1340021 - RNA, 19 nt, Artificial Sequence
  Description of Artificial Sequence: Synthetic oligonucleotide
ucaucggcuugcuugcaaa

SEQ ID NO: 1340022 - RNA, 19 nt, Artificial Sequence
  Description of Artificial Sequence: Synthetic oligonucleotide
gacacacugucuaugaagu

SEQ ID NO: 1340023 - RNA, 19 nt, Artificial Sequence
  Description of Artificial Sequence: Synthetic oligonucleotide
ccaauauccaugccagagg

SEQ ID NO: 1340024 - RNA, 19 nt, Artificial Sequence
  Description of Artificial Sequence: Synthetic oligonucleotide
gguccagcauaauuuggag

SEQ ID NO: 1340025 - RNA, 19 nt, Artificial Sequence
  Description of Artificial Sequence: Synthetic oligonucleotide
cuuauaugguuccacauuu

SEQ ID NO: 1340026 - RNA, 19 nt, Artificial Sequence
  Description of Artificial Sequence: Synthetic oligonucleotide
cugcaacucauauguauca

SEQ ID NO: 1340027 - RNA, 19 nt, Artificial Sequence
  Description of Artificial Sequence: Synthetic oligonucleotide
agcagugccaccgccgcgg

SEQ ID NO: 1340028 - RNA, 19 nt, Artificial Sequence
  Description of Artificial Sequence: Synthetic oligonucleotide
acaguagaacaaugugcgu

SEQ ID NO: 1340029 - RNA, 19 nt, Artificial Sequence
  Description of Artificial Sequence: Synthetic oligonucleotide
uuauuagagaagggccacu

SEQ ID NO: 1340030 - RNA, 19 nt, Artificial Sequence
  Description of Artificial Sequence: Synthetic oligonucleotide
ugguuccacauuugaccag

SEQ ID NO: 1340031 - RNA, 19 nt, Artificial Sequence
  Description of Artificial Sequence: Synthetic oligonucleotide
guaucgccaagaauuugcc

SEQ ID NO: 1340032 - RNA, 19 nt, Artificial Sequence
  Description of Artificial Sequence: Synthetic oligonucleotide
uuacucuaauauugacauc

SEQ ID NO: 1340033 - RNA, 19 nt, Artificial Sequence
  Description of Artificial Sequence: Synthetic oligonucleotide
guuagagcacacucaugca

SEQ ID NO: 1340034 - RNA, 19 nt, Artificial Sequence
  Description of Artificial Sequence: Synthetic oligonucleotide
gagggaacccuggacauga

SEQ ID NO: 1340035 - RNA, 19 nt, Artificial Sequence
  Description of Artificial Sequence: Synthetic oligonucleotide
gcauauguagcucugauuu

SEQ ID NO: 1340036 - RNA, 19 nt, Artificial Sequence
  Description of Artificial Sequence: Synthetic oligonucleotide
acaaugugcguuucagcua

SEQ ID NO: 1340037 - RNA, 19 nt, Artificial Sequence
  Description of Artificial Sequence: Synthetic oligonucleotide
caccauaccuaagguaacc

SEQ ID NO: 1340038 - RNA, 19 nt, Artificial Sequence
  Description of Artificial Sequence: Synthetic oligonucleotide
ugcaaacgacacacugucu

SEQ ID NO: 1340039 - RNA, 19 nt, Artificial Sequence
  Description of Artificial Sequence: Synthetic oligonucleotide
ugaauacaacucagcuuau

SEQ ID NO: 1340040 - RNA, 19 nt, Artificial Sequence
  Description of Artificial Sequence: Synthetic oligonucleotide
guaguuagagcacacucau

SEQ ID NO: 1340041 - RNA, 19 nt, Artificial Sequence
  Description of Artificial Sequence: Synthetic oligonucleotide
gaaauacaucagaaccuuc

SEQ ID NO: 1340042 - RNA, 19 nt, Artificial Sequence
  Description of Artificial Sequence: Synthetic oligonucleotide
ggacaugagcagcagugcc

SEQ ID NO: 1340043 - RNA, 19 nt, Artificial Sequence
  Description of Artificial Sequence: Synthetic oligonucleotide
uucaucggcuugcuugcaa

SEQ ID NO: 1340044 - RNA, 19 nt, Artificial Sequence
  Description of Artificial Sequence: Synthetic oligonucleotide
cucuuuaacucaucagaaa

SEQ ID NO: 1340045 - RNA, 19 nt, Artificial Sequence
  Description of Artificial Sequence: Synthetic oligonucleotide
acucuaauauugacaucag

SEQ ID NO: 1340046 - RNA, 19 nt, Artificial Sequence
  Description of Artificial Sequence: Synthetic oligonucleotide
cauuaaggguccagcauaa

SEQ ID NO: 1340047 - RNA, 19 nt, Artificial Sequence
  Description of Artificial Sequence: Synthetic oligonucleotide
uccuucgcuucccaauauc

SEQ ID NO: 1340048 - RNA, 19 nt, Artificial Sequence
  Description of Artificial Sequence: Synthetic oligonucleotide
cagaaugaaucagaaaucu

SEQ ID NO: 1340049 - RNA, 19 nt, Artificial Sequence
  Description of Artificial Sequence: Synthetic oligonucleotide
auuagagaagggccacuuu

SEQ ID NO: 1340050 - RNA, 19 nt, Artificial Sequence
  Description of Artificial Sequence: Synthetic oligonucleotide
cuugcaaacgacacacugu

SEQ ID NO: 1340051 - RNA, 19 nt, Artificial Sequence
  Description of Artificial Sequence: Synthetic oligonucleotide
ucggugaggccauguuugc

SEQ ID NO: 1340052 - RNA, 19 nt, Artificial Sequence
  Description of Artificial Sequence: Synthetic oligonucleotide
gguaguuagagcacacuca

SEQ ID NO: 1340053 - RNA, 19 nt, Artificial Sequence
  Description of Artificial Sequence: Synthetic oligonucleotide
ccauaccuaagguaacccc

SEQ ID NO: 1340054 - RNA, 19 nt, Artificial Sequence
  Description of Artificial Sequence: Synthetic oligonucleotide
gaggcgacggaacuugucu

SEQ ID NO: 1340055 - RNA, 19 nt, Artificial Sequence
  Description of Artificial Sequence: Synthetic oligonucleotide
caucagaaccuucaucaaa

SEQ ID NO: 1340056 - RNA, 19 nt, Artificial Sequence
  Description of Artificial Sequence: Synthetic oligonucleotide
gucgcacacacacaccaga

SEQ ID NO: 1340057 - RNA, 19 nt, Artificial Sequence
  Description of Artificial Sequence: Synthetic oligonucleotide
cacucaugcagaaaucaua

SEQ ID NO: 1340058 - RNA, 19 nt, Artificial Sequence
  Description of Artificial Sequence: Synthetic oligonucleotide
ccugcaacucauauguauc

SEQ ID NO: 1340059 - RNA, 19 nt, Artificial Sequence
  Description of Artificial Sequence: Synthetic oligonucleotide
caucagaaagcuguaugga

SEQ ID NO: 1340060 - RNA, 19 nt, Artificial Sequence
  Description of Artificial Sequence: Synthetic oligonucleotide
gaguaucgccaagaauuug

SEQ ID NO: 1340061 - RNA, 19 nt, Artificial Sequence
  Description of Artificial Sequence: Synthetic oligonucleotide
ggagcuuuaacgaggcgac

SEQ ID NO: 1340062 - RNA, 19 nt, Artificial Sequence
  Description of Artificial Sequence: Synthetic oligonucleotide
ucauauguaucagcccuuu

SEQ ID NO: 1340063 - RNA, 19 nt, Artificial Sequence
  Description of Artificial Sequence: Synthetic oligonucleotide
cccaauauccaugccagag

SEQ ID NO: 1340064 - RNA, 19 nt, Artificial Sequence
  Description of Artificial Sequence: Synthetic oligonucleotide
ugacgauaacagaguaauu

SEQ ID NO: 1340065 - RNA, 19 nt, Artificial Sequence
  Description of Artificial Sequence: Synthetic oligonucleotide
ucgcaccugcaacucauau

SEQ ID NO: 1340066 - RNA, 19 nt, Artificial Sequence
  Description of Artificial Sequence: Synthetic oligonucleotide
caucggcuugcuugcaaac

SEQ ID NO: 1340067 - RNA, 19 nt, Artificial Sequence
  Description of Artificial Sequence: Synthetic oligonucleotide
cagcugacuaaccuucuca

SEQ ID NO: 1340068 - RNA, 19 nt, Artificial Sequence
  Description of Artificial Sequence: Synthetic oligonucleotide
gcaaacgacacacugucua

SEQ ID NO: 1340069 - RNA, 19 nt, Artificial Sequence
  Description of Artificial Sequence: Synthetic oligonucleotide
gucuaauuacucuaauauu

SEQ ID NO: 1340070 - RNA, 19 nt, Artificial Sequence
  Description of Artificial Sequence: Synthetic oligonucleotide
auacacaaguccaccgaca

SEQ ID NO: 1340071 - RNA, 19 nt, Artificial Sequence
  Description of Artificial Sequence: Synthetic oligonucleotide
gagcuuuaacgaggcgacg

SEQ ID NO: 1340072 - RNA, 19 nt, Artificial Sequence
  Description of Artificial Sequence: Synthetic oligonucleotide
caugaauacaacucagcuu

SEQ ID NO: 1340073 - RNA, 19 nt, Artificial Sequence
  Description of Artificial Sequence: Synthetic oligonucleotide
aggguccagcauaauuugg

SEQ ID NO: 1340074 - RNA, 19 nt, Artificial Sequence
  Description of Artificial Sequence: Synthetic oligonucleotide
guauuuugaucgaaagaua

SEQ ID NO: 1340075 - RNA, 19 nt, Artificial Sequence
  Description of Artificial Sequence: Synthetic oligonucleotide
acuaaccuucucagacaac

SEQ ID NO: 1340076 - RNA, 19 nt, Artificial Sequence
  Description of Artificial Sequence: Synthetic oligonucleotide
acauuugaccagaugucau

SEQ ID NO: 1340077 - RNA, 19 nt, Artificial Sequence
  Description of Artificial Sequence: Synthetic oligonucleotide
guucugucugcgauccacc

SEQ ID NO: 1340078 - RNA, 19 nt, Artificial Sequence
  Description of Artificial Sequence: Synthetic oligonucleotide
agaaugaaucagaaaucuu

SEQ ID NO: 1340079 - RNA, 19 nt, Artificial Sequence
  Description of Artificial Sequence: Synthetic oligonucleotide
caaaucaguauuucaugau

SEQ ID NO: 1340080 - RNA, 19 nt, Artificial Sequence
  Description of Artificial Sequence: Synthetic oligonucleotide
uucuuugggcggaggccga

SEQ ID NO: 1340081 - RNA, 19 nt, Artificial Sequence
  Description of Artificial Sequence: Synthetic oligonucleotide
cugaaaacccucgcaccug

SEQ ID NO: 1340082 - RNA, 19 nt, Artificial Sequence
  Description of Artificial Sequence: Synthetic oligonucleotide
cucauucuaagagaguccu

SEQ ID NO: 1340083 - RNA, 19 nt, Artificial Sequence
  Description of Artificial Sequence: Synthetic oligonucleotide
ggcgacggaacuugucucc

SEQ ID NO: 1340084 - RNA, 19 nt, Artificial Sequence
  Description of Artificial Sequence: Synthetic oligonucleotide
agaggcauauguagcucug

SEQ ID NO: 1340085 - RNA, 19 nt, Artificial Sequence
  Description of Artificial Sequence: Synthetic oligonucleotide
cuguuagguaaaagugaga

SEQ ID NO: 1340086 - RNA, 19 nt, Artificial Sequence
  Description of Artificial Sequence: Synthetic oligonucleotide
acauguccuguauggggau

SEQ ID NO: 1340087 - RNA, 19 nt, Artificial Sequence
  Description of Artificial Sequence: Synthetic oligonucleotide
aauauccaugccagaggua

SEQ ID NO: 1340088 - RNA, 19 nt, Artificial Sequence
  Description of Artificial Sequence: Synthetic oligonucleotide
agcugcaaaugcccaucca

SEQ ID NO: 1340089 - RNA, 19 nt, Artificial Sequence
  Description of Artificial Sequence: Synthetic oligonucleotide
gcuucuucgaagauacaca

SEQ ID NO: 1340090 - RNA, 19 nt, Artificial Sequence
  Description of Artificial Sequence: Synthetic oligonucleotide
uaucagcccuuuuggguuu

SEQ ID NO: 1340091 - RNA, 19 nt, Artificial Sequence
  Description of Artificial Sequence: Synthetic oligonucleotide
augcccauccaguuuuauu

SEQ ID NO: 1340092 - RNA, 19 nt, Artificial Sequence
  Description of Artificial Sequence: Synthetic oligonucleotide
ugucugcgauccaccgggc

SEQ ID NO: 1340093 - RNA, 19 nt, Artificial Sequence
  Description of Artificial Sequence: Synthetic oligonucleotide
gcguuucagcuacaaacug

SEQ ID NO: 1340094 - RNA, 19 nt, Artificial Sequence
  Description of Artificial Sequence: Synthetic oligonucleotide
cuaagagaguccuuuccau

SEQ ID NO: 1340095 - RNA, 19 nt, Artificial Sequence
  Description of Artificial Sequence: Synthetic oligonucleotide
acgacacacugucuaugaa

SEQ ID NO: 1340096 - RNA, 19 nt, Artificial Sequence
  Description of Artificial Sequence: Synthetic oligonucleotide
gaaauccucuuuaacucau

SEQ ID NO: 1340097 - RNA, 19 nt, Artificial Sequence
  Description of Artificial Sequence: Synthetic oligonucleotide
aggucuuuuauugguccau

SEQ ID NO: 1340098 - RNA, 19 nt, Artificial Sequence
  Description of Artificial Sequence: Synthetic oligonucleotide
caaaugcccauccaguuuu

SEQ ID NO: 1340099 - RNA, 19 nt, Artificial Sequence
  Description of Artificial Sequence: Synthetic oligonucleotide
cauguacaagguaguuaga

SEQ ID NO: 1340100 - RNA, 19 nt, Artificial Sequence
  Description of Artificial Sequence: Synthetic oligonucleotide
acacucaugcagaaaucau

SEQ ID NO: 1340101 - RNA, 19 nt, Artificial Sequence
  Description of Artificial Sequence: Synthetic oligonucleotide
cauucuaagagaguccuuu

SEQ ID NO: 1340102 - RNA, 19 nt, Artificial Sequence
  Description of Artificial Sequence: Synthetic oligonucleotide
cccaccauugaacaguaga

SEQ ID NO: 1340103 - RNA, 19 nt, Artificial Sequence
  Description of Artificial Sequence: Synthetic oligonucleotide
aagggccacuuuaaauaaa

SEQ ID NO: 1340104 - RNA, 19 nt, Artificial Sequence
  Description of Artificial Sequence: Synthetic oligonucleotide
guccaccgacaacagccag

SEQ ID NO: 1340105 - RNA, 19 nt, Artificial Sequence
  Description of Artificial Sequence: Synthetic oligonucleotide
ccucuuuaacucaucagaa

SEQ ID NO: 1340106 - RNA, 19 nt, Artificial Sequence
  Description of Artificial Sequence: Synthetic oligonucleotide
cugcaaaugcccauccagu

SEQ ID NO: 1340107 - RNA, 19 nt, Artificial Sequence
  Description of Artificial Sequence: Synthetic oligonucleotide
acacacugucuaugaaguu

SEQ ID NO: 1340108 - RNA, 19 nt, Artificial Sequence
  Description of Artificial Sequence: Synthetic oligonucleotide
agaccauuuauaaguuaua

SEQ ID NO: 1340109 - RNA, 19 nt, Artificial Sequence
  Description of Artificial Sequence: Synthetic oligonucleotide
cucuuauaugguuccacau

SEQ ID NO: 1340110 - RNA, 19 nt, Artificial Sequence
  Description of Artificial Sequence: Synthetic oligonucleotide
ccgacaacagccagaagca

SEQ ID NO: 1340111 - RNA, 19 nt, Artificial Sequence
  Description of Artificial Sequence: Synthetic oligonucleotide
uucuauccauaggcaacaa

SEQ ID NO: 1340112 - RNA, 19 nt, Artificial Sequence
  Description of Artificial Sequence: Synthetic oligonucleotide
auccuucgcuucccaauau

SEQ ID NO: 1340113 - RNA, 19 nt, Artificial Sequence
  Description of Artificial Sequence: Synthetic oligonucleotide
uguccuguauggggauucu

SEQ ID NO: 1340114 - RNA, 19 nt, Artificial Sequence
  Description of Artificial Sequence: Synthetic oligonucleotide
guagaacaaugugcguuuc

SEQ ID NO: 1340115 - RNA, 19 nt, Artificial Sequence
  Description of Artificial Sequence: Synthetic oligonucleotide
cucuaauauugacaucagu

SEQ ID NO: 1340116 - RNA, 19 nt, Artificial Sequence
  Description of Artificial Sequence: Synthetic oligonucleotide
cauccuucgcuucccaaua

SEQ ID NO: 1340117 - RNA, 19 nt, Artificial Sequence
  Description of Artificial Sequence: Synthetic oligonucleotide
ggagcugaauucauguuua

SEQ ID NO: 1340118 - RNA, 19 nt, Artificial Sequence
  Description of Artificial Sequence: Synthetic oligonucleotide
ccaugaauacaacucagcu

SEQ ID NO: 1340119 - RNA, 19 nt, Artificial Sequence
  Description of Artificial Sequence: Synthetic oligonucleotide
agucuuguuguuagaggua

SEQ ID NO: 1340120 - RNA, 19 nt, Artificial Sequence
  Description of Artificial Sequence: Synthetic oligonucleotide
ccucuuauaugguuccaca

SEQ ID NO: 1340121 - RNA, 19 nt, Artificial Sequence
  Description of Artificial Sequence: Synthetic oligonucleotide
gcuuuaacgaggcgacgga

SEQ ID NO: 1340122 - RNA, 19 nt, Artificial Sequence
  Description of Artificial Sequence: Synthetic oligonucleotide
gaggucuaauuacucuaau

SEQ ID NO: 1340123 - RNA, 19 nt, Artificial Sequence
  Description of Artificial Sequence: Synthetic oligonucleotide
cuuuaacgaggcgacggaa

SEQ ID NO: 1340124 - RNA, 19 nt, Artificial Sequence
  Description of Artificial Sequence: Synthetic oligonucleotide
gcugacuaaccuucucaga

SEQ ID NO: 1340125 - RNA, 19 nt, Artificial Sequence
  Description of Artificial Sequence: Synthetic oligonucleotide
uaacgaggcgacggaacuu

SEQ ID NO: 1340126 - RNA, 19 nt, Artificial Sequence
  Description of Artificial Sequence: Synthetic oligonucleotide
aaugugcguuucagcuaca

SEQ ID NO: 1340127 - RNA, 19 nt, Artificial Sequence
  Description of Artificial Sequence: Synthetic oligonucleotide
aggcaacaaaucaguauuu

SEQ ID NO: 1340128 - RNA, 19 nt, Artificial Sequence
  Description of Artificial Sequence: Synthetic oligonucleotide
caaacgacacacugucuau

SEQ ID NO: 1340129 - RNA, 19 nt, Artificial Sequence
  Description of Artificial Sequence: Synthetic oligonucleotide
gauccaccgggcaaucugu

SEQ ID NO: 1340130 - RNA, 19 nt, Artificial Sequence
  Description of Artificial Sequence: Synthetic oligonucleotide
caguagaacaaugugcguu

SEQ ID NO: 1340131 - RNA, 19 nt, Artificial Sequence
  Description of Artificial Sequence: Synthetic oligonucleotide
cguuucagcuacaaacuga

SEQ ID NO: 1340132 - RNA, 19 nt, Artificial Sequence
  Description of Artificial Sequence: Synthetic oligonucleotide
cuaagguaaccccaccauu

SEQ ID NO: 1340133 - RNA, 19 nt, Artificial Sequence
  Description of Artificial Sequence: Synthetic oligonucleotide
gguaaaugcacuggaguau

SEQ ID NO: 1340134 - RNA, 19 nt, Artificial Sequence
  Description of Artificial Sequence: Synthetic oligonucleotide
ggaggucuaauuacucuaa

SEQ ID NO: 1340135 - RNA, 19 nt, Artificial Sequence
  Description of Artificial Sequence: Synthetic oligonucleotide
cagcauaauuuggaggucu

SEQ ID NO: 1340136 - RNA, 19 nt, Artificial Sequence
  Description of Artificial Sequence: Synthetic oligonucleotide
aucgaaagauagagagcau

SEQ ID NO: 1340137 - RNA, 19 nt, Artificial Sequence
  Description of Artificial Sequence: Synthetic oligonucleotide
ccauaggcaacaaaucagu

SEQ ID NO: 1340138 - RNA, 19 nt, Artificial Sequence
  Description of Artificial Sequence: Synthetic oligonucleotide
cugagaccauuuauaaguu

SEQ ID NO: 1340139 - RNA, 19 nt, Artificial Sequence
  Description of Artificial Sequence: Synthetic oligonucleotide
aaaugcccauccaguuuua

SEQ ID NO: 1340140 - RNA, 19 nt, Artificial Sequence
  Description of Artificial Sequence: Synthetic oligonucleotide
gaauacaacucagcuuauu

SEQ ID NO: 1340141 - RNA, 19 nt, Artificial Sequence
  Description of Artificial Sequence: Synthetic oligonucleotide
ccaccgggcaaucuguuca

SEQ ID NO: 1340142 - RNA, 19 nt, Artificial Sequence
  Description of Artificial Sequence: Synthetic oligonucleotide
ccagaugucauagcaagua

SEQ ID NO: 1340143 - RNA, 19 nt, Artificial Sequence
  Description of Artificial Sequence: Synthetic oligonucleotide
gggccacuuuaaauaaaac

SEQ ID NO: 1340144 - RNA, 19 nt, Artificial Sequence
  Description of Artificial Sequence: Synthetic oligonucleotide
ggucgcacacacacaccag

SEQ ID NO: 1340145 - RNA, 19 nt, Artificial Sequence
  Description of Artificial Sequence: Synthetic oligonucleotide
cgcggucgcacacacacac

SEQ ID NO: 1340146 - RNA, 19 nt, Artificial Sequence
  Description of Artificial Sequence: Synthetic oligonucleotide
cgcaccugcaacucauaug

SEQ ID NO: 1340147 - RNA, 19 nt, Artificial Sequence
  Description of Artificial Sequence: Synthetic oligonucleotide
ggggauucuuaugagcaua

SEQ ID NO: 1340148 - RNA, 19 nt, Artificial Sequence
  Description of Artificial Sequence: Synthetic oligonucleotide
cgauaacagaguaauuucu

SEQ ID NO: 1340149 - RNA, 19 nt, Artificial Sequence
  Description of Artificial Sequence: Synthetic oligonucleotide
cucauauguaucagcccuu

SEQ ID NO: 1340150 - RNA, 19 nt, Artificial Sequence
  Description of Artificial Sequence: Synthetic oligonucleotide
ugcgauccaccgggcaauc

SEQ ID NO: 1340151 - RNA, 19 nt, Artificial Sequence
  Description of Artificial Sequence: Synthetic oligonucleotide
ucccaacauuaagggucca

SEQ ID NO: 1340152 - RNA, 19 nt, Artificial Sequence
  Description of Artificial Sequence: Synthetic oligonucleotide
ggccauguuugcucuucuc

SEQ ID NO: 1340153 - RNA, 19 nt, Artificial Sequence
  Description of Artificial Sequence: Synthetic oligonucleotide
gcacuggaguaucgccaag

SEQ ID NO: 1340154 - RNA, 19 nt, Artificial Sequence
  Description of Artificial Sequence: Synthetic oligonucleotide
cuggaguaucgccaagaau

SEQ ID NO: 1340155 - RNA, 19 nt, Artificial Sequence
  Description of Artificial Sequence: Synthetic oligonucleotide
ggcauauguagcucugauu

SEQ ID NO: 1340156 - RNA, 19 nt, Artificial Sequence
  Description of Artificial Sequence: Synthetic oligonucleotide
cagaaaucauagucuuguu

SEQ ID NO: 1340157 - RNA, 19 nt, Artificial Sequence
  Description of Artificial Sequence: Synthetic oligonucleotide
caccgacaacagccagaag

SEQ ID NO: 1340158 - RNA, 19 nt, Artificial Sequence
  Description of Artificial Sequence: Synthetic oligonucleotide
gcauauggugguccucuua

SEQ ID NO: 1340159 - RNA, 19 nt, Artificial Sequence
  Description of Artificial Sequence: Synthetic oligonucleotide
gcaaaugcccauccaguuu

SEQ ID NO: 1340160 - RNA, 19 nt, Artificial Sequence
  Description of Artificial Sequence: Synthetic oligonucleotide
agggaacccuggacaugag

SEQ ID NO: 1340161 - RNA, 19 nt, Artificial Sequence
  Description of Artificial Sequence: Synthetic oligonucleotide
ccuaagguaaccccaccau

SEQ ID NO: 1340162 - RNA, 19 nt, Artificial Sequence
  Description of Artificial Sequence: Synthetic oligonucleotide
accgccgcggucgcacaca

SEQ ID NO: 1340163 - RNA, 19 nt, Artificial Sequence
  Description of Artificial Sequence: Synthetic oligonucleotide
cuucaucggcuugcuugca

SEQ ID NO: 1340164 - RNA, 19 nt, Artificial Sequence
  Description of Artificial Sequence: Synthetic oligonucleotide
acgaggcgacggaacuugu

SEQ ID NO: 1340165 - RNA, 19 nt, Artificial Sequence
  Description of Artificial Sequence: Synthetic oligonucleotide
cgaggcgacggaacuuguc

SEQ ID NO: 1340166 - RNA, 19 nt, Artificial Sequence
  Description of Artificial Sequence: Synthetic oligonucleotide
ggugguccucuuauauggu

SEQ ID NO: 1340167 - RNA, 19 nt, Artificial Sequence
  Description of Artificial Sequence: Synthetic oligonucleotide
cagugccaccgccgcgguc

SEQ ID NO: 1340168 - RNA, 19 nt, Artificial Sequence
  Description of Artificial Sequence: Synthetic oligonucleotide
cugcgauccaccgggcaau

SEQ ID NO: 1340169 - RNA, 19 nt, Artificial Sequence
  Description of Artificial Sequence: Synthetic oligonucleotide
cauguccuguauggggauu

SEQ ID NO: 1340170 - RNA, 19 nt, Artificial Sequence
  Description of Artificial Sequence: Synthetic oligonucleotide
ccgccgcggucgcacacac

SEQ ID NO: 1340171 - RNA, 19 nt, Artificial Sequence
  Description of Artificial Sequence: Synthetic oligonucleotide
ccgcggucgcacacacaca

SEQ ID NO: 1340172 - RNA, 19 nt, Artificial Sequence
  Description of Artificial Sequence: Synthetic oligonucleotide
gcgauccaccgggcaaucu

SEQ ID NO: 1340173 - RNA, 19 nt, Artificial Sequence
  Description of Artificial Sequence: Synthetic oligonucleotide
ccaccucggugaggccaug

SEQ ID NO: 1340174 - RNA, 19 nt, Artificial Sequence
  Description of Artificial Sequence: Synthetic oligonucleotide
aagauaaucauuuagcagg

SEQ ID NO: 1340175 - RNA, 19 nt, Artificial Sequence
  Description of Artificial Sequence: Synthetic oligonucleotide
uuaacuuuaaccauagugg

SEQ ID NO: 1340176 - RNA, 19 nt, Artificial Sequence
  Description of Artificial Sequence: Synthetic oligonucleotide
aauaagauaaucauuuagc

SEQ ID NO: 1340177 - RNA, 19 nt, Artificial Sequence
  Description of Artificial Sequence: Synthetic oligonucleotide
uuucauauaauucuuaacu

SEQ ID NO: 1340178 - RNA, 19 nt, Artificial Sequence
  Description of Artificial Sequence: Synthetic oligonucleotide
gaagaauaagaucacaggg

SEQ ID NO: 1340179 - RNA, 19 nt, Artificial Sequence
  Description of Artificial Sequence: Synthetic oligonucleotide
uuguaggacaacaauaugg

SEQ ID NO: 1340180 - RNA, 19 nt, Artificial Sequence
  Description of Artificial Sequence: Synthetic oligonucleotide
aauaagaucacagggaaag

SEQ ID NO: 1340181 - RNA, 19 nt, Artificial Sequence
  Description of Artificial Sequence: Synthetic oligonucleotide
uaauucuuaacuuuaacca

SEQ ID NO: 1340182 - RNA, 19 nt, Artificial Sequence
  Description of Artificial Sequence: Synthetic oligonucleotide
aaugauuaauccauauucc

SEQ ID NO: 1340183 - RNA, 19 nt, Artificial Sequence
  Description of Artificial Sequence: Synthetic oligonucleotide
cuagaauuuaguaugagug

SEQ ID NO: 1340184 - RNA, 19 nt, Artificial Sequence
  Description of Artificial Sequence: Synthetic oligonucleotide
uugacuagaauuuaguaug

SEQ ID NO: 1340185 - RNA, 19 nt, Artificial Sequence
  Description of Artificial Sequence: Synthetic oligonucleotide
uucuuuacuacuauuagga

SEQ ID NO: 1340186 - RNA, 19 nt, Artificial Sequence
  Description of Artificial Sequence: Synthetic oligonucleotide
aauggauucggcuguacac

SEQ ID NO: 1340187 - RNA, 19 nt, Artificial Sequence
  Description of Artificial Sequence: Synthetic oligonucleotide
uuuacuacuauuaggagaa

SEQ ID NO: 1340188 - RNA, 19 nt, Artificial Sequence
  Description of Artificial Sequence: Synthetic oligonucleotide
uguaacaguuauaacaaag

SEQ ID NO: 1340189 - RNA, 19 nt, Artificial Sequence
  Description of Artificial Sequence: Synthetic oligonucleotide
aguaugcuuacuuuaaaac

SEQ ID NO: 1340190 - RNA, 19 nt, Artificial Sequence
  Description of Artificial Sequence: Synthetic oligonucleotide
cuuacuauaacuguaaaug

SEQ ID NO: 1340191 - RNA, 19 nt, Artificial Sequence
  Description of Artificial Sequence: Synthetic oligonucleotide
cuuaacuuuaaccauagug

SEQ ID NO: 1340192 - RNA, 19 nt, Artificial Sequence
  Description of Artificial Sequence: Synthetic oligonucleotide
aguuaauaucuuuuguagc

SEQ ID NO: 1340193 - RNA, 19 nt, Artificial Sequence
  Description of Artificial Sequence: Synthetic oligonucleotide
auacuauuauauuuaaauc

SEQ ID NO: 1340194 - RNA, 19 nt, Artificial Sequence
  Description of Artificial Sequence: Synthetic oligonucleotide
aguugugagauacugauug

SEQ ID NO: 1340195 - RNA, 19 nt, Artificial Sequence
  Description of Artificial Sequence: Synthetic oligonucleotide
aaccauaguggcuacuuac

SEQ ID NO: 1340196 - RNA, 19 nt, Artificial Sequence
  Description of Artificial Sequence: Synthetic oligonucleotide
uaagauaaucauuuagcag

SEQ ID NO: 1340197 - RNA, 19 nt, Artificial Sequence
  Description of Artificial Sequence: Synthetic oligonucleotide
uccagaauuauaaguaugc

SEQ ID NO: 1340198 - RNA, 19 nt, Artificial Sequence
  Description of Artificial Sequence: Synthetic oligonucleotide
uuaucaauggauucggcug

SEQ ID NO: 1340199 - RNA, 19 nt, Artificial Sequence
  Description of Artificial Sequence: Synthetic oligonucleotide
cuuacgauauucuaguaac

SEQ ID NO: 1340200 - RNA, 19 nt, Artificial Sequence
  Description of Artificial Sequence: Synthetic oligonucleotide
gguuacaagaguuauuugg

SEQ ID NO: 1340201 - RNA, 19 nt, Artificial Sequence
  Description of Artificial Sequence: Synthetic oligonucleotide
uuaggagaaucucagguug

SEQ ID NO: 1340202 - RNA, 19 nt, Artificial Sequence
  Description of Artificial Sequence: Synthetic oligonucleotide
ugcauauugaguauccuga

SEQ ID NO: 1340203 - RNA, 19 nt, Artificial Sequence
  Description of Artificial Sequence: Synthetic oligonucleotide
uuugcuaucuaaauccaga

SEQ ID NO: 1340204 - RNA, 19 nt, Artificial Sequence
  Description of Artificial Sequence: Synthetic oligonucleotide
ucauuuagcaggaaugaga

SEQ ID NO: 1340205 - RNA, 19 nt, Artificial Sequence
  Description of Artificial Sequence: Synthetic oligonucleotide
uuuagcaggaaugagaaau

SEQ ID NO: 1340206 - RNA, 19 nt, Artificial Sequence
  Description of Artificial Sequence: Synthetic oligonucleotide
aacccuauacaugagagug

SEQ ID NO: 1340207 - RNA, 19 nt, Artificial Sequence
  Description of Artificial Sequence: Synthetic oligonucleotide
agaauuuaguaugagugac

SEQ ID NO: 1340208 - RNA, 19 nt, Artificial Sequence
  Description of Artificial Sequence: Synthetic oligonucleotide
aguauccugaguuaauauc

SEQ ID NO: 1340209 - RNA, 19 nt, Artificial Sequence
  Description of Artificial Sequence: Synthetic oligonucleotide
uaacuuuaaccauaguggc

SEQ ID NO: 1340210 - RNA, 19 nt, Artificial Sequence
  Description of Artificial Sequence: Synthetic oligonucleotide
uucuacuacaucaccaacc

SEQ ID NO: 1340211 - RNA, 19 nt, Artificial Sequence
  Description of Artificial Sequence: Synthetic oligonucleotide
uaacaauucauguaaucga

SEQ ID NO: 1340212 - RNA, 19 nt, Artificial Sequence
  Description of Artificial Sequence: Synthetic oligonucleotide
uuuguggucaguucuaaga

SEQ ID NO: 1340213 - RNA, 19 nt, Artificial Sequence
  Description of Artificial Sequence: Synthetic oligonucleotide
uucugaacccuauacauga

SEQ ID NO: 1340214 - RNA, 19 nt, Artificial Sequence
  Description of Artificial Sequence: Synthetic oligonucleotide
ucauaucccuguuugauug

SEQ ID NO: 1340215 - RNA, 19 nt, Artificial Sequence
  Description of Artificial Sequence: Synthetic oligonucleotide
cuguaaaugguuacaagag

SEQ ID NO: 1340216 - RNA, 19 nt, Artificial Sequence
  Description of Artificial Sequence: Synthetic oligonucleotide
uuaguugugagauacugau

SEQ ID NO: 1340217 - RNA, 19 nt, Artificial Sequence
  Description of Artificial Sequence: Synthetic oligonucleotide
ucuacuacaucaccaaccu

SEQ ID NO: 1340218 - RNA, 19 nt, Artificial Sequence
  Description of Artificial Sequence: Synthetic oligonucleotide
aaucucagguuguuugcac

SEQ ID NO: 1340219 - RNA, 19 nt, Artificial Sequence
  Description of Artificial Sequence: Synthetic oligonucleotide
uauaauucuuaacuuuaac

SEQ ID NO: 1340220 - RNA, 19 nt, Artificial Sequence
  Description of Artificial Sequence: Synthetic oligonucleotide
uacuauaacuguaaauggu

SEQ ID NO: 1340221 - RNA, 19 nt, Artificial Sequence
  Description of Artificial Sequence: Synthetic oligonucleotide
ucaauaugcuuguaggaca

SEQ ID NO: 1340222 - RNA, 19 nt, Artificial Sequence
  Description of Artificial Sequence: Synthetic oligonucleotide
uauaaguaugcuuacuuua

SEQ ID NO: 1340223 - RNA, 19 nt, Artificial Sequence
  Description of Artificial Sequence: Synthetic oligonucleotide
uaacaguuauaacaaagaa

SEQ ID NO: 1340224 - RNA, 19 nt, Artificial Sequence
  Description of Artificial Sequence: Synthetic oligonucleotide
ucuucucuaucuuguaagg

SEQ ID NO: 1340225 - RNA, 19 nt, Artificial Sequence
  Description of Artificial Sequence: Synthetic oligonucleotide
uuguggucaguucuaagag

SEQ ID NO: 1340226 - RNA, 19 nt, Artificial Sequence
  Description of Artificial Sequence: Synthetic oligonucleotide
uacuauuaggagaaucuca

SEQ ID NO: 1340227 - RNA, 19 nt, Artificial Sequence
  Description of Artificial Sequence: Synthetic oligonucleotide
agucaauggguuaaaagcg

SEQ ID NO: 1340228 - RNA, 19 nt, Artificial Sequence
  Description of Artificial Sequence: Synthetic oligonucleotide
aauggguuaaaagcgcauc

SEQ ID NO: 1340229 - RNA, 19 nt, Artificial Sequence
  Description of Artificial Sequence: Synthetic oligonucleotide
uguacuucuacuacaucac

SEQ ID NO: 1340230 - RNA, 19 nt, Artificial Sequence
  Description of Artificial Sequence: Synthetic oligonucleotide
aggacaacaauaugggcag

SEQ ID NO: 1340231 - RNA, 19 nt, Artificial Sequence
  Description of Artificial Sequence: Synthetic oligonucleotide
uuagauucaccaucaagac

SEQ ID NO: 1340232 - RNA, 19 nt, Artificial Sequence
  Description of Artificial Sequence: Synthetic oligonucleotide
ucuucguacauucuuuacu

SEQ ID NO: 1340233 - RNA, 19 nt, Artificial Sequence
  Description of Artificial Sequence: Synthetic oligonucleotide
uagaauuuaguaugaguga

SEQ ID NO: 1340234 - RNA, 19 nt, Artificial Sequence
  Description of Artificial Sequence: Synthetic oligonucleotide
aguaugagugacaaugugg

SEQ ID NO: 1340235 - RNA, 19 nt, Artificial Sequence
  Description of Artificial Sequence: Synthetic oligonucleotide
uuagcugcaaucagaguca

SEQ ID NO: 1340236 - RNA, 19 nt, Artificial Sequence
  Description of Artificial Sequence: Synthetic oligonucleotide
aauuuaguaugagugacaa

SEQ ID NO: 1340237 - RNA, 19 nt, Artificial Sequence
  Description of Artificial Sequence: Synthetic oligonucleotide
uauuaguugugagauacug

SEQ ID NO: 1340238 - RNA, 19 nt, Artificial Sequence
  Description of Artificial Sequence: Synthetic oligonucleotide
gagguuaucaauggauucg

SEQ ID NO: 1340239 - RNA, 19 nt, Artificial Sequence
  Description of Artificial Sequence: Synthetic oligonucleotide
agccaucaaugauuaaucc

SEQ ID NO: 1340240 - RNA, 19 nt, Artificial Sequence
  Description of Artificial Sequence: Synthetic oligonucleotide
acuagaauuuaguaugagu

SEQ ID NO: 1340241 - RNA, 19 nt, Artificial Sequence
  Description of Artificial Sequence: Synthetic oligonucleotide
auugcuguaacaguuauaa

SEQ ID NO: 1340242 - RNA, 19 nt, Artificial Sequence
  Description of Artificial Sequence: Synthetic oligonucleotide
ucuuacgauauucuaguaa

SEQ ID NO: 1340243 - RNA, 19 nt, Artificial Sequence
  Description of Artificial Sequence: Synthetic oligonucleotide
aauguggagccaucaauga

SEQ ID NO: 1340244 - RNA, 19 nt, Artificial Sequence
  Description of Artificial Sequence: Synthetic oligonucleotide
uaauggacauuuauucuga

SEQ ID NO: 1340245 - RNA, 19 nt, Artificial Sequence
  Description of Artificial Sequence: Synthetic oligonucleotide
ugugucuaagccaaucuuc

SEQ ID NO: 1340246 - RNA, 19 nt, Artificial Sequence
  Description of Artificial Sequence: Synthetic oligonucleotide
aacaguuauaacaaagaaa

SEQ ID NO: 1340247 - RNA, 19 nt, Artificial Sequence
  Description of Artificial Sequence: Synthetic oligonucleotide
acuauuaggagaaucucag

SEQ ID NO: 1340248 - RNA, 19 nt, Artificial Sequence
  Description of Artificial Sequence: Synthetic oligonucleotide
gauucggcuguacacagug

SEQ ID NO: 1340249 - RNA, 19 nt, Artificial Sequence
  Description of Artificial Sequence: Synthetic oligonucleotide
accaaaguguauuuucaag

SEQ ID NO: 1340250 - RNA, 19 nt, Artificial Sequence
  Description of Artificial Sequence: Synthetic oligonucleotide
uuaguaugagugacaaugu

SEQ ID NO: 1340251 - RNA, 19 nt, Artificial Sequence
  Description of Artificial Sequence: Synthetic oligonucleotide
aagcgcauccauuucauaa

SEQ ID NO: 1340252 - RNA, 19 nt, Artificial Sequence
  Description of Artificial Sequence: Synthetic oligonucleotide
agauucagauuccuggcag

SEQ ID NO: 1340253 - RNA, 19 nt, Artificial Sequence
  Description of Artificial Sequence: Synthetic oligonucleotide
ucauguuugucucaaucuc

SEQ ID NO: 1340254 - RNA, 19 nt, Artificial Sequence
  Description of Artificial Sequence: Synthetic oligonucleotide
guuaauaucuuuuguagcu

SEQ ID NO: 1340255 - RNA, 19 nt, Artificial Sequence
  Description of Artificial Sequence: Synthetic oligonucleotide
uugcauauugaguauccug

SEQ ID NO: 1340256 - RNA, 19 nt, Artificial Sequence
  Description of Artificial Sequence: Synthetic oligonucleotide
ugcauaaugugucuugcaa

SEQ ID NO: 1340257 - RNA, 19 nt, Artificial Sequence
  Description of Artificial Sequence: Synthetic oligonucleotide
uucaauuguuugcucggag

SEQ ID NO: 1340258 - RNA, 19 nt, Artificial Sequence
  Description of Artificial Sequence: Synthetic oligonucleotide
auauuccugauguucuguc

SEQ ID NO: 1340259 - RNA, 19 nt, Artificial Sequence
  Description of Artificial Sequence: Synthetic oligonucleotide
caauguggagccaucaaug

SEQ ID NO: 1340260 - RNA, 19 nt, Artificial Sequence
  Description of Artificial Sequence: Synthetic oligonucleotide
uaucaauggauucggcugu

SEQ ID NO: 1340261 - RNA, 19 nt, Artificial Sequence
  Description of Artificial Sequence: Synthetic oligonucleotide
gguuguuugcacuagaguc

SEQ ID NO: 1340262 - RNA, 19 nt, Artificial Sequence
  Description of Artificial Sequence: Synthetic oligonucleotide
uggcuacuuacuauaacug

SEQ ID NO: 1340263 - RNA, 19 nt, Artificial Sequence
  Description of Artificial Sequence: Synthetic oligonucleotide
uacaagaguuauuugguau

SEQ ID NO: 1340264 - RNA, 19 nt, Artificial Sequence
  Description of Artificial Sequence: Synthetic oligonucleotide
ugucuugcaauuagauuca

SEQ ID NO: 1340265 - RNA, 19 nt, Artificial Sequence
  Description of Artificial Sequence: Synthetic oligonucleotide
ucaauggguuaaaagcgca

SEQ ID NO: 1340266 - RNA, 19 nt, Artificial Sequence
  Description of Artificial Sequence: Synthetic oligonucleotide
ugacauaacagguuccauc

SEQ ID NO: 1340267 - RNA, 19 nt, Artificial Sequence
  Description of Artificial Sequence: Synthetic oligonucleotide
acugcauaaugugucuugc

SEQ ID NO: 1340268 - RNA, 19 nt, Artificial Sequence
  Description of Artificial Sequence: Synthetic oligonucleotide
uucuaagagcucaguauug

SEQ ID NO: 1340269 - RNA, 19 nt, Artificial Sequence
  Description of Artificial Sequence: Synthetic oligonucleotide
cuguacuucuacuacauca

SEQ ID NO: 1340270 - RNA, 19 nt, Artificial Sequence
  Description of Artificial Sequence: Synthetic oligonucleotide
ucaaugauuaauccauauu

SEQ ID NO: 1340271 - RNA, 19 nt, Artificial Sequence
  Description of Artificial Sequence: Synthetic oligonucleotide
uaaaugguuacaagaguua

SEQ ID NO: 1340272 - RNA, 19 nt, Artificial Sequence
  Description of Artificial Sequence: Synthetic oligonucleotide
uuugccucuauuaguugug

SEQ ID NO: 1340273 - RNA, 19 nt, Artificial Sequence
  Description of Artificial Sequence: Synthetic oligonucleotide
gauauucuaguaacaauuc

SEQ ID NO: 1340274 - RNA, 19 nt, Artificial Sequence
  Description of Artificial Sequence: Synthetic oligonucleotide
guagugacauaacagguuc

SEQ ID NO: 1340275 - RNA, 19 nt, Artificial Sequence
  Description of Artificial Sequence: Synthetic oligonucleotide
ugcaaugguaucucggacu

SEQ ID NO: 1340276 - RNA, 19 nt, Artificial Sequence
  Description of Artificial Sequence: Synthetic oligonucleotide
ucuugacuagaauuuagua

SEQ ID NO: 1340277 - RNA, 19 nt, Artificial Sequence
  Description of Artificial Sequence: Synthetic oligonucleotide
uaugcuuguaggacaacaa

SEQ ID NO: 1340278 - RNA, 19 nt, Artificial Sequence
  Description of Artificial Sequence: Synthetic oligonucleotide
uuacgauauucuaguaaca

SEQ ID NO: 1340279 - RNA, 19 nt, Artificial Sequence
  Description of Artificial Sequence: Synthetic oligonucleotide
uguagugacauaacagguu

SEQ ID NO: 1340280 - RNA, 19 nt, Artificial Sequence
  Description of Artificial Sequence: Synthetic oligonucleotide
ucguacauucuuuacuacu

SEQ ID NO: 1340281 - RNA, 19 nt, Artificial Sequence
  Description of Artificial Sequence: Synthetic oligonucleotide
uugcacuagagucuugacu

SEQ ID NO: 1340282 - RNA, 19 nt, Artificial Sequence
  Description of Artificial Sequence: Synthetic oligonucleotide
ucuugcaauuagauucacc

SEQ ID NO: 1340283 - RNA, 19 nt, Artificial Sequence
  Description of Artificial Sequence: Synthetic oligonucleotide
acacuguauuagcaaaauc

SEQ ID NO: 1340284 - RNA, 19 nt, Artificial Sequence
  Description of Artificial Sequence: Synthetic oligonucleotide
uaguaacugggcugguugg

SEQ ID NO: 1340285 - RNA, 19 nt, Artificial Sequence
  Description of Artificial Sequence: Synthetic oligonucleotide
ugugaccuguacaaggaaa

SEQ ID NO: 1340286 - RNA, 19 nt, Artificial Sequence
  Description of Artificial Sequence: Synthetic oligonucleotide
uuugucucaaucucaucaa

SEQ ID NO: 1340287 - RNA, 19 nt, Artificial Sequence
  Description of Artificial Sequence: Synthetic oligonucleotide
cuauuaggagaaucucagg

SEQ ID NO: 1340288 - RNA, 19 nt, Artificial Sequence
  Description of Artificial Sequence: Synthetic oligonucleotide
ucucggacugcauaaugug

SEQ ID NO: 1340289 - RNA, 19 nt, Artificial Sequence
  Description of Artificial Sequence: Synthetic oligonucleotide
aguucaagauucagauucc

SEQ ID NO: 1340290 - RNA, 19 nt, Artificial Sequence
  Description of Artificial Sequence: Synthetic oligonucleotide
ucggagguuaucaauggau

SEQ ID NO: 1340291 - RNA, 19 nt, Artificial Sequence
  Description of Artificial Sequence: Synthetic oligonucleotide
aacuucuuacgauauucua

SEQ ID NO: 1340292 - RNA, 19 nt, Artificial Sequence
  Description of Artificial Sequence: Synthetic oligonucleotide
aucaaugauuaauccauau

SEQ ID NO: 1340293 - RNA, 19 nt, Artificial Sequence
  Description of Artificial Sequence: Synthetic oligonucleotide
gacugcauaaugugucuug

SEQ ID NO: 1340294 - RNA, 19 nt, Artificial Sequence
  Description of Artificial Sequence: Synthetic oligonucleotide
auaacuguaaaugguuaca

SEQ ID NO: 1340295 - RNA, 19 nt, Artificial Sequence
  Description of Artificial Sequence: Synthetic oligonucleotide
auuaggagaaucucagguu

SEQ ID NO: 1340296 - RNA, 19 nt, Artificial Sequence
  Description of Artificial Sequence: Synthetic oligonucleotide
ucggacugcauaauguguc

SEQ ID NO: 1340297 - RNA, 19 nt, Artificial Sequence
  Description of Artificial Sequence: Synthetic oligonucleotide
auaguggcuacuuacuaua

SEQ ID NO: 1340298 - RNA, 19 nt, Artificial Sequence
  Description of Artificial Sequence: Synthetic oligonucleotide
acaauguggagccaucaau

SEQ ID NO: 1340299 - RNA, 19 nt, Artificial Sequence
  Description of Artificial Sequence: Synthetic oligonucleotide
gucaauaugcuuguaggac

SEQ ID NO: 1340300 - RNA, 19 nt, Artificial Sequence
  Description of Artificial Sequence: Synthetic oligonucleotide
uugcuaucuaaauccagaa

SEQ ID NO: 1340301 - RNA, 19 nt, Artificial Sequence
  Description of Artificial Sequence: Synthetic oligonucleotide
ugacacaaacagccuaugu

SEQ ID NO: 1340302 - RNA, 19 nt, Artificial Sequence
  Description of Artificial Sequence: Synthetic oligonucleotide
aauaugcuuguaggacaac

SEQ ID NO: 1340303 - RNA, 19 nt, Artificial Sequence
  Description of Artificial Sequence: Synthetic oligonucleotide
agaaaaguggaaguccacu

SEQ ID NO: 1340304 - RNA, 19 nt, Artificial Sequence
  Description of Artificial Sequence: Synthetic oligonucleotide
aaguaacacuguauuagca

SEQ ID NO: 1340305 - RNA, 19 nt, Artificial Sequence
  Description of Artificial Sequence: Synthetic oligonucleotide
gaaaaguggaaguccacua

SEQ ID NO: 1340306 - RNA, 19 nt, Artificial Sequence
  Description of Artificial Sequence: Synthetic oligonucleotide
acaauaugggcaguucaag

SEQ ID NO: 1340307 - RNA, 19 nt, Artificial Sequence
  Description of Artificial Sequence: Synthetic oligonucleotide
aacaauaugggcaguucaa

SEQ ID NO: 1340308 - RNA, 19 nt, Artificial Sequence
  Description of Artificial Sequence: Synthetic oligonucleotide
aacacuguauuagcaaaau

SEQ ID NO: 1340309 - RNA, 19 nt, Artificial Sequence
  Description of Artificial Sequence: Synthetic oligonucleotide
ggacauuuauucugaaccc

SEQ ID NO: 1340310 - RNA, 19 nt, Artificial Sequence
  Description of Artificial Sequence: Synthetic oligonucleotide
acaacaauaugggcaguuc

SEQ ID NO: 1340311 - RNA, 19 nt, Artificial Sequence
  Description of Artificial Sequence: Synthetic oligonucleotide
ucugaacccuauacaugag

SEQ ID NO: 1340312 - RNA, 19 nt, Artificial Sequence
  Description of Artificial Sequence: Synthetic oligonucleotide
aggcauaacagguggauuu

SEQ ID NO: 1340313 - RNA, 19 nt, Artificial Sequence
  Description of Artificial Sequence: Synthetic oligonucleotide
agguggauuuggcuguuuc

SEQ ID NO: 1340314 - RNA, 19 nt, Artificial Sequence
  Description of Artificial Sequence: Synthetic oligonucleotide
guaggacaacaauaugggc

SEQ ID NO: 1340315 - RNA, 19 nt, Artificial Sequence
  Description of Artificial Sequence: Synthetic oligonucleotide
acuauaacuguaaaugguu

SEQ ID NO: 1340316 - RNA, 19 nt, Artificial Sequence
  Description of Artificial Sequence: Synthetic oligonucleotide
caauucauguaaucgaucu

SEQ ID NO: 1340317 - RNA, 19 nt, Artificial Sequence
  Description of Artificial Sequence: Synthetic oligonucleotide
uacuuacuauaacuguaaa

SEQ ID NO: 1340318 - RNA, 19 nt, Artificial Sequence
  Description of Artificial Sequence: Synthetic oligonucleotide
acgauauucuaguaacaau

SEQ ID NO: 1340319 - RNA, 19 nt, Artificial Sequence
  Description of Artificial Sequence: Synthetic oligonucleotide
cuuguaggacaacaauaug

SEQ ID NO: 1340320 - RNA, 19 nt, Artificial Sequence
  Description of Artificial Sequence: Synthetic oligonucleotide
ugcuaucuaaauccagaau

SEQ ID NO: 1340321 - RNA, 19 nt, Artificial Sequence
  Description of Artificial Sequence: Synthetic oligonucleotide
agccugaucuugcagcuug

SEQ ID NO: 1340322 - RNA, 19 nt, Artificial Sequence
  Description of Artificial Sequence: Synthetic oligonucleotide
auaugcuuguaggacaaca

SEQ ID NO: 1340323 - RNA, 19 nt, Artificial Sequence
  Description of Artificial Sequence: Synthetic oligonucleotide
aaugugacacaaacagccu

SEQ ID NO: 1340324 - RNA, 19 nt, Artificial Sequence
  Description of Artificial Sequence: Synthetic oligonucleotide
cagguuguuugcacuagag

SEQ ID NO: 1340325 - RNA, 19 nt, Artificial Sequence
  Description of Artificial Sequence: Synthetic oligonucleotide
guuaaaagcgcauccauuu

SEQ ID NO: 1340326 - RNA, 19 nt, Artificial Sequence
  Description of Artificial Sequence: Synthetic oligonucleotide
cuugacuagaauuuaguau

SEQ ID NO: 1340327 - RNA, 19 nt, Artificial Sequence
  Description of Artificial Sequence: Synthetic oligonucleotide
uugauugcuguaacaguua

SEQ ID NO: 1340328 - RNA, 19 nt, Artificial Sequence
  Description of Artificial Sequence: Synthetic oligonucleotide
uaucuuguaaggccauuuu

SEQ ID NO: 1340329 - RNA, 19 nt, Artificial Sequence
  Description of Artificial Sequence: Synthetic oligonucleotide
guacuucuacuacaucacc

SEQ ID NO: 1340330 - RNA, 19 nt, Artificial Sequence
  Description of Artificial Sequence: Synthetic oligonucleotide
uuaaccauaguggcuacuu

SEQ ID NO: 1340331 - RNA, 19 nt, Artificial Sequence
  Description of Artificial Sequence: Synthetic oligonucleotide
gacuagaauuuaguaugag

SEQ ID NO: 1340332 - RNA, 19 nt, Artificial Sequence
  Description of Artificial Sequence: Synthetic oligonucleotide
agguuguuugcacuagagu

SEQ ID NO: 1340333 - RNA, 19 nt, Artificial Sequence
  Description of Artificial Sequence: Synthetic oligonucleotide
gaauuuaguaugagugaca

SEQ ID NO: 1340334 - RNA, 19 nt, Artificial Sequence
  Description of Artificial Sequence: Synthetic oligonucleotide
uuagcaaaaucuguucauu

SEQ ID NO: 1340335 - RNA, 19 nt, Artificial Sequence
  Description of Artificial Sequence: Synthetic oligonucleotide
auugaguauccugaguuaa

SEQ ID NO: 1340336 - RNA, 19 nt, Artificial Sequence
  Description of Artificial Sequence: Synthetic oligonucleotide
cuacuuacuauaacuguaa

SEQ ID NO: 1340337 - RNA, 19 nt, Artificial Sequence
  Description of Artificial Sequence: Synthetic oligonucleotide
uucucacucguuuugcauu

SEQ ID NO: 1340338 - RNA, 19 nt, Artificial Sequence
  Description of Artificial Sequence: Synthetic oligonucleotide
auaugggcaguucaagauu

SEQ ID NO: 1340339 - RNA, 19 nt, Artificial Sequence
  Description of Artificial Sequence: Synthetic oligonucleotide
agccuaugucuuuugccag

SEQ ID NO: 1340340 - RNA, 19 nt, Artificial Sequence
  Description of Artificial Sequence: Synthetic oligonucleotide
uucguacauucuuuacuac

SEQ ID NO: 1340341 - RNA, 19 nt, Artificial Sequence
  Description of Artificial Sequence: Synthetic oligonucleotide
agucuugacuagaauuuag

SEQ ID NO: 1340342 - RNA, 19 nt, Artificial Sequence
  Description of Artificial Sequence: Synthetic oligonucleotide
caauaugggcaguucaaga

SEQ ID NO: 1340343 - RNA, 19 nt, Artificial Sequence
  Description of Artificial Sequence: Synthetic oligonucleotide
agauaaucauuuagcagga

SEQ ID NO: 1340344 - RNA, 19 nt, Artificial Sequence
  Description of Artificial Sequence: Synthetic oligonucleotide
ugaguauccugaguuaaua

SEQ ID NO: 1340345 - RNA, 19 nt, Artificial Sequence
  Description of Artificial Sequence: Synthetic oligonucleotide
uggguuaaaagcgcaucca

SEQ ID NO: 1340346 - RNA, 19 nt, Artificial Sequence
  Description of Artificial Sequence: Synthetic oligonucleotide
uuugcucggagguuaucaa

SEQ ID NO: 1340347 - RNA, 19 nt, Artificial Sequence
  Description of Artificial Sequence: Synthetic oligonucleotide
uugaguauccugaguuaau

SEQ ID NO: 1340348 - RNA, 19 nt, Artificial Sequence
  Description of Artificial Sequence: Synthetic oligonucleotide
cauaucccuguuugauugc

SEQ ID NO: 1340349 - RNA, 19 nt, Artificial Sequence
  Description of Artificial Sequence: Synthetic oligonucleotide
aaaagcgcauccauuucau

SEQ ID NO: 1340350 - RNA, 19 nt, Artificial Sequence
  Description of Artificial Sequence: Synthetic oligonucleotide
ugguaucucggacugcaua

SEQ ID NO: 1340351 - RNA, 19 nt, Artificial Sequence
  Description of Artificial Sequence: Synthetic oligonucleotide
agcgcauccauuucauaau

SEQ ID NO: 1340352 - RNA, 19 nt, Artificial Sequence
  Description of Artificial Sequence: Synthetic oligonucleotide
caacaauaugggcaguuca

SEQ ID NO: 1340353 - RNA, 19 nt, Artificial Sequence
  Description of Artificial Sequence: Synthetic oligonucleotide
ucuuaacuuuaaccauagu

SEQ ID NO: 1340354 - RNA, 19 nt, Artificial Sequence
  Description of Artificial Sequence: Synthetic oligonucleotide
gcuaucuaaauccagaauu

SEQ ID NO: 1340355 - RNA, 19 nt, Artificial Sequence
  Description of Artificial Sequence: Synthetic oligonucleotide
aguccacuaguaacugggc

SEQ ID NO: 1340356 - RNA, 19 nt, Artificial Sequence
  Description of Artificial Sequence: Synthetic oligonucleotide
auuguuugcucggagguua

SEQ ID NO: 1340357 - RNA, 19 nt, Artificial Sequence
  Description of Artificial Sequence: Synthetic oligonucleotide
ggcuguagugacauaacag

SEQ ID NO: 1340358 - RNA, 19 nt, Artificial Sequence
  Description of Artificial Sequence: Synthetic oligonucleotide
auggauucggcuguacaca

SEQ ID NO: 1340359 - RNA, 19 nt, Artificial Sequence
  Description of Artificial Sequence: Synthetic oligonucleotide
ucacucguuuugcauuuuc

SEQ ID NO: 1340360 - RNA, 19 nt, Artificial Sequence
  Description of Artificial Sequence: Synthetic oligonucleotide
augugacacaaacagccua

SEQ ID NO: 1340361 - RNA, 19 nt, Artificial Sequence
  Description of Artificial Sequence: Synthetic oligonucleotide
ucucacucguuuugcauuu

SEQ ID NO: 1340362 - RNA, 19 nt, Artificial Sequence
  Description of Artificial Sequence: Synthetic oligonucleotide
aguugugcaggaugacaga

SEQ ID NO: 1340363 - RNA, 19 nt, Artificial Sequence
  Description of Artificial Sequence: Synthetic oligonucleotide
cugccuguacuucuacuac

SEQ ID NO: 1340364 - RNA, 19 nt, Artificial Sequence
  Description of Artificial Sequence: Synthetic oligonucleotide
caauaugcuuguaggacaa

SEQ ID NO: 1340365 - RNA, 19 nt, Artificial Sequence
  Description of Artificial Sequence: Synthetic oligonucleotide
gguggauuuggcuguuucc

SEQ ID NO: 1340366 - RNA, 19 nt, Artificial Sequence
  Description of Artificial Sequence: Synthetic oligonucleotide
ggagguuaucaauggauuc

SEQ ID NO: 1340367 - RNA, 19 nt, Artificial Sequence
  Description of Artificial Sequence: Synthetic oligonucleotide
ugucuuuugccaggcaaaa

SEQ ID NO: 1340368 - RNA, 19 nt, Artificial Sequence
  Description of Artificial Sequence: Synthetic oligonucleotide
uuguugcauauugaguauc

SEQ ID NO: 1340369 - RNA, 19 nt, Artificial Sequence
  Description of Artificial Sequence: Synthetic oligonucleotide
uaguggcuacuuacuauaa

SEQ ID NO: 1340370 - RNA, 19 nt, Artificial Sequence
  Description of Artificial Sequence: Synthetic oligonucleotide
guuugcacuagagucuuga

SEQ ID NO: 1340371 - RNA, 19 nt, Artificial Sequence
  Description of Artificial Sequence: Synthetic oligonucleotide
guaaaugguuacaagaguu

SEQ ID NO: 1340372 - RNA, 19 nt, Artificial Sequence
  Description of Artificial Sequence: Synthetic oligonucleotide
guuugcucggagguuauca

SEQ ID NO: 1340373 - RNA, 19 nt, Artificial Sequence
  Description of Artificial Sequence: Synthetic oligonucleotide
gcuguaacaguuauaacaa

SEQ ID NO: 1340374 - RNA, 19 nt, Artificial Sequence
  Description of Artificial Sequence: Synthetic oligonucleotide
aucaguugugcaggaugac

SEQ ID NO: 1340375 - RNA, 19 nt, Artificial Sequence
  Description of Artificial Sequence: Synthetic oligonucleotide
gcuguacacagugcaaugg

SEQ ID NO: 1340376 - RNA, 19 nt, Artificial Sequence
  Description of Artificial Sequence: Synthetic oligonucleotide
aaagcgcauccauuucaua

SEQ ID NO: 1340377 - RNA, 19 nt, Artificial Sequence
  Description of Artificial Sequence: Synthetic oligonucleotide
aucucggacugcauaaugu

SEQ ID NO: 1340378 - RNA, 19 nt, Artificial Sequence
  Description of Artificial Sequence: Synthetic oligonucleotide
cuggcuguagugacauaac

SEQ ID NO: 1340379 - RNA, 19 nt, Artificial Sequence
  Description of Artificial Sequence: Synthetic oligonucleotide
aucuaaauccagaauuaua

SEQ ID NO: 1340380 - RNA, 19 nt, Artificial Sequence
  Description of Artificial Sequence: Synthetic oligonucleotide
gguaucucggacugcauaa

SEQ ID NO: 1340381 - RNA, 19 nt, Artificial Sequence
  Description of Artificial Sequence: Synthetic oligonucleotide
uucuuacgauauucuagua

SEQ ID NO: 1340382 - RNA, 19 nt, Artificial Sequence
  Description of Artificial Sequence: Synthetic oligonucleotide
acaaacagccuaugucuuu

SEQ ID NO: 1340383 - RNA, 19 nt, Artificial Sequence
  Description of Artificial Sequence: Synthetic oligonucleotide
aagaguuauuugguauuuu

SEQ ID NO: 1340384 - RNA, 19 nt, Artificial Sequence
  Description of Artificial Sequence: Synthetic oligonucleotide
aaguggaaguccacuagua

SEQ ID NO: 1340385 - RNA, 19 nt, Artificial Sequence
  Description of Artificial Sequence: Synthetic oligonucleotide
uaguugugagauacugauu

SEQ ID NO: 1340386 - RNA, 19 nt, Artificial Sequence
  Description of Artificial Sequence: Synthetic oligonucleotide
auucggcuguacacagugc

SEQ ID NO: 1340387 - RNA, 19 nt, Artificial Sequence
  Description of Artificial Sequence: Synthetic oligonucleotide
cugaacccuauacaugaga

SEQ ID NO: 1340388 - RNA, 19 nt, Artificial Sequence
  Description of Artificial Sequence: Synthetic oligonucleotide
gcugcaaucagagucaaua

SEQ ID NO: 1340389 - RNA, 19 nt, Artificial Sequence
  Description of Artificial Sequence: Synthetic oligonucleotide
uugcucggagguuaucaau

SEQ ID NO: 1340390 - RNA, 19 nt, Artificial Sequence
  Description of Artificial Sequence: Synthetic oligonucleotide
cauaacagguuccaucagu

SEQ ID NO: 1340391 - RNA, 19 nt, Artificial Sequence
  Description of Artificial Sequence: Synthetic oligonucleotide
gccuaugucuuuugccagg

SEQ ID NO: 1340392 - RNA, 19 nt, Artificial Sequence
  Description of Artificial Sequence: Synthetic oligonucleotide
guugguguguccacuguga

SEQ ID NO: 1340393 - RNA, 19 nt, Artificial Sequence
  Description of Artificial Sequence: Synthetic oligonucleotide
cuguuugauugcuguaaca

SEQ ID NO: 1340394 - RNA, 19 nt, Artificial Sequence
  Description of Artificial Sequence: Synthetic oligonucleotide
uguuugcacuagagucuug

SEQ ID NO: 1340395 - RNA, 19 nt, Artificial Sequence
  Description of Artificial Sequence: Synthetic oligonucleotide
caauggauucggcuguaca

SEQ ID NO: 1340396 - RNA, 19 nt, Artificial Sequence
  Description of Artificial Sequence: Synthetic oligonucleotide
ccaucaguugugcaggaug

SEQ ID NO: 1340397 - RNA, 19 nt, Artificial Sequence
  Description of Artificial Sequence: Synthetic oligonucleotide
gauucagauuccuggcagu

SEQ ID NO: 1340398 - RNA, 19 nt, Artificial Sequence
  Description of Artificial Sequence: Synthetic oligonucleotide
uugccucuauuaguuguga

SEQ ID NO: 1340399 - RNA, 19 nt, Artificial Sequence
  Description of Artificial Sequence: Synthetic oligonucleotide
auguuugucucaaucucau

SEQ ID NO: 1340400 - RNA, 19 nt, Artificial Sequence
  Description of Artificial Sequence: Synthetic oligonucleotide
gaacccuauacaugagagu

SEQ ID NO: 1340401 - RNA, 19 nt, Artificial Sequence
  Description of Artificial Sequence: Synthetic oligonucleotide
gaguauccugaguuaauau

SEQ ID NO: 1340402 - RNA, 19 nt, Artificial Sequence
  Description of Artificial Sequence: Synthetic oligonucleotide
auaaugugucuugcaauua

SEQ ID NO: 1340403 - RNA, 19 nt, Artificial Sequence
  Description of Artificial Sequence: Synthetic oligonucleotide
cugaguuaauaucuuuugu

SEQ ID NO: 1340404 - RNA, 19 nt, Artificial Sequence
  Description of Artificial Sequence: Synthetic oligonucleotide
ugaccuguacaaggaaaau

SEQ ID NO: 1340405 - RNA, 19 nt, Artificial Sequence
  Description of Artificial Sequence: Synthetic oligonucleotide
gugaccuguacaaggaaaa

SEQ ID NO: 1340406 - RNA, 19 nt, Artificial Sequence
  Description of Artificial Sequence: Synthetic oligonucleotide
guugugcaggaugacagaa

SEQ ID NO: 1340407 - RNA, 19 nt, Artificial Sequence
  Description of Artificial Sequence: Synthetic oligonucleotide
ggacuucuacuuuauacua

SEQ ID NO: 1340408 - RNA, 19 nt, Artificial Sequence
  Description of Artificial Sequence: Synthetic oligonucleotide
uccugauguucuguccaug

SEQ ID NO: 1340409 - RNA, 19 nt, Artificial Sequence
  Description of Artificial Sequence: Synthetic oligonucleotide
ccacuaguaacugggcugg

SEQ ID NO: 1340410 - RNA, 19 nt, Artificial Sequence
  Description of Artificial Sequence: Synthetic oligonucleotide
caaucagagucaauaugcu

SEQ ID NO: 1340411 - RNA, 19 nt, Artificial Sequence
  Description of Artificial Sequence: Synthetic oligonucleotide
ccaaaguguauuuucaagu

SEQ ID NO: 1340412 - RNA, 19 nt, Artificial Sequence
  Description of Artificial Sequence: Synthetic oligonucleotide
uuguuugcucggagguuau

SEQ ID NO: 1340413 - RNA, 19 nt, Artificial Sequence
  Description of Artificial Sequence: Synthetic oligonucleotide
aaaaggcggcaggcauaac

SEQ ID NO: 1340414 - RNA, 19 nt, Artificial Sequence
  Description of Artificial Sequence: Synthetic oligonucleotide
aagguuucaucugccugua

SEQ ID NO: 1340415 - RNA, 19 nt, Artificial Sequence
  Description of Artificial Sequence: Synthetic oligonucleotide
ucaauggauucggcuguac

SEQ ID NO: 1340416 - RNA, 19 nt, Artificial Sequence
  Description of Artificial Sequence: Synthetic oligonucleotide
agcaacuucuuacgauauu

SEQ ID NO: 1340417 - RNA, 19 nt, Artificial Sequence
  Description of Artificial Sequence: Synthetic oligonucleotide
augucuuuugccaggcaaa

SEQ ID NO: 1340418 - RNA, 19 nt, Artificial Sequence
  Description of Artificial Sequence: Synthetic oligonucleotide
ccaucaaugauuaauccau

SEQ ID NO: 1340419 - RNA, 19 nt, Artificial Sequence
  Description of Artificial Sequence: Synthetic oligonucleotide
caucaaugauuaauccaua

SEQ ID NO: 1340420 - RNA, 19 nt, Artificial Sequence
  Description of Artificial Sequence: Synthetic oligonucleotide
ccuguuugauugcuguaac

SEQ ID NO: 1340421 - RNA, 19 nt, Artificial Sequence
  Description of Artificial Sequence: Synthetic oligonucleotide
agcaguggcuccaauuaaa

SEQ ID NO: 1340422 - RNA, 19 nt, Artificial Sequence
  Description of Artificial Sequence: Synthetic oligonucleotide
ucuaucuuguaaggccauu

SEQ ID NO: 1340423 - RNA, 19 nt, Artificial Sequence
  Description of Artificial Sequence: Synthetic oligonucleotide
gcuacuuacuauaacugua

SEQ ID NO: 1340424 - RNA, 19 nt, Artificial Sequence
  Description of Artificial Sequence: Synthetic oligonucleotide
cacccagacuuucaagcca

SEQ ID NO: 1340425 - RNA, 19 nt, Artificial Sequence
  Description of Artificial Sequence: Synthetic oligonucleotide
cuaagagcucaguauuggu

SEQ ID NO: 1340426 - RNA, 19 nt, Artificial Sequence
  Description of Artificial Sequence: Synthetic oligonucleotide
caugcagagcuucaauggu

SEQ ID NO: 1340427 - RNA, 19 nt, Artificial Sequence
  Description of Artificial Sequence: Synthetic oligonucleotide
ggcauaacagguggauuug

SEQ ID NO: 1340428 - RNA, 19 nt, Artificial Sequence
  Description of Artificial Sequence: Synthetic oligonucleotide
agauacugauugccacaaa

SEQ ID NO: 1340429 - RNA, 19 nt, Artificial Sequence
  Description of Artificial Sequence: Synthetic oligonucleotide
ggcuacuuacuauaacugu

SEQ ID NO: 1340430 - RNA, 19 nt, Artificial Sequence
  Description of Artificial Sequence: Synthetic oligonucleotide
gucuugacuagaauuuagu

SEQ ID NO: 1340431 - RNA, 19 nt, Artificial Sequence
  Description of Artificial Sequence: Synthetic oligonucleotide
uggcuccaauuaaauucau

SEQ ID NO: 1340432 - RNA, 19 nt, Artificial Sequence
  Description of Artificial Sequence: Synthetic oligonucleotide
acuuucaagccagcugcau

SEQ ID NO: 1340433 - RNA, 19 nt, Artificial Sequence
  Description of Artificial Sequence: Synthetic oligonucleotide
gggaaagguuucaucugcc

SEQ ID NO: 1340434 - RNA, 19 nt, Artificial Sequence
  Description of Artificial Sequence: Synthetic oligonucleotide
cuccaauuaaauucauguu

SEQ ID NO: 1340435 - RNA, 19 nt, Artificial Sequence
  Description of Artificial Sequence: Synthetic oligonucleotide
acuaguaacugggcugguu

SEQ ID NO: 1340436 - RNA, 19 nt, Artificial Sequence
  Description of Artificial Sequence: Synthetic oligonucleotide
gauugcuguaacaguuaua

SEQ ID NO: 1340437 - RNA, 19 nt, Artificial Sequence
  Description of Artificial Sequence: Synthetic oligonucleotide
cucggagguuaucaaugga

SEQ ID NO: 1340438 - RNA, 19 nt, Artificial Sequence
  Description of Artificial Sequence: Synthetic oligonucleotide
gacuucuacuuuauacuau

SEQ ID NO: 1340439 - RNA, 19 nt, Artificial Sequence
  Description of Artificial Sequence: Synthetic oligonucleotide
ccuaugucuuuugccaggc

SEQ ID NO: 1340440 - RNA, 19 nt, Artificial Sequence
  Description of Artificial Sequence: Synthetic oligonucleotide
cucagcaacuucuuacgau

SEQ ID NO: 1340441 - RNA, 19 nt, Artificial Sequence
  Description of Artificial Sequence: Synthetic oligonucleotide
ggcuccaauuaaauucaug

SEQ ID NO: 1340442 - RNA, 19 nt, Artificial Sequence
  Description of Artificial Sequence: Synthetic oligonucleotide
gcuuguaggacaacaauau

SEQ ID NO: 1340443 - RNA, 19 nt, Artificial Sequence
  Description of Artificial Sequence: Synthetic oligonucleotide
cucggacugcauaaugugu

SEQ ID NO: 1340444 - RNA, 19 nt, Artificial Sequence
  Description of Artificial Sequence: Synthetic oligonucleotide
cuauuaguugugagauacu

SEQ ID NO: 1340445 - RNA, 19 nt, Artificial Sequence
  Description of Artificial Sequence: Synthetic oligonucleotide
gcauaaugugucuugcaau

SEQ ID NO: 1340446 - RNA, 19 nt, Artificial Sequence
  Description of Artificial Sequence: Synthetic oligonucleotide
cacuagagucuugacuaga

SEQ ID NO: 1340447 - RNA, 19 nt, Artificial Sequence
  Description of Artificial Sequence: Synthetic oligonucleotide
cugcaaucagagucaauau

SEQ ID NO: 1340448 - RNA, 19 nt, Artificial Sequence
  Description of Artificial Sequence: Synthetic oligonucleotide
guugcauauugaguauccu

SEQ ID NO: 1340449 - RNA, 19 nt, Artificial Sequence
  Description of Artificial Sequence: Synthetic oligonucleotide
uguuugcucggagguuauc

SEQ ID NO: 1340450 - RNA, 19 nt, Artificial Sequence
  Description of Artificial Sequence: Synthetic oligonucleotide
gucuugcaauuagauucac

SEQ ID NO: 1340451 - RNA, 19 nt, Artificial Sequence
  Description of Artificial Sequence: Synthetic oligonucleotide
caucaagacuggcuguagu

SEQ ID NO: 1340452 - RNA, 19 nt, Artificial Sequence
  Description of Artificial Sequence: Synthetic oligonucleotide
cugugaccuguacaaggaa

SEQ ID NO: 1340453 - RNA, 19 nt, Artificial Sequence
  Description of Artificial Sequence: Synthetic oligonucleotide
uggagccaucaaugauuaa

SEQ ID NO: 1340454 - RNA, 19 nt, Artificial Sequence
  Description of Artificial Sequence: Synthetic oligonucleotide
caauggguuaaaagcgcau

SEQ ID NO: 1340455 - RNA, 19 nt, Artificial Sequence
  Description of Artificial Sequence: Synthetic oligonucleotide
cuagagucuugacuagaau

SEQ ID NO: 1340456 - RNA, 19 nt, Artificial Sequence
  Description of Artificial Sequence: Synthetic oligonucleotide
ggguuaaaagcgcauccau

SEQ ID NO: 1340457 - RNA, 19 nt, Artificial Sequence
  Description of Artificial Sequence: Synthetic oligonucleotide
aucaauggauucggcugua

SEQ ID NO: 1340458 - RNA, 19 nt, Artificial Sequence
  Description of Artificial Sequence: Synthetic oligonucleotide
cuaucuuguaaggccauuu

SEQ ID NO: 1340459 - RNA, 19 nt, Artificial Sequence
  Description of Artificial Sequence: Synthetic oligonucleotide
cugugucuaagccaaucuu

SEQ ID NO: 1340460 - RNA, 19 nt, Artificial Sequence
  Description of Artificial Sequence: Synthetic oligonucleotide
cagcaacuucuuacgauau

SEQ ID NO: 1340461 - RNA, 19 nt, Artificial Sequence
  Description of Artificial Sequence: Synthetic oligonucleotide
ggcggcaggcauaacaggu

SEQ ID NO: 1340462 - RNA, 19 nt, Artificial Sequence
  Description of Artificial Sequence: Synthetic oligonucleotide
augguaucucggacugcau

SEQ ID NO: 1340463 - RNA, 19 nt, Artificial Sequence
  Description of Artificial Sequence: Synthetic oligonucleotide
cccuguuugauugcuguaa

SEQ ID NO: 1340464 - RNA, 19 nt, Artificial Sequence
  Description of Artificial Sequence: Synthetic oligonucleotide
cugcaugcagagcuucaau

SEQ ID NO: 1340465 - RNA, 19 nt, Artificial Sequence
  Description of Artificial Sequence: Synthetic oligonucleotide
cuacuacaucaccaaccuu

SEQ ID NO: 1340466 - RNA, 19 nt, Artificial Sequence
  Description of Artificial Sequence: Synthetic oligonucleotide
gcgcauccauuucauaauu

SEQ ID NO: 1340467 - RNA, 19 nt, Artificial Sequence
  Description of Artificial Sequence: Synthetic oligonucleotide
cccuauacaugagagugau

SEQ ID NO: 1340468 - RNA, 19 nt, Artificial Sequence
  Description of Artificial Sequence: Synthetic oligonucleotide
caggcauaacagguggauu

SEQ ID NO: 1340469 - RNA, 19 nt, Artificial Sequence
  Description of Artificial Sequence: Synthetic oligonucleotide
ggagaaucucagguuguuu

SEQ ID NO: 1340470 - RNA, 19 nt, Artificial Sequence
  Description of Artificial Sequence: Synthetic oligonucleotide
cagauuccuggcaguucuu

SEQ ID NO: 1340471 - RNA, 19 nt, Artificial Sequence
  Description of Artificial Sequence: Synthetic oligonucleotide
ggacugcauaaugugucuu

SEQ ID NO: 1340472 - RNA, 19 nt, Artificial Sequence
  Description of Artificial Sequence: Synthetic oligonucleotide
cggacugcauaaugugucu

SEQ ID NO: 1340473 - RNA, 19 nt, Artificial Sequence
  Description of Artificial Sequence: Synthetic oligonucleotide
ggacaacaauaugggcagu

SEQ ID NO: 1340474 - RNA, 19 nt, Artificial Sequence
  Description of Artificial Sequence: Synthetic oligonucleotide
cacuaguaacugggcuggu

SEQ ID NO: 1340475 - RNA, 19 nt, Artificial Sequence
  Description of Artificial Sequence: Synthetic oligonucleotide
cucacucguuuugcauuuu

SEQ ID NO: 1340476 - RNA, 19 nt, Artificial Sequence
  Description of Artificial Sequence: Synthetic oligonucleotide
ccuauacaugagagugauu

SEQ ID NO: 1340477 - RNA, 19 nt, Artificial Sequence
  Description of Artificial Sequence: Synthetic oligonucleotide
cagguggauuuggcuguuu

SEQ ID NO: 1340478 - RNA, 19 nt, Artificial Sequence
  Description of Artificial Sequence: Synthetic oligonucleotide
aaagaaauuacacugaaca

SEQ ID NO: 1340479 - RNA, 19 nt, Artificial Sequence
  Description of Artificial Sequence: Synthetic oligonucleotide
aagaauugucuuuugaugc

SEQ ID NO: 1340480 - RNA, 19 nt, Artificial Sequence
  Description of Artificial Sequence: Synthetic oligonucleotide
agcauuacuaagcauaucc

SEQ ID NO: 1340481 - RNA, 19 nt, Artificial Sequence
  Description of Artificial Sequence: Synthetic oligonucleotide
aauuacacugaacaucagc

SEQ ID NO: 1340482 - RNA, 19 nt, Artificial Sequence
  Description of Artificial Sequence: Synthetic oligonucleotide
aauuauaaguauucuggac

SEQ ID NO: 1340483 - RNA, 19 nt, Artificial Sequence
  Description of Artificial Sequence: Synthetic oligonucleotide
uaaucuuucuuuaggaucg

SEQ ID NO: 1340484 - RNA, 19 nt, Artificial Sequence
  Description of Artificial Sequence: Synthetic oligonucleotide
aaaguuaucaaccuccaga

SEQ ID NO: 1340485 - RNA, 19 nt, Artificial Sequence
  Description of Artificial Sequence: Synthetic oligonucleotide
uuaaagaaaaucuaccgca

SEQ ID NO: 1340486 - RNA, 19 nt, Artificial Sequence
  Description of Artificial Sequence: Synthetic oligonucleotide
aaagguaaacucgaguugc

SEQ ID NO: 1340487 - RNA, 19 nt, Artificial Sequence
  Description of Artificial Sequence: Synthetic oligonucleotide
aauuguaagcaacagguga

SEQ ID NO: 1340488 - RNA, 19 nt, Artificial Sequence
  Description of Artificial Sequence: Synthetic oligonucleotide
aauguguuaacaucaaaga

SEQ ID NO: 1340489 - RNA, 19 nt, Artificial Sequence
  Description of Artificial Sequence: Synthetic oligonucleotide
aauggguuuaaauugauua

SEQ ID NO: 1340490 - RNA, 19 nt, Artificial Sequence
  Description of Artificial Sequence: Synthetic oligonucleotide
cuuccuagaaauaauauac

SEQ ID NO: 1340491 - RNA, 19 nt, Artificial Sequence
  Description of Artificial Sequence: Synthetic oligonucleotide
uaauauuugauacuacaug

SEQ ID NO: 1340492 - RNA, 19 nt, Artificial Sequence
  Description of Artificial Sequence: Synthetic oligonucleotide
ugugcagccuuuaugaggg

SEQ ID NO: 1340493 - RNA, 19 nt, Artificial Sequence
  Description of Artificial Sequence: Synthetic oligonucleotide
auuauaaguauucuggaca

SEQ ID NO: 1340494 - RNA, 19 nt, Artificial Sequence
  Description of Artificial Sequence: Synthetic oligonucleotide
uuagcauguguuaagaugu

SEQ ID NO: 1340495 - RNA, 19 nt, Artificial Sequence
  Description of Artificial Sequence: Synthetic oligonucleotide
aaaauuaagauagcaaaca

SEQ ID NO: 1340496 - RNA, 19 nt, Artificial Sequence
  Description of Artificial Sequence: Synthetic oligonucleotide
aauugauuaacacuauuaa

SEQ ID NO: 1340497 - RNA, 19 nt, Artificial Sequence
  Description of Artificial Sequence: Synthetic oligonucleotide
aagaauacaaccaaaauua

SEQ ID NO: 1340498 - RNA, 19 nt, Artificial Sequence
  Description of Artificial Sequence: Synthetic oligonucleotide
uuugaugcgaaguucauga

SEQ ID NO: 1340499 - RNA, 19 nt, Artificial Sequence
  Description of Artificial Sequence: Synthetic oligonucleotide
uauuaaaucacaucuaaua

SEQ ID NO: 1340500 - RNA, 19 nt, Artificial Sequence
  Description of Artificial Sequence: Synthetic oligonucleotide
uuuauucccaaucauacuc

SEQ ID NO: 1340501 - RNA, 19 nt, Artificial Sequence
  Description of Artificial Sequence: Synthetic oligonucleotide
auucaauacagcuauacga

SEQ ID NO: 1340502 - RNA, 19 nt, Artificial Sequence
  Description of Artificial Sequence: Synthetic oligonucleotide
ucuaauauuugauacuaca

SEQ ID NO: 1340503 - RNA, 19 nt, Artificial Sequence
  Description of Artificial Sequence: Synthetic oligonucleotide
ugagauuucagguuaguug

SEQ ID NO: 1340504 - RNA, 19 nt, Artificial Sequence
  Description of Artificial Sequence: Synthetic oligonucleotide
uuuagcauguguuaagaug

SEQ ID NO: 1340505 - RNA, 19 nt, Artificial Sequence
  Description of Artificial Sequence: Synthetic oligonucleotide
uucgaaugugcacugaaag

SEQ ID NO: 1340506 - RNA, 19 nt, Artificial Sequence
  Description of Artificial Sequence: Synthetic oligonucleotide
aacgagauuacagagcaag

SEQ ID NO: 1340507 - RNA, 19 nt, Artificial Sequence
  Description of Artificial Sequence: Synthetic oligonucleotide
gauucaauacagcuauacg

SEQ ID NO: 1340508 - RNA, 19 nt, Artificial Sequence
  Description of Artificial Sequence: Synthetic oligonucleotide
cuauacgauacaauuauac

SEQ ID NO: 1340509 - RNA, 19 nt, Artificial Sequence
  Description of Artificial Sequence: Synthetic oligonucleotide
uuuaggaucgcuauuuuau

SEQ ID NO: 1340510 - RNA, 19 nt, Artificial Sequence
  Description of Artificial Sequence: Synthetic oligonucleotide
aaaauaaggcugugcuuac

SEQ ID NO: 1340511 - RNA, 19 nt, Artificial Sequence
  Description of Artificial Sequence: Synthetic oligonucleotide
gaaguaugcauguaacugc

SEQ ID NO: 1340512 - RNA, 19 nt, Artificial Sequence
  Description of Artificial Sequence: Synthetic oligonucleotide
uagcuuugagcucucaacg

SEQ ID NO: 1340513 - RNA, 19 nt, Artificial Sequence
  Description of Artificial Sequence: Synthetic oligonucleotide
auuugauacuacaugauuc

SEQ ID NO: 1340514 - RNA, 19 nt, Artificial Sequence
  Description of Artificial Sequence: Synthetic oligonucleotide
uugaaacgagauuacagag

SEQ ID NO: 1340515 - RNA, 19 nt, Artificial Sequence
  Description of Artificial Sequence: Synthetic oligonucleotide
uauacgauacaauuauaca

SEQ ID NO: 1340516 - RNA, 19 nt, Artificial Sequence
  Description of Artificial Sequence: Synthetic oligonucleotide
aagauagagcaucuuagca

SEQ ID NO: 1340517 - RNA, 19 nt, Artificial Sequence
  Description of Artificial Sequence: Synthetic oligonucleotide
gaaacgagauuacagagca

SEQ ID NO: 1340518 - RNA, 19 nt, Artificial Sequence
  Description of Artificial Sequence: Synthetic oligonucleotide
auacgauacaauuauacaa

SEQ ID NO: 1340519 - RNA, 19 nt, Artificial Sequence
  Description of Artificial Sequence: Synthetic oligonucleotide
gauuaacacuauuaaauca

SEQ ID NO: 1340520 - RNA, 19 nt, Artificial Sequence
  Description of Artificial Sequence: Synthetic oligonucleotide
uacgauacaauuauacaaa

SEQ ID NO: 1340521 - RNA, 19 nt, Artificial Sequence
  Description of Artificial Sequence: Synthetic oligonucleotide
aaaucuaccgcaagcaaag

SEQ ID NO: 1340522 - RNA, 19 nt, Artificial Sequence
  Description of Artificial Sequence: Synthetic oligonucleotide
uacauucuacaacugagca

SEQ ID NO: 1340523 - RNA, 19 nt, Artificial Sequence
  Description of Artificial Sequence: Synthetic oligonucleotide
gaaauuacacugaacauca

SEQ ID NO: 1340524 - RNA, 19 nt, Artificial Sequence
  Description of Artificial Sequence: Synthetic oligonucleotide
ucaacgaacgcuuugccac

SEQ ID NO: 1340525 - RNA, 19 nt, Artificial Sequence
  Description of Artificial Sequence: Synthetic oligonucleotide
aaguuaucaaccuccagaa

SEQ ID NO: 1340526 - RNA, 19 nt, Artificial Sequence
  Description of Artificial Sequence: Synthetic oligonucleotide
uaaagguaaacucgaguug

SEQ ID NO: 1340527 - RNA, 19 nt, Artificial Sequence
  Description of Artificial Sequence: Synthetic oligonucleotide
uucaauacagcuauacgau

SEQ ID NO: 1340528 - RNA, 19 nt, Artificial Sequence
  Description of Artificial Sequence: Synthetic oligonucleotide
ugucguuuuagcuuugagc

SEQ ID NO: 1340529 - RNA, 19 nt, Artificial Sequence
  Description of Artificial Sequence: Synthetic oligonucleotide
cauuacuaagcauaucccc

SEQ ID NO: 1340530 - RNA, 19 nt, Artificial Sequence
  Description of Artificial Sequence: Synthetic oligonucleotide
ugaaacgagauuacagagc

SEQ ID NO: 1340531 - RNA, 19 nt, Artificial Sequence
  Description of Artificial Sequence: Synthetic oligonucleotide
ucuguaacugaacaggcaa

SEQ ID NO: 1340532 - RNA, 19 nt, Artificial Sequence
  Description of Artificial Sequence: Synthetic oligonucleotide
agaauugucuuuugaugcg

SEQ ID NO: 1340533 - RNA, 19 nt, Artificial Sequence
  Description of Artificial Sequence: Synthetic oligonucleotide
uugccugucauauauucag

SEQ ID NO: 1340534 - RNA, 19 nt, Artificial Sequence
  Description of Artificial Sequence: Synthetic oligonucleotide
aaaggagaggcauauuuau

SEQ ID NO: 1340535 - RNA, 19 nt, Artificial Sequence
  Description of Artificial Sequence: Synthetic oligonucleotide
agauuacagagcaagauag

SEQ ID NO: 1340536 - RNA, 19 nt, Artificial Sequence
  Description of Artificial Sequence: Synthetic oligonucleotide
ugagcuucauauuuauaag

SEQ ID NO: 1340537 - RNA, 19 nt, Artificial Sequence
  Description of Artificial Sequence: Synthetic oligonucleotide
caagcuauuguucuuggag

SEQ ID NO: 1340538 - RNA, 19 nt, Artificial Sequence
  Description of Artificial Sequence: Synthetic oligonucleotide
uuaagauagcaaacaaaac

SEQ ID NO: 1340539 - RNA, 19 nt, Artificial Sequence
  Description of Artificial Sequence: Synthetic oligonucleotide
uuaacacuauuaaaucaca

SEQ ID NO: 1340540 - RNA, 19 nt, Artificial Sequence
  Description of Artificial Sequence: Synthetic oligonucleotide
uuauaaguauucuggacaa

SEQ ID NO: 1340541 - RNA, 19 nt, Artificial Sequence
  Description of Artificial Sequence: Synthetic oligonucleotide
uuucuguaacugaacaggc

SEQ ID NO: 1340542 - RNA, 19 nt, Artificial Sequence
  Description of Artificial Sequence: Synthetic oligonucleotide
uuauucccaaucauacucc

SEQ ID NO: 1340543 - RNA, 19 nt, Artificial Sequence
  Description of Artificial Sequence: Synthetic oligonucleotide
aggcucaagaauuauaagu

SEQ ID NO: 1340544 - RNA, 19 nt, Artificial Sequence
  Description of Artificial Sequence: Synthetic oligonucleotide
uuauaagaaugugaaaaga

SEQ ID NO: 1340545 - RNA, 19 nt, Artificial Sequence
  Description of Artificial Sequence: Synthetic oligonucleotide
guacaauaugcacacuugg

SEQ ID NO: 1340546 - RNA, 19 nt, Artificial Sequence
  Description of Artificial Sequence: Synthetic oligonucleotide
acaacugagcaccacuuuc

SEQ ID NO: 1340547 - RNA, 19 nt, Artificial Sequence
  Description of Artificial Sequence: Synthetic oligonucleotide
auaaucaggaggugaguuc

SEQ ID NO: 1340548 - RNA, 19 nt, Artificial Sequence
  Description of Artificial Sequence: Synthetic oligonucleotide
aauacagcuauacgauaca

SEQ ID NO: 1340549 - RNA, 19 nt, Artificial Sequence
  Description of Artificial Sequence: Synthetic oligonucleotide
aaauugauuaacacuauua

SEQ ID NO: 1340550 - RNA, 19 nt, Artificial Sequence
  Description of Artificial Sequence: Synthetic oligonucleotide
uuacuacuuuaucaaaaca

SEQ ID NO: 1340551 - RNA, 19 nt, Artificial Sequence
  Description of Artificial Sequence: Synthetic oligonucleotide
caauacagcuauacgauac

SEQ ID NO: 1340552 - RNA, 19 nt, Artificial Sequence
  Description of Artificial Sequence: Synthetic oligonucleotide
ucugccauaaucuuucuuu

SEQ ID NO: 1340553 - RNA, 19 nt, Artificial Sequence
  Description of Artificial Sequence: Synthetic oligonucleotide
ucuaccgcaagcaaaguua

SEQ ID NO: 1340554 - RNA, 19 nt, Artificial Sequence
  Description of Artificial Sequence: Synthetic oligonucleotide
aaaagugacuaaaaugggu

SEQ ID NO: 1340555 - RNA, 19 nt, Artificial Sequence
  Description of Artificial Sequence: Synthetic oligonucleotide
uguacaggaaaauacuuuu

SEQ ID NO: 1340556 - RNA, 19 nt, Artificial Sequence
  Description of Artificial Sequence: Synthetic oligonucleotide
ucccugaacaucuuugugc

SEQ ID NO: 1340557 - RNA, 19 nt, Artificial Sequence
  Description of Artificial Sequence: Synthetic oligonucleotide
agcuauacgauacaauuau

SEQ ID NO: 1340558 - RNA, 19 nt, Artificial Sequence
  Description of Artificial Sequence: Synthetic oligonucleotide
ucuacaacugagcaccacu

SEQ ID NO: 1340559 - RNA, 19 nt, Artificial Sequence
  Description of Artificial Sequence: Synthetic oligonucleotide
agaguuaucccugaacauc

SEQ ID NO: 1340560 - RNA, 19 nt, Artificial Sequence
  Description of Artificial Sequence: Synthetic oligonucleotide
ugaugcgaaguucaugagc

SEQ ID NO: 1340561 - RNA, 19 nt, Artificial Sequence
  Description of Artificial Sequence: Synthetic oligonucleotide
uuacaugggauguacacau

SEQ ID NO: 1340562 - RNA, 19 nt, Artificial Sequence
  Description of Artificial Sequence: Synthetic oligonucleotide
cuuacagaucucuuucugc

SEQ ID NO: 1340563 - RNA, 19 nt, Artificial Sequence
  Description of Artificial Sequence: Synthetic oligonucleotide
ugacugagcaaacuucuug

SEQ ID NO: 1340564 - RNA, 19 nt, Artificial Sequence
  Description of Artificial Sequence: Synthetic oligonucleotide
ugggauguacacaucaggu

SEQ ID NO: 1340565 - RNA, 19 nt, Artificial Sequence
  Description of Artificial Sequence: Synthetic oligonucleotide
aauuaagauagcaaacaaa

SEQ ID NO: 1340566 - RNA, 19 nt, Artificial Sequence
  Description of Artificial Sequence: Synthetic oligonucleotide
ugaacaucagcaucuggca

SEQ ID NO: 1340567 - RNA, 19 nt, Artificial Sequence
  Description of Artificial Sequence: Synthetic oligonucleotide
augggauguacacaucagg

SEQ ID NO: 1340568 - RNA, 19 nt, Artificial Sequence
  Description of Artificial Sequence: Synthetic oligonucleotide
acaauaugcacacuuggaa

SEQ ID NO: 1340569 - RNA, 19 nt, Artificial Sequence
  Description of Artificial Sequence: Synthetic oligonucleotide
caagauagagcaucuuagc

SEQ ID NO: 1340570 - RNA, 19 nt, Artificial Sequence
  Description of Artificial Sequence: Synthetic oligonucleotide
gaaaauaaggcugugcuua

SEQ ID NO: 1340571 - RNA, 19 nt, Artificial Sequence
  Description of Artificial Sequence: Synthetic oligonucleotide
auaaguauucuggacaaca

SEQ ID NO: 1340572 - RNA, 19 nt, Artificial Sequence
  Description of Artificial Sequence: Synthetic oligonucleotide
agaauaaucaggaggugag

SEQ ID NO: 1340573 - RNA, 19 nt, Artificial Sequence
  Description of Artificial Sequence: Synthetic oligonucleotide
aaagugacuaaaauggguu

SEQ ID NO: 1340574 - RNA, 19 nt, Artificial Sequence
  Description of Artificial Sequence: Synthetic oligonucleotide
cucgaguugcuuuauuuag

SEQ ID NO: 1340575 - RNA, 19 nt, Artificial Sequence
  Description of Artificial Sequence: Synthetic oligonucleotide
gucgaaggggcacacauag

SEQ ID NO: 1340576 - RNA, 19 nt, Artificial Sequence
  Description of Artificial Sequence: Synthetic oligonucleotide
gucguuuuagcuuugagcu

SEQ ID NO: 1340577 - RNA, 19 nt, Artificial Sequence
  Description of Artificial Sequence: Synthetic oligonucleotide
ugauucaauacagcuauac

SEQ ID NO: 1340578 - RNA, 19 nt, Artificial Sequence
  Description of Artificial Sequence: Synthetic oligonucleotide
guuacagccgucgaagggg

SEQ ID NO: 1340579 - RNA, 19 nt, Artificial Sequence
  Description of Artificial Sequence: Synthetic oligonucleotide
uaggaucgcuauuuuauug

SEQ ID NO: 1340580 - RNA, 19 nt, Artificial Sequence
  Description of Artificial Sequence: Synthetic oligonucleotide
uuaaauugauuaacacuau

SEQ ID NO: 1340581 - RNA, 19 nt, Artificial Sequence
  Description of Artificial Sequence: Synthetic oligonucleotide
auuguaagcaacaggugag

SEQ ID NO: 1340582 - RNA, 19 nt, Artificial Sequence
  Description of Artificial Sequence: Synthetic oligonucleotide
aauaaucaggaggugaguu

SEQ ID NO: 1340583 - RNA, 19 nt, Artificial Sequence
  Description of Artificial Sequence: Synthetic oligonucleotide
ugauacuacaugauucaau

SEQ ID NO: 1340584 - RNA, 19 nt, Artificial Sequence
  Description of Artificial Sequence: Synthetic oligonucleotide
auguguuaacaucaaagaa

SEQ ID NO: 1340585 - RNA, 19 nt, Artificial Sequence
  Description of Artificial Sequence: Synthetic oligonucleotide
ugucccuuagguguguagg

SEQ ID NO: 1340586 - RNA, 19 nt, Artificial Sequence
  Description of Artificial Sequence: Synthetic oligonucleotide
uaugagggcaagcuauugu

SEQ ID NO: 1340587 - RNA, 19 nt, Artificial Sequence
  Description of Artificial Sequence: Synthetic oligonucleotide
ucgaguugcuuuauuuagc

SEQ ID NO: 1340588 - RNA, 19 nt, Artificial Sequence
  Description of Artificial Sequence: Synthetic oligonucleotide
gagaggcauauuuauuccc

SEQ ID NO: 1340589 - RNA, 19 nt, Artificial Sequence
  Description of Artificial Sequence: Synthetic oligonucleotide
gaugugagauuucagguua

SEQ ID NO: 1340590 - RNA, 19 nt, Artificial Sequence
  Description of Artificial Sequence: Synthetic oligonucleotide
auuuauucccaaucauacu

SEQ ID NO: 1340591 - RNA, 19 nt, Artificial Sequence
  Description of Artificial Sequence: Synthetic oligonucleotide
aacucgaguugcuuuauuu

SEQ ID NO: 1340592 - RNA, 19 nt, Artificial Sequence
  Description of Artificial Sequence: Synthetic oligonucleotide
gaacaucagcaucuggcag

SEQ ID NO: 1340593 - RNA, 19 nt, Artificial Sequence
  Description of Artificial Sequence: Synthetic oligonucleotide
aaauuguaagcaacaggug

SEQ ID NO: 1340594 - RNA, 19 nt, Artificial Sequence
  Description of Artificial Sequence: Synthetic oligonucleotide
uaaucaggaggugaguucu

SEQ ID NO: 1340595 - RNA, 19 nt, Artificial Sequence
  Description of Artificial Sequence: Synthetic oligonucleotide
ucacaucuaauauuugaua

SEQ ID NO: 1340596 - RNA, 19 nt, Artificial Sequence
  Description of Artificial Sequence: Synthetic oligonucleotide
cuacaugauucaauacagc

SEQ ID NO: 1340597 - RNA, 19 nt, Artificial Sequence
  Description of Artificial Sequence: Synthetic oligonucleotide
aucagguguuaaaagguac

SEQ ID NO: 1340598 - RNA, 19 nt, Artificial Sequence
  Description of Artificial Sequence: Synthetic oligonucleotide
cuucuuguuacagccgucg

SEQ ID NO: 1340599 - RNA, 19 nt, Artificial Sequence
  Description of Artificial Sequence: Synthetic oligonucleotide
ugucuuuugaugcgaaguu

SEQ ID NO: 1340600 - RNA, 19 nt, Artificial Sequence
  Description of Artificial Sequence: Synthetic oligonucleotide
accgcaagcaaaguuauca

SEQ ID NO: 1340601 - RNA, 19 nt, Artificial Sequence
  Description of Artificial Sequence: Synthetic oligonucleotide
agcuauuguucuuggagca

SEQ ID NO: 1340602 - RNA, 19 nt, Artificial Sequence
  Description of Artificial Sequence: Synthetic oligonucleotide
aagugacuaaaauggguuu

SEQ ID NO: 1340603 - RNA, 19 nt, Artificial Sequence
  Description of Artificial Sequence: Synthetic oligonucleotide
uccagugaaaagcgcuucc

SEQ ID NO: 1340604 - RNA, 19 nt, Artificial Sequence
  Description of Artificial Sequence: Synthetic oligonucleotide
gaggcucaagaauuauaag

SEQ ID NO: 1340605 - RNA, 19 nt, Artificial Sequence
  Description of Artificial Sequence: Synthetic oligonucleotide
auugucuuuugaugcgaag

SEQ ID NO: 1340606 - RNA, 19 nt, Artificial Sequence
  Description of Artificial Sequence: Synthetic oligonucleotide
gagauuacagagcaagaua

SEQ ID NO: 1340607 - RNA, 19 nt, Artificial Sequence
  Description of Artificial Sequence: Synthetic oligonucleotide
uuuugaugcgaaguucaug

SEQ ID NO: 1340608 - RNA, 19 nt, Artificial Sequence
  Description of Artificial Sequence: Synthetic oligonucleotide
gcaagcaaaguuaucaacc

SEQ ID NO: 1340609 - RNA, 19 nt, Artificial Sequence
  Description of Artificial Sequence: Synthetic oligonucleotide
cuuugagcucucaacgaac

SEQ ID NO: 1340610 - RNA, 19 nt, Artificial Sequence
  Description of Artificial Sequence: Synthetic oligonucleotide
auguguuaagaugugagau

SEQ ID NO: 1340611 - RNA, 19 nt, Artificial Sequence
  Description of Artificial Sequence: Synthetic oligonucleotide
uaugaaccagcuggugucg

SEQ ID NO: 1340612 - RNA, 19 nt, Artificial Sequence
  Description of Artificial Sequence: Synthetic oligonucleotide
agcaagauagagcaucuua

SEQ ID NO: 1340613 - RNA, 19 nt, Artificial Sequence
  Description of Artificial Sequence: Synthetic oligonucleotide
agacguggacucuggggcc

SEQ ID NO: 1340614 - RNA, 19 nt, Artificial Sequence
  Description of Artificial Sequence: Synthetic oligonucleotide
ugagcucucaacgaacgcu

SEQ ID NO: 1340615 - RNA, 19 nt, Artificial Sequence
  Description of Artificial Sequence: Synthetic oligonucleotide
gauagagcaucuuagcaau

SEQ ID NO: 1340616 - RNA, 19 nt, Artificial Sequence
  Description of Artificial Sequence: Synthetic oligonucleotide
ucucaacgaacgcuuugcc

SEQ ID NO: 1340617 - RNA, 19 nt, Artificial Sequence
  Description of Artificial Sequence: Synthetic oligonucleotide
uuuagcacuguuguauaaa

SEQ ID NO: 1340618 - RNA, 19 nt, Artificial Sequence
  Description of Artificial Sequence: Synthetic oligonucleotide
cugucucccguauggaugc

SEQ ID NO: 1340619 - RNA, 19 nt, Artificial Sequence
  Description of Artificial Sequence: Synthetic oligonucleotide
gaaaaucuaccgcaagcaa

SEQ ID NO: 1340620 - RNA, 19 nt, Artificial Sequence
  Description of Artificial Sequence: Synthetic oligonucleotide
ugcgugcgcagauugaagu

SEQ ID NO: 1340621 - RNA, 19 nt, Artificial Sequence
  Description of Artificial Sequence: Synthetic oligonucleotide
ugcuuagggucugagaggu

SEQ ID NO: 1340622 - RNA, 19 nt, Artificial Sequence
  Description of Artificial Sequence: Synthetic oligonucleotide
aucuaauauuugauacuac

SEQ ID NO: 1340623 - RNA, 19 nt, Artificial Sequence
  Description of Artificial Sequence: Synthetic oligonucleotide
acgauacaauuauacaaaa

SEQ ID NO: 1340624 - RNA, 19 nt, Artificial Sequence
  Description of Artificial Sequence: Synthetic oligonucleotide
ucccguauggaugcgcacg

SEQ ID NO: 1340625 - RNA, 19 nt, Artificial Sequence
  Description of Artificial Sequence: Synthetic oligonucleotide
uauuguugcccuuucuguu

SEQ ID NO: 1340626 - RNA, 19 nt, Artificial Sequence
  Description of Artificial Sequence: Synthetic oligonucleotide
uccaauuucugggaggcuc

SEQ ID NO: 1340627 - RNA, 19 nt, Artificial Sequence
  Description of Artificial Sequence: Synthetic oligonucleotide
agaugugagauuucagguu

SEQ ID NO: 1340628 - RNA, 19 nt, Artificial Sequence
  Description of Artificial Sequence: Synthetic oligonucleotide
uuacagccgucgaaggggc

SEQ ID NO: 1340629 - RNA, 19 nt, Artificial Sequence
  Description of Artificial Sequence: Synthetic oligonucleotide
accaaaauuaagauagcaa

SEQ ID NO: 1340630 - RNA, 19 nt, Artificial Sequence
  Description of Artificial Sequence: Synthetic oligonucleotide
ucuagcaaauucugccagu

SEQ ID NO: 1340631 - RNA, 19 nt, Artificial Sequence
  Description of Artificial Sequence: Synthetic oligonucleotide
uuacacugaacaucagcau

SEQ ID NO: 1340632 - RNA, 19 nt, Artificial Sequence
  Description of Artificial Sequence: Synthetic oligonucleotide
gcaagauagagcaucuuag

SEQ ID NO: 1340633 - RNA, 19 nt, Artificial Sequence
  Description of Artificial Sequence: Synthetic oligonucleotide
guauggaugcgcacgugcg

SEQ ID NO: 1340634 - RNA, 19 nt, Artificial Sequence
  Description of Artificial Sequence: Synthetic oligonucleotide
guauucuggacaacagaag

SEQ ID NO: 1340635 - RNA, 19 nt, Artificial Sequence
  Description of Artificial Sequence: Synthetic oligonucleotide
uugaugcgaaguucaugag

SEQ ID NO: 1340636 - RNA, 19 nt, Artificial Sequence
  Description of Artificial Sequence: Synthetic oligonucleotide
uguaagcaacaggugagcu

SEQ ID NO: 1340637 - RNA, 19 nt, Artificial Sequence
  Description of Artificial Sequence: Synthetic oligonucleotide
gcagaguuaucccugaaca

SEQ ID NO: 1340638 - RNA, 19 nt, Artificial Sequence
  Description of Artificial Sequence: Synthetic oligonucleotide
cauguguuaagaugugaga

SEQ ID NO: 1340639 - RNA, 19 nt, Artificial Sequence
  Description of Artificial Sequence: Synthetic oligonucleotide
uugagcucucaacgaacgc

SEQ ID NO: 1340640 - RNA, 19 nt, Artificial Sequence
  Description of Artificial Sequence: Synthetic oligonucleotide
agcaccacuuucuguaacu

SEQ ID NO: 1340641 - RNA, 19 nt, Artificial Sequence
  Description of Artificial Sequence: Synthetic oligonucleotide
ugagggcaagcuauuguuc

SEQ ID NO: 1340642 - RNA, 19 nt, Artificial Sequence
  Description of Artificial Sequence: Synthetic oligonucleotide
cucucaacgaacgcuuugc

SEQ ID NO: 1340643 - RNA, 19 nt, Artificial Sequence
  Description of Artificial Sequence: Synthetic oligonucleotide
uauggaugcgcacgugcgu

SEQ ID NO: 1340644 - RNA, 19 nt, Artificial Sequence
  Description of Artificial Sequence: Synthetic oligonucleotide
aacgaacgcuuugccacac

SEQ ID NO: 1340645 - RNA, 19 nt, Artificial Sequence
  Description of Artificial Sequence: Synthetic oligonucleotide
uuaggaucgcuauuuuauu

SEQ ID NO: 1340646 - RNA, 19 nt, Artificial Sequence
  Description of Artificial Sequence: Synthetic oligonucleotide
ggagaggcauauuuauucc

SEQ ID NO: 1340647 - RNA, 19 nt, Artificial Sequence
  Description of Artificial Sequence: Synthetic oligonucleotide
gggaccauacuuuacaaaa

SEQ ID NO: 1340648 - RNA, 19 nt, Artificial Sequence
  Description of Artificial Sequence: Synthetic oligonucleotide
augagggcaagcuauuguu

SEQ ID NO: 1340649 - RNA, 19 nt, Artificial Sequence
  Description of Artificial Sequence: Synthetic oligonucleotide
uguuaagaugugagauuuc

SEQ ID NO: 1340650 - RNA, 19 nt, Artificial Sequence
  Description of Artificial Sequence: Synthetic oligonucleotide
uuaugagggcaagcuauug

SEQ ID NO: 1340651 - RNA, 19 nt, Artificial Sequence
  Description of Artificial Sequence: Synthetic oligonucleotide
caaaguuaucaaccuccag

SEQ ID NO: 1340652 - RNA, 19 nt, Artificial Sequence
  Description of Artificial Sequence: Synthetic oligonucleotide
auuguugcccuuucuguua

SEQ ID NO: 1340653 - RNA, 19 nt, Artificial Sequence
  Description of Artificial Sequence: Synthetic oligonucleotide
uguugggaccauacuuuac

SEQ ID NO: 1340654 - RNA, 19 nt, Artificial Sequence
  Description of Artificial Sequence: Synthetic oligonucleotide
uuguugcccuuucuguuac

SEQ ID NO: 1340655 - RNA, 19 nt, Artificial Sequence
  Description of Artificial Sequence: Synthetic oligonucleotide
cagauugaaguccagugaa

SEQ ID NO: 1340656 - RNA, 19 nt, Artificial Sequence
  Description of Artificial Sequence: Synthetic oligonucleotide
uuucugggaggcucaagaa

SEQ ID NO: 1340657 - RNA, 19 nt, Artificial Sequence
  Description of Artificial Sequence: Synthetic oligonucleotide
aggugaguucucuccaaug

SEQ ID NO: 1340658 - RNA, 19 nt, Artificial Sequence
  Description of Artificial Sequence: Synthetic oligonucleotide
caauuauacaaaauguguu

SEQ ID NO: 1340659 - RNA, 19 nt, Artificial Sequence
  Description of Artificial Sequence: Synthetic oligonucleotide
uagcauguguuaagaugug

SEQ ID NO: 1340660 - RNA, 19 nt, Artificial Sequence
  Description of Artificial Sequence: Synthetic oligonucleotide
uucccacagccuucgaaug

SEQ ID NO: 1340661 - RNA, 19 nt, Artificial Sequence
  Description of Artificial Sequence: Synthetic oligonucleotide
agaggcauauuuauuccca

SEQ ID NO: 1340662 - RNA, 19 nt, Artificial Sequence
  Description of Artificial Sequence: Synthetic oligonucleotide
caucuaauauuugauacua

SEQ ID NO: 1340663 - RNA, 19 nt, Artificial Sequence
  Description of Artificial Sequence: Synthetic oligonucleotide
guacaggaaaauacuuuug

SEQ ID NO: 1340664 - RNA, 19 nt, Artificial Sequence
  Description of Artificial Sequence: Synthetic oligonucleotide
ccaaucauacuccugaaga

SEQ ID NO: 1340665 - RNA, 19 nt, Artificial Sequence
  Description of Artificial Sequence: Synthetic oligonucleotide
cuuagggucugagagguca

SEQ ID NO: 1340666 - RNA, 19 nt, Artificial Sequence
  Description of Artificial Sequence: Synthetic oligonucleotide
ugccugucauauauucaga

SEQ ID NO: 1340667 - RNA, 19 nt, Artificial Sequence
  Description of Artificial Sequence: Synthetic oligonucleotide
aaauuacacugaacaucag

SEQ ID NO: 1340668 - RNA, 19 nt, Artificial Sequence
  Description of Artificial Sequence: Synthetic oligonucleotide
ucgcuauuuuauuguugcc

SEQ ID NO: 1340669 - RNA, 19 nt, Artificial Sequence
  Description of Artificial Sequence: Synthetic oligonucleotide
guaaacucgaguugcuuua

SEQ ID NO: 1340670 - RNA, 19 nt, Artificial Sequence
  Description of Artificial Sequence: Synthetic oligonucleotide
aaauaaggcugugcuuaca

SEQ ID NO: 1340671 - RNA, 19 nt, Artificial Sequence
  Description of Artificial Sequence: Synthetic oligonucleotide
agcaucuuagcaaugucau

SEQ ID NO: 1340672 - RNA, 19 nt, Artificial Sequence
  Description of Artificial Sequence: Synthetic oligonucleotide
cgaaggggcacacauaggg

SEQ ID NO: 1340673 - RNA, 19 nt, Artificial Sequence
  Description of Artificial Sequence: Synthetic oligonucleotide
gguuaguugacugagcaaa

SEQ ID NO: 1340674 - RNA, 19 nt, Artificial Sequence
  Description of Artificial Sequence: Synthetic oligonucleotide
gaauugucuuuugaugcga

SEQ ID NO: 1340675 - RNA, 19 nt, Artificial Sequence
  Description of Artificial Sequence: Synthetic oligonucleotide
cugcccauucuuuuaaaga

SEQ ID NO: 1340676 - RNA, 19 nt, Artificial Sequence
  Description of Artificial Sequence: Synthetic oligonucleotide
gaaggggcacacauagggc

SEQ ID NO: 1340677 - RNA, 19 nt, Artificial Sequence
  Description of Artificial Sequence: Synthetic oligonucleotide
ucuuuaggaucgcuauuuu

SEQ ID NO: 1340678 - RNA, 19 nt, Artificial Sequence
  Description of Artificial Sequence: Synthetic oligonucleotide
gggauguacacaucaggug

SEQ ID NO: 1340679 - RNA, 19 nt, Artificial Sequence
  Description of Artificial Sequence: Synthetic oligonucleotide
uauaaguauucuggacaac

SEQ ID NO: 1340680 - RNA, 19 nt, Artificial Sequence
  Description of Artificial Sequence: Synthetic oligonucleotide
gaaguccagugaaaagcgc

SEQ ID NO: 1340681 - RNA, 19 nt, Artificial Sequence
  Description of Artificial Sequence: Synthetic oligonucleotide
agauuucagguuaguugac

SEQ ID NO: 1340682 - RNA, 19 nt, Artificial Sequence
  Description of Artificial Sequence: Synthetic oligonucleotide
gucgagaaguucuucucuc

SEQ ID NO: 1340683 - RNA, 19 nt, Artificial Sequence
  Description of Artificial Sequence: Synthetic oligonucleotide
uggucgagaaguucuucuc

SEQ ID NO: 1340684 - RNA, 19 nt, Artificial Sequence
  Description of Artificial Sequence: Synthetic oligonucleotide
aauugucuuuugaugcgaa

SEQ ID NO: 1340685 - RNA, 19 nt, Artificial Sequence
  Description of Artificial Sequence: Synthetic oligonucleotide
ggauguacacaucaggugu

SEQ ID NO: 1340686 - RNA, 19 nt, Artificial Sequence
  Description of Artificial Sequence: Synthetic oligonucleotide
acugagcaccacuuucugu

SEQ ID NO: 1340687 - RNA, 19 nt, Artificial Sequence
  Description of Artificial Sequence: Synthetic oligonucleotide
agccuuuaugagggcaagc

SEQ ID NO: 1340688 - RNA, 19 nt, Artificial Sequence
  Description of Artificial Sequence: Synthetic oligonucleotide
agugacuaaaauggguuua

SEQ ID NO: 1340689 - RNA, 19 nt, Artificial Sequence
  Description of Artificial Sequence: Synthetic oligonucleotide
uacaacugagcaccacuuu

SEQ ID NO: 1340690 - RNA, 19 nt, Artificial Sequence
  Description of Artificial Sequence: Synthetic oligonucleotide
uuagguguguaggauucau

SEQ ID NO: 1340691 - RNA, 19 nt, Artificial Sequence
  Description of Artificial Sequence: Synthetic oligonucleotide
aucuaccgcaagcaaaguu

SEQ ID NO: 1340692 - RNA, 19 nt, Artificial Sequence
  Description of Artificial Sequence: Synthetic oligonucleotide
ucguuuuagcuuugagcuc

SEQ ID NO: 1340693 - RNA, 19 nt, Artificial Sequence
  Description of Artificial Sequence: Synthetic oligonucleotide
aaucaggaggugaguucuc

SEQ ID NO: 1340694 - RNA, 19 nt, Artificial Sequence
  Description of Artificial Sequence: Synthetic oligonucleotide
ggcuuuagcauguguuaag

SEQ ID NO: 1340695 - RNA, 19 nt, Artificial Sequence
  Description of Artificial Sequence: Synthetic oligonucleotide
cuugccugucauauauuca

SEQ ID NO: 1340696 - RNA, 19 nt, Artificial Sequence
  Description of Artificial Sequence: Synthetic oligonucleotide
aggugagcuucauauuuau

SEQ ID NO: 1340697 - RNA, 19 nt, Artificial Sequence
  Description of Artificial Sequence: Synthetic oligonucleotide
gugucguuuuagcuuugag

SEQ ID NO: 1340698 - RNA, 19 nt, Artificial Sequence
  Description of Artificial Sequence: Synthetic oligonucleotide
gagggcaagcuauuguucu

SEQ ID NO: 1340699 - RNA, 19 nt, Artificial Sequence
  Description of Artificial Sequence: Synthetic oligonucleotide
cucaacgaacgcuuugcca

SEQ ID NO: 1340700 - RNA, 19 nt, Artificial Sequence
  Description of Artificial Sequence: Synthetic oligonucleotide
gaguuaucccugaacaucu

SEQ ID NO: 1340701 - RNA, 19 nt, Artificial Sequence
  Description of Artificial Sequence: Synthetic oligonucleotide
gaugcuucccguggucgag

SEQ ID NO: 1340702 - RNA, 19 nt, Artificial Sequence
  Description of Artificial Sequence: Synthetic oligonucleotide
aguuaucaaccuccagaaa

SEQ ID NO: 1340703 - RNA, 19 nt, Artificial Sequence
  Description of Artificial Sequence: Synthetic oligonucleotide
ugugagauuucagguuagu

SEQ ID NO: 1340704 - RNA, 19 nt, Artificial Sequence
  Description of Artificial Sequence: Synthetic oligonucleotide
ggcaagcuauuguucuugg

SEQ ID NO: 1340705 - RNA, 19 nt, Artificial Sequence
  Description of Artificial Sequence: Synthetic oligonucleotide
agagcaagauagagcaucu

SEQ ID NO: 1340706 - RNA, 19 nt, Artificial Sequence
  Description of Artificial Sequence: Synthetic oligonucleotide
uggcuuuagcauguguuaa

SEQ ID NO: 1340707 - RNA, 19 nt, Artificial Sequence
  Description of Artificial Sequence: Synthetic oligonucleotide
cuuagcaaugucaucuuau

SEQ ID NO: 1340708 - RNA, 19 nt, Artificial Sequence
  Description of Artificial Sequence: Synthetic oligonucleotide
cacuauuaaaucacaucua

SEQ ID NO: 1340709 - RNA, 19 nt, Artificial Sequence
  Description of Artificial Sequence: Synthetic oligonucleotide
augucccuuagguguguag

SEQ ID NO: 1340710 - RNA, 19 nt, Artificial Sequence
  Description of Artificial Sequence: Synthetic oligonucleotide
gaggcauauuuauucccaa

SEQ ID NO: 1340711 - RNA, 19 nt, Artificial Sequence
  Description of Artificial Sequence: Synthetic oligonucleotide
agaugcuucccguggucga

SEQ ID NO: 1340712 - RNA, 19 nt, Artificial Sequence
  Description of Artificial Sequence: Synthetic oligonucleotide
ugagcaccacuuucuguaa

SEQ ID NO: 1340713 - RNA, 19 nt, Artificial Sequence
  Description of Artificial Sequence: Synthetic oligonucleotide
uugacugagcaaacuucuu

SEQ ID NO: 1340714 - RNA, 19 nt, Artificial Sequence
  Description of Artificial Sequence: Synthetic oligonucleotide
gcuauuuuauuguugcccu

SEQ ID NO: 1340715 - RNA, 19 nt, Artificial Sequence
  Description of Artificial Sequence: Synthetic oligonucleotide
gacguggacucuggggccg

SEQ ID NO: 1340716 - RNA, 19 nt, Artificial Sequence
  Description of Artificial Sequence: Synthetic oligonucleotide
aaucuaccgcaagcaaagu

SEQ ID NO: 1340717 - RNA, 19 nt, Artificial Sequence
  Description of Artificial Sequence: Synthetic oligonucleotide
gcagauugaaguccaguga

SEQ ID NO: 1340718 - RNA, 19 nt, Artificial Sequence
  Description of Artificial Sequence: Synthetic oligonucleotide
ggguuuaaauugauuaaca

SEQ ID NO: 1340719 - RNA, 19 nt, Artificial Sequence
  Description of Artificial Sequence: Synthetic oligonucleotide
ugacuaaaauggguuuaaa

SEQ ID NO: 1340720 - RNA, 19 nt, Artificial Sequence
  Description of Artificial Sequence: Synthetic oligonucleotide
gucuuuugaugcgaaguuc

SEQ ID NO: 1340721 - RNA, 19 nt, Artificial Sequence
  Description of Artificial Sequence: Synthetic oligonucleotide
ugcgcagauugaaguccag

SEQ ID NO: 1340722 - RNA, 19 nt, Artificial Sequence
  Description of Artificial Sequence: Synthetic oligonucleotide
agcauguguuaagauguga

SEQ ID NO: 1340723 - RNA, 19 nt, Artificial Sequence
  Description of Artificial Sequence: Synthetic oligonucleotide
guugacugagcaaacuucu

SEQ ID NO: 1340724 - RNA, 19 nt, Artificial Sequence
  Description of Artificial Sequence: Synthetic oligonucleotide
cacgugcgugcgcagauug

SEQ ID NO: 1340725 - RNA, 19 nt, Artificial Sequence
  Description of Artificial Sequence: Synthetic oligonucleotide
ccuuagguguguaggauuc

SEQ ID NO: 1340726 - RNA, 19 nt, Artificial Sequence
  Description of Artificial Sequence: Synthetic oligonucleotide
uucugccauaaucuuucuu

SEQ ID NO: 1340727 - RNA, 19 nt, Artificial Sequence
  Description of Artificial Sequence: Synthetic oligonucleotide
uacaugggauguacacauc

SEQ ID NO: 1340728 - RNA, 19 nt, Artificial Sequence
  Description of Artificial Sequence: Synthetic oligonucleotide
cuauuaaaucacaucuaau

SEQ ID NO: 1340729 - RNA, 19 nt, Artificial Sequence
  Description of Artificial Sequence: Synthetic oligonucleotide
uaaacucgaguugcuuuau

SEQ ID NO: 1340730 - RNA, 19 nt, Artificial Sequence
  Description of Artificial Sequence: Synthetic oligonucleotide
cuucgaaugugcacugaaa

SEQ ID NO: 1340731 - RNA, 19 nt, Artificial Sequence
  Description of Artificial Sequence: Synthetic oligonucleotide
gaaguucaugagcuguccu

SEQ ID NO: 1340732 - RNA, 19 nt, Artificial Sequence
  Description of Artificial Sequence: Synthetic oligonucleotide
ucccaaucauacuccugaa

SEQ ID NO: 1340733 - RNA, 19 nt, Artificial Sequence
  Description of Artificial Sequence: Synthetic oligonucleotide
acuucuuguuacagccguc

SEQ ID NO: 1340734 - RNA, 19 nt, Artificial Sequence
  Description of Artificial Sequence: Synthetic oligonucleotide
cagcuauacgauacaauua

SEQ ID NO: 1340735 - RNA, 19 nt, Artificial Sequence
  Description of Artificial Sequence: Synthetic oligonucleotide
gauuucagguuaguugacu

SEQ ID NO: 1340736 - RNA, 19 nt, Artificial Sequence
  Description of Artificial Sequence: Synthetic oligonucleotide
agguguuaaaagguacaau

SEQ ID NO: 1340737 - RNA, 19 nt, Artificial Sequence
  Description of Artificial Sequence: Synthetic oligonucleotide
gucccuuagguguguagga

SEQ ID NO: 1340738 - RNA, 19 nt, Artificial Sequence
  Description of Artificial Sequence: Synthetic oligonucleotide
uucuacaacugagcaccac

SEQ ID NO: 1340739 - RNA, 19 nt, Artificial Sequence
  Description of Artificial Sequence: Synthetic oligonucleotide
agaucucuuucugccauaa

SEQ ID NO: 1340740 - RNA, 19 nt, Artificial Sequence
  Description of Artificial Sequence: Synthetic oligonucleotide
augugagauuucagguuag

SEQ ID NO: 1340741 - RNA, 19 nt, Artificial Sequence
  Description of Artificial Sequence: Synthetic oligonucleotide
cgcagauugaaguccagug

SEQ ID NO: 1340742 - RNA, 19 nt, Artificial Sequence
  Description of Artificial Sequence: Synthetic oligonucleotide
gugacuaaaauggguuuaa

SEQ ID NO: 1340743 - RNA, 19 nt, Artificial Sequence
  Description of Artificial Sequence: Synthetic oligonucleotide
caaucauacuccugaagau

SEQ ID NO: 1340744 - RNA, 19 nt, Artificial Sequence
  Description of Artificial Sequence: Synthetic oligonucleotide
acgagauuacagagcaaga

SEQ ID NO: 1340745 - RNA, 19 nt, Artificial Sequence
  Description of Artificial Sequence: Synthetic oligonucleotide
cuucccguggucgagaagu

SEQ ID NO: 1340746 - RNA, 19 nt, Artificial Sequence
  Description of Artificial Sequence: Synthetic oligonucleotide
agauugaaguccagugaaa

SEQ ID NO: 1340747 - RNA, 19 nt, Artificial Sequence
  Description of Artificial Sequence: Synthetic oligonucleotide
ucccuuagguguguaggau

SEQ ID NO: 1340748 - RNA, 19 nt, Artificial Sequence
  Description of Artificial Sequence: Synthetic oligonucleotide
agcgcuucccacagccuuc

SEQ ID NO: 1340749 - RNA, 19 nt, Artificial Sequence
  Description of Artificial Sequence: Synthetic oligonucleotide
gaauaaucaggaggugagu

SEQ ID NO: 1340750 - RNA, 19 nt, Artificial Sequence
  Description of Artificial Sequence: Synthetic oligonucleotide
uaccgcaagcaaaguuauc

SEQ ID NO: 1340751 - RNA, 19 nt, Artificial Sequence
  Description of Artificial Sequence: Synthetic oligonucleotide
gucaucuuauuaaaguauu

SEQ ID NO: 1340752 - RNA, 19 nt, Artificial Sequence
  Description of Artificial Sequence: Synthetic oligonucleotide
aaacgagauuacagagcaa

SEQ ID NO: 1340753 - RNA, 19 nt, Artificial Sequence
  Description of Artificial Sequence: Synthetic oligonucleotide
uguugcccuuucuguuaca

SEQ ID NO: 1340754 - RNA, 19 nt, Artificial Sequence
  Description of Artificial Sequence: Synthetic oligonucleotide
gcuuugagcucucaacgaa

SEQ ID NO: 1340755 - RNA, 19 nt, Artificial Sequence
  Description of Artificial Sequence: Synthetic oligonucleotide
cccugaacaucuuugugca

SEQ ID NO: 1340756 - RNA, 19 nt, Artificial Sequence
  Description of Artificial Sequence: Synthetic oligonucleotide
caacgaacgcuuugccaca

SEQ ID NO: 1340757 - RNA, 19 nt, Artificial Sequence
  Description of Artificial Sequence: Synthetic oligonucleotide
cagguguuaaaagguacaa

SEQ ID NO: 1340758 - RNA, 19 nt, Artificial Sequence
  Description of Artificial Sequence: Synthetic oligonucleotide
agggcaagcuauuguucuu

SEQ ID NO: 1340759 - RNA, 19 nt, Artificial Sequence
  Description of Artificial Sequence: Synthetic oligonucleotide
gccugucauauauucagaa

SEQ ID NO: 1340760 - RNA, 19 nt, Artificial Sequence
  Description of Artificial Sequence: Synthetic oligonucleotide
cuuuagcauguguuaagau

SEQ ID NO: 1340761 - RNA, 19 nt, Artificial Sequence
  Description of Artificial Sequence: Synthetic oligonucleotide
gcucucaacgaacgcuuug

SEQ ID NO: 1340762 - RNA, 19 nt, Artificial Sequence
  Description of Artificial Sequence: Synthetic oligonucleotide
gguaaacucgaguugcuuu

SEQ ID NO: 1340763 - RNA, 19 nt, Artificial Sequence
  Description of Artificial Sequence: Synthetic oligonucleotide
cgcaagcaaaguuaucaac

SEQ ID NO: 1340764 - RNA, 19 nt, Artificial Sequence
  Description of Artificial Sequence: Synthetic oligonucleotide
aguguacaauaugcacacu

SEQ ID NO: 1340765 - RNA, 19 nt, Artificial Sequence
  Description of Artificial Sequence: Synthetic oligonucleotide
ccagugaaaagcgcuuccc

SEQ ID NO: 1340766 - RNA, 19 nt, Artificial Sequence
  Description of Artificial Sequence: Synthetic oligonucleotide
gggcaagcuauuguucuug

SEQ ID NO: 1340767 - RNA, 19 nt, Artificial Sequence
  Description of Artificial Sequence: Synthetic oligonucleotide
uacagccgucgaaggggca

SEQ ID NO: 1340768 - RNA, 19 nt, Artificial Sequence
  Description of Artificial Sequence: Synthetic oligonucleotide
ugucucccguauggaugcg

SEQ ID NO: 1340769 - RNA, 19 nt, Artificial Sequence
  Description of Artificial Sequence: Synthetic oligonucleotide
cuguugggaccauacuuua

SEQ ID NO: 1340770 - RNA, 19 nt, Artificial Sequence
  Description of Artificial Sequence: Synthetic oligonucleotide
cuggugucguuuuagcuuu

SEQ ID NO: 1340771 - RNA, 19 nt, Artificial Sequence
  Description of Artificial Sequence: Synthetic oligonucleotide
gugcgugcgcagauugaag

SEQ ID NO: 1340772 - RNA, 19 nt, Artificial Sequence
  Description of Artificial Sequence: Synthetic oligonucleotide
gauguacacaucagguguu

SEQ ID NO: 1340773 - RNA, 19 nt, Artificial Sequence
  Description of Artificial Sequence: Synthetic oligonucleotide
cuacaacugagcaccacuu

SEQ ID NO: 1340774 - RNA, 19 nt, Artificial Sequence
  Description of Artificial Sequence: Synthetic oligonucleotide
cuaccgcaagcaaaguuau

SEQ ID NO: 1340775 - RNA, 19 nt, Artificial Sequence
  Description of Artificial Sequence: Synthetic oligonucleotide
auucuacaacugagcacca

SEQ ID NO: 1340776 - RNA, 19 nt, Artificial Sequence
  Description of Artificial Sequence: Synthetic oligonucleotide
ggucgagaaguucuucucu

SEQ ID NO: 1340777 - RNA, 19 nt, Artificial Sequence
  Description of Artificial Sequence: Synthetic oligonucleotide
acgaacgcuuugccacacu

SEQ ID NO: 1340778 - RNA, 19 nt, Artificial Sequence
  Description of Artificial Sequence: Synthetic oligonucleotide
uucccguggucgagaaguu

SEQ ID NO: 1340779 - RNA, 19 nt, Artificial Sequence
  Description of Artificial Sequence: Synthetic oligonucleotide
cuuagguguguaggauuca

SEQ ID NO: 1340780 - RNA, 19 nt, Artificial Sequence
  Description of Artificial Sequence: Synthetic oligonucleotide
gaggugaguucucuccaau

SEQ ID NO: 1340781 - RNA, 19 nt, Artificial Sequence
  Description of Artificial Sequence: Synthetic oligonucleotide
cuuuugaugcgaaguucau

SEQ ID NO: 1340782 - RNA, 19 nt, Artificial Sequence
  Description of Artificial Sequence: Synthetic oligonucleotide
cagccuucgaaugugcacu

SEQ ID NO: 1340783 - RNA, 19 nt, Artificial Sequence
  Description of Artificial Sequence: Synthetic oligonucleotide
cagcauuacuaagcauauc

SEQ ID NO: 1340784 - RNA, 19 nt, Artificial Sequence
  Description of Artificial Sequence: Synthetic oligonucleotide
gcaagcuauuguucuugga

SEQ ID NO: 1340785 - RNA, 19 nt, Artificial Sequence
  Description of Artificial Sequence: Synthetic oligonucleotide
cugggaggcucaagaauua

SEQ ID NO: 1340786 - RNA, 19 nt, Artificial Sequence
  Description of Artificial Sequence: Synthetic oligonucleotide
ucccguggucgagaaguuc

SEQ ID NO: 1340787 - RNA, 19 nt, Artificial Sequence
  Description of Artificial Sequence: Synthetic oligonucleotide
ggaguuucuugccugucau

SEQ ID NO: 1340788 - RNA, 19 nt, Artificial Sequence
  Description of Artificial Sequence: Synthetic oligonucleotide
ggaggugaguucucuccaa

SEQ ID NO: 1340789 - RNA, 19 nt, Artificial Sequence
  Description of Artificial Sequence: Synthetic oligonucleotide
gcgugcgcagauugaaguc

SEQ ID NO: 1340790 - RNA, 19 nt, Artificial Sequence
  Description of Artificial Sequence: Synthetic oligonucleotide
guugcccuuucuguuacau

SEQ ID NO: 1340791 - RNA, 19 nt, Artificial Sequence
  Description of Artificial Sequence: Synthetic oligonucleotide
augauucaauacagcuaua

SEQ ID NO: 1340792 - RNA, 19 nt, Artificial Sequence
  Description of Artificial Sequence: Synthetic oligonucleotide
ccuucgaaugugcacugaa

SEQ ID NO: 1340793 - RNA, 19 nt, Artificial Sequence
  Description of Artificial Sequence: Synthetic oligonucleotide
cagaucucuuucugccaua

SEQ ID NO: 1340794 - RNA, 19 nt, Artificial Sequence
  Description of Artificial Sequence: Synthetic oligonucleotide
ggaucgcuauuuuauuguu

SEQ ID NO: 1340795 - RNA, 19 nt, Artificial Sequence
  Description of Artificial Sequence: Synthetic oligonucleotide
gcuauacgauacaauuaua

SEQ ID NO: 1340796 - RNA, 19 nt, Artificial Sequence
  Description of Artificial Sequence: Synthetic oligonucleotide
gcgcuucccacagccuucg

SEQ ID NO: 1340797 - RNA, 19 nt, Artificial Sequence
  Description of Artificial Sequence: Synthetic oligonucleotide
cguuuuagcuuugagcucu

SEQ ID NO: 1340798 - RNA, 19 nt, Artificial Sequence
  Description of Artificial Sequence: Synthetic oligonucleotide
agcucucaacgaacgcuuu

SEQ ID NO: 1340799 - RNA, 19 nt, Artificial Sequence
  Description of Artificial Sequence: Synthetic oligonucleotide
acgugcgugcgcagauuga

SEQ ID NO: 1340800 - RNA, 19 nt, Artificial Sequence
  Description of Artificial Sequence: Synthetic oligonucleotide
gcuucccguggucgagaag

SEQ ID NO: 1340801 - RNA, 19 nt, Artificial Sequence
  Description of Artificial Sequence: Synthetic oligonucleotide
cccguggucgagaaguucu

SEQ ID NO: 1340802 - RNA, 19 nt, Artificial Sequence
  Description of Artificial Sequence: Synthetic oligonucleotide
ccgcaagcaaaguuaucaa

SEQ ID NO: 1340803 - RNA, 19 nt, Artificial Sequence
  Description of Artificial Sequence: Synthetic oligonucleotide
cugugcuuacagaucucuu

SEQ ID NO: 1340804 - RNA, 19 nt, Artificial Sequence
  Description of Artificial Sequence: Synthetic oligonucleotide
ccuuucuguuacaugggau

SEQ ID NO: 1340805 - RNA, 19 nt, Artificial Sequence
  Description of Artificial Sequence: Synthetic oligonucleotide
acguggacucuggggccgu

SEQ ID NO: 1340806 - RNA, 19 nt, Artificial Sequence
  Description of Artificial Sequence: Synthetic oligonucleotide
cgagauuacagagcaagau

SEQ ID NO: 1340807 - RNA, 19 nt, Artificial Sequence
  Description of Artificial Sequence: Synthetic oligonucleotide
ccgucgaaggggcacacau

SEQ ID NO: 1340808 - RNA, 19 nt, Artificial Sequence
  Description of Artificial Sequence: Synthetic oligonucleotide
gcgcagauugaaguccagu

SEQ ID NO: 1340809 - RNA, 19 nt, Artificial Sequence
  Description of Artificial Sequence: Synthetic oligonucleotide
gccuucgaaugugcacuga

SEQ ID NO: 1340810 - RNA, 19 nt, Artificial Sequence
  Description of Artificial Sequence: Synthetic oligonucleotide
gcuuagggucugagagguc

SEQ ID NO: 1340811 - RNA, 19 nt, Artificial Sequence
  Description of Artificial Sequence: Synthetic oligonucleotide
cgugcgugcgcagauugaa

SEQ ID NO: 1340812 - RNA, 19 nt, Artificial Sequence
  Description of Artificial Sequence: Synthetic oligonucleotide
cugcacagacguggacucu

SEQ ID NO: 1340813 - RNA, 19 nt, Artificial Sequence
  Description of Artificial Sequence: Synthetic oligonucleotide
cgucgaaggggcacacaua

SEQ ID NO: 1340814 - RNA, 19 nt, Artificial Sequence
  Description of Artificial Sequence: Synthetic oligonucleotide
gccgucgaaggggcacaca

SEQ ID NO: 1340815 - RNA, 19 nt, Artificial Sequence
  Description of Artificial Sequence: Synthetic oligonucleotide
ccguggucgagaaguucuu

SEQ ID NO: 1340816 - RNA, 19 nt, Artificial Sequence
  Description of Artificial Sequence: Synthetic oligonucleotide
cgcacgugcgugcgcagau

SEQ ID NO: 1340817 - RNA, 19 nt, Artificial Sequence
  Description of Artificial Sequence: Synthetic oligonucleotide
gcacgugcgugcgcagauu

SEQ ID NO: 1340818 - RNA, 19 nt, Artificial Sequence
  Description of Artificial Sequence: Synthetic oligonucleotide
acuaguaauaaauaacugc

SEQ ID NO: 1340819 - RNA, 19 nt, Artificial Sequence
  Description of Artificial Sequence: Synthetic oligonucleotide
  modified_base (7)..(7): a, c, u, g, unknown or other
aaacugnucugacucagcc

SEQ ID NO: 1340820 - RNA, 19 nt, Artificial Sequence
  Description of Artificial Sequence: Synthetic oligonucleotide
auaaauaacugccaggagg

SEQ ID NO: 1340821 - RNA, 19 nt, Artificial Sequence
  Description of Artificial Sequence: Synthetic oligonucleotide
cuaguaauaaauaacugcc

SEQ ID NO: 1340822 - RNA, 19 nt, Artificial Sequence
  Description of Artificial Sequence: Synthetic oligonucleotide
gaaguagucaccuagcucc

SEQ ID NO: 1340823 - RNA, 19 nt, Artificial Sequence
  Description of Artificial Sequence: Synthetic oligonucleotide
aauucugaacaucacguuc

SEQ ID NO: 1340824 - RNA, 19 nt, Artificial Sequence
  Description of Artificial Sequence: Synthetic oligonucleotide
cacaaauccagcaagauug

SEQ ID NO: 1340825 - RNA, 19 nt, Artificial Sequence
  Description of Artificial Sequence: Synthetic oligonucleotide
aguaaaaggaucuagccca

SEQ ID NO: 1340826 - RNA, 19 nt, Artificial Sequence
  Description of Artificial Sequence: Synthetic oligonucleotide
gauaacauggaggagacag

SEQ ID NO: 1340827 - RNA, 19 nt, Artificial Sequence
  Description of Artificial Sequence: Synthetic oligonucleotide
uguuauacugcucuugugc

SEQ ID NO: 1340828 - RNA, 19 nt, Artificial Sequence
  Description of Artificial Sequence: Synthetic oligonucleotide
auccauaaagaauucuucc

SEQ ID NO: 1340829 - RNA, 19 nt, Artificial Sequence
  Description of Artificial Sequence: Synthetic oligonucleotide
aguaauaaauaacugccag

SEQ ID NO: 1340830 - RNA, 19 nt, Artificial Sequence
  Description of Artificial Sequence: Synthetic oligonucleotide
uugguaauaccacacagcc

SEQ ID NO: 1340831 - RNA, 19 nt, Artificial Sequence
  Description of Artificial Sequence: Synthetic oligonucleotide
agguucauaagucccaugc

SEQ ID NO: 1340832 - RNA, 19 nt, Artificial Sequence
  Description of Artificial Sequence: Synthetic oligonucleotide
aaaacauauuccuaaaguu

SEQ ID NO: 1340833 - RNA, 19 nt, Artificial Sequence
  Description of Artificial Sequence: Synthetic oligonucleotide
acucuuaaucucuugauag

SEQ ID NO: 1340834 - RNA, 19 nt, Artificial Sequence
  Description of Artificial Sequence: Synthetic oligonucleotide
aaggaucuagcccagaggu

SEQ ID NO: 1340835 - RNA, 19 nt, Artificial Sequence
  Description of Artificial Sequence: Synthetic oligonucleotide
ugcaugaccauuuaggcac

SEQ ID NO: 1340836 - RNA, 19 nt, Artificial Sequence
  Description of Artificial Sequence: Synthetic oligonucleotide
uuauauagagucuccaugu

SEQ ID NO: 1340837 - RNA, 19 nt, Artificial Sequence
  Description of Artificial Sequence: Synthetic oligonucleotide
ugaccauuuaggcacaugc

SEQ ID NO: 1340838 - RNA, 19 nt, Artificial Sequence
  Description of Artificial Sequence: Synthetic oligonucleotide
ugauagggcauucggaagg

SEQ ID NO: 1340839 - RNA, 19 nt, Artificial Sequence
  Description of Artificial Sequence: Synthetic oligonucleotide
aaaaggaucuagcccagag

SEQ ID NO: 1340840 - RNA, 19 nt, Artificial Sequence
  Description of Artificial Sequence: Synthetic oligonucleotide
uuaaguucucagcagaaac

SEQ ID NO: 1340841 - RNA, 19 nt, Artificial Sequence
  Description of Artificial Sequence: Synthetic oligonucleotide
  modified_base (5)..(5): a, c, u, g, unknown or other
acugnucugacucagccag

SEQ ID NO: 1340842 - RNA, 19 nt, Artificial Sequence
  Description of Artificial Sequence: Synthetic oligonucleotide
uguuuaaugagguucugga

SEQ ID NO: 1340843 - RNA, 19 nt, Artificial Sequence
  Description of Artificial Sequence: Synthetic oligonucleotide
ucuuaaucucuugauaggg

SEQ ID NO: 1340844 - RNA, 19 nt, Artificial Sequence
  Description of Artificial Sequence: Synthetic oligonucleotide
aaacuuguccuuuucgucu

SEQ ID NO: 1340845 - RNA, 19 nt, Artificial Sequence
  Description of Artificial Sequence: Synthetic oligonucleotide
aauaaauaacugccaggag

SEQ ID NO: 1340846 - RNA, 19 nt, Artificial Sequence
  Description of Artificial Sequence: Synthetic oligonucleotide
aaaggaucuagcccagagg

SEQ ID NO: 1340847 - RNA, 19 nt, Artificial Sequence
  Description of Artificial Sequence: Synthetic oligonucleotide
ugcagauccauaaagaauu

SEQ ID NO: 1340848 - RNA, 19 nt, Artificial Sequence
  Description of Artificial Sequence: Synthetic oligonucleotide
ucccaugcuauucucaggg

SEQ ID NO: 1340849 - RNA, 19 nt, Artificial Sequence
  Description of Artificial Sequence: Synthetic oligonucleotide
uuugguaauaccacacagc

SEQ ID NO: 1340850 - RNA, 19 nt, Artificial Sequence
  Description of Artificial Sequence: Synthetic oligonucleotide
uuaaugagguucuggauca

SEQ ID NO: 1340851 - RNA, 19 nt, Artificial Sequence
  Description of Artificial Sequence: Synthetic oligonucleotide
guuaaggcagcaaacacgg

SEQ ID NO: 1340852 - RNA, 19 nt, Artificial Sequence
  Description of Artificial Sequence: Synthetic oligonucleotide
aacaucacguuccacguca

SEQ ID NO: 1340853 - RNA, 19 nt, Artificial Sequence
  Description of Artificial Sequence: Synthetic oligonucleotide
agcaagauugaccuagggg

SEQ ID NO: 1340854 - RNA, 19 nt, Artificial Sequence
  Description of Artificial Sequence: Synthetic oligonucleotide
aguccaauacuuuuagcuc

SEQ ID NO: 1340855 - RNA, 19 nt, Artificial Sequence
  Description of Artificial Sequence: Synthetic oligonucleotide
uucuggaucauagauuccg

SEQ ID NO: 1340856 - RNA, 19 nt, Artificial Sequence
  Description of Artificial Sequence: Synthetic oligonucleotide
ucuuucgucggaaugcugc

SEQ ID NO: 1340857 - RNA, 19 nt, Artificial Sequence
  Description of Artificial Sequence: Synthetic oligonucleotide
cuuauauagagucuccaug

SEQ ID NO: 1340858 - RNA, 19 nt, Artificial Sequence
  Description of Artificial Sequence: Synthetic oligonucleotide
aaugccacagcacuaguaa

SEQ ID NO: 1340859 - RNA, 19 nt, Artificial Sequence
  Description of Artificial Sequence: Synthetic oligonucleotide
acaaaacuuguccuuuucg

SEQ ID NO: 1340860 - RNA, 19 nt, Artificial Sequence
  Description of Artificial Sequence: Synthetic oligonucleotide
aaggcagcaaacacggacc

SEQ ID NO: 1340861 - RNA, 19 nt, Artificial Sequence
  Description of Artificial Sequence: Synthetic oligonucleotide
ugcacggccaaccagcucc

SEQ ID NO: 1340862 - RNA, 19 nt, Artificial Sequence
  Description of Artificial Sequence: Synthetic oligonucleotide
uaaggcagcaaacacggac

SEQ ID NO: 1340863 - RNA, 19 nt, Artificial Sequence
  Description of Artificial Sequence: Synthetic oligonucleotide
uccauaaagaauucuucca

SEQ ID NO: 1340864 - RNA, 19 nt, Artificial Sequence
  Description of Artificial Sequence: Synthetic oligonucleotide
aacuagucauuuucucaac

SEQ ID NO: 1340865 - RNA, 19 nt, Artificial Sequence
  Description of Artificial Sequence: Synthetic oligonucleotide
uagaaaguggggcugagaa

SEQ ID NO: 1340866 - RNA, 19 nt, Artificial Sequence
  Description of Artificial Sequence: Synthetic oligonucleotide
uugaguccaauacuuuuag

SEQ ID NO: 1340867 - RNA, 19 nt, Artificial Sequence
  Description of Artificial Sequence: Synthetic oligonucleotide
agagaugugacugcacacc

SEQ ID NO: 1340868 - RNA, 19 nt, Artificial Sequence
  Description of Artificial Sequence: Synthetic oligonucleotide
ggaaauucugaacaucacg

SEQ ID NO: 1340869 - RNA, 19 nt, Artificial Sequence
  Description of Artificial Sequence: Synthetic oligonucleotide
gaugugacugcacacccag

SEQ ID NO: 1340870 - RNA, 19 nt, Artificial Sequence
  Description of Artificial Sequence: Synthetic oligonucleotide
uggguuuugucugagacca

SEQ ID NO: 1340871 - RNA, 19 nt, Artificial Sequence
  Description of Artificial Sequence: Synthetic oligonucleotide
augucuaugagcugcucuc

SEQ ID NO: 1340872 - RNA, 19 nt, Artificial Sequence
  Description of Artificial Sequence: Synthetic oligonucleotide
ugauguucagacagcagca

SEQ ID NO: 1340873 - RNA, 19 nt, Artificial Sequence
  Description of Artificial Sequence: Synthetic oligonucleotide
uugaccuaggggaaggccc

SEQ ID NO: 1340874 - RNA, 19 nt, Artificial Sequence
  Description of Artificial Sequence: Synthetic oligonucleotide
ucuaaguucuucuguuaag

SEQ ID NO: 1340875 - RNA, 19 nt, Artificial Sequence
  Description of Artificial Sequence: Synthetic oligonucleotide
cuuaaucucuugauagggc

SEQ ID NO: 1340876 - RNA, 19 nt, Artificial Sequence
  Description of Artificial Sequence: Synthetic oligonucleotide
caguaaaaggaucuagccc

SEQ ID NO: 1340877 - RNA, 19 nt, Artificial Sequence
  Description of Artificial Sequence: Synthetic oligonucleotide
auauagagucuccauguug

SEQ ID NO: 1340878 - RNA, 19 nt, Artificial Sequence
  Description of Artificial Sequence: Synthetic oligonucleotide
uguccuuuucgucuguggc

SEQ ID NO: 1340879 - RNA, 19 nt, Artificial Sequence
  Description of Artificial Sequence: Synthetic oligonucleotide
uggaucauagauuccguga

SEQ ID NO: 1340880 - RNA, 19 nt, Artificial Sequence
  Description of Artificial Sequence: Synthetic oligonucleotide
uuucuugggcaccuuagca

SEQ ID NO: 1340881 - RNA, 19 nt, Artificial Sequence
  Description of Artificial Sequence: Synthetic oligonucleotide
uaaagaauucuuccacaga

SEQ ID NO: 1340882 - RNA, 19 nt, Artificial Sequence
  Description of Artificial Sequence: Synthetic oligonucleotide
ucuagaagacuguccauca

SEQ ID NO: 1340883 - RNA, 19 nt, Artificial Sequence
  Description of Artificial Sequence: Synthetic oligonucleotide
ucuugauagggcauucgga

SEQ ID NO: 1340884 - RNA, 19 nt, Artificial Sequence
  Description of Artificial Sequence: Synthetic oligonucleotide
gcaagauugaccuagggga

SEQ ID NO: 1340885 - RNA, 19 nt, Artificial Sequence
  Description of Artificial Sequence: Synthetic oligonucleotide
uuucgucuguggcagcugg

SEQ ID NO: 1340886 - RNA, 19 nt, Artificial Sequence
  Description of Artificial Sequence: Synthetic oligonucleotide
auauuccuaaaguugugca

SEQ ID NO: 1340887 - RNA, 19 nt, Artificial Sequence
  Description of Artificial Sequence: Synthetic oligonucleotide
uuugaguccaauacuuuua

SEQ ID NO: 1340888 - RNA, 19 nt, Artificial Sequence
  Description of Artificial Sequence: Synthetic oligonucleotide
uucauaagucccaugcuau

SEQ ID NO: 1340889 - RNA, 19 nt, Artificial Sequence
  Description of Artificial Sequence: Synthetic oligonucleotide
auuccgugagaacagccuc

SEQ ID NO: 1340890 - RNA, 19 nt, Artificial Sequence
  Description of Artificial Sequence: Synthetic oligonucleotide
caaagaugaaguagucacc

SEQ ID NO: 1340891 - RNA, 19 nt, Artificial Sequence
  Description of Artificial Sequence: Synthetic oligonucleotide
ugaacaucacguuccacgu

SEQ ID NO: 1340892 - RNA, 19 nt, Artificial Sequence
  Description of Artificial Sequence: Synthetic oligonucleotide
gaguccaauacuuuuagcu

SEQ ID NO: 1340893 - RNA, 19 nt, Artificial Sequence
  Description of Artificial Sequence: Synthetic oligonucleotide
aucacguuccacgucagcg

SEQ ID NO: 1340894 - RNA, 19 nt, Artificial Sequence
  Description of Artificial Sequence: Synthetic oligonucleotide
auuguggggacuccuucac

SEQ ID NO: 1340895 - RNA, 19 nt, Artificial Sequence
  Description of Artificial Sequence: Synthetic oligonucleotide
cauagauuccgugagaaca

SEQ ID NO: 1340896 - RNA, 19 nt, Artificial Sequence
  Description of Artificial Sequence: Synthetic oligonucleotide
agggcauucggaaggagcc

SEQ ID NO: 1340897 - RNA, 19 nt, Artificial Sequence
  Description of Artificial Sequence: Synthetic oligonucleotide
auacucguccuucaguuca

SEQ ID NO: 1340898 - RNA, 19 nt, Artificial Sequence
  Description of Artificial Sequence: Synthetic oligonucleotide
gaggugacagcaguaaaag

SEQ ID NO: 1340899 - RNA, 19 nt, Artificial Sequence
  Description of Artificial Sequence: Synthetic oligonucleotide
aaauucugaacaucacguu

SEQ ID NO: 1340900 - RNA, 19 nt, Artificial Sequence
  Description of Artificial Sequence: Synthetic oligonucleotide
uggauaacauggaggagac

SEQ ID NO: 1340901 - RNA, 19 nt, Artificial Sequence
  Description of Artificial Sequence: Synthetic oligonucleotide
uugauagggcauucggaag

SEQ ID NO: 1340902 - RNA, 19 nt, Artificial Sequence
  Description of Artificial Sequence: Synthetic oligonucleotide
uuagcuugcacggccaacc

SEQ ID NO: 1340903 - RNA, 19 nt, Artificial Sequence
  Description of Artificial Sequence: Synthetic oligonucleotide
cucuugauagggcauucgg

SEQ ID NO: 1340904 - RNA, 19 nt, Artificial Sequence
  Description of Artificial Sequence: Synthetic oligonucleotide
cauauuccuaaaguugugc

SEQ ID NO: 1340905 - RNA, 19 nt, Artificial Sequence
  Description of Artificial Sequence: Synthetic oligonucleotide
gaaauucugaacaucacgu

SEQ ID NO: 1340906 - RNA, 19 nt, Artificial Sequence
  Description of Artificial Sequence: Synthetic oligonucleotide
uccucaaggauugugggga

SEQ ID NO: 1340907 - RNA, 19 nt, Artificial Sequence
  Description of Artificial Sequence: Synthetic oligonucleotide
ugaaguagucaccuagcuc

SEQ ID NO: 1340908 - RNA, 19 nt, Artificial Sequence
  Description of Artificial Sequence: Synthetic oligonucleotide
gagaugugacugcacaccc

SEQ ID NO: 1340909 - RNA, 19 nt, Artificial Sequence
  Description of Artificial Sequence: Synthetic oligonucleotide
caccuagcuccuuauauag

SEQ ID NO: 1340910 - RNA, 19 nt, Artificial Sequence
  Description of Artificial Sequence: Synthetic oligonucleotide
ucccucugcauucaugucu

SEQ ID NO: 1340911 - RNA, 19 nt, Artificial Sequence
  Description of Artificial Sequence: Synthetic oligonucleotide
  modified_base (6)..(6): a, c, u, g, unknown or other
aacugnucugacucagcca

SEQ ID NO: 1340912 - RNA, 19 nt, Artificial Sequence
  Description of Artificial Sequence: Synthetic oligonucleotide
gaugaaguagucaccuagc

SEQ ID NO: 1340913 - RNA, 19 nt, Artificial Sequence
  Description of Artificial Sequence: Synthetic oligonucleotide
acuagucauuuucucaaca

SEQ ID NO: 1340914 - RNA, 19 nt, Artificial Sequence
  Description of Artificial Sequence: Synthetic oligonucleotide
ugaucuaaguucuucuguu

SEQ ID NO: 1340915 - RNA, 19 nt, Artificial Sequence
  Description of Artificial Sequence: Synthetic oligonucleotide
gauccauaaagaauucuuc

SEQ ID NO: 1340916 - RNA, 19 nt, Artificial Sequence
  Description of Artificial Sequence: Synthetic oligonucleotide
auugaccuaggggaaggcc

SEQ ID NO: 1340917 - RNA, 19 nt, Artificial Sequence
  Description of Artificial Sequence: Synthetic oligonucleotide
auaccacacagccaggggu

SEQ ID NO: 1340918 - RNA, 19 nt, Artificial Sequence
  Description of Artificial Sequence: Synthetic oligonucleotide
agcagacauggcaucaucc

SEQ ID NO: 1340919 - RNA, 19 nt, Artificial Sequence
  Description of Artificial Sequence: Synthetic oligonucleotide
uuucacaaaacuagucauu

SEQ ID NO: 1340920 - RNA, 19 nt, Artificial Sequence
  Description of Artificial Sequence: Synthetic oligonucleotide
aauaacugccaggaggaaa

SEQ ID NO: 1340921 - RNA, 19 nt, Artificial Sequence
  Description of Artificial Sequence: Synthetic oligonucleotide
cauaaagaauucuuccaca

SEQ ID NO: 1340922 - RNA, 19 nt, Artificial Sequence
  Description of Artificial Sequence: Synthetic oligonucleotide
gguuaaggcagcaaacacg

SEQ ID NO: 1340923 - RNA, 19 nt, Artificial Sequence
  Description of Artificial Sequence: Synthetic oligonucleotide
ggaucauagauuccgugag

SEQ ID NO: 1340924 - RNA, 19 nt, Artificial Sequence
  Description of Artificial Sequence: Synthetic oligonucleotide
uucgucggaaugcugcccc

SEQ ID NO: 1340925 - RNA, 19 nt, Artificial Sequence
  Description of Artificial Sequence: Synthetic oligonucleotide
guuauacugcucuugugca

SEQ ID NO: 1340926 - RNA, 19 nt, Artificial Sequence
  Description of Artificial Sequence: Synthetic oligonucleotide
uucacaaaacuagucauuu

SEQ ID NO: 1340927 - RNA, 19 nt, Artificial Sequence
  Description of Artificial Sequence: Synthetic oligonucleotide
uguaugugauguucagaca

SEQ ID NO: 1340928 - RNA, 19 nt, Artificial Sequence
  Description of Artificial Sequence: Synthetic oligonucleotide
uaggggaaggcccacuaga

SEQ ID NO: 1340929 - RNA, 19 nt, Artificial Sequence
  Description of Artificial Sequence: Synthetic oligonucleotide
cuugauagggcauucggaa

SEQ ID NO: 1340930 - RNA, 19 nt, Artificial Sequence
  Description of Artificial Sequence: Synthetic oligonucleotide
uggagugcaucauccguag

SEQ ID NO: 1340931 - RNA, 19 nt, Artificial Sequence
  Description of Artificial Sequence: Synthetic oligonucleotide
auagauuccgugagaacag

SEQ ID NO: 1340932 - RNA, 19 nt, Artificial Sequence
  Description of Artificial Sequence: Synthetic oligonucleotide
ggaccucuggauaacaugg

SEQ ID NO: 1340933 - RNA, 19 nt, Artificial Sequence
  Description of Artificial Sequence: Synthetic oligonucleotide
agcuucuagaagacugucc

SEQ ID NO: 1340934 - RNA, 19 nt, Artificial Sequence
  Description of Artificial Sequence: Synthetic oligonucleotide
aauggccuuagagcccagc

SEQ ID NO: 1340935 - RNA, 19 nt, Artificial Sequence
  Description of Artificial Sequence: Synthetic oligonucleotide
cucucuuucgucggaaugc

SEQ ID NO: 1340936 - RNA, 19 nt, Artificial Sequence
  Description of Artificial Sequence: Synthetic oligonucleotide
accucuggauaacauggag

SEQ ID NO: 1340937 - RNA, 19 nt, Artificial Sequence
  Description of Artificial Sequence: Synthetic oligonucleotide
ugucuaugagcugcucucg

SEQ ID NO: 1340938 - RNA, 19 nt, Artificial Sequence
  Description of Artificial Sequence: Synthetic oligonucleotide
gaggcuagcagagauguga

SEQ ID NO: 1340939 - RNA, 19 nt, Artificial Sequence
  Description of Artificial Sequence: Synthetic oligonucleotide
uccuguugacuugacgggg

SEQ ID NO: 1340940 - RNA, 19 nt, Artificial Sequence
  Description of Artificial Sequence: Synthetic oligonucleotide
ugcacacccagcuuuccug

SEQ ID NO: 1340941 - RNA, 19 nt, Artificial Sequence
  Description of Artificial Sequence: Synthetic oligonucleotide
ccuagcuccuuauauagag

SEQ ID NO: 1340942 - RNA, 19 nt, Artificial Sequence
  Description of Artificial Sequence: Synthetic oligonucleotide
agcgaucuguuucuucauc

SEQ ID NO: 1340943 - RNA, 19 nt, Artificial Sequence
  Description of Artificial Sequence: Synthetic oligonucleotide
acaaaacuagucauuuucu

SEQ ID NO: 1340944 - RNA, 19 nt, Artificial Sequence
  Description of Artificial Sequence: Synthetic oligonucleotide
uauauagagucuccauguu

SEQ ID NO: 1340945 - RNA, 19 nt, Artificial Sequence
  Description of Artificial Sequence: Synthetic oligonucleotide
ucuggaucauagauuccgu

SEQ ID NO: 1340946 - RNA, 19 nt, Artificial Sequence
  Description of Artificial Sequence: Synthetic oligonucleotide
agauugaccuaggggaagg

SEQ ID NO: 1340947 - RNA, 19 nt, Artificial Sequence
  Description of Artificial Sequence: Synthetic oligonucleotide
gcaaggguaaguuuggaca

SEQ ID NO: 1340948 - RNA, 19 nt, Artificial Sequence
  Description of Artificial Sequence: Synthetic oligonucleotide
uaaucucuugauagggcau

SEQ ID NO: 1340949 - RNA, 19 nt, Artificial Sequence
  Description of Artificial Sequence: Synthetic oligonucleotide
aggaccucuggauaacaug

SEQ ID NO: 1340950 - RNA, 19 nt, Artificial Sequence
  Description of Artificial Sequence: Synthetic oligonucleotide
cuggauaacauggaggaga

SEQ ID NO: 1340951 - RNA, 19 nt, Artificial Sequence
  Description of Artificial Sequence: Synthetic oligonucleotide
ugaguccaauacuuuuagc

SEQ ID NO: 1340952 - RNA, 19 nt, Artificial Sequence
  Description of Artificial Sequence: Synthetic oligonucleotide
agcuguaugugauguucag

SEQ ID NO: 1340953 - RNA, 19 nt, Artificial Sequence
  Description of Artificial Sequence: Synthetic oligonucleotide
uuggagugcaucauccgua

SEQ ID NO: 1340954 - RNA, 19 nt, Artificial Sequence
  Description of Artificial Sequence: Synthetic oligonucleotide
cuuucgucggaaugcugcc

SEQ ID NO: 1340955 - RNA, 19 nt, Artificial Sequence
  Description of Artificial Sequence: Synthetic oligonucleotide
gauguucagacagcagcag

SEQ ID NO: 1340956 - RNA, 19 nt, Artificial Sequence
  Description of Artificial Sequence: Synthetic oligonucleotide
uuuggaagucuuggucugg

SEQ ID NO: 1340957 - RNA, 19 nt, Artificial Sequence
  Description of Artificial Sequence: Synthetic oligonucleotide
ugcagagcuucuagaagac

SEQ ID NO: 1340958 - RNA, 19 nt, Artificial Sequence
  Description of Artificial Sequence: Synthetic oligonucleotide
ucacguuccacgucagcga

SEQ ID NO: 1340959 - RNA, 19 nt, Artificial Sequence
  Description of Artificial Sequence: Synthetic oligonucleotide
ccauuuaggcacaugcugc

SEQ ID NO: 1340960 - RNA, 19 nt, Artificial Sequence
  Description of Artificial Sequence: Synthetic oligonucleotide
aggcccacuagaaaguggg

SEQ ID NO: 1340961 - RNA, 19 nt, Artificial Sequence
  Description of Artificial Sequence: Synthetic oligonucleotide
ucucuugauagggcauucg

SEQ ID NO: 1340962 - RNA, 19 nt, Artificial Sequence
  Description of Artificial Sequence: Synthetic oligonucleotide
uaaaguugugcagauccau

SEQ ID NO: 1340963 - RNA, 19 nt, Artificial Sequence
  Description of Artificial Sequence: Synthetic oligonucleotide
ugccacagcacuaguaaua

SEQ ID NO: 1340964 - RNA, 19 nt, Artificial Sequence
  Description of Artificial Sequence: Synthetic oligonucleotide
ugaccuaggggaaggccca

SEQ ID NO: 1340965 - RNA, 19 nt, Artificial Sequence
  Description of Artificial Sequence: Synthetic oligonucleotide
guucauaagucccaugcua

SEQ ID NO: 1340966 - RNA, 19 nt, Artificial Sequence
  Description of Artificial Sequence: Synthetic oligonucleotide
aucauagauuccgugagaa

SEQ ID NO: 1340967 - RNA, 19 nt, Artificial Sequence
  Description of Artificial Sequence: Synthetic oligonucleotide
uccuuauauagagucucca

SEQ ID NO: 1340968 - RNA, 19 nt, Artificial Sequence
  Description of Artificial Sequence: Synthetic oligonucleotide
aaacacggacccugcuuug

SEQ ID NO: 1340969 - RNA, 19 nt, Artificial Sequence
  Description of Artificial Sequence: Synthetic oligonucleotide
caugcuauucucagggcca

SEQ ID NO: 1340970 - RNA, 19 nt, Artificial Sequence
  Description of Artificial Sequence: Synthetic oligonucleotide
ucaccuagcuccuuauaua

SEQ ID NO: 1340971 - RNA, 19 nt, Artificial Sequence
  Description of Artificial Sequence: Synthetic oligonucleotide
uuugcucuccgcaucuuuu

SEQ ID NO: 1340972 - RNA, 19 nt, Artificial Sequence
  Description of Artificial Sequence: Synthetic oligonucleotide
uguggggacuccuucacuu

SEQ ID NO: 1340973 - RNA, 19 nt, Artificial Sequence
  Description of Artificial Sequence: Synthetic oligonucleotide
agauccauaaagaauucuu

SEQ ID NO: 1340974 - RNA, 19 nt, Artificial Sequence
  Description of Artificial Sequence: Synthetic oligonucleotide
  modified_base (8)..(8): a, c, u, g, unknown or other
caaacugnucugacucagc

SEQ ID NO: 1340975 - RNA, 19 nt, Artificial Sequence
  Description of Artificial Sequence: Synthetic oligonucleotide
cauaagucccaugcuauuc

SEQ ID NO: 1340976 - RNA, 19 nt, Artificial Sequence
  Description of Artificial Sequence: Synthetic oligonucleotide
cuggaucauagauuccgug

SEQ ID NO: 1340977 - RNA, 19 nt, Artificial Sequence
  Description of Artificial Sequence: Synthetic oligonucleotide
gaucauagauuccgugaga

SEQ ID NO: 1340978 - RNA, 19 nt, Artificial Sequence
  Description of Artificial Sequence: Synthetic oligonucleotide
uaguuuugcucuccgcauc

SEQ ID NO: 1340979 - RNA, 19 nt, Artificial Sequence
  Description of Artificial Sequence: Synthetic oligonucleotide
aucuguuuaaugagguucu

SEQ ID NO: 1340980 - RNA, 19 nt, Artificial Sequence
  Description of Artificial Sequence: Synthetic oligonucleotide
gacugcagagcuucuagaa

SEQ ID NO: 1340981 - RNA, 19 nt, Artificial Sequence
  Description of Artificial Sequence: Synthetic oligonucleotide
gcuagcagagaugugacug

SEQ ID NO: 1340982 - RNA, 19 nt, Artificial Sequence
  Description of Artificial Sequence: Synthetic oligonucleotide
gagugcaucauccguagcu

SEQ ID NO: 1340983 - RNA, 19 nt, Artificial Sequence
  Description of Artificial Sequence: Synthetic oligonucleotide
cacuuaggagcagcaaugg

SEQ ID NO: 1340984 - RNA, 19 nt, Artificial Sequence
  Description of Artificial Sequence: Synthetic oligonucleotide
uuauacugcucuugugcau

SEQ ID NO: 1340985 - RNA, 19 nt, Artificial Sequence
  Description of Artificial Sequence: Synthetic oligonucleotide
aucauccguagcuuguuau

SEQ ID NO: 1340986 - RNA, 19 nt, Artificial Sequence
  Description of Artificial Sequence: Synthetic oligonucleotide
aggguuaaggcagcaaaca

SEQ ID NO: 1340987 - RNA, 19 nt, Artificial Sequence
  Description of Artificial Sequence: Synthetic oligonucleotide
aaucucuugauagggcauu

SEQ ID NO: 1340988 - RNA, 19 nt, Artificial Sequence
  Description of Artificial Sequence: Synthetic oligonucleotide
cauccguagcuuguuauac

SEQ ID NO: 1340989 - RNA, 19 nt, Artificial Sequence
  Description of Artificial Sequence: Synthetic oligonucleotide
auggccuuagagcccagcu

SEQ ID NO: 1340990 - RNA, 19 nt, Artificial Sequence
  Description of Artificial Sequence: Synthetic oligonucleotide
cagucugggcuucacuuag

SEQ ID NO: 1340991 - RNA, 19 nt, Artificial Sequence
  Description of Artificial Sequence: Synthetic oligonucleotide
cuguuaaguucucagcaga

SEQ ID NO: 1340992 - RNA, 19 nt, Artificial Sequence
  Description of Artificial Sequence: Synthetic oligonucleotide
uacucguccuucaguucag

SEQ ID NO: 1340993 - RNA, 19 nt, Artificial Sequence
  Description of Artificial Sequence: Synthetic oligonucleotide
ccagagguucauaaguccc

SEQ ID NO: 1340994 - RNA, 19 nt, Artificial Sequence
  Description of Artificial Sequence: Synthetic oligonucleotide
acgucagcgaucuguuucu

SEQ ID NO: 1340995 - RNA, 19 nt, Artificial Sequence
  Description of Artificial Sequence: Synthetic oligonucleotide
uguuucccggcgcuucuga

SEQ ID NO: 1340996 - RNA, 19 nt, Artificial Sequence
  Description of Artificial Sequence: Synthetic oligonucleotide
gcuaguuuugcucuccgca

SEQ ID NO: 1340997 - RNA, 19 nt, Artificial Sequence
  Description of Artificial Sequence: Synthetic oligonucleotide
aaaguugugcagauccaua

SEQ ID NO: 1340998 - RNA, 19 nt, Artificial Sequence
  Description of Artificial Sequence: Synthetic oligonucleotide
aagcuguaugugauguuca

SEQ ID NO: 1340999 - RNA, 19 nt, Artificial Sequence
  Description of Artificial Sequence: Synthetic oligonucleotide
guaaaaggaucuagcccag

SEQ ID NO: 1341000 - RNA, 19 nt, Artificial Sequence
  Description of Artificial Sequence: Synthetic oligonucleotide
cuagaagacuguccaucac

SEQ ID NO: 1341001 - RNA, 19 nt, Artificial Sequence
  Description of Artificial Sequence: Synthetic oligonucleotide
gacggggcccucucuuucg

SEQ ID NO: 1341002 - RNA, 19 nt, Artificial Sequence
  Description of Artificial Sequence: Synthetic oligonucleotide
uccgaggcuagcagagaug

SEQ ID NO: 1341003 - RNA, 19 nt, Artificial Sequence
  Description of Artificial Sequence: Synthetic oligonucleotide
caaaacuuguccuuuucgu

SEQ ID NO: 1341004 - RNA, 19 nt, Artificial Sequence
  Description of Artificial Sequence: Synthetic oligonucleotide
gaucuaaguucuucuguua

SEQ ID NO: 1341005 - RNA, 19 nt, Artificial Sequence
  Description of Artificial Sequence: Synthetic oligonucleotide
ucauccguagcuuguuaua

SEQ ID NO: 1341006 - RNA, 19 nt, Artificial Sequence
  Description of Artificial Sequence: Synthetic oligonucleotide
cgugagaacagccucauuc

SEQ ID NO: 1341007 - RNA, 19 nt, Artificial Sequence
  Description of Artificial Sequence: Synthetic oligonucleotide
uuccuaaaguugugcagau

SEQ ID NO: 1341008 - RNA, 19 nt, Artificial Sequence
  Description of Artificial Sequence: Synthetic oligonucleotide
ugguucuggcaucuguuua

SEQ ID NO: 1341009 - RNA, 19 nt, Artificial Sequence
  Description of Artificial Sequence: Synthetic oligonucleotide
  modified_base (3)..(3): a, c, u, g, unknown or other
ugnucugacucagccagau

SEQ ID NO: 1341010 - RNA, 19 nt, Artificial Sequence
  Description of Artificial Sequence: Synthetic oligonucleotide
cuaaaguugugcagaucca

SEQ ID NO: 1341011 - RNA, 19 nt, Artificial Sequence
  Description of Artificial Sequence: Synthetic oligonucleotide
augugauguucagacagca

SEQ ID NO: 1341012 - RNA, 19 nt, Artificial Sequence
  Description of Artificial Sequence: Synthetic oligonucleotide
ucuguuucccggcgcuucu

SEQ ID NO: 1341013 - RNA, 19 nt, Artificial Sequence
  Description of Artificial Sequence: Synthetic oligonucleotide
ucucuuucgucggaaugcu

SEQ ID NO: 1341014 - RNA, 19 nt, Artificial Sequence
  Description of Artificial Sequence: Synthetic oligonucleotide
gaaggcccacuagaaagug

SEQ ID NO: 1341015 - RNA, 19 nt, Artificial Sequence
  Description of Artificial Sequence: Synthetic oligonucleotide
ucauaagucccaugcuauu

SEQ ID NO: 1341016 - RNA, 19 nt, Artificial Sequence
  Description of Artificial Sequence: Synthetic oligonucleotide
auccguagcuuguuauacu

SEQ ID NO: 1341017 - RNA, 19 nt, Artificial Sequence
  Description of Artificial Sequence: Synthetic oligonucleotide
cagacacagcucccaaugc

SEQ ID NO: 1341018 - RNA, 19 nt, Artificial Sequence
  Description of Artificial Sequence: Synthetic oligonucleotide
auucggaaggagcccaaaa

SEQ ID NO: 1341019 - RNA, 19 nt, Artificial Sequence
  Description of Artificial Sequence: Synthetic oligonucleotide
uuggcuaguuuugcucucc

SEQ ID NO: 1341020 - RNA, 19 nt, Artificial Sequence
  Description of Artificial Sequence: Synthetic oligonucleotide
caucugaucuaaguucuuc

SEQ ID NO: 1341021 - RNA, 19 nt, Artificial Sequence
  Description of Artificial Sequence: Synthetic oligonucleotide
uagauuccgugagaacagc

SEQ ID NO: 1341022 - RNA, 19 nt, Artificial Sequence
  Description of Artificial Sequence: Synthetic oligonucleotide
cccagcuuagcuugcacgg

SEQ ID NO: 1341023 - RNA, 19 nt, Artificial Sequence
  Description of Artificial Sequence: Synthetic oligonucleotide
  modified_base (13)..(13): a, c, u, g, unknown or other
cacgccaaacugnucugac

SEQ ID NO: 1341024 - RNA, 19 nt, Artificial Sequence
  Description of Artificial Sequence: Synthetic oligonucleotide
uuaaggcagcaaacacgga

SEQ ID NO: 1341025 - RNA, 19 nt, Artificial Sequence
  Description of Artificial Sequence: Synthetic oligonucleotide
auuuaggcacaugcugcag

SEQ ID NO: 1341026 - RNA, 19 nt, Artificial Sequence
  Description of Artificial Sequence: Synthetic oligonucleotide
agacacaaaggcaggguca

SEQ ID NO: 1341027 - RNA, 19 nt, Artificial Sequence
  Description of Artificial Sequence: Synthetic oligonucleotide
ccaugcuauucucagggcc

SEQ ID NO: 1341028 - RNA, 19 nt, Artificial Sequence
  Description of Artificial Sequence: Synthetic oligonucleotide
cuagcccagagguucauaa

SEQ ID NO: 1341029 - RNA, 19 nt, Artificial Sequence
  Description of Artificial Sequence: Synthetic oligonucleotide
cauacucguccuucaguuc

SEQ ID NO: 1341030 - RNA, 19 nt, Artificial Sequence
  Description of Artificial Sequence: Synthetic oligonucleotide
agcuugcacggccaaccag

SEQ ID NO: 1341031 - RNA, 19 nt, Artificial Sequence
  Description of Artificial Sequence: Synthetic oligonucleotide
caagauugaccuaggggaa

SEQ ID NO: 1341032 - RNA, 19 nt, Artificial Sequence
  Description of Artificial Sequence: Synthetic oligonucleotide
cagucgcuccuuuucugcc

SEQ ID NO: 1341033 - RNA, 19 nt, Artificial Sequence
  Description of Artificial Sequence: Synthetic oligonucleotide
cuguugacuugacggggcc

SEQ ID NO: 1341034 - RNA, 19 nt, Artificial Sequence
  Description of Artificial Sequence: Synthetic oligonucleotide
caccuuagcaggaccagca

SEQ ID NO: 1341035 - RNA, 19 nt, Artificial Sequence
  Description of Artificial Sequence: Synthetic oligonucleotide
uguugacuugacggggccc

SEQ ID NO: 1341036 - RNA, 19 nt, Artificial Sequence
  Description of Artificial Sequence: Synthetic oligonucleotide
caccuccaggauaacacuc

SEQ ID NO: 1341037 - RNA, 19 nt, Artificial Sequence
  Description of Artificial Sequence: Synthetic oligonucleotide
cuaggggaaggcccacuag

SEQ ID NO: 1341038 - RNA, 19 nt, Artificial Sequence
  Description of Artificial Sequence: Synthetic oligonucleotide
uuggucagcuccgaggcua

SEQ ID NO: 1341039 - RNA, 19 nt, Artificial Sequence
  Description of Artificial Sequence: Synthetic oligonucleotide
uuucgucggaaugcugccc

SEQ ID NO: 1341040 - RNA, 19 nt, Artificial Sequence
  Description of Artificial Sequence: Synthetic oligonucleotide
ggguuaaggcagcaaacac

SEQ ID NO: 1341041 - RNA, 19 nt, Artificial Sequence
  Description of Artificial Sequence: Synthetic oligonucleotide
uggucagcuccgaggcuag

SEQ ID NO: 1341042 - RNA, 19 nt, Artificial Sequence
  Description of Artificial Sequence: Synthetic oligonucleotide
ggccagagaaaccacaaaa

SEQ ID NO: 1341043 - RNA, 19 nt, Artificial Sequence
  Description of Artificial Sequence: Synthetic oligonucleotide
aagucccaugcuauucuca

SEQ ID NO: 1341044 - RNA, 19 nt, Artificial Sequence
  Description of Artificial Sequence: Synthetic oligonucleotide
  modified_base (12)..(12): a, c, u, g, unknown or other
acgccaaacugnucugacu

SEQ ID NO: 1341045 - RNA, 19 nt, Artificial Sequence
  Description of Artificial Sequence: Synthetic oligonucleotide
auucaccuccaggauaaca

SEQ ID NO: 1341046 - RNA, 19 nt, Artificial Sequence
  Description of Artificial Sequence: Synthetic oligonucleotide
gaacaucacguuccacguc

SEQ ID NO: 1341047 - RNA, 19 nt, Artificial Sequence
  Description of Artificial Sequence: Synthetic oligonucleotide
cuaaguucuucuguuaagu

SEQ ID NO: 1341048 - RNA, 19 nt, Artificial Sequence
  Description of Artificial Sequence: Synthetic oligonucleotide
gaccaggaccucuggauaa

SEQ ID NO: 1341049 - RNA, 19 nt, Artificial Sequence
  Description of Artificial Sequence: Synthetic oligonucleotide
agaccaggaccucuggaua

SEQ ID NO: 1341050 - RNA, 19 nt, Artificial Sequence
  Description of Artificial Sequence: Synthetic oligonucleotide
gugcaucauccguagcuug

SEQ ID NO: 1341051 - RNA, 19 nt, Artificial Sequence
  Description of Artificial Sequence: Synthetic oligonucleotide
cuccgcaucuuuucuucug

SEQ ID NO: 1341052 - RNA, 19 nt, Artificial Sequence
  Description of Artificial Sequence: Synthetic oligonucleotide
ggcuuuggaagucuugguc

SEQ ID NO: 1341053 - RNA, 19 nt, Artificial Sequence
  Description of Artificial Sequence: Synthetic oligonucleotide
aaauaacugccaggaggaa

SEQ ID NO: 1341054 - RNA, 19 nt, Artificial Sequence
  Description of Artificial Sequence: Synthetic oligonucleotide
ccagagaaaccacaaaaga

SEQ ID NO: 1341055 - RNA, 19 nt, Artificial Sequence
  Description of Artificial Sequence: Synthetic oligonucleotide
acggacccugcuuugguaa

SEQ ID NO: 1341056 - RNA, 19 nt, Artificial Sequence
  Description of Artificial Sequence: Synthetic oligonucleotide
cuuggcuaguuuugcucuc

SEQ ID NO: 1341057 - RNA, 19 nt, Artificial Sequence
  Description of Artificial Sequence: Synthetic oligonucleotide
uuagcaggaccagcagaca

SEQ ID NO: 1341058 - RNA, 19 nt, Artificial Sequence
  Description of Artificial Sequence: Synthetic oligonucleotide
gauagggcauucggaagga

SEQ ID NO: 1341059 - RNA, 19 nt, Artificial Sequence
  Description of Artificial Sequence: Synthetic oligonucleotide
uaaaaggaucuagcccaga

SEQ ID NO: 1341060 - RNA, 19 nt, Artificial Sequence
  Description of Artificial Sequence: Synthetic oligonucleotide
ggggcccucucuuucgucg

SEQ ID NO: 1341061 - RNA, 19 nt, Artificial Sequence
  Description of Artificial Sequence: Synthetic oligonucleotide
cagaaacuccaccacgcca

SEQ ID NO: 1341062 - RNA, 19 nt, Artificial Sequence
  Description of Artificial Sequence: Synthetic oligonucleotide
guuuaaugagguucuggau

SEQ ID NO: 1341063 - RNA, 19 nt, Artificial Sequence
  Description of Artificial Sequence: Synthetic oligonucleotide
aaguagucaccuagcuccu

SEQ ID NO: 1341064 - RNA, 19 nt, Artificial Sequence
  Description of Artificial Sequence: Synthetic oligonucleotide
acaaauccagcaagauuga

SEQ ID NO: 1341065 - RNA, 19 nt, Artificial Sequence
  Description of Artificial Sequence: Synthetic oligonucleotide
guuaaguucucagcagaaa

SEQ ID NO: 1341066 - RNA, 19 nt, Artificial Sequence
  Description of Artificial Sequence: Synthetic oligonucleotide
gauuccgugagaacagccu

SEQ ID NO: 1341067 - RNA, 19 nt, Artificial Sequence
  Description of Artificial Sequence: Synthetic oligonucleotide
agcuccgaggcuagcagag

SEQ ID NO: 1341068 - RNA, 19 nt, Artificial Sequence
  Description of Artificial Sequence: Synthetic oligonucleotide
caaauccagcaagauugac

SEQ ID NO: 1341069 - RNA, 19 nt, Artificial Sequence
  Description of Artificial Sequence: Synthetic oligonucleotide
uggggacuccuucacuuuu

SEQ ID NO: 1341070 - RNA, 19 nt, Artificial Sequence
  Description of Artificial Sequence: Synthetic oligonucleotide
ucggaaugcugccccugac

SEQ ID NO: 1341071 - RNA, 19 nt, Artificial Sequence
  Description of Artificial Sequence: Synthetic oligonucleotide
gcccagcuuagcuugcacg

SEQ ID NO: 1341072 - RNA, 19 nt, Artificial Sequence
  Description of Artificial Sequence: Synthetic oligonucleotide
ugauucuccuugacugcuu

SEQ ID NO: 1341073 - RNA, 19 nt, Artificial Sequence
  Description of Artificial Sequence: Synthetic oligonucleotide
gucaccuagcuccuuauau

SEQ ID NO: 1341074 - RNA, 19 nt, Artificial Sequence
  Description of Artificial Sequence: Synthetic oligonucleotide
agcaaacacggacccugcu

SEQ ID NO: 1341075 - RNA, 19 nt, Artificial Sequence
  Description of Artificial Sequence: Synthetic oligonucleotide
augccacagcacuaguaau

SEQ ID NO: 1341076 - RNA, 19 nt, Artificial Sequence
  Description of Artificial Sequence: Synthetic oligonucleotide
gcuugcacggccaaccagc

SEQ ID NO: 1341077 - RNA, 19 nt, Artificial Sequence
  Description of Artificial Sequence: Synthetic oligonucleotide
augcuauucucagggccag

SEQ ID NO: 1341078 - RNA, 19 nt, Artificial Sequence
  Description of Artificial Sequence: Synthetic oligonucleotide
cugaucuaaguucuucugu

SEQ ID NO: 1341079 - RNA, 19 nt, Artificial Sequence
  Description of Artificial Sequence: Synthetic oligonucleotide
agugcaucauccguagcuu

SEQ ID NO: 1341080 - RNA, 19 nt, Artificial Sequence
  Description of Artificial Sequence: Synthetic oligonucleotide
  modified_base (2)..(2): a, c, u, g, unknown or other
gnucugacucagccagauc

SEQ ID NO: 1341081 - RNA, 19 nt, Artificial Sequence
  Description of Artificial Sequence: Synthetic oligonucleotide
uagucaccuagcuccuuau

SEQ ID NO: 1341082 - RNA, 19 nt, Artificial Sequence
  Description of Artificial Sequence: Synthetic oligonucleotide
ucugaacaucacguuccac

SEQ ID NO: 1341083 - RNA, 19 nt, Artificial Sequence
  Description of Artificial Sequence: Synthetic oligonucleotide
uuucccggcgcuucugauu

SEQ ID NO: 1341084 - RNA, 19 nt, Artificial Sequence
  Description of Artificial Sequence: Synthetic oligonucleotide
ugacggggcccucucuuuc

SEQ ID NO: 1341085 - RNA, 19 nt, Artificial Sequence
  Description of Artificial Sequence: Synthetic oligonucleotide
auaacacucuuaaucucuu

SEQ ID NO: 1341086 - RNA, 19 nt, Artificial Sequence
  Description of Artificial Sequence: Synthetic oligonucleotide
gaguggccacugcaugacc

SEQ ID NO: 1341087 - RNA, 19 nt, Artificial Sequence
  Description of Artificial Sequence: Synthetic oligonucleotide
auccuuggucagcuccgag

SEQ ID NO: 1341088 - RNA, 19 nt, Artificial Sequence
  Description of Artificial Sequence: Synthetic oligonucleotide
agagguucauaagucccau

SEQ ID NO: 1341089 - RNA, 19 nt, Artificial Sequence
  Description of Artificial Sequence: Synthetic oligonucleotide
gaccagcagacauggcauc

SEQ ID NO: 1341090 - RNA, 19 nt, Artificial Sequence
  Description of Artificial Sequence: Synthetic oligonucleotide
gagcuucuagaagacuguc

SEQ ID NO: 1341091 - RNA, 19 nt, Artificial Sequence
  Description of Artificial Sequence: Synthetic oligonucleotide
acacggacccugcuuuggu

SEQ ID NO: 1341092 - RNA, 19 nt, Artificial Sequence
  Description of Artificial Sequence: Synthetic oligonucleotide
accagcagacauggcauca

SEQ ID NO: 1341093 - RNA, 19 nt, Artificial Sequence
  Description of Artificial Sequence: Synthetic oligonucleotide
cuuagcuugcacggccaac

SEQ ID NO: 1341094 - RNA, 19 nt, Artificial Sequence
  Description of Artificial Sequence: Synthetic oligonucleotide
cuccuugacugcuugcaaa

SEQ ID NO: 1341095 - RNA, 19 nt, Artificial Sequence
  Description of Artificial Sequence: Synthetic oligonucleotide
  modified_base (9)..(9): a, c, u, g, unknown or other
ccaaacugnucugacucag

SEQ ID NO: 1341096 - RNA, 19 nt, Artificial Sequence
  Description of Artificial Sequence: Synthetic oligonucleotide
cucuuucgucggaaugcug

SEQ ID NO: 1341097 - RNA, 19 nt, Artificial Sequence
  Description of Artificial Sequence: Synthetic oligonucleotide
  modified_base (19)..(19): a, c, u, g, unknown or other
cuccaccacgccaaacugn

SEQ ID NO: 1341098 - RNA, 19 nt, Artificial Sequence
  Description of Artificial Sequence: Synthetic oligonucleotide
gucagcgaucuguuucuuc

SEQ ID NO: 1341099 - RNA, 19 nt, Artificial Sequence
  Description of Artificial Sequence: Synthetic oligonucleotide
augaccauuuaggcacaug

SEQ ID NO: 1341100 - RNA, 19 nt, Artificial Sequence
  Description of Artificial Sequence: Synthetic oligonucleotide
ggccuuagagcccagcuua

SEQ ID NO: 1341101 - RNA, 19 nt, Artificial Sequence
  Description of Artificial Sequence: Synthetic oligonucleotide
auagggcauucggaaggag

SEQ ID NO: 1341102 - RNA, 19 nt, Artificial Sequence
  Description of Artificial Sequence: Synthetic oligonucleotide
  modified_base (11)..(11): a, c, u, g, unknown or other
cgccaaacugnucugacuc

SEQ ID NO: 1341103 - RNA, 19 nt, Artificial Sequence
  Description of Artificial Sequence: Synthetic oligonucleotide
cccugcuuugguaauacca

SEQ ID NO: 1341104 - RNA, 19 nt, Artificial Sequence
  Description of Artificial Sequence: Synthetic oligonucleotide
ggauuguggggacuccuuc

SEQ ID NO: 1341105 - RNA, 19 nt, Artificial Sequence
  Description of Artificial Sequence: Synthetic oligonucleotide
cuaguuuugcucuccgcau

SEQ ID NO: 1341106 - RNA, 19 nt, Artificial Sequence
  Description of Artificial Sequence: Synthetic oligonucleotide
caaugccacagcacuagua

SEQ ID NO: 1341107 - RNA, 19 nt, Artificial Sequence
  Description of Artificial Sequence: Synthetic oligonucleotide
ccagcaagauugaccuagg

SEQ ID NO: 1341108 - RNA, 19 nt, Artificial Sequence
  Description of Artificial Sequence: Synthetic oligonucleotide
acuugacggggcccucucu

SEQ ID NO: 1341109 - RNA, 19 nt, Artificial Sequence
  Description of Artificial Sequence: Synthetic oligonucleotide
agaugugacugcacaccca

SEQ ID NO: 1341110 - RNA, 19 nt, Artificial Sequence
  Description of Artificial Sequence: Synthetic oligonucleotide
cugucucaucucccucugc

SEQ ID NO: 1341111 - RNA, 19 nt, Artificial Sequence
  Description of Artificial Sequence: Synthetic oligonucleotide
ggcuaguuuugcucuccgc

SEQ ID NO: 1341112 - RNA, 19 nt, Artificial Sequence
  Description of Artificial Sequence: Synthetic oligonucleotide
agucaccuagcuccuuaua

SEQ ID NO: 1341113 - RNA, 19 nt, Artificial Sequence
  Description of Artificial Sequence: Synthetic oligonucleotide
gaccucuggauaacaugga

SEQ ID NO: 1341114 - RNA, 19 nt, Artificial Sequence
  Description of Artificial Sequence: Synthetic oligonucleotide
gucggaaugcugccccuga

SEQ ID NO: 1341115 - RNA, 19 nt, Artificial Sequence
  Description of Artificial Sequence: Synthetic oligonucleotide
ccguagcuuguuauacugc

SEQ ID NO: 1341116 - RNA, 19 nt, Artificial Sequence
  Description of Artificial Sequence: Synthetic oligonucleotide
cagggccagagaaaccaca

SEQ ID NO: 1341117 - RNA, 19 nt, Artificial Sequence
  Description of Artificial Sequence: Synthetic oligonucleotide
aggcagucugggcuucacu

SEQ ID NO: 1341118 - RNA, 19 nt, Artificial Sequence
  Description of Artificial Sequence: Synthetic oligonucleotide
uugacggggcccucucuuu

SEQ ID NO: 1341119 - RNA, 19 nt, Artificial Sequence
  Description of Artificial Sequence: Synthetic oligonucleotide
caaacacggacccugcuuu

SEQ ID NO: 1341120 - RNA, 19 nt, Artificial Sequence
  Description of Artificial Sequence: Synthetic oligonucleotide
agucuuggucugggcagag

SEQ ID NO: 1341121 - RNA, 19 nt, Artificial Sequence
  Description of Artificial Sequence: Synthetic oligonucleotide
cccaaugccacagcacuag

SEQ ID NO: 1341122 - RNA, 19 nt, Artificial Sequence
  Description of Artificial Sequence: Synthetic oligonucleotide
ucgucggaaugcugccccu

SEQ ID NO: 1341123 - RNA, 19 nt, Artificial Sequence
  Description of Artificial Sequence: Synthetic oligonucleotide
guugacuugacggggcccu

SEQ ID NO: 1341124 - RNA, 19 nt, Artificial Sequence
  Description of Artificial Sequence: Synthetic oligonucleotide
accuagcuccuuauauaga

SEQ ID NO: 1341125 - RNA, 19 nt, Artificial Sequence
  Description of Artificial Sequence: Synthetic oligonucleotide
gguucauaagucccaugcu

SEQ ID NO: 1341126 - RNA, 19 nt, Artificial Sequence
  Description of Artificial Sequence: Synthetic oligonucleotide
agcuuagcuugcacggcca

SEQ ID NO: 1341127 - RNA, 19 nt, Artificial Sequence
  Description of Artificial Sequence: Synthetic oligonucleotide
  modified_base (4)..(4): a, c, u, g, unknown or other
cugnucugacucagccaga

SEQ ID NO: 1341128 - RNA, 19 nt, Artificial Sequence
  Description of Artificial Sequence: Synthetic oligonucleotide
cuagaaaguggggcugaga

SEQ ID NO: 1341129 - RNA, 19 nt, Artificial Sequence
  Description of Artificial Sequence: Synthetic oligonucleotide
cucguccuucaguucagaa

SEQ ID NO: 1341130 - RNA, 19 nt, Artificial Sequence
  Description of Artificial Sequence: Synthetic oligonucleotide
gcaauggccuuagagccca

SEQ ID NO: 1341131 - RNA, 19 nt, Artificial Sequence
  Description of Artificial Sequence: Synthetic oligonucleotide
ucuagcccagagguucaua

SEQ ID NO: 1341132 - RNA, 19 nt, Artificial Sequence
  Description of Artificial Sequence: Synthetic oligonucleotide
gggcccucucuuucgucgg

SEQ ID NO: 1341133 - RNA, 19 nt, Artificial Sequence
  Description of Artificial Sequence: Synthetic oligonucleotide
ugcuauucucagggccaga

SEQ ID NO: 1341134 - RNA, 19 nt, Artificial Sequence
  Description of Artificial Sequence: Synthetic oligonucleotide
cacuagaaaguggggcuga

SEQ ID NO: 1341135 - RNA, 19 nt, Artificial Sequence
  Description of Artificial Sequence: Synthetic oligonucleotide
ggagugcaucauccguagc

SEQ ID NO: 1341136 - RNA, 19 nt, Artificial Sequence
  Description of Artificial Sequence: Synthetic oligonucleotide
aggcaaggguaaguuugga

SEQ ID NO: 1341137 - RNA, 19 nt, Artificial Sequence
  Description of Artificial Sequence: Synthetic oligonucleotide
ggcauucggaaggagccca

SEQ ID NO: 1341138 - RNA, 19 nt, Artificial Sequence
  Description of Artificial Sequence: Synthetic oligonucleotide
ccacugcaugaccauuuag

SEQ ID NO: 1341139 - RNA, 19 nt, Artificial Sequence
  Description of Artificial Sequence: Synthetic oligonucleotide
cccaugcuauucucagggc

SEQ ID NO: 1341140 - RNA, 19 nt, Artificial Sequence
  Description of Artificial Sequence: Synthetic oligonucleotide
gcagauccauaaagaauuc

SEQ ID NO: 1341141 - RNA, 19 nt, Artificial Sequence
  Description of Artificial Sequence: Synthetic oligonucleotide
cuaugagcugcucucgcuu

SEQ ID NO: 1341142 - RNA, 19 nt, Artificial Sequence
  Description of Artificial Sequence: Synthetic oligonucleotide
acggggcccucucuuucgu

SEQ ID NO: 1341143 - RNA, 19 nt, Artificial Sequence
  Description of Artificial Sequence: Synthetic oligonucleotide
cagcuccgaggcuagcaga

SEQ ID NO: 1341144 - RNA, 19 nt, Artificial Sequence
  Description of Artificial Sequence: Synthetic oligonucleotide
cagauccauaaagaauucu

SEQ ID NO: 1341145 - RNA, 19 nt, Artificial Sequence
  Description of Artificial Sequence: Synthetic oligonucleotide
cucugguucuggcaucugu

SEQ ID NO: 1341146 - RNA, 19 nt, Artificial Sequence
  Description of Artificial Sequence: Synthetic oligonucleotide
cuugcacggccaaccagcu

SEQ ID NO: 1341147 - RNA, 19 nt, Artificial Sequence
  Description of Artificial Sequence: Synthetic oligonucleotide
cuucuagaagacuguccau

SEQ ID NO: 1341148 - RNA, 19 nt, Artificial Sequence
  Description of Artificial Sequence: Synthetic oligonucleotide
ccacuagaaaguggggcug

SEQ ID NO: 1341149 - RNA, 19 nt, Artificial Sequence
  Description of Artificial Sequence: Synthetic oligonucleotide
gcccagagguucauaaguc

SEQ ID NO: 1341150 - RNA, 19 nt, Artificial Sequence
  Description of Artificial Sequence: Synthetic oligonucleotide
gucaggugguggaguggcc

SEQ ID NO: 1341151 - RNA, 19 nt, Artificial Sequence
  Description of Artificial Sequence: Synthetic oligonucleotide
acucguccuucaguucaga

SEQ ID NO: 1341152 - RNA, 19 nt, Artificial Sequence
  Description of Artificial Sequence: Synthetic oligonucleotide
auccagcaagauugaccua

SEQ ID NO: 1341153 - RNA, 19 nt, Artificial Sequence
  Description of Artificial Sequence: Synthetic oligonucleotide
uaggcacaugcugcaggua

SEQ ID NO: 1341154 - RNA, 19 nt, Artificial Sequence
  Description of Artificial Sequence: Synthetic oligonucleotide
ccuuagagcccagcuuagc

SEQ ID NO: 1341155 - RNA, 19 nt, Artificial Sequence
  Description of Artificial Sequence: Synthetic oligonucleotide
cauucaccuccaggauaac

SEQ ID NO: 1341156 - RNA, 19 nt, Artificial Sequence
  Description of Artificial Sequence: Synthetic oligonucleotide
cuguuucccggcgcuucug

SEQ ID NO: 1341157 - RNA, 19 nt, Artificial Sequence
  Description of Artificial Sequence: Synthetic oligonucleotide
ccuuauauagagucuccau

SEQ ID NO: 1341158 - RNA, 19 nt, Artificial Sequence
  Description of Artificial Sequence: Synthetic oligonucleotide
gccuuagagcccagcuuag

SEQ ID NO: 1341159 - RNA, 19 nt, Artificial Sequence
  Description of Artificial Sequence: Synthetic oligonucleotide
cagacauggcaucauccuu

SEQ ID NO: 1341160 - RNA, 19 nt, Artificial Sequence
  Description of Artificial Sequence: Synthetic oligonucleotide
gggcauucggaaggagccc

SEQ ID NO: 1341161 - RNA, 19 nt, Artificial Sequence
  Description of Artificial Sequence: Synthetic oligonucleotide
cuccgaggcuagcagagau

SEQ ID NO: 1341162 - RNA, 19 nt, Artificial Sequence
  Description of Artificial Sequence: Synthetic oligonucleotide
gaccuaggggaaggcccac

SEQ ID NO: 1341163 - RNA, 19 nt, Artificial Sequence
  Description of Artificial Sequence: Synthetic oligonucleotide
cuugacggggcccucucuu

SEQ ID NO: 1341164 - RNA, 19 nt, Artificial Sequence
  Description of Artificial Sequence: Synthetic oligonucleotide
cauccuuggucagcuccga

SEQ ID NO: 1341165 - RNA, 19 nt, Artificial Sequence
  Description of Artificial Sequence: Synthetic oligonucleotide
cacggacccugcuuuggua

SEQ ID NO: 1341166 - RNA, 19 nt, Artificial Sequence
  Description of Artificial Sequence: Synthetic oligonucleotide
aucuagcccagagguucau

SEQ ID NO: 1341167 - RNA, 19 nt, Artificial Sequence
  Description of Artificial Sequence: Synthetic oligonucleotide
gcaaacacggacccugcuu

SEQ ID NO: 1341168 - RNA, 19 nt, Artificial Sequence
  Description of Artificial Sequence: Synthetic oligonucleotide
cauucggaaggagcccaaa

SEQ ID NO: 1341169 - RNA, 19 nt, Artificial Sequence
  Description of Artificial Sequence: Synthetic oligonucleotide
gggcaccuuagcaggacca

SEQ ID NO: 1341170 - RNA, 19 nt, Artificial Sequence
  Description of Artificial Sequence: Synthetic oligonucleotide
cacguuccacgucagcgau

SEQ ID NO: 1341171 - RNA, 19 nt, Artificial Sequence
  Description of Artificial Sequence: Synthetic oligonucleotide
caggaccucuggauaacau

SEQ ID NO: 1341172 - RNA, 19 nt, Artificial Sequence
  Description of Artificial Sequence: Synthetic oligonucleotide
gggccagagaaaccacaaa

SEQ ID NO: 1341173 - RNA, 19 nt, Artificial Sequence
  Description of Artificial Sequence: Synthetic oligonucleotide
ggguuuugucugagaccag

SEQ ID NO: 1341174 - RNA, 19 nt, Artificial Sequence
  Description of Artificial Sequence: Synthetic oligonucleotide
ggcuggguuuugucugaga

SEQ ID NO: 1341175 - RNA, 19 nt, Artificial Sequence
  Description of Artificial Sequence: Synthetic oligonucleotide
ggauaacauggaggagaca

SEQ ID NO: 1341176 - RNA, 19 nt, Artificial Sequence
  Description of Artificial Sequence: Synthetic oligonucleotide
guuucccggcgcuucugau

SEQ ID NO: 1341177 - RNA, 19 nt, Artificial Sequence
  Description of Artificial Sequence: Synthetic oligonucleotide
cuuggucagcuccgaggcu

SEQ ID NO: 1341178 - RNA, 19 nt, Artificial Sequence
  Description of Artificial Sequence: Synthetic oligonucleotide
gccacugcaugaccauuua

SEQ ID NO: 1341179 - RNA, 19 nt, Artificial Sequence
  Description of Artificial Sequence: Synthetic oligonucleotide
ggcuagcagagaugugacu

SEQ ID NO: 1341180 - RNA, 19 nt, Artificial Sequence
  Description of Artificial Sequence: Synthetic oligonucleotide
gcaucuguuuaaugagguu

SEQ ID NO: 1341181 - RNA, 19 nt, Artificial Sequence
  Description of Artificial Sequence: Synthetic oligonucleotide
  modified_base (14)..(14): a, c, u, g, unknown or other
ccacgccaaacugnucuga

SEQ ID NO: 1341182 - RNA, 19 nt, Artificial Sequence
  Description of Artificial Sequence: Synthetic oligonucleotide
gcaugaccauuuaggcaca

SEQ ID NO: 1341183 - RNA, 19 nt, Artificial Sequence
  Description of Artificial Sequence: Synthetic oligonucleotide
ccgaggcuagcagagaugu

SEQ ID NO: 1341184 - RNA, 19 nt, Artificial Sequence
  Description of Artificial Sequence: Synthetic oligonucleotide
cacacagccagggguggcu

SEQ ID NO: 1341185 - RNA, 19 nt, Artificial Sequence
  Description of Artificial Sequence: Synthetic oligonucleotide
ccuaggggaaggcccacua

SEQ ID NO: 1341186 - RNA, 19 nt, Artificial Sequence
  Description of Artificial Sequence: Synthetic oligonucleotide
ggacccugcuuugguaaua

SEQ ID NO: 1341187 - RNA, 19 nt, Artificial Sequence
  Description of Artificial Sequence: Synthetic oligonucleotide
cguuccacgucagcgaucu

SEQ ID NO: 1341188 - RNA, 19 nt, Artificial Sequence
  Description of Artificial Sequence: Synthetic oligonucleotide
caugaccauuuaggcacau

SEQ ID NO: 1341189 - RNA, 19 nt, Artificial Sequence
  Description of Artificial Sequence: Synthetic oligonucleotide
gcauucggaaggagcccaa

SEQ ID NO: 1341190 - RNA, 19 nt, Artificial Sequence
  Description of Artificial Sequence: Synthetic oligonucleotide
cgucggaaugcugccccug

SEQ ID NO: 1341191 - RNA, 19 nt, Artificial Sequence
  Description of Artificial Sequence: Synthetic oligonucleotide
ggcagcaaacacggacccu

SEQ ID NO: 1341192 - RNA, 19 nt, Artificial Sequence
  Description of Artificial Sequence: Synthetic oligonucleotide
cuucuguuucccggcgcuu

SEQ ID NO: 1341193 - RNA, 19 nt, Artificial Sequence
  Description of Artificial Sequence: Synthetic oligonucleotide
gcccucucuuucgucggaa

SEQ ID NO: 1341194 - RNA, 19 nt, Artificial Sequence
  Description of Artificial Sequence: Synthetic oligonucleotide
cggaaugcugccccugacu

SEQ ID NO: 1341195 - RNA, 19 nt, Artificial Sequence
  Description of Artificial Sequence: Synthetic oligonucleotide
caccccugcacugcccuuu

SEQ ID NO: 1341196 - RNA, 19 nt, Artificial Sequence
  Description of Artificial Sequence: Synthetic oligonucleotide
cccucucuuucgucggaau

SEQ ID NO: 1341197 - RNA, 19 nt, Artificial Sequence
  Description of Artificial Sequence: Synthetic oligonucleotide
ccgcaucuuuucuucuguu

SEQ ID NO: 1341198 - RNA, 19 nt, Artificial Sequence
  Description of Artificial Sequence: Synthetic oligonucleotide
cggacccugcuuugguaau

SEQ ID NO: 1341199 - RNA, 19 nt, Artificial Sequence
  Description of Artificial Sequence: Synthetic oligonucleotide
gccccugacugcagagcuu

SEQ ID NO: 1341200 - RNA, 19 nt, Artificial Sequence
  Description of Artificial Sequence: Synthetic oligonucleotide
aaucugggcagauacacac

SEQ ID NO: 1341201 - RNA, 19 nt, Artificial Sequence
  Description of Artificial Sequence: Synthetic oligonucleotide
gauauuguugauucgcagg

SEQ ID NO: 1341202 - RNA, 19 nt, Artificial Sequence
  Description of Artificial Sequence: Synthetic oligonucleotide
gaugcuuugguaccgaugc

SEQ ID NO: 1341203 - RNA, 19 nt, Artificial Sequence
  Description of Artificial Sequence: Synthetic oligonucleotide
aggucgaugaccuugagug

SEQ ID NO: 1341204 - RNA, 19 nt, Artificial Sequence
  Description of Artificial Sequence: Synthetic oligonucleotide
guaaguaccugccaaaacc

SEQ ID NO: 1341205 - RNA, 19 nt, Artificial Sequence
  Description of Artificial Sequence: Synthetic oligonucleotide
auugaccucagagagaugg

SEQ ID NO: 1341206 - RNA, 19 nt, Artificial Sequence
  Description of Artificial Sequence: Synthetic oligonucleotide
aguguauugucucgggagc

SEQ ID NO: 1341207 - RNA, 19 nt, Artificial Sequence
  Description of Artificial Sequence: Synthetic oligonucleotide
aguguuccaauccacacag

SEQ ID NO: 1341208 - RNA, 19 nt, Artificial Sequence
  Description of Artificial Sequence: Synthetic oligonucleotide
gaaaguacauugauggucc

SEQ ID NO: 1341209 - RNA, 19 nt, Artificial Sequence
  Description of Artificial Sequence: Synthetic oligonucleotide
acaagucucacucuccagg

SEQ ID NO: 1341210 - RNA, 19 nt, Artificial Sequence
  Description of Artificial Sequence: Synthetic oligonucleotide
uuagcuugaauuuggcagc

SEQ ID NO: 1341211 - RNA, 19 nt, Artificial Sequence
  Description of Artificial Sequence: Synthetic oligonucleotide
aacugagugaccucuccuc

SEQ ID NO: 1341212 - RNA, 19 nt, Artificial Sequence
  Description of Artificial Sequence: Synthetic oligonucleotide
ggcagauacacacacaggg

SEQ ID NO: 1341213 - RNA, 19 nt, Artificial Sequence
  Description of Artificial Sequence: Synthetic oligonucleotide
aguacauugaugguccugg

SEQ ID NO: 1341214 - RNA, 19 nt, Artificial Sequence
  Description of Artificial Sequence: Synthetic oligonucleotide
acaugguuuccagagaagc

SEQ ID NO: 1341215 - RNA, 19 nt, Artificial Sequence
  Description of Artificial Sequence: Synthetic oligonucleotide
aagccauccgcccugaaca

SEQ ID NO: 1341216 - RNA, 19 nt, Artificial Sequence
  Description of Artificial Sequence: Synthetic oligonucleotide
uagaguguuuggaaucucg

SEQ ID NO: 1341217 - RNA, 19 nt, Artificial Sequence
  Description of Artificial Sequence: Synthetic oligonucleotide
ugucucuagugccagagca

SEQ ID NO: 1341218 - RNA, 19 nt, Artificial Sequence
  Description of Artificial Sequence: Synthetic oligonucleotide
ucauuguggccacugauga

SEQ ID NO: 1341219 - RNA, 19 nt, Artificial Sequence
  Description of Artificial Sequence: Synthetic oligonucleotide
agaguguuccaauccacac

SEQ ID NO: 1341220 - RNA, 19 nt, Artificial Sequence
  Description of Artificial Sequence: Synthetic oligonucleotide
gaguguauugucucgggag

SEQ ID NO: 1341221 - RNA, 19 nt, Artificial Sequence
  Description of Artificial Sequence: Synthetic oligonucleotide
uaccacgcaggccugaagg

SEQ ID NO: 1341222 - RNA, 19 nt, Artificial Sequence
  Description of Artificial Sequence: Synthetic oligonucleotide
uuuacgcugcacaagccgc

SEQ ID NO: 1341223 - RNA, 19 nt, Artificial Sequence
  Description of Artificial Sequence: Synthetic oligonucleotide
uugguaccgaugcucaggg

SEQ ID NO: 1341224 - RNA, 19 nt, Artificial Sequence
  Description of Artificial Sequence: Synthetic oligonucleotide
cacgacauuccagagaugg

SEQ ID NO: 1341225 - RNA, 19 nt, Artificial Sequence
  Description of Artificial Sequence: Synthetic oligonucleotide
ugucggauauuguugauuc

SEQ ID NO: 1341226 - RNA, 19 nt, Artificial Sequence
  Description of Artificial Sequence: Synthetic oligonucleotide
cuuuacgcugcacaagccg

SEQ ID NO: 1341227 - RNA, 19 nt, Artificial Sequence
  Description of Artificial Sequence: Synthetic oligonucleotide
accacgucauuacaguagg

SEQ ID NO: 1341228 - RNA, 19 nt, Artificial Sequence
  Description of Artificial Sequence: Synthetic oligonucleotide
gaggggucaaaauccaugc

SEQ ID NO: 1341229 - RNA, 19 nt, Artificial Sequence
  Description of Artificial Sequence: Synthetic oligonucleotide
cuucucacaagucucacuc

SEQ ID NO: 1341230 - RNA, 19 nt, Artificial Sequence
  Description of Artificial Sequence: Synthetic oligonucleotide
uuagcagcucucuucagcu

SEQ ID NO: 1341231 - RNA, 19 nt, Artificial Sequence
  Description of Artificial Sequence: Synthetic oligonucleotide
uuccagagauggaugagcc

SEQ ID NO: 1341232 - RNA, 19 nt, Artificial Sequence
  Description of Artificial Sequence: Synthetic oligonucleotide
ucuucuagaguguuuggaa

SEQ ID NO: 1341233 - RNA, 19 nt, Artificial Sequence
  Description of Artificial Sequence: Synthetic oligonucleotide
ucggauauuguugauucgc

SEQ ID NO: 1341234 - RNA, 19 nt, Artificial Sequence
  Description of Artificial Sequence: Synthetic oligonucleotide
aacccggcccuguacaggg

SEQ ID NO: 1341235 - RNA, 19 nt, Artificial Sequence
  Description of Artificial Sequence: Synthetic oligonucleotide
aguaggaaaguacauugau

SEQ ID NO: 1341236 - RNA, 19 nt, Artificial Sequence
  Description of Artificial Sequence: Synthetic oligonucleotide
guaggcgcggccuaggucc

SEQ ID NO: 1341237 - RNA, 19 nt, Artificial Sequence
  Description of Artificial Sequence: Synthetic oligonucleotide
agaagaguguuccaaucca

SEQ ID NO: 1341238 - RNA, 19 nt, Artificial Sequence
  Description of Artificial Sequence: Synthetic oligonucleotide
ugccuuguuagcuugaauu

SEQ ID NO: 1341239 - RNA, 19 nt, Artificial Sequence
  Description of Artificial Sequence: Synthetic oligonucleotide
uugauucgcaggucgauga

SEQ ID NO: 1341240 - RNA, 19 nt, Artificial Sequence
  Description of Artificial Sequence: Synthetic oligonucleotide
cugguuguaaguaccugcc

SEQ ID NO: 1341241 - RNA, 19 nt, Artificial Sequence
  Description of Artificial Sequence: Synthetic oligonucleotide
uuacgcagauugcacuccg

SEQ ID NO: 1341242 - RNA, 19 nt, Artificial Sequence
  Description of Artificial Sequence: Synthetic oligonucleotide
uguaaguaccugccaaaac

SEQ ID NO: 1341243 - RNA, 19 nt, Artificial Sequence
  Description of Artificial Sequence: Synthetic oligonucleotide
ugauguggucuccacacac

SEQ ID NO: 1341244 - RNA, 19 nt, Artificial Sequence
  Description of Artificial Sequence: Synthetic oligonucleotide
uguuggggccaaaacaaac

SEQ ID NO: 1341245 - RNA, 19 nt, Artificial Sequence
  Description of Artificial Sequence: Synthetic oligonucleotide
ucuggcuucagaagagugu

SEQ ID NO: 1341246 - RNA, 19 nt, Artificial Sequence
  Description of Artificial Sequence: Synthetic oligonucleotide
ucauuacgcagauugcacu

SEQ ID NO: 1341247 - RNA, 19 nt, Artificial Sequence
  Description of Artificial Sequence: Synthetic oligonucleotide
uguuagcuugaauuuggca

SEQ ID NO: 1341248 - RNA, 19 nt, Artificial Sequence
  Description of Artificial Sequence: Synthetic oligonucleotide
auuguggccacugaugaug

SEQ ID NO: 1341249 - RNA, 19 nt, Artificial Sequence
  Description of Artificial Sequence: Synthetic oligonucleotide
cucucugcgcucauuacgc

SEQ ID NO: 1341250 - RNA, 19 nt, Artificial Sequence
  Description of Artificial Sequence: Synthetic oligonucleotide
guaggcuucucucugcgcc

SEQ ID NO: 1341251 - RNA, 19 nt, Artificial Sequence
  Description of Artificial Sequence: Synthetic oligonucleotide
auuacgcagauugcacucc

SEQ ID NO: 1341252 - RNA, 19 nt, Artificial Sequence
  Description of Artificial Sequence: Synthetic oligonucleotide
cucgggagcagcuaagcag

SEQ ID NO: 1341253 - RNA, 19 nt, Artificial Sequence
  Description of Artificial Sequence: Synthetic oligonucleotide
uucuagaguguuuggaauc

SEQ ID NO: 1341254 - RNA, 19 nt, Artificial Sequence
  Description of Artificial Sequence: Synthetic oligonucleotide
agaguguuuggaaucucgc

SEQ ID NO: 1341255 - RNA, 19 nt, Artificial Sequence
  Description of Artificial Sequence: Synthetic oligonucleotide
ucgggagcagcuaagcaga

SEQ ID NO: 1341256 - RNA, 19 nt, Artificial Sequence
  Description of Artificial Sequence: Synthetic oligonucleotide
uguagccguaccacgcagg

SEQ ID NO: 1341257 - RNA, 19 nt, Artificial Sequence
  Description of Artificial Sequence: Synthetic oligonucleotide
cucauuacgcagauugcac

SEQ ID NO: 1341258 - RNA, 19 nt, Artificial Sequence
  Description of Artificial Sequence: Synthetic oligonucleotide
cuugaguguauugucucgg

SEQ ID NO: 1341259 - RNA, 19 nt, Artificial Sequence
  Description of Artificial Sequence: Synthetic oligonucleotide
ucugcgcucauuacgcaga

SEQ ID NO: 1341260 - RNA, 19 nt, Artificial Sequence
  Description of Artificial Sequence: Synthetic oligonucleotide
ucuagaguguuuggaaucu

SEQ ID NO: 1341261 - RNA, 19 nt, Artificial Sequence
  Description of Artificial Sequence: Synthetic oligonucleotide
ugaguguauugucucggga

SEQ ID NO: 1341262 - RNA, 19 nt, Artificial Sequence
  Description of Artificial Sequence: Synthetic oligonucleotide
ugguaggcuucucucugcg

SEQ ID NO: 1341263 - RNA, 19 nt, Artificial Sequence
  Description of Artificial Sequence: Synthetic oligonucleotide
agaaccggaucuucugguc

SEQ ID NO: 1341264 - RNA, 19 nt, Artificial Sequence
  Description of Artificial Sequence: Synthetic oligonucleotide
uccuguagccguaccacgc

SEQ ID NO: 1341265 - RNA, 19 nt, Artificial Sequence
  Description of Artificial Sequence: Synthetic oligonucleotide
ucacaguccggucucgacu

SEQ ID NO: 1341266 - RNA, 19 nt, Artificial Sequence
  Description of Artificial Sequence: Synthetic oligonucleotide
cauuacgcagauugcacuc

SEQ ID NO: 1341267 - RNA, 19 nt, Artificial Sequence
  Description of Artificial Sequence: Synthetic oligonucleotide
aaaguacauugaugguccu

SEQ ID NO: 1341268 - RNA, 19 nt, Artificial Sequence
  Description of Artificial Sequence: Synthetic oligonucleotide
gcgcucauuacgcagauug

SEQ ID NO: 1341269 - RNA, 19 nt, Artificial Sequence
  Description of Artificial Sequence: Synthetic oligonucleotide
ggggucaaaauccaugcug

SEQ ID NO: 1341270 - RNA, 19 nt, Artificial Sequence
  Description of Artificial Sequence: Synthetic oligonucleotide
acugagugaccucuccucu

SEQ ID NO: 1341271 - RNA, 19 nt, Artificial Sequence
  Description of Artificial Sequence: Synthetic oligonucleotide
gaacucaggaguaucgcca

SEQ ID NO: 1341272 - RNA, 19 nt, Artificial Sequence
  Description of Artificial Sequence: Synthetic oligonucleotide
ugagugaccucuccucuuc

SEQ ID NO: 1341273 - RNA, 19 nt, Artificial Sequence
  Description of Artificial Sequence: Synthetic oligonucleotide
accugucggauauuguuga

SEQ ID NO: 1341274 - RNA, 19 nt, Artificial Sequence
  Description of Artificial Sequence: Synthetic oligonucleotide
gaagccauccgcccugaac

SEQ ID NO: 1341275 - RNA, 19 nt, Artificial Sequence
  Description of Artificial Sequence: Synthetic oligonucleotide
uuguugauucgcaggucga

SEQ ID NO: 1341276 - RNA, 19 nt, Artificial Sequence
  Description of Artificial Sequence: Synthetic oligonucleotide
aaguacauugaugguccug

SEQ ID NO: 1341277 - RNA, 19 nt, Artificial Sequence
  Description of Artificial Sequence: Synthetic oligonucleotide
ggaucuucuggucauugug

SEQ ID NO: 1341278 - RNA, 19 nt, Artificial Sequence
  Description of Artificial Sequence: Synthetic oligonucleotide
uggaacaguaggcgcggcc

SEQ ID NO: 1341279 - RNA, 19 nt, Artificial Sequence
  Description of Artificial Sequence: Synthetic oligonucleotide
ugaacacagcuuuggucca

SEQ ID NO: 1341280 - RNA, 19 nt, Artificial Sequence
  Description of Artificial Sequence: Synthetic oligonucleotide
caggaguaucgccaggagc

SEQ ID NO: 1341281 - RNA, 19 nt, Artificial Sequence
  Description of Artificial Sequence: Synthetic oligonucleotide
ugugucuccccgaccuucc

SEQ ID NO: 1341282 - RNA, 19 nt, Artificial Sequence
  Description of Artificial Sequence: Synthetic oligonucleotide
uggaaucucgcugaugcuc

SEQ ID NO: 1341283 - RNA, 19 nt, Artificial Sequence
  Description of Artificial Sequence: Synthetic oligonucleotide
gucggauauuguugauucg

SEQ ID NO: 1341284 - RNA, 19 nt, Artificial Sequence
  Description of Artificial Sequence: Synthetic oligonucleotide
acaccugucggauauuguu

SEQ ID NO: 1341285 - RNA, 19 nt, Artificial Sequence
  Description of Artificial Sequence: Synthetic oligonucleotide
cuugaagccauccgcccug

SEQ ID NO: 1341286 - RNA, 19 nt, Artificial Sequence
  Description of Artificial Sequence: Synthetic oligonucleotide
ugguuguaaguaccugcca

SEQ ID NO: 1341287 - RNA, 19 nt, Artificial Sequence
  Description of Artificial Sequence: Synthetic oligonucleotide
uggacugugucuccccgac

SEQ ID NO: 1341288 - RNA, 19 nt, Artificial Sequence
  Description of Artificial Sequence: Synthetic oligonucleotide
cacacagcgggacaguguc

SEQ ID NO: 1341289 - RNA, 19 nt, Artificial Sequence
  Description of Artificial Sequence: Synthetic oligonucleotide
ucucgggagcagcuaagca

SEQ ID NO: 1341290 - RNA, 19 nt, Artificial Sequence
  Description of Artificial Sequence: Synthetic oligonucleotide
caccugucggauauuguug

SEQ ID NO: 1341291 - RNA, 19 nt, Artificial Sequence
  Description of Artificial Sequence: Synthetic oligonucleotide
gaagaguguuccaauccac

SEQ ID NO: 1341292 - RNA, 19 nt, Artificial Sequence
  Description of Artificial Sequence: Synthetic oligonucleotide
gaaccggaucuucugguca

SEQ ID NO: 1341293 - RNA, 19 nt, Artificial Sequence
  Description of Artificial Sequence: Synthetic oligonucleotide
aguaggcgcggccuagguc

SEQ ID NO: 1341294 - RNA, 19 nt, Artificial Sequence
  Description of Artificial Sequence: Synthetic oligonucleotide
cuagcagugccugguaggc

SEQ ID NO: 1341295 - RNA, 19 nt, Artificial Sequence
  Description of Artificial Sequence: Synthetic oligonucleotide
uuguaaguaccugccaaaa

SEQ ID NO: 1341296 - RNA, 19 nt, Artificial Sequence
  Description of Artificial Sequence: Synthetic oligonucleotide
ggaacucaggaguaucgcc

SEQ ID NO: 1341297 - RNA, 19 nt, Artificial Sequence
  Description of Artificial Sequence: Synthetic oligonucleotide
guagccguaccacgcaggc

SEQ ID NO: 1341298 - RNA, 19 nt, Artificial Sequence
  Description of Artificial Sequence: Synthetic oligonucleotide
ucccacgacauuccagaga

SEQ ID NO: 1341299 - RNA, 19 nt, Artificial Sequence
  Description of Artificial Sequence: Synthetic oligonucleotide
aaccggaucuucuggucau

SEQ ID NO: 1341300 - RNA, 19 nt, Artificial Sequence
  Description of Artificial Sequence: Synthetic oligonucleotide
cagccugguuguaaguacc

SEQ ID NO: 1341301 - RNA, 19 nt, Artificial Sequence
  Description of Artificial Sequence: Synthetic oligonucleotide
ccugguuguaaguaccugc

SEQ ID NO: 1341302 - RNA, 19 nt, Artificial Sequence
  Description of Artificial Sequence: Synthetic oligonucleotide
ggggccaaaacaaacagca

SEQ ID NO: 1341303 - RNA, 19 nt, Artificial Sequence
  Description of Artificial Sequence: Synthetic oligonucleotide
guuguaaguaccugccaaa

SEQ ID NO: 1341304 - RNA, 19 nt, Artificial Sequence
  Description of Artificial Sequence: Synthetic oligonucleotide
ucuagugccagagcaccac

SEQ ID NO: 1341305 - RNA, 19 nt, Artificial Sequence
  Description of Artificial Sequence: Synthetic oligonucleotide
uuacgcugcacaagccgcu

SEQ ID NO: 1341306 - RNA, 19 nt, Artificial Sequence
  Description of Artificial Sequence: Synthetic oligonucleotide
agguaacccggcccuguac

SEQ ID NO: 1341307 - RNA, 19 nt, Artificial Sequence
  Description of Artificial Sequence: Synthetic oligonucleotide
aacaguaggcgcggccuag

SEQ ID NO: 1341308 - RNA, 19 nt, Artificial Sequence
  Description of Artificial Sequence: Synthetic oligonucleotide
cucugcgcucauuacgcag

SEQ ID NO: 1341309 - RNA, 19 nt, Artificial Sequence
  Description of Artificial Sequence: Synthetic oligonucleotide
ugauucgcaggucgaugac

SEQ ID NO: 1341310 - RNA, 19 nt, Artificial Sequence
  Description of Artificial Sequence: Synthetic oligonucleotide
acucacaacaugguuucca

SEQ ID NO: 1341311 - RNA, 19 nt, Artificial Sequence
  Description of Artificial Sequence: Synthetic oligonucleotide
gguccuggaacaguaggcg

SEQ ID NO: 1341312 - RNA, 19 nt, Artificial Sequence
  Description of Artificial Sequence: Synthetic oligonucleotide
gaugcucacaguccgcuua

SEQ ID NO: 1341313 - RNA, 19 nt, Artificial Sequence
  Description of Artificial Sequence: Synthetic oligonucleotide
gaggcagaccugaaaggcc

SEQ ID NO: 1341314 - RNA, 19 nt, Artificial Sequence
  Description of Artificial Sequence: Synthetic oligonucleotide
gccgaggcagaccugaaag

SEQ ID NO: 1341315 - RNA, 19 nt, Artificial Sequence
  Description of Artificial Sequence: Synthetic oligonucleotide
cacaguccggucucgacuc

SEQ ID NO: 1341316 - RNA, 19 nt, Artificial Sequence
  Description of Artificial Sequence: Synthetic oligonucleotide
guugauucgcaggucgaug

SEQ ID NO: 1341317 - RNA, 19 nt, Artificial Sequence
  Description of Artificial Sequence: Synthetic oligonucleotide
augcucacaguccgcuuag

SEQ ID NO: 1341318 - RNA, 19 nt, Artificial Sequence
  Description of Artificial Sequence: Synthetic oligonucleotide
auucgcaggucgaugaccu

SEQ ID NO: 1341319 - RNA, 19 nt, Artificial Sequence
  Description of Artificial Sequence: Synthetic oligonucleotide
cagggcuccaucugaggag

SEQ ID NO: 1341320 - RNA, 19 nt, Artificial Sequence
  Description of Artificial Sequence: Synthetic oligonucleotide
uucacaguccggucucgac

SEQ ID NO: 1341321 - RNA, 19 nt, Artificial Sequence
  Description of Artificial Sequence: Synthetic oligonucleotide
gauugcacuccgcggcggc

SEQ ID NO: 1341322 - RNA, 19 nt, Artificial Sequence
  Description of Artificial Sequence: Synthetic oligonucleotide
uacgcagauugcacuccgc

SEQ ID NO: 1341323 - RNA, 19 nt, Artificial Sequence
  Description of Artificial Sequence: Synthetic oligonucleotide
ggacacccgagcuugguug

SEQ ID NO: 1341324 - RNA, 19 nt, Artificial Sequence
  Description of Artificial Sequence: Synthetic oligonucleotide
gguuguaaguaccugccaa

SEQ ID NO: 1341325 - RNA, 19 nt, Artificial Sequence
  Description of Artificial Sequence: Synthetic oligonucleotide
guaacccggcccuguacag

SEQ ID NO: 1341326 - RNA, 19 nt, Artificial Sequence
  Description of Artificial Sequence: Synthetic oligonucleotide
cacagcgggacagugucag

SEQ ID NO: 1341327 - RNA, 19 nt, Artificial Sequence
  Description of Artificial Sequence: Synthetic oligonucleotide
uaacccggcccuguacagg

SEQ ID NO: 1341328 - RNA, 19 nt, Artificial Sequence
  Description of Artificial Sequence: Synthetic oligonucleotide
ucuccccgaccuuccagag

SEQ ID NO: 1341329 - RNA, 19 nt, Artificial Sequence
  Description of Artificial Sequence: Synthetic oligonucleotide
acgcgcuuuacgcugcaca

SEQ ID NO: 1341330 - RNA, 19 nt, Artificial Sequence
  Description of Artificial Sequence: Synthetic oligonucleotide
cucagggagguaacccggc

SEQ ID NO: 1341331 - RNA, 19 nt, Artificial Sequence
  Description of Artificial Sequence: Synthetic oligonucleotide
uuggaaucucgcugaugcu

SEQ ID NO: 1341332 - RNA, 19 nt, Artificial Sequence
  Description of Artificial Sequence: Synthetic oligonucleotide
gauggaugagccggucagc

SEQ ID NO: 1341333 - RNA, 19 nt, Artificial Sequence
  Description of Artificial Sequence: Synthetic oligonucleotide
ucgaugaccuugaguguau

SEQ ID NO: 1341334 - RNA, 19 nt, Artificial Sequence
  Description of Artificial Sequence: Synthetic oligonucleotide
ccuugaguguauugucucg

SEQ ID NO: 1341335 - RNA, 19 nt, Artificial Sequence
  Description of Artificial Sequence: Synthetic oligonucleotide
gaguaucgccaggagcuag

SEQ ID NO: 1341336 - RNA, 19 nt, Artificial Sequence
  Description of Artificial Sequence: Synthetic oligonucleotide
ccuucgagggucugguugg

SEQ ID NO: 1341337 - RNA, 19 nt, Artificial Sequence
  Description of Artificial Sequence: Synthetic oligonucleotide
gaguguuuggaaucucgcu

SEQ ID NO: 1341338 - RNA, 19 nt, Artificial Sequence
  Description of Artificial Sequence: Synthetic oligonucleotide
cuggugccuuguuagcuug

SEQ ID NO: 1341339 - RNA, 19 nt, Artificial Sequence
  Description of Artificial Sequence: Synthetic oligonucleotide
agggaugaccuggaugcag

SEQ ID NO: 1341340 - RNA, 19 nt, Artificial Sequence
  Description of Artificial Sequence: Synthetic oligonucleotide
gccaaaaccugggagcccg

SEQ ID NO: 1341341 - RNA, 19 nt, Artificial Sequence
  Description of Artificial Sequence: Synthetic oligonucleotide
uguugauucgcaggucgau

SEQ ID NO: 1341342 - RNA, 19 nt, Artificial Sequence
  Description of Artificial Sequence: Synthetic oligonucleotide
guauugucucgggagcagc

SEQ ID NO: 1341343 - RNA, 19 nt, Artificial Sequence
  Description of Artificial Sequence: Synthetic oligonucleotide
ggcggcacgcgcuuuacgc

SEQ ID NO: 1341344 - RNA, 19 nt, Artificial Sequence
  Description of Artificial Sequence: Synthetic oligonucleotide
gaaucugggcagauacaca

SEQ ID NO: 1341345 - RNA, 19 nt, Artificial Sequence
  Description of Artificial Sequence: Synthetic oligonucleotide
ucucugcgcucauuacgca

SEQ ID NO: 1341346 - RNA, 19 nt, Artificial Sequence
  Description of Artificial Sequence: Synthetic oligonucleotide
ugcacuccgcggcggcacg

SEQ ID NO: 1341347 - RNA, 19 nt, Artificial Sequence
  Description of Artificial Sequence: Synthetic oligonucleotide
gaacacagcuuugguccag

SEQ ID NO: 1341348 - RNA, 19 nt, Artificial Sequence
  Description of Artificial Sequence: Synthetic oligonucleotide
cagggaugcuuugguaccg

SEQ ID NO: 1341349 - RNA, 19 nt, Artificial Sequence
  Description of Artificial Sequence: Synthetic oligonucleotide
ucgccaggagcuagaggca

SEQ ID NO: 1341350 - RNA, 19 nt, Artificial Sequence
  Description of Artificial Sequence: Synthetic oligonucleotide
cacgucauuacaguaggaa

SEQ ID NO: 1341351 - RNA, 19 nt, Artificial Sequence
  Description of Artificial Sequence: Synthetic oligonucleotide
ggucucgacucccagucac

SEQ ID NO: 1341352 - RNA, 19 nt, Artificial Sequence
  Description of Artificial Sequence: Synthetic oligonucleotide
gguaacccggcccuguaca

SEQ ID NO: 1341353 - RNA, 19 nt, Artificial Sequence
  Description of Artificial Sequence: Synthetic oligonucleotide
gcgggacagugucagagag

SEQ ID NO: 1341354 - RNA, 19 nt, Artificial Sequence
  Description of Artificial Sequence: Synthetic oligonucleotide
uacgcagugcggccuccug

SEQ ID NO: 1341355 - RNA, 19 nt, Artificial Sequence
  Description of Artificial Sequence: Synthetic oligonucleotide
gaaucucgcugaugcucac

SEQ ID NO: 1341356 - RNA, 19 nt, Artificial Sequence
  Description of Artificial Sequence: Synthetic oligonucleotide
caggcgaccucccacgaca

SEQ ID NO: 1341357 - RNA, 19 nt, Artificial Sequence
  Description of Artificial Sequence: Synthetic oligonucleotide
uccgcccugaacaccuguc

SEQ ID NO: 1341358 - RNA, 19 nt, Artificial Sequence
  Description of Artificial Sequence: Synthetic oligonucleotide
uccgcuuagcagcucucuu

SEQ ID NO: 1341359 - RNA, 19 nt, Artificial Sequence
  Description of Artificial Sequence: Synthetic oligonucleotide
cuucuagaguguuuggaau

SEQ ID NO: 1341360 - RNA, 19 nt, Artificial Sequence
  Description of Artificial Sequence: Synthetic oligonucleotide
agugccagagcaccaccuu

SEQ ID NO: 1341361 - RNA, 19 nt, Artificial Sequence
  Description of Artificial Sequence: Synthetic oligonucleotide
gguuggcccucucucugcg

SEQ ID NO: 1341362 - RNA, 19 nt, Artificial Sequence
  Description of Artificial Sequence: Synthetic oligonucleotide
cucgacucccagucacuug

SEQ ID NO: 1341363 - RNA, 19 nt, Artificial Sequence
  Description of Artificial Sequence: Synthetic oligonucleotide
ggagccugccagugcauag

SEQ ID NO: 1341364 - RNA, 19 nt, Artificial Sequence
  Description of Artificial Sequence: Synthetic oligonucleotide
agcuccuucgagggucugg

SEQ ID NO: 1341365 - RNA, 19 nt, Artificial Sequence
  Description of Artificial Sequence: Synthetic oligonucleotide
cacauccacacagcgggac

SEQ ID NO: 1341366 - RNA, 19 nt, Artificial Sequence
  Description of Artificial Sequence: Synthetic oligonucleotide
cgcuuuacgcugcacaagc

SEQ ID NO: 1341367 - RNA, 19 nt, Artificial Sequence
  Description of Artificial Sequence: Synthetic oligonucleotide
guaucgccaggagcuagag

SEQ ID NO: 1341368 - RNA, 19 nt, Artificial Sequence
  Description of Artificial Sequence: Synthetic oligonucleotide
cagccuacgcagugcggcc

SEQ ID NO: 1341369 - RNA, 19 nt, Artificial Sequence
  Description of Artificial Sequence: Synthetic oligonucleotide
uggugccuuguuagcuuga

SEQ ID NO: 1341370 - RNA, 19 nt, Artificial Sequence
  Description of Artificial Sequence: Synthetic oligonucleotide
gugucagagagguggccga

SEQ ID NO: 1341371 - RNA, 19 nt, Artificial Sequence
  Description of Artificial Sequence: Synthetic oligonucleotide
acaguaggcgcggccuagg

SEQ ID NO: 1341372 - RNA, 19 nt, Artificial Sequence
  Description of Artificial Sequence: Synthetic oligonucleotide
gcacuugaagccauccgcc

SEQ ID NO: 1341373 - RNA, 19 nt, Artificial Sequence
  Description of Artificial Sequence: Synthetic oligonucleotide
gucucuagugccagagcac

SEQ ID NO: 1341374 - RNA, 19 nt, Artificial Sequence
  Description of Artificial Sequence: Synthetic oligonucleotide
aguaucgccaggagcuaga

SEQ ID NO: 1341375 - RNA, 19 nt, Artificial Sequence
  Description of Artificial Sequence: Synthetic oligonucleotide
gcucauuacgcagauugca

SEQ ID NO: 1341376 - RNA, 19 nt, Artificial Sequence
  Description of Artificial Sequence: Synthetic oligonucleotide
guaccgaugcucaggggca

SEQ ID NO: 1341377 - RNA, 19 nt, Artificial Sequence
  Description of Artificial Sequence: Synthetic oligonucleotide
gcagccugguuguaaguac

SEQ ID NO: 1341378 - RNA, 19 nt, Artificial Sequence
  Description of Artificial Sequence: Synthetic oligonucleotide
augcuuugguaccgaugcu

SEQ ID NO: 1341379 - RNA, 19 nt, Artificial Sequence
  Description of Artificial Sequence: Synthetic oligonucleotide
cugaacaccugucggauau

SEQ ID NO: 1341380 - RNA, 19 nt, Artificial Sequence
  Description of Artificial Sequence: Synthetic oligonucleotide
guguauugucucgggagca

SEQ ID NO: 1341381 - RNA, 19 nt, Artificial Sequence
  Description of Artificial Sequence: Synthetic oligonucleotide
ucucgcugaugcucacagu

SEQ ID NO: 1341382 - RNA, 19 nt, Artificial Sequence
  Description of Artificial Sequence: Synthetic oligonucleotide
ugagccggucagccccucc

SEQ ID NO: 1341383 - RNA, 19 nt, Artificial Sequence
  Description of Artificial Sequence: Synthetic oligonucleotide
gucgaugaccuugagugua

SEQ ID NO: 1341384 - RNA, 19 nt, Artificial Sequence
  Description of Artificial Sequence: Synthetic oligonucleotide
ccaacugagugaccucucc

SEQ ID NO: 1341385 - RNA, 19 nt, Artificial Sequence
  Description of Artificial Sequence: Synthetic oligonucleotide
guacauugaugguccugga

SEQ ID NO: 1341386 - RNA, 19 nt, Artificial Sequence
  Description of Artificial Sequence: Synthetic oligonucleotide
guaccacgcaggccugaag

SEQ ID NO: 1341387 - RNA, 19 nt, Artificial Sequence
  Description of Artificial Sequence: Synthetic oligonucleotide
ggaaucucgcugaugcuca

SEQ ID NO: 1341388 - RNA, 19 nt, Artificial Sequence
  Description of Artificial Sequence: Synthetic oligonucleotide
ccgaggcagaccugaaagg

SEQ ID NO: 1341389 - RNA, 19 nt, Artificial Sequence
  Description of Artificial Sequence: Synthetic oligonucleotide
cagcuaagcagaugcagcu

SEQ ID NO: 1341390 - RNA, 19 nt, Artificial Sequence
  Description of Artificial Sequence: Synthetic oligonucleotide
gucucgggagcagcuaagc

SEQ ID NO: 1341391 - RNA, 19 nt, Artificial Sequence
  Description of Artificial Sequence: Synthetic oligonucleotide
uucgagggucugguuggcc

SEQ ID NO: 1341392 - RNA, 19 nt, Artificial Sequence
  Description of Artificial Sequence: Synthetic oligonucleotide
ggccaaaacaaacagcauu

SEQ ID NO: 1341393 - RNA, 19 nt, Artificial Sequence
  Description of Artificial Sequence: Synthetic oligonucleotide
gcccgaggggucaaaaucc

SEQ ID NO: 1341394 - RNA, 19 nt, Artificial Sequence
  Description of Artificial Sequence: Synthetic oligonucleotide
gcagccuacgcagugcggc

SEQ ID NO: 1341395 - RNA, 19 nt, Artificial Sequence
  Description of Artificial Sequence: Synthetic oligonucleotide
gagccggucagccccucca

SEQ ID NO: 1341396 - RNA, 19 nt, Artificial Sequence
  Description of Artificial Sequence: Synthetic oligonucleotide
ucucgacucccagucacuu

SEQ ID NO: 1341397 - RNA, 19 nt, Artificial Sequence
  Description of Artificial Sequence: Synthetic oligonucleotide
ccuugguccacacucacaa

SEQ ID NO: 1341398 - RNA, 19 nt, Artificial Sequence
  Description of Artificial Sequence: Synthetic oligonucleotide
cagcuuguucuagcagugc

SEQ ID NO: 1341399 - RNA, 19 nt, Artificial Sequence
  Description of Artificial Sequence: Synthetic oligonucleotide
cuugccuggugccuuguua

SEQ ID NO: 1341400 - RNA, 19 nt, Artificial Sequence
  Description of Artificial Sequence: Synthetic oligonucleotide
cgcugaugcucacaguccg

SEQ ID NO: 1341401 - RNA, 19 nt, Artificial Sequence
  Description of Artificial Sequence: Synthetic oligonucleotide
cuccccgaccuuccagagc

SEQ ID NO: 1341402 - RNA, 19 nt, Artificial Sequence
  Description of Artificial Sequence: Synthetic oligonucleotide
cagugucagagagguggcc

SEQ ID NO: 1341403 - RNA, 19 nt, Artificial Sequence
  Description of Artificial Sequence: Synthetic oligonucleotide
gcagauacacacacaggga

SEQ ID NO: 1341404 - RNA, 19 nt, Artificial Sequence
  Description of Artificial Sequence: Synthetic oligonucleotide
ucucucugcgccgcguuuu

SEQ ID NO: 1341405 - RNA, 19 nt, Artificial Sequence
  Description of Artificial Sequence: Synthetic oligonucleotide
uagccguaccacgcaggcc

SEQ ID NO: 1341406 - RNA, 19 nt, Artificial Sequence
  Description of Artificial Sequence: Synthetic oligonucleotide
aguccgcuuagcagcucuc

SEQ ID NO: 1341407 - RNA, 19 nt, Artificial Sequence
  Description of Artificial Sequence: Synthetic oligonucleotide
ucucugcgccgcguuuucc

SEQ ID NO: 1341408 - RNA, 19 nt, Artificial Sequence
  Description of Artificial Sequence: Synthetic oligonucleotide
agccugguuguaaguaccu

SEQ ID NO: 1341409 - RNA, 19 nt, Artificial Sequence
  Description of Artificial Sequence: Synthetic oligonucleotide
uugcacuccgcggcggcac

SEQ ID NO: 1341410 - RNA, 19 nt, Artificial Sequence
  Description of Artificial Sequence: Synthetic oligonucleotide
aucugggcagauacacaca

SEQ ID NO: 1341411 - RNA, 19 nt, Artificial Sequence
  Description of Artificial Sequence: Synthetic oligonucleotide
acgacauuccagagaugga

SEQ ID NO: 1341412 - RNA, 19 nt, Artificial Sequence
  Description of Artificial Sequence: Synthetic oligonucleotide
gguccagucagagcugcac

SEQ ID NO: 1341413 - RNA, 19 nt, Artificial Sequence
  Description of Artificial Sequence: Synthetic oligonucleotide
auugucucgggagcagcua

SEQ ID NO: 1341414 - RNA, 19 nt, Artificial Sequence
  Description of Artificial Sequence: Synthetic oligonucleotide
cacucacaacaugguuucc

SEQ ID NO: 1341415 - RNA, 19 nt, Artificial Sequence
  Description of Artificial Sequence: Synthetic oligonucleotide
cuucgagggucugguuggc

SEQ ID NO: 1341416 - RNA, 19 nt, Artificial Sequence
  Description of Artificial Sequence: Synthetic oligonucleotide
cacccgagcuugguuggcc

SEQ ID NO: 1341417 - RNA, 19 nt, Artificial Sequence
  Description of Artificial Sequence: Synthetic oligonucleotide
gcgaccucccacgacauuc

SEQ ID NO: 1341418 - RNA, 19 nt, Artificial Sequence
  Description of Artificial Sequence: Synthetic oligonucleotide
cagagagaugggcauccaa

SEQ ID NO: 1341419 - RNA, 19 nt, Artificial Sequence
  Description of Artificial Sequence: Synthetic oligonucleotide
cagaaccggaucuucuggu

SEQ ID NO: 1341420 - RNA, 19 nt, Artificial Sequence
  Description of Artificial Sequence: Synthetic oligonucleotide
ggucccuguagacugcucu

SEQ ID NO: 1341421 - RNA, 19 nt, Artificial Sequence
  Description of Artificial Sequence: Synthetic oligonucleotide
ccgcuuagcagcucucuuc

SEQ ID NO: 1341422 - RNA, 19 nt, Artificial Sequence
  Description of Artificial Sequence: Synthetic oligonucleotide
cugcugucccagaaccgga

SEQ ID NO: 1341423 - RNA, 19 nt, Artificial Sequence
  Description of Artificial Sequence: Synthetic oligonucleotide
ccgcccugaacaccugucg

SEQ ID NO: 1341424 - RNA, 19 nt, Artificial Sequence
  Description of Artificial Sequence: Synthetic oligonucleotide
gacucccagucacuugccu

SEQ ID NO: 1341425 - RNA, 19 nt, Artificial Sequence
  Description of Artificial Sequence: Synthetic oligonucleotide
ggugcgcagcuuguucuag

SEQ ID NO: 1341426 - RNA, 19 nt, Artificial Sequence
  Description of Artificial Sequence: Synthetic oligonucleotide
gagguaacccggcccugua

SEQ ID NO: 1341427 - RNA, 19 nt, Artificial Sequence
  Description of Artificial Sequence: Synthetic oligonucleotide
cagcagcgcaguggggucc

SEQ ID NO: 1341428 - RNA, 19 nt, Artificial Sequence
  Description of Artificial Sequence: Synthetic oligonucleotide
ugaacaccugucggauauu

SEQ ID NO: 1341429 - RNA, 19 nt, Artificial Sequence
  Description of Artificial Sequence: Synthetic oligonucleotide
ccggucagccccuccagug

SEQ ID NO: 1341430 - RNA, 19 nt, Artificial Sequence
  Description of Artificial Sequence: Synthetic oligonucleotide
gcccugaacaccugucgga

SEQ ID NO: 1341431 - RNA, 19 nt, Artificial Sequence
  Description of Artificial Sequence: Synthetic oligonucleotide
cgcucauuacgcagauugc

SEQ ID NO: 1341432 - RNA, 19 nt, Artificial Sequence
  Description of Artificial Sequence: Synthetic oligonucleotide
ggaacaguaggcgcggccu

SEQ ID NO: 1341433 - RNA, 19 nt, Artificial Sequence
  Description of Artificial Sequence: Synthetic oligonucleotide
cagcuuugguccagucaga

SEQ ID NO: 1341434 - RNA, 19 nt, Artificial Sequence
  Description of Artificial Sequence: Synthetic oligonucleotide
ggucccgugccuccuccug

SEQ ID NO: 1341435 - RNA, 19 nt, Artificial Sequence
  Description of Artificial Sequence: Synthetic oligonucleotide
agccuacgcagugcggccu

SEQ ID NO: 1341436 - RNA, 19 nt, Artificial Sequence
  Description of Artificial Sequence: Synthetic oligonucleotide
ccgaccuuccagagcuggg

SEQ ID NO: 1341437 - RNA, 19 nt, Artificial Sequence
  Description of Artificial Sequence: Synthetic oligonucleotide
cuggcuucagaagaguguu

SEQ ID NO: 1341438 - RNA, 19 nt, Artificial Sequence
  Description of Artificial Sequence: Synthetic oligonucleotide
ccuggugcgcagcuuguuc

SEQ ID NO: 1341439 - RNA, 19 nt, Artificial Sequence
  Description of Artificial Sequence: Synthetic oligonucleotide
uucgcaggucgaugaccuu

SEQ ID NO: 1341440 - RNA, 19 nt, Artificial Sequence
  Description of Artificial Sequence: Synthetic oligonucleotide
cauccgcccugaacaccug

SEQ ID NO: 1341441 - RNA, 19 nt, Artificial Sequence
  Description of Artificial Sequence: Synthetic oligonucleotide
cuaucagaggacagcuguu

SEQ ID NO: 1341442 - RNA, 19 nt, Artificial Sequence
  Description of Artificial Sequence: Synthetic oligonucleotide
cgcccugaacaccugucgg

SEQ ID NO: 1341443 - RNA, 19 nt, Artificial Sequence
  Description of Artificial Sequence: Synthetic oligonucleotide
cacuccgcggcggcacgcg

SEQ ID NO: 1341444 - RNA, 19 nt, Artificial Sequence
  Description of Artificial Sequence: Synthetic oligonucleotide
uccgcggcggcacgcgcuu

SEQ ID NO: 1341445 - RNA, 19 nt, Artificial Sequence
  Description of Artificial Sequence: Synthetic oligonucleotide
gccuccuguagccguacca

SEQ ID NO: 1341446 - RNA, 19 nt, Artificial Sequence
  Description of Artificial Sequence: Synthetic oligonucleotide
gcgcuuuacgcugcacaag

SEQ ID NO: 1341447 - RNA, 19 nt, Artificial Sequence
  Description of Artificial Sequence: Synthetic oligonucleotide
uggcccucucucugcgcuc

SEQ ID NO: 1341448 - RNA, 19 nt, Artificial Sequence
  Description of Artificial Sequence: Synthetic oligonucleotide
ccacgcaggccugaagggc

SEQ ID NO: 1341449 - RNA, 19 nt, Artificial Sequence
  Description of Artificial Sequence: Synthetic oligonucleotide
gcugucccagaaccggauc

SEQ ID NO: 1341450 - RNA, 19 nt, Artificial Sequence
  Description of Artificial Sequence: Synthetic oligonucleotide
cugugucucuagugccaga

SEQ ID NO: 1341451 - RNA, 19 nt, Artificial Sequence
  Description of Artificial Sequence: Synthetic oligonucleotide
gccugguuguaaguaccug

SEQ ID NO: 1341452 - RNA, 19 nt, Artificial Sequence
  Description of Artificial Sequence: Synthetic oligonucleotide
ccuguacagggaugaccug

SEQ ID NO: 1341453 - RNA, 19 nt, Artificial Sequence
  Description of Artificial Sequence: Synthetic oligonucleotide
acacagcgggacaguguca

SEQ ID NO: 1341454 - RNA, 19 nt, Artificial Sequence
  Description of Artificial Sequence: Synthetic oligonucleotide
gagcccgaggggucaaaau

SEQ ID NO: 1341455 - RNA, 19 nt, Artificial Sequence
  Description of Artificial Sequence: Synthetic oligonucleotide
caguccgcuuagcagcucu

SEQ ID NO: 1341456 - RNA, 19 nt, Artificial Sequence
  Description of Artificial Sequence: Synthetic oligonucleotide
cuucuggcuucagaagagu

SEQ ID NO: 1341457 - RNA, 19 nt, Artificial Sequence
  Description of Artificial Sequence: Synthetic oligonucleotide
augagccggucagccccuc

SEQ ID NO: 1341458 - RNA, 19 nt, Artificial Sequence
  Description of Artificial Sequence: Synthetic oligonucleotide
ggucauggcugaggcucag

SEQ ID NO: 1341459 - RNA, 19 nt, Artificial Sequence
  Description of Artificial Sequence: Synthetic oligonucleotide
ccuguagccguaccacgca

SEQ ID NO: 1341460 - RNA, 19 nt, Artificial Sequence
  Description of Artificial Sequence: Synthetic oligonucleotide
ccggaucuucuggucauug

SEQ ID NO: 1341461 - RNA, 19 nt, Artificial Sequence
  Description of Artificial Sequence: Synthetic oligonucleotide
gaugagccggucagccccu

SEQ ID NO: 1341462 - RNA, 19 nt, Artificial Sequence
  Description of Artificial Sequence: Synthetic oligonucleotide
ugcgcucauuacgcagauu

SEQ ID NO: 1341463 - RNA, 19 nt, Artificial Sequence
  Description of Artificial Sequence: Synthetic oligonucleotide
gccauccgcccugaacacc

SEQ ID NO: 1341464 - RNA, 19 nt, Artificial Sequence
  Description of Artificial Sequence: Synthetic oligonucleotide
cugagugaccucuccucuu

SEQ ID NO: 1341465 - RNA, 19 nt, Artificial Sequence
  Description of Artificial Sequence: Synthetic oligonucleotide
ccgcguuuuccgccugccg

SEQ ID NO: 1341466 - RNA, 19 nt, Artificial Sequence
  Description of Artificial Sequence: Synthetic oligonucleotide
cacgcgcuuuacgcugcac

SEQ ID NO: 1341467 - RNA, 19 nt, Artificial Sequence
  Description of Artificial Sequence: Synthetic oligonucleotide
gugccuuguuagcuugaau

SEQ ID NO: 1341468 - RNA, 19 nt, Artificial Sequence
  Description of Artificial Sequence: Synthetic oligonucleotide
ccauccgcccugaacaccu

SEQ ID NO: 1341469 - RNA, 19 nt, Artificial Sequence
  Description of Artificial Sequence: Synthetic oligonucleotide
guuggccuccaggcgaccu

SEQ ID NO: 1341470 - RNA, 19 nt, Artificial Sequence
  Description of Artificial Sequence: Synthetic oligonucleotide
cggcacgcgcuuuacgcug

SEQ ID NO: 1341471 - RNA, 19 nt, Artificial Sequence
  Description of Artificial Sequence: Synthetic oligonucleotide
gucacuugccuggugccuu

SEQ ID NO: 1341472 - RNA, 19 nt, Artificial Sequence
  Description of Artificial Sequence: Synthetic oligonucleotide
ccgccugccguuccuccag

SEQ ID NO: 1341473 - RNA, 19 nt, Artificial Sequence
  Description of Artificial Sequence: Synthetic oligonucleotide
guccgcuuagcagcucucu

SEQ ID NO: 1341474 - RNA, 19 nt, Artificial Sequence
  Description of Artificial Sequence: Synthetic oligonucleotide
cagcgcaguggggucccug

SEQ ID NO: 1341475 - RNA, 19 nt, Artificial Sequence
  Description of Artificial Sequence: Synthetic oligonucleotide
aggcgaccucccacgacau

SEQ ID NO: 1341476 - RNA, 19 nt, Artificial Sequence
  Description of Artificial Sequence: Synthetic oligonucleotide
ugggagcccgaggggucaa

SEQ ID NO: 1341477 - RNA, 19 nt, Artificial Sequence
  Description of Artificial Sequence: Synthetic oligonucleotide
gccgcguuuuccgccugcc

SEQ ID NO: 1341478 - RNA, 19 nt, Artificial Sequence
  Description of Artificial Sequence: Synthetic oligonucleotide
ccaggcgaccucccacgac

SEQ ID NO: 1341479 - RNA, 19 nt, Artificial Sequence
  Description of Artificial Sequence: Synthetic oligonucleotide
cgcgcuuuacgcugcacaa

SEQ ID NO: 1341480 - RNA, 19 nt, Artificial Sequence
  Description of Artificial Sequence: Synthetic oligonucleotide
ccacgucauuacaguagga

SEQ ID NO: 1341481 - RNA, 19 nt, Artificial Sequence
  Description of Artificial Sequence: Synthetic oligonucleotide
ccggcccuguacagggaug

SEQ ID NO: 1341482 - RNA, 19 nt, Artificial Sequence
  Description of Artificial Sequence: Synthetic oligonucleotide
ccacgacauuccagagaug

SEQ ID NO: 1341483 - RNA, 19 nt, Artificial Sequence
  Description of Artificial Sequence: Synthetic oligonucleotide
ggaguaucgccaggagcua

SEQ ID NO: 1341484 - RNA, 19 nt, Artificial Sequence
  Description of Artificial Sequence: Synthetic oligonucleotide
caguaggcgcggccuaggu

SEQ ID NO: 1341485 - RNA, 19 nt, Artificial Sequence
  Description of Artificial Sequence: Synthetic oligonucleotide
ggagcccgaggggucaaaa

SEQ ID NO: 1341486 - RNA, 19 nt, Artificial Sequence
  Description of Artificial Sequence: Synthetic oligonucleotide
gcggcacgcgcuuuacgcu

SEQ ID NO: 1341487 - RNA, 19 nt, Artificial Sequence
  Description of Artificial Sequence: Synthetic oligonucleotide
gggcuccaucugaggagcc

SEQ ID NO: 1341488 - RNA, 19 nt, Artificial Sequence
  Description of Artificial Sequence: Synthetic oligonucleotide
cugcgcucauuacgcagau

SEQ ID NO: 1341489 - RNA, 19 nt, Artificial Sequence
  Description of Artificial Sequence: Synthetic oligonucleotide
ccgagcuugguuggcccuc

SEQ ID NO: 1341490 - RNA, 19 nt, Artificial Sequence
  Description of Artificial Sequence: Synthetic oligonucleotide
gcguuuuccgccugccguu

SEQ ID NO: 1341491 - RNA, 19 nt, Artificial Sequence
  Description of Artificial Sequence: Synthetic oligonucleotide
ggcccuguacagggaugac

SEQ ID NO: 1341492 - RNA, 19 nt, Artificial Sequence
  Description of Artificial Sequence: Synthetic oligonucleotide
cuccgcggcggcacgcgcu

SEQ ID NO: 1341493 - RNA, 19 nt, Artificial Sequence
  Description of Artificial Sequence: Synthetic oligonucleotide
cgcguuuuccgccugccgu

SEQ ID NO: 1341494 - RNA, 19 nt, Artificial Sequence
  Description of Artificial Sequence: Synthetic oligonucleotide
ggcuccaucugaggagccu

SEQ ID NO: 1341495 - RNA, 19 nt, Artificial Sequence
  Description of Artificial Sequence: Synthetic oligonucleotide
cguuuuccgccugccguuc

SEQ ID NO: 1341496 - RNA, 19 nt, Artificial Sequence
  Description of Artificial Sequence: Synthetic oligonucleotide
gggccaaaacaaacagcau

SEQ ID NO: 1341497 - RNA, 19 nt, Artificial Sequence
  Description of Artificial Sequence: Synthetic oligonucleotide
ccccaacugagugaccucu

SEQ ID NO: 1341498 - RNA, 19 nt, Artificial Sequence
  Description of Artificial Sequence: Synthetic oligonucleotide
acccggcccuguacaggga

SEQ ID NO: 1341499 - RNA, 19 nt, Artificial Sequence
  Description of Artificial Sequence: Synthetic oligonucleotide
cggcggcacgcgcuuuacg

SEQ ID NO: 1341500 - RNA, 19 nt, Artificial Sequence
  Description of Artificial Sequence: Synthetic oligonucleotide
gugcggccuccuggugcgc

SEQ ID NO: 1341501 - RNA, 19 nt, Artificial Sequence
  Description of Artificial Sequence: Synthetic oligonucleotide
ccagcuccuucgagggucu

SEQ ID NO: 1341502 - RNA, 19 nt, Artificial Sequence
  Description of Artificial Sequence: Synthetic oligonucleotide
gcggcggcacgcgcuuuac

SEQ ID NO: 1341503 - RNA, 19 nt, Artificial Sequence
  Description of Artificial Sequence: Synthetic oligonucleotide
gcgccuccuguagccguac

SEQ ID NO: 1341504 - RNA, 19 nt, Artificial Sequence
  Description of Artificial Sequence: Synthetic oligonucleotide
cgccugccguuccuccagc

SEQ ID NO: 1341505 - RNA, 19 nt, Artificial Sequence
  Description of Artificial Sequence: Synthetic oligonucleotide
gcgccgcguuuuccgccug

SEQ ID NO: 1341506 - RNA, 19 nt, Artificial Sequence
  Description of Artificial Sequence: Synthetic oligonucleotide
ccgaggggucaaaauccau

SEQ ID NO: 1341507 - RNA, 19 nt, Artificial Sequence
  Description of Artificial Sequence: Synthetic oligonucleotide
cggucucgacucccaguca

SEQ ID NO: 1341508 - RNA, 19 nt, Artificial Sequence
  Description of Artificial Sequence: Synthetic oligonucleotide
cccggcccuguacagggau

SEQ ID NO: 1341509 - RNA, 19 nt, Artificial Sequence
  Description of Artificial Sequence: Synthetic oligonucleotide
gggagcccgaggggucaaa

SEQ ID NO: 1341510 - RNA, 19 nt, Artificial Sequence
  Description of Artificial Sequence: Synthetic oligonucleotide
ggcgaccucccacgacauu

SEQ ID NO: 1341511 - RNA, 19 nt, Artificial Sequence
  Description of Artificial Sequence: Synthetic oligonucleotide
ggcgcggccuaggucccau

SEQ ID NO: 1341512 - RNA, 19 nt, Artificial Sequence
  Description of Artificial Sequence: Synthetic oligonucleotide
cgcggcggcacgcgcuuua

SEQ ID NO: 1341513 - RNA, 19 nt, Artificial Sequence
  Description of Artificial Sequence: Synthetic oligonucleotide
cgaugaccuugaguguauu

SEQ ID NO: 1341514 - RNA, 19 nt, Artificial Sequence
  Description of Artificial Sequence: Synthetic oligonucleotide
uauaauauaaaccaggaau

SEQ ID NO: 1341515 - RNA, 19 nt, Artificial Sequence
  Description of Artificial Sequence: Synthetic oligonucleotide
aguuuaauaauacugcuac

SEQ ID NO: 1341516 - RNA, 19 nt, Artificial Sequence
  Description of Artificial Sequence: Synthetic oligonucleotide
aguaaaugaauucagaugu

SEQ ID NO: 1341517 - RNA, 19 nt, Artificial Sequence
  Description of Artificial Sequence: Synthetic oligonucleotide
acaaacaugacccaucugg

SEQ ID NO: 1341518 - RNA, 19 nt, Artificial Sequence
  Description of Artificial Sequence: Synthetic oligonucleotide
aaauaaacuauaucaaugu

SEQ ID NO: 1341519 - RNA, 19 nt, Artificial Sequence
  Description of Artificial Sequence: Synthetic oligonucleotide
agaauuaucagucccuacc

SEQ ID NO: 1341520 - RNA, 19 nt, Artificial Sequence
  Description of Artificial Sequence: Synthetic oligonucleotide
auaugaaucaccuguacac

SEQ ID NO: 1341521 - RNA, 19 nt, Artificial Sequence
  Description of Artificial Sequence: Synthetic oligonucleotide
aauacuagcagagaaugac

SEQ ID NO: 1341522 - RNA, 19 nt, Artificial Sequence
  Description of Artificial Sequence: Synthetic oligonucleotide
aaaagaucgacauaaacuu

SEQ ID NO: 1341523 - RNA, 19 nt, Artificial Sequence
  Description of Artificial Sequence: Synthetic oligonucleotide
aauggagagcaucaaaauc

SEQ ID NO: 1341524 - RNA, 19 nt, Artificial Sequence
  Description of Artificial Sequence: Synthetic oligonucleotide
aaggaacuauaauauaaac

SEQ ID NO: 1341525 - RNA, 19 nt, Artificial Sequence
  Description of Artificial Sequence: Synthetic oligonucleotide
uuuuaggaagaaaauuugg

SEQ ID NO: 1341526 - RNA, 19 nt, Artificial Sequence
  Description of Artificial Sequence: Synthetic oligonucleotide
aaagauuccugucuaaaug

SEQ ID NO: 1341527 - RNA, 19 nt, Artificial Sequence
  Description of Artificial Sequence: Synthetic oligonucleotide
aacuauaucaaugucaaga

SEQ ID NO: 1341528 - RNA, 19 nt, Artificial Sequence
  Description of Artificial Sequence: Synthetic oligonucleotide
acuaguuagaagcaacagc

SEQ ID NO: 1341529 - RNA, 19 nt, Artificial Sequence
  Description of Artificial Sequence: Synthetic oligonucleotide
guucauauuauacacagug

SEQ ID NO: 1341530 - RNA, 19 nt, Artificial Sequence
  Description of Artificial Sequence: Synthetic oligonucleotide
aacuauaauauaaaccagg

SEQ ID NO: 1341531 - RNA, 19 nt, Artificial Sequence
  Description of Artificial Sequence: Synthetic oligonucleotide
ugacacauugaauauaaag

SEQ ID NO: 1341532 - RNA, 19 nt, Artificial Sequence
  Description of Artificial Sequence: Synthetic oligonucleotide
ucauauuauacacaguggu

SEQ ID NO: 1341533 - RNA, 19 nt, Artificial Sequence
  Description of Artificial Sequence: Synthetic oligonucleotide
ugcaguuuaauaauacugc

SEQ ID NO: 1341534 - RNA, 19 nt, Artificial Sequence
  Description of Artificial Sequence: Synthetic oligonucleotide
acacacauauuuaagaggc

SEQ ID NO: 1341535 - RNA, 19 nt, Artificial Sequence
  Description of Artificial Sequence: Synthetic oligonucleotide
auauaaaggaacuauaaua

SEQ ID NO: 1341536 - RNA, 19 nt, Artificial Sequence
  Description of Artificial Sequence: Synthetic oligonucleotide
ucgacauaaacuuuauuag

SEQ ID NO: 1341537 - RNA, 19 nt, Artificial Sequence
  Description of Artificial Sequence: Synthetic oligonucleotide
auauacuucaccccagucg

SEQ ID NO: 1341538 - RNA, 19 nt, Artificial Sequence
  Description of Artificial Sequence: Synthetic oligonucleotide
ugagugaaaacacacuacc

SEQ ID NO: 1341539 - RNA, 19 nt, Artificial Sequence
  Description of Artificial Sequence: Synthetic oligonucleotide
uuuaauaauacugcuaccu

SEQ ID NO: 1341540 - RNA, 19 nt, Artificial Sequence
  Description of Artificial Sequence: Synthetic oligonucleotide
ucaaaaucacuagacaagg

SEQ ID NO: 1341541 - RNA, 19 nt, Artificial Sequence
  Description of Artificial Sequence: Synthetic oligonucleotide
uuuaggaagaaaauuuggu

SEQ ID NO: 1341542 - RNA, 19 nt, Artificial Sequence
  Description of Artificial Sequence: Synthetic oligonucleotide
aagacaguaauaucuauaa

SEQ ID NO: 1341543 - RNA, 19 nt, Artificial Sequence
  Description of Artificial Sequence: Synthetic oligonucleotide
aauuacuuauuauuuagua

SEQ ID NO: 1341544 - RNA, 19 nt, Artificial Sequence
  Description of Artificial Sequence: Synthetic oligonucleotide
aauaugaaucaccuguaca

SEQ ID NO: 1341545 - RNA, 19 nt, Artificial Sequence
  Description of Artificial Sequence: Synthetic oligonucleotide
uucuaaagcacugacuugg

SEQ ID NO: 1341546 - RNA, 19 nt, Artificial Sequence
  Description of Artificial Sequence: Synthetic oligonucleotide
aggaacuauaauauaaacc

SEQ ID NO: 1341547 - RNA, 19 nt, Artificial Sequence
  Description of Artificial Sequence: Synthetic oligonucleotide
aaaugguauguguuuacag

SEQ ID NO: 1341548 - RNA, 19 nt, Artificial Sequence
  Description of Artificial Sequence: Synthetic oligonucleotide
aucucauguacucuuuucc

SEQ ID NO: 1341549 - RNA, 19 nt, Artificial Sequence
  Description of Artificial Sequence: Synthetic oligonucleotide
uaauaauacugcuaccucc

SEQ ID NO: 1341550 - RNA, 19 nt, Artificial Sequence
  Description of Artificial Sequence: Synthetic oligonucleotide
auuagguaacauuucuuac

SEQ ID NO: 1341551 - RNA, 19 nt, Artificial Sequence
  Description of Artificial Sequence: Synthetic oligonucleotide
uagacaaggucacaguuag

SEQ ID NO: 1341552 - RNA, 19 nt, Artificial Sequence
  Description of Artificial Sequence: Synthetic oligonucleotide
aagauuagguaacauuucu

SEQ ID NO: 1341553 - RNA, 19 nt, Artificial Sequence
  Description of Artificial Sequence: Synthetic oligonucleotide
aagauuccugucuaaaugu

SEQ ID NO: 1341554 - RNA, 19 nt, Artificial Sequence
  Description of Artificial Sequence: Synthetic oligonucleotide
auuaugaaguauuaacugu

SEQ ID NO: 1341555 - RNA, 19 nt, Artificial Sequence
  Description of Artificial Sequence: Synthetic oligonucleotide
uugaguucauauuauacac

SEQ ID NO: 1341556 - RNA, 19 nt, Artificial Sequence
  Description of Artificial Sequence: Synthetic oligonucleotide
uaucuaugcaguuuaauaa

SEQ ID NO: 1341557 - RNA, 19 nt, Artificial Sequence
  Description of Artificial Sequence: Synthetic oligonucleotide
aauauacuucaccccaguc

SEQ ID NO: 1341558 - RNA, 19 nt, Artificial Sequence
  Description of Artificial Sequence: Synthetic oligonucleotide
uguaccuuuuaaauaaacu

SEQ ID NO: 1341559 - RNA, 19 nt, Artificial Sequence
  Description of Artificial Sequence: Synthetic oligonucleotide
aucgacauaaacuuuauua

SEQ ID NO: 1341560 - RNA, 19 nt, Artificial Sequence
  Description of Artificial Sequence: Synthetic oligonucleotide
uuugagugaaaacacacua

SEQ ID NO: 1341561 - RNA, 19 nt, Artificial Sequence
  Description of Artificial Sequence: Synthetic oligonucleotide
uuacaugugauaaccaagu

SEQ ID NO: 1341562 - RNA, 19 nt, Artificial Sequence
  Description of Artificial Sequence: Synthetic oligonucleotide
aaaaggcucauuuuauagu

SEQ ID NO: 1341563 - RNA, 19 nt, Artificial Sequence
  Description of Artificial Sequence: Synthetic oligonucleotide
gaugucaacaaaugguccc

SEQ ID NO: 1341564 - RNA, 19 nt, Artificial Sequence
  Description of Artificial Sequence: Synthetic oligonucleotide
uuccagaauaguaagugca

SEQ ID NO: 1341565 - RNA, 19 nt, Artificial Sequence
  Description of Artificial Sequence: Synthetic oligonucleotide
ucucauguacucuuuuccg

SEQ ID NO: 1341566 - RNA, 19 nt, Artificial Sequence
  Description of Artificial Sequence: Synthetic oligonucleotide
uguucuauacaguaacugu

SEQ ID NO: 1341567 - RNA, 19 nt, Artificial Sequence
  Description of Artificial Sequence: Synthetic oligonucleotide
accaagaagaacuagggaa

SEQ ID NO: 1341568 - RNA, 19 nt, Artificial Sequence
  Description of Artificial Sequence: Synthetic oligonucleotide
cauauucaauucuaaaaug

SEQ ID NO: 1341569 - RNA, 19 nt, Artificial Sequence
  Description of Artificial Sequence: Synthetic oligonucleotide
aguacaauuuauauggcag

SEQ ID NO: 1341570 - RNA, 19 nt, Artificial Sequence
  Description of Artificial Sequence: Synthetic oligonucleotide
acaacuaaaaggcucauuu

SEQ ID NO: 1341571 - RNA, 19 nt, Artificial Sequence
  Description of Artificial Sequence: Synthetic oligonucleotide
aagaauuaucagucccuac

SEQ ID NO: 1341572 - RNA, 19 nt, Artificial Sequence
  Description of Artificial Sequence: Synthetic oligonucleotide
uguggauuaagucagcguu

SEQ ID NO: 1341573 - RNA, 19 nt, Artificial Sequence
  Description of Artificial Sequence: Synthetic oligonucleotide
aagauuacaguuggguggg

SEQ ID NO: 1341574 - RNA, 19 nt, Artificial Sequence
  Description of Artificial Sequence: Synthetic oligonucleotide
uggauucaaaauaaauuac

SEQ ID NO: 1341575 - RNA, 19 nt, Artificial Sequence
  Description of Artificial Sequence: Synthetic oligonucleotide
aaaggcucauuuuauagua

SEQ ID NO: 1341576 - RNA, 19 nt, Artificial Sequence
  Description of Artificial Sequence: Synthetic oligonucleotide
uguuuacagcaaaauauga

SEQ ID NO: 1341577 - RNA, 19 nt, Artificial Sequence
  Description of Artificial Sequence: Synthetic oligonucleotide
aaaucacuagacaagguca

SEQ ID NO: 1341578 - RNA, 19 nt, Artificial Sequence
  Description of Artificial Sequence: Synthetic oligonucleotide
aacaguagccaacuguaca

SEQ ID NO: 1341579 - RNA, 19 nt, Artificial Sequence
  Description of Artificial Sequence: Synthetic oligonucleotide
aaagccuguacacaucgca

SEQ ID NO: 1341580 - RNA, 19 nt, Artificial Sequence
  Description of Artificial Sequence: Synthetic oligonucleotide
aauaccugacaucaacagu

SEQ ID NO: 1341581 - RNA, 19 nt, Artificial Sequence
  Description of Artificial Sequence: Synthetic oligonucleotide
aaauuagaaauauguggaa

SEQ ID NO: 1341582 - RNA, 19 nt, Artificial Sequence
  Description of Artificial Sequence: Synthetic oligonucleotide
gaguucuccaaacacaaac

SEQ ID NO: 1341583 - RNA, 19 nt, Artificial Sequence
  Description of Artificial Sequence: Synthetic oligonucleotide
auuacuuauuauuuaguau

SEQ ID NO: 1341584 - RNA, 19 nt, Artificial Sequence
  Description of Artificial Sequence: Synthetic oligonucleotide
aaacaugacccaucugguc

SEQ ID NO: 1341585 - RNA, 19 nt, Artificial Sequence
  Description of Artificial Sequence: Synthetic oligonucleotide
auaaacuauaucaauguca

SEQ ID NO: 1341586 - RNA, 19 nt, Artificial Sequence
  Description of Artificial Sequence: Synthetic oligonucleotide
aauuaaguuacaugugaua

SEQ ID NO: 1341587 - RNA, 19 nt, Artificial Sequence
  Description of Artificial Sequence: Synthetic oligonucleotide
ucuaaauguccucaggcuc

SEQ ID NO: 1341588 - RNA, 19 nt, Artificial Sequence
  Description of Artificial Sequence: Synthetic oligonucleotide
ugaacaaucucauguacuc

SEQ ID NO: 1341589 - RNA, 19 nt, Artificial Sequence
  Description of Artificial Sequence: Synthetic oligonucleotide
auauaaccaauuaaaagug

SEQ ID NO: 1341590 - RNA, 19 nt, Artificial Sequence
  Description of Artificial Sequence: Synthetic oligonucleotide
uaugaaguauuaacuguca

SEQ ID NO: 1341591 - RNA, 19 nt, Artificial Sequence
  Description of Artificial Sequence: Synthetic oligonucleotide
ugugauaaccaaguaaaga

SEQ ID NO: 1341592 - RNA, 19 nt, Artificial Sequence
  Description of Artificial Sequence: Synthetic oligonucleotide
cacaaucuguucuauacag

SEQ ID NO: 1341593 - RNA, 19 nt, Artificial Sequence
  Description of Artificial Sequence: Synthetic oligonucleotide
uaaccuacuuccagaaucc

SEQ ID NO: 1341594 - RNA, 19 nt, Artificial Sequence
  Description of Artificial Sequence: Synthetic oligonucleotide
uacacaucgcaucagcucu

SEQ ID NO: 1341595 - RNA, 19 nt, Artificial Sequence
  Description of Artificial Sequence: Synthetic oligonucleotide
aagagaauauaaccaauua

SEQ ID NO: 1341596 - RNA, 19 nt, Artificial Sequence
  Description of Artificial Sequence: Synthetic oligonucleotide
auuucuuaccaagaagaac

SEQ ID NO: 1341597 - RNA, 19 nt, Artificial Sequence
  Description of Artificial Sequence: Synthetic oligonucleotide
cucauuuuauaguaaauga

SEQ ID NO: 1341598 - RNA, 19 nt, Artificial Sequence
  Description of Artificial Sequence: Synthetic oligonucleotide
aaccaauuaaaagugaauu

SEQ ID NO: 1341599 - RNA, 19 nt, Artificial Sequence
  Description of Artificial Sequence: Synthetic oligonucleotide
aaucacuagacaaggucac

SEQ ID NO: 1341600 - RNA, 19 nt, Artificial Sequence
  Description of Artificial Sequence: Synthetic oligonucleotide
uuagcuguguggauuaagu

SEQ ID NO: 1341601 - RNA, 19 nt, Artificial Sequence
  Description of Artificial Sequence: Synthetic oligonucleotide
uguaaaagauuccugucua

SEQ ID NO: 1341602 - RNA, 19 nt, Artificial Sequence
  Description of Artificial Sequence: Synthetic oligonucleotide
gacaguaauaucuauaaau

SEQ ID NO: 1341603 - RNA, 19 nt, Artificial Sequence
  Description of Artificial Sequence: Synthetic oligonucleotide
aaccaaguaaagaauuauc

SEQ ID NO: 1341604 - RNA, 19 nt, Artificial Sequence
  Description of Artificial Sequence: Synthetic oligonucleotide
aaauucaguaaaagugggg

SEQ ID NO: 1341605 - RNA, 19 nt, Artificial Sequence
  Description of Artificial Sequence: Synthetic oligonucleotide
ugcucauagaagaacuagc

SEQ ID NO: 1341606 - RNA, 19 nt, Artificial Sequence
  Description of Artificial Sequence: Synthetic oligonucleotide
agugcaaaugguaaccuac

SEQ ID NO: 1341607 - RNA, 19 nt, Artificial Sequence
  Description of Artificial Sequence: Synthetic oligonucleotide
guaaccuacuuccagaauc

SEQ ID NO: 1341608 - RNA, 19 nt, Artificial Sequence
  Description of Artificial Sequence: Synthetic oligonucleotide
uauuguuggcacuauuuac

SEQ ID NO: 1341609 - RNA, 19 nt, Artificial Sequence
  Description of Artificial Sequence: Synthetic oligonucleotide
aagaaaauuuggucuauua

SEQ ID NO: 1341610 - RNA, 19 nt, Artificial Sequence
  Description of Artificial Sequence: Synthetic oligonucleotide
augguauguguuuacagca

SEQ ID NO: 1341611 - RNA, 19 nt, Artificial Sequence
  Description of Artificial Sequence: Synthetic oligonucleotide
aaaugcucauagaagaacu

SEQ ID NO: 1341612 - RNA, 19 nt, Artificial Sequence
  Description of Artificial Sequence: Synthetic oligonucleotide
auauucaauucuaaaauga

SEQ ID NO: 1341613 - RNA, 19 nt, Artificial Sequence
  Description of Artificial Sequence: Synthetic oligonucleotide
aaauauacuucaccccagu

SEQ ID NO: 1341614 - RNA, 19 nt, Artificial Sequence
  Description of Artificial Sequence: Synthetic oligonucleotide
guaacugucauauugaguu

SEQ ID NO: 1341615 - RNA, 19 nt, Artificial Sequence
  Description of Artificial Sequence: Synthetic oligonucleotide
ugaacacuaucuaugcagu

SEQ ID NO: 1341616 - RNA, 19 nt, Artificial Sequence
  Description of Artificial Sequence: Synthetic oligonucleotide
ugaguucauauuauacaca

SEQ ID NO: 1341617 - RNA, 19 nt, Artificial Sequence
  Description of Artificial Sequence: Synthetic oligonucleotide
auauuauacacagugguau

SEQ ID NO: 1341618 - RNA, 19 nt, Artificial Sequence
  Description of Artificial Sequence: Synthetic oligonucleotide
gauuagguaacauuucuua

SEQ ID NO: 1341619 - RNA, 19 nt, Artificial Sequence
  Description of Artificial Sequence: Synthetic oligonucleotide
gucaacagaaagauuacag

SEQ ID NO: 1341620 - RNA, 19 nt, Artificial Sequence
  Description of Artificial Sequence: Synthetic oligonucleotide
ugugaacaaucucauguac

SEQ ID NO: 1341621 - RNA, 19 nt, Artificial Sequence
  Description of Artificial Sequence: Synthetic oligonucleotide
acugucaacagaaagauua

SEQ ID NO: 1341622 - RNA, 19 nt, Artificial Sequence
  Description of Artificial Sequence: Synthetic oligonucleotide
aacacaaacaugacccauc

SEQ ID NO: 1341623 - RNA, 19 nt, Artificial Sequence
  Description of Artificial Sequence: Synthetic oligonucleotide
uguaagugcuuauugggaa

SEQ ID NO: 1341624 - RNA, 19 nt, Artificial Sequence
  Description of Artificial Sequence: Synthetic oligonucleotide
uucaccagaguuccaaaga

SEQ ID NO: 1341625 - RNA, 19 nt, Artificial Sequence
  Description of Artificial Sequence: Synthetic oligonucleotide
uuguccaaaagaucgacau

SEQ ID NO: 1341626 - RNA, 19 nt, Artificial Sequence
  Description of Artificial Sequence: Synthetic oligonucleotide
acuauuuacugcuuccaga

SEQ ID NO: 1341627 - RNA, 19 nt, Artificial Sequence
  Description of Artificial Sequence: Synthetic oligonucleotide
caaaagaucgacauaaacu

SEQ ID NO: 1341628 - RNA, 19 nt, Artificial Sequence
  Description of Artificial Sequence: Synthetic oligonucleotide
cuaugcaguuuaauaauac

SEQ ID NO: 1341629 - RNA, 19 nt, Artificial Sequence
  Description of Artificial Sequence: Synthetic oligonucleotide
cucauguacucuuuuccgg

SEQ ID NO: 1341630 - RNA, 19 nt, Artificial Sequence
  Description of Artificial Sequence: Synthetic oligonucleotide
aaaacaguagccaacugua

SEQ ID NO: 1341631 - RNA, 19 nt, Artificial Sequence
  Description of Artificial Sequence: Synthetic oligonucleotide
aaaauauacuucaccccag

SEQ ID NO: 1341632 - RNA, 19 nt, Artificial Sequence
  Description of Artificial Sequence: Synthetic oligonucleotide
aaaccaggaauuucuacua

SEQ ID NO: 1341633 - RNA, 19 nt, Artificial Sequence
  Description of Artificial Sequence: Synthetic oligonucleotide
gaacuauaauauaaaccag

SEQ ID NO: 1341634 - RNA, 19 nt, Artificial Sequence
  Description of Artificial Sequence: Synthetic oligonucleotide
gaauuaucagucccuacca

SEQ ID NO: 1341635 - RNA, 19 nt, Artificial Sequence
  Description of Artificial Sequence: Synthetic oligonucleotide
gaagaacuagggaaaauac

SEQ ID NO: 1341636 - RNA, 19 nt, Artificial Sequence
  Description of Artificial Sequence: Synthetic oligonucleotide
gucccuaccaauaaaauuc

SEQ ID NO: 1341637 - RNA, 19 nt, Artificial Sequence
  Description of Artificial Sequence: Synthetic oligonucleotide
ucguggguggaaaauaaac

SEQ ID NO: 1341638 - RNA, 19 nt, Artificial Sequence
  Description of Artificial Sequence: Synthetic oligonucleotide
auaauauaaaccaggaauu

SEQ ID NO: 1341639 - RNA, 19 nt, Artificial Sequence
  Description of Artificial Sequence: Synthetic oligonucleotide
uccagagaagcgucgaacc

SEQ ID NO: 1341640 - RNA, 19 nt, Artificial Sequence
  Description of Artificial Sequence: Synthetic oligonucleotide
ucagucccuaccaauaaaa

SEQ ID NO: 1341641 - RNA, 19 nt, Artificial Sequence
  Description of Artificial Sequence: Synthetic oligonucleotide
agcaaaauaugaaucaccu

SEQ ID NO: 1341642 - RNA, 19 nt, Artificial Sequence
  Description of Artificial Sequence: Synthetic oligonucleotide
aucuggucauauucaauuc

SEQ ID NO: 1341643 - RNA, 19 nt, Artificial Sequence
  Description of Artificial Sequence: Synthetic oligonucleotide
acuauaauauaaaccagga

SEQ ID NO: 1341644 - RNA, 19 nt, Artificial Sequence
  Description of Artificial Sequence: Synthetic oligonucleotide
uggauguauauacauuaaa

SEQ ID NO: 1341645 - RNA, 19 nt, Artificial Sequence
  Description of Artificial Sequence: Synthetic oligonucleotide
guuacaugugauaaccaag

SEQ ID NO: 1341646 - RNA, 19 nt, Artificial Sequence
  Description of Artificial Sequence: Synthetic oligonucleotide
aaccaggaauuucuacuag

SEQ ID NO: 1341647 - RNA, 19 nt, Artificial Sequence
  Description of Artificial Sequence: Synthetic oligonucleotide
ucugugacuuuagaaauac

SEQ ID NO: 1341648 - RNA, 19 nt, Artificial Sequence
  Description of Artificial Sequence: Synthetic oligonucleotide
aagcgucgaaccucaacuc

SEQ ID NO: 1341649 - RNA, 19 nt, Artificial Sequence
  Description of Artificial Sequence: Synthetic oligonucleotide
uguguggauuaagucagcg

SEQ ID NO: 1341650 - RNA, 19 nt, Artificial Sequence
  Description of Artificial Sequence: Synthetic oligonucleotide
aaacuauaucaaugucaag

SEQ ID NO: 1341651 - RNA, 19 nt, Artificial Sequence
  Description of Artificial Sequence: Synthetic oligonucleotide
ucauguacucuuuuccgga

SEQ ID NO: 1341652 - RNA, 19 nt, Artificial Sequence
  Description of Artificial Sequence: Synthetic oligonucleotide
agaaugacacauugaauau

SEQ ID NO: 1341653 - RNA, 19 nt, Artificial Sequence
  Description of Artificial Sequence: Synthetic oligonucleotide
aaaaugguauguguuuaca

SEQ ID NO: 1341654 - RNA, 19 nt, Artificial Sequence
  Description of Artificial Sequence: Synthetic oligonucleotide
uuaucagucccuaccaaua

SEQ ID NO: 1341655 - RNA, 19 nt, Artificial Sequence
  Description of Artificial Sequence: Synthetic oligonucleotide
gaacuagggaaaauacuag

SEQ ID NO: 1341656 - RNA, 19 nt, Artificial Sequence
  Description of Artificial Sequence: Synthetic oligonucleotide
uccacuaguuagaagcaac

SEQ ID NO: 1341657 - RNA, 19 nt, Artificial Sequence
  Description of Artificial Sequence: Synthetic oligonucleotide
cuguacaacuaaaaggcuc

SEQ ID NO: 1341658 - RNA, 19 nt, Artificial Sequence
  Description of Artificial Sequence: Synthetic oligonucleotide
aagaacuagcucuucuaaa

SEQ ID NO: 1341659 - RNA, 19 nt, Artificial Sequence
  Description of Artificial Sequence: Synthetic oligonucleotide
ugcagauuagcugugugga

SEQ ID NO: 1341660 - RNA, 19 nt, Artificial Sequence
  Description of Artificial Sequence: Synthetic oligonucleotide
aucuaugcaguuuaauaau

SEQ ID NO: 1341661 - RNA, 19 nt, Artificial Sequence
  Description of Artificial Sequence: Synthetic oligonucleotide
auacugcuaccucccagcc

SEQ ID NO: 1341662 - RNA, 19 nt, Artificial Sequence
  Description of Artificial Sequence: Synthetic oligonucleotide
uuguuggcacuauuuacug

SEQ ID NO: 1341663 - RNA, 19 nt, Artificial Sequence
  Description of Artificial Sequence: Synthetic oligonucleotide
cuuauugggaauuucuaaa

SEQ ID NO: 1341664 - RNA, 19 nt, Artificial Sequence
  Description of Artificial Sequence: Synthetic oligonucleotide
ugaaucaccuguacacaca

SEQ ID NO: 1341665 - RNA, 19 nt, Artificial Sequence
  Description of Artificial Sequence: Synthetic oligonucleotide
agaagcgucgaaccucaac

SEQ ID NO: 1341666 - RNA, 19 nt, Artificial Sequence
  Description of Artificial Sequence: Synthetic oligonucleotide
ucuguucuauacaguaacu

SEQ ID NO: 1341667 - RNA, 19 nt, Artificial Sequence
  Description of Artificial Sequence: Synthetic oligonucleotide
aauuaucagucccuaccaa

SEQ ID NO: 1341668 - RNA, 19 nt, Artificial Sequence
  Description of Artificial Sequence: Synthetic oligonucleotide
aaacaguagccaacuguac

SEQ ID NO: 1341669 - RNA, 19 nt, Artificial Sequence
  Description of Artificial Sequence: Synthetic oligonucleotide
agaacuagggaaaauacua

SEQ ID NO: 1341670 - RNA, 19 nt, Artificial Sequence
  Description of Artificial Sequence: Synthetic oligonucleotide
caaguaaagaauuaucagu

SEQ ID NO: 1341671 - RNA, 19 nt, Artificial Sequence
  Description of Artificial Sequence: Synthetic oligonucleotide
auuaucagucccuaccaau

SEQ ID NO: 1341672 - RNA, 19 nt, Artificial Sequence
  Description of Artificial Sequence: Synthetic oligonucleotide
auuguuggcacuauuuacu

SEQ ID NO: 1341673 - RNA, 19 nt, Artificial Sequence
  Description of Artificial Sequence: Synthetic oligonucleotide
auuuuauaguaaaugaauu

SEQ ID NO: 1341674 - RNA, 19 nt, Artificial Sequence
  Description of Artificial Sequence: Synthetic oligonucleotide
ugcaaaaugguauguguuu

SEQ ID NO: 1341675 - RNA, 19 nt, Artificial Sequence
  Description of Artificial Sequence: Synthetic oligonucleotide
acucuuuuccggaggagcc

SEQ ID NO: 1341676 - RNA, 19 nt, Artificial Sequence
  Description of Artificial Sequence: Synthetic oligonucleotide
uggauuaagucagcguucc

SEQ ID NO: 1341677 - RNA, 19 nt, Artificial Sequence
  Description of Artificial Sequence: Synthetic oligonucleotide
acaguaauaucuauaaauu

SEQ ID NO: 1341678 - RNA, 19 nt, Artificial Sequence
  Description of Artificial Sequence: Synthetic oligonucleotide
ugguuugagugaaaacaca

SEQ ID NO: 1341679 - RNA, 19 nt, Artificial Sequence
  Description of Artificial Sequence: Synthetic oligonucleotide
gugguaugcagauuagcug

SEQ ID NO: 1341680 - RNA, 19 nt, Artificial Sequence
  Description of Artificial Sequence: Synthetic oligonucleotide
aagucagcguuccacucca

SEQ ID NO: 1341681 - RNA, 19 nt, Artificial Sequence
  Description of Artificial Sequence: Synthetic oligonucleotide
uacuucaccccagucgugg

SEQ ID NO: 1341682 - RNA, 19 nt, Artificial Sequence
  Description of Artificial Sequence: Synthetic oligonucleotide
uccagaauaguaagugcaa

SEQ ID NO: 1341683 - RNA, 19 nt, Artificial Sequence
  Description of Artificial Sequence: Synthetic oligonucleotide
gaagcgucgaaccucaacu

SEQ ID NO: 1341684 - RNA, 19 nt, Artificial Sequence
  Description of Artificial Sequence: Synthetic oligonucleotide
agccaauguaaauaccuga

SEQ ID NO: 1341685 - RNA, 19 nt, Artificial Sequence
  Description of Artificial Sequence: Synthetic oligonucleotide
aguugaaauugguuuucug

SEQ ID NO: 1341686 - RNA, 19 nt, Artificial Sequence
  Description of Artificial Sequence: Synthetic oligonucleotide
ucccuaccaauaaaauuca

SEQ ID NO: 1341687 - RNA, 19 nt, Artificial Sequence
  Description of Artificial Sequence: Synthetic oligonucleotide
ccaaguaaagaauuaucag

SEQ ID NO: 1341688 - RNA, 19 nt, Artificial Sequence
  Description of Artificial Sequence: Synthetic oligonucleotide
caaaaugguauguguuuac

SEQ ID NO: 1341689 - RNA, 19 nt, Artificial Sequence
  Description of Artificial Sequence: Synthetic oligonucleotide
uuuuguccaaaagaucgac

SEQ ID NO: 1341690 - RNA, 19 nt, Artificial Sequence
  Description of Artificial Sequence: Synthetic oligonucleotide
uuauucaccagaguuccaa

SEQ ID NO: 1341691 - RNA, 19 nt, Artificial Sequence
  Description of Artificial Sequence: Synthetic oligonucleotide
uacucuuuuccggaggagc

SEQ ID NO: 1341692 - RNA, 19 nt, Artificial Sequence
  Description of Artificial Sequence: Synthetic oligonucleotide
cagagaaugacacauugaa

SEQ ID NO: 1341693 - RNA, 19 nt, Artificial Sequence
  Description of Artificial Sequence: Synthetic oligonucleotide
aaagaauuaucagucccua

SEQ ID NO: 1341694 - RNA, 19 nt, Artificial Sequence
  Description of Artificial Sequence: Synthetic oligonucleotide
uaauauaaaccaggaauuu

SEQ ID NO: 1341695 - RNA, 19 nt, Artificial Sequence
  Description of Artificial Sequence: Synthetic oligonucleotide
ucuauacaguaacugucau

SEQ ID NO: 1341696 - RNA, 19 nt, Artificial Sequence
  Description of Artificial Sequence: Synthetic oligonucleotide
ggcacaaucuguucuauac

SEQ ID NO: 1341697 - RNA, 19 nt, Artificial Sequence
  Description of Artificial Sequence: Synthetic oligonucleotide
cuacuagcuggcaggaaag

SEQ ID NO: 1341698 - RNA, 19 nt, Artificial Sequence
  Description of Artificial Sequence: Synthetic oligonucleotide
ucuuaccaagaagaacuag

SEQ ID NO: 1341699 - RNA, 19 nt, Artificial Sequence
  Description of Artificial Sequence: Synthetic oligonucleotide
uaucagucccuaccaauaa

SEQ ID NO: 1341700 - RNA, 19 nt, Artificial Sequence
  Description of Artificial Sequence: Synthetic oligonucleotide
ugcuuauugggaauuucua

SEQ ID NO: 1341701 - RNA, 19 nt, Artificial Sequence
  Description of Artificial Sequence: Synthetic oligonucleotide
acaauuuauauggcaguug

SEQ ID NO: 1341702 - RNA, 19 nt, Artificial Sequence
  Description of Artificial Sequence: Synthetic oligonucleotide
aguagccaacuguacaacu

SEQ ID NO: 1341703 - RNA, 19 nt, Artificial Sequence
  Description of Artificial Sequence: Synthetic oligonucleotide
ucuaaagcacugacuugga

SEQ ID NO: 1341704 - RNA, 19 nt, Artificial Sequence
  Description of Artificial Sequence: Synthetic oligonucleotide
aaauacuagcagagaauga

SEQ ID NO: 1341705 - RNA, 19 nt, Artificial Sequence
  Description of Artificial Sequence: Synthetic oligonucleotide
augcucauagaagaacuag

SEQ ID NO: 1341706 - RNA, 19 nt, Artificial Sequence
  Description of Artificial Sequence: Synthetic oligonucleotide
guccaaaagaucgacauaa

SEQ ID NO: 1341707 - RNA, 19 nt, Artificial Sequence
  Description of Artificial Sequence: Synthetic oligonucleotide
aaauacuaugagaguucuc

SEQ ID NO: 1341708 - RNA, 19 nt, Artificial Sequence
  Description of Artificial Sequence: Synthetic oligonucleotide
cuguucuauacaguaacug

SEQ ID NO: 1341709 - RNA, 19 nt, Artificial Sequence
  Description of Artificial Sequence: Synthetic oligonucleotide
cacuaccaaacauggauuc

SEQ ID NO: 1341710 - RNA, 19 nt, Artificial Sequence
  Description of Artificial Sequence: Synthetic oligonucleotide
gaugaacacuaucuaugca

SEQ ID NO: 1341711 - RNA, 19 nt, Artificial Sequence
  Description of Artificial Sequence: Synthetic oligonucleotide
auacuaugagaguucucca

SEQ ID NO: 1341712 - RNA, 19 nt, Artificial Sequence
  Description of Artificial Sequence: Synthetic oligonucleotide
gcucauuuuauaguaaaug

SEQ ID NO: 1341713 - RNA, 19 nt, Artificial Sequence
  Description of Artificial Sequence: Synthetic oligonucleotide
ugucaacagaaagauuaca

SEQ ID NO: 1341714 - RNA, 19 nt, Artificial Sequence
  Description of Artificial Sequence: Synthetic oligonucleotide
caaucuguucuauacagua

SEQ ID NO: 1341715 - RNA, 19 nt, Artificial Sequence
  Description of Artificial Sequence: Synthetic oligonucleotide
caaaacugcaaaaugguau

SEQ ID NO: 1341716 - RNA, 19 nt, Artificial Sequence
  Description of Artificial Sequence: Synthetic oligonucleotide
cacuauuuacugcuuccag

SEQ ID NO: 1341717 - RNA, 19 nt, Artificial Sequence
  Description of Artificial Sequence: Synthetic oligonucleotide
agugcuuauugggaauuuc

SEQ ID NO: 1341718 - RNA, 19 nt, Artificial Sequence
  Description of Artificial Sequence: Synthetic oligonucleotide
aaccucaacucugugacuu

SEQ ID NO: 1341719 - RNA, 19 nt, Artificial Sequence
  Description of Artificial Sequence: Synthetic oligonucleotide
cauguacucuuuuccggag

SEQ ID NO: 1341720 - RNA, 19 nt, Artificial Sequence
  Description of Artificial Sequence: Synthetic oligonucleotide
cuaaagcacugacuuggag

SEQ ID NO: 1341721 - RNA, 19 nt, Artificial Sequence
  Description of Artificial Sequence: Synthetic oligonucleotide
ugguauguguuuacagcaa

SEQ ID NO: 1341722 - RNA, 19 nt, Artificial Sequence
  Description of Artificial Sequence: Synthetic oligonucleotide
augaaguauuaacugucaa

SEQ ID NO: 1341723 - RNA, 19 nt, Artificial Sequence
  Description of Artificial Sequence: Synthetic oligonucleotide
acauggauucaaaauaaau

SEQ ID NO: 1341724 - RNA, 19 nt, Artificial Sequence
  Description of Artificial Sequence: Synthetic oligonucleotide
agaaaauuaugaaguauua

SEQ ID NO: 1341725 - RNA, 19 nt, Artificial Sequence
  Description of Artificial Sequence: Synthetic oligonucleotide
cauauuauacacaguggua

SEQ ID NO: 1341726 - RNA, 19 nt, Artificial Sequence
  Description of Artificial Sequence: Synthetic oligonucleotide
uccugucuaaauguccuca

SEQ ID NO: 1341727 - RNA, 19 nt, Artificial Sequence
  Description of Artificial Sequence: Synthetic oligonucleotide
gugguaucuguuguuagug

SEQ ID NO: 1341728 - RNA, 19 nt, Artificial Sequence
  Description of Artificial Sequence: Synthetic oligonucleotide
caguaauaucuauaaauua

SEQ ID NO: 1341729 - RNA, 19 nt, Artificial Sequence
  Description of Artificial Sequence: Synthetic oligonucleotide
aagugcaaaugguaaccua

SEQ ID NO: 1341730 - RNA, 19 nt, Artificial Sequence
  Description of Artificial Sequence: Synthetic oligonucleotide
guccuucaaguauaaacca

SEQ ID NO: 1341731 - RNA, 19 nt, Artificial Sequence
  Description of Artificial Sequence: Synthetic oligonucleotide
agauuagcuguguggauua

SEQ ID NO: 1341732 - RNA, 19 nt, Artificial Sequence
  Description of Artificial Sequence: Synthetic oligonucleotide
agauuccugucuaaauguc

SEQ ID NO: 1341733 - RNA, 19 nt, Artificial Sequence
  Description of Artificial Sequence: Synthetic oligonucleotide
aucaacaguccuucaagua

SEQ ID NO: 1341734 - RNA, 19 nt, Artificial Sequence
  Description of Artificial Sequence: Synthetic oligonucleotide
ucagcguuccacuccacua

SEQ ID NO: 1341735 - RNA, 19 nt, Artificial Sequence
  Description of Artificial Sequence: Synthetic oligonucleotide
cuauaauauaaaccaggaa

SEQ ID NO: 1341736 - RNA, 19 nt, Artificial Sequence
  Description of Artificial Sequence: Synthetic oligonucleotide
auaguaagugcaaauggua

SEQ ID NO: 1341737 - RNA, 19 nt, Artificial Sequence
  Description of Artificial Sequence: Synthetic oligonucleotide
auuagcuguguggauuaag

SEQ ID NO: 1341738 - RNA, 19 nt, Artificial Sequence
  Description of Artificial Sequence: Synthetic oligonucleotide
ggauguauauacauuaaaa

SEQ ID NO: 1341739 - RNA, 19 nt, Artificial Sequence
  Description of Artificial Sequence: Synthetic oligonucleotide
uguccaaaagaucgacaua

SEQ ID NO: 1341740 - RNA, 19 nt, Artificial Sequence
  Description of Artificial Sequence: Synthetic oligonucleotide
cuguaagugcuuauuggga

SEQ ID NO: 1341741 - RNA, 19 nt, Artificial Sequence
  Description of Artificial Sequence: Synthetic oligonucleotide
uccaaaagaucgacauaaa

SEQ ID NO: 1341742 - RNA, 19 nt, Artificial Sequence
  Description of Artificial Sequence: Synthetic oligonucleotide
gcuuccagaauaguaagug

SEQ ID NO: 1341743 - RNA, 19 nt, Artificial Sequence
  Description of Artificial Sequence: Synthetic oligonucleotide
uauucaccagaguuccaaa

SEQ ID NO: 1341744 - RNA, 19 nt, Artificial Sequence
  Description of Artificial Sequence: Synthetic oligonucleotide
agcgucgaaccucaacucu

SEQ ID NO: 1341745 - RNA, 19 nt, Artificial Sequence
  Description of Artificial Sequence: Synthetic oligonucleotide
gagugaaaacacacuacca

SEQ ID NO: 1341746 - RNA, 19 nt, Artificial Sequence
  Description of Artificial Sequence: Synthetic oligonucleotide
ccaaaagaucgacauaaac

SEQ ID NO: 1341747 - RNA, 19 nt, Artificial Sequence
  Description of Artificial Sequence: Synthetic oligonucleotide
agacaguaauaucuauaaa

SEQ ID NO: 1341748 - RNA, 19 nt, Artificial Sequence
  Description of Artificial Sequence: Synthetic oligonucleotide
aguaacugucauauugagu

SEQ ID NO: 1341749 - RNA, 19 nt, Artificial Sequence
  Description of Artificial Sequence: Synthetic oligonucleotide
cauuucuuaccaagaagaa

SEQ ID NO: 1341750 - RNA, 19 nt, Artificial Sequence
  Description of Artificial Sequence: Synthetic oligonucleotide
aaugcucauagaagaacua

SEQ ID NO: 1341751 - RNA, 19 nt, Artificial Sequence
  Description of Artificial Sequence: Synthetic oligonucleotide
cagugguaucuguuguuag

SEQ ID NO: 1341752 - RNA, 19 nt, Artificial Sequence
  Description of Artificial Sequence: Synthetic oligonucleotide
augugauaaccaaguaaag

SEQ ID NO: 1341753 - RNA, 19 nt, Artificial Sequence
  Description of Artificial Sequence: Synthetic oligonucleotide
cuaaaaggcucauuuuaua

SEQ ID NO: 1341754 - RNA, 19 nt, Artificial Sequence
  Description of Artificial Sequence: Synthetic oligonucleotide
uuagaagcaacagcuuauu

SEQ ID NO: 1341755 - RNA, 19 nt, Artificial Sequence
  Description of Artificial Sequence: Synthetic oligonucleotide
agaggcacaaucuguucua

SEQ ID NO: 1341756 - RNA, 19 nt, Artificial Sequence
  Description of Artificial Sequence: Synthetic oligonucleotide
gucacaguuagcagcacuc

SEQ ID NO: 1341757 - RNA, 19 nt, Artificial Sequence
  Description of Artificial Sequence: Synthetic oligonucleotide
uccaaagaaaaugcucaua

SEQ ID NO: 1341758 - RNA, 19 nt, Artificial Sequence
  Description of Artificial Sequence: Synthetic oligonucleotide
gggaauuucuaaagcacug

SEQ ID NO: 1341759 - RNA, 19 nt, Artificial Sequence
  Description of Artificial Sequence: Synthetic oligonucleotide
cuggaauuagaccacuugu

SEQ ID NO: 1341760 - RNA, 19 nt, Artificial Sequence
  Description of Artificial Sequence: Synthetic oligonucleotide
agagaagcgucgaaccuca

SEQ ID NO: 1341761 - RNA, 19 nt, Artificial Sequence
  Description of Artificial Sequence: Synthetic oligonucleotide
cuguuguuagugguuugag

SEQ ID NO: 1341762 - RNA, 19 nt, Artificial Sequence
  Description of Artificial Sequence: Synthetic oligonucleotide
cgaaccucaacucugugac

SEQ ID NO: 1341763 - RNA, 19 nt, Artificial Sequence
  Description of Artificial Sequence: Synthetic oligonucleotide
aucagucccuaccaauaaa

SEQ ID NO: 1341764 - RNA, 19 nt, Artificial Sequence
  Description of Artificial Sequence: Synthetic oligonucleotide
acuguacaacuaaaaggcu

SEQ ID NO: 1341765 - RNA, 19 nt, Artificial Sequence
  Description of Artificial Sequence: Synthetic oligonucleotide
ugucaagauuagguaacau

SEQ ID NO: 1341766 - RNA, 19 nt, Artificial Sequence
  Description of Artificial Sequence: Synthetic oligonucleotide
acaaucuguucuauacagu

SEQ ID NO: 1341767 - RNA, 19 nt, Artificial Sequence
  Description of Artificial Sequence: Synthetic oligonucleotide
aagcacugacuuggagagg

SEQ ID NO: 1341768 - RNA, 19 nt, Artificial Sequence
  Description of Artificial Sequence: Synthetic oligonucleotide
augucaagauuagguaaca

SEQ ID NO: 1341769 - RNA, 19 nt, Artificial Sequence
  Description of Artificial Sequence: Synthetic oligonucleotide
uuggucuauuaaagacagu

SEQ ID NO: 1341770 - RNA, 19 nt, Artificial Sequence
  Description of Artificial Sequence: Synthetic oligonucleotide
cagagaagcgucgaaccuc

SEQ ID NO: 1341771 - RNA, 19 nt, Artificial Sequence
  Description of Artificial Sequence: Synthetic oligonucleotide
caguuagcagcacucccuc

SEQ ID NO: 1341772 - RNA, 19 nt, Artificial Sequence
  Description of Artificial Sequence: Synthetic oligonucleotide
agauuagguaacauuucuu

SEQ ID NO: 1341773 - RNA, 19 nt, Artificial Sequence
  Description of Artificial Sequence: Synthetic oligonucleotide
gucauauugaguucauauu

SEQ ID NO: 1341774 - RNA, 19 nt, Artificial Sequence
  Description of Artificial Sequence: Synthetic oligonucleotide
guggauuaagucagcguuc

SEQ ID NO: 1341775 - RNA, 19 nt, Artificial Sequence
  Description of Artificial Sequence: Synthetic oligonucleotide
agcguuccacuccacuagu

SEQ ID NO: 1341776 - RNA, 19 nt, Artificial Sequence
  Description of Artificial Sequence: Synthetic oligonucleotide
uuuccggaggagccuucac

SEQ ID NO: 1341777 - RNA, 19 nt, Artificial Sequence
  Description of Artificial Sequence: Synthetic oligonucleotide
aaccuacuuccagaaucca

SEQ ID NO: 1341778 - RNA, 19 nt, Artificial Sequence
  Description of Artificial Sequence: Synthetic oligonucleotide
caaacaugacccaucuggu

SEQ ID NO: 1341779 - RNA, 19 nt, Artificial Sequence
  Description of Artificial Sequence: Synthetic oligonucleotide
agacaaggucacaguuagc

SEQ ID NO: 1341780 - RNA, 19 nt, Artificial Sequence
  Description of Artificial Sequence: Synthetic oligonucleotide
ggaauuucuaaagcacuga

SEQ ID NO: 1341781 - RNA, 19 nt, Artificial Sequence
  Description of Artificial Sequence: Synthetic oligonucleotide
cacacauauuuaagaggca

SEQ ID NO: 1341782 - RNA, 19 nt, Artificial Sequence
  Description of Artificial Sequence: Synthetic oligonucleotide
gguauguguuuacagcaaa

SEQ ID NO: 1341783 - RNA, 19 nt, Artificial Sequence
  Description of Artificial Sequence: Synthetic oligonucleotide
acaucgcaucagcucuauc

SEQ ID NO: 1341784 - RNA, 19 nt, Artificial Sequence
  Description of Artificial Sequence: Synthetic oligonucleotide
uacaacuaaaaggcucauu

SEQ ID NO: 1341785 - RNA, 19 nt, Artificial Sequence
  Description of Artificial Sequence: Synthetic oligonucleotide
guauguguuuacagcaaaa

SEQ ID NO: 1341786 - RNA, 19 nt, Artificial Sequence
  Description of Artificial Sequence: Synthetic oligonucleotide
ugcuggaauuagaccacuu

SEQ ID NO: 1341787 - RNA, 19 nt, Artificial Sequence
  Description of Artificial Sequence: Synthetic oligonucleotide
acacuaccaaacauggauu

SEQ ID NO: 1341788 - RNA, 19 nt, Artificial Sequence
  Description of Artificial Sequence: Synthetic oligonucleotide
gguaucuguuguuaguggu

SEQ ID NO: 1341789 - RNA, 19 nt, Artificial Sequence
  Description of Artificial Sequence: Synthetic oligonucleotide
aagugcuuauugggaauuu

SEQ ID NO: 1341790 - RNA, 19 nt, Artificial Sequence
  Description of Artificial Sequence: Synthetic oligonucleotide
ccugucuaaauguccucag

SEQ ID NO: 1341791 - RNA, 19 nt, Artificial Sequence
  Description of Artificial Sequence: Synthetic oligonucleotide
uuggcacuauuuacugcuu

SEQ ID NO: 1341792 - RNA, 19 nt, Artificial Sequence
  Description of Artificial Sequence: Synthetic oligonucleotide
guuagaagcaacagcuuau

SEQ ID NO: 1341793 - RNA, 19 nt, Artificial Sequence
  Description of Artificial Sequence: Synthetic oligonucleotide
agucguggguggaaaauaa

SEQ ID NO: 1341794 - RNA, 19 nt, Artificial Sequence
  Description of Artificial Sequence: Synthetic oligonucleotide
ucuuuuccggaggagccuu

SEQ ID NO: 1341795 - RNA, 19 nt, Artificial Sequence
  Description of Artificial Sequence: Synthetic oligonucleotide
gugaacaaucucauguacu

SEQ ID NO: 1341796 - RNA, 19 nt, Artificial Sequence
  Description of Artificial Sequence: Synthetic oligonucleotide
cauagaagaacuagcucuu

SEQ ID NO: 1341797 - RNA, 19 nt, Artificial Sequence
  Description of Artificial Sequence: Synthetic oligonucleotide
ggugguaugcagauuagcu

SEQ ID NO: 1341798 - RNA, 19 nt, Artificial Sequence
  Description of Artificial Sequence: Synthetic oligonucleotide
agaucgacauaaacuuuau

SEQ ID NO: 1341799 - RNA, 19 nt, Artificial Sequence
  Description of Artificial Sequence: Synthetic oligonucleotide
caguagccaacuguacaac

SEQ ID NO: 1341800 - RNA, 19 nt, Artificial Sequence
  Description of Artificial Sequence: Synthetic oligonucleotide
guagccaacuguacaacua

SEQ ID NO: 1341801 - RNA, 19 nt, Artificial Sequence
  Description of Artificial Sequence: Synthetic oligonucleotide
caaaaucacuagacaaggu

SEQ ID NO: 1341802 - RNA, 19 nt, Artificial Sequence
  Description of Artificial Sequence: Synthetic oligonucleotide
guaagugcuuauugggaau

SEQ ID NO: 1341803 - RNA, 19 nt, Artificial Sequence
  Description of Artificial Sequence: Synthetic oligonucleotide
caagaagaacuagggaaaa

SEQ ID NO: 1341804 - RNA, 19 nt, Artificial Sequence
  Description of Artificial Sequence: Synthetic oligonucleotide
aacugucaacagaaagauu

SEQ ID NO: 1341805 - RNA, 19 nt, Artificial Sequence
  Description of Artificial Sequence: Synthetic oligonucleotide
cucugugacuuuagaaaua

SEQ ID NO: 1341806 - RNA, 19 nt, Artificial Sequence
  Description of Artificial Sequence: Synthetic oligonucleotide
ugacccaucuggucauauu

SEQ ID NO: 1341807 - RNA, 19 nt, Artificial Sequence
  Description of Artificial Sequence: Synthetic oligonucleotide
aggucaguugaaauugguu

SEQ ID NO: 1341808 - RNA, 19 nt, Artificial Sequence
  Description of Artificial Sequence: Synthetic oligonucleotide
cgacauaaacuuuauuaga

SEQ ID NO: 1341809 - RNA, 19 nt, Artificial Sequence
  Description of Artificial Sequence: Synthetic oligonucleotide
aggaugcacuuguaccuuu

SEQ ID NO: 1341810 - RNA, 19 nt, Artificial Sequence
  Description of Artificial Sequence: Synthetic oligonucleotide
ccuaccaauaaaauucagu

SEQ ID NO: 1341811 - RNA, 19 nt, Artificial Sequence
  Description of Artificial Sequence: Synthetic oligonucleotide
guguggauuaagucagcgu

SEQ ID NO: 1341812 - RNA, 19 nt, Artificial Sequence
  Description of Artificial Sequence: Synthetic oligonucleotide
cuuuuccggaggagccuuc

SEQ ID NO: 1341813 - RNA, 19 nt, Artificial Sequence
  Description of Artificial Sequence: Synthetic oligonucleotide
ggcucaugugugaacaauc

SEQ ID NO: 1341814 - RNA, 19 nt, Artificial Sequence
  Description of Artificial Sequence: Synthetic oligonucleotide
gcucauagaagaacuagcu

SEQ ID NO: 1341815 - RNA, 19 nt, Artificial Sequence
  Description of Artificial Sequence: Synthetic oligonucleotide
ccacuaguuagaagcaaca

SEQ ID NO: 1341816 - RNA, 19 nt, Artificial Sequence
  Description of Artificial Sequence: Synthetic oligonucleotide
gcaaaaugguauguguuua

SEQ ID NO: 1341817 - RNA, 19 nt, Artificial Sequence
  Description of Artificial Sequence: Synthetic oligonucleotide
aggcacaaucuguucuaua

SEQ ID NO: 1341818 - RNA, 19 nt, Artificial Sequence
  Description of Artificial Sequence: Synthetic oligonucleotide
acacacuaccaaacaugga

SEQ ID NO: 1341819 - RNA, 19 nt, Artificial Sequence
  Description of Artificial Sequence: Synthetic oligonucleotide
gggugguaugcagauuagc

SEQ ID NO: 1341820 - RNA, 19 nt, Artificial Sequence
  Description of Artificial Sequence: Synthetic oligonucleotide
gaggucaguugaaauuggu

SEQ ID NO: 1341821 - RNA, 19 nt, Artificial Sequence
  Description of Artificial Sequence: Synthetic oligonucleotide
gucaacaaauggucccagu

SEQ ID NO: 1341822 - RNA, 19 nt, Artificial Sequence
  Description of Artificial Sequence: Synthetic oligonucleotide
gaaccucaacucugugacu

SEQ ID NO: 1341823 - RNA, 19 nt, Artificial Sequence
  Description of Artificial Sequence: Synthetic oligonucleotide
gcagagaaugacacauuga

SEQ ID NO: 1341824 - RNA, 19 nt, Artificial Sequence
  Description of Artificial Sequence: Synthetic oligonucleotide
gcgucgaaccucaacucug

SEQ ID NO: 1341825 - RNA, 19 nt, Artificial Sequence
  Description of Artificial Sequence: Synthetic oligonucleotide
auacuucaccccagucgug

SEQ ID NO: 1341826 - RNA, 19 nt, Artificial Sequence
  Description of Artificial Sequence: Synthetic oligonucleotide
gauuagcuguguggauuaa

SEQ ID NO: 1341827 - RNA, 19 nt, Artificial Sequence
  Description of Artificial Sequence: Synthetic oligonucleotide
gucagcguuccacuccacu

SEQ ID NO: 1341828 - RNA, 19 nt, Artificial Sequence
  Description of Artificial Sequence: Synthetic oligonucleotide
cagauuagcuguguggauu

SEQ ID NO: 1341829 - RNA, 19 nt, Artificial Sequence
  Description of Artificial Sequence: Synthetic oligonucleotide
cuccacuaguuagaagcaa

SEQ ID NO: 1341830 - RNA, 19 nt, Artificial Sequence
  Description of Artificial Sequence: Synthetic oligonucleotide
cagucccuaccaauaaaau

SEQ ID NO: 1341831 - RNA, 19 nt, Artificial Sequence
  Description of Artificial Sequence: Synthetic oligonucleotide
gucguggguggaaaauaaa

SEQ ID NO: 1341832 - RNA, 19 nt, Artificial Sequence
  Description of Artificial Sequence: Synthetic oligonucleotide
ggggugguaugcagauuag

SEQ ID NO: 1341833 - RNA, 19 nt, Artificial Sequence
  Description of Artificial Sequence: Synthetic oligonucleotide
cagucguggguggaaaaua

SEQ ID NO: 1341834 - RNA, 19 nt, Artificial Sequence
  Description of Artificial Sequence: Synthetic oligonucleotide
acacaucgcaucagcucua

SEQ ID NO: 1341835 - RNA, 19 nt, Artificial Sequence
  Description of Artificial Sequence: Synthetic oligonucleotide
gguaaccuacuuccagaau

SEQ ID NO: 1341836 - RNA, 19 nt, Artificial Sequence
  Description of Artificial Sequence: Synthetic oligonucleotide
ggggcuuauuguuggcacu

SEQ ID NO: 1341837 - RNA, 19 nt, Artificial Sequence
  Description of Artificial Sequence: Synthetic oligonucleotide
ccaucaaucccugccugga

SEQ ID NO: 1341838 - RNA, 19 nt, Artificial Sequence
  Description of Artificial Sequence: Synthetic oligonucleotide
cuucaccccagucgugggu

SEQ ID NO: 1341839 - RNA, 19 nt, Artificial Sequence
  Description of Artificial Sequence: Synthetic oligonucleotide
cucuuuuccggaggagccu

SEQ ID NO: 1341840 - RNA, 19 nt, Artificial Sequence
  Description of Artificial Sequence: Synthetic oligonucleotide
caucaaucccugccuggau

SEQ ID NO: 1341841 - RNA, 19 nt, Artificial Sequence
  Description of Artificial Sequence: Synthetic oligonucleotide
gcuuauuguuggcacuauu

SEQ ID NO: 1341842 - RNA, 19 nt, Artificial Sequence
  Description of Artificial Sequence: Synthetic oligonucleotide
accccagucguggguggaa

SEQ ID NO: 1341843 - RNA, 19 nt, Artificial Sequence
  Description of Artificial Sequence: Synthetic oligonucleotide
gcacugacuuggagaggcc

SEQ ID NO: 1341844 - RNA, 19 nt, Artificial Sequence
  Description of Artificial Sequence: Synthetic oligonucleotide
cguuccacuccacuaguua

SEQ ID NO: 1341845 - RNA, 19 nt, Artificial Sequence
  Description of Artificial Sequence: Synthetic oligonucleotide
cugcuggaauuagaccacu

SEQ ID NO: 1341846 - RNA, 19 nt, Artificial Sequence
  Description of Artificial Sequence: Synthetic oligonucleotide
gagaagcgucgaaccucaa

SEQ ID NO: 1341847 - RNA, 19 nt, Artificial Sequence
  Description of Artificial Sequence: Synthetic oligonucleotide
cacaucgcaucagcucuau

SEQ ID NO: 1341848 - RNA, 19 nt, Artificial Sequence
  Description of Artificial Sequence: Synthetic oligonucleotide
cccagucguggguggaaaa

SEQ ID NO: 1341849 - RNA, 19 nt, Artificial Sequence
  Description of Artificial Sequence: Synthetic oligonucleotide
ccucccagccaauguaaau

SEQ ID NO: 1341850 - RNA, 19 nt, Artificial Sequence
  Description of Artificial Sequence: Synthetic oligonucleotide
cgucgaaccucaacucugu

SEQ ID NO: 1341851 - RNA, 19 nt, Artificial Sequence
  Description of Artificial Sequence: Synthetic oligonucleotide
ccagucguggguggaaaau

SEQ ID NO: 1341852 - RNA, 19 nt, Artificial Sequence
  Description of Artificial Sequence: Synthetic oligonucleotide
ccccagucguggguggaaa

SEQ ID NO: 1341853 - RNA, 19 nt, Artificial Sequence
  Description of Artificial Sequence: Synthetic oligonucleotide
gcguuccacuccacuaguu

SEQ ID NO: 1341854 - RNA, 19 nt, Artificial Sequence
  Description of Artificial Sequence: Synthetic oligonucleotide
acuugaaucaaucaguggg

SEQ ID NO: 1341855 - RNA, 19 nt, Artificial Sequence
  Description of Artificial Sequence: Synthetic oligonucleotide
aauuuagaugcucuguaac

SEQ ID NO: 1341856 - RNA, 19 nt, Artificial Sequence
  Description of Artificial Sequence: Synthetic oligonucleotide
uauaucaugcuucuuagca

SEQ ID NO: 1341857 - RNA, 19 nt, Artificial Sequence
  Description of Artificial Sequence: Synthetic oligonucleotide
aauuauaucaugcuucuua

SEQ ID NO: 1341858 - RNA, 19 nt, Artificial Sequence
  Description of Artificial Sequence: Synthetic oligonucleotide
auaaaggauagccacagag

SEQ ID NO: 1341859 - RNA, 19 nt, Artificial Sequence
  Description of Artificial Sequence: Synthetic oligonucleotide
gcuuaugucaucuucaucg

SEQ ID NO: 1341860 - RNA, 19 nt, Artificial Sequence
  Description of Artificial Sequence: Synthetic oligonucleotide
uuuaaguucagaguaaaca

SEQ ID NO: 1341861 - RNA, 19 nt, Artificial Sequence
  Description of Artificial Sequence: Synthetic oligonucleotide
ugauguuucgauuugacaa

SEQ ID NO: 1341862 - RNA, 19 nt, Artificial Sequence
  Description of Artificial Sequence: Synthetic oligonucleotide
uguucuuuagaacucgaag

SEQ ID NO: 1341863 - RNA, 19 nt, Artificial Sequence
  Description of Artificial Sequence: Synthetic oligonucleotide
uuagggaugacuccgagcu

SEQ ID NO: 1341864 - RNA, 19 nt, Artificial Sequence
  Description of Artificial Sequence: Synthetic oligonucleotide
ucugacauaaaggauagcc

SEQ ID NO: 1341865 - RNA, 19 nt, Artificial Sequence
  Description of Artificial Sequence: Synthetic oligonucleotide
aaguucagaguaaacaucg

SEQ ID NO: 1341866 - RNA, 19 nt, Artificial Sequence
  Description of Artificial Sequence: Synthetic oligonucleotide
ugugcaguccuucauacag

SEQ ID NO: 1341867 - RNA, 19 nt, Artificial Sequence
  Description of Artificial Sequence: Synthetic oligonucleotide
ucaguaauaucauagacuu

SEQ ID NO: 1341868 - RNA, 19 nt, Artificial Sequence
  Description of Artificial Sequence: Synthetic oligonucleotide
uguaaucugaagaggaccc

SEQ ID NO: 1341869 - RNA, 19 nt, Artificial Sequence
  Description of Artificial Sequence: Synthetic oligonucleotide
ugaugguuaaauuuucaag

SEQ ID NO: 1341870 - RNA, 19 nt, Artificial Sequence
  Description of Artificial Sequence: Synthetic oligonucleotide
ucaaucagugggaagcugg

SEQ ID NO: 1341871 - RNA, 19 nt, Artificial Sequence
  Description of Artificial Sequence: Synthetic oligonucleotide
agauuuggcaaauuugguc

SEQ ID NO: 1341872 - RNA, 19 nt, Artificial Sequence
  Description of Artificial Sequence: Synthetic oligonucleotide
agcgauuaaaguccauucc

SEQ ID NO: 1341873 - RNA, 19 nt, Artificial Sequence
  Description of Artificial Sequence: Synthetic oligonucleotide
uauccguuuucuaaucugg

SEQ ID NO: 1341874 - RNA, 19 nt, Artificial Sequence
  Description of Artificial Sequence: Synthetic oligonucleotide
uuugaugauggaccgcucg

SEQ ID NO: 1341875 - RNA, 19 nt, Artificial Sequence
  Description of Artificial Sequence: Synthetic oligonucleotide
uuaaguucagaguaaacau

SEQ ID NO: 1341876 - RNA, 19 nt, Artificial Sequence
  Description of Artificial Sequence: Synthetic oligonucleotide
gauauaguguccucuguag

SEQ ID NO: 1341877 - RNA, 19 nt, Artificial Sequence
  Description of Artificial Sequence: Synthetic oligonucleotide
aaaauuuagaugcucugua

SEQ ID NO: 1341878 - RNA, 19 nt, Artificial Sequence
  Description of Artificial Sequence: Synthetic oligonucleotide
ucuauacuucuguuuaggg

SEQ ID NO: 1341879 - RNA, 19 nt, Artificial Sequence
  Description of Artificial Sequence: Synthetic oligonucleotide
ugacauaaaggauagccac

SEQ ID NO: 1341880 - RNA, 19 nt, Artificial Sequence
  Description of Artificial Sequence: Synthetic oligonucleotide
uucgauuugacaaucugaa

SEQ ID NO: 1341881 - RNA, 19 nt, Artificial Sequence
  Description of Artificial Sequence: Synthetic oligonucleotide
cugaauuauaucaugcuuc

SEQ ID NO: 1341882 - RNA, 19 nt, Artificial Sequence
  Description of Artificial Sequence: Synthetic oligonucleotide
aauaucugcugcuguaaug

SEQ ID NO: 1341883 - RNA, 19 nt, Artificial Sequence
  Description of Artificial Sequence: Synthetic oligonucleotide
uuucgauuugacaaucuga

SEQ ID NO: 1341884 - RNA, 19 nt, Artificial Sequence
  Description of Artificial Sequence: Synthetic oligonucleotide
aacaucgccuauuguaauc

SEQ ID NO: 1341885 - RNA, 19 nt, Artificial Sequence
  Description of Artificial Sequence: Synthetic oligonucleotide
ucuaaucugguucugggaa

SEQ ID NO: 1341886 - RNA, 19 nt, Artificial Sequence
  Description of Artificial Sequence: Synthetic oligonucleotide
ugaugaacaucccacacuc

SEQ ID NO: 1341887 - RNA, 19 nt, Artificial Sequence
  Description of Artificial Sequence: Synthetic oligonucleotide
agaguuugaugauggaccg

SEQ ID NO: 1341888 - RNA, 19 nt, Artificial Sequence
  Description of Artificial Sequence: Synthetic oligonucleotide
auaucugcugcuguaaugg

SEQ ID NO: 1341889 - RNA, 19 nt, Artificial Sequence
  Description of Artificial Sequence: Synthetic oligonucleotide
aaacacauucucuccuggg

SEQ ID NO: 1341890 - RNA, 19 nt, Artificial Sequence
  Description of Artificial Sequence: Synthetic oligonucleotide
accucuggcacacugcgcc

SEQ ID NO: 1341891 - RNA, 19 nt, Artificial Sequence
  Description of Artificial Sequence: Synthetic oligonucleotide
aacaccacagcgauuaaag

SEQ ID NO: 1341892 - RNA, 19 nt, Artificial Sequence
  Description of Artificial Sequence: Synthetic oligonucleotide
guaaguuugccuuugcaac

SEQ ID NO: 1341893 - RNA, 19 nt, Artificial Sequence
  Description of Artificial Sequence: Synthetic oligonucleotide
uuuucaaggacuauccguu

SEQ ID NO: 1341894 - RNA, 19 nt, Artificial Sequence
  Description of Artificial Sequence: Synthetic oligonucleotide
uaagauauaguguccucug

SEQ ID NO: 1341895 - RNA, 19 nt, Artificial Sequence
  Description of Artificial Sequence: Synthetic oligonucleotide
uugcuaauccccacaagag

SEQ ID NO: 1341896 - RNA, 19 nt, Artificial Sequence
  Description of Artificial Sequence: Synthetic oligonucleotide
auuuagaugcucuguaaca

SEQ ID NO: 1341897 - RNA, 19 nt, Artificial Sequence
  Description of Artificial Sequence: Synthetic oligonucleotide
uauugguuuuaguagaaau

SEQ ID NO: 1341898 - RNA, 19 nt, Artificial Sequence
  Description of Artificial Sequence: Synthetic oligonucleotide
uguaauggcgucuuugaaa

SEQ ID NO: 1341899 - RNA, 19 nt, Artificial Sequence
  Description of Artificial Sequence: Synthetic oligonucleotide
auaucaugcuucuuagcag

SEQ ID NO: 1341900 - RNA, 19 nt, Artificial Sequence
  Description of Artificial Sequence: Synthetic oligonucleotide
ugguuucaggcacacagag

SEQ ID NO: 1341901 - RNA, 19 nt, Artificial Sequence
  Description of Artificial Sequence: Synthetic oligonucleotide
uccugaaaugcucagcacu

SEQ ID NO: 1341902 - RNA, 19 nt, Artificial Sequence
  Description of Artificial Sequence: Synthetic oligonucleotide
uuuucuaaucugguucugg

SEQ ID NO: 1341903 - RNA, 19 nt, Artificial Sequence
  Description of Artificial Sequence: Synthetic oligonucleotide
uuaagauauaguguccucu

SEQ ID NO: 1341904 - RNA, 19 nt, Artificial Sequence
  Description of Artificial Sequence: Synthetic oligonucleotide
aacuaccugccucacagcu

SEQ ID NO: 1341905 - RNA, 19 nt, Artificial Sequence
  Description of Artificial Sequence: Synthetic oligonucleotide
aguaaguuugccuuugcaa

SEQ ID NO: 1341906 - RNA, 19 nt, Artificial Sequence
  Description of Artificial Sequence: Synthetic oligonucleotide
gauauggugaguagaauuc

SEQ ID NO: 1341907 - RNA, 19 nt, Artificial Sequence
  Description of Artificial Sequence: Synthetic oligonucleotide
cuucugacauaaaggauag

SEQ ID NO: 1341908 - RNA, 19 nt, Artificial Sequence
  Description of Artificial Sequence: Synthetic oligonucleotide
uuguaaucugaagaggacc

SEQ ID NO: 1341909 - RNA, 19 nt, Artificial Sequence
  Description of Artificial Sequence: Synthetic oligonucleotide
guaaacaucgccuauugua

SEQ ID NO: 1341910 - RNA, 19 nt, Artificial Sequence
  Description of Artificial Sequence: Synthetic oligonucleotide
uuuauugguuuuaguagaa

SEQ ID NO: 1341911 - RNA, 19 nt, Artificial Sequence
  Description of Artificial Sequence: Synthetic oligonucleotide
uguguaaauaccacauuuu

SEQ ID NO: 1341912 - RNA, 19 nt, Artificial Sequence
  Description of Artificial Sequence: Synthetic oligonucleotide
guucagaguaaacaucgcc

SEQ ID NO: 1341913 - RNA, 19 nt, Artificial Sequence
  Description of Artificial Sequence: Synthetic oligonucleotide
ugagccggagugaugaaca

SEQ ID NO: 1341914 - RNA, 19 nt, Artificial Sequence
  Description of Artificial Sequence: Synthetic oligonucleotide
caaauuugguccugaaaug

SEQ ID NO: 1341915 - RNA, 19 nt, Artificial Sequence
  Description of Artificial Sequence: Synthetic oligonucleotide
ucaucaagguuguucugag

SEQ ID NO: 1341916 - RNA, 19 nt, Artificial Sequence
  Description of Artificial Sequence: Synthetic oligonucleotide
uuaauggccguaccugagc

SEQ ID NO: 1341917 - RNA, 19 nt, Artificial Sequence
  Description of Artificial Sequence: Synthetic oligonucleotide
uggaguuuugggaauuugu

SEQ ID NO: 1341918 - RNA, 19 nt, Artificial Sequence
  Description of Artificial Sequence: Synthetic oligonucleotide
uucuaaauaugaugguuaa

SEQ ID NO: 1341919 - RNA, 19 nt, Artificial Sequence
  Description of Artificial Sequence: Synthetic oligonucleotide
auuuaagauauaguguccu

SEQ ID NO: 1341920 - RNA, 19 nt, Artificial Sequence
  Description of Artificial Sequence: Synthetic oligonucleotide
gguucugggaacuugaauc

SEQ ID NO: 1341921 - RNA, 19 nt, Artificial Sequence
  Description of Artificial Sequence: Synthetic oligonucleotide
ugaaucaaucagugggaag

SEQ ID NO: 1341922 - RNA, 19 nt, Artificial Sequence
  Description of Artificial Sequence: Synthetic oligonucleotide
uagaacucgaaguaaguuu

SEQ ID NO: 1341923 - RNA, 19 nt, Artificial Sequence
  Description of Artificial Sequence: Synthetic oligonucleotide
uuucaagcucucauaggug

SEQ ID NO: 1341924 - RNA, 19 nt, Artificial Sequence
  Description of Artificial Sequence: Synthetic oligonucleotide
uuuagaugcucuguaacaa

SEQ ID NO: 1341925 - RNA, 19 nt, Artificial Sequence
  Description of Artificial Sequence: Synthetic oligonucleotide
gauuugacaaucugaaagu

SEQ ID NO: 1341926 - RNA, 19 nt, Artificial Sequence
  Description of Artificial Sequence: Synthetic oligonucleotide
uuucggagaaugcuucuga

SEQ ID NO: 1341927 - RNA, 19 nt, Artificial Sequence
  Description of Artificial Sequence: Synthetic oligonucleotide
agaacucgaaguaaguuug

SEQ ID NO: 1341928 - RNA, 19 nt, Artificial Sequence
  Description of Artificial Sequence: Synthetic oligonucleotide
guaauggcgucuuugaaaa

SEQ ID NO: 1341929 - RNA, 19 nt, Artificial Sequence
  Description of Artificial Sequence: Synthetic oligonucleotide
uuauaucaugcuucuuagc

SEQ ID NO: 1341930 - RNA, 19 nt, Artificial Sequence
  Description of Artificial Sequence: Synthetic oligonucleotide
aggacuauccguuuucuaa

SEQ ID NO: 1341931 - RNA, 19 nt, Artificial Sequence
  Description of Artificial Sequence: Synthetic oligonucleotide
ugcacuacuucuccagagc

SEQ ID NO: 1341932 - RNA, 19 nt, Artificial Sequence
  Description of Artificial Sequence: Synthetic oligonucleotide
uagacuuuauugguuuuag

SEQ ID NO: 1341933 - RNA, 19 nt, Artificial Sequence
  Description of Artificial Sequence: Synthetic oligonucleotide
aagguguucuuuagaacuc

SEQ ID NO: 1341934 - RNA, 19 nt, Artificial Sequence
  Description of Artificial Sequence: Synthetic oligonucleotide
ucuaucuuccugaauuaua

SEQ ID NO: 1341935 - RNA, 19 nt, Artificial Sequence
  Description of Artificial Sequence: Synthetic oligonucleotide
uuuagggaugacuccgagc

SEQ ID NO: 1341936 - RNA, 19 nt, Artificial Sequence
  Description of Artificial Sequence: Synthetic oligonucleotide
auucuauacuucuguuuag

SEQ ID NO: 1341937 - RNA, 19 nt, Artificial Sequence
  Description of Artificial Sequence: Synthetic oligonucleotide
acgacaucgcuguagugag

SEQ ID NO: 1341938 - RNA, 19 nt, Artificial Sequence
  Description of Artificial Sequence: Synthetic oligonucleotide
cacucauggauccucacug

SEQ ID NO: 1341939 - RNA, 19 nt, Artificial Sequence
  Description of Artificial Sequence: Synthetic oligonucleotide
ucucgaacccauacuggag

SEQ ID NO: 1341940 - RNA, 19 nt, Artificial Sequence
  Description of Artificial Sequence: Synthetic oligonucleotide
gacaucgcuguagugagcc

SEQ ID NO: 1341941 - RNA, 19 nt, Artificial Sequence
  Description of Artificial Sequence: Synthetic oligonucleotide
cgauuugacaaucugaaag

SEQ ID NO: 1341942 - RNA, 19 nt, Artificial Sequence
  Description of Artificial Sequence: Synthetic oligonucleotide
uggucauuucuucauuuaa

SEQ ID NO: 1341943 - RNA, 19 nt, Artificial Sequence
  Description of Artificial Sequence: Synthetic oligonucleotide
aaaaguccaggcaauacuu

SEQ ID NO: 1341944 - RNA, 19 nt, Artificial Sequence
  Description of Artificial Sequence: Synthetic oligonucleotide
ucagaguaaacaucgccua

SEQ ID NO: 1341945 - RNA, 19 nt, Artificial Sequence
  Description of Artificial Sequence: Synthetic oligonucleotide
aggacauaccugcaccggg

SEQ ID NO: 1341946 - RNA, 19 nt, Artificial Sequence
  Description of Artificial Sequence: Synthetic oligonucleotide
ucaaggacuauccguuuuc

SEQ ID NO: 1341947 - RNA, 19 nt, Artificial Sequence
  Description of Artificial Sequence: Synthetic oligonucleotide
cuauccguuuucuaaucug

SEQ ID NO: 1341948 - RNA, 19 nt, Artificial Sequence
  Description of Artificial Sequence: Synthetic oligonucleotide
aauuugguccugaaaugcu

SEQ ID NO: 1341949 - RNA, 19 nt, Artificial Sequence
  Description of Artificial Sequence: Synthetic oligonucleotide
auauaguguccucuguaga

SEQ ID NO: 1341950 - RNA, 19 nt, Artificial Sequence
  Description of Artificial Sequence: Synthetic oligonucleotide
cuugaaucaaucaguggga

SEQ ID NO: 1341951 - RNA, 19 nt, Artificial Sequence
  Description of Artificial Sequence: Synthetic oligonucleotide
accacaacuaccugccuca

SEQ ID NO: 1341952 - RNA, 19 nt, Artificial Sequence
  Description of Artificial Sequence: Synthetic oligonucleotide
cuuaauggccguaccugag

SEQ ID NO: 1341953 - RNA, 19 nt, Artificial Sequence
  Description of Artificial Sequence: Synthetic oligonucleotide
uaggaauuccucugugaug

SEQ ID NO: 1341954 - RNA, 19 nt, Artificial Sequence
  Description of Artificial Sequence: Synthetic oligonucleotide
ucauggauccucacuggcu

SEQ ID NO: 1341955 - RNA, 19 nt, Artificial Sequence
  Description of Artificial Sequence: Synthetic oligonucleotide
uuagcagcugguucuaaau

SEQ ID NO: 1341956 - RNA, 19 nt, Artificial Sequence
  Description of Artificial Sequence: Synthetic oligonucleotide
acucgaaguaaguuugccu

SEQ ID NO: 1341957 - RNA, 19 nt, Artificial Sequence
  Description of Artificial Sequence: Synthetic oligonucleotide
accuugguuagauuuggca

SEQ ID NO: 1341958 - RNA, 19 nt, Artificial Sequence
  Description of Artificial Sequence: Synthetic oligonucleotide
caugccgaaacacauucuc

SEQ ID NO: 1341959 - RNA, 19 nt, Artificial Sequence
  Description of Artificial Sequence: Synthetic oligonucleotide
ugccgaaacacauucucuc

SEQ ID NO: 1341960 - RNA, 19 nt, Artificial Sequence
  Description of Artificial Sequence: Synthetic oligonucleotide
uagugagccggagugauga

SEQ ID NO: 1341961 - RNA, 19 nt, Artificial Sequence
  Description of Artificial Sequence: Synthetic oligonucleotide
caaucagugggaagcuggg

SEQ ID NO: 1341962 - RNA, 19 nt, Artificial Sequence
  Description of Artificial Sequence: Synthetic oligonucleotide
ucuugcuaauccccacaag

SEQ ID NO: 1341963 - RNA, 19 nt, Artificial Sequence
  Description of Artificial Sequence: Synthetic oligonucleotide
cuaaauaugaugguuaaau

SEQ ID NO: 1341964 - RNA, 19 nt, Artificial Sequence
  Description of Artificial Sequence: Synthetic oligonucleotide
aaacaucgccuauuguaau

SEQ ID NO: 1341965 - RNA, 19 nt, Artificial Sequence
  Description of Artificial Sequence: Synthetic oligonucleotide
gacuuggaaccuugguuag

SEQ ID NO: 1341966 - RNA, 19 nt, Artificial Sequence
  Description of Artificial Sequence: Synthetic oligonucleotide
uugaugauggaccgcucgu

SEQ ID NO: 1341967 - RNA, 19 nt, Artificial Sequence
  Description of Artificial Sequence: Synthetic oligonucleotide
uccagauauggugaguaga

SEQ ID NO: 1341968 - RNA, 19 nt, Artificial Sequence
  Description of Artificial Sequence: Synthetic oligonucleotide
ucacucauggauccucacu

SEQ ID NO: 1341969 - RNA, 19 nt, Artificial Sequence
  Description of Artificial Sequence: Synthetic oligonucleotide
caagguguucuuuagaacu

SEQ ID NO: 1341970 - RNA, 19 nt, Artificial Sequence
  Description of Artificial Sequence: Synthetic oligonucleotide
caaucuuggccauacaaaa

SEQ ID NO: 1341971 - RNA, 19 nt, Artificial Sequence
  Description of Artificial Sequence: Synthetic oligonucleotide
uuugcaccgcaguuucuag

SEQ ID NO: 1341972 - RNA, 19 nt, Artificial Sequence
  Description of Artificial Sequence: Synthetic oligonucleotide
acuauccguuuucuaaucu

SEQ ID NO: 1341973 - RNA, 19 nt, Artificial Sequence
  Description of Artificial Sequence: Synthetic oligonucleotide
gaugacuccgagcuucuuc

SEQ ID NO: 1341974 - RNA, 19 nt, Artificial Sequence
  Description of Artificial Sequence: Synthetic oligonucleotide
ucgccuauuguaaucugaa

SEQ ID NO: 1341975 - RNA, 19 nt, Artificial Sequence
  Description of Artificial Sequence: Synthetic oligonucleotide
uccacgacaucgcuguagu

SEQ ID NO: 1341976 - RNA, 19 nt, Artificial Sequence
  Description of Artificial Sequence: Synthetic oligonucleotide
agagugaccucuggcacac

SEQ ID NO: 1341977 - RNA, 19 nt, Artificial Sequence
  Description of Artificial Sequence: Synthetic oligonucleotide
uuagaacucgaaguaaguu

SEQ ID NO: 1341978 - RNA, 19 nt, Artificial Sequence
  Description of Artificial Sequence: Synthetic oligonucleotide
guucugggaacuugaauca

SEQ ID NO: 1341979 - RNA, 19 nt, Artificial Sequence
  Description of Artificial Sequence: Synthetic oligonucleotide
uccuuugcaccgcaguuuc

SEQ ID NO: 1341980 - RNA, 19 nt, Artificial Sequence
  Description of Artificial Sequence: Synthetic oligonucleotide
cuuuaggaauuccucugug

SEQ ID NO: 1341981 - RNA, 19 nt, Artificial Sequence
  Description of Artificial Sequence: Synthetic oligonucleotide
auuuggcaaauuugguccu

SEQ ID NO: 1341982 - RNA, 19 nt, Artificial Sequence
  Description of Artificial Sequence: Synthetic oligonucleotide
cuugguuagauuuggcaaa

SEQ ID NO: 1341983 - RNA, 19 nt, Artificial Sequence
  Description of Artificial Sequence: Synthetic oligonucleotide
aguucagaguaaacaucgc

SEQ ID NO: 1341984 - RNA, 19 nt, Artificial Sequence
  Description of Artificial Sequence: Synthetic oligonucleotide
uuuucggagaaugcuucug

SEQ ID NO: 1341985 - RNA, 19 nt, Artificial Sequence
  Description of Artificial Sequence: Synthetic oligonucleotide
aaguuugccuuugcaaccu

SEQ ID NO: 1341986 - RNA, 19 nt, Artificial Sequence
  Description of Artificial Sequence: Synthetic oligonucleotide
aaccuugguuagauuuggc

SEQ ID NO: 1341987 - RNA, 19 nt, Artificial Sequence
  Description of Artificial Sequence: Synthetic oligonucleotide
gcuguagugagccggagug

SEQ ID NO: 1341988 - RNA, 19 nt, Artificial Sequence
  Description of Artificial Sequence: Synthetic oligonucleotide
aaagguugcugcagaaaga

SEQ ID NO: 1341989 - RNA, 19 nt, Artificial Sequence
  Description of Artificial Sequence: Synthetic oligonucleotide
auguuucgauuugacaauc

SEQ ID NO: 1341990 - RNA, 19 nt, Artificial Sequence
  Description of Artificial Sequence: Synthetic oligonucleotide
ucaauaucugcugcuguaa

SEQ ID NO: 1341991 - RNA, 19 nt, Artificial Sequence
  Description of Artificial Sequence: Synthetic oligonucleotide
ugguucuaaauaugauggu

SEQ ID NO: 1341992 - RNA, 19 nt, Artificial Sequence
  Description of Artificial Sequence: Synthetic oligonucleotide
agcaggguggcuauaaacu

SEQ ID NO: 1341993 - RNA, 19 nt, Artificial Sequence
  Description of Artificial Sequence: Synthetic oligonucleotide
uggcuuaauggccguaccu

SEQ ID NO: 1341994 - RNA, 19 nt, Artificial Sequence
  Description of Artificial Sequence: Synthetic oligonucleotide
cucauggauccucacuggc

SEQ ID NO: 1341995 - RNA, 19 nt, Artificial Sequence
  Description of Artificial Sequence: Synthetic oligonucleotide
agcugaaaaucaggaggcc

SEQ ID NO: 1341996 - RNA, 19 nt, Artificial Sequence
  Description of Artificial Sequence: Synthetic oligonucleotide
ugcuguaauggcgucuuug

SEQ ID NO: 1341997 - RNA, 19 nt, Artificial Sequence
  Description of Artificial Sequence: Synthetic oligonucleotide
gaguuuugggaauuugugu

SEQ ID NO: 1341998 - RNA, 19 nt, Artificial Sequence
  Description of Artificial Sequence: Synthetic oligonucleotide
gcuaauccccacaagagug

SEQ ID NO: 1341999 - RNA, 19 nt, Artificial Sequence
  Description of Artificial Sequence: Synthetic oligonucleotide
gacauaccugcaccgggcc

SEQ ID NO: 1342000 - RNA, 19 nt, Artificial Sequence
  Description of Artificial Sequence: Synthetic oligonucleotide
uucaaggacuauccguuuu

SEQ ID NO: 1342001 - RNA, 19 nt, Artificial Sequence
  Description of Artificial Sequence: Synthetic oligonucleotide
ucuaaauaugaugguuaaa

SEQ ID NO: 1342002 - RNA, 19 nt, Artificial Sequence
  Description of Artificial Sequence: Synthetic oligonucleotide
gacauaaaggauagccaca

SEQ ID NO: 1342003 - RNA, 19 nt, Artificial Sequence
  Description of Artificial Sequence: Synthetic oligonucleotide
cugcucaacaaugugcaug

SEQ ID NO: 1342004 - RNA, 19 nt, Artificial Sequence
  Description of Artificial Sequence: Synthetic oligonucleotide
gagugaugaacaucccaca

SEQ ID NO: 1342005 - RNA, 19 nt, Artificial Sequence
  Description of Artificial Sequence: Synthetic oligonucleotide
uugaaucaaucagugggaa

SEQ ID NO: 1342006 - RNA, 19 nt, Artificial Sequence
  Description of Artificial Sequence: Synthetic oligonucleotide
caucgcuguagugagccgg

SEQ ID NO: 1342007 - RNA, 19 nt, Artificial Sequence
  Description of Artificial Sequence: Synthetic oligonucleotide
ugauggaccgcucguccac

SEQ ID NO: 1342008 - RNA, 19 nt, Artificial Sequence
  Description of Artificial Sequence: Synthetic oligonucleotide
uugguccugaaaugcucag

SEQ ID NO: 1342009 - RNA, 19 nt, Artificial Sequence
  Description of Artificial Sequence: Synthetic oligonucleotide
auauggugaguagaauuca

SEQ ID NO: 1342010 - RNA, 19 nt, Artificial Sequence
  Description of Artificial Sequence: Synthetic oligonucleotide
cugcacuacuucuccagag

SEQ ID NO: 1342011 - RNA, 19 nt, Artificial Sequence
  Description of Artificial Sequence: Synthetic oligonucleotide
caagguuguucugaggcug

SEQ ID NO: 1342012 - RNA, 19 nt, Artificial Sequence
  Description of Artificial Sequence: Synthetic oligonucleotide
gauguuucgauuugacaau

SEQ ID NO: 1342013 - RNA, 19 nt, Artificial Sequence
  Description of Artificial Sequence: Synthetic oligonucleotide
cagucaagguguucuuuag

SEQ ID NO: 1342014 - RNA, 19 nt, Artificial Sequence
  Description of Artificial Sequence: Synthetic oligonucleotide
uuggucauuucuucauuua

SEQ ID NO: 1342015 - RNA, 19 nt, Artificial Sequence
  Description of Artificial Sequence: Synthetic oligonucleotide
cacuacuucuccagagcag

SEQ ID NO: 1342016 - RNA, 19 nt, Artificial Sequence
  Description of Artificial Sequence: Synthetic oligonucleotide
agacuuuauugguuuuagu

SEQ ID NO: 1342017 - RNA, 19 nt, Artificial Sequence
  Description of Artificial Sequence: Synthetic oligonucleotide
ggaguuuugggaauuugug

SEQ ID NO: 1342018 - RNA, 19 nt, Artificial Sequence
  Description of Artificial Sequence: Synthetic oligonucleotide
ucgauuugacaaucugaaa

SEQ ID NO: 1342019 - RNA, 19 nt, Artificial Sequence
  Description of Artificial Sequence: Synthetic oligonucleotide
ccacagaguuugaugaugg

SEQ ID NO: 1342020 - RNA, 19 nt, Artificial Sequence
  Description of Artificial Sequence: Synthetic oligonucleotide
uuccucucgaacccauacu

SEQ ID NO: 1342021 - RNA, 19 nt, Artificial Sequence
  Description of Artificial Sequence: Synthetic oligonucleotide
acaucgccuauuguaaucu

SEQ ID NO: 1342022 - RNA, 19 nt, Artificial Sequence
  Description of Artificial Sequence: Synthetic oligonucleotide
cuuaugucaucuucaucga

SEQ ID NO: 1342023 - RNA, 19 nt, Artificial Sequence
  Description of Artificial Sequence: Synthetic oligonucleotide
uuauugguuuuaguagaaa

SEQ ID NO: 1342024 - RNA, 19 nt, Artificial Sequence
  Description of Artificial Sequence: Synthetic oligonucleotide
auuccagauauggugagua

SEQ ID NO: 1342025 - RNA, 19 nt, Artificial Sequence
  Description of Artificial Sequence: Synthetic oligonucleotide
uguagugagccggagugau

SEQ ID NO: 1342026 - RNA, 19 nt, Artificial Sequence
  Description of Artificial Sequence: Synthetic oligonucleotide
auggccguaccugagccuc

SEQ ID NO: 1342027 - RNA, 19 nt, Artificial Sequence
  Description of Artificial Sequence: Synthetic oligonucleotide
gaacugcuaaggugugcag

SEQ ID NO: 1342028 - RNA, 19 nt, Artificial Sequence
  Description of Artificial Sequence: Synthetic oligonucleotide
ucuccuggguccugcaacu

SEQ ID NO: 1342029 - RNA, 19 nt, Artificial Sequence
  Description of Artificial Sequence: Synthetic oligonucleotide
gcgauuaaaguccauucca

SEQ ID NO: 1342030 - RNA, 19 nt, Artificial Sequence
  Description of Artificial Sequence: Synthetic oligonucleotide
uucggagaaugcuucugaa

SEQ ID NO: 1342031 - RNA, 19 nt, Artificial Sequence
  Description of Artificial Sequence: Synthetic oligonucleotide
ucaugccgaaacacauucu

SEQ ID NO: 1342032 - RNA, 19 nt, Artificial Sequence
  Description of Artificial Sequence: Synthetic oligonucleotide
ugcaccgcaguuucuaguu

SEQ ID NO: 1342033 - RNA, 19 nt, Artificial Sequence
  Description of Artificial Sequence: Synthetic oligonucleotide
gccggagugaugaacaucc

SEQ ID NO: 1342034 - RNA, 19 nt, Artificial Sequence
  Description of Artificial Sequence: Synthetic oligonucleotide
ucggagaaugcuucugaau

SEQ ID NO: 1342035 - RNA, 19 nt, Artificial Sequence
  Description of Artificial Sequence: Synthetic oligonucleotide
cagcaggguggcuauaaac

SEQ ID NO: 1342036 - RNA, 19 nt, Artificial Sequence
  Description of Artificial Sequence: Synthetic oligonucleotide
aggaacugcuaaggugugc

SEQ ID NO: 1342037 - RNA, 19 nt, Artificial Sequence
  Description of Artificial Sequence: Synthetic oligonucleotide
uccguuuucuaaucugguu

SEQ ID NO: 1342038 - RNA, 19 nt, Artificial Sequence
  Description of Artificial Sequence: Synthetic oligonucleotide
acugcacuacuucuccaga

SEQ ID NO: 1342039 - RNA, 19 nt, Artificial Sequence
  Description of Artificial Sequence: Synthetic oligonucleotide
acuguguaaauaccacauu

SEQ ID NO: 1342040 - RNA, 19 nt, Artificial Sequence
  Description of Artificial Sequence: Synthetic oligonucleotide
aaggacuauccguuuucua

SEQ ID NO: 1342041 - RNA, 19 nt, Artificial Sequence
  Description of Artificial Sequence: Synthetic oligonucleotide
gaaugcuucugaaugccaa

SEQ ID NO: 1342042 - RNA, 19 nt, Artificial Sequence
  Description of Artificial Sequence: Synthetic oligonucleotide
gguacaggggccgaggaug

SEQ ID NO: 1342043 - RNA, 19 nt, Artificial Sequence
  Description of Artificial Sequence: Synthetic oligonucleotide
aggaugguuucaggcacac

SEQ ID NO: 1342044 - RNA, 19 nt, Artificial Sequence
  Description of Artificial Sequence: Synthetic oligonucleotide
cuaauccccacaagaguga

SEQ ID NO: 1342045 - RNA, 19 nt, Artificial Sequence
  Description of Artificial Sequence: Synthetic oligonucleotide
ccguuuucuaaucugguuc

SEQ ID NO: 1342046 - RNA, 19 nt, Artificial Sequence
  Description of Artificial Sequence: Synthetic oligonucleotide
ccaggcaauacuuugcuca

SEQ ID NO: 1342047 - RNA, 19 nt, Artificial Sequence
  Description of Artificial Sequence: Synthetic oligonucleotide
cuucauacagugggccggg

SEQ ID NO: 1342048 - RNA, 19 nt, Artificial Sequence
  Description of Artificial Sequence: Synthetic oligonucleotide
cacgacaucgcuguaguga

SEQ ID NO: 1342049 - RNA, 19 nt, Artificial Sequence
  Description of Artificial Sequence: Synthetic oligonucleotide
aaucugaagaggacccaaa

SEQ ID NO: 1342050 - RNA, 19 nt, Artificial Sequence
  Description of Artificial Sequence: Synthetic oligonucleotide
ugugcauggcuuuccucuc

SEQ ID NO: 1342051 - RNA, 19 nt, Artificial Sequence
  Description of Artificial Sequence: Synthetic oligonucleotide
augauggaccgcucgucca

SEQ ID NO: 1342052 - RNA, 19 nt, Artificial Sequence
  Description of Artificial Sequence: Synthetic oligonucleotide
caaaaguccaggcaauacu

SEQ ID NO: 1342053 - RNA, 19 nt, Artificial Sequence
  Description of Artificial Sequence: Synthetic oligonucleotide
cggagaaugcuucugaaug

SEQ ID NO: 1342054 - RNA, 19 nt, Artificial Sequence
  Description of Artificial Sequence: Synthetic oligonucleotide
agaguaaacaucgccuauu

SEQ ID NO: 1342055 - RNA, 19 nt, Artificial Sequence
  Description of Artificial Sequence: Synthetic oligonucleotide
uaauccccacaagagugac

SEQ ID NO: 1342056 - RNA, 19 nt, Artificial Sequence
  Description of Artificial Sequence: Synthetic oligonucleotide
caagaacuggugucaauaa

SEQ ID NO: 1342057 - RNA, 19 nt, Artificial Sequence
  Description of Artificial Sequence: Synthetic oligonucleotide
gagccucugacugguagug

SEQ ID NO: 1342058 - RNA, 19 nt, Artificial Sequence
  Description of Artificial Sequence: Synthetic oligonucleotide
gacuccgagcuucuucuga

SEQ ID NO: 1342059 - RNA, 19 nt, Artificial Sequence
  Description of Artificial Sequence: Synthetic oligonucleotide
uggcacacugcgccuguug

SEQ ID NO: 1342060 - RNA, 19 nt, Artificial Sequence
  Description of Artificial Sequence: Synthetic oligonucleotide
uugcaccgcaguuucuagu

SEQ ID NO: 1342061 - RNA, 19 nt, Artificial Sequence
  Description of Artificial Sequence: Synthetic oligonucleotide
cucgaaguaaguuugccuu

SEQ ID NO: 1342062 - RNA, 19 nt, Artificial Sequence
  Description of Artificial Sequence: Synthetic oligonucleotide
guguaugauguuucgauuu

SEQ ID NO: 1342063 - RNA, 19 nt, Artificial Sequence
  Description of Artificial Sequence: Synthetic oligonucleotide
gccgaggaugguuucaggc

SEQ ID NO: 1342064 - RNA, 19 nt, Artificial Sequence
  Description of Artificial Sequence: Synthetic oligonucleotide
cuguguaaauaccacauuu

SEQ ID NO: 1342065 - RNA, 19 nt, Artificial Sequence
  Description of Artificial Sequence: Synthetic oligonucleotide
aaggauagccacagaguuu

SEQ ID NO: 1342066 - RNA, 19 nt, Artificial Sequence
  Description of Artificial Sequence: Synthetic oligonucleotide
caggacauaccugcaccgg

SEQ ID NO: 1342067 - RNA, 19 nt, Artificial Sequence
  Description of Artificial Sequence: Synthetic oligonucleotide
guacaggggccgaggaugg

SEQ ID NO: 1342068 - RNA, 19 nt, Artificial Sequence
  Description of Artificial Sequence: Synthetic oligonucleotide
gccgaaacacauucucucc

SEQ ID NO: 1342069 - RNA, 19 nt, Artificial Sequence
  Description of Artificial Sequence: Synthetic oligonucleotide
gguagugugucaucaaggu

SEQ ID NO: 1342070 - RNA, 19 nt, Artificial Sequence
  Description of Artificial Sequence: Synthetic oligonucleotide
cucguccacgacaucgcug

SEQ ID NO: 1342071 - RNA, 19 nt, Artificial Sequence
  Description of Artificial Sequence: Synthetic oligonucleotide
gguuuuaguagaaauucua

SEQ ID NO: 1342072 - RNA, 19 nt, Artificial Sequence
  Description of Artificial Sequence: Synthetic oligonucleotide
ggcuuaauggccguaccug

SEQ ID NO: 1342073 - RNA, 19 nt, Artificial Sequence
  Description of Artificial Sequence: Synthetic oligonucleotide
gcuauaaacuguguaaaua

SEQ ID NO: 1342074 - RNA, 19 nt, Artificial Sequence
  Description of Artificial Sequence: Synthetic oligonucleotide
aucgccuauuguaaucuga

SEQ ID NO: 1342075 - RNA, 19 nt, Artificial Sequence
  Description of Artificial Sequence: Synthetic oligonucleotide
gaguuugaugauggaccgc

SEQ ID NO: 1342076 - RNA, 19 nt, Artificial Sequence
  Description of Artificial Sequence: Synthetic oligonucleotide
ucgaacccauacuggaguu

SEQ ID NO: 1342077 - RNA, 19 nt, Artificial Sequence
  Description of Artificial Sequence: Synthetic oligonucleotide
gguuucaggcacacagagg

SEQ ID NO: 1342078 - RNA, 19 nt, Artificial Sequence
  Description of Artificial Sequence: Synthetic oligonucleotide
cgauuaaaguccauuccac

SEQ ID NO: 1342079 - RNA, 19 nt, Artificial Sequence
  Description of Artificial Sequence: Synthetic oligonucleotide
caucgccuauuguaaucug

SEQ ID NO: 1342080 - RNA, 19 nt, Artificial Sequence
  Description of Artificial Sequence: Synthetic oligonucleotide
guccacgacaucgcuguag

SEQ ID NO: 1342081 - RNA, 19 nt, Artificial Sequence
  Description of Artificial Sequence: Synthetic oligonucleotide
cccauacuggaguuuuggg

SEQ ID NO: 1342082 - RNA, 19 nt, Artificial Sequence
  Description of Artificial Sequence: Synthetic oligonucleotide
agaaugcuucugaaugcca

SEQ ID NO: 1342083 - RNA, 19 nt, Artificial Sequence
  Description of Artificial Sequence: Synthetic oligonucleotide
guagaacucccugacccuc

SEQ ID NO: 1342084 - RNA, 19 nt, Artificial Sequence
  Description of Artificial Sequence: Synthetic oligonucleotide
ccuucauacagugggccgg

SEQ ID NO: 1342085 - RNA, 19 nt, Artificial Sequence
  Description of Artificial Sequence: Synthetic oligonucleotide
uggcaaauuugguccugaa

SEQ ID NO: 1342086 - RNA, 19 nt, Artificial Sequence
  Description of Artificial Sequence: Synthetic oligonucleotide
ugacuccgagcuucuucug

SEQ ID NO: 1342087 - RNA, 19 nt, Artificial Sequence
  Description of Artificial Sequence: Synthetic oligonucleotide
guccugaaaugcucagcac

SEQ ID NO: 1342088 - RNA, 19 nt, Artificial Sequence
  Description of Artificial Sequence: Synthetic oligonucleotide
ugacugguagugugucauc

SEQ ID NO: 1342089 - RNA, 19 nt, Artificial Sequence
  Description of Artificial Sequence: Synthetic oligonucleotide
ccucucgaacccauacugg

SEQ ID NO: 1342090 - RNA, 19 nt, Artificial Sequence
  Description of Artificial Sequence: Synthetic oligonucleotide
ggcacaaucuuggccauac

SEQ ID NO: 1342091 - RNA, 19 nt, Artificial Sequence
  Description of Artificial Sequence: Synthetic oligonucleotide
gccucugacugguagugug

SEQ ID NO: 1342092 - RNA, 19 nt, Artificial Sequence
  Description of Artificial Sequence: Synthetic oligonucleotide
caccaggaccaucaauauc

SEQ ID NO: 1342093 - RNA, 19 nt, Artificial Sequence
  Description of Artificial Sequence: Synthetic oligonucleotide
guaaucugaagaggaccca

SEQ ID NO: 1342094 - RNA, 19 nt, Artificial Sequence
  Description of Artificial Sequence: Synthetic oligonucleotide
gguuagauuuggcaaauuu

SEQ ID NO: 1342095 - RNA, 19 nt, Artificial Sequence
  Description of Artificial Sequence: Synthetic oligonucleotide
cacugcgccuguugucagg

SEQ ID NO: 1342096 - RNA, 19 nt, Artificial Sequence
  Description of Artificial Sequence: Synthetic oligonucleotide
acugcgccuguugucagga

SEQ ID NO: 1342097 - RNA, 19 nt, Artificial Sequence
  Description of Artificial Sequence: Synthetic oligonucleotide
cugaaaaucaggaggccuu

SEQ ID NO: 1342098 - RNA, 19 nt, Artificial Sequence
  Description of Artificial Sequence: Synthetic oligonucleotide
ccagauauggugaguagaa

SEQ ID NO: 1342099 - RNA, 19 nt, Artificial Sequence
  Description of Artificial Sequence: Synthetic oligonucleotide
cauaaaggauagccacaga

SEQ ID NO: 1342100 - RNA, 19 nt, Artificial Sequence
  Description of Artificial Sequence: Synthetic oligonucleotide
cucugacugguaguguguc

SEQ ID NO: 1342101 - RNA, 19 nt, Artificial Sequence
  Description of Artificial Sequence: Synthetic oligonucleotide
agucacucauggauccuca

SEQ ID NO: 1342102 - RNA, 19 nt, Artificial Sequence
  Description of Artificial Sequence: Synthetic oligonucleotide
cucgaacccauacuggagu

SEQ ID NO: 1342103 - RNA, 19 nt, Artificial Sequence
  Description of Artificial Sequence: Synthetic oligonucleotide
cugacuuggaaccuugguu

SEQ ID NO: 1342104 - RNA, 19 nt, Artificial Sequence
  Description of Artificial Sequence: Synthetic oligonucleotide
ccgggugaagaaaucugag

SEQ ID NO: 1342105 - RNA, 19 nt, Artificial Sequence
  Description of Artificial Sequence: Synthetic oligonucleotide
caggcaauacuuugcucaa

SEQ ID NO: 1342106 - RNA, 19 nt, Artificial Sequence
  Description of Artificial Sequence: Synthetic oligonucleotide
cagucacucauggauccuc

SEQ ID NO: 1342107 - RNA, 19 nt, Artificial Sequence
  Description of Artificial Sequence: Synthetic oligonucleotide
uacuggaguuuugggaauu

SEQ ID NO: 1342108 - RNA, 19 nt, Artificial Sequence
  Description of Artificial Sequence: Synthetic oligonucleotide
ugggccgggugaagaaauc

SEQ ID NO: 1342109 - RNA, 19 nt, Artificial Sequence
  Description of Artificial Sequence: Synthetic oligonucleotide
gugagccggagugaugaac

SEQ ID NO: 1342110 - RNA, 19 nt, Artificial Sequence
  Description of Artificial Sequence: Synthetic oligonucleotide
cuuggucauuucuucauuu

SEQ ID NO: 1342111 - RNA, 19 nt, Artificial Sequence
  Description of Artificial Sequence: Synthetic oligonucleotide
gggaucaugccgaaacaca

SEQ ID NO: 1342112 - RNA, 19 nt, Artificial Sequence
  Description of Artificial Sequence: Synthetic oligonucleotide
uaggugggcacuggcuuaa

SEQ ID NO: 1342113 - RNA, 19 nt, Artificial Sequence
  Description of Artificial Sequence: Synthetic oligonucleotide
gguugcugcagaaagacuu

SEQ ID NO: 1342114 - RNA, 19 nt, Artificial Sequence
  Description of Artificial Sequence: Synthetic oligonucleotide
ugccaagaacuggugucaa

SEQ ID NO: 1342115 - RNA, 19 nt, Artificial Sequence
  Description of Artificial Sequence: Synthetic oligonucleotide
cuuugcaccgcaguuucua

SEQ ID NO: 1342116 - RNA, 19 nt, Artificial Sequence
  Description of Artificial Sequence: Synthetic oligonucleotide
gaacccauacuggaguuuu

SEQ ID NO: 1342117 - RNA, 19 nt, Artificial Sequence
  Description of Artificial Sequence: Synthetic oligonucleotide
guguucuuuagaacucgaa

SEQ ID NO: 1342118 - RNA, 19 nt, Artificial Sequence
  Description of Artificial Sequence: Synthetic oligonucleotide
ccggaggcugacuuggaac

SEQ ID NO: 1342119 - RNA, 19 nt, Artificial Sequence
  Description of Artificial Sequence: Synthetic oligonucleotide
guagugagccggagugaug

SEQ ID NO: 1342120 - RNA, 19 nt, Artificial Sequence
  Description of Artificial Sequence: Synthetic oligonucleotide
cuuggaaccuugguuagau

SEQ ID NO: 1342121 - RNA, 19 nt, Artificial Sequence
  Description of Artificial Sequence: Synthetic oligonucleotide
ccgcucguccacgacaucg

SEQ ID NO: 1342122 - RNA, 19 nt, Artificial Sequence
  Description of Artificial Sequence: Synthetic oligonucleotide
aucgcuguagugagccgga

SEQ ID NO: 1342123 - RNA, 19 nt, Artificial Sequence
  Description of Artificial Sequence: Synthetic oligonucleotide
gggccggaggcugacuugg

SEQ ID NO: 1342124 - RNA, 19 nt, Artificial Sequence
  Description of Artificial Sequence: Synthetic oligonucleotide
ggacuauccguuuucuaau

SEQ ID NO: 1342125 - RNA, 19 nt, Artificial Sequence
  Description of Artificial Sequence: Synthetic oligonucleotide
caccgcaguuucuaguucu

SEQ ID NO: 1342126 - RNA, 19 nt, Artificial Sequence
  Description of Artificial Sequence: Synthetic oligonucleotide
ucgcuguagugagccggag

SEQ ID NO: 1342127 - RNA, 19 nt, Artificial Sequence
  Description of Artificial Sequence: Synthetic oligonucleotide
guaauaucauagacuuuau

SEQ ID NO: 1342128 - RNA, 19 nt, Artificial Sequence
  Description of Artificial Sequence: Synthetic oligonucleotide
cugugauguucucuuccaa

SEQ ID NO: 1342129 - RNA, 19 nt, Artificial Sequence
  Description of Artificial Sequence: Synthetic oligonucleotide
auacagugggccgggugaa

SEQ ID NO: 1342130 - RNA, 19 nt, Artificial Sequence
  Description of Artificial Sequence: Synthetic oligonucleotide
uccauuccacaggcuugug

SEQ ID NO: 1342131 - RNA, 19 nt, Artificial Sequence
  Description of Artificial Sequence: Synthetic oligonucleotide
agugggccgggugaagaaa

SEQ ID NO: 1342132 - RNA, 19 nt, Artificial Sequence
  Description of Artificial Sequence: Synthetic oligonucleotide
cucuggcacacugcgccug

SEQ ID NO: 1342133 - RNA, 19 nt, Artificial Sequence
  Description of Artificial Sequence: Synthetic oligonucleotide
cacaacuaccugccucaca

SEQ ID NO: 1342134 - RNA, 19 nt, Artificial Sequence
  Description of Artificial Sequence: Synthetic oligonucleotide
ccgaggaugguuucaggca

SEQ ID NO: 1342135 - RNA, 19 nt, Artificial Sequence
  Description of Artificial Sequence: Synthetic oligonucleotide
uggccguaccugagccucu

SEQ ID NO: 1342136 - RNA, 19 nt, Artificial Sequence
  Description of Artificial Sequence: Synthetic oligonucleotide
ugguuagauuuggcaaauu

SEQ ID NO: 1342137 - RNA, 19 nt, Artificial Sequence
  Description of Artificial Sequence: Synthetic oligonucleotide
ggccgaggaugguuucagg

SEQ ID NO: 1342138 - RNA, 19 nt, Artificial Sequence
  Description of Artificial Sequence: Synthetic oligonucleotide
cacacagaggcacaaucuu

SEQ ID NO: 1342139 - RNA, 19 nt, Artificial Sequence
  Description of Artificial Sequence: Synthetic oligonucleotide
uucauacagugggccgggu

SEQ ID NO: 1342140 - RNA, 19 nt, Artificial Sequence
  Description of Artificial Sequence: Synthetic oligonucleotide
ggcuauaaacuguguaaau

SEQ ID NO: 1342141 - RNA, 19 nt, Artificial Sequence
  Description of Artificial Sequence: Synthetic oligonucleotide
cuguugucaggaacugcua

SEQ ID NO: 1342142 - RNA, 19 nt, Artificial Sequence
  Description of Artificial Sequence: Synthetic oligonucleotide
cauagacuuuauugguuuu

SEQ ID NO: 1342143 - RNA, 19 nt, Artificial Sequence
  Description of Artificial Sequence: Synthetic oligonucleotide
gcugaaaaucaggaggccu

SEQ ID NO: 1342144 - RNA, 19 nt, Artificial Sequence
  Description of Artificial Sequence: Synthetic oligonucleotide
accgcucguccacgacauc

SEQ ID NO: 1342145 - RNA, 19 nt, Artificial Sequence
  Description of Artificial Sequence: Synthetic oligonucleotide
ccaagaacuggugucaaua

SEQ ID NO: 1342146 - RNA, 19 nt, Artificial Sequence
  Description of Artificial Sequence: Synthetic oligonucleotide
gccgggugaagaaaucuga

SEQ ID NO: 1342147 - RNA, 19 nt, Artificial Sequence
  Description of Artificial Sequence: Synthetic oligonucleotide
cagcuuaugucaucuucau

SEQ ID NO: 1342148 - RNA, 19 nt, Artificial Sequence
  Description of Artificial Sequence: Synthetic oligonucleotide
cagaguaaacaucgccuau

SEQ ID NO: 1342149 - RNA, 19 nt, Artificial Sequence
  Description of Artificial Sequence: Synthetic oligonucleotide
cuguagugagccggaguga

SEQ ID NO: 1342150 - RNA, 19 nt, Artificial Sequence
  Description of Artificial Sequence: Synthetic oligonucleotide
ccguaccugagccucugac

SEQ ID NO: 1342151 - RNA, 19 nt, Artificial Sequence
  Description of Artificial Sequence: Synthetic oligonucleotide
cauucucuccuggguccug

SEQ ID NO: 1342152 - RNA, 19 nt, Artificial Sequence
  Description of Artificial Sequence: Synthetic oligonucleotide
gggccgaggaugguuucag

SEQ ID NO: 1342153 - RNA, 19 nt, Artificial Sequence
  Description of Artificial Sequence: Synthetic oligonucleotide
caaggacuauccguuuucu

SEQ ID NO: 1342154 - RNA, 19 nt, Artificial Sequence
  Description of Artificial Sequence: Synthetic oligonucleotide
ggcacacugcgccuguugu

SEQ ID NO: 1342155 - RNA, 19 nt, Artificial Sequence
  Description of Artificial Sequence: Synthetic oligonucleotide
ccaaaagcugcucaacaau

SEQ ID NO: 1342156 - RNA, 19 nt, Artificial Sequence
  Description of Artificial Sequence: Synthetic oligonucleotide
ccucacagcuuaugucauc

SEQ ID NO: 1342157 - RNA, 19 nt, Artificial Sequence
  Description of Artificial Sequence: Synthetic oligonucleotide
ccggagugaugaacauccc

SEQ ID NO: 1342158 - RNA, 19 nt, Artificial Sequence
  Description of Artificial Sequence: Synthetic oligonucleotide
auaccugcaccgggccgga

SEQ ID NO: 1342159 - RNA, 19 nt, Artificial Sequence
  Description of Artificial Sequence: Synthetic oligonucleotide
gcaccgcaguuucuaguuc

SEQ ID NO: 1342160 - RNA, 19 nt, Artificial Sequence
  Description of Artificial Sequence: Synthetic oligonucleotide
gaccgcucguccacgacau

SEQ ID NO: 1342161 - RNA, 19 nt, Artificial Sequence
  Description of Artificial Sequence: Synthetic oligonucleotide
gagccggagugaugaacau

SEQ ID NO: 1342162 - RNA, 19 nt, Artificial Sequence
  Description of Artificial Sequence: Synthetic oligonucleotide
cgcucguccacgacaucgc

SEQ ID NO: 1342163 - RNA, 19 nt, Artificial Sequence
  Description of Artificial Sequence: Synthetic oligonucleotide
cagauauggugaguagaau

SEQ ID NO: 1342164 - RNA, 19 nt, Artificial Sequence
  Description of Artificial Sequence: Synthetic oligonucleotide
ccacagcgauuaaagucca

SEQ ID NO: 1342165 - RNA, 19 nt, Artificial Sequence
  Description of Artificial Sequence: Synthetic oligonucleotide
ugucagcaggguggcuaua

SEQ ID NO: 1342166 - RNA, 19 nt, Artificial Sequence
  Description of Artificial Sequence: Synthetic oligonucleotide
ggauccucacuggcuaaaa

SEQ ID NO: 1342167 - RNA, 19 nt, Artificial Sequence
  Description of Artificial Sequence: Synthetic oligonucleotide
gcucaacaaugugcauggc

SEQ ID NO: 1342168 - RNA, 19 nt, Artificial Sequence
  Description of Artificial Sequence: Synthetic oligonucleotide
ccacgacaucgcuguagug

SEQ ID NO: 1342169 - RNA, 19 nt, Artificial Sequence
  Description of Artificial Sequence: Synthetic oligonucleotide
gugggccgggugaagaaau

SEQ ID NO: 1342170 - RNA, 19 nt, Artificial Sequence
  Description of Artificial Sequence: Synthetic oligonucleotide
cgacaucgcuguagugagc

SEQ ID NO: 1342171 - RNA, 19 nt, Artificial Sequence
  Description of Artificial Sequence: Synthetic oligonucleotide
ggccguaccugagccucug

SEQ ID NO: 1342172 - RNA, 19 nt, Artificial Sequence
  Description of Artificial Sequence: Synthetic oligonucleotide
caggggccgaggaugguuu

SEQ ID NO: 1342173 - RNA, 19 nt, Artificial Sequence
  Description of Artificial Sequence: Synthetic oligonucleotide
gggccgggugaagaaaucu

SEQ ID NO: 1342174 - RNA, 19 nt, Artificial Sequence
  Description of Artificial Sequence: Synthetic oligonucleotide
ccacaacuaccugccucac

SEQ ID NO: 1342175 - RNA, 19 nt, Artificial Sequence
  Description of Artificial Sequence: Synthetic oligonucleotide
ccugacccucagguucagc

SEQ ID NO: 1342176 - RNA, 19 nt, Artificial Sequence
  Description of Artificial Sequence: Synthetic oligonucleotide
aggugggcacuggcuuaau

SEQ ID NO: 1342177 - RNA, 19 nt, Artificial Sequence
  Description of Artificial Sequence: Synthetic oligonucleotide
accgggccggaggcugacu

SEQ ID NO: 1342178 - RNA, 19 nt, Artificial Sequence
  Description of Artificial Sequence: Synthetic oligonucleotide
cacuggcuuaauggccgua

SEQ ID NO: 1342179 - RNA, 19 nt, Artificial Sequence
  Description of Artificial Sequence: Synthetic oligonucleotide
gccguaccugagccucuga

SEQ ID NO: 1342180 - RNA, 19 nt, Artificial Sequence
  Description of Artificial Sequence: Synthetic oligonucleotide
gcacuggcuuaauggccgu

SEQ ID NO: 1342181 - RNA, 19 nt, Artificial Sequence
  Description of Artificial Sequence: Synthetic oligonucleotide
cagccacuuuguccuuccu

SEQ ID NO: 1342182 - RNA, 19 nt, Artificial Sequence
  Description of Artificial Sequence: Synthetic oligonucleotide
ggguggcuauaaacugugu

SEQ ID NO: 1342183 - RNA, 19 nt, Artificial Sequence
  Description of Artificial Sequence: Synthetic oligonucleotide
cugcuguaauggcgucuuu

SEQ ID NO: 1342184 - RNA, 19 nt, Artificial Sequence
  Description of Artificial Sequence: Synthetic oligonucleotide
ccgggccggaggcugacuu

SEQ ID NO: 1342185 - RNA, 19 nt, Artificial Sequence
  Description of Artificial Sequence: Synthetic oligonucleotide
cgaacccauacuggaguuu

SEQ ID NO: 1342186 - RNA, 19 nt, Artificial Sequence
  Description of Artificial Sequence: Synthetic oligonucleotide
cguccacgacaucgcugua

SEQ ID NO: 1342187 - RNA, 19 nt, Artificial Sequence
  Description of Artificial Sequence: Synthetic oligonucleotide
aaaguuuucagguagcucc

SEQ ID NO: 1342188 - RNA, 19 nt, Artificial Sequence
  Description of Artificial Sequence: Synthetic oligonucleotide
uuggcuaccagccaguagg

SEQ ID NO: 1342189 - RNA, 19 nt, Artificial Sequence
  Description of Artificial Sequence: Synthetic oligonucleotide
uagauuuccgccaugaucu

SEQ ID NO: 1342190 - RNA, 19 nt, Artificial Sequence
  Description of Artificial Sequence: Synthetic oligonucleotide
aacagcacuagucuagggg

SEQ ID NO: 1342191 - RNA, 19 nt, Artificial Sequence
  Description of Artificial Sequence: Synthetic oligonucleotide
ugguaagcagccuacaugg

SEQ ID NO: 1342192 - RNA, 19 nt, Artificial Sequence
  Description of Artificial Sequence: Synthetic oligonucleotide
aaaugcagggauaaacucc

SEQ ID NO: 1342193 - RNA, 19 nt, Artificial Sequence
  Description of Artificial Sequence: Synthetic oligonucleotide
aagucaagaagucugaaaa

SEQ ID NO: 1342194 - RNA, 19 nt, Artificial Sequence
  Description of Artificial Sequence: Synthetic oligonucleotide
uguagaguccaccagaaac

SEQ ID NO: 1342195 - RNA, 19 nt, Artificial Sequence
  Description of Artificial Sequence: Synthetic oligonucleotide
aaauugacagggugaagcg

SEQ ID NO: 1342196 - RNA, 19 nt, Artificial Sequence
  Description of Artificial Sequence: Synthetic oligonucleotide
aaugcagggauaaacuccc

SEQ ID NO: 1342197 - RNA, 19 nt, Artificial Sequence
  Description of Artificial Sequence: Synthetic oligonucleotide
ucuaaggauuuuaaagagg

SEQ ID NO: 1342198 - RNA, 19 nt, Artificial Sequence
  Description of Artificial Sequence: Synthetic oligonucleotide
ucaacauuccaagaguugg

SEQ ID NO: 1342199 - RNA, 19 nt, Artificial Sequence
  Description of Artificial Sequence: Synthetic oligonucleotide
uugauaguugggcaguugg

SEQ ID NO: 1342200 - RNA, 19 nt, Artificial Sequence
  Description of Artificial Sequence: Synthetic oligonucleotide
agaacauuagaaccuuccc

SEQ ID NO: 1342201 - RNA, 19 nt, Artificial Sequence
  Description of Artificial Sequence: Synthetic oligonucleotide
uguuaaauugacaggguga

SEQ ID NO: 1342202 - RNA, 19 nt, Artificial Sequence
  Description of Artificial Sequence: Synthetic oligonucleotide
uuguuagacacgcuguagg

SEQ ID NO: 1342203 - RNA, 19 nt, Artificial Sequence
  Description of Artificial Sequence: Synthetic oligonucleotide
aacccuuucaggcagcuug

SEQ ID NO: 1342204 - RNA, 19 nt, Artificial Sequence
  Description of Artificial Sequence: Synthetic oligonucleotide
auaguuaaucaggucaucc

SEQ ID NO: 1342205 - RNA, 19 nt, Artificial Sequence
  Description of Artificial Sequence: Synthetic oligonucleotide
agaauugguuuauuggcac

SEQ ID NO: 1342206 - RNA, 19 nt, Artificial Sequence
  Description of Artificial Sequence: Synthetic oligonucleotide
uuagacacgcuguaggaag

SEQ ID NO: 1342207 - RNA, 19 nt, Artificial Sequence
  Description of Artificial Sequence: Synthetic oligonucleotide
uauacuccugauuuguaag

SEQ ID NO: 1342208 - RNA, 19 nt, Artificial Sequence
  Description of Artificial Sequence: Synthetic oligonucleotide
uuuauuggcacagucauuc

SEQ ID NO: 1342209 - RNA, 19 nt, Artificial Sequence
  Description of Artificial Sequence: Synthetic oligonucleotide
cauggaauagacugggagg

SEQ ID NO: 1342210 - RNA, 19 nt, Artificial Sequence
  Description of Artificial Sequence: Synthetic oligonucleotide
aucuguuugauaguugggc

SEQ ID NO: 1342211 - RNA, 19 nt, Artificial Sequence
  Description of Artificial Sequence: Synthetic oligonucleotide
uaguuaaucaggucauccg

SEQ ID NO: 1342212 - RNA, 19 nt, Artificial Sequence
  Description of Artificial Sequence: Synthetic oligonucleotide
uuguuaaauugacagggug

SEQ ID NO: 1342213 - RNA, 19 nt, Artificial Sequence
  Description of Artificial Sequence: Synthetic oligonucleotide
acaugggaauuguagaguc

SEQ ID NO: 1342214 - RNA, 19 nt, Artificial Sequence
  Description of Artificial Sequence: Synthetic oligonucleotide
gaaaacacagugaaggcac

SEQ ID NO: 1342215 - RNA, 19 nt, Artificial Sequence
  Description of Artificial Sequence: Synthetic oligonucleotide
caucaaaguuuucagguag

SEQ ID NO: 1342216 - RNA, 19 nt, Artificial Sequence
  Description of Artificial Sequence: Synthetic oligonucleotide
ucuucuuuguaggaugggg

SEQ ID NO: 1342217 - RNA, 19 nt, Artificial Sequence
  Description of Artificial Sequence: Synthetic oligonucleotide
aaagacuguccuguuugcc

SEQ ID NO: 1342218 - RNA, 19 nt, Artificial Sequence
  Description of Artificial Sequence: Synthetic oligonucleotide
auggaauagacugggaggg

SEQ ID NO: 1342219 - RNA, 19 nt, Artificial Sequence
  Description of Artificial Sequence: Synthetic oligonucleotide
cuugguacacuuaggagug

SEQ ID NO: 1342220 - RNA, 19 nt, Artificial Sequence
  Description of Artificial Sequence: Synthetic oligonucleotide
gaggcuaggaugcaggcug

SEQ ID NO: 1342221 - RNA, 19 nt, Artificial Sequence
  Description of Artificial Sequence: Synthetic oligonucleotide
cuacaugggaauuguagag

SEQ ID NO: 1342222 - RNA, 19 nt, Artificial Sequence
  Description of Artificial Sequence: Synthetic oligonucleotide
auuccguuuguugauauag

SEQ ID NO: 1342223 - RNA, 19 nt, Artificial Sequence
  Description of Artificial Sequence: Synthetic oligonucleotide
ggagaauugguuuauuggc

SEQ ID NO: 1342224 - RNA, 19 nt, Artificial Sequence
  Description of Artificial Sequence: Synthetic oligonucleotide
ucuguuugauaguugggca

SEQ ID NO: 1342225 - RNA, 19 nt, Artificial Sequence
  Description of Artificial Sequence: Synthetic oligonucleotide
agagagcggaaucaaggac

SEQ ID NO: 1342226 - RNA, 19 nt, Artificial Sequence
  Description of Artificial Sequence: Synthetic oligonucleotide
aagagagcggaaucaagga

SEQ ID NO: 1342227 - RNA, 19 nt, Artificial Sequence
  Description of Artificial Sequence: Synthetic oligonucleotide
agcggaaucaaggaccacc

SEQ ID NO: 1342228 - RNA, 19 nt, Artificial Sequence
  Description of Artificial Sequence: Synthetic oligonucleotide
cagaacauuagaaccuucc

SEQ ID NO: 1342229 - RNA, 19 nt, Artificial Sequence
  Description of Artificial Sequence: Synthetic oligonucleotide
auggggaauagccagccuc

SEQ ID NO: 1342230 - RNA, 19 nt, Artificial Sequence
  Description of Artificial Sequence: Synthetic oligonucleotide
cucauuguuagacacgcug

SEQ ID NO: 1342231 - RNA, 19 nt, Artificial Sequence
  Description of Artificial Sequence: Synthetic oligonucleotide
aguuaaucaggucauccga

SEQ ID NO: 1342232 - RNA, 19 nt, Artificial Sequence
  Description of Artificial Sequence: Synthetic oligonucleotide
ucauuguuagacacgcugu

SEQ ID NO: 1342233 - RNA, 19 nt, Artificial Sequence
  Description of Artificial Sequence: Synthetic oligonucleotide
gaaggcacccuccacuggg

SEQ ID NO: 1342234 - RNA, 19 nt, Artificial Sequence
  Description of Artificial Sequence: Synthetic oligonucleotide
cuuucaggcagcuuggguc

SEQ ID NO: 1342235 - RNA, 19 nt, Artificial Sequence
  Description of Artificial Sequence: Synthetic oligonucleotide
cauuccaagaguuggcuac

SEQ ID NO: 1342236 - RNA, 19 nt, Artificial Sequence
  Description of Artificial Sequence: Synthetic oligonucleotide
uguaugguaagcagccuac

SEQ ID NO: 1342237 - RNA, 19 nt, Artificial Sequence
  Description of Artificial Sequence: Synthetic oligonucleotide
cuucgugcaucuuagauga

SEQ ID NO: 1342238 - RNA, 19 nt, Artificial Sequence
  Description of Artificial Sequence: Synthetic oligonucleotide
aaugcccaacaagagccgc

SEQ ID NO: 1342239 - RNA, 19 nt, Artificial Sequence
  Description of Artificial Sequence: Synthetic oligonucleotide
cacuaaguacccuugcagc

SEQ ID NO: 1342240 - RNA, 19 nt, Artificial Sequence
  Description of Artificial Sequence: Synthetic oligonucleotide
uguccaguugcucaagccu

SEQ ID NO: 1342241 - RNA, 19 nt, Artificial Sequence
  Description of Artificial Sequence: Synthetic oligonucleotide
cucgguagcuaaaugcagg

SEQ ID NO: 1342242 - RNA, 19 nt, Artificial Sequence
  Description of Artificial Sequence: Synthetic oligonucleotide
aaccgagccgcuccuggcc

SEQ ID NO: 1342243 - RNA, 19 nt, Artificial Sequence
  Description of Artificial Sequence: Synthetic oligonucleotide
uaaggauuuuaaagaggcc

SEQ ID NO: 1342244 - RNA, 19 nt, Artificial Sequence
  Description of Artificial Sequence: Synthetic oligonucleotide
ugcaucuuagaugaauuca

SEQ ID NO: 1342245 - RNA, 19 nt, Artificial Sequence
  Description of Artificial Sequence: Synthetic oligonucleotide
cauuccuuguuaaauugac

SEQ ID NO: 1342246 - RNA, 19 nt, Artificial Sequence
  Description of Artificial Sequence: Synthetic oligonucleotide
acuaaguacccuugcagcu

SEQ ID NO: 1342247 - RNA, 19 nt, Artificial Sequence
  Description of Artificial Sequence: Synthetic oligonucleotide
ucuucagauagcuuauguc

SEQ ID NO: 1342248 - RNA, 19 nt, Artificial Sequence
  Description of Artificial Sequence: Synthetic oligonucleotide
agaaguuccaugcuccaga

SEQ ID NO: 1342249 - RNA, 19 nt, Artificial Sequence
  Description of Artificial Sequence: Synthetic oligonucleotide
uguuagacacgcuguagga

SEQ ID NO: 1342250 - RNA, 19 nt, Artificial Sequence
  Description of Artificial Sequence: Synthetic oligonucleotide
uguucucuacuccccagcc

SEQ ID NO: 1342251 - RNA, 19 nt, Artificial Sequence
  Description of Artificial Sequence: Synthetic oligonucleotide
cuuguugugggcacuugcc

SEQ ID NO: 1342252 - RNA, 19 nt, Artificial Sequence
  Description of Artificial Sequence: Synthetic oligonucleotide
guagauuuccgccaugauc

SEQ ID NO: 1342253 - RNA, 19 nt, Artificial Sequence
  Description of Artificial Sequence: Synthetic oligonucleotide
gauucaauuccacaguggu

SEQ ID NO: 1342254 - RNA, 19 nt, Artificial Sequence
  Description of Artificial Sequence: Synthetic oligonucleotide
gagcgcaccacuaaguacc

SEQ ID NO: 1342255 - RNA, 19 nt, Artificial Sequence
  Description of Artificial Sequence: Synthetic oligonucleotide
guacaggucagugcgaggg

SEQ ID NO: 1342256 - RNA, 19 nt, Artificial Sequence
  Description of Artificial Sequence: Synthetic oligonucleotide
acccguagugcuuaucuuc

SEQ ID NO: 1342257 - RNA, 19 nt, Artificial Sequence
  Description of Artificial Sequence: Synthetic oligonucleotide
ucuggagcgcaccacuaag

SEQ ID NO: 1342258 - RNA, 19 nt, Artificial Sequence
  Description of Artificial Sequence: Synthetic oligonucleotide
gacgcuguucucuacuccc

SEQ ID NO: 1342259 - RNA, 19 nt, Artificial Sequence
  Description of Artificial Sequence: Synthetic oligonucleotide
gaagcuggauccugcaccc

SEQ ID NO: 1342260 - RNA, 19 nt, Artificial Sequence
  Description of Artificial Sequence: Synthetic oligonucleotide
guagaguccaccagaaacc

SEQ ID NO: 1342261 - RNA, 19 nt, Artificial Sequence
  Description of Artificial Sequence: Synthetic oligonucleotide
uacacuuaggagugucucc

SEQ ID NO: 1342262 - RNA, 19 nt, Artificial Sequence
  Description of Artificial Sequence: Synthetic oligonucleotide
agugcgagggauuccagcu

SEQ ID NO: 1342263 - RNA, 19 nt, Artificial Sequence
  Description of Artificial Sequence: Synthetic oligonucleotide
ugaccacccauuaugucac

SEQ ID NO: 1342264 - RNA, 19 nt, Artificial Sequence
  Description of Artificial Sequence: Synthetic oligonucleotide
ucuaaucuguuugauaguu

SEQ ID NO: 1342265 - RNA, 19 nt, Artificial Sequence
  Description of Artificial Sequence: Synthetic oligonucleotide
cauuaugucaccagccuca

SEQ ID NO: 1342266 - RNA, 19 nt, Artificial Sequence
  Description of Artificial Sequence: Synthetic oligonucleotide
auuagaaccuuccccagua

SEQ ID NO: 1342267 - RNA, 19 nt, Artificial Sequence
  Description of Artificial Sequence: Synthetic oligonucleotide
guagugcuuaucuucuuug

SEQ ID NO: 1342268 - RNA, 19 nt, Artificial Sequence
  Description of Artificial Sequence: Synthetic oligonucleotide
gauaguugggcaguuggac

SEQ ID NO: 1342269 - RNA, 19 nt, Artificial Sequence
  Description of Artificial Sequence: Synthetic oligonucleotide
cugauucaauuccacagug

SEQ ID NO: 1342270 - RNA, 19 nt, Artificial Sequence
  Description of Artificial Sequence: Synthetic oligonucleotide
ugccauggaauagacuggg

SEQ ID NO: 1342271 - RNA, 19 nt, Artificial Sequence
  Description of Artificial Sequence: Synthetic oligonucleotide
uaugguaagcagccuacau

SEQ ID NO: 1342272 - RNA, 19 nt, Artificial Sequence
  Description of Artificial Sequence: Synthetic oligonucleotide
ugauaguugggcaguugga

SEQ ID NO: 1342273 - RNA, 19 nt, Artificial Sequence
  Description of Artificial Sequence: Synthetic oligonucleotide
uagcuuaugucaacauugu

SEQ ID NO: 1342274 - RNA, 19 nt, Artificial Sequence
  Description of Artificial Sequence: Synthetic oligonucleotide
cucuugguacacuuaggag

SEQ ID NO: 1342275 - RNA, 19 nt, Artificial Sequence
  Description of Artificial Sequence: Synthetic oligonucleotide
ggauaaacucccuaaggac

SEQ ID NO: 1342276 - RNA, 19 nt, Artificial Sequence
  Description of Artificial Sequence: Synthetic oligonucleotide
gucguauuccguuuguuga

SEQ ID NO: 1342277 - RNA, 19 nt, Artificial Sequence
  Description of Artificial Sequence: Synthetic oligonucleotide
aggaaguguacccguagug

SEQ ID NO: 1342278 - RNA, 19 nt, Artificial Sequence
  Description of Artificial Sequence: Synthetic oligonucleotide
ugugaucacugccauggaa

SEQ ID NO: 1342279 - RNA, 19 nt, Artificial Sequence
  Description of Artificial Sequence: Synthetic oligonucleotide
caacauuccaagaguuggc

SEQ ID NO: 1342280 - RNA, 19 nt, Artificial Sequence
  Description of Artificial Sequence: Synthetic oligonucleotide
uggggaauagccagccuca

SEQ ID NO: 1342281 - RNA, 19 nt, Artificial Sequence
  Description of Artificial Sequence: Synthetic oligonucleotide
acccauuaugucaccagcc

SEQ ID NO: 1342282 - RNA, 19 nt, Artificial Sequence
  Description of Artificial Sequence: Synthetic oligonucleotide
caagcagagggagaauugg

SEQ ID NO: 1342283 - RNA, 19 nt, Artificial Sequence
  Description of Artificial Sequence: Synthetic oligonucleotide
auaaacucccuaaggacug

SEQ ID NO: 1342284 - RNA, 19 nt, Artificial Sequence
  Description of Artificial Sequence: Synthetic oligonucleotide
auacuccugauuuguaagu

SEQ ID NO: 1342285 - RNA, 19 nt, Artificial Sequence
  Description of Artificial Sequence: Synthetic oligonucleotide
auuccaagaguuggcuacc

SEQ ID NO: 1342286 - RNA, 19 nt, Artificial Sequence
  Description of Artificial Sequence: Synthetic oligonucleotide
auuguuagacacgcuguag

SEQ ID NO: 1342287 - RNA, 19 nt, Artificial Sequence
  Description of Artificial Sequence: Synthetic oligonucleotide
uccugauuuguaagucaag

SEQ ID NO: 1342288 - RNA, 19 nt, Artificial Sequence
  Description of Artificial Sequence: Synthetic oligonucleotide
uacuccccagcccaggaug

SEQ ID NO: 1342289 - RNA, 19 nt, Artificial Sequence
  Description of Artificial Sequence: Synthetic oligonucleotide
ggaaguugcguccagccug

SEQ ID NO: 1342290 - RNA, 19 nt, Artificial Sequence
  Description of Artificial Sequence: Synthetic oligonucleotide
uguuugauaguugggcagu

SEQ ID NO: 1342291 - RNA, 19 nt, Artificial Sequence
  Description of Artificial Sequence: Synthetic oligonucleotide
gagaauugguuuauuggca

SEQ ID NO: 1342292 - RNA, 19 nt, Artificial Sequence
  Description of Artificial Sequence: Synthetic oligonucleotide
gaaccuuccccaguacagg

SEQ ID NO: 1342293 - RNA, 19 nt, Artificial Sequence
  Description of Artificial Sequence: Synthetic oligonucleotide
guuaaauugacagggugaa

SEQ ID NO: 1342294 - RNA, 19 nt, Artificial Sequence
  Description of Artificial Sequence: Synthetic oligonucleotide
acuccugauuuguaaguca

SEQ ID NO: 1342295 - RNA, 19 nt, Artificial Sequence
  Description of Artificial Sequence: Synthetic oligonucleotide
ucuacaacauaaagacguu

SEQ ID NO: 1342296 - RNA, 19 nt, Artificial Sequence
  Description of Artificial Sequence: Synthetic oligonucleotide
agcgcuacagccugggccu

SEQ ID NO: 1342297 - RNA, 19 nt, Artificial Sequence
  Description of Artificial Sequence: Synthetic oligonucleotide
cuaccagccaguaggggac

SEQ ID NO: 1342298 - RNA, 19 nt, Artificial Sequence
  Description of Artificial Sequence: Synthetic oligonucleotide
uacaugggaauuguagagu

SEQ ID NO: 1342299 - RNA, 19 nt, Artificial Sequence
  Description of Artificial Sequence: Synthetic oligonucleotide
uccguuuguugauauaguu

SEQ ID NO: 1342300 - RNA, 19 nt, Artificial Sequence
  Description of Artificial Sequence: Synthetic oligonucleotide
ugcgagggauuccagcuac

SEQ ID NO: 1342301 - RNA, 19 nt, Artificial Sequence
  Description of Artificial Sequence: Synthetic oligonucleotide
cuucuuuguaggaugggga

SEQ ID NO: 1342302 - RNA, 19 nt, Artificial Sequence
  Description of Artificial Sequence: Synthetic oligonucleotide
uggucucuaaucuguuuga

SEQ ID NO: 1342303 - RNA, 19 nt, Artificial Sequence
  Description of Artificial Sequence: Synthetic oligonucleotide
ugaaggcacccuccacugg

SEQ ID NO: 1342304 - RNA, 19 nt, Artificial Sequence
  Description of Artificial Sequence: Synthetic oligonucleotide
gggauaaacucccuaagga

SEQ ID NO: 1342305 - RNA, 19 nt, Artificial Sequence
  Description of Artificial Sequence: Synthetic oligonucleotide
caaacagcacuagucuagg

SEQ ID NO: 1342306 - RNA, 19 nt, Artificial Sequence
  Description of Artificial Sequence: Synthetic oligonucleotide
auugacagggugaagcggu

SEQ ID NO: 1342307 - RNA, 19 nt, Artificial Sequence
  Description of Artificial Sequence: Synthetic oligonucleotide
uccaagaguuggcuaccag

SEQ ID NO: 1342308 - RNA, 19 nt, Artificial Sequence
  Description of Artificial Sequence: Synthetic oligonucleotide
caacauuguggaaguugcg

SEQ ID NO: 1342309 - RNA, 19 nt, Artificial Sequence
  Description of Artificial Sequence: Synthetic oligonucleotide
uuaggagugucuccuucuc

SEQ ID NO: 1342310 - RNA, 19 nt, Artificial Sequence
  Description of Artificial Sequence: Synthetic oligonucleotide
gggauagccaccguuacag

SEQ ID NO: 1342311 - RNA, 19 nt, Artificial Sequence
  Description of Artificial Sequence: Synthetic oligonucleotide
ggauccugcacccaccgag

SEQ ID NO: 1342312 - RNA, 19 nt, Artificial Sequence
  Description of Artificial Sequence: Synthetic oligonucleotide
gcuaaaugcagggauaaac

SEQ ID NO: 1342313 - RNA, 19 nt, Artificial Sequence
  Description of Artificial Sequence: Synthetic oligonucleotide
uuccguuuguugauauagu

SEQ ID NO: 1342314 - RNA, 19 nt, Artificial Sequence
  Description of Artificial Sequence: Synthetic oligonucleotide
cagggauaaacucccuaag

SEQ ID NO: 1342315 - RNA, 19 nt, Artificial Sequence
  Description of Artificial Sequence: Synthetic oligonucleotide
cacccauuaugucaccagc

SEQ ID NO: 1342316 - RNA, 19 nt, Artificial Sequence
  Description of Artificial Sequence: Synthetic oligonucleotide
agcuuaugucaacauugug

SEQ ID NO: 1342317 - RNA, 19 nt, Artificial Sequence
  Description of Artificial Sequence: Synthetic oligonucleotide
uguauacuccugauuugua

SEQ ID NO: 1342318 - RNA, 19 nt, Artificial Sequence
  Description of Artificial Sequence: Synthetic oligonucleotide
uggaugcagagucggucag

SEQ ID NO: 1342319 - RNA, 19 nt, Artificial Sequence
  Description of Artificial Sequence: Synthetic oligonucleotide
agguaugguguaugguaag

SEQ ID NO: 1342320 - RNA, 19 nt, Artificial Sequence
  Description of Artificial Sequence: Synthetic oligonucleotide
agcuucgugcaucuuagau

SEQ ID NO: 1342321 - RNA, 19 nt, Artificial Sequence
  Description of Artificial Sequence: Synthetic oligonucleotide
accacuaaguacccuugca

SEQ ID NO: 1342322 - RNA, 19 nt, Artificial Sequence
  Description of Artificial Sequence: Synthetic oligonucleotide
uuuguaggauggggaauag

SEQ ID NO: 1342323 - RNA, 19 nt, Artificial Sequence
  Description of Artificial Sequence: Synthetic oligonucleotide
agucggucagacauggcuc

SEQ ID NO: 1342324 - RNA, 19 nt, Artificial Sequence
  Description of Artificial Sequence: Synthetic oligonucleotide
guauacuccugauuuguaa

SEQ ID NO: 1342325 - RNA, 19 nt, Artificial Sequence
  Description of Artificial Sequence: Synthetic oligonucleotide
acgcuguaggaaguguacc

SEQ ID NO: 1342326 - RNA, 19 nt, Artificial Sequence
  Description of Artificial Sequence: Synthetic oligonucleotide
aguacaggucagugcgagg

SEQ ID NO: 1342327 - RNA, 19 nt, Artificial Sequence
  Description of Artificial Sequence: Synthetic oligonucleotide
ugaagcggugacucuacaa

SEQ ID NO: 1342328 - RNA, 19 nt, Artificial Sequence
  Description of Artificial Sequence: Synthetic oligonucleotide
uuugauaguugggcaguug

SEQ ID NO: 1342329 - RNA, 19 nt, Artificial Sequence
  Description of Artificial Sequence: Synthetic oligonucleotide
gcuucgugcaucuuagaug

SEQ ID NO: 1342330 - RNA, 19 nt, Artificial Sequence
  Description of Artificial Sequence: Synthetic oligonucleotide
ggcgugaccacccauuaug

SEQ ID NO: 1342331 - RNA, 19 nt, Artificial Sequence
  Description of Artificial Sequence: Synthetic oligonucleotide
uggaaguugcguccagccu

SEQ ID NO: 1342332 - RNA, 19 nt, Artificial Sequence
  Description of Artificial Sequence: Synthetic oligonucleotide
ugaucacugccauggaaua

SEQ ID NO: 1342333 - RNA, 19 nt, Artificial Sequence
  Description of Artificial Sequence: Synthetic oligonucleotide
gaaguguacccguagugcu

SEQ ID NO: 1342334 - RNA, 19 nt, Artificial Sequence
  Description of Artificial Sequence: Synthetic oligonucleotide
agauagcuuaugucaacau

SEQ ID NO: 1342335 - RNA, 19 nt, Artificial Sequence
  Description of Artificial Sequence: Synthetic oligonucleotide
uucccgggcaucaaaguuu

SEQ ID NO: 1342336 - RNA, 19 nt, Artificial Sequence
  Description of Artificial Sequence: Synthetic oligonucleotide
acacuuaggagugucuccu

SEQ ID NO: 1342337 - RNA, 19 nt, Artificial Sequence
  Description of Artificial Sequence: Synthetic oligonucleotide
ccaaaugcccaacaagagc

SEQ ID NO: 1342338 - RNA, 19 nt, Artificial Sequence
  Description of Artificial Sequence: Synthetic oligonucleotide
acaagagccgcaggacccc

SEQ ID NO: 1342339 - RNA, 19 nt, Artificial Sequence
  Description of Artificial Sequence: Synthetic oligonucleotide
cagagucggucagacaugg

SEQ ID NO: 1342340 - RNA, 19 nt, Artificial Sequence
  Description of Artificial Sequence: Synthetic oligonucleotide
uaucaccccagucaacauu

SEQ ID NO: 1342341 - RNA, 19 nt, Artificial Sequence
  Description of Artificial Sequence: Synthetic oligonucleotide
cuguucccgggcaucaaag

SEQ ID NO: 1342342 - RNA, 19 nt, Artificial Sequence
  Description of Artificial Sequence: Synthetic oligonucleotide
ucagcgaacgcaacccuuu

SEQ ID NO: 1342343 - RNA, 19 nt, Artificial Sequence
  Description of Artificial Sequence: Synthetic oligonucleotide
cacgcuguaggaaguguac

SEQ ID NO: 1342344 - RNA, 19 nt, Artificial Sequence
  Description of Artificial Sequence: Synthetic oligonucleotide
ccaagaguuggcuaccagc

SEQ ID NO: 1342345 - RNA, 19 nt, Artificial Sequence
  Description of Artificial Sequence: Synthetic oligonucleotide
ccauggaauagacugggag

SEQ ID NO: 1342346 - RNA, 19 nt, Artificial Sequence
  Description of Artificial Sequence: Synthetic oligonucleotide
agagccgcaggaccccugg

SEQ ID NO: 1342347 - RNA, 19 nt, Artificial Sequence
  Description of Artificial Sequence: Synthetic oligonucleotide
ucguauuccguuuguugau

SEQ ID NO: 1342348 - RNA, 19 nt, Artificial Sequence
  Description of Artificial Sequence: Synthetic oligonucleotide
cuguuugccucacucccag

SEQ ID NO: 1342349 - RNA, 19 nt, Artificial Sequence
  Description of Artificial Sequence: Synthetic oligonucleotide
uggagcgcaccacuaagua

SEQ ID NO: 1342350 - RNA, 19 nt, Artificial Sequence
  Description of Artificial Sequence: Synthetic oligonucleotide
gagucggucagacauggcu

SEQ ID NO: 1342351 - RNA, 19 nt, Artificial Sequence
  Description of Artificial Sequence: Synthetic oligonucleotide
acgcaacccuuucaggcag

SEQ ID NO: 1342352 - RNA, 19 nt, Artificial Sequence
  Description of Artificial Sequence: Synthetic oligonucleotide
ggaaguguacccguagugc

SEQ ID NO: 1342353 - RNA, 19 nt, Artificial Sequence
  Description of Artificial Sequence: Synthetic oligonucleotide
uauaguuaaucaggucauc

SEQ ID NO: 1342354 - RNA, 19 nt, Artificial Sequence
  Description of Artificial Sequence: Synthetic oligonucleotide
gaaguugcguccagccugc

SEQ ID NO: 1342355 - RNA, 19 nt, Artificial Sequence
  Description of Artificial Sequence: Synthetic oligonucleotide
ugcuuguauacuccugauu

SEQ ID NO: 1342356 - RNA, 19 nt, Artificial Sequence
  Description of Artificial Sequence: Synthetic oligonucleotide
gucaacauuccaagaguug

SEQ ID NO: 1342357 - RNA, 19 nt, Artificial Sequence
  Description of Artificial Sequence: Synthetic oligonucleotide
gagggauagccaccguuac

SEQ ID NO: 1342358 - RNA, 19 nt, Artificial Sequence
  Description of Artificial Sequence: Synthetic oligonucleotide
uguggaaguugcguccagc

SEQ ID NO: 1342359 - RNA, 19 nt, Artificial Sequence
  Description of Artificial Sequence: Synthetic oligonucleotide
aggucagugcgagggauuc

SEQ ID NO: 1342360 - RNA, 19 nt, Artificial Sequence
  Description of Artificial Sequence: Synthetic oligonucleotide
uguucccgggcaucaaagu

SEQ ID NO: 1342361 - RNA, 19 nt, Artificial Sequence
  Description of Artificial Sequence: Synthetic oligonucleotide
ggaauagacugggagggag

SEQ ID NO: 1342362 - RNA, 19 nt, Artificial Sequence
  Description of Artificial Sequence: Synthetic oligonucleotide
auccugcacccaccgagcg

SEQ ID NO: 1342363 - RNA, 19 nt, Artificial Sequence
  Description of Artificial Sequence: Synthetic oligonucleotide
ucauccgacagugggugga

SEQ ID NO: 1342364 - RNA, 19 nt, Artificial Sequence
  Description of Artificial Sequence: Synthetic oligonucleotide
augcggauggcgugaccac

SEQ ID NO: 1342365 - RNA, 19 nt, Artificial Sequence
  Description of Artificial Sequence: Synthetic oligonucleotide
acccaugaugguaccacac

SEQ ID NO: 1342366 - RNA, 19 nt, Artificial Sequence
  Description of Artificial Sequence: Synthetic oligonucleotide
aguacccuugcagcuccgc

SEQ ID NO: 1342367 - RNA, 19 nt, Artificial Sequence
  Description of Artificial Sequence: Synthetic oligonucleotide
cuaaguacccuugcagcuc

SEQ ID NO: 1342368 - RNA, 19 nt, Artificial Sequence
  Description of Artificial Sequence: Synthetic oligonucleotide
auuguagaguccaccagaa

SEQ ID NO: 1342369 - RNA, 19 nt, Artificial Sequence
  Description of Artificial Sequence: Synthetic oligonucleotide
auagccaccguuacagcca

SEQ ID NO: 1342370 - RNA, 19 nt, Artificial Sequence
  Description of Artificial Sequence: Synthetic oligonucleotide
gccuacaugggaauuguag

SEQ ID NO: 1342371 - RNA, 19 nt, Artificial Sequence
  Description of Artificial Sequence: Synthetic oligonucleotide
ucagugcgagggauuccag

SEQ ID NO: 1342372 - RNA, 19 nt, Artificial Sequence
  Description of Artificial Sequence: Synthetic oligonucleotide
caaaguuuucagguagcuc

SEQ ID NO: 1342373 - RNA, 19 nt, Artificial Sequence
  Description of Artificial Sequence: Synthetic oligonucleotide
aggauuuuaaagaggccau

SEQ ID NO: 1342374 - RNA, 19 nt, Artificial Sequence
  Description of Artificial Sequence: Synthetic oligonucleotide
gcgaacgcaacccuuucag

SEQ ID NO: 1342375 - RNA, 19 nt, Artificial Sequence
  Description of Artificial Sequence: Synthetic oligonucleotide
ucucauuguuagacacgcu

SEQ ID NO: 1342376 - RNA, 19 nt, Artificial Sequence
  Description of Artificial Sequence: Synthetic oligonucleotide
uacaggucagugcgaggga

SEQ ID NO: 1342377 - RNA, 19 nt, Artificial Sequence
  Description of Artificial Sequence: Synthetic oligonucleotide
guaugguguaugguaagca

SEQ ID NO: 1342378 - RNA, 19 nt, Artificial Sequence
  Description of Artificial Sequence: Synthetic oligonucleotide
cagugcgagggauuccagc

SEQ ID NO: 1342379 - RNA, 19 nt, Artificial Sequence
  Description of Artificial Sequence: Synthetic oligonucleotide
acagaacauuagaaccuuc

SEQ ID NO: 1342380 - RNA, 19 nt, Artificial Sequence
  Description of Artificial Sequence: Synthetic oligonucleotide
ucgugcaucuuagaugaau

SEQ ID NO: 1342381 - RNA, 19 nt, Artificial Sequence
  Description of Artificial Sequence: Synthetic oligonucleotide
uuaugucaccagccucaug

SEQ ID NO: 1342382 - RNA, 19 nt, Artificial Sequence
  Description of Artificial Sequence: Synthetic oligonucleotide
ccacuaaguacccuugcag

SEQ ID NO: 1342383 - RNA, 19 nt, Artificial Sequence
  Description of Artificial Sequence: Synthetic oligonucleotide
guacacuuaggagugucuc

SEQ ID NO: 1342384 - RNA, 19 nt, Artificial Sequence
  Description of Artificial Sequence: Synthetic oligonucleotide
gguuuauuggcacagucau

SEQ ID NO: 1342385 - RNA, 19 nt, Artificial Sequence
  Description of Artificial Sequence: Synthetic oligonucleotide
gauccugcacccaccgagc

SEQ ID NO: 1342386 - RNA, 19 nt, Artificial Sequence
  Description of Artificial Sequence: Synthetic oligonucleotide
gcuccuggccucuggagcg

SEQ ID NO: 1342387 - RNA, 19 nt, Artificial Sequence
  Description of Artificial Sequence: Synthetic oligonucleotide
uauuccguuuguugauaua

SEQ ID NO: 1342388 - RNA, 19 nt, Artificial Sequence
  Description of Artificial Sequence: Synthetic oligonucleotide
guacccuugcagcuccgcc

SEQ ID NO: 1342389 - RNA, 19 nt, Artificial Sequence
  Description of Artificial Sequence: Synthetic oligonucleotide
gguaugguguaugguaagc

SEQ ID NO: 1342390 - RNA, 19 nt, Artificial Sequence
  Description of Artificial Sequence: Synthetic oligonucleotide
agucaacauuccaagaguu

SEQ ID NO: 1342391 - RNA, 19 nt, Artificial Sequence
  Description of Artificial Sequence: Synthetic oligonucleotide
gcuaccagccaguagggga

SEQ ID NO: 1342392 - RNA, 19 nt, Artificial Sequence
  Description of Artificial Sequence: Synthetic oligonucleotide
cuccagugcacuggggccg

SEQ ID NO: 1342393 - RNA, 19 nt, Artificial Sequence
  Description of Artificial Sequence: Synthetic oligonucleotide
agggauagccaccguuaca

SEQ ID NO: 1342394 - RNA, 19 nt, Artificial Sequence
  Description of Artificial Sequence: Synthetic oligonucleotide
guacccguagugcuuaucu

SEQ ID NO: 1342395 - RNA, 19 nt, Artificial Sequence
  Description of Artificial Sequence: Synthetic oligonucleotide
agcgaacgcaacccuuuca

SEQ ID NO: 1342396 - RNA, 19 nt, Artificial Sequence
  Description of Artificial Sequence: Synthetic oligonucleotide
cagccucaugcuuguauac

SEQ ID NO: 1342397 - RNA, 19 nt, Artificial Sequence
  Description of Artificial Sequence: Synthetic oligonucleotide
ugguacacuuaggaguguc

SEQ ID NO: 1342398 - RNA, 19 nt, Artificial Sequence
  Description of Artificial Sequence: Synthetic oligonucleotide
gguagcuaaaugcagggau

SEQ ID NO: 1342399 - RNA, 19 nt, Artificial Sequence
  Description of Artificial Sequence: Synthetic oligonucleotide
cccaaaugcccaacaagag

SEQ ID NO: 1342400 - RNA, 19 nt, Artificial Sequence
  Description of Artificial Sequence: Synthetic oligonucleotide
ccucaugcuuguauacucc

SEQ ID NO: 1342401 - RNA, 19 nt, Artificial Sequence
  Description of Artificial Sequence: Synthetic oligonucleotide
accccuggucucuaaucug

SEQ ID NO: 1342402 - RNA, 19 nt, Artificial Sequence
  Description of Artificial Sequence: Synthetic oligonucleotide
acuguucccgggcaucaaa

SEQ ID NO: 1342403 - RNA, 19 nt, Artificial Sequence
  Description of Artificial Sequence: Synthetic oligonucleotide
gcuuguugugggcacuugc

SEQ ID NO: 1342404 - RNA, 19 nt, Artificial Sequence
  Description of Artificial Sequence: Synthetic oligonucleotide
gucauccgacagugggugg

SEQ ID NO: 1342405 - RNA, 19 nt, Artificial Sequence
  Description of Artificial Sequence: Synthetic oligonucleotide
gucucuaaucuguuugaua

SEQ ID NO: 1342406 - RNA, 19 nt, Artificial Sequence
  Description of Artificial Sequence: Synthetic oligonucleotide
ggucauccgacagugggug

SEQ ID NO: 1342407 - RNA, 19 nt, Artificial Sequence
  Description of Artificial Sequence: Synthetic oligonucleotide
uggaauagacugggaggga

SEQ ID NO: 1342408 - RNA, 19 nt, Artificial Sequence
  Description of Artificial Sequence: Synthetic oligonucleotide
ugugggcacuugccagugc

SEQ ID NO: 1342409 - RNA, 19 nt, Artificial Sequence
  Description of Artificial Sequence: Synthetic oligonucleotide
uguuugccucacucccagc

SEQ ID NO: 1342410 - RNA, 19 nt, Artificial Sequence
  Description of Artificial Sequence: Synthetic oligonucleotide
cagacaccuccacauugac

SEQ ID NO: 1342411 - RNA, 19 nt, Artificial Sequence
  Description of Artificial Sequence: Synthetic oligonucleotide
agagggauagccaccguua

SEQ ID NO: 1342412 - RNA, 19 nt, Artificial Sequence
  Description of Artificial Sequence: Synthetic oligonucleotide
gcagggauaaacucccuaa

SEQ ID NO: 1342413 - RNA, 19 nt, Artificial Sequence
  Description of Artificial Sequence: Synthetic oligonucleotide
aaggcuuguugugggcacu

SEQ ID NO: 1342414 - RNA, 19 nt, Artificial Sequence
  Description of Artificial Sequence: Synthetic oligonucleotide
aggggacgcuguucucuac

SEQ ID NO: 1342415 - RNA, 19 nt, Artificial Sequence
  Description of Artificial Sequence: Synthetic oligonucleotide
gucagugcgagggauucca

SEQ ID NO: 1342416 - RNA, 19 nt, Artificial Sequence
  Description of Artificial Sequence: Synthetic oligonucleotide
guuagacacgcuguaggaa

SEQ ID NO: 1342417 - RNA, 19 nt, Artificial Sequence
  Description of Artificial Sequence: Synthetic oligonucleotide
aguugcguccagccugcca

SEQ ID NO: 1342418 - RNA, 19 nt, Artificial Sequence
  Description of Artificial Sequence: Synthetic oligonucleotide
agccucaugcuuguauacu

SEQ ID NO: 1342419 - RNA, 19 nt, Artificial Sequence
  Description of Artificial Sequence: Synthetic oligonucleotide
gccaccguuacagccaucc

SEQ ID NO: 1342420 - RNA, 19 nt, Artificial Sequence
  Description of Artificial Sequence: Synthetic oligonucleotide
agccugccaugucguauuc

SEQ ID NO: 1342421 - RNA, 19 nt, Artificial Sequence
  Description of Artificial Sequence: Synthetic oligonucleotide
ccccagucaacauuccaag

SEQ ID NO: 1342422 - RNA, 19 nt, Artificial Sequence
  Description of Artificial Sequence: Synthetic oligonucleotide
aggccauuaucaccccagu

SEQ ID NO: 1342423 - RNA, 19 nt, Artificial Sequence
  Description of Artificial Sequence: Synthetic oligonucleotide
cagucaacauuccaagagu

SEQ ID NO: 1342424 - RNA, 19 nt, Artificial Sequence
  Description of Artificial Sequence: Synthetic oligonucleotide
aaguugcguccagccugcc

SEQ ID NO: 1342425 - RNA, 19 nt, Artificial Sequence
  Description of Artificial Sequence: Synthetic oligonucleotide
gcuuaucuucuuuguagga

SEQ ID NO: 1342426 - RNA, 19 nt, Artificial Sequence
  Description of Artificial Sequence: Synthetic oligonucleotide
aaguguacccguagugcuu

SEQ ID NO: 1342427 - RNA, 19 nt, Artificial Sequence
  Description of Artificial Sequence: Synthetic oligonucleotide
aguguacccguagugcuua

SEQ ID NO: 1342428 - RNA, 19 nt, Artificial Sequence
  Description of Artificial Sequence: Synthetic oligonucleotide
uggauccugcacccaccga

SEQ ID NO: 1342429 - RNA, 19 nt, Artificial Sequence
  Description of Artificial Sequence: Synthetic oligonucleotide
agacacgcuguaggaagug

SEQ ID NO: 1342430 - RNA, 19 nt, Artificial Sequence
  Description of Artificial Sequence: Synthetic oligonucleotide
auggcgugaccacccauua

SEQ ID NO: 1342431 - RNA, 19 nt, Artificial Sequence
  Description of Artificial Sequence: Synthetic oligonucleotide
uaggggacgcuguucucua

SEQ ID NO: 1342432 - RNA, 19 nt, Artificial Sequence
  Description of Artificial Sequence: Synthetic oligonucleotide
ggggaggcuaggaugcagg

SEQ ID NO: 1342433 - RNA, 19 nt, Artificial Sequence
  Description of Artificial Sequence: Synthetic oligonucleotide
uacccguagugcuuaucuu

SEQ ID NO: 1342434 - RNA, 19 nt, Artificial Sequence
  Description of Artificial Sequence: Synthetic oligonucleotide
gguaagcagccuacauggg

SEQ ID NO: 1342435 - RNA, 19 nt, Artificial Sequence
  Description of Artificial Sequence: Synthetic oligonucleotide
acugggagggagucaggua

SEQ ID NO: 1342436 - RNA, 19 nt, Artificial Sequence
  Description of Artificial Sequence: Synthetic oligonucleotide
agagucggucagacauggc

SEQ ID NO: 1342437 - RNA, 19 nt, Artificial Sequence
  Description of Artificial Sequence: Synthetic oligonucleotide
ccucgguagcuaaaugcag

SEQ ID NO: 1342438 - RNA, 19 nt, Artificial Sequence
  Description of Artificial Sequence: Synthetic oligonucleotide
gguccacccaugaugguac

SEQ ID NO: 1342439 - RNA, 19 nt, Artificial Sequence
  Description of Artificial Sequence: Synthetic oligonucleotide
agggugaagcggugacucu

SEQ ID NO: 1342440 - RNA, 19 nt, Artificial Sequence
  Description of Artificial Sequence: Synthetic oligonucleotide
acaggucagugcgagggau

SEQ ID NO: 1342441 - RNA, 19 nt, Artificial Sequence
  Description of Artificial Sequence: Synthetic oligonucleotide
aaguacccuugcagcuccg

SEQ ID NO: 1342442 - RNA, 19 nt, Artificial Sequence
  Description of Artificial Sequence: Synthetic oligonucleotide
gcagccuacaugggaauug

SEQ ID NO: 1342443 - RNA, 19 nt, Artificial Sequence
  Description of Artificial Sequence: Synthetic oligonucleotide
uugcguccagccugccaug

SEQ ID NO: 1342444 - RNA, 19 nt, Artificial Sequence
  Description of Artificial Sequence: Synthetic oligonucleotide
ccacccauuaugucaccag

SEQ ID NO: 1342445 - RNA, 19 nt, Artificial Sequence
  Description of Artificial Sequence: Synthetic oligonucleotide
guugugggcacuugccagu

SEQ ID NO: 1342446 - RNA, 19 nt, Artificial Sequence
  Description of Artificial Sequence: Synthetic oligonucleotide
cucaugcuuguauacuccu

SEQ ID NO: 1342447 - RNA, 19 nt, Artificial Sequence
  Description of Artificial Sequence: Synthetic oligonucleotide
guaugguaagcagccuaca

SEQ ID NO: 1342448 - RNA, 19 nt, Artificial Sequence
  Description of Artificial Sequence: Synthetic oligonucleotide
cagccgccgagccgaaccg

SEQ ID NO: 1342449 - RNA, 19 nt, Artificial Sequence
  Description of Artificial Sequence: Synthetic oligonucleotide
ggauagccaccguuacagc

SEQ ID NO: 1342450 - RNA, 19 nt, Artificial Sequence
  Description of Artificial Sequence: Synthetic oligonucleotide
gcaucaaaguuuucaggua

SEQ ID NO: 1342451 - RNA, 19 nt, Artificial Sequence
  Description of Artificial Sequence: Synthetic oligonucleotide
guauuccguuuguugauau

SEQ ID NO: 1342452 - RNA, 19 nt, Artificial Sequence
  Description of Artificial Sequence: Synthetic oligonucleotide
uggcgugaccacccauuau

SEQ ID NO: 1342453 - RNA, 19 nt, Artificial Sequence
  Description of Artificial Sequence: Synthetic oligonucleotide
uguacccguagugcuuauc

SEQ ID NO: 1342454 - RNA, 19 nt, Artificial Sequence
  Description of Artificial Sequence: Synthetic oligonucleotide
gccucacagcucuugguac

SEQ ID NO: 1342455 - RNA, 19 nt, Artificial Sequence
  Description of Artificial Sequence: Synthetic oligonucleotide
uuccccaguacaggucagu

SEQ ID NO: 1342456 - RNA, 19 nt, Artificial Sequence
  Description of Artificial Sequence: Synthetic oligonucleotide
cagccucgguagcuaaaug

SEQ ID NO: 1342457 - RNA, 19 nt, Artificial Sequence
  Description of Artificial Sequence: Synthetic oligonucleotide
cgaacgcaacccuuucagg

SEQ ID NO: 1342458 - RNA, 19 nt, Artificial Sequence
  Description of Artificial Sequence: Synthetic oligonucleotide
cagcuuggguccacccaug

SEQ ID NO: 1342459 - RNA, 19 nt, Artificial Sequence
  Description of Artificial Sequence: Synthetic oligonucleotide
acccaccgagcgcagcgcu

SEQ ID NO: 1342460 - RNA, 19 nt, Artificial Sequence
  Description of Artificial Sequence: Synthetic oligonucleotide
gccucgguagcuaaaugca

SEQ ID NO: 1342461 - RNA, 19 nt, Artificial Sequence
  Description of Artificial Sequence: Synthetic oligonucleotide
cagcgaacgcaacccuuuc

SEQ ID NO: 1342462 - RNA, 19 nt, Artificial Sequence
  Description of Artificial Sequence: Synthetic oligonucleotide
gauuuccgccaugaucucu

SEQ ID NO: 1342463 - RNA, 19 nt, Artificial Sequence
  Description of Artificial Sequence: Synthetic oligonucleotide
ggaccccuggucucuaauc

SEQ ID NO: 1342464 - RNA, 19 nt, Artificial Sequence
  Description of Artificial Sequence: Synthetic oligonucleotide
acacgcuguaggaagugua

SEQ ID NO: 1342465 - RNA, 19 nt, Artificial Sequence
  Description of Artificial Sequence: Synthetic oligonucleotide
ggugaagcggugacucuac

SEQ ID NO: 1342466 - RNA, 19 nt, Artificial Sequence
  Description of Artificial Sequence: Synthetic oligonucleotide
augcccaacaagagccgca

SEQ ID NO: 1342467 - RNA, 19 nt, Artificial Sequence
  Description of Artificial Sequence: Synthetic oligonucleotide
cacucccagccucgguagc

SEQ ID NO: 1342468 - RNA, 19 nt, Artificial Sequence
  Description of Artificial Sequence: Synthetic oligonucleotide
ggugacucuacaacauaaa

SEQ ID NO: 1342469 - RNA, 19 nt, Artificial Sequence
  Description of Artificial Sequence: Synthetic oligonucleotide
cagguagcuccauguccuc

SEQ ID NO: 1342470 - RNA, 19 nt, Artificial Sequence
  Description of Artificial Sequence: Synthetic oligonucleotide
aagagccgcaggaccccug

SEQ ID NO: 1342471 - RNA, 19 nt, Artificial Sequence
  Description of Artificial Sequence: Synthetic oligonucleotide
gugaagcggugacucuaca

SEQ ID NO: 1342472 - RNA, 19 nt, Artificial Sequence
  Description of Artificial Sequence: Synthetic oligonucleotide
guucccgggcaucaaaguu

SEQ ID NO: 1342473 - RNA, 19 nt, Artificial Sequence
  Description of Artificial Sequence: Synthetic oligonucleotide
auccgacaguggguggaag

SEQ ID NO: 1342474 - RNA, 19 nt, Artificial Sequence
  Description of Artificial Sequence: Synthetic oligonucleotide
ggcuaccacagcagguaag

SEQ ID NO: 1342475 - RNA, 19 nt, Artificial Sequence
  Description of Artificial Sequence: Synthetic oligonucleotide
gggacgcuguucucuacuc

SEQ ID NO: 1342476 - RNA, 19 nt, Artificial Sequence
  Description of Artificial Sequence: Synthetic oligonucleotide
gauggcgugaccacccauu

SEQ ID NO: 1342477 - RNA, 19 nt, Artificial Sequence
  Description of Artificial Sequence: Synthetic oligonucleotide
cacagggagguauggugua

SEQ ID NO: 1342478 - RNA, 19 nt, Artificial Sequence
  Description of Artificial Sequence: Synthetic oligonucleotide
uggguccacccaugauggu

SEQ ID NO: 1342479 - RNA, 19 nt, Artificial Sequence
  Description of Artificial Sequence: Synthetic oligonucleotide
caugucguauuccguuugu

SEQ ID NO: 1342480 - RNA, 19 nt, Artificial Sequence
  Description of Artificial Sequence: Synthetic oligonucleotide
cuggagcgcaccacuaagu

SEQ ID NO: 1342481 - RNA, 19 nt, Artificial Sequence
  Description of Artificial Sequence: Synthetic oligonucleotide
caggcagcuuggguccacc

SEQ ID NO: 1342482 - RNA, 19 nt, Artificial Sequence
  Description of Artificial Sequence: Synthetic oligonucleotide
cgaaccgagccgcuccugg

SEQ ID NO: 1342483 - RNA, 19 nt, Artificial Sequence
  Description of Artificial Sequence: Synthetic oligonucleotide
agcagccuacaugggaauu

SEQ ID NO: 1342484 - RNA, 19 nt, Artificial Sequence
  Description of Artificial Sequence: Synthetic oligonucleotide
ugaaagcuucgugcaucuu

SEQ ID NO: 1342485 - RNA, 19 nt, Artificial Sequence
  Description of Artificial Sequence: Synthetic oligonucleotide
ggcuaccagccaguagggg

SEQ ID NO: 1342486 - RNA, 19 nt, Artificial Sequence
  Description of Artificial Sequence: Synthetic oligonucleotide
aguuggcuaccagccagua

SEQ ID NO: 1342487 - RNA, 19 nt, Artificial Sequence
  Description of Artificial Sequence: Synthetic oligonucleotide
uccagccugccaugucgua

SEQ ID NO: 1342488 - RNA, 19 nt, Artificial Sequence
  Description of Artificial Sequence: Synthetic oligonucleotide
cuacagccugggccugcag

SEQ ID NO: 1342489 - RNA, 19 nt, Artificial Sequence
  Description of Artificial Sequence: Synthetic oligonucleotide
gcagguaagcagguccuca

SEQ ID NO: 1342490 - RNA, 19 nt, Artificial Sequence
  Description of Artificial Sequence: Synthetic oligonucleotide
ggcaagagagcggaaucaa

SEQ ID NO: 1342491 - RNA, 19 nt, Artificial Sequence
  Description of Artificial Sequence: Synthetic oligonucleotide
gcggauggcgugaccaccc

SEQ ID NO: 1342492 - RNA, 19 nt, Artificial Sequence
  Description of Artificial Sequence: Synthetic oligonucleotide
cuacaacauaaagacguuu

SEQ ID NO: 1342493 - RNA, 19 nt, Artificial Sequence
  Description of Artificial Sequence: Synthetic oligonucleotide
ccucacagcucuugguaca

SEQ ID NO: 1342494 - RNA, 19 nt, Artificial Sequence
  Description of Artificial Sequence: Synthetic oligonucleotide
gugcgagggauuccagcua

SEQ ID NO: 1342495 - RNA, 19 nt, Artificial Sequence
  Description of Artificial Sequence: Synthetic oligonucleotide
ccuaaggacuggccaacca

SEQ ID NO: 1342496 - RNA, 19 nt, Artificial Sequence
  Description of Artificial Sequence: Synthetic oligonucleotide
augguaccacacagccucu

SEQ ID NO: 1342497 - RNA, 19 nt, Artificial Sequence
  Description of Artificial Sequence: Synthetic oligonucleotide
ccuguuugccucacuccca

SEQ ID NO: 1342498 - RNA, 19 nt, Artificial Sequence
  Description of Artificial Sequence: Synthetic oligonucleotide
aggcuaggaugcaggcugu

SEQ ID NO: 1342499 - RNA, 19 nt, Artificial Sequence
  Description of Artificial Sequence: Synthetic oligonucleotide
cagagggauagccaccguu

SEQ ID NO: 1342500 - RNA, 19 nt, Artificial Sequence
  Description of Artificial Sequence: Synthetic oligonucleotide
ggucagugcgagggauucc

SEQ ID NO: 1342501 - RNA, 19 nt, Artificial Sequence
  Description of Artificial Sequence: Synthetic oligonucleotide
ggaugcggauggcgugacc

SEQ ID NO: 1342502 - RNA, 19 nt, Artificial Sequence
  Description of Artificial Sequence: Synthetic oligonucleotide
augcagggauaaacucccu

SEQ ID NO: 1342503 - RNA, 19 nt, Artificial Sequence
  Description of Artificial Sequence: Synthetic oligonucleotide
gccgggagccauugacaug

SEQ ID NO: 1342504 - RNA, 19 nt, Artificial Sequence
  Description of Artificial Sequence: Synthetic oligonucleotide
cggugacucuacaacauaa

SEQ ID NO: 1342505 - RNA, 19 nt, Artificial Sequence
  Description of Artificial Sequence: Synthetic oligonucleotide
cucagcgaacgcaacccuu

SEQ ID NO: 1342506 - RNA, 19 nt, Artificial Sequence
  Description of Artificial Sequence: Synthetic oligonucleotide
gcucugauggcagguagcu

SEQ ID NO: 1342507 - RNA, 19 nt, Artificial Sequence
  Description of Artificial Sequence: Synthetic oligonucleotide
cgugaccacccauuauguc

SEQ ID NO: 1342508 - RNA, 19 nt, Artificial Sequence
  Description of Artificial Sequence: Synthetic oligonucleotide
cugcacccaccgagcgcag

SEQ ID NO: 1342509 - RNA, 19 nt, Artificial Sequence
  Description of Artificial Sequence: Synthetic oligonucleotide
ggguccacccaugauggua

SEQ ID NO: 1342510 - RNA, 19 nt, Artificial Sequence
  Description of Artificial Sequence: Synthetic oligonucleotide
guuugauaguugggcaguu

SEQ ID NO: 1342511 - RNA, 19 nt, Artificial Sequence
  Description of Artificial Sequence: Synthetic oligonucleotide
gggugaagcggugacucua

SEQ ID NO: 1342512 - RNA, 19 nt, Artificial Sequence
  Description of Artificial Sequence: Synthetic oligonucleotide
cugccaugucguauuccgu

SEQ ID NO: 1342513 - RNA, 19 nt, Artificial Sequence
  Description of Artificial Sequence: Synthetic oligonucleotide
cccguagugcuuaucuucu

SEQ ID NO: 1342514 - RNA, 19 nt, Artificial Sequence
  Description of Artificial Sequence: Synthetic oligonucleotide
cagccuacaugggaauugu

SEQ ID NO: 1342515 - RNA, 19 nt, Artificial Sequence
  Description of Artificial Sequence: Synthetic oligonucleotide
gccgcaggaccccuggucu

SEQ ID NO: 1342516 - RNA, 19 nt, Artificial Sequence
  Description of Artificial Sequence: Synthetic oligonucleotide
caaccaggucacagaacau

SEQ ID NO: 1342517 - RNA, 19 nt, Artificial Sequence
  Description of Artificial Sequence: Synthetic oligonucleotide
gcggugacucuacaacaua

SEQ ID NO: 1342518 - RNA, 19 nt, Artificial Sequence
  Description of Artificial Sequence: Synthetic oligonucleotide
cccuaaggacuggccaacc

SEQ ID NO: 1342519 - RNA, 19 nt, Artificial Sequence
  Description of Artificial Sequence: Synthetic oligonucleotide
cauccgacaguggguggaa

SEQ ID NO: 1342520 - RNA, 19 nt, Artificial Sequence
  Description of Artificial Sequence: Synthetic oligonucleotide
ccgacaguggguggaagga

SEQ ID NO: 1342521 - RNA, 19 nt, Artificial Sequence
  Description of Artificial Sequence: Synthetic oligonucleotide
agccuacaugggaauugua

SEQ ID NO: 1342522 - RNA, 19 nt, Artificial Sequence
  Description of Artificial Sequence: Synthetic oligonucleotide
uggugcucacagggaggua

SEQ ID NO: 1342523 - RNA, 19 nt, Artificial Sequence
  Description of Artificial Sequence: Synthetic oligonucleotide
ccgcuccuggccucuggag

SEQ ID NO: 1342524 - RNA, 19 nt, Artificial Sequence
  Description of Artificial Sequence: Synthetic oligonucleotide
gggccgggagccauugaca

SEQ ID NO: 1342525 - RNA, 19 nt, Artificial Sequence
  Description of Artificial Sequence: Synthetic oligonucleotide
agccgccgagccgaaccga

SEQ ID NO: 1342526 - RNA, 19 nt, Artificial Sequence
  Description of Artificial Sequence: Synthetic oligonucleotide
cgugcaucuuagaugaauu

SEQ ID NO: 1342527 - RNA, 19 nt, Artificial Sequence
  Description of Artificial Sequence: Synthetic oligonucleotide
cggaaucaaggaccaccac

SEQ ID NO: 1342528 - RNA, 19 nt, Artificial Sequence
  Description of Artificial Sequence: Synthetic oligonucleotide
gccgcuccuggccucugga

SEQ ID NO: 1342529 - RNA, 19 nt, Artificial Sequence
  Description of Artificial Sequence: Synthetic oligonucleotide
caggucagugcgagggauu

SEQ ID NO: 1342530 - RNA, 19 nt, Artificial Sequence
  Description of Artificial Sequence: Synthetic oligonucleotide
gcgugaccacccauuaugu

SEQ ID NO: 1342531 - RNA, 19 nt, Artificial Sequence
  Description of Artificial Sequence: Synthetic oligonucleotide
cacuuaggagugucuccuu

SEQ ID NO: 1342532 - RNA, 19 nt, Artificial Sequence
  Description of Artificial Sequence: Synthetic oligonucleotide
ccgcaggaccccuggucuc

SEQ ID NO: 1342533 - RNA, 19 nt, Artificial Sequence
  Description of Artificial Sequence: Synthetic oligonucleotide
caccgagcgcagcgcuaca

SEQ ID NO: 1342534 - RNA, 19 nt, Artificial Sequence
  Description of Artificial Sequence: Synthetic oligonucleotide
cgcaccacuaaguacccuu

SEQ ID NO: 1342535 - RNA, 19 nt, Artificial Sequence
  Description of Artificial Sequence: Synthetic oligonucleotide
cguauuccguuuguugaua

SEQ ID NO: 1342536 - RNA, 19 nt, Artificial Sequence
  Description of Artificial Sequence: Synthetic oligonucleotide
guguacccguagugcuuau

SEQ ID NO: 1342537 - RNA, 19 nt, Artificial Sequence
  Description of Artificial Sequence: Synthetic oligonucleotide
gcgcagcgcuacagccugg

SEQ ID NO: 1342538 - RNA, 19 nt, Artificial Sequence
  Description of Artificial Sequence: Synthetic oligonucleotide
gccgaaccgagccgcuccu

SEQ ID NO: 1342539 - RNA, 19 nt, Artificial Sequence
  Description of Artificial Sequence: Synthetic oligonucleotide
cgguagcuaaaugcaggga

SEQ ID NO: 1342540 - RNA, 19 nt, Artificial Sequence
  Description of Artificial Sequence: Synthetic oligonucleotide
cccagccucgguagcuaaa

SEQ ID NO: 1342541 - RNA, 19 nt, Artificial Sequence
  Description of Artificial Sequence: Synthetic oligonucleotide
cugcagccgccgagccgaa

SEQ ID NO: 1342542 - RNA, 19 nt, Artificial Sequence
  Description of Artificial Sequence: Synthetic oligonucleotide
ccagccugccaugucguau

SEQ ID NO: 1342543 - RNA, 19 nt, Artificial Sequence
  Description of Artificial Sequence: Synthetic oligonucleotide
ccguagugcuuaucuucuu

SEQ ID NO: 1342544 - RNA, 19 nt, Artificial Sequence
  Description of Artificial Sequence: Synthetic oligonucleotide
cacccuccacugggccauu

SEQ ID NO: 1342545 - RNA, 19 nt, Artificial Sequence
  Description of Artificial Sequence: Synthetic oligonucleotide
uuauuuaaaacuuacaagc

SEQ ID NO: 1342546 - RNA, 19 nt, Artificial Sequence
  Description of Artificial Sequence: Synthetic oligonucleotide
auauacugaaauuacagcc

SEQ ID NO: 1342547 - RNA, 19 nt, Artificial Sequence
  Description of Artificial Sequence: Synthetic oligonucleotide
aauuaauauggcuacaaag

SEQ ID NO: 1342548 - RNA, 19 nt, Artificial Sequence
  Description of Artificial Sequence: Synthetic oligonucleotide
aaugaaaucucccaauccg

SEQ ID NO: 1342549 - RNA, 19 nt, Artificial Sequence
  Description of Artificial Sequence: Synthetic oligonucleotide
uuuaaaacuuacaagcggg

SEQ ID NO: 1342550 - RNA, 19 nt, Artificial Sequence
  Description of Artificial Sequence: Synthetic oligonucleotide
auuaauauggcuacaaagc

SEQ ID NO: 1342551 - RNA, 19 nt, Artificial Sequence
  Description of Artificial Sequence: Synthetic oligonucleotide
uauaaagaaccacaggagg

SEQ ID NO: 1342552 - RNA, 19 nt, Artificial Sequence
  Description of Artificial Sequence: Synthetic oligonucleotide
aaaugaaaucucccaaucc

SEQ ID NO: 1342553 - RNA, 19 nt, Artificial Sequence
  Description of Artificial Sequence: Synthetic oligonucleotide
uauguuagauguaaaauug

SEQ ID NO: 1342554 - RNA, 19 nt, Artificial Sequence
  Description of Artificial Sequence: Synthetic oligonucleotide
auuacagccaagaugagcc

SEQ ID NO: 1342555 - RNA, 19 nt, Artificial Sequence
  Description of Artificial Sequence: Synthetic oligonucleotide
aaugagacuguggaaaccc

SEQ ID NO: 1342556 - RNA, 19 nt, Artificial Sequence
  Description of Artificial Sequence: Synthetic oligonucleotide
agaaacaauaagccaaggc

SEQ ID NO: 1342557 - RNA, 19 nt, Artificial Sequence
  Description of Artificial Sequence: Synthetic oligonucleotide
aaaacuuacaagcgggcag

SEQ ID NO: 1342558 - RNA, 19 nt, Artificial Sequence
  Description of Artificial Sequence: Synthetic oligonucleotide
aauauggcuacaaagcagg

SEQ ID NO: 1342559 - RNA, 19 nt, Artificial Sequence
  Description of Artificial Sequence: Synthetic oligonucleotide
uuauaaagaaccacaggag

SEQ ID NO: 1342560 - RNA, 19 nt, Artificial Sequence
  Description of Artificial Sequence: Synthetic oligonucleotide
uauacauccagacuggccu

SEQ ID NO: 1342561 - RNA, 19 nt, Artificial Sequence
  Description of Artificial Sequence: Synthetic oligonucleotide
aucauaaugagauacgccu

SEQ ID NO: 1342562 - RNA, 19 nt, Artificial Sequence
  Description of Artificial Sequence: Synthetic oligonucleotide
aaucauauacugaaauuac

SEQ ID NO: 1342563 - RNA, 19 nt, Artificial Sequence
  Description of Artificial Sequence: Synthetic oligonucleotide
aacccauauacauccagac

SEQ ID NO: 1342564 - RNA, 19 nt, Artificial Sequence
  Description of Artificial Sequence: Synthetic oligonucleotide
aguacuagaguccugucuc

SEQ ID NO: 1342565 - RNA, 19 nt, Artificial Sequence
  Description of Artificial Sequence: Synthetic oligonucleotide
agaagaaacauccaugggu

SEQ ID NO: 1342566 - RNA, 19 nt, Artificial Sequence
  Description of Artificial Sequence: Synthetic oligonucleotide
aaccauaccauuguugagg

SEQ ID NO: 1342567 - RNA, 19 nt, Artificial Sequence
  Description of Artificial Sequence: Synthetic oligonucleotide
acuguggaaacccagaacu

SEQ ID NO: 1342568 - RNA, 19 nt, Artificial Sequence
  Description of Artificial Sequence: Synthetic oligonucleotide
cagugaauggcaaucaucc

SEQ ID NO: 1342569 - RNA, 19 nt, Artificial Sequence
  Description of Artificial Sequence: Synthetic oligonucleotide
uuaaugaucaaagaagaaa

SEQ ID NO: 1342570 - RNA, 19 nt, Artificial Sequence
  Description of Artificial Sequence: Synthetic oligonucleotide
uaacguaaggcacaggcca

SEQ ID NO: 1342571 - RNA, 19 nt, Artificial Sequence
  Description of Artificial Sequence: Synthetic oligonucleotide
aaaauugauggaaugcaag

SEQ ID NO: 1342572 - RNA, 19 nt, Artificial Sequence
  Description of Artificial Sequence: Synthetic oligonucleotide
gauagaaacaauaagccaa

SEQ ID NO: 1342573 - RNA, 19 nt, Artificial Sequence
  Description of Artificial Sequence: Synthetic oligonucleotide
cucaggauuaagcaaaccc

SEQ ID NO: 1342574 - RNA, 19 nt, Artificial Sequence
  Description of Artificial Sequence: Synthetic oligonucleotide
uguagcaccuguauuauaa

SEQ ID NO: 1342575 - RNA, 19 nt, Artificial Sequence
  Description of Artificial Sequence: Synthetic oligonucleotide
ucaaccagcauacgaagug

SEQ ID NO: 1342576 - RNA, 19 nt, Artificial Sequence
  Description of Artificial Sequence: Synthetic oligonucleotide
uuaggauacugcuggaaag

SEQ ID NO: 1342577 - RNA, 19 nt, Artificial Sequence
  Description of Artificial Sequence: Synthetic oligonucleotide
uguuucaaccagcauacga

SEQ ID NO: 1342578 - RNA, 19 nt, Artificial Sequence
  Description of Artificial Sequence: Synthetic oligonucleotide
aaugaucagagccacggau

SEQ ID NO: 1342579 - RNA, 19 nt, Artificial Sequence
  Description of Artificial Sequence: Synthetic oligonucleotide
ugugcauuguacuuggggu

SEQ ID NO: 1342580 - RNA, 19 nt, Artificial Sequence
  Description of Artificial Sequence: Synthetic oligonucleotide
acgaaguggaccuuugggg

SEQ ID NO: 1342581 - RNA, 19 nt, Artificial Sequence
  Description of Artificial Sequence: Synthetic oligonucleotide
uucaccaaccauaccauug

SEQ ID NO: 1342582 - RNA, 19 nt, Artificial Sequence
  Description of Artificial Sequence: Synthetic oligonucleotide
uguuagauguaaaauugau

SEQ ID NO: 1342583 - RNA, 19 nt, Artificial Sequence
  Description of Artificial Sequence: Synthetic oligonucleotide
augacucucaggauuaagc

SEQ ID NO: 1342584 - RNA, 19 nt, Artificial Sequence
  Description of Artificial Sequence: Synthetic oligonucleotide
agauagaaacaauaagcca

SEQ ID NO: 1342585 - RNA, 19 nt, Artificial Sequence
  Description of Artificial Sequence: Synthetic oligonucleotide
aaaacagccaccaaaucau

SEQ ID NO: 1342586 - RNA, 19 nt, Artificial Sequence
  Description of Artificial Sequence: Synthetic oligonucleotide
uugaucgauaguuccauca

SEQ ID NO: 1342587 - RNA, 19 nt, Artificial Sequence
  Description of Artificial Sequence: Synthetic oligonucleotide
augguuguguuccagucuc

SEQ ID NO: 1342588 - RNA, 19 nt, Artificial Sequence
  Description of Artificial Sequence: Synthetic oligonucleotide
caagcgggcagcaaaagag

SEQ ID NO: 1342589 - RNA, 19 nt, Artificial Sequence
  Description of Artificial Sequence: Synthetic oligonucleotide
uuuaaugaucaaagaagaa

SEQ ID NO: 1342590 - RNA, 19 nt, Artificial Sequence
  Description of Artificial Sequence: Synthetic oligonucleotide
cagcaaaagagccuaagag

SEQ ID NO: 1342591 - RNA, 19 nt, Artificial Sequence
  Description of Artificial Sequence: Synthetic oligonucleotide
guauuauaaagaaccacag

SEQ ID NO: 1342592 - RNA, 19 nt, Artificial Sequence
  Description of Artificial Sequence: Synthetic oligonucleotide
aaacaauaagccaaggcau

SEQ ID NO: 1342593 - RNA, 19 nt, Artificial Sequence
  Description of Artificial Sequence: Synthetic oligonucleotide
ucauaaugagauacgccug

SEQ ID NO: 1342594 - RNA, 19 nt, Artificial Sequence
  Description of Artificial Sequence: Synthetic oligonucleotide
ugaucauaaugagauacgc

SEQ ID NO: 1342595 - RNA, 19 nt, Artificial Sequence
  Description of Artificial Sequence: Synthetic oligonucleotide
ucauugguuaggauacugc

SEQ ID NO: 1342596 - RNA, 19 nt, Artificial Sequence
  Description of Artificial Sequence: Synthetic oligonucleotide
acuagaguccugucucucc

SEQ ID NO: 1342597 - RNA, 19 nt, Artificial Sequence
  Description of Artificial Sequence: Synthetic oligonucleotide
cauaaugagauacgccugc

SEQ ID NO: 1342598 - RNA, 19 nt, Artificial Sequence
  Description of Artificial Sequence: Synthetic oligonucleotide
agaugaugagugucagugc

SEQ ID NO: 1342599 - RNA, 19 nt, Artificial Sequence
  Description of Artificial Sequence: Synthetic oligonucleotide
ucuaacugcagguauguua

SEQ ID NO: 1342600 - RNA, 19 nt, Artificial Sequence
  Description of Artificial Sequence: Synthetic oligonucleotide
cugaucauaaugagauacg

SEQ ID NO: 1342601 - RNA, 19 nt, Artificial Sequence
  Description of Artificial Sequence: Synthetic oligonucleotide
uacuuaacgcucacagggg

SEQ ID NO: 1342602 - RNA, 19 nt, Artificial Sequence
  Description of Artificial Sequence: Synthetic oligonucleotide
uuuggguacccuucuuugg

SEQ ID NO: 1342603 - RNA, 19 nt, Artificial Sequence
  Description of Artificial Sequence: Synthetic oligonucleotide
uuuuggguacccuucuuug

SEQ ID NO: 1342604 - RNA, 19 nt, Artificial Sequence
  Description of Artificial Sequence: Synthetic oligonucleotide
auguaaaauugauggaaug

SEQ ID NO: 1342605 - RNA, 19 nt, Artificial Sequence
  Description of Artificial Sequence: Synthetic oligonucleotide
ugagguuaugacucucagg

SEQ ID NO: 1342606 - RNA, 19 nt, Artificial Sequence
  Description of Artificial Sequence: Synthetic oligonucleotide
uaggucuuaaacacuuccc

SEQ ID NO: 1342607 - RNA, 19 nt, Artificial Sequence
  Description of Artificial Sequence: Synthetic oligonucleotide
ugacucucaggauuaagca

SEQ ID NO: 1342608 - RNA, 19 nt, Artificial Sequence
  Description of Artificial Sequence: Synthetic oligonucleotide
aaugcaagcugguccauaa

SEQ ID NO: 1342609 - RNA, 19 nt, Artificial Sequence
  Description of Artificial Sequence: Synthetic oligonucleotide
cuuuggggcacaaaacagc

SEQ ID NO: 1342610 - RNA, 19 nt, Artificial Sequence
  Description of Artificial Sequence: Synthetic oligonucleotide
uggaugaccuuguagcacc

SEQ ID NO: 1342611 - RNA, 19 nt, Artificial Sequence
  Description of Artificial Sequence: Synthetic oligonucleotide
uuaccaaccagaacacugu

SEQ ID NO: 1342612 - RNA, 19 nt, Artificial Sequence
  Description of Artificial Sequence: Synthetic oligonucleotide
cagaugaugagugucagug

SEQ ID NO: 1342613 - RNA, 19 nt, Artificial Sequence
  Description of Artificial Sequence: Synthetic oligonucleotide
uccauaaagggcugcacga

SEQ ID NO: 1342614 - RNA, 19 nt, Artificial Sequence
  Description of Artificial Sequence: Synthetic oligonucleotide
aacaagacaacaacagaga

SEQ ID NO: 1342615 - RNA, 19 nt, Artificial Sequence
  Description of Artificial Sequence: Synthetic oligonucleotide
gccaagaugagccaugcgg

SEQ ID NO: 1342616 - RNA, 19 nt, Artificial Sequence
  Description of Artificial Sequence: Synthetic oligonucleotide
uuguugaggaauagaucag

SEQ ID NO: 1342617 - RNA, 19 nt, Artificial Sequence
  Description of Artificial Sequence: Synthetic oligonucleotide
guuagauguaaaauugaug

SEQ ID NO: 1342618 - RNA, 19 nt, Artificial Sequence
  Description of Artificial Sequence: Synthetic oligonucleotide
uggaaagagaguuucguuu

SEQ ID NO: 1342619 - RNA, 19 nt, Artificial Sequence
  Description of Artificial Sequence: Synthetic oligonucleotide
cauggguucuaacugcagg

SEQ ID NO: 1342620 - RNA, 19 nt, Artificial Sequence
  Description of Artificial Sequence: Synthetic oligonucleotide
guaaaauugauggaaugca

SEQ ID NO: 1342621 - RNA, 19 nt, Artificial Sequence
  Description of Artificial Sequence: Synthetic oligonucleotide
uagcaccuguauuauaaag

SEQ ID NO: 1342622 - RNA, 19 nt, Artificial Sequence
  Description of Artificial Sequence: Synthetic oligonucleotide
gaucauaaugagauacgcc

SEQ ID NO: 1342623 - RNA, 19 nt, Artificial Sequence
  Description of Artificial Sequence: Synthetic oligonucleotide
caggcuaugguuguguucc

SEQ ID NO: 1342624 - RNA, 19 nt, Artificial Sequence
  Description of Artificial Sequence: Synthetic oligonucleotide
guagaaaaugaaaucuccc

SEQ ID NO: 1342625 - RNA, 19 nt, Artificial Sequence
  Description of Artificial Sequence: Synthetic oligonucleotide
auauacauccagacuggcc

SEQ ID NO: 1342626 - RNA, 19 nt, Artificial Sequence
  Description of Artificial Sequence: Synthetic oligonucleotide
guagaaaaccagcccaaag

SEQ ID NO: 1342627 - RNA, 19 nt, Artificial Sequence
  Description of Artificial Sequence: Synthetic oligonucleotide
ugcaacuguaauguagucc

SEQ ID NO: 1342628 - RNA, 19 nt, Artificial Sequence
  Description of Artificial Sequence: Synthetic oligonucleotide
gaguaguaguaacguaagg

SEQ ID NO: 1342629 - RNA, 19 nt, Artificial Sequence
  Description of Artificial Sequence: Synthetic oligonucleotide
gaaccugagguuaugacuc

SEQ ID NO: 1342630 - RNA, 19 nt, Artificial Sequence
  Description of Artificial Sequence: Synthetic oligonucleotide
ugaucagagccacggaugu

SEQ ID NO: 1342631 - RNA, 19 nt, Artificial Sequence
  Description of Artificial Sequence: Synthetic oligonucleotide
acaauaagccaaggcaugg

SEQ ID NO: 1342632 - RNA, 19 nt, Artificial Sequence
  Description of Artificial Sequence: Synthetic oligonucleotide
ucaccaaccauaccauugu

SEQ ID NO: 1342633 - RNA, 19 nt, Artificial Sequence
  Description of Artificial Sequence: Synthetic oligonucleotide
cacaggggacuguugaucg

SEQ ID NO: 1342634 - RNA, 19 nt, Artificial Sequence
  Description of Artificial Sequence: Synthetic oligonucleotide
caauccgaguuuuacuccc

SEQ ID NO: 1342635 - RNA, 19 nt, Artificial Sequence
  Description of Artificial Sequence: Synthetic oligonucleotide
auaaagaccagggccauca

SEQ ID NO: 1342636 - RNA, 19 nt, Artificial Sequence
  Description of Artificial Sequence: Synthetic oligonucleotide
ugauguccuuauuuaaaac

SEQ ID NO: 1342637 - RNA, 19 nt, Artificial Sequence
  Description of Artificial Sequence: Synthetic oligonucleotide
cagaacuuacuuaacgcuc

SEQ ID NO: 1342638 - RNA, 19 nt, Artificial Sequence
  Description of Artificial Sequence: Synthetic oligonucleotide
ggauucagcuaguacaugc

SEQ ID NO: 1342639 - RNA, 19 nt, Artificial Sequence
  Description of Artificial Sequence: Synthetic oligonucleotide
gcaacuguaauguagucca

SEQ ID NO: 1342640 - RNA, 19 nt, Artificial Sequence
  Description of Artificial Sequence: Synthetic oligonucleotide
gaguuuuacuccccuuucc

SEQ ID NO: 1342641 - RNA, 19 nt, Artificial Sequence
  Description of Artificial Sequence: Synthetic oligonucleotide
ggagguacuugauaaagac

SEQ ID NO: 1342642 - RNA, 19 nt, Artificial Sequence
  Description of Artificial Sequence: Synthetic oligonucleotide
ugcacgagauagucugugg

SEQ ID NO: 1342643 - RNA, 19 nt, Artificial Sequence
  Description of Artificial Sequence: Synthetic oligonucleotide
aauccgaguuuuacucccc

SEQ ID NO: 1342644 - RNA, 19 nt, Artificial Sequence
  Description of Artificial Sequence: Synthetic oligonucleotide
cuugacucaggaguggagc

SEQ ID NO: 1342645 - RNA, 19 nt, Artificial Sequence
  Description of Artificial Sequence: Synthetic oligonucleotide
uucaaccagcauacgaagu

SEQ ID NO: 1342646 - RNA, 19 nt, Artificial Sequence
  Description of Artificial Sequence: Synthetic oligonucleotide
ugaucgauaguuccaucau

SEQ ID NO: 1342647 - RNA, 19 nt, Artificial Sequence
  Description of Artificial Sequence: Synthetic oligonucleotide
ugaagauggcgaguaguag

SEQ ID NO: 1342648 - RNA, 19 nt, Artificial Sequence
  Description of Artificial Sequence: Synthetic oligonucleotide
ucaucguucccaguacuag

SEQ ID NO: 1342649 - RNA, 19 nt, Artificial Sequence
  Description of Artificial Sequence: Synthetic oligonucleotide
ugagauacgccugcugcag

SEQ ID NO: 1342650 - RNA, 19 nt, Artificial Sequence
  Description of Artificial Sequence: Synthetic oligonucleotide
auacgaaguggaccuuugg

SEQ ID NO: 1342651 - RNA, 19 nt, Artificial Sequence
  Description of Artificial Sequence: Synthetic oligonucleotide
ucaggagugcaacuguaau

SEQ ID NO: 1342652 - RNA, 19 nt, Artificial Sequence
  Description of Artificial Sequence: Synthetic oligonucleotide
cacggaugugacaggaggg

SEQ ID NO: 1342653 - RNA, 19 nt, Artificial Sequence
  Description of Artificial Sequence: Synthetic oligonucleotide
ugcaggauucagcuaguac

SEQ ID NO: 1342654 - RNA, 19 nt, Artificial Sequence
  Description of Artificial Sequence: Synthetic oligonucleotide
uagaaacaauaagccaagg

SEQ ID NO: 1342655 - RNA, 19 nt, Artificial Sequence
  Description of Artificial Sequence: Synthetic oligonucleotide
auagucuguggcaaaguag

SEQ ID NO: 1342656 - RNA, 19 nt, Artificial Sequence
  Description of Artificial Sequence: Synthetic oligonucleotide
gaagugggccuuuccagug

SEQ ID NO: 1342657 - RNA, 19 nt, Artificial Sequence
  Description of Artificial Sequence: Synthetic oligonucleotide
agugcaacuguaauguagu

SEQ ID NO: 1342658 - RNA, 19 nt, Artificial Sequence
  Description of Artificial Sequence: Synthetic oligonucleotide
uuacaagcgggcagcaaaa

SEQ ID NO: 1342659 - RNA, 19 nt, Artificial Sequence
  Description of Artificial Sequence: Synthetic oligonucleotide
acuuaacgcucacagggga

SEQ ID NO: 1342660 - RNA, 19 nt, Artificial Sequence
  Description of Artificial Sequence: Synthetic oligonucleotide
accauaccauuguugagga

SEQ ID NO: 1342661 - RNA, 19 nt, Artificial Sequence
  Description of Artificial Sequence: Synthetic oligonucleotide
gaaucgagugcagggcucg

SEQ ID NO: 1342662 - RNA, 19 nt, Artificial Sequence
  Description of Artificial Sequence: Synthetic oligonucleotide
gaagauggcgaguaguagu

SEQ ID NO: 1342663 - RNA, 19 nt, Artificial Sequence
  Description of Artificial Sequence: Synthetic oligonucleotide
caggagugcaacuguaaug

SEQ ID NO: 1342664 - RNA, 19 nt, Artificial Sequence
  Description of Artificial Sequence: Synthetic oligonucleotide
agcaccuguauuauaaaga

SEQ ID NO: 1342665 - RNA, 19 nt, Artificial Sequence
  Description of Artificial Sequence: Synthetic oligonucleotide
agaucaggagugcaacugu

SEQ ID NO: 1342666 - RNA, 19 nt, Artificial Sequence
  Description of Artificial Sequence: Synthetic oligonucleotide
auggcgaguaguaguaacg

SEQ ID NO: 1342667 - RNA, 19 nt, Artificial Sequence
  Description of Artificial Sequence: Synthetic oligonucleotide
agaacuuacuuaacgcuca

SEQ ID NO: 1342668 - RNA, 19 nt, Artificial Sequence
  Description of Artificial Sequence: Synthetic oligonucleotide
gcucguuucggccuuacag

SEQ ID NO: 1342669 - RNA, 19 nt, Artificial Sequence
  Description of Artificial Sequence: Synthetic oligonucleotide
uaggauacugcuggaaagu

SEQ ID NO: 1342670 - RNA, 19 nt, Artificial Sequence
  Description of Artificial Sequence: Synthetic oligonucleotide
gaagcuuuaccaaccagaa

SEQ ID NO: 1342671 - RNA, 19 nt, Artificial Sequence
  Description of Artificial Sequence: Synthetic oligonucleotide
uacaguuuucaguugucuu

SEQ ID NO: 1342672 - RNA, 19 nt, Artificial Sequence
  Description of Artificial Sequence: Synthetic oligonucleotide
gguugcugaagcuuuacca

SEQ ID NO: 1342673 - RNA, 19 nt, Artificial Sequence
  Description of Artificial Sequence: Synthetic oligonucleotide
ggaaagagaguuucguuuc

SEQ ID NO: 1342674 - RNA, 19 nt, Artificial Sequence
  Description of Artificial Sequence: Synthetic oligonucleotide
gaauagaucagagcuggaa

SEQ ID NO: 1342675 - RNA, 19 nt, Artificial Sequence
  Description of Artificial Sequence: Synthetic oligonucleotide
uuaacgcucacaggggacu

SEQ ID NO: 1342676 - RNA, 19 nt, Artificial Sequence
  Description of Artificial Sequence: Synthetic oligonucleotide
caaccagcauacgaagugg

SEQ ID NO: 1342677 - RNA, 19 nt, Artificial Sequence
  Description of Artificial Sequence: Synthetic oligonucleotide
cuuaacgcucacaggggac

SEQ ID NO: 1342678 - RNA, 19 nt, Artificial Sequence
  Description of Artificial Sequence: Synthetic oligonucleotide
uguugaucgauaguuccau

SEQ ID NO: 1342679 - RNA, 19 nt, Artificial Sequence
  Description of Artificial Sequence: Synthetic oligonucleotide
ucggccuuacaguuuucag

SEQ ID NO: 1342680 - RNA, 19 nt, Artificial Sequence
  Description of Artificial Sequence: Synthetic oligonucleotide
uauggcuacaaagcaggcu

SEQ ID NO: 1342681 - RNA, 19 nt, Artificial Sequence
  Description of Artificial Sequence: Synthetic oligonucleotide
aguacaugcuuuauuucca

SEQ ID NO: 1342682 - RNA, 19 nt, Artificial Sequence
  Description of Artificial Sequence: Synthetic oligonucleotide
cuuacaagcgggcagcaaa

SEQ ID NO: 1342683 - RNA, 19 nt, Artificial Sequence
  Description of Artificial Sequence: Synthetic oligonucleotide
augagauacgccugcugca

SEQ ID NO: 1342684 - RNA, 19 nt, Artificial Sequence
  Description of Artificial Sequence: Synthetic oligonucleotide
acccauauacauccagacu

SEQ ID NO: 1342685 - RNA, 19 nt, Artificial Sequence
  Description of Artificial Sequence: Synthetic oligonucleotide
guaacguaaggcacaggcc

SEQ ID NO: 1342686 - RNA, 19 nt, Artificial Sequence
  Description of Artificial Sequence: Synthetic oligonucleotide
cauauucaccaaccauacc

SEQ ID NO: 1342687 - RNA, 19 nt, Artificial Sequence
  Description of Artificial Sequence: Synthetic oligonucleotide
acaagcgggcagcaaaaga

SEQ ID NO: 1342688 - RNA, 19 nt, Artificial Sequence
  Description of Artificial Sequence: Synthetic oligonucleotide
uacaugcuuuauuuccaac

SEQ ID NO: 1342689 - RNA, 19 nt, Artificial Sequence
  Description of Artificial Sequence: Synthetic oligonucleotide
aagcuugcaaguaugucua

SEQ ID NO: 1342690 - RNA, 19 nt, Artificial Sequence
  Description of Artificial Sequence: Synthetic oligonucleotide
cccagaacuuacuuaacgc

SEQ ID NO: 1342691 - RNA, 19 nt, Artificial Sequence
  Description of Artificial Sequence: Synthetic oligonucleotide
cauacgaaguggaccuuug

SEQ ID NO: 1342692 - RNA, 19 nt, Artificial Sequence
  Description of Artificial Sequence: Synthetic oligonucleotide
aucguucccaguacuagag

SEQ ID NO: 1342693 - RNA, 19 nt, Artificial Sequence
  Description of Artificial Sequence: Synthetic oligonucleotide
ucccaauccgaguuuuacu

SEQ ID NO: 1342694 - RNA, 19 nt, Artificial Sequence
  Description of Artificial Sequence: Synthetic oligonucleotide
uccagaucaggagugcaac

SEQ ID NO: 1342695 - RNA, 19 nt, Artificial Sequence
  Description of Artificial Sequence: Synthetic oligonucleotide
caccuguauuauaaagaac

SEQ ID NO: 1342696 - RNA, 19 nt, Artificial Sequence
  Description of Artificial Sequence: Synthetic oligonucleotide
gcuguuucaaccagcauac

SEQ ID NO: 1342697 - RNA, 19 nt, Artificial Sequence
  Description of Artificial Sequence: Synthetic oligonucleotide
ugcgguccauucagggagg

SEQ ID NO: 1342698 - RNA, 19 nt, Artificial Sequence
  Description of Artificial Sequence: Synthetic oligonucleotide
auaagccaaggcauggaug

SEQ ID NO: 1342699 - RNA, 19 nt, Artificial Sequence
  Description of Artificial Sequence: Synthetic oligonucleotide
augaucagagccacggaug

SEQ ID NO: 1342700 - RNA, 19 nt, Artificial Sequence
  Description of Artificial Sequence: Synthetic oligonucleotide
ucgauaguuccaucauuuc

SEQ ID NO: 1342701 - RNA, 19 nt, Artificial Sequence
  Description of Artificial Sequence: Synthetic oligonucleotide
ggccaauuaauauggcuac

SEQ ID NO: 1342702 - RNA, 19 nt, Artificial Sequence
  Description of Artificial Sequence: Synthetic oligonucleotide
agacuguggaaacccagaa

SEQ ID NO: 1342703 - RNA, 19 nt, Artificial Sequence
  Description of Artificial Sequence: Synthetic oligonucleotide
aagauggcgaguaguagua

SEQ ID NO: 1342704 - RNA, 19 nt, Artificial Sequence
  Description of Artificial Sequence: Synthetic oligonucleotide
uggguacccuucuuugggc

SEQ ID NO: 1342705 - RNA, 19 nt, Artificial Sequence
  Description of Artificial Sequence: Synthetic oligonucleotide
agaugagccaugcggucca

SEQ ID NO: 1342706 - RNA, 19 nt, Artificial Sequence
  Description of Artificial Sequence: Synthetic oligonucleotide
cucacagaaccccuggaca

SEQ ID NO: 1342707 - RNA, 19 nt, Artificial Sequence
  Description of Artificial Sequence: Synthetic oligonucleotide
gaacuuacuuaacgcucac

SEQ ID NO: 1342708 - RNA, 19 nt, Artificial Sequence
  Description of Artificial Sequence: Synthetic oligonucleotide
cauauacauccagacuggc

SEQ ID NO: 1342709 - RNA, 19 nt, Artificial Sequence
  Description of Artificial Sequence: Synthetic oligonucleotide
auguccuuauuuaaaacuu

SEQ ID NO: 1342710 - RNA, 19 nt, Artificial Sequence
  Description of Artificial Sequence: Synthetic oligonucleotide
gauguaaaauugauggaau

SEQ ID NO: 1342711 - RNA, 19 nt, Artificial Sequence
  Description of Artificial Sequence: Synthetic oligonucleotide
gguccauucagggagguac

SEQ ID NO: 1342712 - RNA, 19 nt, Artificial Sequence
  Description of Artificial Sequence: Synthetic oligonucleotide
augaaaucucccaauccga

SEQ ID NO: 1342713 - RNA, 19 nt, Artificial Sequence
  Description of Artificial Sequence: Synthetic oligonucleotide
gagccuaagagugaggccu

SEQ ID NO: 1342714 - RNA, 19 nt, Artificial Sequence
  Description of Artificial Sequence: Synthetic oligonucleotide
aggccaauuaauauggcua

SEQ ID NO: 1342715 - RNA, 19 nt, Artificial Sequence
  Description of Artificial Sequence: Synthetic oligonucleotide
cugaagcuuuaccaaccag

SEQ ID NO: 1342716 - RNA, 19 nt, Artificial Sequence
  Description of Artificial Sequence: Synthetic oligonucleotide
aguaagcuugcaaguaugu

SEQ ID NO: 1342717 - RNA, 19 nt, Artificial Sequence
  Description of Artificial Sequence: Synthetic oligonucleotide
uuuggaaccugagguuaug

SEQ ID NO: 1342718 - RNA, 19 nt, Artificial Sequence
  Description of Artificial Sequence: Synthetic oligonucleotide
caagaugagccaugcgguc

SEQ ID NO: 1342719 - RNA, 19 nt, Artificial Sequence
  Description of Artificial Sequence: Synthetic oligonucleotide
aggauggucaugacaacca

SEQ ID NO: 1342720 - RNA, 19 nt, Artificial Sequence
  Description of Artificial Sequence: Synthetic oligonucleotide
cugcagguauguuagaugu

SEQ ID NO: 1342721 - RNA, 19 nt, Artificial Sequence
  Description of Artificial Sequence: Synthetic oligonucleotide
cucucaggauuaagcaaac

SEQ ID NO: 1342722 - RNA, 19 nt, Artificial Sequence
  Description of Artificial Sequence: Synthetic oligonucleotide
uggcgaguaguaguaacgu

SEQ ID NO: 1342723 - RNA, 19 nt, Artificial Sequence
  Description of Artificial Sequence: Synthetic oligonucleotide
agcuaguacaugcuuuauu

SEQ ID NO: 1342724 - RNA, 19 nt, Artificial Sequence
  Description of Artificial Sequence: Synthetic oligonucleotide
caauuaauauggcuacaaa

SEQ ID NO: 1342725 - RNA, 19 nt, Artificial Sequence
  Description of Artificial Sequence: Synthetic oligonucleotide
ucucaggauuaagcaaacc

SEQ ID NO: 1342726 - RNA, 19 nt, Artificial Sequence
  Description of Artificial Sequence: Synthetic oligonucleotide
ggagcgaugaggccccagg

SEQ ID NO: 1342727 - RNA, 19 nt, Artificial Sequence
  Description of Artificial Sequence: Synthetic oligonucleotide
agaaucgagugcagggcuc

SEQ ID NO: 1342728 - RNA, 19 nt, Artificial Sequence
  Description of Artificial Sequence: Synthetic oligonucleotide
uuggaaccugagguuauga

SEQ ID NO: 1342729 - RNA, 19 nt, Artificial Sequence
  Description of Artificial Sequence: Synthetic oligonucleotide
cacgagauagucuguggca

SEQ ID NO: 1342730 - RNA, 19 nt, Artificial Sequence
  Description of Artificial Sequence: Synthetic oligonucleotide
guuaugacucucaggauua

SEQ ID NO: 1342731 - RNA, 19 nt, Artificial Sequence
  Description of Artificial Sequence: Synthetic oligonucleotide
cauugguuaggauacugcu

SEQ ID NO: 1342732 - RNA, 19 nt, Artificial Sequence
  Description of Artificial Sequence: Synthetic oligonucleotide
uccgggucuucauugguua

SEQ ID NO: 1342733 - RNA, 19 nt, Artificial Sequence
  Description of Artificial Sequence: Synthetic oligonucleotide
acagaugaugagugucagu

SEQ ID NO: 1342734 - RNA, 19 nt, Artificial Sequence
  Description of Artificial Sequence: Synthetic oligonucleotide
acaggccaauuaauauggc

SEQ ID NO: 1342735 - RNA, 19 nt, Artificial Sequence
  Description of Artificial Sequence: Synthetic oligonucleotide
aaccagcauacgaagugga

SEQ ID NO: 1342736 - RNA, 19 nt, Artificial Sequence
  Description of Artificial Sequence: Synthetic oligonucleotide
cauaaagggcugcacgaga

SEQ ID NO: 1342737 - RNA, 19 nt, Artificial Sequence
  Description of Artificial Sequence: Synthetic oligonucleotide
auggccgcauucagaaucg

SEQ ID NO: 1342738 - RNA, 19 nt, Artificial Sequence
  Description of Artificial Sequence: Synthetic oligonucleotide
cccaauccgaguuuuacuc

SEQ ID NO: 1342739 - RNA, 19 nt, Artificial Sequence
  Description of Artificial Sequence: Synthetic oligonucleotide
gcaccuguauuauaaagaa

SEQ ID NO: 1342740 - RNA, 19 nt, Artificial Sequence
  Description of Artificial Sequence: Synthetic oligonucleotide
accagcauacgaaguggac

SEQ ID NO: 1342741 - RNA, 19 nt, Artificial Sequence
  Description of Artificial Sequence: Synthetic oligonucleotide
auaaagggcugcacgagau

SEQ ID NO: 1342742 - RNA, 19 nt, Artificial Sequence
  Description of Artificial Sequence: Synthetic oligonucleotide
cacagaugaugagugucag

SEQ ID NO: 1342743 - RNA, 19 nt, Artificial Sequence
  Description of Artificial Sequence: Synthetic oligonucleotide
gaccuuuggggcacaaaac

SEQ ID NO: 1342744 - RNA, 19 nt, Artificial Sequence
  Description of Artificial Sequence: Synthetic oligonucleotide
auaaugagauacgccugcu

SEQ ID NO: 1342745 - RNA, 19 nt, Artificial Sequence
  Description of Artificial Sequence: Synthetic oligonucleotide
gacuguugaucgauaguuc

SEQ ID NO: 1342746 - RNA, 19 nt, Artificial Sequence
  Description of Artificial Sequence: Synthetic oligonucleotide
gcacgagauagucuguggc

SEQ ID NO: 1342747 - RNA, 19 nt, Artificial Sequence
  Description of Artificial Sequence: Synthetic oligonucleotide
agcucuugacucaggagug

SEQ ID NO: 1342748 - RNA, 19 nt, Artificial Sequence
  Description of Artificial Sequence: Synthetic oligonucleotide
gagacuguggaaacccaga

SEQ ID NO: 1342749 - RNA, 19 nt, Artificial Sequence
  Description of Artificial Sequence: Synthetic oligonucleotide
ucguucccaguacuagagu

SEQ ID NO: 1342750 - RNA, 19 nt, Artificial Sequence
  Description of Artificial Sequence: Synthetic oligonucleotide
ugcauuguacuugggguuu

SEQ ID NO: 1342751 - RNA, 19 nt, Artificial Sequence
  Description of Artificial Sequence: Synthetic oligonucleotide
guaagcuugcaaguauguc

SEQ ID NO: 1342752 - RNA, 19 nt, Artificial Sequence
  Description of Artificial Sequence: Synthetic oligonucleotide
uaccaaccagaacacugua

SEQ ID NO: 1342753 - RNA, 19 nt, Artificial Sequence
  Description of Artificial Sequence: Synthetic oligonucleotide
ggggacuguugaucgauag

SEQ ID NO: 1342754 - RNA, 19 nt, Artificial Sequence
  Description of Artificial Sequence: Synthetic oligonucleotide
cccaaguaaaugaauagaa

SEQ ID NO: 1342755 - RNA, 19 nt, Artificial Sequence
  Description of Artificial Sequence: Synthetic oligonucleotide
ggauuaagcaaacccauau

SEQ ID NO: 1342756 - RNA, 19 nt, Artificial Sequence
  Description of Artificial Sequence: Synthetic oligonucleotide
ccagcauacgaaguggacc

SEQ ID NO: 1342757 - RNA, 19 nt, Artificial Sequence
  Description of Artificial Sequence: Synthetic oligonucleotide
ggaccuuuggggcacaaaa

SEQ ID NO: 1342758 - RNA, 19 nt, Artificial Sequence
  Description of Artificial Sequence: Synthetic oligonucleotide
aacuuacaagcgggcagca

SEQ ID NO: 1342759 - RNA, 19 nt, Artificial Sequence
  Description of Artificial Sequence: Synthetic oligonucleotide
cucccaauccgaguuuuac

SEQ ID NO: 1342760 - RNA, 19 nt, Artificial Sequence
  Description of Artificial Sequence: Synthetic oligonucleotide
ugauaaagaccagggccau

SEQ ID NO: 1342761 - RNA, 19 nt, Artificial Sequence
  Description of Artificial Sequence: Synthetic oligonucleotide
acgagauagucuguggcaa

SEQ ID NO: 1342762 - RNA, 19 nt, Artificial Sequence
  Description of Artificial Sequence: Synthetic oligonucleotide
ccaaccagaacacuguaga

SEQ ID NO: 1342763 - RNA, 19 nt, Artificial Sequence
  Description of Artificial Sequence: Synthetic oligonucleotide
gcuaguacaugcuuuauuu

SEQ ID NO: 1342764 - RNA, 19 nt, Artificial Sequence
  Description of Artificial Sequence: Synthetic oligonucleotide
caucguucccaguacuaga

SEQ ID NO: 1342765 - RNA, 19 nt, Artificial Sequence
  Description of Artificial Sequence: Synthetic oligonucleotide
cagcauacgaaguggaccu

SEQ ID NO: 1342766 - RNA, 19 nt, Artificial Sequence
  Description of Artificial Sequence: Synthetic oligonucleotide
ccaauccgaguuuuacucc

SEQ ID NO: 1342767 - RNA, 19 nt, Artificial Sequence
  Description of Artificial Sequence: Synthetic oligonucleotide
guugaucgauaguuccauc

SEQ ID NO: 1342768 - RNA, 19 nt, Artificial Sequence
  Description of Artificial Sequence: Synthetic oligonucleotide
auccgaguuuuacuccccu

SEQ ID NO: 1342769 - RNA, 19 nt, Artificial Sequence
  Description of Artificial Sequence: Synthetic oligonucleotide
ugcagguauguuagaugua

SEQ ID NO: 1342770 - RNA, 19 nt, Artificial Sequence
  Description of Artificial Sequence: Synthetic oligonucleotide
caugcgguccauucaggga

SEQ ID NO: 1342771 - RNA, 19 nt, Artificial Sequence
  Description of Artificial Sequence: Synthetic oligonucleotide
gcagcaaaagagccuaaga

SEQ ID NO: 1342772 - RNA, 19 nt, Artificial Sequence
  Description of Artificial Sequence: Synthetic oligonucleotide
gauucagcuaguacaugcu

SEQ ID NO: 1342773 - RNA, 19 nt, Artificial Sequence
  Description of Artificial Sequence: Synthetic oligonucleotide
agguuaugacucucaggau

SEQ ID NO: 1342774 - RNA, 19 nt, Artificial Sequence
  Description of Artificial Sequence: Synthetic oligonucleotide
gguauguuagauguaaaau

SEQ ID NO: 1342775 - RNA, 19 nt, Artificial Sequence
  Description of Artificial Sequence: Synthetic oligonucleotide
uaguaacguaaggcacagg

SEQ ID NO: 1342776 - RNA, 19 nt, Artificial Sequence
  Description of Artificial Sequence: Synthetic oligonucleotide
ugcugcagucgaagugggc

SEQ ID NO: 1342777 - RNA, 19 nt, Artificial Sequence
  Description of Artificial Sequence: Synthetic oligonucleotide
uggcgguugcugaagcuuu

SEQ ID NO: 1342778 - RNA, 19 nt, Artificial Sequence
  Description of Artificial Sequence: Synthetic oligonucleotide
ccagugaauggcaaucauc

SEQ ID NO: 1342779 - RNA, 19 nt, Artificial Sequence
  Description of Artificial Sequence: Synthetic oligonucleotide
cgaguaguaguaacguaag

SEQ ID NO: 1342780 - RNA, 19 nt, Artificial Sequence
  Description of Artificial Sequence: Synthetic oligonucleotide
uaacgcucacaggggacug

SEQ ID NO: 1342781 - RNA, 19 nt, Artificial Sequence
  Description of Artificial Sequence: Synthetic oligonucleotide
gcacugaucauaaugagau

SEQ ID NO: 1342782 - RNA, 19 nt, Artificial Sequence
  Description of Artificial Sequence: Synthetic oligonucleotide
guagcaccuguauuauaaa

SEQ ID NO: 1342783 - RNA, 19 nt, Artificial Sequence
  Description of Artificial Sequence: Synthetic oligonucleotide
cucguuucggccuuacagu

SEQ ID NO: 1342784 - RNA, 19 nt, Artificial Sequence
  Description of Artificial Sequence: Synthetic oligonucleotide
auaccauuguugaggaaua

SEQ ID NO: 1342785 - RNA, 19 nt, Artificial Sequence
  Description of Artificial Sequence: Synthetic oligonucleotide
ggugauguccuuauuuaaa

SEQ ID NO: 1342786 - RNA, 19 nt, Artificial Sequence
  Description of Artificial Sequence: Synthetic oligonucleotide
gauaaagaccagggccauc

SEQ ID NO: 1342787 - RNA, 19 nt, Artificial Sequence
  Description of Artificial Sequence: Synthetic oligonucleotide
gcgaguaguaguaacguaa

SEQ ID NO: 1342788 - RNA, 19 nt, Artificial Sequence
  Description of Artificial Sequence: Synthetic oligonucleotide
gagccaugcgguccauuca

SEQ ID NO: 1342789 - RNA, 19 nt, Artificial Sequence
  Description of Artificial Sequence: Synthetic oligonucleotide
uuaugacucucaggauuaa

SEQ ID NO: 1342790 - RNA, 19 nt, Artificial Sequence
  Description of Artificial Sequence: Synthetic oligonucleotide
caggccaauuaauauggcu

SEQ ID NO: 1342791 - RNA, 19 nt, Artificial Sequence
  Description of Artificial Sequence: Synthetic oligonucleotide
acaggggacuguugaucga

SEQ ID NO: 1342792 - RNA, 19 nt, Artificial Sequence
  Description of Artificial Sequence: Synthetic oligonucleotide
ggcagcaaaagagccuaag

SEQ ID NO: 1342793 - RNA, 19 nt, Artificial Sequence
  Description of Artificial Sequence: Synthetic oligonucleotide
gcuuuaccaaccagaacac

SEQ ID NO: 1342794 - RNA, 19 nt, Artificial Sequence
  Description of Artificial Sequence: Synthetic oligonucleotide
ucucccaauccgaguuuua

SEQ ID NO: 1342795 - RNA, 19 nt, Artificial Sequence
  Description of Artificial Sequence: Synthetic oligonucleotide
aagggcugcacgagauagu

SEQ ID NO: 1342796 - RNA, 19 nt, Artificial Sequence
  Description of Artificial Sequence: Synthetic oligonucleotide
aacgcucacaggggacugu

SEQ ID NO: 1342797 - RNA, 19 nt, Artificial Sequence
  Description of Artificial Sequence: Synthetic oligonucleotide
caggauucagcuaguacau

SEQ ID NO: 1342798 - RNA, 19 nt, Artificial Sequence
  Description of Artificial Sequence: Synthetic oligonucleotide
gaucaggagugcaacugua

SEQ ID NO: 1342799 - RNA, 19 nt, Artificial Sequence
  Description of Artificial Sequence: Synthetic oligonucleotide
uccgaguuuuacuccccuu

SEQ ID NO: 1342800 - RNA, 19 nt, Artificial Sequence
  Description of Artificial Sequence: Synthetic oligonucleotide
cuguuucaaccagcauacg

SEQ ID NO: 1342801 - RNA, 19 nt, Artificial Sequence
  Description of Artificial Sequence: Synthetic oligonucleotide
agccacggaugugacagga

SEQ ID NO: 1342802 - RNA, 19 nt, Artificial Sequence
  Description of Artificial Sequence: Synthetic oligonucleotide
agcaacauuguaggucuua

SEQ ID NO: 1342803 - RNA, 19 nt, Artificial Sequence
  Description of Artificial Sequence: Synthetic oligonucleotide
agccaccaaaucauauacu

SEQ ID NO: 1342804 - RNA, 19 nt, Artificial Sequence
  Description of Artificial Sequence: Synthetic oligonucleotide
cguucccaguacuagaguc

SEQ ID NO: 1342805 - RNA, 19 nt, Artificial Sequence
  Description of Artificial Sequence: Synthetic oligonucleotide
ggccuugggaagaaauggc

SEQ ID NO: 1342806 - RNA, 19 nt, Artificial Sequence
  Description of Artificial Sequence: Synthetic oligonucleotide
caguacuagaguccugucu

SEQ ID NO: 1342807 - RNA, 19 nt, Artificial Sequence
  Description of Artificial Sequence: Synthetic oligonucleotide
agcaggcuaugguuguguu

SEQ ID NO: 1342808 - RNA, 19 nt, Artificial Sequence
  Description of Artificial Sequence: Synthetic oligonucleotide
aaucgagugcagggcucgu

SEQ ID NO: 1342809 - RNA, 19 nt, Artificial Sequence
  Description of Artificial Sequence: Synthetic oligonucleotide
aggauuaagcaaacccaua

SEQ ID NO: 1342810 - RNA, 19 nt, Artificial Sequence
  Description of Artificial Sequence: Synthetic oligonucleotide
ggauacugcuggaaaguuc

SEQ ID NO: 1342811 - RNA, 19 nt, Artificial Sequence
  Description of Artificial Sequence: Synthetic oligonucleotide
guacccuucuuugggcuuc

SEQ ID NO: 1342812 - RNA, 19 nt, Artificial Sequence
  Description of Artificial Sequence: Synthetic oligonucleotide
cagccauauucaccaacca

SEQ ID NO: 1342813 - RNA, 19 nt, Artificial Sequence
  Description of Artificial Sequence: Synthetic oligonucleotide
cagaaucgagugcagggcu

SEQ ID NO: 1342814 - RNA, 19 nt, Artificial Sequence
  Description of Artificial Sequence: Synthetic oligonucleotide
aggcacaggccaauuaaua

SEQ ID NO: 1342815 - RNA, 19 nt, Artificial Sequence
  Description of Artificial Sequence: Synthetic oligonucleotide
agcuugcaaguaugucuaa

SEQ ID NO: 1342816 - RNA, 19 nt, Artificial Sequence
  Description of Artificial Sequence: Synthetic oligonucleotide
ccaauuaauauggcuacaa

SEQ ID NO: 1342817 - RNA, 19 nt, Artificial Sequence
  Description of Artificial Sequence: Synthetic oligonucleotide
ccauaaagggcugcacgag

SEQ ID NO: 1342818 - RNA, 19 nt, Artificial Sequence
  Description of Artificial Sequence: Synthetic oligonucleotide
ggcacaggccaauuaauau

SEQ ID NO: 1342819 - RNA, 19 nt, Artificial Sequence
  Description of Artificial Sequence: Synthetic oligonucleotide
gucagugcuuaagaacaaa

SEQ ID NO: 1342820 - RNA, 19 nt, Artificial Sequence
  Description of Artificial Sequence: Synthetic oligonucleotide
ccagaacuuacuuaacgcu

SEQ ID NO: 1342821 - RNA, 19 nt, Artificial Sequence
  Description of Artificial Sequence: Synthetic oligonucleotide
guacuagaguccugucucu

SEQ ID NO: 1342822 - RNA, 19 nt, Artificial Sequence
  Description of Artificial Sequence: Synthetic oligonucleotide
gaaugcaagcugguccaua

SEQ ID NO: 1342823 - RNA, 19 nt, Artificial Sequence
  Description of Artificial Sequence: Synthetic oligonucleotide
gugcauuguacuugggguu

SEQ ID NO: 1342824 - RNA, 19 nt, Artificial Sequence
  Description of Artificial Sequence: Synthetic oligonucleotide
agauggcgaguaguaguaa

SEQ ID NO: 1342825 - RNA, 19 nt, Artificial Sequence
  Description of Artificial Sequence: Synthetic oligonucleotide
acuuacaagcgggcagcaa

SEQ ID NO: 1342826 - RNA, 19 nt, Artificial Sequence
  Description of Artificial Sequence: Synthetic oligonucleotide
cuggaaagagaguuucguu

SEQ ID NO: 1342827 - RNA, 19 nt, Artificial Sequence
  Description of Artificial Sequence: Synthetic oligonucleotide
auucagggagguacuugau

SEQ ID NO: 1342828 - RNA, 19 nt, Artificial Sequence
  Description of Artificial Sequence: Synthetic oligonucleotide
uggagcgaugaggccccag

SEQ ID NO: 1342829 - RNA, 19 nt, Artificial Sequence
  Description of Artificial Sequence: Synthetic oligonucleotide
gcaggcuaugguuguguuc

SEQ ID NO: 1342830 - RNA, 19 nt, Artificial Sequence
  Description of Artificial Sequence: Synthetic oligonucleotide
augaugagugucagugcuu

SEQ ID NO: 1342831 - RNA, 19 nt, Artificial Sequence
  Description of Artificial Sequence: Synthetic oligonucleotide
ccugagguuaugacucuca

SEQ ID NO: 1342832 - RNA, 19 nt, Artificial Sequence
  Description of Artificial Sequence: Synthetic oligonucleotide
cacugaucauaaugagaua

SEQ ID NO: 1342833 - RNA, 19 nt, Artificial Sequence
  Description of Artificial Sequence: Synthetic oligonucleotide
gguuaggauacugcuggaa

SEQ ID NO: 1342834 - RNA, 19 nt, Artificial Sequence
  Description of Artificial Sequence: Synthetic oligonucleotide
uggaccuuuggggcacaaa

SEQ ID NO: 1342835 - RNA, 19 nt, Artificial Sequence
  Description of Artificial Sequence: Synthetic oligonucleotide
ggcuacaaagcaggcuaug

SEQ ID NO: 1342836 - RNA, 19 nt, Artificial Sequence
  Description of Artificial Sequence: Synthetic oligonucleotide
cuuuggaaccugagguuau

SEQ ID NO: 1342837 - RNA, 19 nt, Artificial Sequence
  Description of Artificial Sequence: Synthetic oligonucleotide
ccuuacaguuuucaguugu

SEQ ID NO: 1342838 - RNA, 19 nt, Artificial Sequence
  Description of Artificial Sequence: Synthetic oligonucleotide
ccauggguucuaacugcag

SEQ ID NO: 1342839 - RNA, 19 nt, Artificial Sequence
  Description of Artificial Sequence: Synthetic oligonucleotide
gcuggaaagagaguuucgu

SEQ ID NO: 1342840 - RNA, 19 nt, Artificial Sequence
  Description of Artificial Sequence: Synthetic oligonucleotide
acguaaggcacaggccaau

SEQ ID NO: 1342841 - RNA, 19 nt, Artificial Sequence
  Description of Artificial Sequence: Synthetic oligonucleotide
ugcagucgaagugggccuu

SEQ ID NO: 1342842 - RNA, 19 nt, Artificial Sequence
  Description of Artificial Sequence: Synthetic oligonucleotide
cugcucuuugugcauugua

SEQ ID NO: 1342843 - RNA, 19 nt, Artificial Sequence
  Description of Artificial Sequence: Synthetic oligonucleotide
gacucaggaguggagcgau

SEQ ID NO: 1342844 - RNA, 19 nt, Artificial Sequence
  Description of Artificial Sequence: Synthetic oligonucleotide
ggcgaguaguaguaacgua

SEQ ID NO: 1342845 - RNA, 19 nt, Artificial Sequence
  Description of Artificial Sequence: Synthetic oligonucleotide
cuuuaccaaccagaacacu

SEQ ID NO: 1342846 - RNA, 19 nt, Artificial Sequence
  Description of Artificial Sequence: Synthetic oligonucleotide
ccgggucuucauugguuag

SEQ ID NO: 1342847 - RNA, 19 nt, Artificial Sequence
  Description of Artificial Sequence: Synthetic oligonucleotide
gccaugcgguccauucagg

SEQ ID NO: 1342848 - RNA, 19 nt, Artificial Sequence
  Description of Artificial Sequence: Synthetic oligonucleotide
ccaguacuagaguccuguc

SEQ ID NO: 1342849 - RNA, 19 nt, Artificial Sequence
  Description of Artificial Sequence: Synthetic oligonucleotide
uggccgcauucagaaucga

SEQ ID NO: 1342850 - RNA, 19 nt, Artificial Sequence
  Description of Artificial Sequence: Synthetic oligonucleotide
cgguugcugaagcuuuacc

SEQ ID NO: 1342851 - RNA, 19 nt, Artificial Sequence
  Description of Artificial Sequence: Synthetic oligonucleotide
cagucgaagugggccuuuc

SEQ ID NO: 1342852 - RNA, 19 nt, Artificial Sequence
  Description of Artificial Sequence: Synthetic oligonucleotide
agcauacgaaguggaccuu

SEQ ID NO: 1342853 - RNA, 19 nt, Artificial Sequence
  Description of Artificial Sequence: Synthetic oligonucleotide
acgcucacaggggacuguu

SEQ ID NO: 1342854 - RNA, 19 nt, Artificial Sequence
  Description of Artificial Sequence: Synthetic oligonucleotide
ggaauagaucagagcugga

SEQ ID NO: 1342855 - RNA, 19 nt, Artificial Sequence
  Description of Artificial Sequence: Synthetic oligonucleotide
ggguacccuucuuugggcu

SEQ ID NO: 1342856 - RNA, 19 nt, Artificial Sequence
  Description of Artificial Sequence: Synthetic oligonucleotide
cuucauugguuaggauacu

SEQ ID NO: 1342857 - RNA, 19 nt, Artificial Sequence
  Description of Artificial Sequence: Synthetic oligonucleotide
aggggacuguugaucgaua

SEQ ID NO: 1342858 - RNA, 19 nt, Artificial Sequence
  Description of Artificial Sequence: Synthetic oligonucleotide
cuccgggucuucauugguu

SEQ ID NO: 1342859 - RNA, 19 nt, Artificial Sequence
  Description of Artificial Sequence: Synthetic oligonucleotide
caggggacuguugaucgau

SEQ ID NO: 1342860 - RNA, 19 nt, Artificial Sequence
  Description of Artificial Sequence: Synthetic oligonucleotide
cccaguacuagaguccugu

SEQ ID NO: 1342861 - RNA, 19 nt, Artificial Sequence
  Description of Artificial Sequence: Synthetic oligonucleotide
ggcucguuucggccuuaca

SEQ ID NO: 1342862 - RNA, 19 nt, Artificial Sequence
  Description of Artificial Sequence: Synthetic oligonucleotide
ggaagguggaagugcuguu

SEQ ID NO: 1342863 - RNA, 19 nt, Artificial Sequence
  Description of Artificial Sequence: Synthetic oligonucleotide
cuggcgguugcugaagcuu

SEQ ID NO: 1342864 - RNA, 19 nt, Artificial Sequence
  Description of Artificial Sequence: Synthetic oligonucleotide
gguacccuucuuugggcuu

SEQ ID NO: 1342865 - RNA, 19 nt, Artificial Sequence
  Description of Artificial Sequence: Synthetic oligonucleotide
caccaaccauaccauuguu

SEQ ID NO: 1342866 - RNA, 19 nt, Artificial Sequence
  Description of Artificial Sequence: Synthetic oligonucleotide
ggaaagcaucugggcaaaa

SEQ ID NO: 1342867 - RNA, 19 nt, Artificial Sequence
  Description of Artificial Sequence: Synthetic oligonucleotide
gcauacgaaguggaccuuu

SEQ ID NO: 1342868 - RNA, 19 nt, Artificial Sequence
  Description of Artificial Sequence: Synthetic oligonucleotide
ggaugaccuuguagcaccu

SEQ ID NO: 1342869 - RNA, 19 nt, Artificial Sequence
  Description of Artificial Sequence: Synthetic oligonucleotide
cagcuaguacaugcuuuau

SEQ ID NO: 1342870 - RNA, 19 nt, Artificial Sequence
  Description of Artificial Sequence: Synthetic oligonucleotide
ccauaccauuguugaggaa

SEQ ID NO: 1342871 - RNA, 19 nt, Artificial Sequence
  Description of Artificial Sequence: Synthetic oligonucleotide
guggaccuuuggggcacaa

SEQ ID NO: 1342872 - RNA, 19 nt, Artificial Sequence
  Description of Artificial Sequence: Synthetic oligonucleotide
gcgggcagcaaaagagccu

SEQ ID NO: 1342873 - RNA, 19 nt, Artificial Sequence
  Description of Artificial Sequence: Synthetic oligonucleotide
gcugcacgagauagucugu

SEQ ID NO: 1342874 - RNA, 19 nt, Artificial Sequence
  Description of Artificial Sequence: Synthetic oligonucleotide
gggcucguuucggccuuac

SEQ ID NO: 1342875 - RNA, 19 nt, Artificial Sequence
  Description of Artificial Sequence: Synthetic oligonucleotide
agggcucguuucggccuua

SEQ ID NO: 1342876 - RNA, 19 nt, Artificial Sequence
  Description of Artificial Sequence: Synthetic oligonucleotide
cagggcucguuucggccuu

SEQ ID NO: 1342877 - RNA, 19 nt, Artificial Sequence
  Description of Artificial Sequence: Synthetic oligonucleotide
guggagcgaugaggcccca

SEQ ID NO: 1342878 - RNA, 19 nt, Artificial Sequence
  Description of Artificial Sequence: Synthetic oligonucleotide
ccagucuccacuggcgguu

SEQ ID NO: 1342879 - RNA, 19 nt, Artificial Sequence
  Description of Artificial Sequence: Synthetic oligonucleotide
gcgguccauucagggaggu

SEQ ID NO: 1342880 - RNA, 19 nt, Artificial Sequence
  Description of Artificial Sequence: Synthetic oligonucleotide
cguaaggcacaggccaauu

SEQ ID NO: 1342881 - RNA, 19 nt, Artificial Sequence
  Description of Artificial Sequence: Synthetic oligonucleotide
cgguccauucagggaggua

SEQ ID NO: 1342882 - RNA, 19 nt, Artificial Sequence
  Description of Artificial Sequence: Synthetic oligonucleotide
aaggauaucccauuuaggg

SEQ ID NO: 1342883 - RNA, 19 nt, Artificial Sequence
  Description of Artificial Sequence: Synthetic oligonucleotide
gauugacacaccuauaacg

SEQ ID NO: 1342884 - RNA, 19 nt, Artificial Sequence
  Description of Artificial Sequence: Synthetic oligonucleotide
uuagacuugacaauagggc

SEQ ID NO: 1342885 - RNA, 19 nt, Artificial Sequence
  Description of Artificial Sequence: Synthetic oligonucleotide
uugauagacagauugacac

SEQ ID NO: 1342886 - RNA, 19 nt, Artificial Sequence
  Description of Artificial Sequence: Synthetic oligonucleotide
uguaaaauucuuccaaugu

SEQ ID NO: 1342887 - RNA, 19 nt, Artificial Sequence
  Description of Artificial Sequence: Synthetic oligonucleotide
cuuagacuugacaauaggg

SEQ ID NO: 1342888 - RNA, 19 nt, Artificial Sequence
  Description of Artificial Sequence: Synthetic oligonucleotide
aaugcaaggaugcugccug

SEQ ID NO: 1342889 - RNA, 19 nt, Artificial Sequence
  Description of Artificial Sequence: Synthetic oligonucleotide
agaauuuuguguucaggcg

SEQ ID NO: 1342890 - RNA, 19 nt, Artificial Sequence
  Description of Artificial Sequence: Synthetic oligonucleotide
aacggcaucagagacacag

SEQ ID NO: 1342891 - RNA, 19 nt, Artificial Sequence
  Description of Artificial Sequence: Synthetic oligonucleotide
agauauucgaggaugcugc

SEQ ID NO: 1342892 - RNA, 19 nt, Artificial Sequence
  Description of Artificial Sequence: Synthetic oligonucleotide
ugacacaccuauaacgggg

SEQ ID NO: 1342893 - RNA, 19 nt, Artificial Sequence
  Description of Artificial Sequence: Synthetic oligonucleotide
uuucacucagcacagucag

SEQ ID NO: 1342894 - RNA, 19 nt, Artificial Sequence
  Description of Artificial Sequence: Synthetic oligonucleotide
agggaugagaaggauaucc

SEQ ID NO: 1342895 - RNA, 19 nt, Artificial Sequence
  Description of Artificial Sequence: Synthetic oligonucleotide
aaguaccagauauucgagg

SEQ ID NO: 1342896 - RNA, 19 nt, Artificial Sequence
  Description of Artificial Sequence: Synthetic oligonucleotide
uagacuugacaauagggcc

SEQ ID NO: 1342897 - RNA, 19 nt, Artificial Sequence
  Description of Artificial Sequence: Synthetic oligonucleotide
aagcauagagugcacaugu

SEQ ID NO: 1342898 - RNA, 19 nt, Artificial Sequence
  Description of Artificial Sequence: Synthetic oligonucleotide
agucacacgcaguaaacac

SEQ ID NO: 1342899 - RNA, 19 nt, Artificial Sequence
  Description of Artificial Sequence: Synthetic oligonucleotide
auugacacaccuauaacgg

SEQ ID NO: 1342900 - RNA, 19 nt, Artificial Sequence
  Description of Artificial Sequence: Synthetic oligonucleotide
ugagggaaguaccagauau

SEQ ID NO: 1342901 - RNA, 19 nt, Artificial Sequence
  Description of Artificial Sequence: Synthetic oligonucleotide
uuuagggucaaugagcaac

SEQ ID NO: 1342902 - RNA, 19 nt, Artificial Sequence
  Description of Artificial Sequence: Synthetic oligonucleotide
uguucugagucacacgcag

SEQ ID NO: 1342903 - RNA, 19 nt, Artificial Sequence
  Description of Artificial Sequence: Synthetic oligonucleotide
uuuauggaggcacugcaac

SEQ ID NO: 1342904 - RNA, 19 nt, Artificial Sequence
  Description of Artificial Sequence: Synthetic oligonucleotide
caagauaugcuccaccagc

SEQ ID NO: 1342905 - RNA, 19 nt, Artificial Sequence
  Description of Artificial Sequence: Synthetic oligonucleotide
aacacaucgucuccacgac

SEQ ID NO: 1342906 - RNA, 19 nt, Artificial Sequence
  Description of Artificial Sequence: Synthetic oligonucleotide
aagacuuccaugcuggguu

SEQ ID NO: 1342907 - RNA, 19 nt, Artificial Sequence
  Description of Artificial Sequence: Synthetic oligonucleotide
ucacccugcaagcauacag

SEQ ID NO: 1342908 - RNA, 19 nt, Artificial Sequence
  Description of Artificial Sequence: Synthetic oligonucleotide
aguaccagauauucgagga

SEQ ID NO: 1342909 - RNA, 19 nt, Artificial Sequence
  Description of Artificial Sequence: Synthetic oligonucleotide
agauugacacaccuauaac

SEQ ID NO: 1342910 - RNA, 19 nt, Artificial Sequence
  Description of Artificial Sequence: Synthetic oligonucleotide
acgacuccgaagcuguucc

SEQ ID NO: 1342911 - RNA, 19 nt, Artificial Sequence
  Description of Artificial Sequence: Synthetic oligonucleotide
gaauguucccaucaacggc

SEQ ID NO: 1342912 - RNA, 19 nt, Artificial Sequence
  Description of Artificial Sequence: Synthetic oligonucleotide
aauuuuguguucaggcguc

SEQ ID NO: 1342913 - RNA, 19 nt, Artificial Sequence
  Description of Artificial Sequence: Synthetic oligonucleotide
aucagagacacagaagcgg

SEQ ID NO: 1342914 - RNA, 19 nt, Artificial Sequence
  Description of Artificial Sequence: Synthetic oligonucleotide
ugacaauagggccagggaa

SEQ ID NO: 1342915 - RNA, 19 nt, Artificial Sequence
  Description of Artificial Sequence: Synthetic oligonucleotide
uucauucuagcccugcggu

SEQ ID NO: 1342916 - RNA, 19 nt, Artificial Sequence
  Description of Artificial Sequence: Synthetic oligonucleotide
ucguaguguggcaagcagg

SEQ ID NO: 1342917 - RNA, 19 nt, Artificial Sequence
  Description of Artificial Sequence: Synthetic oligonucleotide
uugacacaccuauaacggg

SEQ ID NO: 1342918 - RNA, 19 nt, Artificial Sequence
  Description of Artificial Sequence: Synthetic oligonucleotide
acacgcaguaaacacaugu

SEQ ID NO: 1342919 - RNA, 19 nt, Artificial Sequence
  Description of Artificial Sequence: Synthetic oligonucleotide
gcagguagaagauaggggc

SEQ ID NO: 1342920 - RNA, 19 nt, Artificial Sequence
  Description of Artificial Sequence: Synthetic oligonucleotide
agggaaguaccagauauuc

SEQ ID NO: 1342921 - RNA, 19 nt, Artificial Sequence
  Description of Artificial Sequence: Synthetic oligonucleotide
uuagguagcccuuuccuuc

SEQ ID NO: 1342922 - RNA, 19 nt, Artificial Sequence
  Description of Artificial Sequence: Synthetic oligonucleotide
uaacgggguuuccagaacc

SEQ ID NO: 1342923 - RNA, 19 nt, Artificial Sequence
  Description of Artificial Sequence: Synthetic oligonucleotide
gacaauagggccagggaag

SEQ ID NO: 1342924 - RNA, 19 nt, Artificial Sequence
  Description of Artificial Sequence: Synthetic oligonucleotide
ugaguuaggcucuugguuu

SEQ ID NO: 1342925 - RNA, 19 nt, Artificial Sequence
  Description of Artificial Sequence: Synthetic oligonucleotide
uucugguuuagguagcccu

SEQ ID NO: 1342926 - RNA, 19 nt, Artificial Sequence
  Description of Artificial Sequence: Synthetic oligonucleotide
ucauuagggaugagaagga

SEQ ID NO: 1342927 - RNA, 19 nt, Artificial Sequence
  Description of Artificial Sequence: Synthetic oligonucleotide
caucugucuaccauggcac

SEQ ID NO: 1342928 - RNA, 19 nt, Artificial Sequence
  Description of Artificial Sequence: Synthetic oligonucleotide
uuggguuccaggauguccu

SEQ ID NO: 1342929 - RNA, 19 nt, Artificial Sequence
  Description of Artificial Sequence: Synthetic oligonucleotide
uuagggucaaugagcaacu

SEQ ID NO: 1342930 - RNA, 19 nt, Artificial Sequence
  Description of Artificial Sequence: Synthetic oligonucleotide
gaaggauaucccauuuagg

SEQ ID NO: 1342931 - RNA, 19 nt, Artificial Sequence
  Description of Artificial Sequence: Synthetic oligonucleotide
ucaacggcaucagagacac

SEQ ID NO: 1342932 - RNA, 19 nt, Artificial Sequence
  Description of Artificial Sequence: Synthetic oligonucleotide
cuggguuucacucagcaca

SEQ ID NO: 1342933 - RNA, 19 nt, Artificial Sequence
  Description of Artificial Sequence: Synthetic oligonucleotide
cugggugaccugaacaucc

SEQ ID NO: 1342934 - RNA, 19 nt, Artificial Sequence
  Description of Artificial Sequence: Synthetic oligonucleotide
uuugcuagguaagauccug

SEQ ID NO: 1342935 - RNA, 19 nt, Artificial Sequence
  Description of Artificial Sequence: Synthetic oligonucleotide
cuucauucuagcccugcgg

SEQ ID NO: 1342936 - RNA, 19 nt, Artificial Sequence
  Description of Artificial Sequence: Synthetic oligonucleotide
agggacacaaaucucugcu

SEQ ID NO: 1342937 - RNA, 19 nt, Artificial Sequence
  Description of Artificial Sequence: Synthetic oligonucleotide
ugagauuuugguucccagu

SEQ ID NO: 1342938 - RNA, 19 nt, Artificial Sequence
  Description of Artificial Sequence: Synthetic oligonucleotide
ucacacgcaguaaacacau

SEQ ID NO: 1342939 - RNA, 19 nt, Artificial Sequence
  Description of Artificial Sequence: Synthetic oligonucleotide
ugucuuaacuccauuucua

SEQ ID NO: 1342940 - RNA, 19 nt, Artificial Sequence
  Description of Artificial Sequence: Synthetic oligonucleotide
caucagagacacagaagcg

SEQ ID NO: 1342941 - RNA, 19 nt, Artificial Sequence
  Description of Artificial Sequence: Synthetic oligonucleotide
uuauuugaauuuucccuaa

SEQ ID NO: 1342942 - RNA, 19 nt, Artificial Sequence
  Description of Artificial Sequence: Synthetic oligonucleotide
cucucuagucaccuguucc

SEQ ID NO: 1342943 - RNA, 19 nt, Artificial Sequence
  Description of Artificial Sequence: Synthetic oligonucleotide
guugucuuaacuccauuuc

SEQ ID NO: 1342944 - RNA, 19 nt, Artificial Sequence
  Description of Artificial Sequence: Synthetic oligonucleotide
aggauaucccauuuagggu

SEQ ID NO: 1342945 - RNA, 19 nt, Artificial Sequence
  Description of Artificial Sequence: Synthetic oligonucleotide
aguagcuguugucuuaacu

SEQ ID NO: 1342946 - RNA, 19 nt, Artificial Sequence
  Description of Artificial Sequence: Synthetic oligonucleotide
uggguuucacucagcacag

SEQ ID NO: 1342947 - RNA, 19 nt, Artificial Sequence
  Description of Artificial Sequence: Synthetic oligonucleotide
acuucauucuagcccugcg

SEQ ID NO: 1342948 - RNA, 19 nt, Artificial Sequence
  Description of Artificial Sequence: Synthetic oligonucleotide
ugcuagguaagauccugcc

SEQ ID NO: 1342949 - RNA, 19 nt, Artificial Sequence
  Description of Artificial Sequence: Synthetic oligonucleotide
ggauaucccauuuaggguc

SEQ ID NO: 1342950 - RNA, 19 nt, Artificial Sequence
  Description of Artificial Sequence: Synthetic oligonucleotide
uggucauguaaaauucuuc

SEQ ID NO: 1342951 - RNA, 19 nt, Artificial Sequence
  Description of Artificial Sequence: Synthetic oligonucleotide
uccucaucccagcuguucc

SEQ ID NO: 1342952 - RNA, 19 nt, Artificial Sequence
  Description of Artificial Sequence: Synthetic oligonucleotide
gcauagagugcacaugugg

SEQ ID NO: 1342953 - RNA, 19 nt, Artificial Sequence
  Description of Artificial Sequence: Synthetic oligonucleotide
auuucuaagugccccaguu

SEQ ID NO: 1342954 - RNA, 19 nt, Artificial Sequence
  Description of Artificial Sequence: Synthetic oligonucleotide
uccucauggguuccauccg

SEQ ID NO: 1342955 - RNA, 19 nt, Artificial Sequence
  Description of Artificial Sequence: Synthetic oligonucleotide
agauaggggcagcaaguuc

SEQ ID NO: 1342956 - RNA, 19 nt, Artificial Sequence
  Description of Artificial Sequence: Synthetic oligonucleotide
uuucuaagugccccaguuc

SEQ ID NO: 1342957 - RNA, 19 nt, Artificial Sequence
  Description of Artificial Sequence: Synthetic oligonucleotide
aggagcuugagccguucac

SEQ ID NO: 1342958 - RNA, 19 nt, Artificial Sequence
  Description of Artificial Sequence: Synthetic oligonucleotide
agacauugcagccgcacca

SEQ ID NO: 1342959 - RNA, 19 nt, Artificial Sequence
  Description of Artificial Sequence: Synthetic oligonucleotide
aucguaguguggcaagcag

SEQ ID NO: 1342960 - RNA, 19 nt, Artificial Sequence
  Description of Artificial Sequence: Synthetic oligonucleotide
cacauguuuauggaggcac

SEQ ID NO: 1342961 - RNA, 19 nt, Artificial Sequence
  Description of Artificial Sequence: Synthetic oligonucleotide
uaagauccugcccuggcua

SEQ ID NO: 1342962 - RNA, 19 nt, Artificial Sequence
  Description of Artificial Sequence: Synthetic oligonucleotide
uugcuagguaagauccugc

SEQ ID NO: 1342963 - RNA, 19 nt, Artificial Sequence
  Description of Artificial Sequence: Synthetic oligonucleotide
uuuugcuagguaagauccu

SEQ ID NO: 1342964 - RNA, 19 nt, Artificial Sequence
  Description of Artificial Sequence: Synthetic oligonucleotide
uccauuaguagcuguuguc

SEQ ID NO: 1342965 - RNA, 19 nt, Artificial Sequence
  Description of Artificial Sequence: Synthetic oligonucleotide
caucaacggcaucagagac

SEQ ID NO: 1342966 - RNA, 19 nt, Artificial Sequence
  Description of Artificial Sequence: Synthetic oligonucleotide
uccuagagguuuugcuagg

SEQ ID NO: 1342967 - RNA, 19 nt, Artificial Sequence
  Description of Artificial Sequence: Synthetic oligonucleotide
uccagaauuuuguguucag

SEQ ID NO: 1342968 - RNA, 19 nt, Artificial Sequence
  Description of Artificial Sequence: Synthetic oligonucleotide
uuuagguagcccuuuccuu

SEQ ID NO: 1342969 - RNA, 19 nt, Artificial Sequence
  Description of Artificial Sequence: Synthetic oligonucleotide
uggaucguaguguggcaag

SEQ ID NO: 1342970 - RNA, 19 nt, Artificial Sequence
  Description of Artificial Sequence: Synthetic oligonucleotide
auucgaggaugcugccugc

SEQ ID NO: 1342971 - RNA, 19 nt, Artificial Sequence
  Description of Artificial Sequence: Synthetic oligonucleotide
cacccugcaagcauacagc

SEQ ID NO: 1342972 - RNA, 19 nt, Artificial Sequence
  Description of Artificial Sequence: Synthetic oligonucleotide
aguguuaggccacauucuu

SEQ ID NO: 1342973 - RNA, 19 nt, Artificial Sequence
  Description of Artificial Sequence: Synthetic oligonucleotide
cugaacauccuccucuguc

SEQ ID NO: 1342974 - RNA, 19 nt, Artificial Sequence
  Description of Artificial Sequence: Synthetic oligonucleotide
gacuugacaauagggccag

SEQ ID NO: 1342975 - RNA, 19 nt, Artificial Sequence
  Description of Artificial Sequence: Synthetic oligonucleotide
ugcuggguuggucauguaa

SEQ ID NO: 1342976 - RNA, 19 nt, Artificial Sequence
  Description of Artificial Sequence: Synthetic oligonucleotide
auagacagauugacacacc

SEQ ID NO: 1342977 - RNA, 19 nt, Artificial Sequence
  Description of Artificial Sequence: Synthetic oligonucleotide
cuagguaagauccugcccu

SEQ ID NO: 1342978 - RNA, 19 nt, Artificial Sequence
  Description of Artificial Sequence: Synthetic oligonucleotide
cagauugacacaccuauaa

SEQ ID NO: 1342979 - RNA, 19 nt, Artificial Sequence
  Description of Artificial Sequence: Synthetic oligonucleotide
ugcgguugaguuaggcucu

SEQ ID NO: 1342980 - RNA, 19 nt, Artificial Sequence
  Description of Artificial Sequence: Synthetic oligonucleotide
cuccauuucuaagugcccc

SEQ ID NO: 1342981 - RNA, 19 nt, Artificial Sequence
  Description of Artificial Sequence: Synthetic oligonucleotide
cagauauucgaggaugcug

SEQ ID NO: 1342982 - RNA, 19 nt, Artificial Sequence
  Description of Artificial Sequence: Synthetic oligonucleotide
ucugucuaccauggcacag

SEQ ID NO: 1342983 - RNA, 19 nt, Artificial Sequence
  Description of Artificial Sequence: Synthetic oligonucleotide
uugacagcaccguugucuc

SEQ ID NO: 1342984 - RNA, 19 nt, Artificial Sequence
  Description of Artificial Sequence: Synthetic oligonucleotide
ugucuaccauggcacagac

SEQ ID NO: 1342985 - RNA, 19 nt, Artificial Sequence
  Description of Artificial Sequence: Synthetic oligonucleotide
uugagccguucacccaugg

SEQ ID NO: 1342986 - RNA, 19 nt, Artificial Sequence
  Description of Artificial Sequence: Synthetic oligonucleotide
cuugagaguuuccugcuca

SEQ ID NO: 1342987 - RNA, 19 nt, Artificial Sequence
  Description of Artificial Sequence: Synthetic oligonucleotide
gguuuugcuagguaagauc

SEQ ID NO: 1342988 - RNA, 19 nt, Artificial Sequence
  Description of Artificial Sequence: Synthetic oligonucleotide
acgcaguaaacacauguuu

SEQ ID NO: 1342989 - RNA, 19 nt, Artificial Sequence
  Description of Artificial Sequence: Synthetic oligonucleotide
cauucuagcccugcgguug

SEQ ID NO: 1342990 - RNA, 19 nt, Artificial Sequence
  Description of Artificial Sequence: Synthetic oligonucleotide
ggugggagccuccucaucc

SEQ ID NO: 1342991 - RNA, 19 nt, Artificial Sequence
  Description of Artificial Sequence: Synthetic oligonucleotide
agguguucugagucacacg

SEQ ID NO: 1342992 - RNA, 19 nt, Artificial Sequence
  Description of Artificial Sequence: Synthetic oligonucleotide
agccgcaccagaaaucuuc

SEQ ID NO: 1342993 - RNA, 19 nt, Artificial Sequence
  Description of Artificial Sequence: Synthetic oligonucleotide
ucauggguuccauccguca

SEQ ID NO: 1342994 - RNA, 19 nt, Artificial Sequence
  Description of Artificial Sequence: Synthetic oligonucleotide
acccauggaucguagugug

SEQ ID NO: 1342995 - RNA, 19 nt, Artificial Sequence
  Description of Artificial Sequence: Synthetic oligonucleotide
uagguaagauccugcccug

SEQ ID NO: 1342996 - RNA, 19 nt, Artificial Sequence
  Description of Artificial Sequence: Synthetic oligonucleotide
agacuugacaauagggcca

SEQ ID NO: 1342997 - RNA, 19 nt, Artificial Sequence
  Description of Artificial Sequence: Synthetic oligonucleotide
ccuauaacgggguuuccag

SEQ ID NO: 1342998 - RNA, 19 nt, Artificial Sequence
  Description of Artificial Sequence: Synthetic oligonucleotide
ggagcauuggguuccagga

SEQ ID NO: 1342999 - RNA, 19 nt, Artificial Sequence
  Description of Artificial Sequence: Synthetic oligonucleotide
auuuugguucccagugcac

SEQ ID NO: 1343000 - RNA, 19 nt, Artificial Sequence
  Description of Artificial Sequence: Synthetic oligonucleotide
ggcccugagauuuugguuc

SEQ ID NO: 1343001 - RNA, 19 nt, Artificial Sequence
  Description of Artificial Sequence: Synthetic oligonucleotide
agugaggccuccaagacuu

SEQ ID NO: 1343002 - RNA, 19 nt, Artificial Sequence
  Description of Artificial Sequence: Synthetic oligonucleotide
cagacauugcagccgcacc

SEQ ID NO: 1343003 - RNA, 19 nt, Artificial Sequence
  Description of Artificial Sequence: Synthetic oligonucleotide
guaggacaggaugauguug

SEQ ID NO: 1343004 - RNA, 19 nt, Artificial Sequence
  Description of Artificial Sequence: Synthetic oligonucleotide
ugcuuuccagcgccacacg

SEQ ID NO: 1343005 - RNA, 19 nt, Artificial Sequence
  Description of Artificial Sequence: Synthetic oligonucleotide
gacuccgaagcuguuccag

SEQ ID NO: 1343006 - RNA, 19 nt, Artificial Sequence
  Description of Artificial Sequence: Synthetic oligonucleotide
cccauuuagggucaaugag

SEQ ID NO: 1343007 - RNA, 19 nt, Artificial Sequence
  Description of Artificial Sequence: Synthetic oligonucleotide
ugccucucauguugcauga

SEQ ID NO: 1343008 - RNA, 19 nt, Artificial Sequence
  Description of Artificial Sequence: Synthetic oligonucleotide
uggcuuagacuugacaaua

SEQ ID NO: 1343009 - RNA, 19 nt, Artificial Sequence
  Description of Artificial Sequence: Synthetic oligonucleotide
guuuagguagcccuuuccu

SEQ ID NO: 1343010 - RNA, 19 nt, Artificial Sequence
  Description of Artificial Sequence: Synthetic oligonucleotide
uuuuguguucaggcgucug

SEQ ID NO: 1343011 - RNA, 19 nt, Artificial Sequence
  Description of Artificial Sequence: Synthetic oligonucleotide
ucgaggaugcugccugcug

SEQ ID NO: 1343012 - RNA, 19 nt, Artificial Sequence
  Description of Artificial Sequence: Synthetic oligonucleotide
aagauaggggcagcaaguu

SEQ ID NO: 1343013 - RNA, 19 nt, Artificial Sequence
  Description of Artificial Sequence: Synthetic oligonucleotide
agccguucacccauggauc

SEQ ID NO: 1343014 - RNA, 19 nt, Artificial Sequence
  Description of Artificial Sequence: Synthetic oligonucleotide
guuucacucagcacaguca

SEQ ID NO: 1343015 - RNA, 19 nt, Artificial Sequence
  Description of Artificial Sequence: Synthetic oligonucleotide
gauaucccauuuaggguca

SEQ ID NO: 1343016 - RNA, 19 nt, Artificial Sequence
  Description of Artificial Sequence: Synthetic oligonucleotide
caaugagcaacugggccac

SEQ ID NO: 1343017 - RNA, 19 nt, Artificial Sequence
  Description of Artificial Sequence: Synthetic oligonucleotide
cagggaagcauagagugca

SEQ ID NO: 1343018 - RNA, 19 nt, Artificial Sequence
  Description of Artificial Sequence: Synthetic oligonucleotide
auuagggaugagaaggaua

SEQ ID NO: 1343019 - RNA, 19 nt, Artificial Sequence
  Description of Artificial Sequence: Synthetic oligonucleotide
gguaagauccugcccuggc

SEQ ID NO: 1343020 - RNA, 19 nt, Artificial Sequence
  Description of Artificial Sequence: Synthetic oligonucleotide
caaguucuggcacgaguuc

SEQ ID NO: 1343021 - RNA, 19 nt, Artificial Sequence
  Description of Artificial Sequence: Synthetic oligonucleotide
acuccgaagcuguuccaga

SEQ ID NO: 1343022 - RNA, 19 nt, Artificial Sequence
  Description of Artificial Sequence: Synthetic oligonucleotide
cggaaugcaaggaugcugc

SEQ ID NO: 1343023 - RNA, 19 nt, Artificial Sequence
  Description of Artificial Sequence: Synthetic oligonucleotide
ucuguacgcaggccuugga

SEQ ID NO: 1343024 - RNA, 19 nt, Artificial Sequence
  Description of Artificial Sequence: Synthetic oligonucleotide
gcuagguaagauccugccc

SEQ ID NO: 1343025 - RNA, 19 nt, Artificial Sequence
  Description of Artificial Sequence: Synthetic oligonucleotide
gagaaggauaucccauuua

SEQ ID NO: 1343026 - RNA, 19 nt, Artificial Sequence
  Description of Artificial Sequence: Synthetic oligonucleotide
ugggccacccggaaugcaa

SEQ ID NO: 1343027 - RNA, 19 nt, Artificial Sequence
  Description of Artificial Sequence: Synthetic oligonucleotide
cugccagacauugcagccg

SEQ ID NO: 1343028 - RNA, 19 nt, Artificial Sequence
  Description of Artificial Sequence: Synthetic oligonucleotide
gccguucacccauggaucg

SEQ ID NO: 1343029 - RNA, 19 nt, Artificial Sequence
  Description of Artificial Sequence: Synthetic oligonucleotide
ggaaguccucucuagucac

SEQ ID NO: 1343030 - RNA, 19 nt, Artificial Sequence
  Description of Artificial Sequence: Synthetic oligonucleotide
cagguagaagauaggggca

SEQ ID NO: 1343031 - RNA, 19 nt, Artificial Sequence
  Description of Artificial Sequence: Synthetic oligonucleotide
cuauaacgggguuuccaga

SEQ ID NO: 1343032 - RNA, 19 nt, Artificial Sequence
  Description of Artificial Sequence: Synthetic oligonucleotide
aucugucuaccauggcaca

SEQ ID NO: 1343033 - RNA, 19 nt, Artificial Sequence
  Description of Artificial Sequence: Synthetic oligonucleotide
acgaguucuccugagggaa

SEQ ID NO: 1343034 - RNA, 19 nt, Artificial Sequence
  Description of Artificial Sequence: Synthetic oligonucleotide
aacgggguuuccagaacca

SEQ ID NO: 1343035 - RNA, 19 nt, Artificial Sequence
  Description of Artificial Sequence: Synthetic oligonucleotide
acgcaggccuuggaagucc

SEQ ID NO: 1343036 - RNA, 19 nt, Artificial Sequence
  Description of Artificial Sequence: Synthetic oligonucleotide
gagccguucacccauggau

SEQ ID NO: 1343037 - RNA, 19 nt, Artificial Sequence
  Description of Artificial Sequence: Synthetic oligonucleotide
gacauuccagguguucuga

SEQ ID NO: 1343038 - RNA, 19 nt, Artificial Sequence
  Description of Artificial Sequence: Synthetic oligonucleotide
uucacccauggaucguagu

SEQ ID NO: 1343039 - RNA, 19 nt, Artificial Sequence
  Description of Artificial Sequence: Synthetic oligonucleotide
guugaguuaggcucuuggu

SEQ ID NO: 1343040 - RNA, 19 nt, Artificial Sequence
  Description of Artificial Sequence: Synthetic oligonucleotide
acacggcccugaauguucc

SEQ ID NO: 1343041 - RNA, 19 nt, Artificial Sequence
  Description of Artificial Sequence: Synthetic oligonucleotide
gagguuccaucugucuacc

SEQ ID NO: 1343042 - RNA, 19 nt, Artificial Sequence
  Description of Artificial Sequence: Synthetic oligonucleotide
uuagggucugggugaccug

SEQ ID NO: 1343043 - RNA, 19 nt, Artificial Sequence
  Description of Artificial Sequence: Synthetic oligonucleotide
gucacacgcaguaaacaca

SEQ ID NO: 1343044 - RNA, 19 nt, Artificial Sequence
  Description of Artificial Sequence: Synthetic oligonucleotide
auucuagcccugcgguuga

SEQ ID NO: 1343045 - RNA, 19 nt, Artificial Sequence
  Description of Artificial Sequence: Synthetic oligonucleotide
gaucguaguguggcaagca

SEQ ID NO: 1343046 - RNA, 19 nt, Artificial Sequence
  Description of Artificial Sequence: Synthetic oligonucleotide
aucaacggcaucagagaca

SEQ ID NO: 1343047 - RNA, 19 nt, Artificial Sequence
  Description of Artificial Sequence: Synthetic oligonucleotide
uggguuggucauguaaaau

SEQ ID NO: 1343048 - RNA, 19 nt, Artificial Sequence
  Description of Artificial Sequence: Synthetic oligonucleotide
ucugggugaccugaacauc

SEQ ID NO: 1343049 - RNA, 19 nt, Artificial Sequence
  Description of Artificial Sequence: Synthetic oligonucleotide
agguaagauccugcccugg

SEQ ID NO: 1343050 - RNA, 19 nt, Artificial Sequence
  Description of Artificial Sequence: Synthetic oligonucleotide
caaacuggccuaagcccuc

SEQ ID NO: 1343051 - RNA, 19 nt, Artificial Sequence
  Description of Artificial Sequence: Synthetic oligonucleotide
agcaagguuucuggcuuag

SEQ ID NO: 1343052 - RNA, 19 nt, Artificial Sequence
  Description of Artificial Sequence: Synthetic oligonucleotide
aguguggcaagcagguuaa

SEQ ID NO: 1343053 - RNA, 19 nt, Artificial Sequence
  Description of Artificial Sequence: Synthetic oligonucleotide
acauguuuauggaggcacu

SEQ ID NO: 1343054 - RNA, 19 nt, Artificial Sequence
  Description of Artificial Sequence: Synthetic oligonucleotide
agguuuugcuagguaagau

SEQ ID NO: 1343055 - RNA, 19 nt, Artificial Sequence
  Description of Artificial Sequence: Synthetic oligonucleotide
ucccaucaacggcaucaga

SEQ ID NO: 1343056 - RNA, 19 nt, Artificial Sequence
  Description of Artificial Sequence: Synthetic oligonucleotide
gcucuugguuuuccuagag

SEQ ID NO: 1343057 - RNA, 19 nt, Artificial Sequence
  Description of Artificial Sequence: Synthetic oligonucleotide
cuucuagcaagacccaggu

SEQ ID NO: 1343058 - RNA, 19 nt, Artificial Sequence
  Description of Artificial Sequence: Synthetic oligonucleotide
cgcaccagaaaucuucccc

SEQ ID NO: 1343059 - RNA, 19 nt, Artificial Sequence
  Description of Artificial Sequence: Synthetic oligonucleotide
auggaucguaguguggcaa

SEQ ID NO: 1343060 - RNA, 19 nt, Artificial Sequence
  Description of Artificial Sequence: Synthetic oligonucleotide
ccaccugcaguguuaggcc

SEQ ID NO: 1343061 - RNA, 19 nt, Artificial Sequence
  Description of Artificial Sequence: Synthetic oligonucleotide
uccucucuagucaccuguu

SEQ ID NO: 1343062 - RNA, 19 nt, Artificial Sequence
  Description of Artificial Sequence: Synthetic oligonucleotide
ccgcuucuuuucauuaggg

SEQ ID NO: 1343063 - RNA, 19 nt, Artificial Sequence
  Description of Artificial Sequence: Synthetic oligonucleotide
ggcuuagacuugacaauag

SEQ ID NO: 1343064 - RNA, 19 nt, Artificial Sequence
  Description of Artificial Sequence: Synthetic oligonucleotide
ccaucugucuaccauggca

SEQ ID NO: 1343065 - RNA, 19 nt, Artificial Sequence
  Description of Artificial Sequence: Synthetic oligonucleotide
agcauagagugcacaugug

SEQ ID NO: 1343066 - RNA, 19 nt, Artificial Sequence
  Description of Artificial Sequence: Synthetic oligonucleotide
cuugagccguucacccaug

SEQ ID NO: 1343067 - RNA, 19 nt, Artificial Sequence
  Description of Artificial Sequence: Synthetic oligonucleotide
gaaugcaaggaugcugccu

SEQ ID NO: 1343068 - RNA, 19 nt, Artificial Sequence
  Description of Artificial Sequence: Synthetic oligonucleotide
cucuagucaccuguuccuc

SEQ ID NO: 1343069 - RNA, 19 nt, Artificial Sequence
  Description of Artificial Sequence: Synthetic oligonucleotide
ggaaugcaaggaugcugcc

SEQ ID NO: 1343070 - RNA, 19 nt, Artificial Sequence
  Description of Artificial Sequence: Synthetic oligonucleotide
cuagcaagguuucuggcuu

SEQ ID NO: 1343071 - RNA, 19 nt, Artificial Sequence
  Description of Artificial Sequence: Synthetic oligonucleotide
guucacccauggaucguag

SEQ ID NO: 1343072 - RNA, 19 nt, Artificial Sequence
  Description of Artificial Sequence: Synthetic oligonucleotide
gauguccuugauagacaga

SEQ ID NO: 1343073 - RNA, 19 nt, Artificial Sequence
  Description of Artificial Sequence: Synthetic oligonucleotide
guacgcaggccuuggaagu

SEQ ID NO: 1343074 - RNA, 19 nt, Artificial Sequence
  Description of Artificial Sequence: Synthetic oligonucleotide
gccucacuucauucuagcc

SEQ ID NO: 1343075 - RNA, 19 nt, Artificial Sequence
  Description of Artificial Sequence: Synthetic oligonucleotide
cuuagggucugggugaccu

SEQ ID NO: 1343076 - RNA, 19 nt, Artificial Sequence
  Description of Artificial Sequence: Synthetic oligonucleotide
gggacacaaaucucugcuc

SEQ ID NO: 1343077 - RNA, 19 nt, Artificial Sequence
  Description of Artificial Sequence: Synthetic oligonucleotide
uguucccaucaacggcauc

SEQ ID NO: 1343078 - RNA, 19 nt, Artificial Sequence
  Description of Artificial Sequence: Synthetic oligonucleotide
uagcaagguuucuggcuua

SEQ ID NO: 1343079 - RNA, 19 nt, Artificial Sequence
  Description of Artificial Sequence: Synthetic oligonucleotide
auaggggcagcaaguucug

SEQ ID NO: 1343080 - RNA, 19 nt, Artificial Sequence
  Description of Artificial Sequence: Synthetic oligonucleotide
ucuagcccugcgguugagu

SEQ ID NO: 1343081 - RNA, 19 nt, Artificial Sequence
  Description of Artificial Sequence: Synthetic oligonucleotide
ucccuaacuccugggccug

SEQ ID NO: 1343082 - RNA, 19 nt, Artificial Sequence
  Description of Artificial Sequence: Synthetic oligonucleotide
gagccuuagccagcagcug

SEQ ID NO: 1343083 - RNA, 19 nt, Artificial Sequence
  Description of Artificial Sequence: Synthetic oligonucleotide
uacgcaggccuuggaaguc

SEQ ID NO: 1343084 - RNA, 19 nt, Artificial Sequence
  Description of Artificial Sequence: Synthetic oligonucleotide
gacacaccuauaacggggu

SEQ ID NO: 1343085 - RNA, 19 nt, Artificial Sequence
  Description of Artificial Sequence: Synthetic oligonucleotide
cuagagguuuugcuaggua

SEQ ID NO: 1343086 - RNA, 19 nt, Artificial Sequence
  Description of Artificial Sequence: Synthetic oligonucleotide
uccauccgucaggagcuug

SEQ ID NO: 1343087 - RNA, 19 nt, Artificial Sequence
  Description of Artificial Sequence: Synthetic oligonucleotide
ggaucguaguguggcaagc

SEQ ID NO: 1343088 - RNA, 19 nt, Artificial Sequence
  Description of Artificial Sequence: Synthetic oligonucleotide
cacacgcaguaaacacaug

SEQ ID NO: 1343089 - RNA, 19 nt, Artificial Sequence
  Description of Artificial Sequence: Synthetic oligonucleotide
cacgacuccgaagcuguuc

SEQ ID NO: 1343090 - RNA, 19 nt, Artificial Sequence
  Description of Artificial Sequence: Synthetic oligonucleotide
agguuccaucugucuacca

SEQ ID NO: 1343091 - RNA, 19 nt, Artificial Sequence
  Description of Artificial Sequence: Synthetic oligonucleotide
cgccacacggcccugaaug

SEQ ID NO: 1343092 - RNA, 19 nt, Artificial Sequence
  Description of Artificial Sequence: Synthetic oligonucleotide
gcaccguugucuccagagc

SEQ ID NO: 1343093 - RNA, 19 nt, Artificial Sequence
  Description of Artificial Sequence: Synthetic oligonucleotide
ucuggagcauuggguucca

SEQ ID NO: 1343094 - RNA, 19 nt, Artificial Sequence
  Description of Artificial Sequence: Synthetic oligonucleotide
cuaagugccccaguucugu

SEQ ID NO: 1343095 - RNA, 19 nt, Artificial Sequence
  Description of Artificial Sequence: Synthetic oligonucleotide
cacauguggggcccugaga

SEQ ID NO: 1343096 - RNA, 19 nt, Artificial Sequence
  Description of Artificial Sequence: Synthetic oligonucleotide
cuggcacgaguucuccuga

SEQ ID NO: 1343097 - RNA, 19 nt, Artificial Sequence
  Description of Artificial Sequence: Synthetic oligonucleotide
gaguuaggcucuugguuuu

SEQ ID NO: 1343098 - RNA, 19 nt, Artificial Sequence
  Description of Artificial Sequence: Synthetic oligonucleotide
acuugacaauagggccagg

SEQ ID NO: 1343099 - RNA, 19 nt, Artificial Sequence
  Description of Artificial Sequence: Synthetic oligonucleotide
guaccagauauucgaggau

SEQ ID NO: 1343100 - RNA, 19 nt, Artificial Sequence
  Description of Artificial Sequence: Synthetic oligonucleotide
gcuagaggguaggacagga

SEQ ID NO: 1343101 - RNA, 19 nt, Artificial Sequence
  Description of Artificial Sequence: Synthetic oligonucleotide
gguuccaucugucuaccau

SEQ ID NO: 1343102 - RNA, 19 nt, Artificial Sequence
  Description of Artificial Sequence: Synthetic oligonucleotide
gguccgcuucuuuucauua

SEQ ID NO: 1343103 - RNA, 19 nt, Artificial Sequence
  Description of Artificial Sequence: Synthetic oligonucleotide
uucuagcccugcgguugag

SEQ ID NO: 1343104 - RNA, 19 nt, Artificial Sequence
  Description of Artificial Sequence: Synthetic oligonucleotide
ccggaaugcaaggaugcug

SEQ ID NO: 1343105 - RNA, 19 nt, Artificial Sequence
  Description of Artificial Sequence: Synthetic oligonucleotide
cacgcaguaaacacauguu

SEQ ID NO: 1343106 - RNA, 19 nt, Artificial Sequence
  Description of Artificial Sequence: Synthetic oligonucleotide
cacggcccugaauguuccc

SEQ ID NO: 1343107 - RNA, 19 nt, Artificial Sequence
  Description of Artificial Sequence: Synthetic oligonucleotide
caugcuggguuggucaugu

SEQ ID NO: 1343108 - RNA, 19 nt, Artificial Sequence
  Description of Artificial Sequence: Synthetic oligonucleotide
ccagacauugcagccgcac

SEQ ID NO: 1343109 - RNA, 19 nt, Artificial Sequence
  Description of Artificial Sequence: Synthetic oligonucleotide
cauuggguuccaggauguc

SEQ ID NO: 1343110 - RNA, 19 nt, Artificial Sequence
  Description of Artificial Sequence: Synthetic oligonucleotide
gguagcucaaagguccgcu

SEQ ID NO: 1343111 - RNA, 19 nt, Artificial Sequence
  Description of Artificial Sequence: Synthetic oligonucleotide
ccauuaguagcuguugucu

SEQ ID NO: 1343112 - RNA, 19 nt, Artificial Sequence
  Description of Artificial Sequence: Synthetic oligonucleotide
cacccauggaucguagugu

SEQ ID NO: 1343113 - RNA, 19 nt, Artificial Sequence
  Description of Artificial Sequence: Synthetic oligonucleotide
agugcacauguggggcccu

SEQ ID NO: 1343114 - RNA, 19 nt, Artificial Sequence
  Description of Artificial Sequence: Synthetic oligonucleotide
caggagcuugagccguuca

SEQ ID NO: 1343115 - RNA, 19 nt, Artificial Sequence
  Description of Artificial Sequence: Synthetic oligonucleotide
guagcucaaagguccgcuu

SEQ ID NO: 1343116 - RNA, 19 nt, Artificial Sequence
  Description of Artificial Sequence: Synthetic oligonucleotide
agcgccacacggcccugaa

SEQ ID NO: 1343117 - RNA, 19 nt, Artificial Sequence
  Description of Artificial Sequence: Synthetic oligonucleotide
guggggcccugagauuuug

SEQ ID NO: 1343118 - RNA, 19 nt, Artificial Sequence
  Description of Artificial Sequence: Synthetic oligonucleotide
gcagcaaguucuggcacga

SEQ ID NO: 1343119 - RNA, 19 nt, Artificial Sequence
  Description of Artificial Sequence: Synthetic oligonucleotide
gagggaaguaccagauauu

SEQ ID NO: 1343120 - RNA, 19 nt, Artificial Sequence
  Description of Artificial Sequence: Synthetic oligonucleotide
cagcaaguucuggcacgag

SEQ ID NO: 1343121 - RNA, 19 nt, Artificial Sequence
  Description of Artificial Sequence: Synthetic oligonucleotide
gggccacccggaaugcaag

SEQ ID NO: 1343122 - RNA, 19 nt, Artificial Sequence
  Description of Artificial Sequence: Synthetic oligonucleotide
ggggugcucugcuccaaga

SEQ ID NO: 1343123 - RNA, 19 nt, Artificial Sequence
  Description of Artificial Sequence: Synthetic oligonucleotide
gcagccgcaccagaaaucu

SEQ ID NO: 1343124 - RNA, 19 nt, Artificial Sequence
  Description of Artificial Sequence: Synthetic oligonucleotide
gguuaaaggcaugcugccu

SEQ ID NO: 1343125 - RNA, 19 nt, Artificial Sequence
  Description of Artificial Sequence: Synthetic oligonucleotide
cguaguguggcaagcaggu

SEQ ID NO: 1343126 - RNA, 19 nt, Artificial Sequence
  Description of Artificial Sequence: Synthetic oligonucleotide
cuaccauggcacagacccu

SEQ ID NO: 1343127 - RNA, 19 nt, Artificial Sequence
  Description of Artificial Sequence: Synthetic oligonucleotide
cuaacuccugggccugccu

SEQ ID NO: 1343128 - RNA, 19 nt, Artificial Sequence
  Description of Artificial Sequence: Synthetic oligonucleotide
ccugagggaaguaccagau

SEQ ID NO: 1343129 - RNA, 19 nt, Artificial Sequence
  Description of Artificial Sequence: Synthetic oligonucleotide
gccuuggaaguccucucua

SEQ ID NO: 1343130 - RNA, 19 nt, Artificial Sequence
  Description of Artificial Sequence: Synthetic oligonucleotide
uuccauccgucaggagcuu

SEQ ID NO: 1343131 - RNA, 19 nt, Artificial Sequence
  Description of Artificial Sequence: Synthetic oligonucleotide
cccugaauguucccaucaa

SEQ ID NO: 1343132 - RNA, 19 nt, Artificial Sequence
  Description of Artificial Sequence: Synthetic oligonucleotide
augcuggguuggucaugua

SEQ ID NO: 1343133 - RNA, 19 nt, Artificial Sequence
  Description of Artificial Sequence: Synthetic oligonucleotide
ccaugcuggguuggucaug

SEQ ID NO: 1343134 - RNA, 19 nt, Artificial Sequence
  Description of Artificial Sequence: Synthetic oligonucleotide
cagcaccguugucuccaga

SEQ ID NO: 1343135 - RNA, 19 nt, Artificial Sequence
  Description of Artificial Sequence: Synthetic oligonucleotide
ccucauggguuccauccgu

SEQ ID NO: 1343136 - RNA, 19 nt, Artificial Sequence
  Description of Artificial Sequence: Synthetic oligonucleotide
guaguguggcaagcagguu

SEQ ID NO: 1343137 - RNA, 19 nt, Artificial Sequence
  Description of Artificial Sequence: Synthetic oligonucleotide
ccuagagguuuugcuaggu

SEQ ID NO: 1343138 - RNA, 19 nt, Artificial Sequence
  Description of Artificial Sequence: Synthetic oligonucleotide
ccagauauucgaggaugcu

SEQ ID NO: 1343139 - RNA, 19 nt, Artificial Sequence
  Description of Artificial Sequence: Synthetic oligonucleotide
cguucacccauggaucgua

SEQ ID NO: 1343140 - RNA, 19 nt, Artificial Sequence
  Description of Artificial Sequence: Synthetic oligonucleotide
ggaggcaguagggccugau

SEQ ID NO: 1343141 - RNA, 19 nt, Artificial Sequence
  Description of Artificial Sequence: Synthetic oligonucleotide
ggguuucacucagcacagu

SEQ ID NO: 1343142 - RNA, 19 nt, Artificial Sequence
  Description of Artificial Sequence: Synthetic oligonucleotide
cagccgcaccagaaaucuu

SEQ ID NO: 1343143 - RNA, 19 nt, Artificial Sequence
  Description of Artificial Sequence: Synthetic oligonucleotide
ccguugucuccagagccuu

SEQ ID NO: 1343144 - RNA, 19 nt, Artificial Sequence
  Description of Artificial Sequence: Synthetic oligonucleotide
gcgccacacggcccugaau

SEQ ID NO: 1343145 - RNA, 19 nt, Artificial Sequence
  Description of Artificial Sequence: Synthetic oligonucleotide
ccguucacccauggaucgu

SEQ ID NO: 1343146 - RNA, 19 nt, Artificial Sequence
  Description of Artificial Sequence: Synthetic oligonucleotide
aauagugacaaucagaauc

SEQ ID NO: 1343147 - RNA, 19 nt, Artificial Sequence
  Description of Artificial Sequence: Synthetic oligonucleotide
aaucauagguacuaagucc

SEQ ID NO: 1343148 - RNA, 19 nt, Artificial Sequence
  Description of Artificial Sequence: Synthetic oligonucleotide
aaauauuagaauguuuccc

SEQ ID NO: 1343149 - RNA, 19 nt, Artificial Sequence
  Description of Artificial Sequence: Synthetic oligonucleotide
aaaucauagguacuaaguc

SEQ ID NO: 1343150 - RNA, 19 nt, Artificial Sequence
  Description of Artificial Sequence: Synthetic oligonucleotide
  modified_base (2)..(2): a, c, u, g, unknown or other
gnuuauguggaauacuccg

SEQ ID NO: 1343151 - RNA, 19 nt, Artificial Sequence
  Description of Artificial Sequence: Synthetic oligonucleotide
agugaguucguuuggaugc

SEQ ID NO: 1343152 - RNA, 19 nt, Artificial Sequence
  Description of Artificial Sequence: Synthetic oligonucleotide
aauauuagaauguuuccca

SEQ ID NO: 1343153 - RNA, 19 nt, Artificial Sequence
  Description of Artificial Sequence: Synthetic oligonucleotide
ucuuaugugaucaauuuga

SEQ ID NO: 1343154 - RNA, 19 nt, Artificial Sequence
  Description of Artificial Sequence: Synthetic oligonucleotide
uaugaguuaauuuauuaug

SEQ ID NO: 1343155 - RNA, 19 nt, Artificial Sequence
  Description of Artificial Sequence: Synthetic oligonucleotide
guaauacucaaucagaaug

SEQ ID NO: 1343156 - RNA, 19 nt, Artificial Sequence
  Description of Artificial Sequence: Synthetic oligonucleotide
aaaauggcaauuaacauca

SEQ ID NO: 1343157 - RNA, 19 nt, Artificial Sequence
  Description of Artificial Sequence: Synthetic oligonucleotide
aaucacauuaaucacugga

SEQ ID NO: 1343158 - RNA, 19 nt, Artificial Sequence
  Description of Artificial Sequence: Synthetic oligonucleotide
uuaacaagguaguuuaugc

SEQ ID NO: 1343159 - RNA, 19 nt, Artificial Sequence
  Description of Artificial Sequence: Synthetic oligonucleotide
aaaagacaagaccaaucac

SEQ ID NO: 1343160 - RNA, 19 nt, Artificial Sequence
  Description of Artificial Sequence: Synthetic oligonucleotide
auuagaauguuucccaauc

SEQ ID NO: 1343161 - RNA, 19 nt, Artificial Sequence
  Description of Artificial Sequence: Synthetic oligonucleotide
ucaaugugcgcucaucucg

SEQ ID NO: 1343162 - RNA, 19 nt, Artificial Sequence
  Description of Artificial Sequence: Synthetic oligonucleotide
acauguaagccauccaugc

SEQ ID NO: 1343163 - RNA, 19 nt, Artificial Sequence
  Description of Artificial Sequence: Synthetic oligonucleotide
gcaauuaacaucaaaaggg

SEQ ID NO: 1343164 - RNA, 19 nt, Artificial Sequence
  Description of Artificial Sequence: Synthetic oligonucleotide
aaucaggacagugaguucg

SEQ ID NO: 1343165 - RNA, 19 nt, Artificial Sequence
  Description of Artificial Sequence: Synthetic oligonucleotide
uaugcuauugauacaaaac

SEQ ID NO: 1343166 - RNA, 19 nt, Artificial Sequence
  Description of Artificial Sequence: Synthetic oligonucleotide
acaacuuugccaaaggccc

SEQ ID NO: 1343167 - RNA, 19 nt, Artificial Sequence
  Description of Artificial Sequence: Synthetic oligonucleotide
ucaaccuucauguacaaaa

SEQ ID NO: 1343168 - RNA, 19 nt, Artificial Sequence
  Description of Artificial Sequence: Synthetic oligonucleotide
uacuugacuacauagucag

SEQ ID NO: 1343169 - RNA, 19 nt, Artificial Sequence
  Description of Artificial Sequence: Synthetic oligonucleotide
uuagaauuguacuugacua

SEQ ID NO: 1343170 - RNA, 19 nt, Artificial Sequence
  Description of Artificial Sequence: Synthetic oligonucleotide
uuuuagauccguaugaguu

SEQ ID NO: 1343171 - RNA, 19 nt, Artificial Sequence
  Description of Artificial Sequence: Synthetic oligonucleotide
guacuuggauuucagaucg

SEQ ID NO: 1343172 - RNA, 19 nt, Artificial Sequence
  Description of Artificial Sequence: Synthetic oligonucleotide
uaugguaaugucuuggaac

SEQ ID NO: 1343173 - RNA, 19 nt, Artificial Sequence
  Description of Artificial Sequence: Synthetic oligonucleotide
agagucaaccuucauguac

SEQ ID NO: 1343174 - RNA, 19 nt, Artificial Sequence
  Description of Artificial Sequence: Synthetic oligonucleotide
uucuaaauagugacaauca

SEQ ID NO: 1343175 - RNA, 19 nt, Artificial Sequence
  Description of Artificial Sequence: Synthetic oligonucleotide
uuuaaacugaugauguggu

SEQ ID NO: 1343176 - RNA, 19 nt, Artificial Sequence
  Description of Artificial Sequence: Synthetic oligonucleotide
uuauacaacaccauacuua

SEQ ID NO: 1343177 - RNA, 19 nt, Artificial Sequence
  Description of Artificial Sequence: Synthetic oligonucleotide
aaagacaagaccaaucaca

SEQ ID NO: 1343178 - RNA, 19 nt, Artificial Sequence
  Description of Artificial Sequence: Synthetic oligonucleotide
ucuuuugguaucaugugug

SEQ ID NO: 1343179 - RNA, 19 nt, Artificial Sequence
  Description of Artificial Sequence: Synthetic oligonucleotide
aucauagguacuaaguccc

SEQ ID NO: 1343180 - RNA, 19 nt, Artificial Sequence
  Description of Artificial Sequence: Synthetic oligonucleotide
ugcacagugucuauuacgc

SEQ ID NO: 1343181 - RNA, 19 nt, Artificial Sequence
  Description of Artificial Sequence: Synthetic oligonucleotide
auuacgcuuccuuuuaggg

SEQ ID NO: 1343182 - RNA, 19 nt, Artificial Sequence
  Description of Artificial Sequence: Synthetic oligonucleotide
ucuacaacuuugccaaagg

SEQ ID NO: 1343183 - RNA, 19 nt, Artificial Sequence
  Description of Artificial Sequence: Synthetic oligonucleotide
augcuauugauacaaaaca

SEQ ID NO: 1343184 - RNA, 19 nt, Artificial Sequence
  Description of Artificial Sequence: Synthetic oligonucleotide
uacucaucaauguaucucc

SEQ ID NO: 1343185 - RNA, 19 nt, Artificial Sequence
  Description of Artificial Sequence: Synthetic oligonucleotide
uggaacauauccuucgcag

SEQ ID NO: 1343186 - RNA, 19 nt, Artificial Sequence
  Description of Artificial Sequence: Synthetic oligonucleotide
ggcaauuaacaucaaaagg

SEQ ID NO: 1343187 - RNA, 19 nt, Artificial Sequence
  Description of Artificial Sequence: Synthetic oligonucleotide
acaaaggguauuccaaagg

SEQ ID NO: 1343188 - RNA, 19 nt, Artificial Sequence
  Description of Artificial Sequence: Synthetic oligonucleotide
ugaucaaaccauucuagca

SEQ ID NO: 1343189 - RNA, 19 nt, Artificial Sequence
  Description of Artificial Sequence: Synthetic oligonucleotide
ucauauugcauucauuaua

SEQ ID NO: 1343190 - RNA, 19 nt, Artificial Sequence
  Description of Artificial Sequence: Synthetic oligonucleotide
cuccuuacuaucaugaguc

SEQ ID NO: 1343191 - RNA, 19 nt, Artificial Sequence
  Description of Artificial Sequence: Synthetic oligonucleotide
  modified_base (4)..(4): a, c, u, g, unknown or other
cugnuuauguggaauacuc

SEQ ID NO: 1343192 - RNA, 19 nt, Artificial Sequence
  Description of Artificial Sequence: Synthetic oligonucleotide
ugcuaucccaaucaggaca

SEQ ID NO: 1343193 - RNA, 19 nt, Artificial Sequence
  Description of Artificial Sequence: Synthetic oligonucleotide
caaaggguauuccaaaggc

SEQ ID NO: 1343194 - RNA, 19 nt, Artificial Sequence
  Description of Artificial Sequence: Synthetic oligonucleotide
caucggaagacacuguugg

SEQ ID NO: 1343195 - RNA, 19 nt, Artificial Sequence
  Description of Artificial Sequence: Synthetic oligonucleotide
gaugaucaaaccauucuag

SEQ ID NO: 1343196 - RNA, 19 nt, Artificial Sequence
  Description of Artificial Sequence: Synthetic oligonucleotide
  modified_base (19)..(19): a, c, u, g, unknown or other
uguuucccaaucuagcugn

SEQ ID NO: 1343197 - RNA, 19 nt, Artificial Sequence
  Description of Artificial Sequence: Synthetic oligonucleotide
  modified_base (3)..(3): a, c, u, g, unknown or other
ugnuuauguggaauacucc

SEQ ID NO: 1343198 - RNA, 19 nt, Artificial Sequence
  Description of Artificial Sequence: Synthetic oligonucleotide
cauucauuauacaacacca

SEQ ID NO: 1343199 - RNA, 19 nt, Artificial Sequence
  Description of Artificial Sequence: Synthetic oligonucleotide
ucucguuucauuuuagaau

SEQ ID NO: 1343200 - RNA, 19 nt, Artificial Sequence
  Description of Artificial Sequence: Synthetic oligonucleotide
aaugucucuaugguaaugu

SEQ ID NO: 1343201 - RNA, 19 nt, Artificial Sequence
  Description of Artificial Sequence: Synthetic oligonucleotide
ucgaaugugacugaugacu

SEQ ID NO: 1343202 - RNA, 19 nt, Artificial Sequence
  Description of Artificial Sequence: Synthetic oligonucleotide
uuuuaacucauauugcauu

SEQ ID NO: 1343203 - RNA, 19 nt, Artificial Sequence
  Description of Artificial Sequence: Synthetic oligonucleotide
acaccaauguacuaugaug

SEQ ID NO: 1343204 - RNA, 19 nt, Artificial Sequence
  Description of Artificial Sequence: Synthetic oligonucleotide
aauuuauagacuggcagau

SEQ ID NO: 1343205 - RNA, 19 nt, Artificial Sequence
  Description of Artificial Sequence: Synthetic oligonucleotide
uacgcuuccuuuuagggcu

SEQ ID NO: 1343206 - RNA, 19 nt, Artificial Sequence
  Description of Artificial Sequence: Synthetic oligonucleotide
aucacauuaaucacuggac

SEQ ID NO: 1343207 - RNA, 19 nt, Artificial Sequence
  Description of Artificial Sequence: Synthetic oligonucleotide
uuucaaugugcgcucaucu

SEQ ID NO: 1343208 - RNA, 19 nt, Artificial Sequence
  Description of Artificial Sequence: Synthetic oligonucleotide
uucaccuaaaguguccacg

SEQ ID NO: 1343209 - RNA, 19 nt, Artificial Sequence
  Description of Artificial Sequence: Synthetic oligonucleotide
ugugcgaucuccucuuccg

SEQ ID NO: 1343210 - RNA, 19 nt, Artificial Sequence
  Description of Artificial Sequence: Synthetic oligonucleotide
aaccuaaagccaaaaugac

SEQ ID NO: 1343211 - RNA, 19 nt, Artificial Sequence
  Description of Artificial Sequence: Synthetic oligonucleotide
uuuacacuuaacuguacaa

SEQ ID NO: 1343212 - RNA, 19 nt, Artificial Sequence
  Description of Artificial Sequence: Synthetic oligonucleotide
uuccuuuuagggcugcucc

SEQ ID NO: 1343213 - RNA, 19 nt, Artificial Sequence
  Description of Artificial Sequence: Synthetic oligonucleotide
uauuccaaaggccuuuuaa

SEQ ID NO: 1343214 - RNA, 19 nt, Artificial Sequence
  Description of Artificial Sequence: Synthetic oligonucleotide
acgauuucauaucuugcuc

SEQ ID NO: 1343215 - RNA, 19 nt, Artificial Sequence
  Description of Artificial Sequence: Synthetic oligonucleotide
aauacuccguuuccuuguc

SEQ ID NO: 1343216 - RNA, 19 nt, Artificial Sequence
  Description of Artificial Sequence: Synthetic oligonucleotide
ugcuauugauacaaaacau

SEQ ID NO: 1343217 - RNA, 19 nt, Artificial Sequence
  Description of Artificial Sequence: Synthetic oligonucleotide
uguacuguucaagugcucc

SEQ ID NO: 1343218 - RNA, 19 nt, Artificial Sequence
  Description of Artificial Sequence: Synthetic oligonucleotide
auuuacacuuaacuguaca

SEQ ID NO: 1343219 - RNA, 19 nt, Artificial Sequence
  Description of Artificial Sequence: Synthetic oligonucleotide
uucgcaguagucauuucug

SEQ ID NO: 1343220 - RNA, 19 nt, Artificial Sequence
  Description of Artificial Sequence: Synthetic oligonucleotide
uguggaauacuccguuucc

SEQ ID NO: 1343221 - RNA, 19 nt, Artificial Sequence
  Description of Artificial Sequence: Synthetic oligonucleotide
ugucucuaugguaaugucu

SEQ ID NO: 1343222 - RNA, 19 nt, Artificial Sequence
  Description of Artificial Sequence: Synthetic oligonucleotide
uuaugcuauugauacaaaa

SEQ ID NO: 1343223 - RNA, 19 nt, Artificial Sequence
  Description of Artificial Sequence: Synthetic oligonucleotide
ugaacccaagguaauacuc

SEQ ID NO: 1343224 - RNA, 19 nt, Artificial Sequence
  Description of Artificial Sequence: Synthetic oligonucleotide
cacauuaaucacuggacac

SEQ ID NO: 1343225 - RNA, 19 nt, Artificial Sequence
  Description of Artificial Sequence: Synthetic oligonucleotide
uagaauuguacuugacuac

SEQ ID NO: 1343226 - RNA, 19 nt, Artificial Sequence
  Description of Artificial Sequence: Synthetic oligonucleotide
aacauacaguauuuacacu

SEQ ID NO: 1343227 - RNA, 19 nt, Artificial Sequence
  Description of Artificial Sequence: Synthetic oligonucleotide
gcugagaccaaccuaaagc

SEQ ID NO: 1343228 - RNA, 19 nt, Artificial Sequence
  Description of Artificial Sequence: Synthetic oligonucleotide
gacacaucggaagacacug

SEQ ID NO: 1343229 - RNA, 19 nt, Artificial Sequence
  Description of Artificial Sequence: Synthetic oligonucleotide
auccguaugaguuaauuua

SEQ ID NO: 1343230 - RNA, 19 nt, Artificial Sequence
  Description of Artificial Sequence: Synthetic oligonucleotide
uuacgcuuccuuuuagggc

SEQ ID NO: 1343231 - RNA, 19 nt, Artificial Sequence
  Description of Artificial Sequence: Synthetic oligonucleotide
ucuaugguaaugucuugga

SEQ ID NO: 1343232 - RNA, 19 nt, Artificial Sequence
  Description of Artificial Sequence: Synthetic oligonucleotide
ucacuggacacaaagggua

SEQ ID NO: 1343233 - RNA, 19 nt, Artificial Sequence
  Description of Artificial Sequence: Synthetic oligonucleotide
uaacaagguaguuuaugcu

SEQ ID NO: 1343234 - RNA, 19 nt, Artificial Sequence
  Description of Artificial Sequence: Synthetic oligonucleotide
aauauccgcuccaucauug

SEQ ID NO: 1343235 - RNA, 19 nt, Artificial Sequence
  Description of Artificial Sequence: Synthetic oligonucleotide
ugaguuaauuuauuaugau

SEQ ID NO: 1343236 - RNA, 19 nt, Artificial Sequence
  Description of Artificial Sequence: Synthetic oligonucleotide
uagguacuaagucccagca

SEQ ID NO: 1343237 - RNA, 19 nt, Artificial Sequence
  Description of Artificial Sequence: Synthetic oligonucleotide
uuuuagaauuguacuugac

SEQ ID NO: 1343238 - RNA, 19 nt, Artificial Sequence
  Description of Artificial Sequence: Synthetic oligonucleotide
uacaguauuuacacuuaac

SEQ ID NO: 1343239 - RNA, 19 nt, Artificial Sequence
  Description of Artificial Sequence: Synthetic oligonucleotide
gaucuuuuccuucgguggc

SEQ ID NO: 1343240 - RNA, 19 nt, Artificial Sequence
  Description of Artificial Sequence: Synthetic oligonucleotide
cuucgaaugugacugauga

SEQ ID NO: 1343241 - RNA, 19 nt, Artificial Sequence
  Description of Artificial Sequence: Synthetic oligonucleotide
gauggguccguaauauccg

SEQ ID NO: 1343242 - RNA, 19 nt, Artificial Sequence
  Description of Artificial Sequence: Synthetic oligonucleotide
ucuuuaaacugaugaugug

SEQ ID NO: 1343243 - RNA, 19 nt, Artificial Sequence
  Description of Artificial Sequence: Synthetic oligonucleotide
augaguuaauuuauuauga

SEQ ID NO: 1343244 - RNA, 19 nt, Artificial Sequence
  Description of Artificial Sequence: Synthetic oligonucleotide
agacuucacaaauaaaaua

SEQ ID NO: 1343245 - RNA, 19 nt, Artificial Sequence
  Description of Artificial Sequence: Synthetic oligonucleotide
ucaccuaaaguguccacga

SEQ ID NO: 1343246 - RNA, 19 nt, Artificial Sequence
  Description of Artificial Sequence: Synthetic oligonucleotide
ugucuuaugugaucaauuu

SEQ ID NO: 1343247 - RNA, 19 nt, Artificial Sequence
  Description of Artificial Sequence: Synthetic oligonucleotide
ucuauuacgcuuccuuuua

SEQ ID NO: 1343248 - RNA, 19 nt, Artificial Sequence
  Description of Artificial Sequence: Synthetic oligonucleotide
auauccgcuccaucauugc

SEQ ID NO: 1343249 - RNA, 19 nt, Artificial Sequence
  Description of Artificial Sequence: Synthetic oligonucleotide
gcauucauuauacaacacc

SEQ ID NO: 1343250 - RNA, 19 nt, Artificial Sequence
  Description of Artificial Sequence: Synthetic oligonucleotide
ucggacugaggauuuacug

SEQ ID NO: 1343251 - RNA, 19 nt, Artificial Sequence
  Description of Artificial Sequence: Synthetic oligonucleotide
aacauauccuucgcaguag

SEQ ID NO: 1343252 - RNA, 19 nt, Artificial Sequence
  Description of Artificial Sequence: Synthetic oligonucleotide
uagaauguuucccaaucua

SEQ ID NO: 1343253 - RNA, 19 nt, Artificial Sequence
  Description of Artificial Sequence: Synthetic oligonucleotide
auugccaggugcuccuuac

SEQ ID NO: 1343254 - RNA, 19 nt, Artificial Sequence
  Description of Artificial Sequence: Synthetic oligonucleotide
cuuaacaagguaguuuaug

SEQ ID NO: 1343255 - RNA, 19 nt, Artificial Sequence
  Description of Artificial Sequence: Synthetic oligonucleotide
uuuagauccguaugaguua

SEQ ID NO: 1343256 - RNA, 19 nt, Artificial Sequence
  Description of Artificial Sequence: Synthetic oligonucleotide
ucagaaucuuuaaacugau

SEQ ID NO: 1343257 - RNA, 19 nt, Artificial Sequence
  Description of Artificial Sequence: Synthetic oligonucleotide
uucgguggcucuucgaaug

SEQ ID NO: 1343258 - RNA, 19 nt, Artificial Sequence
  Description of Artificial Sequence: Synthetic oligonucleotide
uaaacugaugaugugguuu

SEQ ID NO: 1343259 - RNA, 19 nt, Artificial Sequence
  Description of Artificial Sequence: Synthetic oligonucleotide
uuacacuuaacuguacaaa

SEQ ID NO: 1343260 - RNA, 19 nt, Artificial Sequence
  Description of Artificial Sequence: Synthetic oligonucleotide
agacuggcagaucugauaa

SEQ ID NO: 1343261 - RNA, 19 nt, Artificial Sequence
  Description of Artificial Sequence: Synthetic oligonucleotide
uauagacuggcagaucuga

SEQ ID NO: 1343262 - RNA, 19 nt, Artificial Sequence
  Description of Artificial Sequence: Synthetic oligonucleotide
cucaucaauguaucuccgg

SEQ ID NO: 1343263 - RNA, 19 nt, Artificial Sequence
  Description of Artificial Sequence: Synthetic oligonucleotide
agaauuguacuugacuaca

SEQ ID NO: 1343264 - RNA, 19 nt, Artificial Sequence
  Description of Artificial Sequence: Synthetic oligonucleotide
ugugaacccaagguaauac

SEQ ID NO: 1343265 - RNA, 19 nt, Artificial Sequence
  Description of Artificial Sequence: Synthetic oligonucleotide
ugguuuacaaugccuguuc

SEQ ID NO: 1343266 - RNA, 19 nt, Artificial Sequence
  Description of Artificial Sequence: Synthetic oligonucleotide
gaggauuuacugcagugga

SEQ ID NO: 1343267 - RNA, 19 nt, Artificial Sequence
  Description of Artificial Sequence: Synthetic oligonucleotide
ugagaccaaccuaaagcca

SEQ ID NO: 1343268 - RNA, 19 nt, Artificial Sequence
  Description of Artificial Sequence: Synthetic oligonucleotide
auggguccguaauauccgc

SEQ ID NO: 1343269 - RNA, 19 nt, Artificial Sequence
  Description of Artificial Sequence: Synthetic oligonucleotide
cucuaugguaaugucuugg

SEQ ID NO: 1343270 - RNA, 19 nt, Artificial Sequence
  Description of Artificial Sequence: Synthetic oligonucleotide
gucuuaugugaucaauuug

SEQ ID NO: 1343271 - RNA, 19 nt, Artificial Sequence
  Description of Artificial Sequence: Synthetic oligonucleotide
uugucuuaugugaucaauu

SEQ ID NO: 1343272 - RNA, 19 nt, Artificial Sequence
  Description of Artificial Sequence: Synthetic oligonucleotide
uggucaaugcacucuacaa

SEQ ID NO: 1343273 - RNA, 19 nt, Artificial Sequence
  Description of Artificial Sequence: Synthetic oligonucleotide
gaucaaaccauucuagcau

SEQ ID NO: 1343274 - RNA, 19 nt, Artificial Sequence
  Description of Artificial Sequence: Synthetic oligonucleotide
ucuucgaaugugacugaug

SEQ ID NO: 1343275 - RNA, 19 nt, Artificial Sequence
  Description of Artificial Sequence: Synthetic oligonucleotide
ccaaccuaaagccaaaaug

SEQ ID NO: 1343276 - RNA, 19 nt, Artificial Sequence
  Description of Artificial Sequence: Synthetic oligonucleotide
ucaaaccauucuagcaucu

SEQ ID NO: 1343277 - RNA, 19 nt, Artificial Sequence
  Description of Artificial Sequence: Synthetic oligonucleotide
uaacucauauugcauucau

SEQ ID NO: 1343278 - RNA, 19 nt, Artificial Sequence
  Description of Artificial Sequence: Synthetic oligonucleotide
ugugacugaugacuugcac

SEQ ID NO: 1343279 - RNA, 19 nt, Artificial Sequence
  Description of Artificial Sequence: Synthetic oligonucleotide
acauuaaucacuggacaca

SEQ ID NO: 1343280 - RNA, 19 nt, Artificial Sequence
  Description of Artificial Sequence: Synthetic oligonucleotide
  modified_base (6)..(6): a, c, u, g, unknown or other
agcugnuuauguggaauac

SEQ ID NO: 1343281 - RNA, 19 nt, Artificial Sequence
  Description of Artificial Sequence: Synthetic oligonucleotide
gacaaucagaaucuuuaaa

SEQ ID NO: 1343282 - RNA, 19 nt, Artificial Sequence
  Description of Artificial Sequence: Synthetic oligonucleotide
uuaacucauauugcauuca

SEQ ID NO: 1343283 - RNA, 19 nt, Artificial Sequence
  Description of Artificial Sequence: Synthetic oligonucleotide
agaucgagcugccucccgg

SEQ ID NO: 1343284 - RNA, 19 nt, Artificial Sequence
  Description of Artificial Sequence: Synthetic oligonucleotide
ugugguuuacaaugccugu

SEQ ID NO: 1343285 - RNA, 19 nt, Artificial Sequence
  Description of Artificial Sequence: Synthetic oligonucleotide
uugcuucuaaauagugaca

SEQ ID NO: 1343286 - RNA, 19 nt, Artificial Sequence
  Description of Artificial Sequence: Synthetic oligonucleotide
aucugauaagccauuuguc

SEQ ID NO: 1343287 - RNA, 19 nt, Artificial Sequence
  Description of Artificial Sequence: Synthetic oligonucleotide
augucucuaugguaauguc

SEQ ID NO: 1343288 - RNA, 19 nt, Artificial Sequence
  Description of Artificial Sequence: Synthetic oligonucleotide
acugcaguggauccgguaa

SEQ ID NO: 1343289 - RNA, 19 nt, Artificial Sequence
  Description of Artificial Sequence: Synthetic oligonucleotide
aaaguguccacgauuucau

SEQ ID NO: 1343290 - RNA, 19 nt, Artificial Sequence
  Description of Artificial Sequence: Synthetic oligonucleotide
gugacugaugacuugcaca

SEQ ID NO: 1343291 - RNA, 19 nt, Artificial Sequence
  Description of Artificial Sequence: Synthetic oligonucleotide
  modified_base (7)..(7): a, c, u, g, unknown or other
uagcugnuuauguggaaua

SEQ ID NO: 1343292 - RNA, 19 nt, Artificial Sequence
  Description of Artificial Sequence: Synthetic oligonucleotide
uuuaugcuauugauacaaa

SEQ ID NO: 1343293 - RNA, 19 nt, Artificial Sequence
  Description of Artificial Sequence: Synthetic oligonucleotide
uugaaauggcagaaagcua

SEQ ID NO: 1343294 - RNA, 19 nt, Artificial Sequence
  Description of Artificial Sequence: Synthetic oligonucleotide
uuuagggcugcuccuccug

SEQ ID NO: 1343295 - RNA, 19 nt, Artificial Sequence
  Description of Artificial Sequence: Synthetic oligonucleotide
uuagauccguaugaguuaa

SEQ ID NO: 1343296 - RNA, 19 nt, Artificial Sequence
  Description of Artificial Sequence: Synthetic oligonucleotide
cuggcagaucugauaagcc

SEQ ID NO: 1343297 - RNA, 19 nt, Artificial Sequence
  Description of Artificial Sequence: Synthetic oligonucleotide
uagcaucuggacacaucgg

SEQ ID NO: 1343298 - RNA, 19 nt, Artificial Sequence
  Description of Artificial Sequence: Synthetic oligonucleotide
uccuuuuacucaagggaaa

SEQ ID NO: 1343299 - RNA, 19 nt, Artificial Sequence
  Description of Artificial Sequence: Synthetic oligonucleotide
ggcucuucgaaugugacug

SEQ ID NO: 1343300 - RNA, 19 nt, Artificial Sequence
  Description of Artificial Sequence: Synthetic oligonucleotide
uguaagccauccaugccau

SEQ ID NO: 1343301 - RNA, 19 nt, Artificial Sequence
  Description of Artificial Sequence: Synthetic oligonucleotide
caguggauccgguaacugc

SEQ ID NO: 1343302 - RNA, 19 nt, Artificial Sequence
  Description of Artificial Sequence: Synthetic oligonucleotide
ugucuauuacgcuuccuuu

SEQ ID NO: 1343303 - RNA, 19 nt, Artificial Sequence
  Description of Artificial Sequence: Synthetic oligonucleotide
ccaaucacauuaaucacug

SEQ ID NO: 1343304 - RNA, 19 nt, Artificial Sequence
  Description of Artificial Sequence: Synthetic oligonucleotide
auuuauagacuggcagauc

SEQ ID NO: 1343305 - RNA, 19 nt, Artificial Sequence
  Description of Artificial Sequence: Synthetic oligonucleotide
uguacuacugugcgaucuc

SEQ ID NO: 1343306 - RNA, 19 nt, Artificial Sequence
  Description of Artificial Sequence: Synthetic oligonucleotide
accaaucacauuaaucacu

SEQ ID NO: 1343307 - RNA, 19 nt, Artificial Sequence
  Description of Artificial Sequence: Synthetic oligonucleotide
gagucaaccuucauguaca

SEQ ID NO: 1343308 - RNA, 19 nt, Artificial Sequence
  Description of Artificial Sequence: Synthetic oligonucleotide
ugcuccuuacuaucaugag

SEQ ID NO: 1343309 - RNA, 19 nt, Artificial Sequence
  Description of Artificial Sequence: Synthetic oligonucleotide
auucaagcaucuugcuucu

SEQ ID NO: 1343310 - RNA, 19 nt, Artificial Sequence
  Description of Artificial Sequence: Synthetic oligonucleotide
uucguuuggaugccgcauc

SEQ ID NO: 1343311 - RNA, 19 nt, Artificial Sequence
  Description of Artificial Sequence: Synthetic oligonucleotide
uucaaugugcgcucaucuc

SEQ ID NO: 1343312 - RNA, 19 nt, Artificial Sequence
  Description of Artificial Sequence: Synthetic oligonucleotide
auuuuaacucauauugcau

SEQ ID NO: 1343313 - RNA, 19 nt, Artificial Sequence
  Description of Artificial Sequence: Synthetic oligonucleotide
aauguacuaugauguucau

SEQ ID NO: 1343314 - RNA, 19 nt, Artificial Sequence
  Description of Artificial Sequence: Synthetic oligonucleotide
uguaucuccggucccgaua

SEQ ID NO: 1343315 - RNA, 19 nt, Artificial Sequence
  Description of Artificial Sequence: Synthetic oligonucleotide
caccaauguacuaugaugu

SEQ ID NO: 1343316 - RNA, 19 nt, Artificial Sequence
  Description of Artificial Sequence: Synthetic oligonucleotide
agguacuaagucccagcag

SEQ ID NO: 1343317 - RNA, 19 nt, Artificial Sequence
  Description of Artificial Sequence: Synthetic oligonucleotide
cuauuacgcuuccuuuuag

SEQ ID NO: 1343318 - RNA, 19 nt, Artificial Sequence
  Description of Artificial Sequence: Synthetic oligonucleotide
gacacaaaggguauuccaa

SEQ ID NO: 1343319 - RNA, 19 nt, Artificial Sequence
  Description of Artificial Sequence: Synthetic oligonucleotide
  modified_base (10)..(10): a, c, u, g, unknown or other
aucuagcugnuuaugugga

SEQ ID NO: 1343320 - RNA, 19 nt, Artificial Sequence
  Description of Artificial Sequence: Synthetic oligonucleotide
uccgguaacugcuuucaau

SEQ ID NO: 1343321 - RNA, 19 nt, Artificial Sequence
  Description of Artificial Sequence: Synthetic oligonucleotide
caaucacauuaaucacugg

SEQ ID NO: 1343322 - RNA, 19 nt, Artificial Sequence
  Description of Artificial Sequence: Synthetic oligonucleotide
aguggauccgguaacugcu

SEQ ID NO: 1343323 - RNA, 19 nt, Artificial Sequence
  Description of Artificial Sequence: Synthetic oligonucleotide
uaauauccgcuccaucauu

SEQ ID NO: 1343324 - RNA, 19 nt, Artificial Sequence
  Description of Artificial Sequence: Synthetic oligonucleotide
aucauugccaggugcuccu

SEQ ID NO: 1343325 - RNA, 19 nt, Artificial Sequence
  Description of Artificial Sequence: Synthetic oligonucleotide
cacuuaacuguacaaaaua

SEQ ID NO: 1343326 - RNA, 19 nt, Artificial Sequence
  Description of Artificial Sequence: Synthetic oligonucleotide
uagucauuucuguacucau

SEQ ID NO: 1343327 - RNA, 19 nt, Artificial Sequence
  Description of Artificial Sequence: Synthetic oligonucleotide
accuaaaguguccacgauu

SEQ ID NO: 1343328 - RNA, 19 nt, Artificial Sequence
  Description of Artificial Sequence: Synthetic oligonucleotide
uuuucaaugugcgcucauc

SEQ ID NO: 1343329 - RNA, 19 nt, Artificial Sequence
  Description of Artificial Sequence: Synthetic oligonucleotide
ccgauaaucucuuccauuc

SEQ ID NO: 1343330 - RNA, 19 nt, Artificial Sequence
  Description of Artificial Sequence: Synthetic oligonucleotide
uucgaaugugacugaugac

SEQ ID NO: 1343331 - RNA, 19 nt, Artificial Sequence
  Description of Artificial Sequence: Synthetic oligonucleotide
ggaauacuccguuuccuug

SEQ ID NO: 1343332 - RNA, 19 nt, Artificial Sequence
  Description of Artificial Sequence: Synthetic oligonucleotide
uacuacugugcgaucuccu

SEQ ID NO: 1343333 - RNA, 19 nt, Artificial Sequence
  Description of Artificial Sequence: Synthetic oligonucleotide
gugaucaauuugaaauggc

SEQ ID NO: 1343334 - RNA, 19 nt, Artificial Sequence
  Description of Artificial Sequence: Synthetic oligonucleotide
ucuguagugccguguggac

SEQ ID NO: 1343335 - RNA, 19 nt, Artificial Sequence
  Description of Artificial Sequence: Synthetic oligonucleotide
cuuucaaugucucuauggu

SEQ ID NO: 1343336 - RNA, 19 nt, Artificial Sequence
  Description of Artificial Sequence: Synthetic oligonucleotide
aauguaucuccggucccga

SEQ ID NO: 1343337 - RNA, 19 nt, Artificial Sequence
  Description of Artificial Sequence: Synthetic oligonucleotide
aaggccccuucaccuaaag

SEQ ID NO: 1343338 - RNA, 19 nt, Artificial Sequence
  Description of Artificial Sequence: Synthetic oligonucleotide
gguuuuagauccguaugag

SEQ ID NO: 1343339 - RNA, 19 nt, Artificial Sequence
  Description of Artificial Sequence: Synthetic oligonucleotide
  modified_base (9)..(9): a, c, u, g, unknown or other
ucuagcugnuuauguggaa

SEQ ID NO: 1343340 - RNA, 19 nt, Artificial Sequence
  Description of Artificial Sequence: Synthetic oligonucleotide
uggacacaaaggguauucc

SEQ ID NO: 1343341 - RNA, 19 nt, Artificial Sequence
  Description of Artificial Sequence: Synthetic oligonucleotide
uccgcuuguggcuuccacu

SEQ ID NO: 1343342 - RNA, 19 nt, Artificial Sequence
  Description of Artificial Sequence: Synthetic oligonucleotide
uccuuuuagggcugcuccu

SEQ ID NO: 1343343 - RNA, 19 nt, Artificial Sequence
  Description of Artificial Sequence: Synthetic oligonucleotide
aguucguuuggaugccgca

SEQ ID NO: 1343344 - RNA, 19 nt, Artificial Sequence
  Description of Artificial Sequence: Synthetic oligonucleotide
ucgcaguagucauuucugu

SEQ ID NO: 1343345 - RNA, 19 nt, Artificial Sequence
  Description of Artificial Sequence: Synthetic oligonucleotide
ccgguaacugcuuucaaug

SEQ ID NO: 1343346 - RNA, 19 nt, Artificial Sequence
  Description of Artificial Sequence: Synthetic oligonucleotide
ugaguucguuuggaugccg

SEQ ID NO: 1343347 - RNA, 19 nt, Artificial Sequence
  Description of Artificial Sequence: Synthetic oligonucleotide
acaagguaguuuaugcuau

SEQ ID NO: 1343348 - RNA, 19 nt, Artificial Sequence
  Description of Artificial Sequence: Synthetic oligonucleotide
gguaacugcuuucaauguc

SEQ ID NO: 1343349 - RNA, 19 nt, Artificial Sequence
  Description of Artificial Sequence: Synthetic oligonucleotide
acucaucaauguaucuccg

SEQ ID NO: 1343350 - RNA, 19 nt, Artificial Sequence
  Description of Artificial Sequence: Synthetic oligonucleotide
augagucuggaagacugug

SEQ ID NO: 1343351 - RNA, 19 nt, Artificial Sequence
  Description of Artificial Sequence: Synthetic oligonucleotide
gauccgguaacugcuuuca

SEQ ID NO: 1343352 - RNA, 19 nt, Artificial Sequence
  Description of Artificial Sequence: Synthetic oligonucleotide
guaucuccggucccgauaa

SEQ ID NO: 1343353 - RNA, 19 nt, Artificial Sequence
  Description of Artificial Sequence: Synthetic oligonucleotide
cguguggacaccaauguac

SEQ ID NO: 1343354 - RNA, 19 nt, Artificial Sequence
  Description of Artificial Sequence: Synthetic oligonucleotide
ugggauggguccguaauau

SEQ ID NO: 1343355 - RNA, 19 nt, Artificial Sequence
  Description of Artificial Sequence: Synthetic oligonucleotide
cguaauauccgcuccauca

SEQ ID NO: 1343356 - RNA, 19 nt, Artificial Sequence
  Description of Artificial Sequence: Synthetic oligonucleotide
augugugcugggauggguc

SEQ ID NO: 1343357 - RNA, 19 nt, Artificial Sequence
  Description of Artificial Sequence: Synthetic oligonucleotide
  modified_base (15)..(15): a, c, u, g, unknown or other
ucccaaucuagcugnuuau

SEQ ID NO: 1343358 - RNA, 19 nt, Artificial Sequence
  Description of Artificial Sequence: Synthetic oligonucleotide
acacuuaacuguacaaaau

SEQ ID NO: 1343359 - RNA, 19 nt, Artificial Sequence
  Description of Artificial Sequence: Synthetic oligonucleotide
cauauccuucgcaguaguc

SEQ ID NO: 1343360 - RNA, 19 nt, Artificial Sequence
  Description of Artificial Sequence: Synthetic oligonucleotide
gucuuuugguaucaugugu

SEQ ID NO: 1343361 - RNA, 19 nt, Artificial Sequence
  Description of Artificial Sequence: Synthetic oligonucleotide
ucccgauaaucucuuccau

SEQ ID NO: 1343362 - RNA, 19 nt, Artificial Sequence
  Description of Artificial Sequence: Synthetic oligonucleotide
cauuaaucacuggacacaa

SEQ ID NO: 1343363 - RNA, 19 nt, Artificial Sequence
  Description of Artificial Sequence: Synthetic oligonucleotide
gcuaucccaaucaggacag

SEQ ID NO: 1343364 - RNA, 19 nt, Artificial Sequence
  Description of Artificial Sequence: Synthetic oligonucleotide
guuuuagauccguaugagu

SEQ ID NO: 1343365 - RNA, 19 nt, Artificial Sequence
  Description of Artificial Sequence: Synthetic oligonucleotide
auccucuauacuccuggau

SEQ ID NO: 1343366 - RNA, 19 nt, Artificial Sequence
  Description of Artificial Sequence: Synthetic oligonucleotide
cuacauguaagccauccau

SEQ ID NO: 1343367 - RNA, 19 nt, Artificial Sequence
  Description of Artificial Sequence: Synthetic oligonucleotide
gauccguaugaguuaauuu

SEQ ID NO: 1343368 - RNA, 19 nt, Artificial Sequence
  Description of Artificial Sequence: Synthetic oligonucleotide
gaguucguuuggaugccgc

SEQ ID NO: 1343369 - RNA, 19 nt, Artificial Sequence
  Description of Artificial Sequence: Synthetic oligonucleotide
cuucaccuaaaguguccac

SEQ ID NO: 1343370 - RNA, 19 nt, Artificial Sequence
  Description of Artificial Sequence: Synthetic oligonucleotide
acaucggaagacacuguug

SEQ ID NO: 1343371 - RNA, 19 nt, Artificial Sequence
  Description of Artificial Sequence: Synthetic oligonucleotide
aaguguccacgauuucaua

SEQ ID NO: 1343372 - RNA, 19 nt, Artificial Sequence
  Description of Artificial Sequence: Synthetic oligonucleotide
aacucauauugcauucauu

SEQ ID NO: 1343373 - RNA, 19 nt, Artificial Sequence
  Description of Artificial Sequence: Synthetic oligonucleotide
cuuguguacuacugugcga

SEQ ID NO: 1343374 - RNA, 19 nt, Artificial Sequence
  Description of Artificial Sequence: Synthetic oligonucleotide
caucucguuucauuuuaga

SEQ ID NO: 1343375 - RNA, 19 nt, Artificial Sequence
  Description of Artificial Sequence: Synthetic oligonucleotide
guacuacugugcgaucucc

SEQ ID NO: 1343376 - RNA, 19 nt, Artificial Sequence
  Description of Artificial Sequence: Synthetic oligonucleotide
cauggucaaugcacucuac

SEQ ID NO: 1343377 - RNA, 19 nt, Artificial Sequence
  Description of Artificial Sequence: Synthetic oligonucleotide
ucgguggcucuucgaaugu

SEQ ID NO: 1343378 - RNA, 19 nt, Artificial Sequence
  Description of Artificial Sequence: Synthetic oligonucleotide
agauccguaugaguuaauu

SEQ ID NO: 1343379 - RNA, 19 nt, Artificial Sequence
  Description of Artificial Sequence: Synthetic oligonucleotide
cugugcgaucuccucuucc

SEQ ID NO: 1343380 - RNA, 19 nt, Artificial Sequence
  Description of Artificial Sequence: Synthetic oligonucleotide
ggacacaaaggguauucca

SEQ ID NO: 1343381 - RNA, 19 nt, Artificial Sequence
  Description of Artificial Sequence: Synthetic oligonucleotide
gcagcucaaacacaauaca

SEQ ID NO: 1343382 - RNA, 19 nt, Artificial Sequence
  Description of Artificial Sequence: Synthetic oligonucleotide
cuucggacugaggauuuac

SEQ ID NO: 1343383 - RNA, 19 nt, Artificial Sequence
  Description of Artificial Sequence: Synthetic oligonucleotide
gacaccaauguacuaugau

SEQ ID NO: 1343384 - RNA, 19 nt, Artificial Sequence
  Description of Artificial Sequence: Synthetic oligonucleotide
ccacgauuucauaucuugc

SEQ ID NO: 1343385 - RNA, 19 nt, Artificial Sequence
  Description of Artificial Sequence: Synthetic oligonucleotide
gugcuccuuacuaucauga

SEQ ID NO: 1343386 - RNA, 19 nt, Artificial Sequence
  Description of Artificial Sequence: Synthetic oligonucleotide
cugcuaucccaaucaggac

SEQ ID NO: 1343387 - RNA, 19 nt, Artificial Sequence
  Description of Artificial Sequence: Synthetic oligonucleotide
ggugcuccuuacuaucaug

SEQ ID NO: 1343388 - RNA, 19 nt, Artificial Sequence
  Description of Artificial Sequence: Synthetic oligonucleotide
ugcaguggauccgguaacu

SEQ ID NO: 1343389 - RNA, 19 nt, Artificial Sequence
  Description of Artificial Sequence: Synthetic oligonucleotide
uagcuuucauggccccagc

SEQ ID NO: 1343390 - RNA, 19 nt, Artificial Sequence
  Description of Artificial Sequence: Synthetic oligonucleotide
gguccguaauauccgcucc

SEQ ID NO: 1343391 - RNA, 19 nt, Artificial Sequence
  Description of Artificial Sequence: Synthetic oligonucleotide
cuucgcaguagucauuucu

SEQ ID NO: 1343392 - RNA, 19 nt, Artificial Sequence
  Description of Artificial Sequence: Synthetic oligonucleotide
uguguacuacugugcgauc

SEQ ID NO: 1343393 - RNA, 19 nt, Artificial Sequence
  Description of Artificial Sequence: Synthetic oligonucleotide
uuccgcuuguggcuuccac

SEQ ID NO: 1343394 - RNA, 19 nt, Artificial Sequence
  Description of Artificial Sequence: Synthetic oligonucleotide
auacuccguuuccuugucu

SEQ ID NO: 1343395 - RNA, 19 nt, Artificial Sequence
  Description of Artificial Sequence: Synthetic oligonucleotide
cugcaguggauccgguaac

SEQ ID NO: 1343396 - RNA, 19 nt, Artificial Sequence
  Description of Artificial Sequence: Synthetic oligonucleotide
ggcugagaccaaccuaaag

SEQ ID NO: 1343397 - RNA, 19 nt, Artificial Sequence
  Description of Artificial Sequence: Synthetic oligonucleotide
uccguaauauccgcuccau

SEQ ID NO: 1343398 - RNA, 19 nt, Artificial Sequence
  Description of Artificial Sequence: Synthetic oligonucleotide
guccguaauauccgcucca

SEQ ID NO: 1343399 - RNA, 19 nt, Artificial Sequence
  Description of Artificial Sequence: Synthetic oligonucleotide
cagugucuauuacgcuucc

SEQ ID NO: 1343400 - RNA, 19 nt, Artificial Sequence
  Description of Artificial Sequence: Synthetic oligonucleotide
guaaugucuuggaacauau

SEQ ID NO: 1343401 - RNA, 19 nt, Artificial Sequence
  Description of Artificial Sequence: Synthetic oligonucleotide
gugcgaucuccucuuccgc

SEQ ID NO: 1343402 - RNA, 19 nt, Artificial Sequence
  Description of Artificial Sequence: Synthetic oligonucleotide
ugcuucggacugaggauuu

SEQ ID NO: 1343403 - RNA, 19 nt, Artificial Sequence
  Description of Artificial Sequence: Synthetic oligonucleotide
gugaguucguuuggaugcc

SEQ ID NO: 1343404 - RNA, 19 nt, Artificial Sequence
  Description of Artificial Sequence: Synthetic oligonucleotide
uggauccgguaacugcuuu

SEQ ID NO: 1343405 - RNA, 19 nt, Artificial Sequence
  Description of Artificial Sequence: Synthetic oligonucleotide
gugucuauuacgcuuccuu

SEQ ID NO: 1343406 - RNA, 19 nt, Artificial Sequence
  Description of Artificial Sequence: Synthetic oligonucleotide
caccauacuuaacaaggua

SEQ ID NO: 1343407 - RNA, 19 nt, Artificial Sequence
  Description of Artificial Sequence: Synthetic oligonucleotide
acugugaacccaagguaau

SEQ ID NO: 1343408 - RNA, 19 nt, Artificial Sequence
  Description of Artificial Sequence: Synthetic oligonucleotide
gugaacccaagguaauacu

SEQ ID NO: 1343409 - RNA, 19 nt, Artificial Sequence
  Description of Artificial Sequence: Synthetic oligonucleotide
cagaucgagcugccucccg

SEQ ID NO: 1343410 - RNA, 19 nt, Artificial Sequence
  Description of Artificial Sequence: Synthetic oligonucleotide
ugugcugggauggguccgu

SEQ ID NO: 1343411 - RNA, 19 nt, Artificial Sequence
  Description of Artificial Sequence: Synthetic oligonucleotide
  modified_base (14)..(14): a, c, u, g, unknown or other
cccaaucuagcugnuuaug

SEQ ID NO: 1343412 - RNA, 19 nt, Artificial Sequence
  Description of Artificial Sequence: Synthetic oligonucleotide
ccuuacuaucaugagucug

SEQ ID NO: 1343413 - RNA, 19 nt, Artificial Sequence
  Description of Artificial Sequence: Synthetic oligonucleotide
agugucuauuacgcuuccu

SEQ ID NO: 1343414 - RNA, 19 nt, Artificial Sequence
  Description of Artificial Sequence: Synthetic oligonucleotide
aggauuuacugcaguggau

SEQ ID NO: 1343415 - RNA, 19 nt, Artificial Sequence
  Description of Artificial Sequence: Synthetic oligonucleotide
ggaacauauccuucgcagu

SEQ ID NO: 1343416 - RNA, 19 nt, Artificial Sequence
  Description of Artificial Sequence: Synthetic oligonucleotide
guaagccauccaugccaug

SEQ ID NO: 1343417 - RNA, 19 nt, Artificial Sequence
  Description of Artificial Sequence: Synthetic oligonucleotide
guggacaccaauguacuau

SEQ ID NO: 1343418 - RNA, 19 nt, Artificial Sequence
  Description of Artificial Sequence: Synthetic oligonucleotide
gcuacauguaagccaucca

SEQ ID NO: 1343419 - RNA, 19 nt, Artificial Sequence
  Description of Artificial Sequence: Synthetic oligonucleotide
gguaaugucuuggaacaua

SEQ ID NO: 1343420 - RNA, 19 nt, Artificial Sequence
  Description of Artificial Sequence: Synthetic oligonucleotide
uucuagcaucuggacacau

SEQ ID NO: 1343421 - RNA, 19 nt, Artificial Sequence
  Description of Artificial Sequence: Synthetic oligonucleotide
gaauuguacuugacuacau

SEQ ID NO: 1343422 - RNA, 19 nt, Artificial Sequence
  Description of Artificial Sequence: Synthetic oligonucleotide
auagacuggcagaucugau

SEQ ID NO: 1343423 - RNA, 19 nt, Artificial Sequence
  Description of Artificial Sequence: Synthetic oligonucleotide
uagauccguaugaguuaau

SEQ ID NO: 1343424 - RNA, 19 nt, Artificial Sequence
  Description of Artificial Sequence: Synthetic oligonucleotide
  modified_base (17)..(17): a, c, u, g, unknown or other
uuucccaaucuagcugnuu

SEQ ID NO: 1343425 - RNA, 19 nt, Artificial Sequence
  Description of Artificial Sequence: Synthetic oligonucleotide
guguacuacugugcgaucu

SEQ ID NO: 1343426 - RNA, 19 nt, Artificial Sequence
  Description of Artificial Sequence: Synthetic oligonucleotide
uagugccguguggacacca

SEQ ID NO: 1343427 - RNA, 19 nt, Artificial Sequence
  Description of Artificial Sequence: Synthetic oligonucleotide
cuuagaacgucuccacuuu

SEQ ID NO: 1343428 - RNA, 19 nt, Artificial Sequence
  Description of Artificial Sequence: Synthetic oligonucleotide
auuaaucacuggacacaaa

SEQ ID NO: 1343429 - RNA, 19 nt, Artificial Sequence
  Description of Artificial Sequence: Synthetic oligonucleotide
gcuccuuacuaucaugagu

SEQ ID NO: 1343430 - RNA, 19 nt, Artificial Sequence
  Description of Artificial Sequence: Synthetic oligonucleotide
caaugugcgcucaucucgu

SEQ ID NO: 1343431 - RNA, 19 nt, Artificial Sequence
  Description of Artificial Sequence: Synthetic oligonucleotide
caaaggccccuucaccuaa

SEQ ID NO: 1343432 - RNA, 19 nt, Artificial Sequence
  Description of Artificial Sequence: Synthetic oligonucleotide
gauaagccauuugucuuau

SEQ ID NO: 1343433 - RNA, 19 nt, Artificial Sequence
  Description of Artificial Sequence: Synthetic oligonucleotide
ccuaaaguguccacgauuu

SEQ ID NO: 1343434 - RNA, 19 nt, Artificial Sequence
  Description of Artificial Sequence: Synthetic oligonucleotide
gucagacuucacaaauaaa

SEQ ID NO: 1343435 - RNA, 19 nt, Artificial Sequence
  Description of Artificial Sequence: Synthetic oligonucleotide
  modified_base (8)..(8): a, c, u, g, unknown or other
cuagcugnuuauguggaau

SEQ ID NO: 1343436 - RNA, 19 nt, Artificial Sequence
  Description of Artificial Sequence: Synthetic oligonucleotide
  modified_base (13)..(13): a, c, u, g, unknown or other
ccaaucuagcugnuuaugu

SEQ ID NO: 1343437 - RNA, 19 nt, Artificial Sequence
  Description of Artificial Sequence: Synthetic oligonucleotide
auccgguaacugcuuucaa

SEQ ID NO: 1343438 - RNA, 19 nt, Artificial Sequence
  Description of Artificial Sequence: Synthetic oligonucleotide
ucccgguaacggccuacau

SEQ ID NO: 1343439 - RNA, 19 nt, Artificial Sequence
  Description of Artificial Sequence: Synthetic oligonucleotide
gguggcucuucgaauguga

SEQ ID NO: 1343440 - RNA, 19 nt, Artificial Sequence
  Description of Artificial Sequence: Synthetic oligonucleotide
cucuuagaacgucuccacu

SEQ ID NO: 1343441 - RNA, 19 nt, Artificial Sequence
  Description of Artificial Sequence: Synthetic oligonucleotide
acacaucggaagacacugu

SEQ ID NO: 1343442 - RNA, 19 nt, Artificial Sequence
  Description of Artificial Sequence: Synthetic oligonucleotide
ccguuuccuugucuuuugg

SEQ ID NO: 1343443 - RNA, 19 nt, Artificial Sequence
  Description of Artificial Sequence: Synthetic oligonucleotide
cucaaucagaaugcagccu

SEQ ID NO: 1343444 - RNA, 19 nt, Artificial Sequence
  Description of Artificial Sequence: Synthetic oligonucleotide
cugggauggguccguaaua

SEQ ID NO: 1343445 - RNA, 19 nt, Artificial Sequence
  Description of Artificial Sequence: Synthetic oligonucleotide
ccgguaacggccuacauuu

SEQ ID NO: 1343446 - RNA, 19 nt, Artificial Sequence
  Description of Artificial Sequence: Synthetic oligonucleotide
uaucuccggucccgauaau

SEQ ID NO: 1343447 - RNA, 19 nt, Artificial Sequence
  Description of Artificial Sequence: Synthetic oligonucleotide
ucaggacagugaguucguu

SEQ ID NO: 1343448 - RNA, 19 nt, Artificial Sequence
  Description of Artificial Sequence: Synthetic oligonucleotide
cacaucggaagacacuguu

SEQ ID NO: 1343449 - RNA, 19 nt, Artificial Sequence
  Description of Artificial Sequence: Synthetic oligonucleotide
  modified_base (5)..(5): a, c, u, g, unknown or other
gcugnuuauguggaauacu

SEQ ID NO: 1343450 - RNA, 19 nt, Artificial Sequence
  Description of Artificial Sequence: Synthetic oligonucleotide
gcaguggauccgguaacug

SEQ ID NO: 1343451 - RNA, 19 nt, Artificial Sequence
  Description of Artificial Sequence: Synthetic oligonucleotide
ccuuuuagggcugcuccuc

SEQ ID NO: 1343452 - RNA, 19 nt, Artificial Sequence
  Description of Artificial Sequence: Synthetic oligonucleotide
gucaaccuucauguacaaa

SEQ ID NO: 1343453 - RNA, 19 nt, Artificial Sequence
  Description of Artificial Sequence: Synthetic oligonucleotide
cagagucaaccuucaugua

SEQ ID NO: 1343454 - RNA, 19 nt, Artificial Sequence
  Description of Artificial Sequence: Synthetic oligonucleotide
guucguuuggaugccgcau

SEQ ID NO: 1343455 - RNA, 19 nt, Artificial Sequence
  Description of Artificial Sequence: Synthetic oligonucleotide
uucaagcaucuugcuucua

SEQ ID NO: 1343456 - RNA, 19 nt, Artificial Sequence
  Description of Artificial Sequence: Synthetic oligonucleotide
guagugccguguggacacc

SEQ ID NO: 1343457 - RNA, 19 nt, Artificial Sequence
  Description of Artificial Sequence: Synthetic oligonucleotide
cuucgguggcucuucgaau

SEQ ID NO: 1343458 - RNA, 19 nt, Artificial Sequence
  Description of Artificial Sequence: Synthetic oligonucleotide
gcucuucgaaugugacuga

SEQ ID NO: 1343459 - RNA, 19 nt, Artificial Sequence
  Description of Artificial Sequence: Synthetic oligonucleotide
acgcuuccuuuuagggcug

SEQ ID NO: 1343460 - RNA, 19 nt, Artificial Sequence
  Description of Artificial Sequence: Synthetic oligonucleotide
gcuucuaaauagugacaau

SEQ ID NO: 1343461 - RNA, 19 nt, Artificial Sequence
  Description of Artificial Sequence: Synthetic oligonucleotide
ccguaauauccgcuccauc

SEQ ID NO: 1343462 - RNA, 19 nt, Artificial Sequence
  Description of Artificial Sequence: Synthetic oligonucleotide
gagcucuguagugccgugu

SEQ ID NO: 1343463 - RNA, 19 nt, Artificial Sequence
  Description of Artificial Sequence: Synthetic oligonucleotide
cucccgguaacggccuaca

SEQ ID NO: 1343464 - RNA, 19 nt, Artificial Sequence
  Description of Artificial Sequence: Synthetic oligonucleotide
gccauggucaaugcacucu

SEQ ID NO: 1343465 - RNA, 19 nt, Artificial Sequence
  Description of Artificial Sequence: Synthetic oligonucleotide
aggcugagaccaaccuaaa

SEQ ID NO: 1343466 - RNA, 19 nt, Artificial Sequence
  Description of Artificial Sequence: Synthetic oligonucleotide
cucuucgaaugugacugau

SEQ ID NO: 1343467 - RNA, 19 nt, Artificial Sequence
  Description of Artificial Sequence: Synthetic oligonucleotide
cuguuggggucuguacugu

SEQ ID NO: 1343468 - RNA, 19 nt, Artificial Sequence
  Description of Artificial Sequence: Synthetic oligonucleotide
ccuucgcaguagucauuuc

SEQ ID NO: 1343469 - RNA, 19 nt, Artificial Sequence
  Description of Artificial Sequence: Synthetic oligonucleotide
ccauucaagcaucuugcuu

SEQ ID NO: 1343470 - RNA, 19 nt, Artificial Sequence
  Description of Artificial Sequence: Synthetic oligonucleotide
  modified_base (18)..(18): a, c, u, g, unknown or other
guuucccaaucuagcugnu

SEQ ID NO: 1343471 - RNA, 19 nt, Artificial Sequence
  Description of Artificial Sequence: Synthetic oligonucleotide
cgaaugugacugaugacuu

SEQ ID NO: 1343472 - RNA, 19 nt, Artificial Sequence
  Description of Artificial Sequence: Synthetic oligonucleotide
gguauuccaaaggccuuuu

SEQ ID NO: 1343473 - RNA, 19 nt, Artificial Sequence
  Description of Artificial Sequence: Synthetic oligonucleotide
cuuccgcuuguggcuucca

SEQ ID NO: 1343474 - RNA, 19 nt, Artificial Sequence
  Description of Artificial Sequence: Synthetic oligonucleotide
guggauccgguaacugcuu

SEQ ID NO: 1343475 - RNA, 19 nt, Artificial Sequence
  Description of Artificial Sequence: Synthetic oligonucleotide
ccguguggacaccaaugua

SEQ ID NO: 1343476 - RNA, 19 nt, Artificial Sequence
  Description of Artificial Sequence: Synthetic oligonucleotide
ccucccgguaacggccuac

SEQ ID NO: 1343477 - RNA, 19 nt, Artificial Sequence
  Description of Artificial Sequence: Synthetic oligonucleotide
cuaucccaaucaggacagu

SEQ ID NO: 1343478 - RNA, 19 nt, Artificial Sequence
  Description of Artificial Sequence: Synthetic oligonucleotide
cccgguaacggccuacauu

SEQ ID NO: 1343479 - RNA, 19 nt, Artificial Sequence
  Description of Artificial Sequence: Synthetic oligonucleotide
gcuucggacugaggauuua

SEQ ID NO: 1343480 - RNA, 19 nt, Artificial Sequence
  Description of Artificial Sequence: Synthetic oligonucleotide
cgguggcucuucgaaugug

SEQ ID NO: 1343481 - RNA, 19 nt, Artificial Sequence
  Description of Artificial Sequence: Synthetic oligonucleotide
cgguaacggccuacauuuu

SEQ ID NO: 1343482 - RNA, 19 nt, Artificial Sequence
  Description of Artificial Sequence: Synthetic oligonucleotide
  modified_base (1)..(1): a, c, u, g, unknown or other
nuuauguggaauacuccgu

SEQ ID NO: 1343483 - RNA, 19 nt, Artificial Sequence
  Description of Artificial Sequence: Synthetic oligonucleotide
uguguuuucaacaagcugg

SEQ ID NO: 1343484 - RNA, 19 nt, Artificial Sequence
  Description of Artificial Sequence: Synthetic oligonucleotide
aaugcaauaggucucaucu

SEQ ID NO: 1343485 - RNA, 19 nt, Artificial Sequence
  Description of Artificial Sequence: Synthetic oligonucleotide
aaacagaugucauagagug

SEQ ID NO: 1343486 - RNA, 19 nt, Artificial Sequence
  Description of Artificial Sequence: Synthetic oligonucleotide
ucaaguagcgcccauggcg

SEQ ID NO: 1343487 - RNA, 19 nt, Artificial Sequence
  Description of Artificial Sequence: Synthetic oligonucleotide
uuaucaaugcaauaggucu

SEQ ID NO: 1343488 - RNA, 19 nt, Artificial Sequence
  Description of Artificial Sequence: Synthetic oligonucleotide
gacauuaagcaucuguucg

SEQ ID NO: 1343489 - RNA, 19 nt, Artificial Sequence
  Description of Artificial Sequence: Synthetic oligonucleotide
cuuaaaacagcucuaggcc

SEQ ID NO: 1343490 - RNA, 19 nt, Artificial Sequence
  Description of Artificial Sequence: Synthetic oligonucleotide
ugugaaugaauaaagaguu

SEQ ID NO: 1343491 - RNA, 19 nt, Artificial Sequence
  Description of Artificial Sequence: Synthetic oligonucleotide
auaaggagaguacccaucc

SEQ ID NO: 1343492 - RNA, 19 nt, Artificial Sequence
  Description of Artificial Sequence: Synthetic oligonucleotide
ucugagaugcguuugaaca

SEQ ID NO: 1343493 - RNA, 19 nt, Artificial Sequence
  Description of Artificial Sequence: Synthetic oligonucleotide
aauacgaaguuaucugguc

SEQ ID NO: 1343494 - RNA, 19 nt, Artificial Sequence
  Description of Artificial Sequence: Synthetic oligonucleotide
ucugaaacagaugucauag

SEQ ID NO: 1343495 - RNA, 19 nt, Artificial Sequence
  Description of Artificial Sequence: Synthetic oligonucleotide
agugcuucguuaucaaugc

SEQ ID NO: 1343496 - RNA, 19 nt, Artificial Sequence
  Description of Artificial Sequence: Synthetic oligonucleotide
uucguuaucaaugcaauag

SEQ ID NO: 1343497 - RNA, 19 nt, Artificial Sequence
  Description of Artificial Sequence: Synthetic oligonucleotide
guugauacgcuccagcugg

SEQ ID NO: 1343498 - RNA, 19 nt, Artificial Sequence
  Description of Artificial Sequence: Synthetic oligonucleotide
uuguuuuggacauuaagca

SEQ ID NO: 1343499 - RNA, 19 nt, Artificial Sequence
  Description of Artificial Sequence: Synthetic oligonucleotide
uuguaguacacguugauac

SEQ ID NO: 1343500 - RNA, 19 nt, Artificial Sequence
  Description of Artificial Sequence: Synthetic oligonucleotide
ucuaugaauugcuuuaaug

SEQ ID NO: 1343501 - RNA, 19 nt, Artificial Sequence
  Description of Artificial Sequence: Synthetic oligonucleotide
aucaaugccaugcucgucg

SEQ ID NO: 1343502 - RNA, 19 nt, Artificial Sequence
  Description of Artificial Sequence: Synthetic oligonucleotide
uuuaggcugcuuaaaacag

SEQ ID NO: 1343503 - RNA, 19 nt, Artificial Sequence
  Description of Artificial Sequence: Synthetic oligonucleotide
acugcugauacucggacac

SEQ ID NO: 1343504 - RNA, 19 nt, Artificial Sequence
  Description of Artificial Sequence: Synthetic oligonucleotide
aagaguucacacugcuccc

SEQ ID NO: 1343505 - RNA, 19 nt, Artificial Sequence
  Description of Artificial Sequence: Synthetic oligonucleotide
ugucaaguagcgcccaugg

SEQ ID NO: 1343506 - RNA, 19 nt, Artificial Sequence
  Description of Artificial Sequence: Synthetic oligonucleotide
uuaaaacagcucuaggcca

SEQ ID NO: 1343507 - RNA, 19 nt, Artificial Sequence
  Description of Artificial Sequence: Synthetic oligonucleotide
uccuucauagacaugcggc

SEQ ID NO: 1343508 - RNA, 19 nt, Artificial Sequence
  Description of Artificial Sequence: Synthetic oligonucleotide
uguaguacacguugauacg

SEQ ID NO: 1343509 - RNA, 19 nt, Artificial Sequence
  Description of Artificial Sequence: Synthetic oligonucleotide
cucacaacguccaacacug

SEQ ID NO: 1343510 - RNA, 19 nt, Artificial Sequence
  Description of Artificial Sequence: Synthetic oligonucleotide
ugcaauaggucucaucugu

SEQ ID NO: 1343511 - RNA, 19 nt, Artificial Sequence
  Description of Artificial Sequence: Synthetic oligonucleotide
ucaggucaccauaaguggg

SEQ ID NO: 1343512 - RNA, 19 nt, Artificial Sequence
  Description of Artificial Sequence: Synthetic oligonucleotide
auuaagcaucuguucgucc

SEQ ID NO: 1343513 - RNA, 19 nt, Artificial Sequence
  Description of Artificial Sequence: Synthetic oligonucleotide
uguacaagugaugucagga

SEQ ID NO: 1343514 - RNA, 19 nt, Artificial Sequence
  Description of Artificial Sequence: Synthetic oligonucleotide
uuaagcaucuguucgucca

SEQ ID NO: 1343515 - RNA, 19 nt, Artificial Sequence
  Description of Artificial Sequence: Synthetic oligonucleotide
uacaagugaugucaggaca

SEQ ID NO: 1343516 - RNA, 19 nt, Artificial Sequence
  Description of Artificial Sequence: Synthetic oligonucleotide
ucucaggucagcauuuagc

SEQ ID NO: 1343517 - RNA, 19 nt, Artificial Sequence
  Description of Artificial Sequence: Synthetic oligonucleotide
ucagcauuuagcuggccag

SEQ ID NO: 1343518 - RNA, 19 nt, Artificial Sequence
  Description of Artificial Sequence: Synthetic oligonucleotide
uuaggguucugaaacagau

SEQ ID NO: 1343519 - RNA, 19 nt, Artificial Sequence
  Description of Artificial Sequence: Synthetic oligonucleotide
uuaauggugguaucuguac

SEQ ID NO: 1343520 - RNA, 19 nt, Artificial Sequence
  Description of Artificial Sequence: Synthetic oligonucleotide
uuuuggacauuaagcaucu

SEQ ID NO: 1343521 - RNA, 19 nt, Artificial Sequence
  Description of Artificial Sequence: Synthetic oligonucleotide
gcuuaaaacagcucuaggc

SEQ ID NO: 1343522 - RNA, 19 nt, Artificial Sequence
  Description of Artificial Sequence: Synthetic oligonucleotide
ugggaauccacucaacaaa

SEQ ID NO: 1343523 - RNA, 19 nt, Artificial Sequence
  Description of Artificial Sequence: Synthetic oligonucleotide
agaguacccaucccagacc

SEQ ID NO: 1343524 - RNA, 19 nt, Artificial Sequence
  Description of Artificial Sequence: Synthetic oligonucleotide
gcugugaaugaauaaagag

SEQ ID NO: 1343525 - RNA, 19 nt, Artificial Sequence
  Description of Artificial Sequence: Synthetic oligonucleotide
gauucugucaggguacucc

SEQ ID NO: 1343526 - RNA, 19 nt, Artificial Sequence
  Description of Artificial Sequence: Synthetic oligonucleotide
cuuuaggcugcuuaaaaca

SEQ ID NO: 1343527 - RNA, 19 nt, Artificial Sequence
  Description of Artificial Sequence: Synthetic oligonucleotide
aaguccacgagcacggcac

SEQ ID NO: 1343528 - RNA, 19 nt, Artificial Sequence
  Description of Artificial Sequence: Synthetic oligonucleotide
uucucuaugaauugcuuua

SEQ ID NO: 1343529 - RNA, 19 nt, Artificial Sequence
  Description of Artificial Sequence: Synthetic oligonucleotide
ugaccgaauacgaaguuau

SEQ ID NO: 1343530 - RNA, 19 nt, Artificial Sequence
  Description of Artificial Sequence: Synthetic oligonucleotide
auugcuuuaauggugguau

SEQ ID NO: 1343531 - RNA, 19 nt, Artificial Sequence
  Description of Artificial Sequence: Synthetic oligonucleotide
caaguagcgcccauggcgg

SEQ ID NO: 1343532 - RNA, 19 nt, Artificial Sequence
  Description of Artificial Sequence: Synthetic oligonucleotide
uuuaauggugguaucugua

SEQ ID NO: 1343533 - RNA, 19 nt, Artificial Sequence
  Description of Artificial Sequence: Synthetic oligonucleotide
uaaaacagcucuaggccac

SEQ ID NO: 1343534 - RNA, 19 nt, Artificial Sequence
  Description of Artificial Sequence: Synthetic oligonucleotide
uacgaaguuaucuggucug

SEQ ID NO: 1343535 - RNA, 19 nt, Artificial Sequence
  Description of Artificial Sequence: Synthetic oligonucleotide
uaggcugcuuaaaacagcu

SEQ ID NO: 1343536 - RNA, 19 nt, Artificial Sequence
  Description of Artificial Sequence: Synthetic oligonucleotide
aucuguacaagugauguca

SEQ ID NO: 1343537 - RNA, 19 nt, Artificial Sequence
  Description of Artificial Sequence: Synthetic oligonucleotide
gauacgcuccagcuggagg

SEQ ID NO: 1343538 - RNA, 19 nt, Artificial Sequence
  Description of Artificial Sequence: Synthetic oligonucleotide
uucauagacaugcggcccc

SEQ ID NO: 1343539 - RNA, 19 nt, Artificial Sequence
  Description of Artificial Sequence: Synthetic oligonucleotide
ugauacucggacaccaggu

SEQ ID NO: 1343540 - RNA, 19 nt, Artificial Sequence
  Description of Artificial Sequence: Synthetic oligonucleotide
uggacauuaagcaucuguu

SEQ ID NO: 1343541 - RNA, 19 nt, Artificial Sequence
  Description of Artificial Sequence: Synthetic oligonucleotide
uuaggcugcuuaaaacagc

SEQ ID NO: 1343542 - RNA, 19 nt, Artificial Sequence
  Description of Artificial Sequence: Synthetic oligonucleotide
cucguuguaguacacguug

SEQ ID NO: 1343543 - RNA, 19 nt, Artificial Sequence
  Description of Artificial Sequence: Synthetic oligonucleotide
ugcuucguuaucaaugcaa

SEQ ID NO: 1343544 - RNA, 19 nt, Artificial Sequence
  Description of Artificial Sequence: Synthetic oligonucleotide
cuugguacugcugauacuc

SEQ ID NO: 1343545 - RNA, 19 nt, Artificial Sequence
  Description of Artificial Sequence: Synthetic oligonucleotide
aaugccaugcucgucgcug

SEQ ID NO: 1343546 - RNA, 19 nt, Artificial Sequence
  Description of Artificial Sequence: Synthetic oligonucleotide
acauggcuagcagacaggc

SEQ ID NO: 1343547 - RNA, 19 nt, Artificial Sequence
  Description of Artificial Sequence: Synthetic oligonucleotide
auuuacagccagcuuucuc

SEQ ID NO: 1343548 - RNA, 19 nt, Artificial Sequence
  Description of Artificial Sequence: Synthetic oligonucleotide
uuuaggguucugaaacaga

SEQ ID NO: 1343549 - RNA, 19 nt, Artificial Sequence
  Description of Artificial Sequence: Synthetic oligonucleotide
aacagaugucauagagugc

SEQ ID NO: 1343550 - RNA, 19 nt, Artificial Sequence
  Description of Artificial Sequence: Synthetic oligonucleotide
auacgaaguuaucuggucu

SEQ ID NO: 1343551 - RNA, 19 nt, Artificial Sequence
  Description of Artificial Sequence: Synthetic oligonucleotide
agacaugcggccccggaac

SEQ ID NO: 1343552 - RNA, 19 nt, Artificial Sequence
  Description of Artificial Sequence: Synthetic oligonucleotide
cuggaggucgcuaucuccg

SEQ ID NO: 1343553 - RNA, 19 nt, Artificial Sequence
  Description of Artificial Sequence: Synthetic oligonucleotide
ucaacaagcugguguacug

SEQ ID NO: 1343554 - RNA, 19 nt, Artificial Sequence
  Description of Artificial Sequence: Synthetic oligonucleotide
agccguggcgucuugguac

SEQ ID NO: 1343555 - RNA, 19 nt, Artificial Sequence
  Description of Artificial Sequence: Synthetic oligonucleotide
agugaugucaggacaggac

SEQ ID NO: 1343556 - RNA, 19 nt, Artificial Sequence
  Description of Artificial Sequence: Synthetic oligonucleotide
gaguacccaucccagaccc

SEQ ID NO: 1343557 - RNA, 19 nt, Artificial Sequence
  Description of Artificial Sequence: Synthetic oligonucleotide
agcugguguacugaaaggg

SEQ ID NO: 1343558 - RNA, 19 nt, Artificial Sequence
  Description of Artificial Sequence: Synthetic oligonucleotide
gagaguacccaucccagac

SEQ ID NO: 1343559 - RNA, 19 nt, Artificial Sequence
  Description of Artificial Sequence: Synthetic oligonucleotide
uguuuucacauuguuggga

SEQ ID NO: 1343560 - RNA, 19 nt, Artificial Sequence
  Description of Artificial Sequence: Synthetic oligonucleotide
guuuuggacauuaagcauc

SEQ ID NO: 1343561 - RNA, 19 nt, Artificial Sequence
  Description of Artificial Sequence: Synthetic oligonucleotide
guucacacugcucccaugc

SEQ ID NO: 1343562 - RNA, 19 nt, Artificial Sequence
  Description of Artificial Sequence: Synthetic oligonucleotide
acauuaagcaucuguucgu

SEQ ID NO: 1343563 - RNA, 19 nt, Artificial Sequence
  Description of Artificial Sequence: Synthetic oligonucleotide
ucagcuuuaggguucugaa

SEQ ID NO: 1343564 - RNA, 19 nt, Artificial Sequence
  Description of Artificial Sequence: Synthetic oligonucleotide
aucgcaggcaugugguuac

SEQ ID NO: 1343565 - RNA, 19 nt, Artificial Sequence
  Description of Artificial Sequence: Synthetic oligonucleotide
uacacguugauacgcucca

SEQ ID NO: 1343566 - RNA, 19 nt, Artificial Sequence
  Description of Artificial Sequence: Synthetic oligonucleotide
cauggcggggaucacaggc

SEQ ID NO: 1343567 - RNA, 19 nt, Artificial Sequence
  Description of Artificial Sequence: Synthetic oligonucleotide
cugagaugcguuugaacag

SEQ ID NO: 1343568 - RNA, 19 nt, Artificial Sequence
  Description of Artificial Sequence: Synthetic oligonucleotide
augaauugcuuuaauggug

SEQ ID NO: 1343569 - RNA, 19 nt, Artificial Sequence
  Description of Artificial Sequence: Synthetic oligonucleotide
cuugccaccgguagccucg

SEQ ID NO: 1343570 - RNA, 19 nt, Artificial Sequence
  Description of Artificial Sequence: Synthetic oligonucleotide
gaaugaauaaagaguucac

SEQ ID NO: 1343571 - RNA, 19 nt, Artificial Sequence
  Description of Artificial Sequence: Synthetic oligonucleotide
ucacccguguaccagugca

SEQ ID NO: 1343572 - RNA, 19 nt, Artificial Sequence
  Description of Artificial Sequence: Synthetic oligonucleotide
uguacugaaaggguggcau

SEQ ID NO: 1343573 - RNA, 19 nt, Artificial Sequence
  Description of Artificial Sequence: Synthetic oligonucleotide
aguacacguugauacgcuc

SEQ ID NO: 1343574 - RNA, 19 nt, Artificial Sequence
  Description of Artificial Sequence: Synthetic oligonucleotide
gccacugucaaguagcgcc

SEQ ID NO: 1343575 - RNA, 19 nt, Artificial Sequence
  Description of Artificial Sequence: Synthetic oligonucleotide
gacaggacagcaaaugcac

SEQ ID NO: 1343576 - RNA, 19 nt, Artificial Sequence
  Description of Artificial Sequence: Synthetic oligonucleotide
aagugcaagcgagggaagg

SEQ ID NO: 1343577 - RNA, 19 nt, Artificial Sequence
  Description of Artificial Sequence: Synthetic oligonucleotide
ugcugauaaggagaguacc

SEQ ID NO: 1343578 - RNA, 19 nt, Artificial Sequence
  Description of Artificial Sequence: Synthetic oligonucleotide
ugcuuuaggcugcuuaaaa

SEQ ID NO: 1343579 - RNA, 19 nt, Artificial Sequence
  Description of Artificial Sequence: Synthetic oligonucleotide
ucauagagugcuucguuau

SEQ ID NO: 1343580 - RNA, 19 nt, Artificial Sequence
  Description of Artificial Sequence: Synthetic oligonucleotide
gagguggaaugucacagac

SEQ ID NO: 1343581 - RNA, 19 nt, Artificial Sequence
  Description of Artificial Sequence: Synthetic oligonucleotide
guuaucaaugcaauagguc

SEQ ID NO: 1343582 - RNA, 19 nt, Artificial Sequence
  Description of Artificial Sequence: Synthetic oligonucleotide
aacaagcugguguacugaa

SEQ ID NO: 1343583 - RNA, 19 nt, Artificial Sequence
  Description of Artificial Sequence: Synthetic oligonucleotide
ugugguuaccccacucaug

SEQ ID NO: 1343584 - RNA, 19 nt, Artificial Sequence
  Description of Artificial Sequence: Synthetic oligonucleotide
cugauacucggacaccagg

SEQ ID NO: 1343585 - RNA, 19 nt, Artificial Sequence
  Description of Artificial Sequence: Synthetic oligonucleotide
uucacauuguugggaaucc

SEQ ID NO: 1343586 - RNA, 19 nt, Artificial Sequence
  Description of Artificial Sequence: Synthetic oligonucleotide
acaagugaugucaggacag

SEQ ID NO: 1343587 - RNA, 19 nt, Artificial Sequence
  Description of Artificial Sequence: Synthetic oligonucleotide
uuacagccagcuuucucag

SEQ ID NO: 1343588 - RNA, 19 nt, Artificial Sequence
  Description of Artificial Sequence: Synthetic oligonucleotide
cacggcacgaggcacauac

SEQ ID NO: 1343589 - RNA, 19 nt, Artificial Sequence
  Description of Artificial Sequence: Synthetic oligonucleotide
accgaauacgaaguuaucu

SEQ ID NO: 1343590 - RNA, 19 nt, Artificial Sequence
  Description of Artificial Sequence: Synthetic oligonucleotide
cugugaaugaauaaagagu

SEQ ID NO: 1343591 - RNA, 19 nt, Artificial Sequence
  Description of Artificial Sequence: Synthetic oligonucleotide
caacguccaacacugaguc

SEQ ID NO: 1343592 - RNA, 19 nt, Artificial Sequence
  Description of Artificial Sequence: Synthetic oligonucleotide
cacauuguugggaauccac

SEQ ID NO: 1343593 - RNA, 19 nt, Artificial Sequence
  Description of Artificial Sequence: Synthetic oligonucleotide
cugguguacugaaagggug

SEQ ID NO: 1343594 - RNA, 19 nt, Artificial Sequence
  Description of Artificial Sequence: Synthetic oligonucleotide
uuguugggaauccacucaa

SEQ ID NO: 1343595 - RNA, 19 nt, Artificial Sequence
  Description of Artificial Sequence: Synthetic oligonucleotide
ggcucaaccacuguguccg

SEQ ID NO: 1343596 - RNA, 19 nt, Artificial Sequence
  Description of Artificial Sequence: Synthetic oligonucleotide
guuaccccacucauggugg

SEQ ID NO: 1343597 - RNA, 19 nt, Artificial Sequence
  Description of Artificial Sequence: Synthetic oligonucleotide
augcucgucgcugaucacc

SEQ ID NO: 1343598 - RNA, 19 nt, Artificial Sequence
  Description of Artificial Sequence: Synthetic oligonucleotide
uucucaggucagcauuuag

SEQ ID NO: 1343599 - RNA, 19 nt, Artificial Sequence
  Description of Artificial Sequence: Synthetic oligonucleotide
cacaacguccaacacugag

SEQ ID NO: 1343600 - RNA, 19 nt, Artificial Sequence
  Description of Artificial Sequence: Synthetic oligonucleotide
uacugaaaggguggcauug

SEQ ID NO: 1343601 - RNA, 19 nt, Artificial Sequence
  Description of Artificial Sequence: Synthetic oligonucleotide
uuuucucuaugaauugcuu

SEQ ID NO: 1343602 - RNA, 19 nt, Artificial Sequence
  Description of Artificial Sequence: Synthetic oligonucleotide
gucuugguacugcugauac

SEQ ID NO: 1343603 - RNA, 19 nt, Artificial Sequence
  Description of Artificial Sequence: Synthetic oligonucleotide
uaaggagaguacccauccc

SEQ ID NO: 1343604 - RNA, 19 nt, Artificial Sequence
  Description of Artificial Sequence: Synthetic oligonucleotide
gaagguguucaugauucug

SEQ ID NO: 1343605 - RNA, 19 nt, Artificial Sequence
  Description of Artificial Sequence: Synthetic oligonucleotide
gucgcuaucuccgugguac

SEQ ID NO: 1343606 - RNA, 19 nt, Artificial Sequence
  Description of Artificial Sequence: Synthetic oligonucleotide
ugauaaggagaguacccau

SEQ ID NO: 1343607 - RNA, 19 nt, Artificial Sequence
  Description of Artificial Sequence: Synthetic oligonucleotide
acacuagaugguucagguc

SEQ ID NO: 1343608 - RNA, 19 nt, Artificial Sequence
  Description of Artificial Sequence: Synthetic oligonucleotide
cauaaguggguguggucag

SEQ ID NO: 1343609 - RNA, 19 nt, Artificial Sequence
  Description of Artificial Sequence: Synthetic oligonucleotide
uaguacacguugauacgcu

SEQ ID NO: 1343610 - RNA, 19 nt, Artificial Sequence
  Description of Artificial Sequence: Synthetic oligonucleotide
gaugguucaggucaccaua

SEQ ID NO: 1343611 - RNA, 19 nt, Artificial Sequence
  Description of Artificial Sequence: Synthetic oligonucleotide
uucuguguagugccccuug

SEQ ID NO: 1343612 - RNA, 19 nt, Artificial Sequence
  Description of Artificial Sequence: Synthetic oligonucleotide
acguugauacgcuccagcu

SEQ ID NO: 1343613 - RNA, 19 nt, Artificial Sequence
  Description of Artificial Sequence: Synthetic oligonucleotide
agugcaagcgagggaaggg

SEQ ID NO: 1343614 - RNA, 19 nt, Artificial Sequence
  Description of Artificial Sequence: Synthetic oligonucleotide
agacacuagaugguucagg

SEQ ID NO: 1343615 - RNA, 19 nt, Artificial Sequence
  Description of Artificial Sequence: Synthetic oligonucleotide
gauacucggacaccagguc

SEQ ID NO: 1343616 - RNA, 19 nt, Artificial Sequence
  Description of Artificial Sequence: Synthetic oligonucleotide
gacacuagaugguucaggu

SEQ ID NO: 1343617 - RNA, 19 nt, Artificial Sequence
  Description of Artificial Sequence: Synthetic oligonucleotide
ucguuguaguacacguuga

SEQ ID NO: 1343618 - RNA, 19 nt, Artificial Sequence
  Description of Artificial Sequence: Synthetic oligonucleotide
ggacauggcuagcagacag

SEQ ID NO: 1343619 - RNA, 19 nt, Artificial Sequence
  Description of Artificial Sequence: Synthetic oligonucleotide
uucaacaagcugguguacu

SEQ ID NO: 1343620 - RNA, 19 nt, Artificial Sequence
  Description of Artificial Sequence: Synthetic oligonucleotide
gucaggguacuccucucgg

SEQ ID NO: 1343621 - RNA, 19 nt, Artificial Sequence
  Description of Artificial Sequence: Synthetic oligonucleotide
cucaggaacugucagggca

SEQ ID NO: 1343622 - RNA, 19 nt, Artificial Sequence
  Description of Artificial Sequence: Synthetic oligonucleotide
gucaccauaagugggugug

SEQ ID NO: 1343623 - RNA, 19 nt, Artificial Sequence
  Description of Artificial Sequence: Synthetic oligonucleotide
gguucugaaacagauguca

SEQ ID NO: 1343624 - RNA, 19 nt, Artificial Sequence
  Description of Artificial Sequence: Synthetic oligonucleotide
gaacacggcagccacuguc

SEQ ID NO: 1343625 - RNA, 19 nt, Artificial Sequence
  Description of Artificial Sequence: Synthetic oligonucleotide
ugcaagcgagggaagggca

SEQ ID NO: 1343626 - RNA, 19 nt, Artificial Sequence
  Description of Artificial Sequence: Synthetic oligonucleotide
agcagacaggcugugaaug

SEQ ID NO: 1343627 - RNA, 19 nt, Artificial Sequence
  Description of Artificial Sequence: Synthetic oligonucleotide
cuguacaagugaugucagg

SEQ ID NO: 1343628 - RNA, 19 nt, Artificial Sequence
  Description of Artificial Sequence: Synthetic oligonucleotide
agaucugcccgaagggccc

SEQ ID NO: 1343629 - RNA, 19 nt, Artificial Sequence
  Description of Artificial Sequence: Synthetic oligonucleotide
gugguaucuguacaaguga

SEQ ID NO: 1343630 - RNA, 19 nt, Artificial Sequence
  Description of Artificial Sequence: Synthetic oligonucleotide
ugccgcacugcccagccug

SEQ ID NO: 1343631 - RNA, 19 nt, Artificial Sequence
  Description of Artificial Sequence: Synthetic oligonucleotide
ugcugauacucggacacca

SEQ ID NO: 1343632 - RNA, 19 nt, Artificial Sequence
  Description of Artificial Sequence: Synthetic oligonucleotide
gguuaccccacucauggug

SEQ ID NO: 1343633 - RNA, 19 nt, Artificial Sequence
  Description of Artificial Sequence: Synthetic oligonucleotide
gcucccaugcuuuaggcug

SEQ ID NO: 1343634 - RNA, 19 nt, Artificial Sequence
  Description of Artificial Sequence: Synthetic oligonucleotide
ggugguaucuguacaagug

SEQ ID NO: 1343635 - RNA, 19 nt, Artificial Sequence
  Description of Artificial Sequence: Synthetic oligonucleotide
agcauuuagcuggccaggg

SEQ ID NO: 1343636 - RNA, 19 nt, Artificial Sequence
  Description of Artificial Sequence: Synthetic oligonucleotide
cugcuuaaaacagcucuag

SEQ ID NO: 1343637 - RNA, 19 nt, Artificial Sequence
  Description of Artificial Sequence: Synthetic oligonucleotide
acuagaugguucaggucac

SEQ ID NO: 1343638 - RNA, 19 nt, Artificial Sequence
  Description of Artificial Sequence: Synthetic oligonucleotide
gggaaucgcaggcaugugg

SEQ ID NO: 1343639 - RNA, 19 nt, Artificial Sequence
  Description of Artificial Sequence: Synthetic oligonucleotide
guaucuguacaagugaugu

SEQ ID NO: 1343640 - RNA, 19 nt, Artificial Sequence
  Description of Artificial Sequence: Synthetic oligonucleotide
caaacaucugcugggugag

SEQ ID NO: 1343641 - RNA, 19 nt, Artificial Sequence
  Description of Artificial Sequence: Synthetic oligonucleotide
guagccucguuguaguaca

SEQ ID NO: 1343642 - RNA, 19 nt, Artificial Sequence
  Description of Artificial Sequence: Synthetic oligonucleotide
aaguagcgcccauggcggg

SEQ ID NO: 1343643 - RNA, 19 nt, Artificial Sequence
  Description of Artificial Sequence: Synthetic oligonucleotide
agggcucaaccacuguguc

SEQ ID NO: 1343644 - RNA, 19 nt, Artificial Sequence
  Description of Artificial Sequence: Synthetic oligonucleotide
ugcucgucgcugaucaccu

SEQ ID NO: 1343645 - RNA, 19 nt, Artificial Sequence
  Description of Artificial Sequence: Synthetic oligonucleotide
aggugcacgaucucccuca

SEQ ID NO: 1343646 - RNA, 19 nt, Artificial Sequence
  Description of Artificial Sequence: Synthetic oligonucleotide
uaucuguacaagugauguc

SEQ ID NO: 1343647 - RNA, 19 nt, Artificial Sequence
  Description of Artificial Sequence: Synthetic oligonucleotide
caccauauuuacagccagc

SEQ ID NO: 1343648 - RNA, 19 nt, Artificial Sequence
  Description of Artificial Sequence: Synthetic oligonucleotide
acguccaacacugagucaa

SEQ ID NO: 1343649 - RNA, 19 nt, Artificial Sequence
  Description of Artificial Sequence: Synthetic oligonucleotide
uuggcgccaaucugguugc

SEQ ID NO: 1343650 - RNA, 19 nt, Artificial Sequence
  Description of Artificial Sequence: Synthetic oligonucleotide
ccgaauacgaaguuaucug

SEQ ID NO: 1343651 - RNA, 19 nt, Artificial Sequence
  Description of Artificial Sequence: Synthetic oligonucleotide
aggcacauacuugccaccg

SEQ ID NO: 1343652 - RNA, 19 nt, Artificial Sequence
  Description of Artificial Sequence: Synthetic oligonucleotide
aagugaugucaggacagga

SEQ ID NO: 1343653 - RNA, 19 nt, Artificial Sequence
  Description of Artificial Sequence: Synthetic oligonucleotide
ucaccauaagugggugugg

SEQ ID NO: 1343654 - RNA, 19 nt, Artificial Sequence
  Description of Artificial Sequence: Synthetic oligonucleotide
ugcgccuucuguguagugc

SEQ ID NO: 1343655 - RNA, 19 nt, Artificial Sequence
  Description of Artificial Sequence: Synthetic oligonucleotide
caucuguguuuucaacaag

SEQ ID NO: 1343656 - RNA, 19 nt, Artificial Sequence
  Description of Artificial Sequence: Synthetic oligonucleotide
guggacauggcuagcagac

SEQ ID NO: 1343657 - RNA, 19 nt, Artificial Sequence
  Description of Artificial Sequence: Synthetic oligonucleotide
ucauagacaugcggccccg

SEQ ID NO: 1343658 - RNA, 19 nt, Artificial Sequence
  Description of Artificial Sequence: Synthetic oligonucleotide
ucaaugccaugcucgucgc

SEQ ID NO: 1343659 - RNA, 19 nt, Artificial Sequence
  Description of Artificial Sequence: Synthetic oligonucleotide
guacacguugauacgcucc

SEQ ID NO: 1343660 - RNA, 19 nt, Artificial Sequence
  Description of Artificial Sequence: Synthetic oligonucleotide
cauuuagcuggccagggaa

SEQ ID NO: 1343661 - RNA, 19 nt, Artificial Sequence
  Description of Artificial Sequence: Synthetic oligonucleotide
uguugggaauccacucaac

SEQ ID NO: 1343662 - RNA, 19 nt, Artificial Sequence
  Description of Artificial Sequence: Synthetic oligonucleotide
gucagcauuuagcuggcca

SEQ ID NO: 1343663 - RNA, 19 nt, Artificial Sequence
  Description of Artificial Sequence: Synthetic oligonucleotide
ugcgucggaacauggcugu

SEQ ID NO: 1343664 - RNA, 19 nt, Artificial Sequence
  Description of Artificial Sequence: Synthetic oligonucleotide
cacuguguccgacaccuug

SEQ ID NO: 1343665 - RNA, 19 nt, Artificial Sequence
  Description of Artificial Sequence: Synthetic oligonucleotide
gaaacagaugucauagagu

SEQ ID NO: 1343666 - RNA, 19 nt, Artificial Sequence
  Description of Artificial Sequence: Synthetic oligonucleotide
acaacguccaacacugagu

SEQ ID NO: 1343667 - RNA, 19 nt, Artificial Sequence
  Description of Artificial Sequence: Synthetic oligonucleotide
aaucgcaggcaugugguua

SEQ ID NO: 1343668 - RNA, 19 nt, Artificial Sequence
  Description of Artificial Sequence: Synthetic oligonucleotide
uuuagcuggccagggaauc

SEQ ID NO: 1343669 - RNA, 19 nt, Artificial Sequence
  Description of Artificial Sequence: Synthetic oligonucleotide
uagacaugcggccccggaa

SEQ ID NO: 1343670 - RNA, 19 nt, Artificial Sequence
  Description of Artificial Sequence: Synthetic oligonucleotide
agggagcaaagccaggcau

SEQ ID NO: 1343671 - RNA, 19 nt, Artificial Sequence
  Description of Artificial Sequence: Synthetic oligonucleotide
cauuaagcaucuguucguc

SEQ ID NO: 1343672 - RNA, 19 nt, Artificial Sequence
  Description of Artificial Sequence: Synthetic oligonucleotide
aacguccaacacugaguca

SEQ ID NO: 1343673 - RNA, 19 nt, Artificial Sequence
  Description of Artificial Sequence: Synthetic oligonucleotide
caugcuuuaggcugcuuaa

SEQ ID NO: 1343674 - RNA, 19 nt, Artificial Sequence
  Description of Artificial Sequence: Synthetic oligonucleotide
ugcguuugaacagcuccug

SEQ ID NO: 1343675 - RNA, 19 nt, Artificial Sequence
  Description of Artificial Sequence: Synthetic oligonucleotide
cagcaaaugcacaguggac

SEQ ID NO: 1343676 - RNA, 19 nt, Artificial Sequence
  Description of Artificial Sequence: Synthetic oligonucleotide
gcugauaaggagaguaccc

SEQ ID NO: 1343677 - RNA, 19 nt, Artificial Sequence
  Description of Artificial Sequence: Synthetic oligonucleotide
ucuugguacugcugauacu

SEQ ID NO: 1343678 - RNA, 19 nt, Artificial Sequence
  Description of Artificial Sequence: Synthetic oligonucleotide
ggacauuaagcaucuguuc

SEQ ID NO: 1343679 - RNA, 19 nt, Artificial Sequence
  Description of Artificial Sequence: Synthetic oligonucleotide
aaugucacagacagcuguu

SEQ ID NO: 1343680 - RNA, 19 nt, Artificial Sequence
  Description of Artificial Sequence: Synthetic oligonucleotide
cuggucaagggagcaaagc

SEQ ID NO: 1343681 - RNA, 19 nt, Artificial Sequence
  Description of Artificial Sequence: Synthetic oligonucleotide
cagcucucagcuuccuucc

SEQ ID NO: 1343682 - RNA, 19 nt, Artificial Sequence
  Description of Artificial Sequence: Synthetic oligonucleotide
gggaauccacucaacaaag

SEQ ID NO: 1343683 - RNA, 19 nt, Artificial Sequence
  Description of Artificial Sequence: Synthetic oligonucleotide
augugguuaccccacucau

SEQ ID NO: 1343684 - RNA, 19 nt, Artificial Sequence
  Description of Artificial Sequence: Synthetic oligonucleotide
cuagcagacaggcugugaa

SEQ ID NO: 1343685 - RNA, 19 nt, Artificial Sequence
  Description of Artificial Sequence: Synthetic oligonucleotide
cauagagugcuucguuauc

SEQ ID NO: 1343686 - RNA, 19 nt, Artificial Sequence
  Description of Artificial Sequence: Synthetic oligonucleotide
caugugguuaccccacuca

SEQ ID NO: 1343687 - RNA, 19 nt, Artificial Sequence
  Description of Artificial Sequence: Synthetic oligonucleotide
ucgcuaucuccgugguacg

SEQ ID NO: 1343688 - RNA, 19 nt, Artificial Sequence
  Description of Artificial Sequence: Synthetic oligonucleotide
agcucugcgccuucugugu

SEQ ID NO: 1343689 - RNA, 19 nt, Artificial Sequence
  Description of Artificial Sequence: Synthetic oligonucleotide
ugcucccaugcuuuaggcu

SEQ ID NO: 1343690 - RNA, 19 nt, Artificial Sequence
  Description of Artificial Sequence: Synthetic oligonucleotide
auagacaugcggccccgga

SEQ ID NO: 1343691 - RNA, 19 nt, Artificial Sequence
  Description of Artificial Sequence: Synthetic oligonucleotide
cugauaaggagaguaccca

SEQ ID NO: 1343692 - RNA, 19 nt, Artificial Sequence
  Description of Artificial Sequence: Synthetic oligonucleotide
gaauacgaaguuaucuggu

SEQ ID NO: 1343693 - RNA, 19 nt, Artificial Sequence
  Description of Artificial Sequence: Synthetic oligonucleotide
aguccacgagcacggcacg

SEQ ID NO: 1343694 - RNA, 19 nt, Artificial Sequence
  Description of Artificial Sequence: Synthetic oligonucleotide
cugcccagccugcaggugc

SEQ ID NO: 1343695 - RNA, 19 nt, Artificial Sequence
  Description of Artificial Sequence: Synthetic oligonucleotide
ucagccguggcgucuuggu

SEQ ID NO: 1343696 - RNA, 19 nt, Artificial Sequence
  Description of Artificial Sequence: Synthetic oligonucleotide
uuucaacaagcugguguac

SEQ ID NO: 1343697 - RNA, 19 nt, Artificial Sequence
  Description of Artificial Sequence: Synthetic oligonucleotide
cugcucccaugcuuuaggc

SEQ ID NO: 1343698 - RNA, 19 nt, Artificial Sequence
  Description of Artificial Sequence: Synthetic oligonucleotide
gcagccacugucaaguagc

SEQ ID NO: 1343699 - RNA, 19 nt, Artificial Sequence
  Description of Artificial Sequence: Synthetic oligonucleotide
cagcauuuagcuggccagg

SEQ ID NO: 1343700 - RNA, 19 nt, Artificial Sequence
  Description of Artificial Sequence: Synthetic oligonucleotide
agagugcuucguuaucaau

SEQ ID NO: 1343701 - RNA, 19 nt, Artificial Sequence
  Description of Artificial Sequence: Synthetic oligonucleotide
uuaccccacucaugguggc

SEQ ID NO: 1343702 - RNA, 19 nt, Artificial Sequence
  Description of Artificial Sequence: Synthetic oligonucleotide
aguucacacugcucccaug

SEQ ID NO: 1343703 - RNA, 19 nt, Artificial Sequence
  Description of Artificial Sequence: Synthetic oligonucleotide
guugccgcacugcccagcc

SEQ ID NO: 1343704 - RNA, 19 nt, Artificial Sequence
  Description of Artificial Sequence: Synthetic oligonucleotide
gaagugcaagcgagggaag

SEQ ID NO: 1343705 - RNA, 19 nt, Artificial Sequence
  Description of Artificial Sequence: Synthetic oligonucleotide
aggucagcauuuagcuggc

SEQ ID NO: 1343706 - RNA, 19 nt, Artificial Sequence
  Description of Artificial Sequence: Synthetic oligonucleotide
ggcugcuuaaaacagcucu

SEQ ID NO: 1343707 - RNA, 19 nt, Artificial Sequence
  Description of Artificial Sequence: Synthetic oligonucleotide
gcuuuaauggugguaucug

SEQ ID NO: 1343708 - RNA, 19 nt, Artificial Sequence
  Description of Artificial Sequence: Synthetic oligonucleotide
ugauacgcuccagcuggag

SEQ ID NO: 1343709 - RNA, 19 nt, Artificial Sequence
  Description of Artificial Sequence: Synthetic oligonucleotide
uaggucucaucuguguuuu

SEQ ID NO: 1343710 - RNA, 19 nt, Artificial Sequence
  Description of Artificial Sequence: Synthetic oligonucleotide
uugauacgcuccagcugga

SEQ ID NO: 1343711 - RNA, 19 nt, Artificial Sequence
  Description of Artificial Sequence: Synthetic oligonucleotide
agccucguuguaguacacg

SEQ ID NO: 1343712 - RNA, 19 nt, Artificial Sequence
  Description of Artificial Sequence: Synthetic oligonucleotide
caggcugugaaugaauaaa

SEQ ID NO: 1343713 - RNA, 19 nt, Artificial Sequence
  Description of Artificial Sequence: Synthetic oligonucleotide
gguaucuguacaagugaug

SEQ ID NO: 1343714 - RNA, 19 nt, Artificial Sequence
  Description of Artificial Sequence: Synthetic oligonucleotide
agaguucacacugcuccca

SEQ ID NO: 1343715 - RNA, 19 nt, Artificial Sequence
  Description of Artificial Sequence: Synthetic oligonucleotide
agcgcacugaguccauggu

SEQ ID NO: 1343716 - RNA, 19 nt, Artificial Sequence
  Description of Artificial Sequence: Synthetic oligonucleotide
uauuuacagccagcuuucu

SEQ ID NO: 1343717 - RNA, 19 nt, Artificial Sequence
  Description of Artificial Sequence: Synthetic oligonucleotide
cccacucugaccgaauacg

SEQ ID NO: 1343718 - RNA, 19 nt, Artificial Sequence
  Description of Artificial Sequence: Synthetic oligonucleotide
uagcagacaggcugugaau

SEQ ID NO: 1343719 - RNA, 19 nt, Artificial Sequence
  Description of Artificial Sequence: Synthetic oligonucleotide
caagcgagggaagggcacc

SEQ ID NO: 1343720 - RNA, 19 nt, Artificial Sequence
  Description of Artificial Sequence: Synthetic oligonucleotide
ggcgucuugguacugcuga

SEQ ID NO: 1343721 - RNA, 19 nt, Artificial Sequence
  Description of Artificial Sequence: Synthetic oligonucleotide
uuguucccagccccacucu

SEQ ID NO: 1343722 - RNA, 19 nt, Artificial Sequence
  Description of Artificial Sequence: Synthetic oligonucleotide
caggcaugugguuacccca

SEQ ID NO: 1343723 - RNA, 19 nt, Artificial Sequence
  Description of Artificial Sequence: Synthetic oligonucleotide
gugcaagcgagggaagggc

SEQ ID NO: 1343724 - RNA, 19 nt, Artificial Sequence
  Description of Artificial Sequence: Synthetic oligonucleotide
aguagcgcccauggcgggg

SEQ ID NO: 1343725 - RNA, 19 nt, Artificial Sequence
  Description of Artificial Sequence: Synthetic oligonucleotide
cugaaacagaugucauaga

SEQ ID NO: 1343726 - RNA, 19 nt, Artificial Sequence
  Description of Artificial Sequence: Synthetic oligonucleotide
acugcggagcggcugcaga

SEQ ID NO: 1343727 - RNA, 19 nt, Artificial Sequence
  Description of Artificial Sequence: Synthetic oligonucleotide
ucuaggccaccuccucuuc

SEQ ID NO: 1343728 - RNA, 19 nt, Artificial Sequence
  Description of Artificial Sequence: Synthetic oligonucleotide
gcaggcaugugguuacccc

SEQ ID NO: 1343729 - RNA, 19 nt, Artificial Sequence
  Description of Artificial Sequence: Synthetic oligonucleotide
gcuggaggucgcuaucucc

SEQ ID NO: 1343730 - RNA, 19 nt, Artificial Sequence
  Description of Artificial Sequence: Synthetic oligonucleotide
acgaaguuaucuggucuga

SEQ ID NO: 1343731 - RNA, 19 nt, Artificial Sequence
  Description of Artificial Sequence: Synthetic oligonucleotide
cacccguguaccagugcag

SEQ ID NO: 1343732 - RNA, 19 nt, Artificial Sequence
  Description of Artificial Sequence: Synthetic oligonucleotide
aacugcucugagaugcguu

SEQ ID NO: 1343733 - RNA, 19 nt, Artificial Sequence
  Description of Artificial Sequence: Synthetic oligonucleotide
ucacaacguccaacacuga

SEQ ID NO: 1343734 - RNA, 19 nt, Artificial Sequence
  Description of Artificial Sequence: Synthetic oligonucleotide
auuuagcuggccagggaau

SEQ ID NO: 1343735 - RNA, 19 nt, Artificial Sequence
  Description of Artificial Sequence: Synthetic oligonucleotide
uggaggucgcuaucuccgu

SEQ ID NO: 1343736 - RNA, 19 nt, Artificial Sequence
  Description of Artificial Sequence: Synthetic oligonucleotide
ggcagccacugucaaguag

SEQ ID NO: 1343737 - RNA, 19 nt, Artificial Sequence
  Description of Artificial Sequence: Synthetic oligonucleotide
ggcacauacuugccaccgg

SEQ ID NO: 1343738 - RNA, 19 nt, Artificial Sequence
  Description of Artificial Sequence: Synthetic oligonucleotide
gcgccuucuguguagugcc

SEQ ID NO: 1343739 - RNA, 19 nt, Artificial Sequence
  Description of Artificial Sequence: Synthetic oligonucleotide
cucugaccgaauacgaagu

SEQ ID NO: 1343740 - RNA, 19 nt, Artificial Sequence
  Description of Artificial Sequence: Synthetic oligonucleotide
gucggaacauggcugugaa

SEQ ID NO: 1343741 - RNA, 19 nt, Artificial Sequence
  Description of Artificial Sequence: Synthetic oligonucleotide
gacaugcggccccggaaca

SEQ ID NO: 1343742 - RNA, 19 nt, Artificial Sequence
  Description of Artificial Sequence: Synthetic oligonucleotide
aagcgagggaagggcacca

SEQ ID NO: 1343743 - RNA, 19 nt, Artificial Sequence
  Description of Artificial Sequence: Synthetic oligonucleotide
cuucguuaucaaugcaaua

SEQ ID NO: 1343744 - RNA, 19 nt, Artificial Sequence
  Description of Artificial Sequence: Synthetic oligonucleotide
gguagccucguuguaguac

SEQ ID NO: 1343745 - RNA, 19 nt, Artificial Sequence
  Description of Artificial Sequence: Synthetic oligonucleotide
gaucugcccgaagggcccg

SEQ ID NO: 1343746 - RNA, 19 nt, Artificial Sequence
  Description of Artificial Sequence: Synthetic oligonucleotide
aggucaccauaagugggug

SEQ ID NO: 1343747 - RNA, 19 nt, Artificial Sequence
  Description of Artificial Sequence: Synthetic oligonucleotide
cugucaaguagcgcccaug

SEQ ID NO: 1343748 - RNA, 19 nt, Artificial Sequence
  Description of Artificial Sequence: Synthetic oligonucleotide
uuuggacauuaagcaucug

SEQ ID NO: 1343749 - RNA, 19 nt, Artificial Sequence
  Description of Artificial Sequence: Synthetic oligonucleotide
cagacacuagaugguucag

SEQ ID NO: 1343750 - RNA, 19 nt, Artificial Sequence
  Description of Artificial Sequence: Synthetic oligonucleotide
ugguacgugccggugggau

SEQ ID NO: 1343751 - RNA, 19 nt, Artificial Sequence
  Description of Artificial Sequence: Synthetic oligonucleotide
aggucgcuaucuccguggu

SEQ ID NO: 1343752 - RNA, 19 nt, Artificial Sequence
  Description of Artificial Sequence: Synthetic oligonucleotide
uagccucguuguaguacac

SEQ ID NO: 1343753 - RNA, 19 nt, Artificial Sequence
  Description of Artificial Sequence: Synthetic oligonucleotide
caggaacugucagggcacg

SEQ ID NO: 1343754 - RNA, 19 nt, Artificial Sequence
  Description of Artificial Sequence: Synthetic oligonucleotide
ugguuaccccacucauggu

SEQ ID NO: 1343755 - RNA, 19 nt, Artificial Sequence
  Description of Artificial Sequence: Synthetic oligonucleotide
gaauugcuuuaaugguggu

SEQ ID NO: 1343756 - RNA, 19 nt, Artificial Sequence
  Description of Artificial Sequence: Synthetic oligonucleotide
acugucaaguagcgcccau

SEQ ID NO: 1343757 - RNA, 19 nt, Artificial Sequence
  Description of Artificial Sequence: Synthetic oligonucleotide
cacucugaccgaauacgaa

SEQ ID NO: 1343758 - RNA, 19 nt, Artificial Sequence
  Description of Artificial Sequence: Synthetic oligonucleotide
gccaccgguagccucguug

SEQ ID NO: 1343759 - RNA, 19 nt, Artificial Sequence
  Description of Artificial Sequence: Synthetic oligonucleotide
ggcugugaacugcucugag

SEQ ID NO: 1343760 - RNA, 19 nt, Artificial Sequence
  Description of Artificial Sequence: Synthetic oligonucleotide
ggcacgaggcacauacuug

SEQ ID NO: 1343761 - RNA, 19 nt, Artificial Sequence
  Description of Artificial Sequence: Synthetic oligonucleotide
cagcuuuaggguucugaaa

SEQ ID NO: 1343762 - RNA, 19 nt, Artificial Sequence
  Description of Artificial Sequence: Synthetic oligonucleotide
gaccgaauacgaaguuauc

SEQ ID NO: 1343763 - RNA, 19 nt, Artificial Sequence
  Description of Artificial Sequence: Synthetic oligonucleotide
gcggggaucacaggcagcc

SEQ ID NO: 1343764 - RNA, 19 nt, Artificial Sequence
  Description of Artificial Sequence: Synthetic oligonucleotide
caacaagcugguguacuga

SEQ ID NO: 1343765 - RNA, 19 nt, Artificial Sequence
  Description of Artificial Sequence: Synthetic oligonucleotide
gggcucaaccacugugucc

SEQ ID NO: 1343766 - RNA, 19 nt, Artificial Sequence
  Description of Artificial Sequence: Synthetic oligonucleotide
gcaauaggucucaucugug

SEQ ID NO: 1343767 - RNA, 19 nt, Artificial Sequence
  Description of Artificial Sequence: Synthetic oligonucleotide
cauagacaugcggccccgg

SEQ ID NO: 1343768 - RNA, 19 nt, Artificial Sequence
  Description of Artificial Sequence: Synthetic oligonucleotide
uccgugguacgugccggug

SEQ ID NO: 1343769 - RNA, 19 nt, Artificial Sequence
  Description of Artificial Sequence: Synthetic oligonucleotide
gcuaucuccgugguacgug

SEQ ID NO: 1343770 - RNA, 19 nt, Artificial Sequence
  Description of Artificial Sequence: Synthetic oligonucleotide
augcuuuaggcugcuuaaa

SEQ ID NO: 1343771 - RNA, 19 nt, Artificial Sequence
  Description of Artificial Sequence: Synthetic oligonucleotide
gcgcacugaguccauggug

SEQ ID NO: 1343772 - RNA, 19 nt, Artificial Sequence
  Description of Artificial Sequence: Synthetic oligonucleotide
ggagaguacccaucccaga

SEQ ID NO: 1343773 - RNA, 19 nt, Artificial Sequence
  Description of Artificial Sequence: Synthetic oligonucleotide
ccaugcucgucgcugauca

SEQ ID NO: 1343774 - RNA, 19 nt, Artificial Sequence
  Description of Artificial Sequence: Synthetic oligonucleotide
cucagccguggcgucuugg

SEQ ID NO: 1343775 - RNA, 19 nt, Artificial Sequence
  Description of Artificial Sequence: Synthetic oligonucleotide
ggaggucgcuaucuccgug

SEQ ID NO: 1343776 - RNA, 19 nt, Artificial Sequence
  Description of Artificial Sequence: Synthetic oligonucleotide
cacugcucccaugcuuuag

SEQ ID NO: 1343777 - RNA, 19 nt, Artificial Sequence
  Description of Artificial Sequence: Synthetic oligonucleotide
gcccggagcgcacugaguc

SEQ ID NO: 1343778 - RNA, 19 nt, Artificial Sequence
  Description of Artificial Sequence: Synthetic oligonucleotide
gugcuucguuaucaaugca

SEQ ID NO: 1343779 - RNA, 19 nt, Artificial Sequence
  Description of Artificial Sequence: Synthetic oligonucleotide
caugcucgucgcugaucac

SEQ ID NO: 1343780 - RNA, 19 nt, Artificial Sequence
  Description of Artificial Sequence: Synthetic oligonucleotide
ugguugccgcacugcccag

SEQ ID NO: 1343781 - RNA, 19 nt, Artificial Sequence
  Description of Artificial Sequence: Synthetic oligonucleotide
acaagcugguguacugaaa

SEQ ID NO: 1343782 - RNA, 19 nt, Artificial Sequence
  Description of Artificial Sequence: Synthetic oligonucleotide
ggcgccaaucugguugccg

SEQ ID NO: 1343783 - RNA, 19 nt, Artificial Sequence
  Description of Artificial Sequence: Synthetic oligonucleotide
acacggcagccacugucaa

SEQ ID NO: 1343784 - RNA, 19 nt, Artificial Sequence
  Description of Artificial Sequence: Synthetic oligonucleotide
ggaaucgcaggcauguggu

SEQ ID NO: 1343785 - RNA, 19 nt, Artificial Sequence
  Description of Artificial Sequence: Synthetic oligonucleotide
cagggaaucgcaggcaugu

SEQ ID NO: 1343786 - RNA, 19 nt, Artificial Sequence
  Description of Artificial Sequence: Synthetic oligonucleotide
uacgcuccagcuggagguc

SEQ ID NO: 1343787 - RNA, 19 nt, Artificial Sequence
  Description of Artificial Sequence: Synthetic oligonucleotide
guguacugaaaggguggca

SEQ ID NO: 1343788 - RNA, 19 nt, Artificial Sequence
  Description of Artificial Sequence: Synthetic oligonucleotide
gcgacugcggagcggcugc

SEQ ID NO: 1343789 - RNA, 19 nt, Artificial Sequence
  Description of Artificial Sequence: Synthetic oligonucleotide
gacugcggagcggcugcag

SEQ ID NO: 1343790 - RNA, 19 nt, Artificial Sequence
  Description of Artificial Sequence: Synthetic oligonucleotide
gccucguuguaguacacgu

SEQ ID NO: 1343791 - RNA, 19 nt, Artificial Sequence
  Description of Artificial Sequence: Synthetic oligonucleotide
gagaugcguuugaacagcu

SEQ ID NO: 1343792 - RNA, 19 nt, Artificial Sequence
  Description of Artificial Sequence: Synthetic oligonucleotide
agggaaucgcaggcaugug

SEQ ID NO: 1343793 - RNA, 19 nt, Artificial Sequence
  Description of Artificial Sequence: Synthetic oligonucleotide
uacuugccaccgguagccu

SEQ ID NO: 1343794 - RNA, 19 nt, Artificial Sequence
  Description of Artificial Sequence: Synthetic oligonucleotide
ccgugguacgugccggugg

SEQ ID NO: 1343795 - RNA, 19 nt, Artificial Sequence
  Description of Artificial Sequence: Synthetic oligonucleotide
gcuggucaagggagcaaag

SEQ ID NO: 1343796 - RNA, 19 nt, Artificial Sequence
  Description of Artificial Sequence: Synthetic oligonucleotide
ccacucugaccgaauacga

SEQ ID NO: 1343797 - RNA, 19 nt, Artificial Sequence
  Description of Artificial Sequence: Synthetic oligonucleotide
gcugcuuaaaacagcucua

SEQ ID NO: 1343798 - RNA, 19 nt, Artificial Sequence
  Description of Artificial Sequence: Synthetic oligonucleotide
uugccgcacugcccagccu

SEQ ID NO: 1343799 - RNA, 19 nt, Artificial Sequence
  Description of Artificial Sequence: Synthetic oligonucleotide
ucgcaggcaugugguuacc

SEQ ID NO: 1343800 - RNA, 19 nt, Artificial Sequence
  Description of Artificial Sequence: Synthetic oligonucleotide
cugcccgaagggcccggag

SEQ ID NO: 1343801 - RNA, 19 nt, Artificial Sequence
  Description of Artificial Sequence: Synthetic oligonucleotide
gcaagcgagggaagggcac

SEQ ID NO: 1343802 - RNA, 19 nt, Artificial Sequence
  Description of Artificial Sequence: Synthetic oligonucleotide
ccagggaaucgcaggcaug

SEQ ID NO: 1343803 - RNA, 19 nt, Artificial Sequence
  Description of Artificial Sequence: Synthetic oligonucleotide
gaaucgcaggcaugugguu

SEQ ID NO: 1343804 - RNA, 19 nt, Artificial Sequence
  Description of Artificial Sequence: Synthetic oligonucleotide
guacugaaaggguggcauu

SEQ ID NO: 1343805 - RNA, 19 nt, Artificial Sequence
  Description of Artificial Sequence: Synthetic oligonucleotide
aucugcccgaagggcccgg

SEQ ID NO: 1343806 - RNA, 19 nt, Artificial Sequence
  Description of Artificial Sequence: Synthetic oligonucleotide
gcuucguuaucaaugcaau

SEQ ID NO: 1343807 - RNA, 19 nt, Artificial Sequence
  Description of Artificial Sequence: Synthetic oligonucleotide
cccggagcgcacugagucc

SEQ ID NO: 1343808 - RNA, 19 nt, Artificial Sequence
  Description of Artificial Sequence: Synthetic oligonucleotide
ccucacaacguccaacacu

SEQ ID NO: 1343809 - RNA, 19 nt, Artificial Sequence
  Description of Artificial Sequence: Synthetic oligonucleotide
gcggcgacugcggagcggc

SEQ ID NO: 1343810 - RNA, 19 nt, Artificial Sequence
  Description of Artificial Sequence: Synthetic oligonucleotide
cgaucucccucauggcggc

SEQ ID NO: 1343811 - RNA, 19 nt, Artificial Sequence
  Description of Artificial Sequence: Synthetic oligonucleotide
cucuaggccaccuccucuu

SEQ ID NO: 1343812 - RNA, 19 nt, Artificial Sequence
  Description of Artificial Sequence: Synthetic oligonucleotide
caccauaaguggguguggu

SEQ ID NO: 1343813 - RNA, 19 nt, Artificial Sequence
  Description of Artificial Sequence: Synthetic oligonucleotide
cacugucaaguagcgccca

SEQ ID NO: 1343814 - RNA, 19 nt, Artificial Sequence
  Description of Artificial Sequence: Synthetic oligonucleotide
ccucacccguguaccagug

SEQ ID NO: 1343815 - RNA, 19 nt, Artificial Sequence
  Description of Artificial Sequence: Synthetic oligonucleotide
cggaacacggcagccacug

SEQ ID NO: 1343816 - RNA, 19 nt, Artificial Sequence
  Description of Artificial Sequence: Synthetic oligonucleotide
ggaauccacucaacaaagu

SEQ ID NO: 1343817 - RNA, 19 nt, Artificial Sequence
  Description of Artificial Sequence: Synthetic oligonucleotide
gguugccgcacugcccagc

SEQ ID NO: 1343818 - RNA, 19 nt, Artificial Sequence
  Description of Artificial Sequence: Synthetic oligonucleotide
ccccgagguggaaugucac

SEQ ID NO: 1343819 - RNA, 19 nt, Artificial Sequence
  Description of Artificial Sequence: Synthetic oligonucleotide
ggucaccauaagugggugu

SEQ ID NO: 1343820 - RNA, 19 nt, Artificial Sequence
  Description of Artificial Sequence: Synthetic oligonucleotide
uugccaccgguagccucgu

SEQ ID NO: 1343821 - RNA, 19 nt, Artificial Sequence
  Description of Artificial Sequence: Synthetic oligonucleotide
guccacgagcacggcacga

SEQ ID NO: 1343822 - RNA, 19 nt, Artificial Sequence
  Description of Artificial Sequence: Synthetic oligonucleotide
gcgcccauggcggggauca

SEQ ID NO: 1343823 - RNA, 19 nt, Artificial Sequence
  Description of Artificial Sequence: Synthetic oligonucleotide
gcuagcagacaggcuguga

SEQ ID NO: 1343824 - RNA, 19 nt, Artificial Sequence
  Description of Artificial Sequence: Synthetic oligonucleotide
uggcgccaaucugguugcc

SEQ ID NO: 1343825 - RNA, 19 nt, Artificial Sequence
  Description of Artificial Sequence: Synthetic oligonucleotide
ggagcgcacugaguccaug

SEQ ID NO: 1343826 - RNA, 19 nt, Artificial Sequence
  Description of Artificial Sequence: Synthetic oligonucleotide
acggcacgaggcacauacu

SEQ ID NO: 1343827 - RNA, 19 nt, Artificial Sequence
  Description of Artificial Sequence: Synthetic oligonucleotide
cguccaacacugagucaac

SEQ ID NO: 1343828 - RNA, 19 nt, Artificial Sequence
  Description of Artificial Sequence: Synthetic oligonucleotide
acucggacaccaggucguu

SEQ ID NO: 1343829 - RNA, 19 nt, Artificial Sequence
  Description of Artificial Sequence: Synthetic oligonucleotide
gccccggcuggucaaggga

SEQ ID NO: 1343830 - RNA, 19 nt, Artificial Sequence
  Description of Artificial Sequence: Synthetic oligonucleotide
ggucagcauuuagcuggcc

SEQ ID NO: 1343831 - RNA, 19 nt, Artificial Sequence
  Description of Artificial Sequence: Synthetic oligonucleotide
aggccccgagguggaaugu

SEQ ID NO: 1343832 - RNA, 19 nt, Artificial Sequence
  Description of Artificial Sequence: Synthetic oligonucleotide
uagcgcccauggcggggau

SEQ ID NO: 1343833 - RNA, 19 nt, Artificial Sequence
  Description of Artificial Sequence: Synthetic oligonucleotide
cagccguggcgucuuggua

SEQ ID NO: 1343834 - RNA, 19 nt, Artificial Sequence
  Description of Artificial Sequence: Synthetic oligonucleotide
gccagggaaucgcaggcau

SEQ ID NO: 1343835 - RNA, 19 nt, Artificial Sequence
  Description of Artificial Sequence: Synthetic oligonucleotide
ggcggggaucacaggcagc

SEQ ID NO: 1343836 - RNA, 19 nt, Artificial Sequence
  Description of Artificial Sequence: Synthetic oligonucleotide
ccaccgguagccucguugu

SEQ ID NO: 1343837 - RNA, 19 nt, Artificial Sequence
  Description of Artificial Sequence: Synthetic oligonucleotide
uacgugccggugggaucaa

SEQ ID NO: 1343838 - RNA, 19 nt, Artificial Sequence
  Description of Artificial Sequence: Synthetic oligonucleotide
gcgagggaagggcaccaua

SEQ ID NO: 1343839 - RNA, 19 nt, Artificial Sequence
  Description of Artificial Sequence: Synthetic oligonucleotide
ggcggcgacugcggagcgg

SEQ ID NO: 1343840 - RNA, 19 nt, Artificial Sequence
  Description of Artificial Sequence: Synthetic oligonucleotide
cgcacugcccagccugcag

SEQ ID NO: 1343841 - RNA, 19 nt, Artificial Sequence
  Description of Artificial Sequence: Synthetic oligonucleotide
gugguacgugccgguggga

SEQ ID NO: 1343842 - RNA, 19 nt, Artificial Sequence
  Description of Artificial Sequence: Synthetic oligonucleotide
ccggagcgcacugagucca

SEQ ID NO: 1343843 - RNA, 19 nt, Artificial Sequence
  Description of Artificial Sequence: Synthetic oligonucleotide
cgcaggcaugugguuaccc

SEQ ID NO: 1343844 - RNA, 19 nt, Artificial Sequence
  Description of Artificial Sequence: Synthetic oligonucleotide
gccaugcucgucgcugauc

SEQ ID NO: 1343845 - RNA, 19 nt, Artificial Sequence
  Description of Artificial Sequence: Synthetic oligonucleotide
ggucgcuaucuccguggua

SEQ ID NO: 1343846 - RNA, 19 nt, Artificial Sequence
  Description of Artificial Sequence: Synthetic oligonucleotide
ccgguagccucguuguagu

SEQ ID NO: 1343847 - RNA, 19 nt, Artificial Sequence
  Description of Artificial Sequence: Synthetic oligonucleotide
gcucugcgccuucugugua

SEQ ID NO: 1343848 - RNA, 19 nt, Artificial Sequence
  Description of Artificial Sequence: Synthetic oligonucleotide
caccgguagccucguugua

SEQ ID NO: 1343849 - RNA, 19 nt, Artificial Sequence
  Description of Artificial Sequence: Synthetic oligonucleotide
gcgucggaacauggcugug

SEQ ID NO: 1343850 - RNA, 19 nt, Artificial Sequence
  Description of Artificial Sequence: Synthetic oligonucleotide
cccucauggcggcggcgac

SEQ ID NO: 1343851 - RNA, 19 nt, Artificial Sequence
  Description of Artificial Sequence: Synthetic oligonucleotide
cgucggaacauggcuguga

SEQ ID NO: 1343852 - RNA, 19 nt, Artificial Sequence
  Description of Artificial Sequence: Synthetic oligonucleotide
ggcugccccggcuggucaa

SEQ ID NO: 1343853 - RNA, 19 nt, Artificial Sequence
  Description of Artificial Sequence: Synthetic oligonucleotide
cgaagggcccggagcgcac

SEQ ID NO: 1343854 - RNA, 19 nt, Artificial Sequence
  Description of Artificial Sequence: Synthetic oligonucleotide
cccgaagggcccggagcgc

SEQ ID NO: 1343855 - RNA, 19 nt, Artificial Sequence
  Description of Artificial Sequence: Synthetic oligonucleotide
cgaaguuaucuggucugaa

SEQ ID NO: 1343856 - RNA, 19 nt, Artificial Sequence
  Description of Artificial Sequence: Synthetic oligonucleotide
acgugccggugggaucaau

SEQ ID NO: 1343857 - RNA, 19 nt, Artificial Sequence
  Description of Artificial Sequence: Synthetic oligonucleotide
gcgucuugguacugcugau

SEQ ID NO: 1343858 - RNA, 19 nt, Artificial Sequence
  Description of Artificial Sequence: Synthetic oligonucleotide
ccggcuggucaagggagca

SEQ ID NO: 1343859 - RNA, 19 nt, Artificial Sequence
  Description of Artificial Sequence: Synthetic oligonucleotide
ccccacucaugguggcaga

SEQ ID NO: 1343860 - RNA, 19 nt, Artificial Sequence
  Description of Artificial Sequence: Synthetic oligonucleotide
cggugggaucaaugccaug

SEQ ID NO: 1343861 - RNA, 19 nt, Artificial Sequence
  Description of Artificial Sequence: Synthetic oligonucleotide
ccggugggaucaaugccau

SEQ ID NO: 1343862 - RNA, 19 nt, Artificial Sequence
  Description of Artificial Sequence: Synthetic oligonucleotide
ccagccccacucugaccga

SEQ ID NO: 1343863 - RNA, 19 nt, Artificial Sequence
  Description of Artificial Sequence: Synthetic oligonucleotide
cgucuugguacugcugaua

SEQ ID NO: 1343864 - RNA, 19 nt, Artificial Sequence
  Description of Artificial Sequence: Synthetic oligonucleotide
cagccugcaggugcacgau

SEQ ID NO: 1343865 - RNA, 19 nt, Artificial Sequence
  Description of Artificial Sequence: Synthetic oligonucleotide
cggcacgaggcacauacuu

SEQ ID NO: 1343866 - RNA, 19 nt, Artificial Sequence
  Description of Artificial Sequence: Synthetic oligonucleotide
gcccagccugcaggugcac

SEQ ID NO: 1343867 - RNA, 19 nt, Artificial Sequence
  Description of Artificial Sequence: Synthetic oligonucleotide
ggcccggagcgcacugagu

SEQ ID NO: 1343868 - RNA, 19 nt, Artificial Sequence
  Description of Artificial Sequence: Synthetic oligonucleotide
cgguagccucguuguagua

SEQ ID NO: 1343869 - RNA, 19 nt, Artificial Sequence
  Description of Artificial Sequence: Synthetic oligonucleotide
cgcuaucuccgugguacgu

SEQ ID NO: 1343870 - RNA, 19 nt, Artificial Sequence
  Description of Artificial Sequence: Synthetic oligonucleotide
ccgcacugcccagccugca

SEQ ID NO: 1343871 - RNA, 19 nt, Artificial Sequence
  Description of Artificial Sequence: Synthetic oligonucleotide
cggggaucacaggcagcca

SEQ ID NO: 1343872 - RNA, 19 nt, Artificial Sequence
  Description of Artificial Sequence: Synthetic oligonucleotide
gcacggcacgaggcacaua

SEQ ID NO: 1343873 - RNA, 19 nt, Artificial Sequence
  Description of Artificial Sequence: Synthetic oligonucleotide
cgacugcggagcggcugca

SEQ ID NO: 1343874 - RNA, 19 nt, Artificial Sequence
  Description of Artificial Sequence: Synthetic oligonucleotide
ccacuguguccgacaccuu

SEQ ID NO: 1343875 - RNA, 19 nt, Artificial Sequence
  Description of Artificial Sequence: Synthetic oligonucleotide
cggcgacugcggagcggcu

SEQ ID NO: 1343876 - RNA, 19 nt, Artificial Sequence
  Description of Artificial Sequence: Synthetic oligonucleotide
ugagauuccauucauaggg

SEQ ID NO: 1343877 - RNA, 19 nt, Artificial Sequence
  Description of Artificial Sequence: Synthetic oligonucleotide
aagauuggcaguuuggugc

SEQ ID NO: 1343878 - RNA, 19 nt, Artificial Sequence
  Description of Artificial Sequence: Synthetic oligonucleotide
uuuacuuccagaauugucc

SEQ ID NO: 1343879 - RNA, 19 nt, Artificial Sequence
  Description of Artificial Sequence: Synthetic oligonucleotide
aaauggcacaaguuuaagc

SEQ ID NO: 1343880 - RNA, 19 nt, Artificial Sequence
  Description of Artificial Sequence: Synthetic oligonucleotide
uuuacauccaugcagcuug

SEQ ID NO: 1343881 - RNA, 19 nt, Artificial Sequence
  Description of Artificial Sequence: Synthetic oligonucleotide
aaagcacuucuuuagcuac

SEQ ID NO: 1343882 - RNA, 19 nt, Artificial Sequence
  Description of Artificial Sequence: Synthetic oligonucleotide
acucuuaacagccacuggc

SEQ ID NO: 1343883 - RNA, 19 nt, Artificial Sequence
  Description of Artificial Sequence: Synthetic oligonucleotide
uauuguaauacucuuccug

SEQ ID NO: 1343884 - RNA, 19 nt, Artificial Sequence
  Description of Artificial Sequence: Synthetic oligonucleotide
ugugguuuuacauccaugc

SEQ ID NO: 1343885 - RNA, 19 nt, Artificial Sequence
  Description of Artificial Sequence: Synthetic oligonucleotide
agagugagaaaacugauca

SEQ ID NO: 1343886 - RNA, 19 nt, Artificial Sequence
  Description of Artificial Sequence: Synthetic oligonucleotide
aucgaugugggauaguaac

SEQ ID NO: 1343887 - RNA, 19 nt, Artificial Sequence
  Description of Artificial Sequence: Synthetic oligonucleotide
uagggaauuucacagagug

SEQ ID NO: 1343888 - RNA, 19 nt, Artificial Sequence
  Description of Artificial Sequence: Synthetic oligonucleotide
cuuacuagaacuugcuggg

SEQ ID NO: 1343889 - RNA, 19 nt, Artificial Sequence
  Description of Artificial Sequence: Synthetic oligonucleotide
aagcuuaccagcuugaauu

SEQ ID NO: 1343890 - RNA, 19 nt, Artificial Sequence
  Description of Artificial Sequence: Synthetic oligonucleotide
ucugguacggggaacacag

SEQ ID NO: 1343891 - RNA, 19 nt, Artificial Sequence
  Description of Artificial Sequence: Synthetic oligonucleotide
uucuccuaaaccaaguucu

SEQ ID NO: 1343892 - RNA, 19 nt, Artificial Sequence
  Description of Artificial Sequence: Synthetic oligonucleotide
aaagaguauuguaauacuc

SEQ ID NO: 1343893 - RNA, 19 nt, Artificial Sequence
  Description of Artificial Sequence: Synthetic oligonucleotide
ucugaccgaaccuuaaggg

SEQ ID NO: 1343894 - RNA, 19 nt, Artificial Sequence
  Description of Artificial Sequence: Synthetic oligonucleotide
cuaaaccaaguucugaccg

SEQ ID NO: 1343895 - RNA, 19 nt, Artificial Sequence
  Description of Artificial Sequence: Synthetic oligonucleotide
caaguuuaagcuuaccagc

SEQ ID NO: 1343896 - RNA, 19 nt, Artificial Sequence
  Description of Artificial Sequence: Synthetic oligonucleotide
aagcuauuaacucuucuga

SEQ ID NO: 1343897 - RNA, 19 nt, Artificial Sequence
  Description of Artificial Sequence: Synthetic oligonucleotide
uguaaaagaguauuguaau

SEQ ID NO: 1343898 - RNA, 19 nt, Artificial Sequence
  Description of Artificial Sequence: Synthetic oligonucleotide
accagucuaacucaggauc

SEQ ID NO: 1343899 - RNA, 19 nt, Artificial Sequence
  Description of Artificial Sequence: Synthetic oligonucleotide
aaccuuaaggggucuuucc

SEQ ID NO: 1343900 - RNA, 19 nt, Artificial Sequence
  Description of Artificial Sequence: Synthetic oligonucleotide
uuuguuagggaccaucacu

SEQ ID NO: 1343901 - RNA, 19 nt, Artificial Sequence
  Description of Artificial Sequence: Synthetic oligonucleotide
uaacucuucugauaagccg

SEQ ID NO: 1343902 - RNA, 19 nt, Artificial Sequence
  Description of Artificial Sequence: Synthetic oligonucleotide
aagagcuucugguacgggg

SEQ ID NO: 1343903 - RNA, 19 nt, Artificial Sequence
  Description of Artificial Sequence: Synthetic oligonucleotide
auaguaacaccauccguac

SEQ ID NO: 1343904 - RNA, 19 nt, Artificial Sequence
  Description of Artificial Sequence: Synthetic oligonucleotide
cugguuaagcagaagaggc

SEQ ID NO: 1343905 - RNA, 19 nt, Artificial Sequence
  Description of Artificial Sequence: Synthetic oligonucleotide
uucugaccgaaccuuaagg

SEQ ID NO: 1343906 - RNA, 19 nt, Artificial Sequence
  Description of Artificial Sequence: Synthetic oligonucleotide
aagccgcucacucuguccc

SEQ ID NO: 1343907 - RNA, 19 nt, Artificial Sequence
  Description of Artificial Sequence: Synthetic oligonucleotide
aaacugaucaccugucugu

SEQ ID NO: 1343908 - RNA, 19 nt, Artificial Sequence
  Description of Artificial Sequence: Synthetic oligonucleotide
uuaguucaggcaaaauaag

SEQ ID NO: 1343909 - RNA, 19 nt, Artificial Sequence
  Description of Artificial Sequence: Synthetic oligonucleotide
agaguaauugccacaaugg

SEQ ID NO: 1343910 - RNA, 19 nt, Artificial Sequence
  Description of Artificial Sequence: Synthetic oligonucleotide
aaaggcuuagacuccugag

SEQ ID NO: 1343911 - RNA, 19 nt, Artificial Sequence
  Description of Artificial Sequence: Synthetic oligonucleotide
aauggaauugcugguauca

SEQ ID NO: 1343912 - RNA, 19 nt, Artificial Sequence
  Description of Artificial Sequence: Synthetic oligonucleotide
ugauaagccgcucacucug

SEQ ID NO: 1343913 - RNA, 19 nt, Artificial Sequence
  Description of Artificial Sequence: Synthetic oligonucleotide
ucuugaagcuauuaacucu

SEQ ID NO: 1343914 - RNA, 19 nt, Artificial Sequence
  Description of Artificial Sequence: Synthetic oligonucleotide
gaauccggcaccgagagcc

SEQ ID NO: 1343915 - RNA, 19 nt, Artificial Sequence
  Description of Artificial Sequence: Synthetic oligonucleotide
gcuuacuagaacuugcugg

SEQ ID NO: 1343916 - RNA, 19 nt, Artificial Sequence
  Description of Artificial Sequence: Synthetic oligonucleotide
uguuaucuuuguuagggac

SEQ ID NO: 1343917 - RNA, 19 nt, Artificial Sequence
  Description of Artificial Sequence: Synthetic oligonucleotide
cauagggaauuucacagag

SEQ ID NO: 1343918 - RNA, 19 nt, Artificial Sequence
  Description of Artificial Sequence: Synthetic oligonucleotide
agcuacuuacuuugcaugg

SEQ ID NO: 1343919 - RNA, 19 nt, Artificial Sequence
  Description of Artificial Sequence: Synthetic oligonucleotide
ucugauaagccgcucacuc

SEQ ID NO: 1343920 - RNA, 19 nt, Artificial Sequence
  Description of Artificial Sequence: Synthetic oligonucleotide
cuuaaggggucuuuccugg

SEQ ID NO: 1343921 - RNA, 19 nt, Artificial Sequence
  Description of Artificial Sequence: Synthetic oligonucleotide
cacuucgguaccaacaccg

SEQ ID NO: 1343922 - RNA, 19 nt, Artificial Sequence
  Description of Artificial Sequence: Synthetic oligonucleotide
uuuagcuacuuacuuugca

SEQ ID NO: 1343923 - RNA, 19 nt, Artificial Sequence
  Description of Artificial Sequence: Synthetic oligonucleotide
uggaauugcugguaucacg

SEQ ID NO: 1343924 - RNA, 19 nt, Artificial Sequence
  Description of Artificial Sequence: Synthetic oligonucleotide
accaacaccggacucacag

SEQ ID NO: 1343925 - RNA, 19 nt, Artificial Sequence
  Description of Artificial Sequence: Synthetic oligonucleotide
ucuuuguuagggaccauca

SEQ ID NO: 1343926 - RNA, 19 nt, Artificial Sequence
  Description of Artificial Sequence: Synthetic oligonucleotide
gaaaacucuuaacagccac

SEQ ID NO: 1343927 - RNA, 19 nt, Artificial Sequence
  Description of Artificial Sequence: Synthetic oligonucleotide
uagaauccggcaccgagag

SEQ ID NO: 1343928 - RNA, 19 nt, Artificial Sequence
  Description of Artificial Sequence: Synthetic oligonucleotide
aaacucuuaacagccacug

SEQ ID NO: 1343929 - RNA, 19 nt, Artificial Sequence
  Description of Artificial Sequence: Synthetic oligonucleotide
uggaccucgaacaauugga

SEQ ID NO: 1343930 - RNA, 19 nt, Artificial Sequence
  Description of Artificial Sequence: Synthetic oligonucleotide
ugucuguaaaagaguauug

SEQ ID NO: 1343931 - RNA, 19 nt, Artificial Sequence
  Description of Artificial Sequence: Synthetic oligonucleotide
aucaccaguuguuaucuuc

SEQ ID NO: 1343932 - RNA, 19 nt, Artificial Sequence
  Description of Artificial Sequence: Synthetic oligonucleotide
caaaagagcuucugguacg

SEQ ID NO: 1343933 - RNA, 19 nt, Artificial Sequence
  Description of Artificial Sequence: Synthetic oligonucleotide
ucugaagauuggcaguuug

SEQ ID NO: 1343934 - RNA, 19 nt, Artificial Sequence
  Description of Artificial Sequence: Synthetic oligonucleotide
ugauuggucuuugaggaag

SEQ ID NO: 1343935 - RNA, 19 nt, Artificial Sequence
  Description of Artificial Sequence: Synthetic oligonucleotide
uccuaaaccaaguucugac

SEQ ID NO: 1343936 - RNA, 19 nt, Artificial Sequence
  Description of Artificial Sequence: Synthetic oligonucleotide
ugagugagaggaagcaaag

SEQ ID NO: 1343937 - RNA, 19 nt, Artificial Sequence
  Description of Artificial Sequence: Synthetic oligonucleotide
uuccugaaguuuaagcucu

SEQ ID NO: 1343938 - RNA, 19 nt, Artificial Sequence
  Description of Artificial Sequence: Synthetic oligonucleotide
uuagggaccaucacuucug

SEQ ID NO: 1343939 - RNA, 19 nt, Artificial Sequence
  Description of Artificial Sequence: Synthetic oligonucleotide
ugagguauuacuuccuuua

SEQ ID NO: 1343940 - RNA, 19 nt, Artificial Sequence
  Description of Artificial Sequence: Synthetic oligonucleotide
uuucuuaucaccaguuguu

SEQ ID NO: 1343941 - RNA, 19 nt, Artificial Sequence
  Description of Artificial Sequence: Synthetic oligonucleotide
ucuguaaaagaguauugua

SEQ ID NO: 1343942 - RNA, 19 nt, Artificial Sequence
  Description of Artificial Sequence: Synthetic oligonucleotide
uccgaguagagauaccagc

SEQ ID NO: 1343943 - RNA, 19 nt, Artificial Sequence
  Description of Artificial Sequence: Synthetic oligonucleotide
ugaccgaaccuuaaggggu

SEQ ID NO: 1343944 - RNA, 19 nt, Artificial Sequence
  Description of Artificial Sequence: Synthetic oligonucleotide
aacucuuaacagccacugg

SEQ ID NO: 1343945 - RNA, 19 nt, Artificial Sequence
  Description of Artificial Sequence: Synthetic oligonucleotide
uuuaagcuuaccagcuuga

SEQ ID NO: 1343946 - RNA, 19 nt, Artificial Sequence
  Description of Artificial Sequence: Synthetic oligonucleotide
guauggugaacucuucucc

SEQ ID NO: 1343947 - RNA, 19 nt, Artificial Sequence
  Description of Artificial Sequence: Synthetic oligonucleotide
uuaucuuuguuagggacca

SEQ ID NO: 1343948 - RNA, 19 nt, Artificial Sequence
  Description of Artificial Sequence: Synthetic oligonucleotide
ucuucugauaagccgcuca

SEQ ID NO: 1343949 - RNA, 19 nt, Artificial Sequence
  Description of Artificial Sequence: Synthetic oligonucleotide
accggacucacagucaucc

SEQ ID NO: 1343950 - RNA, 19 nt, Artificial Sequence
  Description of Artificial Sequence: Synthetic oligonucleotide
uuagcuacuuacuuugcau

SEQ ID NO: 1343951 - RNA, 19 nt, Artificial Sequence
  Description of Artificial Sequence: Synthetic oligonucleotide
cugaccgaaccuuaagggg

SEQ ID NO: 1343952 - RNA, 19 nt, Artificial Sequence
  Description of Artificial Sequence: Synthetic oligonucleotide
gauaguaacaccauccgua

SEQ ID NO: 1343953 - RNA, 19 nt, Artificial Sequence
  Description of Artificial Sequence: Synthetic oligonucleotide
gaagauuggcaguuuggug

SEQ ID NO: 1343954 - RNA, 19 nt, Artificial Sequence
  Description of Artificial Sequence: Synthetic oligonucleotide
uuuccgaguagagauacca

SEQ ID NO: 1343955 - RNA, 19 nt, Artificial Sequence
  Description of Artificial Sequence: Synthetic oligonucleotide
cuuaucaccaguuguuauc

SEQ ID NO: 1343956 - RNA, 19 nt, Artificial Sequence
  Description of Artificial Sequence: Synthetic oligonucleotide
uguuaucuucccagguuag

SEQ ID NO: 1343957 - RNA, 19 nt, Artificial Sequence
  Description of Artificial Sequence: Synthetic oligonucleotide
uccucugagguaacaggcg

SEQ ID NO: 1343958 - RNA, 19 nt, Artificial Sequence
  Description of Artificial Sequence: Synthetic oligonucleotide
acgaaggcccaguaauacc

SEQ ID NO: 1343959 - RNA, 19 nt, Artificial Sequence
  Description of Artificial Sequence: Synthetic oligonucleotide
ugguacggggaacacaggc

SEQ ID NO: 1343960 - RNA, 19 nt, Artificial Sequence
  Description of Artificial Sequence: Synthetic oligonucleotide
cugaagauuggcaguuugg

SEQ ID NO: 1343961 - RNA, 19 nt, Artificial Sequence
  Description of Artificial Sequence: Synthetic oligonucleotide
uaauacucuuccuguaugu

SEQ ID NO: 1343962 - RNA, 19 nt, Artificial Sequence
  Description of Artificial Sequence: Synthetic oligonucleotide
uguauggugaacucuucuc

SEQ ID NO: 1343963 - RNA, 19 nt, Artificial Sequence
  Description of Artificial Sequence: Synthetic oligonucleotide
cuaacucaggaucuuguac

SEQ ID NO: 1343964 - RNA, 19 nt, Artificial Sequence
  Description of Artificial Sequence: Synthetic oligonucleotide
auggaccucgaacaauugg

SEQ ID NO: 1343965 - RNA, 19 nt, Artificial Sequence
  Description of Artificial Sequence: Synthetic oligonucleotide
gaccauaucugcaaaccag

SEQ ID NO: 1343966 - RNA, 19 nt, Artificial Sequence
  Description of Artificial Sequence: Synthetic oligonucleotide
aauuucacagagugagaaa

SEQ ID NO: 1343967 - RNA, 19 nt, Artificial Sequence
  Description of Artificial Sequence: Synthetic oligonucleotide
acgacuggaacagugcugg

SEQ ID NO: 1343968 - RNA, 19 nt, Artificial Sequence
  Description of Artificial Sequence: Synthetic oligonucleotide
uagcuacuuacuuugcaug

SEQ ID NO: 1343969 - RNA, 19 nt, Artificial Sequence
  Description of Artificial Sequence: Synthetic oligonucleotide
accucgaacaauuggagaa

SEQ ID NO: 1343970 - RNA, 19 nt, Artificial Sequence
  Description of Artificial Sequence: Synthetic oligonucleotide
aaacaccaacugguuaagc

SEQ ID NO: 1343971 - RNA, 19 nt, Artificial Sequence
  Description of Artificial Sequence: Synthetic oligonucleotide
cugagauuccauucauagg

SEQ ID NO: 1343972 - RNA, 19 nt, Artificial Sequence
  Description of Artificial Sequence: Synthetic oligonucleotide
ugagguaacaggcguggca

SEQ ID NO: 1343973 - RNA, 19 nt, Artificial Sequence
  Description of Artificial Sequence: Synthetic oligonucleotide
uguaugugcuuuccgagua

SEQ ID NO: 1343974 - RNA, 19 nt, Artificial Sequence
  Description of Artificial Sequence: Synthetic oligonucleotide
ugaagcuauuaacucuucu

SEQ ID NO: 1343975 - RNA, 19 nt, Artificial Sequence
  Description of Artificial Sequence: Synthetic oligonucleotide
acaucugagauuccauuca

SEQ ID NO: 1343976 - RNA, 19 nt, Artificial Sequence
  Description of Artificial Sequence: Synthetic oligonucleotide
uuuugaguuggcacagacu

SEQ ID NO: 1343977 - RNA, 19 nt, Artificial Sequence
  Description of Artificial Sequence: Synthetic oligonucleotide
guuaucuuuguuagggacc

SEQ ID NO: 1343978 - RNA, 19 nt, Artificial Sequence
  Description of Artificial Sequence: Synthetic oligonucleotide
uagagauaccagcaccgcc

SEQ ID NO: 1343979 - RNA, 19 nt, Artificial Sequence
  Description of Artificial Sequence: Synthetic oligonucleotide
agaauuauuccugaaguuu

SEQ ID NO: 1343980 - RNA, 19 nt, Artificial Sequence
  Description of Artificial Sequence: Synthetic oligonucleotide
uauuaacucuucugauaag

SEQ ID NO: 1343981 - RNA, 19 nt, Artificial Sequence
  Description of Artificial Sequence: Synthetic oligonucleotide
aauugccacaauggaauug

SEQ ID NO: 1343982 - RNA, 19 nt, Artificial Sequence
  Description of Artificial Sequence: Synthetic oligonucleotide
ugaagauuggcaguuuggu

SEQ ID NO: 1343983 - RNA, 19 nt, Artificial Sequence
  Description of Artificial Sequence: Synthetic oligonucleotide
ggcaaaauaaggaaaguac

SEQ ID NO: 1343984 - RNA, 19 nt, Artificial Sequence
  Description of Artificial Sequence: Synthetic oligonucleotide
uacgaagaguaauugccac

SEQ ID NO: 1343985 - RNA, 19 nt, Artificial Sequence
  Description of Artificial Sequence: Synthetic oligonucleotide
gggaccaucacuucugucc

SEQ ID NO: 1343986 - RNA, 19 nt, Artificial Sequence
  Description of Artificial Sequence: Synthetic oligonucleotide
agucuugaagcuauuaacu

SEQ ID NO: 1343987 - RNA, 19 nt, Artificial Sequence
  Description of Artificial Sequence: Synthetic oligonucleotide
acuggaacagugcuggcga

SEQ ID NO: 1343988 - RNA, 19 nt, Artificial Sequence
  Description of Artificial Sequence: Synthetic oligonucleotide
ugguuaagcagaagaggca

SEQ ID NO: 1343989 - RNA, 19 nt, Artificial Sequence
  Description of Artificial Sequence: Synthetic oligonucleotide
uuaucuucccagguuagcu

SEQ ID NO: 1343990 - RNA, 19 nt, Artificial Sequence
  Description of Artificial Sequence: Synthetic oligonucleotide
uucacagagugagaaaacu

SEQ ID NO: 1343991 - RNA, 19 nt, Artificial Sequence
  Description of Artificial Sequence: Synthetic oligonucleotide
uuguauggugaacucuucu

SEQ ID NO: 1343992 - RNA, 19 nt, Artificial Sequence
  Description of Artificial Sequence: Synthetic oligonucleotide
gaugugggauaguaacacc

SEQ ID NO: 1343993 - RNA, 19 nt, Artificial Sequence
  Description of Artificial Sequence: Synthetic oligonucleotide
aaucacgacuggaacagug

SEQ ID NO: 1343994 - RNA, 19 nt, Artificial Sequence
  Description of Artificial Sequence: Synthetic oligonucleotide
agaguauuguaauacucuu

SEQ ID NO: 1343995 - RNA, 19 nt, Artificial Sequence
  Description of Artificial Sequence: Synthetic oligonucleotide
aguaccugaaggcuuaauu

SEQ ID NO: 1343996 - RNA, 19 nt, Artificial Sequence
  Description of Artificial Sequence: Synthetic oligonucleotide
aggaaucacgacuggaaca

SEQ ID NO: 1343997 - RNA, 19 nt, Artificial Sequence
  Description of Artificial Sequence: Synthetic oligonucleotide
ucgaugugggauaguaaca

SEQ ID NO: 1343998 - RNA, 19 nt, Artificial Sequence
  Description of Artificial Sequence: Synthetic oligonucleotide
ugggaaguucccuuugucu

SEQ ID NO: 1343999 - RNA, 19 nt, Artificial Sequence
  Description of Artificial Sequence: Synthetic oligonucleotide
uaaaccaaguucugaccga

SEQ ID NO: 1344000 - RNA, 19 nt, Artificial Sequence
  Description of Artificial Sequence: Synthetic oligonucleotide
aagcaaagcugcagugugc

SEQ ID NO: 1344001 - RNA, 19 nt, Artificial Sequence
  Description of Artificial Sequence: Synthetic oligonucleotide
cacaaguuuaagcuuacca

SEQ ID NO: 1344002 - RNA, 19 nt, Artificial Sequence
  Description of Artificial Sequence: Synthetic oligonucleotide
ugguuugacuuccccacgc

SEQ ID NO: 1344003 - RNA, 19 nt, Artificial Sequence
  Description of Artificial Sequence: Synthetic oligonucleotide
gcuacgaagaguaauugcc

SEQ ID NO: 1344004 - RNA, 19 nt, Artificial Sequence
  Description of Artificial Sequence: Synthetic oligonucleotide
caggcuuacuagaacuugc

SEQ ID NO: 1344005 - RNA, 19 nt, Artificial Sequence
  Description of Artificial Sequence: Synthetic oligonucleotide
uccuccuagaauccggcac

SEQ ID NO: 1344006 - RNA, 19 nt, Artificial Sequence
  Description of Artificial Sequence: Synthetic oligonucleotide
aguuguuaucuucccaggu

SEQ ID NO: 1344007 - RNA, 19 nt, Artificial Sequence
  Description of Artificial Sequence: Synthetic oligonucleotide
uuugugguuuuacauccau

SEQ ID NO: 1344008 - RNA, 19 nt, Artificial Sequence
  Description of Artificial Sequence: Synthetic oligonucleotide
aguaauaccuguggcaaga

SEQ ID NO: 1344009 - RNA, 19 nt, Artificial Sequence
  Description of Artificial Sequence: Synthetic oligonucleotide
uaagcuuaccagcuugaau

SEQ ID NO: 1344010 - RNA, 19 nt, Artificial Sequence
  Description of Artificial Sequence: Synthetic oligonucleotide
aguucacuucgguaccaac

SEQ ID NO: 1344011 - RNA, 19 nt, Artificial Sequence
  Description of Artificial Sequence: Synthetic oligonucleotide
ucugggaccauaucugcaa

SEQ ID NO: 1344012 - RNA, 19 nt, Artificial Sequence
  Description of Artificial Sequence: Synthetic oligonucleotide
caaaauaaggaaaguaccu

SEQ ID NO: 1344013 - RNA, 19 nt, Artificial Sequence
  Description of Artificial Sequence: Synthetic oligonucleotide
aagcaagcaaggagucucc

SEQ ID NO: 1344014 - RNA, 19 nt, Artificial Sequence
  Description of Artificial Sequence: Synthetic oligonucleotide
ucuccuaaaccaaguucug

SEQ ID NO: 1344015 - RNA, 19 nt, Artificial Sequence
  Description of Artificial Sequence: Synthetic oligonucleotide
uugcuuugagguauuacuu

SEQ ID NO: 1344016 - RNA, 19 nt, Artificial Sequence
  Description of Artificial Sequence: Synthetic oligonucleotide
uugugguuuuacauccaug

SEQ ID NO: 1344017 - RNA, 19 nt, Artificial Sequence
  Description of Artificial Sequence: Synthetic oligonucleotide
gguuuuacauccaugcagc

SEQ ID NO: 1344018 - RNA, 19 nt, Artificial Sequence
  Description of Artificial Sequence: Synthetic oligonucleotide
aacugcaucacuggugaga

SEQ ID NO: 1344019 - RNA, 19 nt, Artificial Sequence
  Description of Artificial Sequence: Synthetic oligonucleotide
ucacgacuggaacagugcu

SEQ ID NO: 1344020 - RNA, 19 nt, Artificial Sequence
  Description of Artificial Sequence: Synthetic oligonucleotide
aucuuuguuagggaccauc

SEQ ID NO: 1344021 - RNA, 19 nt, Artificial Sequence
  Description of Artificial Sequence: Synthetic oligonucleotide
gucuugaagcuauuaacuc

SEQ ID NO: 1344022 - RNA, 19 nt, Artificial Sequence
  Description of Artificial Sequence: Synthetic oligonucleotide
gauuggucuuugaggaagg

SEQ ID NO: 1344023 - RNA, 19 nt, Artificial Sequence
  Description of Artificial Sequence: Synthetic oligonucleotide
caauuggagaagcacagga

SEQ ID NO: 1344024 - RNA, 19 nt, Artificial Sequence
  Description of Artificial Sequence: Synthetic oligonucleotide
uuaaggggucuuuccuggg

SEQ ID NO: 1344025 - RNA, 19 nt, Artificial Sequence
  Description of Artificial Sequence: Synthetic oligonucleotide
gggauaguaacaccauccg

SEQ ID NO: 1344026 - RNA, 19 nt, Artificial Sequence
  Description of Artificial Sequence: Synthetic oligonucleotide
auaggcaucgaugugggau

SEQ ID NO: 1344027 - RNA, 19 nt, Artificial Sequence
  Description of Artificial Sequence: Synthetic oligonucleotide
ggcgaaagcaagcaaggag

SEQ ID NO: 1344028 - RNA, 19 nt, Artificial Sequence
  Description of Artificial Sequence: Synthetic oligonucleotide
gaucaccugucuguaaaag

SEQ ID NO: 1344029 - RNA, 19 nt, Artificial Sequence
  Description of Artificial Sequence: Synthetic oligonucleotide
guacggggaacacaggcug

SEQ ID NO: 1344030 - RNA, 19 nt, Artificial Sequence
  Description of Artificial Sequence: Synthetic oligonucleotide
ucgaacaauuggagaagca

SEQ ID NO: 1344031 - RNA, 19 nt, Artificial Sequence
  Description of Artificial Sequence: Synthetic oligonucleotide
ucuuaucaccaguuguuau

SEQ ID NO: 1344032 - RNA, 19 nt, Artificial Sequence
  Description of Artificial Sequence: Synthetic oligonucleotide
caaaccagucuaacucagg

SEQ ID NO: 1344033 - RNA, 19 nt, Artificial Sequence
  Description of Artificial Sequence: Synthetic oligonucleotide
caguuguuaucuucccagg

SEQ ID NO: 1344034 - RNA, 19 nt, Artificial Sequence
  Description of Artificial Sequence: Synthetic oligonucleotide
ggaaucacgacuggaacag

SEQ ID NO: 1344035 - RNA, 19 nt, Artificial Sequence
  Description of Artificial Sequence: Synthetic oligonucleotide
agagauaccagcaccgcca

SEQ ID NO: 1344036 - RNA, 19 nt, Artificial Sequence
  Description of Artificial Sequence: Synthetic oligonucleotide
agcuauuaacucuucugau

SEQ ID NO: 1344037 - RNA, 19 nt, Artificial Sequence
  Description of Artificial Sequence: Synthetic oligonucleotide
cagguuagcucuucuuccc

SEQ ID NO: 1344038 - RNA, 19 nt, Artificial Sequence
  Description of Artificial Sequence: Synthetic oligonucleotide
agcaaggagucuccccugg

SEQ ID NO: 1344039 - RNA, 19 nt, Artificial Sequence
  Description of Artificial Sequence: Synthetic oligonucleotide
guaaaagaguauuguaaua

SEQ ID NO: 1344040 - RNA, 19 nt, Artificial Sequence
  Description of Artificial Sequence: Synthetic oligonucleotide
cagagugagaaaacugauc

SEQ ID NO: 1344041 - RNA, 19 nt, Artificial Sequence
  Description of Artificial Sequence: Synthetic oligonucleotide
ucuaacucaggaucuugua

SEQ ID NO: 1344042 - RNA, 19 nt, Artificial Sequence
  Description of Artificial Sequence: Synthetic oligonucleotide
uuacuuugcaugggaaacu

SEQ ID NO: 1344043 - RNA, 19 nt, Artificial Sequence
  Description of Artificial Sequence: Synthetic oligonucleotide
accuuaaggggucuuuccu

SEQ ID NO: 1344044 - RNA, 19 nt, Artificial Sequence
  Description of Artificial Sequence: Synthetic oligonucleotide
cuucugauaagccgcucac

SEQ ID NO: 1344045 - RNA, 19 nt, Artificial Sequence
  Description of Artificial Sequence: Synthetic oligonucleotide
uugcugguaucacgaaggc

SEQ ID NO: 1344046 - RNA, 19 nt, Artificial Sequence
  Description of Artificial Sequence: Synthetic oligonucleotide
acgaagaguaauugccaca

SEQ ID NO: 1344047 - RNA, 19 nt, Artificial Sequence
  Description of Artificial Sequence: Synthetic oligonucleotide
guaauugccacaauggaau

SEQ ID NO: 1344048 - RNA, 19 nt, Artificial Sequence
  Description of Artificial Sequence: Synthetic oligonucleotide
acaauuggagaagcacagg

SEQ ID NO: 1344049 - RNA, 19 nt, Artificial Sequence
  Description of Artificial Sequence: Synthetic oligonucleotide
aacaccauccguacaugcu

SEQ ID NO: 1344050 - RNA, 19 nt, Artificial Sequence
  Description of Artificial Sequence: Synthetic oligonucleotide
uugacuuccccacgcugca

SEQ ID NO: 1344051 - RNA, 19 nt, Artificial Sequence
  Description of Artificial Sequence: Synthetic oligonucleotide
ucacuucgguaccaacacc

SEQ ID NO: 1344052 - RNA, 19 nt, Artificial Sequence
  Description of Artificial Sequence: Synthetic oligonucleotide
caggaaucacgacuggaac

SEQ ID NO: 1344053 - RNA, 19 nt, Artificial Sequence
  Description of Artificial Sequence: Synthetic oligonucleotide
cuacgaagaguaauugcca

SEQ ID NO: 1344054 - RNA, 19 nt, Artificial Sequence
  Description of Artificial Sequence: Synthetic oligonucleotide
uaacaggcguggcagcaga

SEQ ID NO: 1344055 - RNA, 19 nt, Artificial Sequence
  Description of Artificial Sequence: Synthetic oligonucleotide
guucugaccgaaccuuaag

SEQ ID NO: 1344056 - RNA, 19 nt, Artificial Sequence
  Description of Artificial Sequence: Synthetic oligonucleotide
gagauaccagcaccgccag

SEQ ID NO: 1344057 - RNA, 19 nt, Artificial Sequence
  Description of Artificial Sequence: Synthetic oligonucleotide
caacaccggacucacaguc

SEQ ID NO: 1344058 - RNA, 19 nt, Artificial Sequence
  Description of Artificial Sequence: Synthetic oligonucleotide
aaaccaaguucugaccgaa

SEQ ID NO: 1344059 - RNA, 19 nt, Artificial Sequence
  Description of Artificial Sequence: Synthetic oligonucleotide
ugcuuggggccuuaucuga

SEQ ID NO: 1344060 - RNA, 19 nt, Artificial Sequence
  Description of Artificial Sequence: Synthetic oligonucleotide
uacuuguauggugaacucu

SEQ ID NO: 1344061 - RNA, 19 nt, Artificial Sequence
  Description of Artificial Sequence: Synthetic oligonucleotide
uguccuuaguucaggcaaa

SEQ ID NO: 1344062 - RNA, 19 nt, Artificial Sequence
  Description of Artificial Sequence: Synthetic oligonucleotide
auaagccgcucacucuguc

SEQ ID NO: 1344063 - RNA, 19 nt, Artificial Sequence
  Description of Artificial Sequence: Synthetic oligonucleotide
cucgaacaauuggagaagc

SEQ ID NO: 1344064 - RNA, 19 nt, Artificial Sequence
  Description of Artificial Sequence: Synthetic oligonucleotide
agauuccauucauagggaa

SEQ ID NO: 1344065 - RNA, 19 nt, Artificial Sequence
  Description of Artificial Sequence: Synthetic oligonucleotide
aacucuucuccuaaaccaa

SEQ ID NO: 1344066 - RNA, 19 nt, Artificial Sequence
  Description of Artificial Sequence: Synthetic oligonucleotide
uaucugaagauuggcaguu

SEQ ID NO: 1344067 - RNA, 19 nt, Artificial Sequence
  Description of Artificial Sequence: Synthetic oligonucleotide
uaucacgaaggcccaguaa

SEQ ID NO: 1344068 - RNA, 19 nt, Artificial Sequence
  Description of Artificial Sequence: Synthetic oligonucleotide
ggcacagacugcaaaagag

SEQ ID NO: 1344069 - RNA, 19 nt, Artificial Sequence
  Description of Artificial Sequence: Synthetic oligonucleotide
uaugugcuuuccgaguaga

SEQ ID NO: 1344070 - RNA, 19 nt, Artificial Sequence
  Description of Artificial Sequence: Synthetic oligonucleotide
gugaacucuucuccuaaac

SEQ ID NO: 1344071 - RNA, 19 nt, Artificial Sequence
  Description of Artificial Sequence: Synthetic oligonucleotide
uaguaacaccauccguaca

SEQ ID NO: 1344072 - RNA, 19 nt, Artificial Sequence
  Description of Artificial Sequence: Synthetic oligonucleotide
ucuuuacuuccagaauugu

SEQ ID NO: 1344073 - RNA, 19 nt, Artificial Sequence
  Description of Artificial Sequence: Synthetic oligonucleotide
guaugugcuuuccgaguag

SEQ ID NO: 1344074 - RNA, 19 nt, Artificial Sequence
  Description of Artificial Sequence: Synthetic oligonucleotide
uucuggugguuugacuucc

SEQ ID NO: 1344075 - RNA, 19 nt, Artificial Sequence
  Description of Artificial Sequence: Synthetic oligonucleotide
cuguccuuaguucaggcaa

SEQ ID NO: 1344076 - RNA, 19 nt, Artificial Sequence
  Description of Artificial Sequence: Synthetic oligonucleotide
uggcaagaugacuuucuuc

SEQ ID NO: 1344077 - RNA, 19 nt, Artificial Sequence
  Description of Artificial Sequence: Synthetic oligonucleotide
agaaauggcacaaguuuaa

SEQ ID NO: 1344078 - RNA, 19 nt, Artificial Sequence
  Description of Artificial Sequence: Synthetic oligonucleotide
ccuaaaccaaguucugacc

SEQ ID NO: 1344079 - RNA, 19 nt, Artificial Sequence
  Description of Artificial Sequence: Synthetic oligonucleotide
agaauccggcaccgagagc

SEQ ID NO: 1344080 - RNA, 19 nt, Artificial Sequence
  Description of Artificial Sequence: Synthetic oligonucleotide
uuuuacauccaugcagcuu

SEQ ID NO: 1344081 - RNA, 19 nt, Artificial Sequence
  Description of Artificial Sequence: Synthetic oligonucleotide
gugguuugacuuccccacg

SEQ ID NO: 1344082 - RNA, 19 nt, Artificial Sequence
  Description of Artificial Sequence: Synthetic oligonucleotide
ugaucaccugucuguaaaa

SEQ ID NO: 1344083 - RNA, 19 nt, Artificial Sequence
  Description of Artificial Sequence: Synthetic oligonucleotide
uaggcaucgaugugggaua

SEQ ID NO: 1344084 - RNA, 19 nt, Artificial Sequence
  Description of Artificial Sequence: Synthetic oligonucleotide
ggcccaguaauaccugugg

SEQ ID NO: 1344085 - RNA, 19 nt, Artificial Sequence
  Description of Artificial Sequence: Synthetic oligonucleotide
ugcauaugauuggucuuug

SEQ ID NO: 1344086 - RNA, 19 nt, Artificial Sequence
  Description of Artificial Sequence: Synthetic oligonucleotide
cuuggggccuuaucugaag

SEQ ID NO: 1344087 - RNA, 19 nt, Artificial Sequence
  Description of Artificial Sequence: Synthetic oligonucleotide
gaccucgaacaauuggaga

SEQ ID NO: 1344088 - RNA, 19 nt, Artificial Sequence
  Description of Artificial Sequence: Synthetic oligonucleotide
caguaauaccuguggcaag

SEQ ID NO: 1344089 - RNA, 19 nt, Artificial Sequence
  Description of Artificial Sequence: Synthetic oligonucleotide
accauaucugcaaaccagu

SEQ ID NO: 1344090 - RNA, 19 nt, Artificial Sequence
  Description of Artificial Sequence: Synthetic oligonucleotide
agcaaacaccaacugguua

SEQ ID NO: 1344091 - RNA, 19 nt, Artificial Sequence
  Description of Artificial Sequence: Synthetic oligonucleotide
acuuguauggugaacucuu

SEQ ID NO: 1344092 - RNA, 19 nt, Artificial Sequence
  Description of Artificial Sequence: Synthetic oligonucleotide
ggaauugcugguaucacga

SEQ ID NO: 1344093 - RNA, 19 nt, Artificial Sequence
  Description of Artificial Sequence: Synthetic oligonucleotide
ggcuacgaagaguaauugc

SEQ ID NO: 1344094 - RNA, 19 nt, Artificial Sequence
  Description of Artificial Sequence: Synthetic oligonucleotide
uucuuaucaccaguuguua

SEQ ID NO: 1344095 - RNA, 19 nt, Artificial Sequence
  Description of Artificial Sequence: Synthetic oligonucleotide
ugggaccauaucugcaaac

SEQ ID NO: 1344096 - RNA, 19 nt, Artificial Sequence
  Description of Artificial Sequence: Synthetic oligonucleotide
uacggggaacacaggcugc

SEQ ID NO: 1344097 - RNA, 19 nt, Artificial Sequence
  Description of Artificial Sequence: Synthetic oligonucleotide
aguuuaagcuuaccagcuu

SEQ ID NO: 1344098 - RNA, 19 nt, Artificial Sequence
  Description of Artificial Sequence: Synthetic oligonucleotide
ccagguuagcucuucuucc

SEQ ID NO: 1344099 - RNA, 19 nt, Artificial Sequence
  Description of Artificial Sequence: Synthetic oligonucleotide
gaaaguaccugaaggcuua

SEQ ID NO: 1344100 - RNA, 19 nt, Artificial Sequence
  Description of Artificial Sequence: Synthetic oligonucleotide
gaacagugcuggcgaaagc

SEQ ID NO: 1344101 - RNA, 19 nt, Artificial Sequence
  Description of Artificial Sequence: Synthetic oligonucleotide
guuaucuucccagguuagc

SEQ ID NO: 1344102 - RNA, 19 nt, Artificial Sequence
  Description of Artificial Sequence: Synthetic oligonucleotide
uuaagcuuaccagcuugaa

SEQ ID NO: 1344103 - RNA, 19 nt, Artificial Sequence
  Description of Artificial Sequence: Synthetic oligonucleotide
uguuagggaccaucacuuc

SEQ ID NO: 1344104 - RNA, 19 nt, Artificial Sequence
  Description of Artificial Sequence: Synthetic oligonucleotide
cacgaaggcccaguaauac

SEQ ID NO: 1344105 - RNA, 19 nt, Artificial Sequence
  Description of Artificial Sequence: Synthetic oligonucleotide
ucuggugguuugacuuccc

SEQ ID NO: 1344106 - RNA, 19 nt, Artificial Sequence
  Description of Artificial Sequence: Synthetic oligonucleotide
cuuuccgaguagagauacc

SEQ ID NO: 1344107 - RNA, 19 nt, Artificial Sequence
  Description of Artificial Sequence: Synthetic oligonucleotide
cacgacuggaacagugcug

SEQ ID NO: 1344108 - RNA, 19 nt, Artificial Sequence
  Description of Artificial Sequence: Synthetic oligonucleotide
caauggaauugcugguauc

SEQ ID NO: 1344109 - RNA, 19 nt, Artificial Sequence
  Description of Artificial Sequence: Synthetic oligonucleotide
uaauugccacaauggaauu

SEQ ID NO: 1344110 - RNA, 19 nt, Artificial Sequence
  Description of Artificial Sequence: Synthetic oligonucleotide
ggcaccgagagccuucugc

SEQ ID NO: 1344111 - RNA, 19 nt, Artificial Sequence
  Description of Artificial Sequence: Synthetic oligonucleotide
cacagacugcaaaagagcu

SEQ ID NO: 1344112 - RNA, 19 nt, Artificial Sequence
  Description of Artificial Sequence: Synthetic oligonucleotide
guuagggaccaucacuucu

SEQ ID NO: 1344113 - RNA, 19 nt, Artificial Sequence
  Description of Artificial Sequence: Synthetic oligonucleotide
gaaccuuaaggggucuuuc

SEQ ID NO: 1344114 - RNA, 19 nt, Artificial Sequence
  Description of Artificial Sequence: Synthetic oligonucleotide
cuugaagcuauuaacucuu

SEQ ID NO: 1344115 - RNA, 19 nt, Artificial Sequence
  Description of Artificial Sequence: Synthetic oligonucleotide
ccuagaauccggcaccgag

SEQ ID NO: 1344116 - RNA, 19 nt, Artificial Sequence
  Description of Artificial Sequence: Synthetic oligonucleotide
ggcuuagucagcaacuuga

SEQ ID NO: 1344117 - RNA, 19 nt, Artificial Sequence
  Description of Artificial Sequence: Synthetic oligonucleotide
cugaucaccugucuguaaa

SEQ ID NO: 1344118 - RNA, 19 nt, Artificial Sequence
  Description of Artificial Sequence: Synthetic oligonucleotide
cauggaccucgaacaauug

SEQ ID NO: 1344119 - RNA, 19 nt, Artificial Sequence
  Description of Artificial Sequence: Synthetic oligonucleotide
acaccggacucacagucau

SEQ ID NO: 1344120 - RNA, 19 nt, Artificial Sequence
  Description of Artificial Sequence: Synthetic oligonucleotide
uucugauaagccgcucacu

SEQ ID NO: 1344121 - RNA, 19 nt, Artificial Sequence
  Description of Artificial Sequence: Synthetic oligonucleotide
acuucgguaccaacaccgg

SEQ ID NO: 1344122 - RNA, 19 nt, Artificial Sequence
  Description of Artificial Sequence: Synthetic oligonucleotide
agcuuaccagcuugaauuu

SEQ ID NO: 1344123 - RNA, 19 nt, Artificial Sequence
  Description of Artificial Sequence: Synthetic oligonucleotide
auagggaagaaaacucuua

SEQ ID NO: 1344124 - RNA, 19 nt, Artificial Sequence
  Description of Artificial Sequence: Synthetic oligonucleotide
caaaggcuuagacuccuga

SEQ ID NO: 1344125 - RNA, 19 nt, Artificial Sequence
  Description of Artificial Sequence: Synthetic oligonucleotide
gcuauuaacucuucugaua

SEQ ID NO: 1344126 - RNA, 19 nt, Artificial Sequence
  Description of Artificial Sequence: Synthetic oligonucleotide
aacugaucaccugucugua

SEQ ID NO: 1344127 - RNA, 19 nt, Artificial Sequence
  Description of Artificial Sequence: Synthetic oligonucleotide
acagagugagaaaacugau

SEQ ID NO: 1344128 - RNA, 19 nt, Artificial Sequence
  Description of Artificial Sequence: Synthetic oligonucleotide
cuuaauuucugggaccaua

SEQ ID NO: 1344129 - RNA, 19 nt, Artificial Sequence
  Description of Artificial Sequence: Synthetic oligonucleotide
uucugguacggggaacaca

SEQ ID NO: 1344130 - RNA, 19 nt, Artificial Sequence
  Description of Artificial Sequence: Synthetic oligonucleotide
aacaccggacucacaguca

SEQ ID NO: 1344131 - RNA, 19 nt, Artificial Sequence
  Description of Artificial Sequence: Synthetic oligonucleotide
aggcuacgaagaguaauug

SEQ ID NO: 1344132 - RNA, 19 nt, Artificial Sequence
  Description of Artificial Sequence: Synthetic oligonucleotide
agcagaacuuuggaaaauu

SEQ ID NO: 1344133 - RNA, 19 nt, Artificial Sequence
  Description of Artificial Sequence: Synthetic oligonucleotide
ugcuuuccgaguagagaua

SEQ ID NO: 1344134 - RNA, 19 nt, Artificial Sequence
  Description of Artificial Sequence: Synthetic oligonucleotide
uccguacaugcuccucaug

SEQ ID NO: 1344135 - RNA, 19 nt, Artificial Sequence
  Description of Artificial Sequence: Synthetic oligonucleotide
ugcagcuugcuuugaggua

SEQ ID NO: 1344136 - RNA, 19 nt, Artificial Sequence
  Description of Artificial Sequence: Synthetic oligonucleotide
guaacaccauccguacaug

SEQ ID NO: 1344137 - RNA, 19 nt, Artificial Sequence
  Description of Artificial Sequence: Synthetic oligonucleotide
gucuguaaaagaguauugu

SEQ ID NO: 1344138 - RNA, 19 nt, Artificial Sequence
  Description of Artificial Sequence: Synthetic oligonucleotide
cucuuccuccuagaauccg

SEQ ID NO: 1344139 - RNA, 19 nt, Artificial Sequence
  Description of Artificial Sequence: Synthetic oligonucleotide
accuguggcaagaugacuu

SEQ ID NO: 1344140 - RNA, 19 nt, Artificial Sequence
  Description of Artificial Sequence: Synthetic oligonucleotide
accugucuguaaaagagua

SEQ ID NO: 1344141 - RNA, 19 nt, Artificial Sequence
  Description of Artificial Sequence: Synthetic oligonucleotide
cccacgcugcauaugauug

SEQ ID NO: 1344142 - RNA, 19 nt, Artificial Sequence
  Description of Artificial Sequence: Synthetic oligonucleotide
cuccuagaauccggcaccg

SEQ ID NO: 1344143 - RNA, 19 nt, Artificial Sequence
  Description of Artificial Sequence: Synthetic oligonucleotide
uggggccuuaucugaagau

SEQ ID NO: 1344144 - RNA, 19 nt, Artificial Sequence
  Description of Artificial Sequence: Synthetic oligonucleotide
agcaccgccaggcuacgaa

SEQ ID NO: 1344145 - RNA, 19 nt, Artificial Sequence
  Description of Artificial Sequence: Synthetic oligonucleotide
ugcuggcgaaagcaagcaa

SEQ ID NO: 1344146 - RNA, 19 nt, Artificial Sequence
  Description of Artificial Sequence: Synthetic oligonucleotide
ccuuaaggggucuuuccug

SEQ ID NO: 1344147 - RNA, 19 nt, Artificial Sequence
  Description of Artificial Sequence: Synthetic oligonucleotide
gcaccgagagccuucugcc

SEQ ID NO: 1344148 - RNA, 19 nt, Artificial Sequence
  Description of Artificial Sequence: Synthetic oligonucleotide
acugaucaccugucuguaa

SEQ ID NO: 1344149 - RNA, 19 nt, Artificial Sequence
  Description of Artificial Sequence: Synthetic oligonucleotide
aacuugagauuggucucau

SEQ ID NO: 1344150 - RNA, 19 nt, Artificial Sequence
  Description of Artificial Sequence: Synthetic oligonucleotide
uggcgaaagcaagcaagga

SEQ ID NO: 1344151 - RNA, 19 nt, Artificial Sequence
  Description of Artificial Sequence: Synthetic oligonucleotide
guaacaggcguggcagcag

SEQ ID NO: 1344152 - RNA, 19 nt, Artificial Sequence
  Description of Artificial Sequence: Synthetic oligonucleotide
ggaccauaucugcaaacca

SEQ ID NO: 1344153 - RNA, 19 nt, Artificial Sequence
  Description of Artificial Sequence: Synthetic oligonucleotide
auagggaauuucacagagu

SEQ ID NO: 1344154 - RNA, 19 nt, Artificial Sequence
  Description of Artificial Sequence: Synthetic oligonucleotide
ggaccucgaacaauuggag

SEQ ID NO: 1344155 - RNA, 19 nt, Artificial Sequence
  Description of Artificial Sequence: Synthetic oligonucleotide
gacacuucuggugguuuga

SEQ ID NO: 1344156 - RNA, 19 nt, Artificial Sequence
  Description of Artificial Sequence: Synthetic oligonucleotide
gguaccaacaccggacuca

SEQ ID NO: 1344157 - RNA, 19 nt, Artificial Sequence
  Description of Artificial Sequence: Synthetic oligonucleotide
aacaggcguggcagcagag

SEQ ID NO: 1344158 - RNA, 19 nt, Artificial Sequence
  Description of Artificial Sequence: Synthetic oligonucleotide
guaccaacaccggacucac

SEQ ID NO: 1344159 - RNA, 19 nt, Artificial Sequence
  Description of Artificial Sequence: Synthetic oligonucleotide
ggccuuaucugaagauugg

SEQ ID NO: 1344160 - RNA, 19 nt, Artificial Sequence
  Description of Artificial Sequence: Synthetic oligonucleotide
aggcuuacuagaacuugcu

SEQ ID NO: 1344161 - RNA, 19 nt, Artificial Sequence
  Description of Artificial Sequence: Synthetic oligonucleotide
gcuuuccgaguagagauac

SEQ ID NO: 1344162 - RNA, 19 nt, Artificial Sequence
  Description of Artificial Sequence: Synthetic oligonucleotide
gauuccauucauagggaau

SEQ ID NO: 1344163 - RNA, 19 nt, Artificial Sequence
  Description of Artificial Sequence: Synthetic oligonucleotide
auaccagcaccgccaggcu

SEQ ID NO: 1344164 - RNA, 19 nt, Artificial Sequence
  Description of Artificial Sequence: Synthetic oligonucleotide
augugcuuuccgaguagag

SEQ ID NO: 1344165 - RNA, 19 nt, Artificial Sequence
  Description of Artificial Sequence: Synthetic oligonucleotide
agaguucacuucgguacca

SEQ ID NO: 1344166 - RNA, 19 nt, Artificial Sequence
  Description of Artificial Sequence: Synthetic oligonucleotide
cacagaguucacuucggua

SEQ ID NO: 1344167 - RNA, 19 nt, Artificial Sequence
  Description of Artificial Sequence: Synthetic oligonucleotide
gcaaaccagucuaacucag

SEQ ID NO: 1344168 - RNA, 19 nt, Artificial Sequence
  Description of Artificial Sequence: Synthetic oligonucleotide
cugguacggggaacacagg

SEQ ID NO: 1344169 - RNA, 19 nt, Artificial Sequence
  Description of Artificial Sequence: Synthetic oligonucleotide
cuucgguaccaacaccgga

SEQ ID NO: 1344170 - RNA, 19 nt, Artificial Sequence
  Description of Artificial Sequence: Synthetic oligonucleotide
gaccgaaccuuaagggguc

SEQ ID NO: 1344171 - RNA, 19 nt, Artificial Sequence
  Description of Artificial Sequence: Synthetic oligonucleotide
ccgaguagagauaccagca

SEQ ID NO: 1344172 - RNA, 19 nt, Artificial Sequence
  Description of Artificial Sequence: Synthetic oligonucleotide
aaguaccugaaggcuuaau

SEQ ID NO: 1344173 - RNA, 19 nt, Artificial Sequence
  Description of Artificial Sequence: Synthetic oligonucleotide
cccagguuagcucuucuuc

SEQ ID NO: 1344174 - RNA, 19 nt, Artificial Sequence
  Description of Artificial Sequence: Synthetic oligonucleotide
gcccaguaauaccuguggc

SEQ ID NO: 1344175 - RNA, 19 nt, Artificial Sequence
  Description of Artificial Sequence: Synthetic oligonucleotide
caucgaugugggauaguaa

SEQ ID NO: 1344176 - RNA, 19 nt, Artificial Sequence
  Description of Artificial Sequence: Synthetic oligonucleotide
uccggcaccgagagccuuc

SEQ ID NO: 1344177 - RNA, 19 nt, Artificial Sequence
  Description of Artificial Sequence: Synthetic oligonucleotide
ccauaucugcaaaccaguc

SEQ ID NO: 1344178 - RNA, 19 nt, Artificial Sequence
  Description of Artificial Sequence: Synthetic oligonucleotide
cuccuaaaccaaguucuga

SEQ ID NO: 1344179 - RNA, 19 nt, Artificial Sequence
  Description of Artificial Sequence: Synthetic oligonucleotide
uccuuaguucaggcaaaau

SEQ ID NO: 1344180 - RNA, 19 nt, Artificial Sequence
  Description of Artificial Sequence: Synthetic oligonucleotide
ccagggcuuagucagcaac

SEQ ID NO: 1344181 - RNA, 19 nt, Artificial Sequence
  Description of Artificial Sequence: Synthetic oligonucleotide
gcgaaagcaagcaaggagu

SEQ ID NO: 1344182 - RNA, 19 nt, Artificial Sequence
  Description of Artificial Sequence: Synthetic oligonucleotide
cuguaugugcuuuccgagu

SEQ ID NO: 1344183 - RNA, 19 nt, Artificial Sequence
  Description of Artificial Sequence: Synthetic oligonucleotide
guaucacgaaggcccagua

SEQ ID NO: 1344184 - RNA, 19 nt, Artificial Sequence
  Description of Artificial Sequence: Synthetic oligonucleotide
ggauaguaacaccauccgu

SEQ ID NO: 1344185 - RNA, 19 nt, Artificial Sequence
  Description of Artificial Sequence: Synthetic oligonucleotide
cgaugugggauaguaacac

SEQ ID NO: 1344186 - RNA, 19 nt, Artificial Sequence
  Description of Artificial Sequence: Synthetic oligonucleotide
cacaauggaauugcuggua

SEQ ID NO: 1344187 - RNA, 19 nt, Artificial Sequence
  Description of Artificial Sequence: Synthetic oligonucleotide
ccucgaacaauuggagaag

SEQ ID NO: 1344188 - RNA, 19 nt, Artificial Sequence
  Description of Artificial Sequence: Synthetic oligonucleotide
uuuuagggccaaggagaua

SEQ ID NO: 1344189 - RNA, 19 nt, Artificial Sequence
  Description of Artificial Sequence: Synthetic oligonucleotide
gguaacaggcguggcagca

SEQ ID NO: 1344190 - RNA, 19 nt, Artificial Sequence
  Description of Artificial Sequence: Synthetic oligonucleotide
aauccggcaccgagagccu

SEQ ID NO: 1344191 - RNA, 19 nt, Artificial Sequence
  Description of Artificial Sequence: Synthetic oligonucleotide
agggcuuagucagcaacuu

SEQ ID NO: 1344192 - RNA, 19 nt, Artificial Sequence
  Description of Artificial Sequence: Synthetic oligonucleotide
ggcuuagacuccugaguga

SEQ ID NO: 1344193 - RNA, 19 nt, Artificial Sequence
  Description of Artificial Sequence: Synthetic oligonucleotide
caggcuacgaagaguaauu

SEQ ID NO: 1344194 - RNA, 19 nt, Artificial Sequence
  Description of Artificial Sequence: Synthetic oligonucleotide
acgcugcauaugauugguc

SEQ ID NO: 1344195 - RNA, 19 nt, Artificial Sequence
  Description of Artificial Sequence: Synthetic oligonucleotide
cgaaagcaagcaaggaguc

SEQ ID NO: 1344196 - RNA, 19 nt, Artificial Sequence
  Description of Artificial Sequence: Synthetic oligonucleotide
gcaccgccaggcuacgaag

SEQ ID NO: 1344197 - RNA, 19 nt, Artificial Sequence
  Description of Artificial Sequence: Synthetic oligonucleotide
acuugagauuggucucauu

SEQ ID NO: 1344198 - RNA, 19 nt, Artificial Sequence
  Description of Artificial Sequence: Synthetic oligonucleotide
gaagaguaauugccacaau

SEQ ID NO: 1344199 - RNA, 19 nt, Artificial Sequence
  Description of Artificial Sequence: Synthetic oligonucleotide
uccuagaauccggcaccga

SEQ ID NO: 1344200 - RNA, 19 nt, Artificial Sequence
  Description of Artificial Sequence: Synthetic oligonucleotide
ccagcagaacuuuggaaaa

SEQ ID NO: 1344201 - RNA, 19 nt, Artificial Sequence
  Description of Artificial Sequence: Synthetic oligonucleotide
caccgccaggcuacgaaga

SEQ ID NO: 1344202 - RNA, 19 nt, Artificial Sequence
  Description of Artificial Sequence: Synthetic oligonucleotide
gcaucgaugugggauagua

SEQ ID NO: 1344203 - RNA, 19 nt, Artificial Sequence
  Description of Artificial Sequence: Synthetic oligonucleotide
gcaugggaaacuggccuug

SEQ ID NO: 1344204 - RNA, 19 nt, Artificial Sequence
  Description of Artificial Sequence: Synthetic oligonucleotide
cugggaccauaucugcaaa

SEQ ID NO: 1344205 - RNA, 19 nt, Artificial Sequence
  Description of Artificial Sequence: Synthetic oligonucleotide
gauaagccgcucacucugu

SEQ ID NO: 1344206 - RNA, 19 nt, Artificial Sequence
  Description of Artificial Sequence: Synthetic oligonucleotide
caccgagagccuucugcca

SEQ ID NO: 1344207 - RNA, 19 nt, Artificial Sequence
  Description of Artificial Sequence: Synthetic oligonucleotide
uaucuuuguuagggaccau

SEQ ID NO: 1344208 - RNA, 19 nt, Artificial Sequence
  Description of Artificial Sequence: Synthetic oligonucleotide
cuuccccacgcugcauaug

SEQ ID NO: 1344209 - RNA, 19 nt, Artificial Sequence
  Description of Artificial Sequence: Synthetic oligonucleotide
accgaaccuuaaggggucu

SEQ ID NO: 1344210 - RNA, 19 nt, Artificial Sequence
  Description of Artificial Sequence: Synthetic oligonucleotide
ccagucuaacucaggaucu

SEQ ID NO: 1344211 - RNA, 19 nt, Artificial Sequence
  Description of Artificial Sequence: Synthetic oligonucleotide
caccggacucacagucauc

SEQ ID NO: 1344212 - RNA, 19 nt, Artificial Sequence
  Description of Artificial Sequence: Synthetic oligonucleotide
ccgagagccuucugccacc

SEQ ID NO: 1344213 - RNA, 19 nt, Artificial Sequence
  Description of Artificial Sequence: Synthetic oligonucleotide
cugcauaugauuggucuuu

SEQ ID NO: 1344214 - RNA, 19 nt, Artificial Sequence
  Description of Artificial Sequence: Synthetic oligonucleotide
cuggaacagugcuggcgaa

SEQ ID NO: 1344215 - RNA, 19 nt, Artificial Sequence
  Description of Artificial Sequence: Synthetic oligonucleotide
ugacuuccccacgcugcau

SEQ ID NO: 1344216 - RNA, 19 nt, Artificial Sequence
  Description of Artificial Sequence: Synthetic oligonucleotide
gguacggggaacacaggcu

SEQ ID NO: 1344217 - RNA, 19 nt, Artificial Sequence
  Description of Artificial Sequence: Synthetic oligonucleotide
gguuugacuuccccacgcu

SEQ ID NO: 1344218 - RNA, 19 nt, Artificial Sequence
  Description of Artificial Sequence: Synthetic oligonucleotide
gaaucacgacuggaacagu

SEQ ID NO: 1344219 - RNA, 19 nt, Artificial Sequence
  Description of Artificial Sequence: Synthetic oligonucleotide
cacuccagucaggccacuc

SEQ ID NO: 1344220 - RNA, 19 nt, Artificial Sequence
  Description of Artificial Sequence: Synthetic oligonucleotide
gagagccuucugccaccca

SEQ ID NO: 1344221 - RNA, 19 nt, Artificial Sequence
  Description of Artificial Sequence: Synthetic oligonucleotide
cugccucucccucagucau

SEQ ID NO: 1344222 - RNA, 19 nt, Artificial Sequence
  Description of Artificial Sequence: Synthetic oligonucleotide
cgcugcauaugauuggucu

SEQ ID NO: 1344223 - RNA, 19 nt, Artificial Sequence
  Description of Artificial Sequence: Synthetic oligonucleotide
agcuugcuuugagguauua

SEQ ID NO: 1344224 - RNA, 19 nt, Artificial Sequence
  Description of Artificial Sequence: Synthetic oligonucleotide
ggcaccagucuugaagcua

SEQ ID NO: 1344225 - RNA, 19 nt, Artificial Sequence
  Description of Artificial Sequence: Synthetic oligonucleotide
gggugcuuggggccuuauc

SEQ ID NO: 1344226 - RNA, 19 nt, Artificial Sequence
  Description of Artificial Sequence: Synthetic oligonucleotide
gcaccagucuugaagcuau

SEQ ID NO: 1344227 - RNA, 19 nt, Artificial Sequence
  Description of Artificial Sequence: Synthetic oligonucleotide
guuuggugcucaggcuccu

SEQ ID NO: 1344228 - RNA, 19 nt, Artificial Sequence
  Description of Artificial Sequence: Synthetic oligonucleotide
auccggcaccgagagccuu

SEQ ID NO: 1344229 - RNA, 19 nt, Artificial Sequence
  Description of Artificial Sequence: Synthetic oligonucleotide
gcaaggagucuccccuggu

SEQ ID NO: 1344230 - RNA, 19 nt, Artificial Sequence
  Description of Artificial Sequence: Synthetic oligonucleotide
ccaggcuacgaagaguaau

SEQ ID NO: 1344231 - RNA, 19 nt, Artificial Sequence
  Description of Artificial Sequence: Synthetic oligonucleotide
agggugcuuggggccuuau

SEQ ID NO: 1344232 - RNA, 19 nt, Artificial Sequence
  Description of Artificial Sequence: Synthetic oligonucleotide
ggccacucuucaggcuuac

SEQ ID NO: 1344233 - RNA, 19 nt, Artificial Sequence
  Description of Artificial Sequence: Synthetic oligonucleotide
ccaacaccggacucacagu

SEQ ID NO: 1344234 - RNA, 19 nt, Artificial Sequence
  Description of Artificial Sequence: Synthetic oligonucleotide
gcuuaccagcuugaauuuu

SEQ ID NO: 1344235 - RNA, 19 nt, Artificial Sequence
  Description of Artificial Sequence: Synthetic oligonucleotide
ggagucuccccuggugcau

SEQ ID NO: 1344236 - RNA, 19 nt, Artificial Sequence
  Description of Artificial Sequence: Synthetic oligonucleotide
gcuuaauuucugggaccau

SEQ ID NO: 1344237 - RNA, 19 nt, Artificial Sequence
  Description of Artificial Sequence: Synthetic oligonucleotide
gccaggcuacgaagaguaa

SEQ ID NO: 1344238 - RNA, 19 nt, Artificial Sequence
  Description of Artificial Sequence: Synthetic oligonucleotide
cagcaccgccaggcuacga

SEQ ID NO: 1344239 - RNA, 19 nt, Artificial Sequence
  Description of Artificial Sequence: Synthetic oligonucleotide
ggcaucgaugugggauagu

SEQ ID NO: 1344240 - RNA, 19 nt, Artificial Sequence
  Description of Artificial Sequence: Synthetic oligonucleotide
gccacucuucaggcuuacu

SEQ ID NO: 1344241 - RNA, 19 nt, Artificial Sequence
  Description of Artificial Sequence: Synthetic oligonucleotide
cgaaccuuaaggggucuuu

SEQ ID NO: 1344242 - RNA, 19 nt, Artificial Sequence
  Description of Artificial Sequence: Synthetic oligonucleotide
ccgccaggcuacgaagagu

SEQ ID NO: 1344243 - RNA, 19 nt, Artificial Sequence
  Description of Artificial Sequence: Synthetic oligonucleotide
cggcaccgagagccuucug

SEQ ID NO: 1344244 - RNA, 19 nt, Artificial Sequence
  Description of Artificial Sequence: Synthetic oligonucleotide
ccggcaccgagagccuucu

SEQ ID NO: 1344245 - RNA, 19 nt, Artificial Sequence
  Description of Artificial Sequence: Synthetic oligonucleotide
ccgaaccuuaaggggucuu

SEQ ID NO: 1344246 - RNA, 19 nt, Artificial Sequence
  Description of Artificial Sequence: Synthetic oligonucleotide
aaagaagggacuuagaaac

SEQ ID NO: 1344247 - RNA, 19 nt, Artificial Sequence
  Description of Artificial Sequence: Synthetic oligonucleotide
aacauguagcacccgauac

SEQ ID NO: 1344248 - RNA, 19 nt, Artificial Sequence
  Description of Artificial Sequence: Synthetic oligonucleotide
ugaucuuggauguagcagg

SEQ ID NO: 1344249 - RNA, 19 nt, Artificial Sequence
  Description of Artificial Sequence: Synthetic oligonucleotide
uugacaaggaugaucuugg

SEQ ID NO: 1344250 - RNA, 19 nt, Artificial Sequence
  Description of Artificial Sequence: Synthetic oligonucleotide
uacucaaugaccaucuccc

SEQ ID NO: 1344251 - RNA, 19 nt, Artificial Sequence
  Description of Artificial Sequence: Synthetic oligonucleotide
auagugaugccacugcgac

SEQ ID NO: 1344252 - RNA, 19 nt, Artificial Sequence
  Description of Artificial Sequence: Synthetic oligonucleotide
ucaaugaccaucuccccgg

SEQ ID NO: 1344253 - RNA, 19 nt, Artificial Sequence
  Description of Artificial Sequence: Synthetic oligonucleotide
ucaguuaaggaagcgacgg

SEQ ID NO: 1344254 - RNA, 19 nt, Artificial Sequence
  Description of Artificial Sequence: Synthetic oligonucleotide
augcggaacauguagcacc

SEQ ID NO: 1344255 - RNA, 19 nt, Artificial Sequence
  Description of Artificial Sequence: Synthetic oligonucleotide
aaucagaguucuccacugc

SEQ ID NO: 1344256 - RNA, 19 nt, Artificial Sequence
  Description of Artificial Sequence: Synthetic oligonucleotide
accuuuguacaauaucuac

SEQ ID NO: 1344257 - RNA, 19 nt, Artificial Sequence
  Description of Artificial Sequence: Synthetic oligonucleotide
acauguagcacccgauacc

SEQ ID NO: 1344258 - RNA, 19 nt, Artificial Sequence
  Description of Artificial Sequence: Synthetic oligonucleotide
uucucaaucagaguucucc

SEQ ID NO: 1344259 - RNA, 19 nt, Artificial Sequence
  Description of Artificial Sequence: Synthetic oligonucleotide
ucaaugggaaacuuguagu

SEQ ID NO: 1344260 - RNA, 19 nt, Artificial Sequence
  Description of Artificial Sequence: Synthetic oligonucleotide
ucauccaugcggaacaugu

SEQ ID NO: 1344261 - RNA, 19 nt, Artificial Sequence
  Description of Artificial Sequence: Synthetic oligonucleotide
cacaugagcaaucuggggc

SEQ ID NO: 1344262 - RNA, 19 nt, Artificial Sequence
  Description of Artificial Sequence: Synthetic oligonucleotide
acaugagcaaucuggggcg

SEQ ID NO: 1344263 - RNA, 19 nt, Artificial Sequence
  Description of Artificial Sequence: Synthetic oligonucleotide
auugacagacuuuauugug

SEQ ID NO: 1344264 - RNA, 19 nt, Artificial Sequence
  Description of Artificial Sequence: Synthetic oligonucleotide
acacugagagacuagggag

SEQ ID NO: 1344265 - RNA, 19 nt, Artificial Sequence
  Description of Artificial Sequence: Synthetic oligonucleotide
ugaucucaagcgcaggugc

SEQ ID NO: 1344266 - RNA, 19 nt, Artificial Sequence
  Description of Artificial Sequence: Synthetic oligonucleotide
aagaugacaauguguuucu

SEQ ID NO: 1344267 - RNA, 19 nt, Artificial Sequence
  Description of Artificial Sequence: Synthetic oligonucleotide
gagugagacacugagagac

SEQ ID NO: 1344268 - RNA, 19 nt, Artificial Sequence
  Description of Artificial Sequence: Synthetic oligonucleotide
agagcgaaugacaaaugcc

SEQ ID NO: 1344269 - RNA, 19 nt, Artificial Sequence
  Description of Artificial Sequence: Synthetic oligonucleotide
uacccuuuccaucauagaa

SEQ ID NO: 1344270 - RNA, 19 nt, Artificial Sequence
  Description of Artificial Sequence: Synthetic oligonucleotide
uuccacuaaggagagaugc

SEQ ID NO: 1344271 - RNA, 19 nt, Artificial Sequence
  Description of Artificial Sequence: Synthetic oligonucleotide
gauacccuuuccaucauag

SEQ ID NO: 1344272 - RNA, 19 nt, Artificial Sequence
  Description of Artificial Sequence: Synthetic oligonucleotide
ugaggccucaccugaauag

SEQ ID NO: 1344273 - RNA, 19 nt, Artificial Sequence
  Description of Artificial Sequence: Synthetic oligonucleotide
aauacccggaccccuggag

SEQ ID NO: 1344274 - RNA, 19 nt, Artificial Sequence
  Description of Artificial Sequence: Synthetic oligonucleotide
ugggcuagcgggcagaccu

SEQ ID NO: 1344275 - RNA, 19 nt, Artificial Sequence
  Description of Artificial Sequence: Synthetic oligonucleotide
uaacacacugagcaggggu

SEQ ID NO: 1344276 - RNA, 19 nt, Artificial Sequence
  Description of Artificial Sequence: Synthetic oligonucleotide
uuacagaacaggccucucc

SEQ ID NO: 1344277 - RNA, 19 nt, Artificial Sequence
  Description of Artificial Sequence: Synthetic oligonucleotide
ugcgcuuacagaacaggcc

SEQ ID NO: 1344278 - RNA, 19 nt, Artificial Sequence
  Description of Artificial Sequence: Synthetic oligonucleotide
cacgccucaguuaaggaag

SEQ ID NO: 1344279 - RNA, 19 nt, Artificial Sequence
  Description of Artificial Sequence: Synthetic oligonucleotide
gaugacgcgagagaagcag

SEQ ID NO: 1344280 - RNA, 19 nt, Artificial Sequence
  Description of Artificial Sequence: Synthetic oligonucleotide
uggaugacgcgagagaagc

SEQ ID NO: 1344281 - RNA, 19 nt, Artificial Sequence
  Description of Artificial Sequence: Synthetic oligonucleotide
uagcauagaaaagaaggga

SEQ ID NO: 1344282 - RNA, 19 nt, Artificial Sequence
  Description of Artificial Sequence: Synthetic oligonucleotide
ucugaggggccaucaaggg

SEQ ID NO: 1344283 - RNA, 19 nt, Artificial Sequence
  Description of Artificial Sequence: Synthetic oligonucleotide
gacacugagagacuaggga

SEQ ID NO: 1344284 - RNA, 19 nt, Artificial Sequence
  Description of Artificial Sequence: Synthetic oligonucleotide
agaguacucaaugaccauc

SEQ ID NO: 1344285 - RNA, 19 nt, Artificial Sequence
  Description of Artificial Sequence: Synthetic oligonucleotide
gaagcaguugggcucacac

SEQ ID NO: 1344286 - RNA, 19 nt, Artificial Sequence
  Description of Artificial Sequence: Synthetic oligonucleotide
uggaucgcugaucuguagc

SEQ ID NO: 1344287 - RNA, 19 nt, Artificial Sequence
  Description of Artificial Sequence: Synthetic oligonucleotide
cucaguuaaggaagcgacg

SEQ ID NO: 1344288 - RNA, 19 nt, Artificial Sequence
  Description of Artificial Sequence: Synthetic oligonucleotide
ucacacgagugguugauga

SEQ ID NO: 1344289 - RNA, 19 nt, Artificial Sequence
  Description of Artificial Sequence: Synthetic oligonucleotide
acgcgagagaagcaguugg

SEQ ID NO: 1344290 - RNA, 19 nt, Artificial Sequence
  Description of Artificial Sequence: Synthetic oligonucleotide
cucggccucacacugaagc

SEQ ID NO: 1344291 - RNA, 19 nt, Artificial Sequence
  Description of Artificial Sequence: Synthetic oligonucleotide
cauguagcacccgauaccc

SEQ ID NO: 1344292 - RNA, 19 nt, Artificial Sequence
  Description of Artificial Sequence: Synthetic oligonucleotide
gagagaagcaguugggcuc

SEQ ID NO: 1344293 - RNA, 19 nt, Artificial Sequence
  Description of Artificial Sequence: Synthetic oligonucleotide
cagagcgaaugacaaaugc

SEQ ID NO: 1344294 - RNA, 19 nt, Artificial Sequence
  Description of Artificial Sequence: Synthetic oligonucleotide
ucucaaucagaguucucca

SEQ ID NO: 1344295 - RNA, 19 nt, Artificial Sequence
  Description of Artificial Sequence: Synthetic oligonucleotide
aaguccagaaccccucgca

SEQ ID NO: 1344296 - RNA, 19 nt, Artificial Sequence
  Description of Artificial Sequence: Synthetic oligonucleotide
aguccagaaccccucgcac

SEQ ID NO: 1344297 - RNA, 19 nt, Artificial Sequence
  Description of Artificial Sequence: Synthetic oligonucleotide
gagcgaaugacaaaugcca

SEQ ID NO: 1344298 - RNA, 19 nt, Artificial Sequence
  Description of Artificial Sequence: Synthetic oligonucleotide
gaaccccucgcacuguggg

SEQ ID NO: 1344299 - RNA, 19 nt, Artificial Sequence
  Description of Artificial Sequence: Synthetic oligonucleotide
gaugaucuuggauguagca

SEQ ID NO: 1344300 - RNA, 19 nt, Artificial Sequence
  Description of Artificial Sequence: Synthetic oligonucleotide
cacugagagacuagggagc

SEQ ID NO: 1344301 - RNA, 19 nt, Artificial Sequence
  Description of Artificial Sequence: Synthetic oligonucleotide
uuggauguagcagguuugg

SEQ ID NO: 1344302 - RNA, 19 nt, Artificial Sequence
  Description of Artificial Sequence: Synthetic oligonucleotide
gaugaagcgggcagcauug

SEQ ID NO: 1344303 - RNA, 19 nt, Artificial Sequence
  Description of Artificial Sequence: Synthetic oligonucleotide
aauagugaugccacugcga

SEQ ID NO: 1344304 - RNA, 19 nt, Artificial Sequence
  Description of Artificial Sequence: Synthetic oligonucleotide
gagacuagggagccacagg

SEQ ID NO: 1344305 - RNA, 19 nt, Artificial Sequence
  Description of Artificial Sequence: Synthetic oligonucleotide
aaccccucgcacugugggc

SEQ ID NO: 1344306 - RNA, 19 nt, Artificial Sequence
  Description of Artificial Sequence: Synthetic oligonucleotide
cuuggauguagcagguuug

SEQ ID NO: 1344307 - RNA, 19 nt, Artificial Sequence
  Description of Artificial Sequence: Synthetic oligonucleotide
guauuguucaaguccagaa

SEQ ID NO: 1344308 - RNA, 19 nt, Artificial Sequence
  Description of Artificial Sequence: Synthetic oligonucleotide
aguuaaggaagcgacggca

SEQ ID NO: 1344309 - RNA, 19 nt, Artificial Sequence
  Description of Artificial Sequence: Synthetic oligonucleotide
cccaguauuguucaagucc

SEQ ID NO: 1344310 - RNA, 19 nt, Artificial Sequence
  Description of Artificial Sequence: Synthetic oligonucleotide
acuaaggagagaugccuga

SEQ ID NO: 1344311 - RNA, 19 nt, Artificial Sequence
  Description of Artificial Sequence: Synthetic oligonucleotide
uagcgggcagaccuugugg

SEQ ID NO: 1344312 - RNA, 19 nt, Artificial Sequence
  Description of Artificial Sequence: Synthetic oligonucleotide
caaucagaguucuccacug

SEQ ID NO: 1344313 - RNA, 19 nt, Artificial Sequence
  Description of Artificial Sequence: Synthetic oligonucleotide
agcgggcagaccuuguggg

SEQ ID NO: 1344314 - RNA, 19 nt, Artificial Sequence
  Description of Artificial Sequence: Synthetic oligonucleotide
uguugcgcuuacagaacag

SEQ ID NO: 1344315 - RNA, 19 nt, Artificial Sequence
  Description of Artificial Sequence: Synthetic oligonucleotide
gacagacuuuauugugggg

SEQ ID NO: 1344316 - RNA, 19 nt, Artificial Sequence
  Description of Artificial Sequence: Synthetic oligonucleotide
uuagccaagggaggugccg

SEQ ID NO: 1344317 - RNA, 19 nt, Artificial Sequence
  Description of Artificial Sequence: Synthetic oligonucleotide
gaacaggccucucccgugg

SEQ ID NO: 1344318 - RNA, 19 nt, Artificial Sequence
  Description of Artificial Sequence: Synthetic oligonucleotide
augaccaucuccccggcgu

SEQ ID NO: 1344319 - RNA, 19 nt, Artificial Sequence
  Description of Artificial Sequence: Synthetic oligonucleotide
uggccuagcuuguugacaa

SEQ ID NO: 1344320 - RNA, 19 nt, Artificial Sequence
  Description of Artificial Sequence: Synthetic oligonucleotide
guugcgcuuacagaacagg

SEQ ID NO: 1344321 - RNA, 19 nt, Artificial Sequence
  Description of Artificial Sequence: Synthetic oligonucleotide
caaacauugacagacuuua

SEQ ID NO: 1344322 - RNA, 19 nt, Artificial Sequence
  Description of Artificial Sequence: Synthetic oligonucleotide
cauuagccaagggaggugc

SEQ ID NO: 1344323 - RNA, 19 nt, Artificial Sequence
  Description of Artificial Sequence: Synthetic oligonucleotide
acccagacucaauacccgg

SEQ ID NO: 1344324 - RNA, 19 nt, Artificial Sequence
  Description of Artificial Sequence: Synthetic oligonucleotide
cucaaucagaguucuccac

SEQ ID NO: 1344325 - RNA, 19 nt, Artificial Sequence
  Description of Artificial Sequence: Synthetic oligonucleotide
gaucucaagcgcaggugcg

SEQ ID NO: 1344326 - RNA, 19 nt, Artificial Sequence
  Description of Artificial Sequence: Synthetic oligonucleotide
aggaggcucggagugagac

SEQ ID NO: 1344327 - RNA, 19 nt, Artificial Sequence
  Description of Artificial Sequence: Synthetic oligonucleotide
acuuggccuagcuuguuga

SEQ ID NO: 1344328 - RNA, 19 nt, Artificial Sequence
  Description of Artificial Sequence: Synthetic oligonucleotide
gaggcucggagugagacac

SEQ ID NO: 1344329 - RNA, 19 nt, Artificial Sequence
  Description of Artificial Sequence: Synthetic oligonucleotide
cugaucuguagcuccacuc

SEQ ID NO: 1344330 - RNA, 19 nt, Artificial Sequence
  Description of Artificial Sequence: Synthetic oligonucleotide
caggcaaauguccggguag

SEQ ID NO: 1344331 - RNA, 19 nt, Artificial Sequence
  Description of Artificial Sequence: Synthetic oligonucleotide
ucccguggaucgcugaucu

SEQ ID NO: 1344332 - RNA, 19 nt, Artificial Sequence
  Description of Artificial Sequence: Synthetic oligonucleotide
auguugcgcuuacagaaca

SEQ ID NO: 1344333 - RNA, 19 nt, Artificial Sequence
  Description of Artificial Sequence: Synthetic oligonucleotide
acccgauacccuuuccauc

SEQ ID NO: 1344334 - RNA, 19 nt, Artificial Sequence
  Description of Artificial Sequence: Synthetic oligonucleotide
aguauuguucaaguccaga

SEQ ID NO: 1344335 - RNA, 19 nt, Artificial Sequence
  Description of Artificial Sequence: Synthetic oligonucleotide
gacggcagcgcuuggcgcc

SEQ ID NO: 1344336 - RNA, 19 nt, Artificial Sequence
  Description of Artificial Sequence: Synthetic oligonucleotide
cacuaaggagagaugccug

SEQ ID NO: 1344337 - RNA, 19 nt, Artificial Sequence
  Description of Artificial Sequence: Synthetic oligonucleotide
aaauguccggguaggguca

SEQ ID NO: 1344338 - RNA, 19 nt, Artificial Sequence
  Description of Artificial Sequence: Synthetic oligonucleotide
gaagcgacggcagcgcuug

SEQ ID NO: 1344339 - RNA, 19 nt, Artificial Sequence
  Description of Artificial Sequence: Synthetic oligonucleotide
gacccagacucaauacccg

SEQ ID NO: 1344340 - RNA, 19 nt, Artificial Sequence
  Description of Artificial Sequence: Synthetic oligonucleotide
agagacuagggagccacag

SEQ ID NO: 1344341 - RNA, 19 nt, Artificial Sequence
  Description of Artificial Sequence: Synthetic oligonucleotide
agcaaucuggggcggccac

SEQ ID NO: 1344342 - RNA, 19 nt, Artificial Sequence
  Description of Artificial Sequence: Synthetic oligonucleotide
ucggccucacacugaagcc

SEQ ID NO: 1344343 - RNA, 19 nt, Artificial Sequence
  Description of Artificial Sequence: Synthetic oligonucleotide
gauguugcgcuuacagaac

SEQ ID NO: 1344344 - RNA, 19 nt, Artificial Sequence
  Description of Artificial Sequence: Synthetic oligonucleotide
ugcgucgcagggcaaagau

SEQ ID NO: 1344345 - RNA, 19 nt, Artificial Sequence
  Description of Artificial Sequence: Synthetic oligonucleotide
ucaagcgcaggugcggacc

SEQ ID NO: 1344346 - RNA, 19 nt, Artificial Sequence
  Description of Artificial Sequence: Synthetic oligonucleotide
gcugccauuagccaaggga

SEQ ID NO: 1344347 - RNA, 19 nt, Artificial Sequence
  Description of Artificial Sequence: Synthetic oligonucleotide
acugcugaucucaagcgca

SEQ ID NO: 1344348 - RNA, 19 nt, Artificial Sequence
  Description of Artificial Sequence: Synthetic oligonucleotide
agaacaggccucucccgug

SEQ ID NO: 1344349 - RNA, 19 nt, Artificial Sequence
  Description of Artificial Sequence: Synthetic oligonucleotide
cggagugagacacugagag

SEQ ID NO: 1344350 - RNA, 19 nt, Artificial Sequence
  Description of Artificial Sequence: Synthetic oligonucleotide
agggagagauuccucucug

SEQ ID NO: 1344351 - RNA, 19 nt, Artificial Sequence
  Description of Artificial Sequence: Synthetic oligonucleotide
agcgaaugacaaaugccag

SEQ ID NO: 1344352 - RNA, 19 nt, Artificial Sequence
  Description of Artificial Sequence: Synthetic oligonucleotide
agcucguuugggaaccugg

SEQ ID NO: 1344353 - RNA, 19 nt, Artificial Sequence
  Description of Artificial Sequence: Synthetic oligonucleotide
ugcggaccagcucguuugg

SEQ ID NO: 1344354 - RNA, 19 nt, Artificial Sequence
  Description of Artificial Sequence: Synthetic oligonucleotide
ucuacauccugggucccca

SEQ ID NO: 1344355 - RNA, 19 nt, Artificial Sequence
  Description of Artificial Sequence: Synthetic oligonucleotide
gauggagggcuccuccuca

SEQ ID NO: 1344356 - RNA, 19 nt, Artificial Sequence
  Description of Artificial Sequence: Synthetic oligonucleotide
cagacucaauacccggacc

SEQ ID NO: 1344357 - RNA, 19 nt, Artificial Sequence
  Description of Artificial Sequence: Synthetic oligonucleotide
aucuacauccugggucccc

SEQ ID NO: 1344358 - RNA, 19 nt, Artificial Sequence
  Description of Artificial Sequence: Synthetic oligonucleotide
auuagccaagggaggugcc

SEQ ID NO: 1344359 - RNA, 19 nt, Artificial Sequence
  Description of Artificial Sequence: Synthetic oligonucleotide
caguuaaggaagcgacggc

SEQ ID NO: 1344360 - RNA, 19 nt, Artificial Sequence
  Description of Artificial Sequence: Synthetic oligonucleotide
aaccuuuguacaauaucua

SEQ ID NO: 1344361 - RNA, 19 nt, Artificial Sequence
  Description of Artificial Sequence: Synthetic oligonucleotide
aucucaagcgcaggugcgg

SEQ ID NO: 1344362 - RNA, 19 nt, Artificial Sequence
  Description of Artificial Sequence: Synthetic oligonucleotide
gugccgaagggagagauuc

SEQ ID NO: 1344363 - RNA, 19 nt, Artificial Sequence
  Description of Artificial Sequence: Synthetic oligonucleotide
accccacccucuuaaauaa

SEQ ID NO: 1344364 - RNA, 19 nt, Artificial Sequence
  Description of Artificial Sequence: Synthetic oligonucleotide
uugaggccucaccugaaua

SEQ ID NO: 1344365 - RNA, 19 nt, Artificial Sequence
  Description of Artificial Sequence: Synthetic oligonucleotide
gacucaauacccggacccc

SEQ ID NO: 1344366 - RNA, 19 nt, Artificial Sequence
  Description of Artificial Sequence: Synthetic oligonucleotide
ugagcaaucuggggcggcc

SEQ ID NO: 1344367 - RNA, 19 nt, Artificial Sequence
  Description of Artificial Sequence: Synthetic oligonucleotide
ucaccucgcaggaugcguc

SEQ ID NO: 1344368 - RNA, 19 nt, Artificial Sequence
  Description of Artificial Sequence: Synthetic oligonucleotide
cuucauccguacacggcug

SEQ ID NO: 1344369 - RNA, 19 nt, Artificial Sequence
  Description of Artificial Sequence: Synthetic oligonucleotide
ccgagcaugcccucgagcc

SEQ ID NO: 1344370 - RNA, 19 nt, Artificial Sequence
  Description of Artificial Sequence: Synthetic oligonucleotide
auacccuuuccaucauaga

SEQ ID NO: 1344371 - RNA, 19 nt, Artificial Sequence
  Description of Artificial Sequence: Synthetic oligonucleotide
guuucuggccuuccacaug

SEQ ID NO: 1344372 - RNA, 19 nt, Artificial Sequence
  Description of Artificial Sequence: Synthetic oligonucleotide
auagaaaagaagggacuua

SEQ ID NO: 1344373 - RNA, 19 nt, Artificial Sequence
  Description of Artificial Sequence: Synthetic oligonucleotide
accccucgcacugugggcg

SEQ ID NO: 1344374 - RNA, 19 nt, Artificial Sequence
  Description of Artificial Sequence: Synthetic oligonucleotide
ugagccgagcaugcccucg

SEQ ID NO: 1344375 - RNA, 19 nt, Artificial Sequence
  Description of Artificial Sequence: Synthetic oligonucleotide
aagggacuuagaaaccuuu

SEQ ID NO: 1344376 - RNA, 19 nt, Artificial Sequence
  Description of Artificial Sequence: Synthetic oligonucleotide
agcgcuuggcgccacaguu

SEQ ID NO: 1344377 - RNA, 19 nt, Artificial Sequence
  Description of Artificial Sequence: Synthetic oligonucleotide
ucgcagggcaaagaugaca

SEQ ID NO: 1344378 - RNA, 19 nt, Artificial Sequence
  Description of Artificial Sequence: Synthetic oligonucleotide
cuuggccuagcuuguugac

SEQ ID NO: 1344379 - RNA, 19 nt, Artificial Sequence
  Description of Artificial Sequence: Synthetic oligonucleotide
agggaggugccgaagggag

SEQ ID NO: 1344380 - RNA, 19 nt, Artificial Sequence
  Description of Artificial Sequence: Synthetic oligonucleotide
ggcgucuucauccguacac

SEQ ID NO: 1344381 - RNA, 19 nt, Artificial Sequence
  Description of Artificial Sequence: Synthetic oligonucleotide
ugacgcgagagaagcaguu

SEQ ID NO: 1344382 - RNA, 19 nt, Artificial Sequence
  Description of Artificial Sequence: Synthetic oligonucleotide
ugccgaagggagagauucc

SEQ ID NO: 1344383 - RNA, 19 nt, Artificial Sequence
  Description of Artificial Sequence: Synthetic oligonucleotide
ucgcaggaugcgucgcagg

SEQ ID NO: 1344384 - RNA, 19 nt, Artificial Sequence
  Description of Artificial Sequence: Synthetic oligonucleotide
caaggaugaucuuggaugu

SEQ ID NO: 1344385 - RNA, 19 nt, Artificial Sequence
  Description of Artificial Sequence: Synthetic oligonucleotide
ucgcugaucuguagcucca

SEQ ID NO: 1344386 - RNA, 19 nt, Artificial Sequence
  Description of Artificial Sequence: Synthetic oligonucleotide
aauguccggguagggucag

SEQ ID NO: 1344387 - RNA, 19 nt, Artificial Sequence
  Description of Artificial Sequence: Synthetic oligonucleotide
augagcaaucuggggcggc

SEQ ID NO: 1344388 - RNA, 19 nt, Artificial Sequence
  Description of Artificial Sequence: Synthetic oligonucleotide
cugaucucaagcgcaggug

SEQ ID NO: 1344389 - RNA, 19 nt, Artificial Sequence
  Description of Artificial Sequence: Synthetic oligonucleotide
cauggaugacgcgagagaa

SEQ ID NO: 1344390 - RNA, 19 nt, Artificial Sequence
  Description of Artificial Sequence: Synthetic oligonucleotide
caagggcccgggcaggacc

SEQ ID NO: 1344391 - RNA, 19 nt, Artificial Sequence
  Description of Artificial Sequence: Synthetic oligonucleotide
gaugcgucgcagggcaaag

SEQ ID NO: 1344392 - RNA, 19 nt, Artificial Sequence
  Description of Artificial Sequence: Synthetic oligonucleotide
uagugaugccacugcgacu

SEQ ID NO: 1344393 - RNA, 19 nt, Artificial Sequence
  Description of Artificial Sequence: Synthetic oligonucleotide
guaacacacugagcagggg

SEQ ID NO: 1344394 - RNA, 19 nt, Artificial Sequence
  Description of Artificial Sequence: Synthetic oligonucleotide
gcacaugagcaaucugggg

SEQ ID NO: 1344395 - RNA, 19 nt, Artificial Sequence
  Description of Artificial Sequence: Synthetic oligonucleotide
ucuggggcggccacgccuc

SEQ ID NO: 1344396 - RNA, 19 nt, Artificial Sequence
  Description of Artificial Sequence: Synthetic oligonucleotide
agcgacggcagcgcuuggc

SEQ ID NO: 1344397 - RNA, 19 nt, Artificial Sequence
  Description of Artificial Sequence: Synthetic oligonucleotide
agcgcaggugcggaccagc

SEQ ID NO: 1344398 - RNA, 19 nt, Artificial Sequence
  Description of Artificial Sequence: Synthetic oligonucleotide
aguugggcucacacgagug

SEQ ID NO: 1344399 - RNA, 19 nt, Artificial Sequence
  Description of Artificial Sequence: Synthetic oligonucleotide
cuagcgggcagaccuugug

SEQ ID NO: 1344400 - RNA, 19 nt, Artificial Sequence
  Description of Artificial Sequence: Synthetic oligonucleotide
acgccucaguuaaggaagc

SEQ ID NO: 1344401 - RNA, 19 nt, Artificial Sequence
  Description of Artificial Sequence: Synthetic oligonucleotide
gccagaguacucaaugacc

SEQ ID NO: 1344402 - RNA, 19 nt, Artificial Sequence
  Description of Artificial Sequence: Synthetic oligonucleotide
ucucaagcgcaggugcgga

SEQ ID NO: 1344403 - RNA, 19 nt, Artificial Sequence
  Description of Artificial Sequence: Synthetic oligonucleotide
caggaugcgucgcagggca

SEQ ID NO: 1344404 - RNA, 19 nt, Artificial Sequence
  Description of Artificial Sequence: Synthetic oligonucleotide
ugggcgucuucauccguac

SEQ ID NO: 1344405 - RNA, 19 nt, Artificial Sequence
  Description of Artificial Sequence: Synthetic oligonucleotide
caugagcaaucuggggcgg

SEQ ID NO: 1344406 - RNA, 19 nt, Artificial Sequence
  Description of Artificial Sequence: Synthetic oligonucleotide
gccuagcuuguugacaagg

SEQ ID NO: 1344407 - RNA, 19 nt, Artificial Sequence
  Description of Artificial Sequence: Synthetic oligonucleotide
ucucccguggaucgcugau

SEQ ID NO: 1344408 - RNA, 19 nt, Artificial Sequence
  Description of Artificial Sequence: Synthetic oligonucleotide
cauugccgugcaugguggc

SEQ ID NO: 1344409 - RNA, 19 nt, Artificial Sequence
  Description of Artificial Sequence: Synthetic oligonucleotide
acagagcgaaugacaaaug

SEQ ID NO: 1344410 - RNA, 19 nt, Artificial Sequence
  Description of Artificial Sequence: Synthetic oligonucleotide
ggguuggcugccauuagcc

SEQ ID NO: 1344411 - RNA, 19 nt, Artificial Sequence
  Description of Artificial Sequence: Synthetic oligonucleotide
ugugggcgucuucauccgu

SEQ ID NO: 1344412 - RNA, 19 nt, Artificial Sequence
  Description of Artificial Sequence: Synthetic oligonucleotide
gggugugacagggucaccc

SEQ ID NO: 1344413 - RNA, 19 nt, Artificial Sequence
  Description of Artificial Sequence: Synthetic oligonucleotide
augccacugcgacucaaaa

SEQ ID NO: 1344414 - RNA, 19 nt, Artificial Sequence
  Description of Artificial Sequence: Synthetic oligonucleotide
gugacagggucacccuccc

SEQ ID NO: 1344415 - RNA, 19 nt, Artificial Sequence
  Description of Artificial Sequence: Synthetic oligonucleotide
gaucgcugaucuguagcuc

SEQ ID NO: 1344416 - RNA, 19 nt, Artificial Sequence
  Description of Artificial Sequence: Synthetic oligonucleotide
uaucuacauccuggguccc

SEQ ID NO: 1344417 - RNA, 19 nt, Artificial Sequence
  Description of Artificial Sequence: Synthetic oligonucleotide
cacagagcgaaugacaaau

SEQ ID NO: 1344418 - RNA, 19 nt, Artificial Sequence
  Description of Artificial Sequence: Synthetic oligonucleotide
cccgauacccuuuccauca

SEQ ID NO: 1344419 - RNA, 19 nt, Artificial Sequence
  Description of Artificial Sequence: Synthetic oligonucleotide
agugagacacugagagacu

SEQ ID NO: 1344420 - RNA, 19 nt, Artificial Sequence
  Description of Artificial Sequence: Synthetic oligonucleotide
agaugccugagccgagcau

SEQ ID NO: 1344421 - RNA, 19 nt, Artificial Sequence
  Description of Artificial Sequence: Synthetic oligonucleotide
cauagaaaagaagggacuu

SEQ ID NO: 1344422 - RNA, 19 nt, Artificial Sequence
  Description of Artificial Sequence: Synthetic oligonucleotide
gcgacggcagcgcuuggcg

SEQ ID NO: 1344423 - RNA, 19 nt, Artificial Sequence
  Description of Artificial Sequence: Synthetic oligonucleotide
cgauguugcgcuuacagaa

SEQ ID NO: 1344424 - RNA, 19 nt, Artificial Sequence
  Description of Artificial Sequence: Synthetic oligonucleotide
ucucggccucacacugaag

SEQ ID NO: 1344425 - RNA, 19 nt, Artificial Sequence
  Description of Artificial Sequence: Synthetic oligonucleotide
uagcacccgauacccuuuc

SEQ ID NO: 1344426 - RNA, 19 nt, Artificial Sequence
  Description of Artificial Sequence: Synthetic oligonucleotide
uguugacaaggaugaucuu

SEQ ID NO: 1344427 - RNA, 19 nt, Artificial Sequence
  Description of Artificial Sequence: Synthetic oligonucleotide
agaaccccucgcacugugg

SEQ ID NO: 1344428 - RNA, 19 nt, Artificial Sequence
  Description of Artificial Sequence: Synthetic oligonucleotide
caccgguccugaaggggcc

SEQ ID NO: 1344429 - RNA, 19 nt, Artificial Sequence
  Description of Artificial Sequence: Synthetic oligonucleotide
cucaagcgcaggugcggac

SEQ ID NO: 1344430 - RNA, 19 nt, Artificial Sequence
  Description of Artificial Sequence: Synthetic oligonucleotide
gagagaugccugagccgag

SEQ ID NO: 1344431 - RNA, 19 nt, Artificial Sequence
  Description of Artificial Sequence: Synthetic oligonucleotide
accgguccugaaggggccc

SEQ ID NO: 1344432 - RNA, 19 nt, Artificial Sequence
  Description of Artificial Sequence: Synthetic oligonucleotide
ucauccguacacggcugac

SEQ ID NO: 1344433 - RNA, 19 nt, Artificial Sequence
  Description of Artificial Sequence: Synthetic oligonucleotide
cuacauccuggguccccag

SEQ ID NO: 1344434 - RNA, 19 nt, Artificial Sequence
  Description of Artificial Sequence: Synthetic oligonucleotide
cucgcaggaugcgucgcag

SEQ ID NO: 1344435 - RNA, 19 nt, Artificial Sequence
  Description of Artificial Sequence: Synthetic oligonucleotide
gugugacagggucacccuc

SEQ ID NO: 1344436 - RNA, 19 nt, Artificial Sequence
  Description of Artificial Sequence: Synthetic oligonucleotide
agcaggcuccccaguauug

SEQ ID NO: 1344437 - RNA, 19 nt, Artificial Sequence
  Description of Artificial Sequence: Synthetic oligonucleotide
aggccucaccugaauagug

SEQ ID NO: 1344438 - RNA, 19 nt, Artificial Sequence
  Description of Artificial Sequence: Synthetic oligonucleotide
ugcccucgagccucuugca

SEQ ID NO: 1344439 - RNA, 19 nt, Artificial Sequence
  Description of Artificial Sequence: Synthetic oligonucleotide
ugggcucacacgagugguu

SEQ ID NO: 1344440 - RNA, 19 nt, Artificial Sequence
  Description of Artificial Sequence: Synthetic oligonucleotide
gaucuuggauguagcaggu

SEQ ID NO: 1344441 - RNA, 19 nt, Artificial Sequence
  Description of Artificial Sequence: Synthetic oligonucleotide
aagggcccgggcaggaccu

SEQ ID NO: 1344442 - RNA, 19 nt, Artificial Sequence
  Description of Artificial Sequence: Synthetic oligonucleotide
aaagggcaccgguccugaa

SEQ ID NO: 1344443 - RNA, 19 nt, Artificial Sequence
  Description of Artificial Sequence: Synthetic oligonucleotide
aaggaugaucuuggaugua

SEQ ID NO: 1344444 - RNA, 19 nt, Artificial Sequence
  Description of Artificial Sequence: Synthetic oligonucleotide
agcgggcacaugagcaauc

SEQ ID NO: 1344445 - RNA, 19 nt, Artificial Sequence
  Description of Artificial Sequence: Synthetic oligonucleotide
cucacacgagugguugaug

SEQ ID NO: 1344446 - RNA, 19 nt, Artificial Sequence
  Description of Artificial Sequence: Synthetic oligonucleotide
cgagugguugaugaagcgg

SEQ ID NO: 1344447 - RNA, 19 nt, Artificial Sequence
  Description of Artificial Sequence: Synthetic oligonucleotide
cuagcuuguugacaaggau

SEQ ID NO: 1344448 - RNA, 19 nt, Artificial Sequence
  Description of Artificial Sequence: Synthetic oligonucleotide
agccgagcaugcccucgag

SEQ ID NO: 1344449 - RNA, 19 nt, Artificial Sequence
  Description of Artificial Sequence: Synthetic oligonucleotide
ggaucgcugaucuguagcu

SEQ ID NO: 1344450 - RNA, 19 nt, Artificial Sequence
  Description of Artificial Sequence: Synthetic oligonucleotide
gcgcuuacagaacaggccu

SEQ ID NO: 1344451 - RNA, 19 nt, Artificial Sequence
  Description of Artificial Sequence: Synthetic oligonucleotide
ucauuccacuaaggagaga

SEQ ID NO: 1344452 - RNA, 19 nt, Artificial Sequence
  Description of Artificial Sequence: Synthetic oligonucleotide
gagccgagcaugcccucga

SEQ ID NO: 1344453 - RNA, 19 nt, Artificial Sequence
  Description of Artificial Sequence: Synthetic oligonucleotide
ccuagcuuguugacaagga

SEQ ID NO: 1344454 - RNA, 19 nt, Artificial Sequence
  Description of Artificial Sequence: Synthetic oligonucleotide
ggaccagcucguuugggaa

SEQ ID NO: 1344455 - RNA, 19 nt, Artificial Sequence
  Description of Artificial Sequence: Synthetic oligonucleotide
ggcucggagugagacacug

SEQ ID NO: 1344456 - RNA, 19 nt, Artificial Sequence
  Description of Artificial Sequence: Synthetic oligonucleotide
cgcgagagaagcaguuggg

SEQ ID NO: 1344457 - RNA, 19 nt, Artificial Sequence
  Description of Artificial Sequence: Synthetic oligonucleotide
gcacccgauacccuuucca

SEQ ID NO: 1344458 - RNA, 19 nt, Artificial Sequence
  Description of Artificial Sequence: Synthetic oligonucleotide
gcaccgguccugaaggggc

SEQ ID NO: 1344459 - RNA, 19 nt, Artificial Sequence
  Description of Artificial Sequence: Synthetic oligonucleotide
caagcgcaggugcggacca

SEQ ID NO: 1344460 - RNA, 19 nt, Artificial Sequence
  Description of Artificial Sequence: Synthetic oligonucleotide
gcggccacgccucaguuaa

SEQ ID NO: 1344461 - RNA, 19 nt, Artificial Sequence
  Description of Artificial Sequence: Synthetic oligonucleotide
ccggguagggucagcuggg

SEQ ID NO: 1344462 - RNA, 19 nt, Artificial Sequence
  Description of Artificial Sequence: Synthetic oligonucleotide
ggauggagggcuccuccuc

SEQ ID NO: 1344463 - RNA, 19 nt, Artificial Sequence
  Description of Artificial Sequence: Synthetic oligonucleotide
gaggccucaccugaauagu

SEQ ID NO: 1344464 - RNA, 19 nt, Artificial Sequence
  Description of Artificial Sequence: Synthetic oligonucleotide
gggcucacacgagugguug

SEQ ID NO: 1344465 - RNA, 19 nt, Artificial Sequence
  Description of Artificial Sequence: Synthetic oligonucleotide
auguccggguagggucagc

SEQ ID NO: 1344466 - RNA, 19 nt, Artificial Sequence
  Description of Artificial Sequence: Synthetic oligonucleotide
cagaacaggccucucccgu

SEQ ID NO: 1344467 - RNA, 19 nt, Artificial Sequence
  Description of Artificial Sequence: Synthetic oligonucleotide
acggcugaccccacugcca

SEQ ID NO: 1344468 - RNA, 19 nt, Artificial Sequence
  Description of Artificial Sequence: Synthetic oligonucleotide
gagcaaucuggggcggcca

SEQ ID NO: 1344469 - RNA, 19 nt, Artificial Sequence
  Description of Artificial Sequence: Synthetic oligonucleotide
gcaaucuggggcggccacg

SEQ ID NO: 1344470 - RNA, 19 nt, Artificial Sequence
  Description of Artificial Sequence: Synthetic oligonucleotide
ugccgugcaugguggcguc

SEQ ID NO: 1344471 - RNA, 19 nt, Artificial Sequence
  Description of Artificial Sequence: Synthetic oligonucleotide
caauacccggaccccugga

SEQ ID NO: 1344472 - RNA, 19 nt, Artificial Sequence
  Description of Artificial Sequence: Synthetic oligonucleotide
cccacccucuuaaauaaaa

SEQ ID NO: 1344473 - RNA, 19 nt, Artificial Sequence
  Description of Artificial Sequence: Synthetic oligonucleotide
ggcguccaccacgucaaag

SEQ ID NO: 1344474 - RNA, 19 nt, Artificial Sequence
  Description of Artificial Sequence: Synthetic oligonucleotide
ggaggcucggagugagaca

SEQ ID NO: 1344475 - RNA, 19 nt, Artificial Sequence
  Description of Artificial Sequence: Synthetic oligonucleotide
cucccguggaucgcugauc

SEQ ID NO: 1344476 - RNA, 19 nt, Artificial Sequence
  Description of Artificial Sequence: Synthetic oligonucleotide
accaucuccccggcgucga

SEQ ID NO: 1344477 - RNA, 19 nt, Artificial Sequence
  Description of Artificial Sequence: Synthetic oligonucleotide
ggccuagcuuguugacaag

SEQ ID NO: 1344478 - RNA, 19 nt, Artificial Sequence
  Description of Artificial Sequence: Synthetic oligonucleotide
gggcaccgguccugaaggg

SEQ ID NO: 1344479 - RNA, 19 nt, Artificial Sequence
  Description of Artificial Sequence: Synthetic oligonucleotide
auguagcacccgauacccu

SEQ ID NO: 1344480 - RNA, 19 nt, Artificial Sequence
  Description of Artificial Sequence: Synthetic oligonucleotide
ggccucaccugaauaguga

SEQ ID NO: 1344481 - RNA, 19 nt, Artificial Sequence
  Description of Artificial Sequence: Synthetic oligonucleotide
gccgagcaugcccucgagc

SEQ ID NO: 1344482 - RNA, 19 nt, Artificial Sequence
  Description of Artificial Sequence: Synthetic oligonucleotide
cacccgauacccuuuccau

SEQ ID NO: 1344483 - RNA, 19 nt, Artificial Sequence
  Description of Artificial Sequence: Synthetic oligonucleotide
cugagccgagcaugcccuc

SEQ ID NO: 1344484 - RNA, 19 nt, Artificial Sequence
  Description of Artificial Sequence: Synthetic oligonucleotide
ucgcacugugggcgucuuc

SEQ ID NO: 1344485 - RNA, 19 nt, Artificial Sequence
  Description of Artificial Sequence: Synthetic oligonucleotide
augcgucgcagggcaaaga

SEQ ID NO: 1344486 - RNA, 19 nt, Artificial Sequence
  Description of Artificial Sequence: Synthetic oligonucleotide
ccauuagccaagggaggug

SEQ ID NO: 1344487 - RNA, 19 nt, Artificial Sequence
  Description of Artificial Sequence: Synthetic oligonucleotide
cccagacucaauacccgga

SEQ ID NO: 1344488 - RNA, 19 nt, Artificial Sequence
  Description of Artificial Sequence: Synthetic oligonucleotide
cucucccguggaucgcuga

SEQ ID NO: 1344489 - RNA, 19 nt, Artificial Sequence
  Description of Artificial Sequence: Synthetic oligonucleotide
caguugggcucacacgagu

SEQ ID NO: 1344490 - RNA, 19 nt, Artificial Sequence
  Description of Artificial Sequence: Synthetic oligonucleotide
ggugugacagggucacccu

SEQ ID NO: 1344491 - RNA, 19 nt, Artificial Sequence
  Description of Artificial Sequence: Synthetic oligonucleotide
cccggcgucgauguugcgc

SEQ ID NO: 1344492 - RNA, 19 nt, Artificial Sequence
  Description of Artificial Sequence: Synthetic oligonucleotide
cagcucguuugggaaccug

SEQ ID NO: 1344493 - RNA, 19 nt, Artificial Sequence
  Description of Artificial Sequence: Synthetic oligonucleotide
cugggcuagcgggcagacc

SEQ ID NO: 1344494 - RNA, 19 nt, Artificial Sequence
  Description of Artificial Sequence: Synthetic oligonucleotide
cagaguacucaaugaccau

SEQ ID NO: 1344495 - RNA, 19 nt, Artificial Sequence
  Description of Artificial Sequence: Synthetic oligonucleotide
caccaccaacaggaggcuc

SEQ ID NO: 1344496 - RNA, 19 nt, Artificial Sequence
  Description of Artificial Sequence: Synthetic oligonucleotide
cccgggcaggaccuucugg

SEQ ID NO: 1344497 - RNA, 19 nt, Artificial Sequence
  Description of Artificial Sequence: Synthetic oligonucleotide
ggcuagcgggcagaccuug

SEQ ID NO: 1344498 - RNA, 19 nt, Artificial Sequence
  Description of Artificial Sequence: Synthetic oligonucleotide
uggggcggccacgccucag

SEQ ID NO: 1344499 - RNA, 19 nt, Artificial Sequence
  Description of Artificial Sequence: Synthetic oligonucleotide
gcgucgcagggcaaagaug

SEQ ID NO: 1344500 - RNA, 19 nt, Artificial Sequence
  Description of Artificial Sequence: Synthetic oligonucleotide
cucguuugggaaccugguu

SEQ ID NO: 1344501 - RNA, 19 nt, Artificial Sequence
  Description of Artificial Sequence: Synthetic oligonucleotide
ggaugacgcgagagaagca

SEQ ID NO: 1344502 - RNA, 19 nt, Artificial Sequence
  Description of Artificial Sequence: Synthetic oligonucleotide
cucaccucgcaggaugcgu

SEQ ID NO: 1344503 - RNA, 19 nt, Artificial Sequence
  Description of Artificial Sequence: Synthetic oligonucleotide
ggaugcgucgcagggcaaa

SEQ ID NO: 1344504 - RNA, 19 nt, Artificial Sequence
  Description of Artificial Sequence: Synthetic oligonucleotide
cugaucccuguaacacacu

SEQ ID NO: 1344505 - RNA, 19 nt, Artificial Sequence
  Description of Artificial Sequence: Synthetic oligonucleotide
gccucaccugaauagugau

SEQ ID NO: 1344506 - RNA, 19 nt, Artificial Sequence
  Description of Artificial Sequence: Synthetic oligonucleotide
ccucaccucgcaggaugcg

SEQ ID NO: 1344507 - RNA, 19 nt, Artificial Sequence
  Description of Artificial Sequence: Synthetic oligonucleotide
agcgggacccagacucaau

SEQ ID NO: 1344508 - RNA, 19 nt, Artificial Sequence
  Description of Artificial Sequence: Synthetic oligonucleotide
guacacggcugaccccacu

SEQ ID NO: 1344509 - RNA, 19 nt, Artificial Sequence
  Description of Artificial Sequence: Synthetic oligonucleotide
ggaccccacccucuuaaau

SEQ ID NO: 1344510 - RNA, 19 nt, Artificial Sequence
  Description of Artificial Sequence: Synthetic oligonucleotide
ccucaaugggaaacuugua

SEQ ID NO: 1344511 - RNA, 19 nt, Artificial Sequence
  Description of Artificial Sequence: Synthetic oligonucleotide
ccaggcaaauguccgggua

SEQ ID NO: 1344512 - RNA, 19 nt, Artificial Sequence
  Description of Artificial Sequence: Synthetic oligonucleotide
gggcgucuucauccguaca

SEQ ID NO: 1344513 - RNA, 19 nt, Artificial Sequence
  Description of Artificial Sequence: Synthetic oligonucleotide
cgacggcagcgcuuggcgc

SEQ ID NO: 1344514 - RNA, 19 nt, Artificial Sequence
  Description of Artificial Sequence: Synthetic oligonucleotide
guagcacccgauacccuuu

SEQ ID NO: 1344515 - RNA, 19 nt, Artificial Sequence
  Description of Artificial Sequence: Synthetic oligonucleotide
ccggcgucgauguugcgcu

SEQ ID NO: 1344516 - RNA, 19 nt, Artificial Sequence
  Description of Artificial Sequence: Synthetic oligonucleotide
ccguggaucgcugaucugu

SEQ ID NO: 1344517 - RNA, 19 nt, Artificial Sequence
  Description of Artificial Sequence: Synthetic oligonucleotide
gcucguuugggaaccuggu

SEQ ID NO: 1344518 - RNA, 19 nt, Artificial Sequence
  Description of Artificial Sequence: Synthetic oligonucleotide
ccucucccguggaucgcug

SEQ ID NO: 1344519 - RNA, 19 nt, Artificial Sequence
  Description of Artificial Sequence: Synthetic oligonucleotide
cgccucaguuaaggaagcg

SEQ ID NO: 1344520 - RNA, 19 nt, Artificial Sequence
  Description of Artificial Sequence: Synthetic oligonucleotide
cagcaggcuccccaguauu

SEQ ID NO: 1344521 - RNA, 19 nt, Artificial Sequence
  Description of Artificial Sequence: Synthetic oligonucleotide
gggaccccacccucuuaaa

SEQ ID NO: 1344522 - RNA, 19 nt, Artificial Sequence
  Description of Artificial Sequence: Synthetic oligonucleotide
aggaugcgucgcagggcaa

SEQ ID NO: 1344523 - RNA, 19 nt, Artificial Sequence
  Description of Artificial Sequence: Synthetic oligonucleotide
ggcggccacgccucaguua

SEQ ID NO: 1344524 - RNA, 19 nt, Artificial Sequence
  Description of Artificial Sequence: Synthetic oligonucleotide
cagucagcacagagcgaau

SEQ ID NO: 1344525 - RNA, 19 nt, Artificial Sequence
  Description of Artificial Sequence: Synthetic oligonucleotide
gcucggagugagacacuga

SEQ ID NO: 1344526 - RNA, 19 nt, Artificial Sequence
  Description of Artificial Sequence: Synthetic oligonucleotide
cccguggaucgcugaucug

SEQ ID NO: 1344527 - RNA, 19 nt, Artificial Sequence
  Description of Artificial Sequence: Synthetic oligonucleotide
ggcgucgauguugcgcuua

SEQ ID NO: 1344528 - RNA, 19 nt, Artificial Sequence
  Description of Artificial Sequence: Synthetic oligonucleotide
ccacauggaugacgcgaga

SEQ ID NO: 1344529 - RNA, 19 nt, Artificial Sequence
  Description of Artificial Sequence: Synthetic oligonucleotide
gcccgggcaggaccuucug

SEQ ID NO: 1344530 - RNA, 19 nt, Artificial Sequence
  Description of Artificial Sequence: Synthetic oligonucleotide
gcucacacgagugguugau

SEQ ID NO: 1344531 - RNA, 19 nt, Artificial Sequence
  Description of Artificial Sequence: Synthetic oligonucleotide
cguggaucgcugaucugua

SEQ ID NO: 1344532 - RNA, 19 nt, Artificial Sequence
  Description of Artificial Sequence: Synthetic oligonucleotide
ggggugugacagggucacc

SEQ ID NO: 1344533 - RNA, 19 nt, Artificial Sequence
  Description of Artificial Sequence: Synthetic oligonucleotide
gcgggcacaugagcaaucu

SEQ ID NO: 1344534 - RNA, 19 nt, Artificial Sequence
  Description of Artificial Sequence: Synthetic oligonucleotide
ggccucucccguggaucgc

SEQ ID NO: 1344535 - RNA, 19 nt, Artificial Sequence
  Description of Artificial Sequence: Synthetic oligonucleotide
cggccucacacugaagcca

SEQ ID NO: 1344536 - RNA, 19 nt, Artificial Sequence
  Description of Artificial Sequence: Synthetic oligonucleotide
gccgugcaugguggcgucc

SEQ ID NO: 1344537 - RNA, 19 nt, Artificial Sequence
  Description of Artificial Sequence: Synthetic oligonucleotide
cagcgggcacaugagcaau

SEQ ID NO: 1344538 - RNA, 19 nt, Artificial Sequence
  Description of Artificial Sequence: Synthetic oligonucleotide
ggcagcgcuuggcgccaca

SEQ ID NO: 1344539 - RNA, 19 nt, Artificial Sequence
  Description of Artificial Sequence: Synthetic oligonucleotide
cuggggcggccacgccuca

SEQ ID NO: 1344540 - RNA, 19 nt, Artificial Sequence
  Description of Artificial Sequence: Synthetic oligonucleotide
ccccacccucuuaaauaaa

SEQ ID NO: 1344541 - RNA, 19 nt, Artificial Sequence
  Description of Artificial Sequence: Synthetic oligonucleotide
cgauacccuuuccaucaua

SEQ ID NO: 1344542 - RNA, 19 nt, Artificial Sequence
  Description of Artificial Sequence: Synthetic oligonucleotide
gccucacacugaagccauc

SEQ ID NO: 1344543 - RNA, 19 nt, Artificial Sequence
  Description of Artificial Sequence: Synthetic oligonucleotide
gcuuggcgccacaguugca

SEQ ID NO: 1344544 - RNA, 19 nt, Artificial Sequence
  Description of Artificial Sequence: Synthetic oligonucleotide
gcuagcgggcagaccuugu

SEQ ID NO: 1344545 - RNA, 19 nt, Artificial Sequence
  Description of Artificial Sequence: Synthetic oligonucleotide
ggugccgaagggagagauu

SEQ ID NO: 1344546 - RNA, 19 nt, Artificial Sequence
  Description of Artificial Sequence: Synthetic oligonucleotide
cgagcaugcccucgagccu

SEQ ID NO: 1344547 - RNA, 19 nt, Artificial Sequence
  Description of Artificial Sequence: Synthetic oligonucleotide
ccccggcgucgauguugcg

SEQ ID NO: 1344548 - RNA, 19 nt, Artificial Sequence
  Description of Artificial Sequence: Synthetic oligonucleotide
cccucgcacugugggcguc

SEQ ID NO: 1344549 - RNA, 19 nt, Artificial Sequence
  Description of Artificial Sequence: Synthetic oligonucleotide
cucgcacugugggcgucuu

SEQ ID NO: 1344550 - RNA, 19 nt, Artificial Sequence
  Description of Artificial Sequence: Synthetic oligonucleotide
ccgauacccuuuccaucau

SEQ ID NO: 1344551 - RNA, 19 nt, Artificial Sequence
  Description of Artificial Sequence: Synthetic oligonucleotide
ccagaaccccucgcacugu

SEQ ID NO: 1344552 - RNA, 19 nt, Artificial Sequence
  Description of Artificial Sequence: Synthetic oligonucleotide
ccucgcacugugggcgucu

SEQ ID NO: 1344553 - RNA, 19 nt, Artificial Sequence
  Description of Artificial Sequence: Synthetic oligonucleotide
gggcuagcgggcagaccuu

SEQ ID NO: 1344554 - RNA, 19 nt, Artificial Sequence
  Description of Artificial Sequence: Synthetic oligonucleotide
ccccucgcacugugggcgu

SEQ ID NO: 1344555 - RNA, 19 nt, Artificial Sequence
  Description of Artificial Sequence: Synthetic oligonucleotide
cggcagcgcuuggcgccac

SEQ ID NO: 1344556 - RNA, 19 nt, Artificial Sequence
  Description of Artificial Sequence: Synthetic oligonucleotide
cggcgucgauguugcgcuu

SEQ ID NO: 1344557 - RNA, 19 nt, Artificial Sequence
  Description of Artificial Sequence: Synthetic oligonucleotide
auucuaaugguuuugaugg

SEQ ID NO: 1344558 - RNA, 19 nt, Artificial Sequence
  Description of Artificial Sequence: Synthetic oligonucleotide
ucagauacaacuaagcuag

SEQ ID NO: 1344559 - RNA, 19 nt, Artificial Sequence
  Description of Artificial Sequence: Synthetic oligonucleotide
uucuuuaccaccaagaaug

SEQ ID NO: 1344560 - RNA, 19 nt, Artificial Sequence
  Description of Artificial Sequence: Synthetic oligonucleotide
uuuaccaccaagaauggcg

SEQ ID NO: 1344561 - RNA, 19 nt, Artificial Sequence
  Description of Artificial Sequence: Synthetic oligonucleotide
aaacccucaaaucaaggcc

SEQ ID NO: 1344562 - RNA, 19 nt, Artificial Sequence
  Description of Artificial Sequence: Synthetic oligonucleotide
gaauugauaaucaacauug

SEQ ID NO: 1344563 - RNA, 19 nt, Artificial Sequence
  Description of Artificial Sequence: Synthetic oligonucleotide
uauuacaaugcaaacccgg

SEQ ID NO: 1344564 - RNA, 19 nt, Artificial Sequence
  Description of Artificial Sequence: Synthetic oligonucleotide
acaguuucaacccugaaug

SEQ ID NO: 1344565 - RNA, 19 nt, Artificial Sequence
  Description of Artificial Sequence: Synthetic oligonucleotide
uauaguuuuguucaccuca

SEQ ID NO: 1344566 - RNA, 19 nt, Artificial Sequence
  Description of Artificial Sequence: Synthetic oligonucleotide
aucacuaaaauguuguuug

SEQ ID NO: 1344567 - RNA, 19 nt, Artificial Sequence
  Description of Artificial Sequence: Synthetic oligonucleotide
ugauaaucaacauuggggu

SEQ ID NO: 1344568 - RNA, 19 nt, Artificial Sequence
  Description of Artificial Sequence: Synthetic oligonucleotide
ucuucgacugcucagacug

SEQ ID NO: 1344569 - RNA, 19 nt, Artificial Sequence
  Description of Artificial Sequence: Synthetic oligonucleotide
acuggaguagagcacaccc

SEQ ID NO: 1344570 - RNA, 19 nt, Artificial Sequence
  Description of Artificial Sequence: Synthetic oligonucleotide
agugcuauauuucuucgac

SEQ ID NO: 1344571 - RNA, 19 nt, Artificial Sequence
  Description of Artificial Sequence: Synthetic oligonucleotide
ugaauucagugucagaccc

SEQ ID NO: 1344572 - RNA, 19 nt, Artificial Sequence
  Description of Artificial Sequence: Synthetic oligonucleotide
uaugaauucagugucagac

SEQ ID NO: 1344573 - RNA, 19 nt, Artificial Sequence
  Description of Artificial Sequence: Synthetic oligonucleotide
auuugcagugcauuuacgg

SEQ ID NO: 1344574 - RNA, 19 nt, Artificial Sequence
  Description of Artificial Sequence: Synthetic oligonucleotide
uuaaaucacuaaaauguug

SEQ ID NO: 1344575 - RNA, 19 nt, Artificial Sequence
  Description of Artificial Sequence: Synthetic oligonucleotide
aagaauggcgaucucaccu

SEQ ID NO: 1344576 - RNA, 19 nt, Artificial Sequence
  Description of Artificial Sequence: Synthetic oligonucleotide
ucuaugugcaacacuauga

SEQ ID NO: 1344577 - RNA, 19 nt, Artificial Sequence
  Description of Artificial Sequence: Synthetic oligonucleotide
uacaucaacuaguaaaggc

SEQ ID NO: 1344578 - RNA, 19 nt, Artificial Sequence
  Description of Artificial Sequence: Synthetic oligonucleotide
uggucuuucacuauguuaa

SEQ ID NO: 1344579 - RNA, 19 nt, Artificial Sequence
  Description of Artificial Sequence: Synthetic oligonucleotide
gaaucauccaacugagccg

SEQ ID NO: 1344580 - RNA, 19 nt, Artificial Sequence
  Description of Artificial Sequence: Synthetic oligonucleotide
cucaaaaugcuaaaacacc

SEQ ID NO: 1344581 - RNA, 19 nt, Artificial Sequence
  Description of Artificial Sequence: Synthetic oligonucleotide
ugauuagucauuucuuugc

SEQ ID NO: 1344582 - RNA, 19 nt, Artificial Sequence
  Description of Artificial Sequence: Synthetic oligonucleotide
auccgaaguaaagagagcc

SEQ ID NO: 1344583 - RNA, 19 nt, Artificial Sequence
  Description of Artificial Sequence: Synthetic oligonucleotide
aacaggguacaucaacuag

SEQ ID NO: 1344584 - RNA, 19 nt, Artificial Sequence
  Description of Artificial Sequence: Synthetic oligonucleotide
ucgaugucaaaugugacag

SEQ ID NO: 1344585 - RNA, 19 nt, Artificial Sequence
  Description of Artificial Sequence: Synthetic oligonucleotide
ugcaacacuaugaauucag

SEQ ID NO: 1344586 - RNA, 19 nt, Artificial Sequence
  Description of Artificial Sequence: Synthetic oligonucleotide
aaugcaaacccggcaauac

SEQ ID NO: 1344587 - RNA, 19 nt, Artificial Sequence
  Description of Artificial Sequence: Synthetic oligonucleotide
uaaagagagccacaggacu

SEQ ID NO: 1344588 - RNA, 19 nt, Artificial Sequence
  Description of Artificial Sequence: Synthetic oligonucleotide
auacaacuaagcuagucug

SEQ ID NO: 1344589 - RNA, 19 nt, Artificial Sequence
  Description of Artificial Sequence: Synthetic oligonucleotide
uaagcuguccaacugaaua

SEQ ID NO: 1344590 - RNA, 19 nt, Artificial Sequence
  Description of Artificial Sequence: Synthetic oligonucleotide
ggaaucauccaacugagcc

SEQ ID NO: 1344591 - RNA, 19 nt, Artificial Sequence
  Description of Artificial Sequence: Synthetic oligonucleotide
ugaauugauaaucaacauu

SEQ ID NO: 1344592 - RNA, 19 nt, Artificial Sequence
  Description of Artificial Sequence: Synthetic oligonucleotide
uguccaacugaauauguga

SEQ ID NO: 1344593 - RNA, 19 nt, Artificial Sequence
  Description of Artificial Sequence: Synthetic oligonucleotide
aaaacgagcauccgaagua

SEQ ID NO: 1344594 - RNA, 19 nt, Artificial Sequence
  Description of Artificial Sequence: Synthetic oligonucleotide
uacugucucgucuaucugg

SEQ ID NO: 1344595 - RNA, 19 nt, Artificial Sequence
  Description of Artificial Sequence: Synthetic oligonucleotide
gaaguaaagagagccacag

SEQ ID NO: 1344596 - RNA, 19 nt, Artificial Sequence
  Description of Artificial Sequence: Synthetic oligonucleotide
aaugugacaguggauccgg

SEQ ID NO: 1344597 - RNA, 19 nt, Artificial Sequence
  Description of Artificial Sequence: Synthetic oligonucleotide
aaaguuccacaauuuguca

SEQ ID NO: 1344598 - RNA, 19 nt, Artificial Sequence
  Description of Artificial Sequence: Synthetic oligonucleotide
guuagcaguuccuagaguc

SEQ ID NO: 1344599 - RNA, 19 nt, Artificial Sequence
  Description of Artificial Sequence: Synthetic oligonucleotide
auuacaaugcaaacccggc

SEQ ID NO: 1344600 - RNA, 19 nt, Artificial Sequence
  Description of Artificial Sequence: Synthetic oligonucleotide
gaugucaaaugugacagug

SEQ ID NO: 1344601 - RNA, 19 nt, Artificial Sequence
  Description of Artificial Sequence: Synthetic oligonucleotide
aacugaauaugugaggccu

SEQ ID NO: 1344602 - RNA, 19 nt, Artificial Sequence
  Description of Artificial Sequence: Synthetic oligonucleotide
cuauguuaagaauggaauc

SEQ ID NO: 1344603 - RNA, 19 nt, Artificial Sequence
  Description of Artificial Sequence: Synthetic oligonucleotide
uccaacugaauaugugagg

SEQ ID NO: 1344604 - RNA, 19 nt, Artificial Sequence
  Description of Artificial Sequence: Synthetic oligonucleotide
uacuguuccaugcuuaaaa

SEQ ID NO: 1344605 - RNA, 19 nt, Artificial Sequence
  Description of Artificial Sequence: Synthetic oligonucleotide
ugcauuuacggaacuggag

SEQ ID NO: 1344606 - RNA, 19 nt, Artificial Sequence
  Description of Artificial Sequence: Synthetic oligonucleotide
ucuuuaccaccaagaaugg

SEQ ID NO: 1344607 - RNA, 19 nt, Artificial Sequence
  Description of Artificial Sequence: Synthetic oligonucleotide
aaaugugacaguggauccg

SEQ ID NO: 1344608 - RNA, 19 nt, Artificial Sequence
  Description of Artificial Sequence: Synthetic oligonucleotide
uacaaugcaaacccggcaa

SEQ ID NO: 1344609 - RNA, 19 nt, Artificial Sequence
  Description of Artificial Sequence: Synthetic oligonucleotide
ugauuugcagugcauuuac

SEQ ID NO: 1344610 - RNA, 19 nt, Artificial Sequence
  Description of Artificial Sequence: Synthetic oligonucleotide
ucugcacacacuccuauac

SEQ ID NO: 1344611 - RNA, 19 nt, Artificial Sequence
  Description of Artificial Sequence: Synthetic oligonucleotide
cauuuacggaacuggagcc

SEQ ID NO: 1344612 - RNA, 19 nt, Artificial Sequence
  Description of Artificial Sequence: Synthetic oligonucleotide
cacagaaguagguuggagc

SEQ ID NO: 1344613 - RNA, 19 nt, Artificial Sequence
  Description of Artificial Sequence: Synthetic oligonucleotide
agacucugaauugauaauc

SEQ ID NO: 1344614 - RNA, 19 nt, Artificial Sequence
  Description of Artificial Sequence: Synthetic oligonucleotide
ucaacccugaauguuaaug

SEQ ID NO: 1344615 - RNA, 19 nt, Artificial Sequence
  Description of Artificial Sequence: Synthetic oligonucleotide
cugaacuauaguuuuguuc

SEQ ID NO: 1344616 - RNA, 19 nt, Artificial Sequence
  Description of Artificial Sequence: Synthetic oligonucleotide
auaaucaacauuggggucu

SEQ ID NO: 1344617 - RNA, 19 nt, Artificial Sequence
  Description of Artificial Sequence: Synthetic oligonucleotide
agacuguaucccucaaagc

SEQ ID NO: 1344618 - RNA, 19 nt, Artificial Sequence
  Description of Artificial Sequence: Synthetic oligonucleotide
ugagccgacaaacagggua

SEQ ID NO: 1344619 - RNA, 19 nt, Artificial Sequence
  Description of Artificial Sequence: Synthetic oligonucleotide
uuacaaugcaaacccggca

SEQ ID NO: 1344620 - RNA, 19 nt, Artificial Sequence
  Description of Artificial Sequence: Synthetic oligonucleotide
gaguagagcacacccgagg

SEQ ID NO: 1344621 - RNA, 19 nt, Artificial Sequence
  Description of Artificial Sequence: Synthetic oligonucleotide
ucgucuaucuggcuguccc

SEQ ID NO: 1344622 - RNA, 19 nt, Artificial Sequence
  Description of Artificial Sequence: Synthetic oligonucleotide
caucaacuaguaaaggcac

SEQ ID NO: 1344623 - RNA, 19 nt, Artificial Sequence
  Description of Artificial Sequence: Synthetic oligonucleotide
uggaguagagcacacccga

SEQ ID NO: 1344624 - RNA, 19 nt, Artificial Sequence
  Description of Artificial Sequence: Synthetic oligonucleotide
gaauguuaaugucugccca

SEQ ID NO: 1344625 - RNA, 19 nt, Artificial Sequence
  Description of Artificial Sequence: Synthetic oligonucleotide
cucaccuuuugaaagucag

SEQ ID NO: 1344626 - RNA, 19 nt, Artificial Sequence
  Description of Artificial Sequence: Synthetic oligonucleotide
acugagccgacaaacaggg

SEQ ID NO: 1344627 - RNA, 19 nt, Artificial Sequence
  Description of Artificial Sequence: Synthetic oligonucleotide
uuuccauccaggauagaaa

SEQ ID NO: 1344628 - RNA, 19 nt, Artificial Sequence
  Description of Artificial Sequence: Synthetic oligonucleotide
ucuugcaaaagggucacca

SEQ ID NO: 1344629 - RNA, 19 nt, Artificial Sequence
  Description of Artificial Sequence: Synthetic oligonucleotide
uagagucacagcuucgaug

SEQ ID NO: 1344630 - RNA, 19 nt, Artificial Sequence
  Description of Artificial Sequence: Synthetic oligonucleotide
aaucacuaaaauguuguuu

SEQ ID NO: 1344631 - RNA, 19 nt, Artificial Sequence
  Description of Artificial Sequence: Synthetic oligonucleotide
aaguuccacaauuugucau

SEQ ID NO: 1344632 - RNA, 19 nt, Artificial Sequence
  Description of Artificial Sequence: Synthetic oligonucleotide
uuugguaaaguuccacaau

SEQ ID NO: 1344633 - RNA, 19 nt, Artificial Sequence
  Description of Artificial Sequence: Synthetic oligonucleotide
uugcaaaagggucaccagu

SEQ ID NO: 1344634 - RNA, 19 nt, Artificial Sequence
  Description of Artificial Sequence: Synthetic oligonucleotide
uacaacuaagcuagucuga

SEQ ID NO: 1344635 - RNA, 19 nt, Artificial Sequence
  Description of Artificial Sequence: Synthetic oligonucleotide
ugaggcaccaauguggagu

SEQ ID NO: 1344636 - RNA, 19 nt, Artificial Sequence
  Description of Artificial Sequence: Synthetic oligonucleotide
aagcuguccaacugaauau

SEQ ID NO: 1344637 - RNA, 19 nt, Artificial Sequence
  Description of Artificial Sequence: Synthetic oligonucleotide
uacuaugaugccuccaggu

SEQ ID NO: 1344638 - RNA, 19 nt, Artificial Sequence
  Description of Artificial Sequence: Synthetic oligonucleotide
gacugcucagacuguaucc

SEQ ID NO: 1344639 - RNA, 19 nt, Artificial Sequence
  Description of Artificial Sequence: Synthetic oligonucleotide
uguuaaugucugcccacag

SEQ ID NO: 1344640 - RNA, 19 nt, Artificial Sequence
  Description of Artificial Sequence: Synthetic oligonucleotide
aagagagccacaggacugg

SEQ ID NO: 1344641 - RNA, 19 nt, Artificial Sequence
  Description of Artificial Sequence: Synthetic oligonucleotide
ugacaguggauccggaggu

SEQ ID NO: 1344642 - RNA, 19 nt, Artificial Sequence
  Description of Artificial Sequence: Synthetic oligonucleotide
uuugaggacaucucuuguc

SEQ ID NO: 1344643 - RNA, 19 nt, Artificial Sequence
  Description of Artificial Sequence: Synthetic oligonucleotide
gaugguuacucggagcuug

SEQ ID NO: 1344644 - RNA, 19 nt, Artificial Sequence
  Description of Artificial Sequence: Synthetic oligonucleotide
ugguaagcuguccaacuga

SEQ ID NO: 1344645 - RNA, 19 nt, Artificial Sequence
  Description of Artificial Sequence: Synthetic oligonucleotide
gcauuuacggaacuggagc

SEQ ID NO: 1344646 - RNA, 19 nt, Artificial Sequence
  Description of Artificial Sequence: Synthetic oligonucleotide
augcuaaaacaccagcacu

SEQ ID NO: 1344647 - RNA, 19 nt, Artificial Sequence
  Description of Artificial Sequence: Synthetic oligonucleotide
guuguuagcaguuccuaga

SEQ ID NO: 1344648 - RNA, 19 nt, Artificial Sequence
  Description of Artificial Sequence: Synthetic oligonucleotide
uugcagugcauuuacggaa

SEQ ID NO: 1344649 - RNA, 19 nt, Artificial Sequence
  Description of Artificial Sequence: Synthetic oligonucleotide
ucaucagcggugcuaacuc

SEQ ID NO: 1344650 - RNA, 19 nt, Artificial Sequence
  Description of Artificial Sequence: Synthetic oligonucleotide
ccucaaaaugcuaaaacac

SEQ ID NO: 1344651 - RNA, 19 nt, Artificial Sequence
  Description of Artificial Sequence: Synthetic oligonucleotide
aaaugauuugcagugcauu

SEQ ID NO: 1344652 - RNA, 19 nt, Artificial Sequence
  Description of Artificial Sequence: Synthetic oligonucleotide
auaguuuuguucaccucac

SEQ ID NO: 1344653 - RNA, 19 nt, Artificial Sequence
  Description of Artificial Sequence: Synthetic oligonucleotide
ucaccagucgcucauccaa

SEQ ID NO: 1344654 - RNA, 19 nt, Artificial Sequence
  Description of Artificial Sequence: Synthetic oligonucleotide
caccaccguacuaugaugc

SEQ ID NO: 1344655 - RNA, 19 nt, Artificial Sequence
  Description of Artificial Sequence: Synthetic oligonucleotide
aaacaggguacaucaacua

SEQ ID NO: 1344656 - RNA, 19 nt, Artificial Sequence
  Description of Artificial Sequence: Synthetic oligonucleotide
uacugcaggcaacugauua

SEQ ID NO: 1344657 - RNA, 19 nt, Artificial Sequence
  Description of Artificial Sequence: Synthetic oligonucleotide
acugucucgucuaucuggc

SEQ ID NO: 1344658 - RNA, 19 nt, Artificial Sequence
  Description of Artificial Sequence: Synthetic oligonucleotide
aggccaagcccucaaaaug

SEQ ID NO: 1344659 - RNA, 19 nt, Artificial Sequence
  Description of Artificial Sequence: Synthetic oligonucleotide
uauauuucuucgacugcuc

SEQ ID NO: 1344660 - RNA, 19 nt, Artificial Sequence
  Description of Artificial Sequence: Synthetic oligonucleotide
uacaccaccguacuaugau

SEQ ID NO: 1344661 - RNA, 19 nt, Artificial Sequence
  Description of Artificial Sequence: Synthetic oligonucleotide
uccgaaguaaagagagcca

SEQ ID NO: 1344662 - RNA, 19 nt, Artificial Sequence
  Description of Artificial Sequence: Synthetic oligonucleotide
ggagcugaugguuacucgg

SEQ ID NO: 1344663 - RNA, 19 nt, Artificial Sequence
  Description of Artificial Sequence: Synthetic oligonucleotide
caaaagggucaccagucgc

SEQ ID NO: 1344664 - RNA, 19 nt, Artificial Sequence
  Description of Artificial Sequence: Synthetic oligonucleotide
acuccuauacugucucguc

SEQ ID NO: 1344665 - RNA, 19 nt, Artificial Sequence
  Description of Artificial Sequence: Synthetic oligonucleotide
accaccguacuaugaugcc

SEQ ID NO: 1344666 - RNA, 19 nt, Artificial Sequence
  Description of Artificial Sequence: Synthetic oligonucleotide
gucuaugugcaacacuaug

SEQ ID NO: 1344667 - RNA, 19 nt, Artificial Sequence
  Description of Artificial Sequence: Synthetic oligonucleotide
caacugagccgacaaacag

SEQ ID NO: 1344668 - RNA, 19 nt, Artificial Sequence
  Description of Artificial Sequence: Synthetic oligonucleotide
ugcagugcauuuacggaac

SEQ ID NO: 1344669 - RNA, 19 nt, Artificial Sequence
  Description of Artificial Sequence: Synthetic oligonucleotide
ugcaaacccggcaauacuu

SEQ ID NO: 1344670 - RNA, 19 nt, Artificial Sequence
  Description of Artificial Sequence: Synthetic oligonucleotide
ucuaaugguuuugaugguc

SEQ ID NO: 1344671 - RNA, 19 nt, Artificial Sequence
  Description of Artificial Sequence: Synthetic oligonucleotide
auauuacaaugcaaacccg

SEQ ID NO: 1344672 - RNA, 19 nt, Artificial Sequence
  Description of Artificial Sequence: Synthetic oligonucleotide
cuggaguagagcacacccg

SEQ ID NO: 1344673 - RNA, 19 nt, Artificial Sequence
  Description of Artificial Sequence: Synthetic oligonucleotide
uuucaacccugaauguuaa

SEQ ID NO: 1344674 - RNA, 19 nt, Artificial Sequence
  Description of Artificial Sequence: Synthetic oligonucleotide
caacugaauaugugaggcc

SEQ ID NO: 1344675 - RNA, 19 nt, Artificial Sequence
  Description of Artificial Sequence: Synthetic oligonucleotide
uuuacggaacuggagccug

SEQ ID NO: 1344676 - RNA, 19 nt, Artificial Sequence
  Description of Artificial Sequence: Synthetic oligonucleotide
cacucaacucacuucuuac

SEQ ID NO: 1344677 - RNA, 19 nt, Artificial Sequence
  Description of Artificial Sequence: Synthetic oligonucleotide
uccuagagucacagcuucg

SEQ ID NO: 1344678 - RNA, 19 nt, Artificial Sequence
  Description of Artificial Sequence: Synthetic oligonucleotide
auuccggagugcuauauuu

SEQ ID NO: 1344679 - RNA, 19 nt, Artificial Sequence
  Description of Artificial Sequence: Synthetic oligonucleotide
ucaccuuuugaaagucaga

SEQ ID NO: 1344680 - RNA, 19 nt, Artificial Sequence
  Description of Artificial Sequence: Synthetic oligonucleotide
guacaucaacuaguaaagg

SEQ ID NO: 1344681 - RNA, 19 nt, Artificial Sequence
  Description of Artificial Sequence: Synthetic oligonucleotide
uguccacucaugaggcacc

SEQ ID NO: 1344682 - RNA, 19 nt, Artificial Sequence
  Description of Artificial Sequence: Synthetic oligonucleotide
gauuugcagugcauuuacg

SEQ ID NO: 1344683 - RNA, 19 nt, Artificial Sequence
  Description of Artificial Sequence: Synthetic oligonucleotide
ucaacuaguaaaggcacuu

SEQ ID NO: 1344684 - RNA, 19 nt, Artificial Sequence
  Description of Artificial Sequence: Synthetic oligonucleotide
ggagugcuauauuucuucg

SEQ ID NO: 1344685 - RNA, 19 nt, Artificial Sequence
  Description of Artificial Sequence: Synthetic oligonucleotide
uuucugcacacacuccuau

SEQ ID NO: 1344686 - RNA, 19 nt, Artificial Sequence
  Description of Artificial Sequence: Synthetic oligonucleotide
cuuacaccaccguacuaug

SEQ ID NO: 1344687 - RNA, 19 nt, Artificial Sequence
  Description of Artificial Sequence: Synthetic oligonucleotide
ucacucaacucacuucuua

SEQ ID NO: 1344688 - RNA, 19 nt, Artificial Sequence
  Description of Artificial Sequence: Synthetic oligonucleotide
caucauccaccuuacacca

SEQ ID NO: 1344689 - RNA, 19 nt, Artificial Sequence
  Description of Artificial Sequence: Synthetic oligonucleotide
aaaaugauuugcagugcau

SEQ ID NO: 1344690 - RNA, 19 nt, Artificial Sequence
  Description of Artificial Sequence: Synthetic oligonucleotide
uuacaccaccguacuauga

SEQ ID NO: 1344691 - RNA, 19 nt, Artificial Sequence
  Description of Artificial Sequence: Synthetic oligonucleotide
auguggagugaccugucug

SEQ ID NO: 1344692 - RNA, 19 nt, Artificial Sequence
  Description of Artificial Sequence: Synthetic oligonucleotide
uuucuucgacugcucagac

SEQ ID NO: 1344693 - RNA, 19 nt, Artificial Sequence
  Description of Artificial Sequence: Synthetic oligonucleotide
ccaacugaauaugugaggc

SEQ ID NO: 1344694 - RNA, 19 nt, Artificial Sequence
  Description of Artificial Sequence: Synthetic oligonucleotide
gagguaagcucaccuuuug

SEQ ID NO: 1344695 - RNA, 19 nt, Artificial Sequence
  Description of Artificial Sequence: Synthetic oligonucleotide
uccaccuuacaccaccgua

SEQ ID NO: 1344696 - RNA, 19 nt, Artificial Sequence
  Description of Artificial Sequence: Synthetic oligonucleotide
ccaaucaaacaccaccucc

SEQ ID NO: 1344697 - RNA, 19 nt, Artificial Sequence
  Description of Artificial Sequence: Synthetic oligonucleotide
guaaagagagccacaggac

SEQ ID NO: 1344698 - RNA, 19 nt, Artificial Sequence
  Description of Artificial Sequence: Synthetic oligonucleotide
acuaugaugccuccagguu

SEQ ID NO: 1344699 - RNA, 19 nt, Artificial Sequence
  Description of Artificial Sequence: Synthetic oligonucleotide
accguacuaugaugccucc

SEQ ID NO: 1344700 - RNA, 19 nt, Artificial Sequence
  Description of Artificial Sequence: Synthetic oligonucleotide
aaacgagcauccgaaguaa

SEQ ID NO: 1344701 - RNA, 19 nt, Artificial Sequence
  Description of Artificial Sequence: Synthetic oligonucleotide
uuggggucuaugugcaaca

SEQ ID NO: 1344702 - RNA, 19 nt, Artificial Sequence
  Description of Artificial Sequence: Synthetic oligonucleotide
augucaaaugugacagugg

SEQ ID NO: 1344703 - RNA, 19 nt, Artificial Sequence
  Description of Artificial Sequence: Synthetic oligonucleotide
accaccaagaauggcgauc

SEQ ID NO: 1344704 - RNA, 19 nt, Artificial Sequence
  Description of Artificial Sequence: Synthetic oligonucleotide
acaggguacaucaacuagu

SEQ ID NO: 1344705 - RNA, 19 nt, Artificial Sequence
  Description of Artificial Sequence: Synthetic oligonucleotide
cacucaugaggcaccaaug

SEQ ID NO: 1344706 - RNA, 19 nt, Artificial Sequence
  Description of Artificial Sequence: Synthetic oligonucleotide
guucucgcgggcuucuugc

SEQ ID NO: 1344707 - RNA, 19 nt, Artificial Sequence
  Description of Artificial Sequence: Synthetic oligonucleotide
cagucgcucauccaacagc

SEQ ID NO: 1344708 - RNA, 19 nt, Artificial Sequence
  Description of Artificial Sequence: Synthetic oligonucleotide
cuaagcuagucugaggaca

SEQ ID NO: 1344709 - RNA, 19 nt, Artificial Sequence
  Description of Artificial Sequence: Synthetic oligonucleotide
uucuaaugguuuugauggu

SEQ ID NO: 1344710 - RNA, 19 nt, Artificial Sequence
  Description of Artificial Sequence: Synthetic oligonucleotide
cauccgaaguaaagagagc

SEQ ID NO: 1344711 - RNA, 19 nt, Artificial Sequence
  Description of Artificial Sequence: Synthetic oligonucleotide
ucauucuaaugguuuugau

SEQ ID NO: 1344712 - RNA, 19 nt, Artificial Sequence
  Description of Artificial Sequence: Synthetic oligonucleotide
caccguacuaugaugccuc

SEQ ID NO: 1344713 - RNA, 19 nt, Artificial Sequence
  Description of Artificial Sequence: Synthetic oligonucleotide
accaagaauggcgaucuca

SEQ ID NO: 1344714 - RNA, 19 nt, Artificial Sequence
  Description of Artificial Sequence: Synthetic oligonucleotide
gcuaacuccaugcucuaug

SEQ ID NO: 1344715 - RNA, 19 nt, Artificial Sequence
  Description of Artificial Sequence: Synthetic oligonucleotide
uguaucccucaaagccagg

SEQ ID NO: 1344716 - RNA, 19 nt, Artificial Sequence
  Description of Artificial Sequence: Synthetic oligonucleotide
cacccgaggacucagcauc

SEQ ID NO: 1344717 - RNA, 19 nt, Artificial Sequence
  Description of Artificial Sequence: Synthetic oligonucleotide
gacucagcaucauuccgga

SEQ ID NO: 1344718 - RNA, 19 nt, Artificial Sequence
  Description of Artificial Sequence: Synthetic oligonucleotide
uggauccggagguuacugc

SEQ ID NO: 1344719 - RNA, 19 nt, Artificial Sequence
  Description of Artificial Sequence: Synthetic oligonucleotide
gagugcuauauuucuucga

SEQ ID NO: 1344720 - RNA, 19 nt, Artificial Sequence
  Description of Artificial Sequence: Synthetic oligonucleotide
ugugaagcacucuccuuua

SEQ ID NO: 1344721 - RNA, 19 nt, Artificial Sequence
  Description of Artificial Sequence: Synthetic oligonucleotide
gagccgacaaacaggguac

SEQ ID NO: 1344722 - RNA, 19 nt, Artificial Sequence
  Description of Artificial Sequence: Synthetic oligonucleotide
aucuguacuggugggcggg

SEQ ID NO: 1344723 - RNA, 19 nt, Artificial Sequence
  Description of Artificial Sequence: Synthetic oligonucleotide
agaauggcgaucucaccuu

SEQ ID NO: 1344724 - RNA, 19 nt, Artificial Sequence
  Description of Artificial Sequence: Synthetic oligonucleotide
ccaagaauggcgaucucac

SEQ ID NO: 1344725 - RNA, 19 nt, Artificial Sequence
  Description of Artificial Sequence: Synthetic oligonucleotide
augcaaacccggcaauacu

SEQ ID NO: 1344726 - RNA, 19 nt, Artificial Sequence
  Description of Artificial Sequence: Synthetic oligonucleotide
agcucaccuuuugaaaguc

SEQ ID NO: 1344727 - RNA, 19 nt, Artificial Sequence
  Description of Artificial Sequence: Synthetic oligonucleotide
gguaagcucaccuuuugaa

SEQ ID NO: 1344728 - RNA, 19 nt, Artificial Sequence
  Description of Artificial Sequence: Synthetic oligonucleotide
gaacacuccaaggacucca

SEQ ID NO: 1344729 - RNA, 19 nt, Artificial Sequence
  Description of Artificial Sequence: Synthetic oligonucleotide
caaacaggguacaucaacu

SEQ ID NO: 1344730 - RNA, 19 nt, Artificial Sequence
  Description of Artificial Sequence: Synthetic oligonucleotide
ggaacuggagccuguaauc

SEQ ID NO: 1344731 - RNA, 19 nt, Artificial Sequence
  Description of Artificial Sequence: Synthetic oligonucleotide
cuugggcuguaaaaucauc

SEQ ID NO: 1344732 - RNA, 19 nt, Artificial Sequence
  Description of Artificial Sequence: Synthetic oligonucleotide
cauuggugcugaugcacac

SEQ ID NO: 1344733 - RNA, 19 nt, Artificial Sequence
  Description of Artificial Sequence: Synthetic oligonucleotide
auuuacggaacuggagccu

SEQ ID NO: 1344734 - RNA, 19 nt, Artificial Sequence
  Description of Artificial Sequence: Synthetic oligonucleotide
caucagcggugcuaacucc

SEQ ID NO: 1344735 - RNA, 19 nt, Artificial Sequence
  Description of Artificial Sequence: Synthetic oligonucleotide
gcuauauuucuucgacugc

SEQ ID NO: 1344736 - RNA, 19 nt, Artificial Sequence
  Description of Artificial Sequence: Synthetic oligonucleotide
gauccggagguuacugcag

SEQ ID NO: 1344737 - RNA, 19 nt, Artificial Sequence
  Description of Artificial Sequence: Synthetic oligonucleotide
acaaugcaaacccggcaau

SEQ ID NO: 1344738 - RNA, 19 nt, Artificial Sequence
  Description of Artificial Sequence: Synthetic oligonucleotide
uucuucgacugcucagacu

SEQ ID NO: 1344739 - RNA, 19 nt, Artificial Sequence
  Description of Artificial Sequence: Synthetic oligonucleotide
accugucuggggaacacuc

SEQ ID NO: 1344740 - RNA, 19 nt, Artificial Sequence
  Description of Artificial Sequence: Synthetic oligonucleotide
acccugaauguuaaugucu

SEQ ID NO: 1344741 - RNA, 19 nt, Artificial Sequence
  Description of Artificial Sequence: Synthetic oligonucleotide
acgagcauccgaaguaaag

SEQ ID NO: 1344742 - RNA, 19 nt, Artificial Sequence
  Description of Artificial Sequence: Synthetic oligonucleotide
guuacucggagcuuggcau

SEQ ID NO: 1344743 - RNA, 19 nt, Artificial Sequence
  Description of Artificial Sequence: Synthetic oligonucleotide
ucggagcuuggcauuucca

SEQ ID NO: 1344744 - RNA, 19 nt, Artificial Sequence
  Description of Artificial Sequence: Synthetic oligonucleotide
caaacccggcaauacuuuc

SEQ ID NO: 1344745 - RNA, 19 nt, Artificial Sequence
  Description of Artificial Sequence: Synthetic oligonucleotide
agccuguaaucuugggcug

SEQ ID NO: 1344746 - RNA, 19 nt, Artificial Sequence
  Description of Artificial Sequence: Synthetic oligonucleotide
guuucaacccugaauguua

SEQ ID NO: 1344747 - RNA, 19 nt, Artificial Sequence
  Description of Artificial Sequence: Synthetic oligonucleotide
gguuacugcaggcaacuga

SEQ ID NO: 1344748 - RNA, 19 nt, Artificial Sequence
  Description of Artificial Sequence: Synthetic oligonucleotide
gguccaagagguaagcuca

SEQ ID NO: 1344749 - RNA, 19 nt, Artificial Sequence
  Description of Artificial Sequence: Synthetic oligonucleotide
acugaacuauaguuuuguu

SEQ ID NO: 1344750 - RNA, 19 nt, Artificial Sequence
  Description of Artificial Sequence: Synthetic oligonucleotide
gucauucuaaugguuuuga

SEQ ID NO: 1344751 - RNA, 19 nt, Artificial Sequence
  Description of Artificial Sequence: Synthetic oligonucleotide
uccggagguuacugcaggc

SEQ ID NO: 1344752 - RNA, 19 nt, Artificial Sequence
  Description of Artificial Sequence: Synthetic oligonucleotide
gaauggcgaucucaccuuc

SEQ ID NO: 1344753 - RNA, 19 nt, Artificial Sequence
  Description of Artificial Sequence: Synthetic oligonucleotide
caacccugaauguuaaugu

SEQ ID NO: 1344754 - RNA, 19 nt, Artificial Sequence
  Description of Artificial Sequence: Synthetic oligonucleotide
cccucaaaaugcuaaaaca

SEQ ID NO: 1344755 - RNA, 19 nt, Artificial Sequence
  Description of Artificial Sequence: Synthetic oligonucleotide
gcuucgaugucaaauguga

SEQ ID NO: 1344756 - RNA, 19 nt, Artificial Sequence
  Description of Artificial Sequence: Synthetic oligonucleotide
cacuaugaauucaguguca

SEQ ID NO: 1344757 - RNA, 19 nt, Artificial Sequence
  Description of Artificial Sequence: Synthetic oligonucleotide
gcccucaaaaugcuaaaac

SEQ ID NO: 1344758 - RNA, 19 nt, Artificial Sequence
  Description of Artificial Sequence: Synthetic oligonucleotide
guagagcacacccgaggac

SEQ ID NO: 1344759 - RNA, 19 nt, Artificial Sequence
  Description of Artificial Sequence: Synthetic oligonucleotide
ggcgggaagcuacuguucc

SEQ ID NO: 1344760 - RNA, 19 nt, Artificial Sequence
  Description of Artificial Sequence: Synthetic oligonucleotide
agcauccgaaguaaagaga

SEQ ID NO: 1344761 - RNA, 19 nt, Artificial Sequence
  Description of Artificial Sequence: Synthetic oligonucleotide
agcuucgaugucaaaugug

SEQ ID NO: 1344762 - RNA, 19 nt, Artificial Sequence
  Description of Artificial Sequence: Synthetic oligonucleotide
gucaagcagccaaucaaac

SEQ ID NO: 1344763 - RNA, 19 nt, Artificial Sequence
  Description of Artificial Sequence: Synthetic oligonucleotide
ccaccuuacaccaccguac

SEQ ID NO: 1344764 - RNA, 19 nt, Artificial Sequence
  Description of Artificial Sequence: Synthetic oligonucleotide
aauggcgaucucaccuucu

SEQ ID NO: 1344765 - RNA, 19 nt, Artificial Sequence
  Description of Artificial Sequence: Synthetic oligonucleotide
ggccaagcccucaaaaugc

SEQ ID NO: 1344766 - RNA, 19 nt, Artificial Sequence
  Description of Artificial Sequence: Synthetic oligonucleotide
uuacggaacuggagccugu

SEQ ID NO: 1344767 - RNA, 19 nt, Artificial Sequence
  Description of Artificial Sequence: Synthetic oligonucleotide
guguccacucaugaggcac

SEQ ID NO: 1344768 - RNA, 19 nt, Artificial Sequence
  Description of Artificial Sequence: Synthetic oligonucleotide
gcugaugguuacucggagc

SEQ ID NO: 1344769 - RNA, 19 nt, Artificial Sequence
  Description of Artificial Sequence: Synthetic oligonucleotide
aucaacuaguaaaggcacu

SEQ ID NO: 1344770 - RNA, 19 nt, Artificial Sequence
  Description of Artificial Sequence: Synthetic oligonucleotide
uuacucggagcuuggcauu

SEQ ID NO: 1344771 - RNA, 19 nt, Artificial Sequence
  Description of Artificial Sequence: Synthetic oligonucleotide
caguggauccggagguuac

SEQ ID NO: 1344772 - RNA, 19 nt, Artificial Sequence
  Description of Artificial Sequence: Synthetic oligonucleotide
gguuacucggagcuuggca

SEQ ID NO: 1344773 - RNA, 19 nt, Artificial Sequence
  Description of Artificial Sequence: Synthetic oligonucleotide
cauccaacugagccgacaa

SEQ ID NO: 1344774 - RNA, 19 nt, Artificial Sequence
  Description of Artificial Sequence: Synthetic oligonucleotide
ggugcuaacuccaugcucu

SEQ ID NO: 1344775 - RNA, 19 nt, Artificial Sequence
  Description of Artificial Sequence: Synthetic oligonucleotide
ucgacugcucagacuguau

SEQ ID NO: 1344776 - RNA, 19 nt, Artificial Sequence
  Description of Artificial Sequence: Synthetic oligonucleotide
guuacugcaggcaacugau

SEQ ID NO: 1344777 - RNA, 19 nt, Artificial Sequence
  Description of Artificial Sequence: Synthetic oligonucleotide
cuuucacuauguuaagaau

SEQ ID NO: 1344778 - RNA, 19 nt, Artificial Sequence
  Description of Artificial Sequence: Synthetic oligonucleotide
agagcacacccgaggacuc

SEQ ID NO: 1344779 - RNA, 19 nt, Artificial Sequence
  Description of Artificial Sequence: Synthetic oligonucleotide
caggguacaucaacuagua

SEQ ID NO: 1344780 - RNA, 19 nt, Artificial Sequence
  Description of Artificial Sequence: Synthetic oligonucleotide
caccagucgcucauccaac

SEQ ID NO: 1344781 - RNA, 19 nt, Artificial Sequence
  Description of Artificial Sequence: Synthetic oligonucleotide
augguuacucggagcuugg

SEQ ID NO: 1344782 - RNA, 19 nt, Artificial Sequence
  Description of Artificial Sequence: Synthetic oligonucleotide
ggauccggagguuacugca

SEQ ID NO: 1344783 - RNA, 19 nt, Artificial Sequence
  Description of Artificial Sequence: Synthetic oligonucleotide
aucagcggugcuaacucca

SEQ ID NO: 1344784 - RNA, 19 nt, Artificial Sequence
  Description of Artificial Sequence: Synthetic oligonucleotide
uucugcuuuucugcacaca

SEQ ID NO: 1344785 - RNA, 19 nt, Artificial Sequence
  Description of Artificial Sequence: Synthetic oligonucleotide
gucuaucuggcugucccac

SEQ ID NO: 1344786 - RNA, 19 nt, Artificial Sequence
  Description of Artificial Sequence: Synthetic oligonucleotide
uccacguucucgcgggcuu

SEQ ID NO: 1344787 - RNA, 19 nt, Artificial Sequence
  Description of Artificial Sequence: Synthetic oligonucleotide
ccgaaguaaagagagccac

SEQ ID NO: 1344788 - RNA, 19 nt, Artificial Sequence
  Description of Artificial Sequence: Synthetic oligonucleotide
cuggucaagcagccaauca

SEQ ID NO: 1344789 - RNA, 19 nt, Artificial Sequence
  Description of Artificial Sequence: Synthetic oligonucleotide
guuugaggacaucucuugu

SEQ ID NO: 1344790 - RNA, 19 nt, Artificial Sequence
  Description of Artificial Sequence: Synthetic oligonucleotide
cagaaguagguuggagcac

SEQ ID NO: 1344791 - RNA, 19 nt, Artificial Sequence
  Description of Artificial Sequence: Synthetic oligonucleotide
guggauccggagguuacug

SEQ ID NO: 1344792 - RNA, 19 nt, Artificial Sequence
  Description of Artificial Sequence: Synthetic oligonucleotide
uucgacugcucagacugua

SEQ ID NO: 1344793 - RNA, 19 nt, Artificial Sequence
  Description of Artificial Sequence: Synthetic oligonucleotide
cuaugagcuucuggcaguc

SEQ ID NO: 1344794 - RNA, 19 nt, Artificial Sequence
  Description of Artificial Sequence: Synthetic oligonucleotide
cacaguuucaacccugaau

SEQ ID NO: 1344795 - RNA, 19 nt, Artificial Sequence
  Description of Artificial Sequence: Synthetic oligonucleotide
cuauacugucucgucuauc

SEQ ID NO: 1344796 - RNA, 19 nt, Artificial Sequence
  Description of Artificial Sequence: Synthetic oligonucleotide
cagugcauuuacggaacug

SEQ ID NO: 1344797 - RNA, 19 nt, Artificial Sequence
  Description of Artificial Sequence: Synthetic oligonucleotide
auguggucuuucacuaugu

SEQ ID NO: 1344798 - RNA, 19 nt, Artificial Sequence
  Description of Artificial Sequence: Synthetic oligonucleotide
aggguacaucaacuaguaa

SEQ ID NO: 1344799 - RNA, 19 nt, Artificial Sequence
  Description of Artificial Sequence: Synthetic oligonucleotide
gagguuacugcaggcaacu

SEQ ID NO: 1344800 - RNA, 19 nt, Artificial Sequence
  Description of Artificial Sequence: Synthetic oligonucleotide
ugaauaugugaggccuuuu

SEQ ID NO: 1344801 - RNA, 19 nt, Artificial Sequence
  Description of Artificial Sequence: Synthetic oligonucleotide
ugccucugcgccucccgca

SEQ ID NO: 1344802 - RNA, 19 nt, Artificial Sequence
  Description of Artificial Sequence: Synthetic oligonucleotide
cuaugaugccuccagguuu

SEQ ID NO: 1344803 - RNA, 19 nt, Artificial Sequence
  Description of Artificial Sequence: Synthetic oligonucleotide
aacgagcauccgaaguaaa

SEQ ID NO: 1344804 - RNA, 19 nt, Artificial Sequence
  Description of Artificial Sequence: Synthetic oligonucleotide
auccaccuuacaccaccgu

SEQ ID NO: 1344805 - RNA, 19 nt, Artificial Sequence
  Description of Artificial Sequence: Synthetic oligonucleotide
uggggucuaugugcaacac

SEQ ID NO: 1344806 - RNA, 19 nt, Artificial Sequence
  Description of Artificial Sequence: Synthetic oligonucleotide
agagguaagcucaccuuuu

SEQ ID NO: 1344807 - RNA, 19 nt, Artificial Sequence
  Description of Artificial Sequence: Synthetic oligonucleotide
ggcaccaauguggagugac

SEQ ID NO: 1344808 - RNA, 19 nt, Artificial Sequence
  Description of Artificial Sequence: Synthetic oligonucleotide
ugguuacucggagcuuggc

SEQ ID NO: 1344809 - RNA, 19 nt, Artificial Sequence
  Description of Artificial Sequence: Synthetic oligonucleotide
cacuggaguagagcacacc

SEQ ID NO: 1344810 - RNA, 19 nt, Artificial Sequence
  Description of Artificial Sequence: Synthetic oligonucleotide
auccaacugagccgacaaa

SEQ ID NO: 1344811 - RNA, 19 nt, Artificial Sequence
  Description of Artificial Sequence: Synthetic oligonucleotide
aagcuagucugaggacaga

SEQ ID NO: 1344812 - RNA, 19 nt, Artificial Sequence
  Description of Artificial Sequence: Synthetic oligonucleotide
ucgggcgcagacucugaau

SEQ ID NO: 1344813 - RNA, 19 nt, Artificial Sequence
  Description of Artificial Sequence: Synthetic oligonucleotide
cacacccgaggacucagca

SEQ ID NO: 1344814 - RNA, 19 nt, Artificial Sequence
  Description of Artificial Sequence: Synthetic oligonucleotide
agcccucaaaaugcuaaaa

SEQ ID NO: 1344815 - RNA, 19 nt, Artificial Sequence
  Description of Artificial Sequence: Synthetic oligonucleotide
acaguggauccggagguua

SEQ ID NO: 1344816 - RNA, 19 nt, Artificial Sequence
  Description of Artificial Sequence: Synthetic oligonucleotide
acacaucuucaaaaugauu

SEQ ID NO: 1344817 - RNA, 19 nt, Artificial Sequence
  Description of Artificial Sequence: Synthetic oligonucleotide
uaccaccaagaauggcgau

SEQ ID NO: 1344818 - RNA, 19 nt, Artificial Sequence
  Description of Artificial Sequence: Synthetic oligonucleotide
cggagugcuauauuucuuc

SEQ ID NO: 1344819 - RNA, 19 nt, Artificial Sequence
  Description of Artificial Sequence: Synthetic oligonucleotide
caucuccucgggcgcagac

SEQ ID NO: 1344820 - RNA, 19 nt, Artificial Sequence
  Description of Artificial Sequence: Synthetic oligonucleotide
gcaacugauuagucauuuc

SEQ ID NO: 1344821 - RNA, 19 nt, Artificial Sequence
  Description of Artificial Sequence: Synthetic oligonucleotide
cacagcuucgaugucaaau

SEQ ID NO: 1344822 - RNA, 19 nt, Artificial Sequence
  Description of Artificial Sequence: Synthetic oligonucleotide
gcuacuguuccaugcuuaa

SEQ ID NO: 1344823 - RNA, 19 nt, Artificial Sequence
  Description of Artificial Sequence: Synthetic oligonucleotide
cuccuauacugucucgucu

SEQ ID NO: 1344824 - RNA, 19 nt, Artificial Sequence
  Description of Artificial Sequence: Synthetic oligonucleotide
ggaguagagcacacccgag

SEQ ID NO: 1344825 - RNA, 19 nt, Artificial Sequence
  Description of Artificial Sequence: Synthetic oligonucleotide
gagugaccugucuggggaa

SEQ ID NO: 1344826 - RNA, 19 nt, Artificial Sequence
  Description of Artificial Sequence: Synthetic oligonucleotide
aucauuccggagugcuaua

SEQ ID NO: 1344827 - RNA, 19 nt, Artificial Sequence
  Description of Artificial Sequence: Synthetic oligonucleotide
gaauucagugucagacccu

SEQ ID NO: 1344828 - RNA, 19 nt, Artificial Sequence
  Description of Artificial Sequence: Synthetic oligonucleotide
ccaacugagccgacaaaca

SEQ ID NO: 1344829 - RNA, 19 nt, Artificial Sequence
  Description of Artificial Sequence: Synthetic oligonucleotide
ugcuaacuccaugcucuau

SEQ ID NO: 1344830 - RNA, 19 nt, Artificial Sequence
  Description of Artificial Sequence: Synthetic oligonucleotide
ggagguuacugcaggcaac

SEQ ID NO: 1344831 - RNA, 19 nt, Artificial Sequence
  Description of Artificial Sequence: Synthetic oligonucleotide
gggcgcagacucugaauug

SEQ ID NO: 1344832 - RNA, 19 nt, Artificial Sequence
  Description of Artificial Sequence: Synthetic oligonucleotide
gccaaucaaacaccaccuc

SEQ ID NO: 1344833 - RNA, 19 nt, Artificial Sequence
  Description of Artificial Sequence: Synthetic oligonucleotide
caucauuccggagugcuau

SEQ ID NO: 1344834 - RNA, 19 nt, Artificial Sequence
  Description of Artificial Sequence: Synthetic oligonucleotide
agguuacugcaggcaacug

SEQ ID NO: 1344835 - RNA, 19 nt, Artificial Sequence
  Description of Artificial Sequence: Synthetic oligonucleotide
accuuacaccaccguacua

SEQ ID NO: 1344836 - RNA, 19 nt, Artificial Sequence
  Description of Artificial Sequence: Synthetic oligonucleotide
cggagcuuggcauuuccac

SEQ ID NO: 1344837 - RNA, 19 nt, Artificial Sequence
  Description of Artificial Sequence: Synthetic oligonucleotide
ccgccgguagcucugcgcc

SEQ ID NO: 1344838 - RNA, 19 nt, Artificial Sequence
  Description of Artificial Sequence: Synthetic oligonucleotide
gguguccaccucuugcaaa

SEQ ID NO: 1344839 - RNA, 19 nt, Artificial Sequence
  Description of Artificial Sequence: Synthetic oligonucleotide
cagcggugcuaacuccaug

SEQ ID NO: 1344840 - RNA, 19 nt, Artificial Sequence
  Description of Artificial Sequence: Synthetic oligonucleotide
guccaagagguaagcucac

SEQ ID NO: 1344841 - RNA, 19 nt, Artificial Sequence
  Description of Artificial Sequence: Synthetic oligonucleotide
ggcgcagacucugaauuga

SEQ ID NO: 1344842 - RNA, 19 nt, Artificial Sequence
  Description of Artificial Sequence: Synthetic oligonucleotide
ccgacaaacaggguacauc

SEQ ID NO: 1344843 - RNA, 19 nt, Artificial Sequence
  Description of Artificial Sequence: Synthetic oligonucleotide
gagccacaggacuggucaa

SEQ ID NO: 1344844 - RNA, 19 nt, Artificial Sequence
  Description of Artificial Sequence: Synthetic oligonucleotide
caaugcaaacccggcaaua

SEQ ID NO: 1344845 - RNA, 19 nt, Artificial Sequence
  Description of Artificial Sequence: Synthetic oligonucleotide
caccaauguggagugaccu

SEQ ID NO: 1344846 - RNA, 19 nt, Artificial Sequence
  Description of Artificial Sequence: Synthetic oligonucleotide
agccgacaaacaggguaca

SEQ ID NO: 1344847 - RNA, 19 nt, Artificial Sequence
  Description of Artificial Sequence: Synthetic oligonucleotide
cuuggucccgcugcagaga

SEQ ID NO: 1344848 - RNA, 19 nt, Artificial Sequence
  Description of Artificial Sequence: Synthetic oligonucleotide
caccuuacaccaccguacu

SEQ ID NO: 1344849 - RNA, 19 nt, Artificial Sequence
  Description of Artificial Sequence: Synthetic oligonucleotide
cacuucuuacugaaauauu

SEQ ID NO: 1344850 - RNA, 19 nt, Artificial Sequence
  Description of Artificial Sequence: Synthetic oligonucleotide
ccuagagucacagcuucga

SEQ ID NO: 1344851 - RNA, 19 nt, Artificial Sequence
  Description of Artificial Sequence: Synthetic oligonucleotide
cucugcgccgccuccacgu

SEQ ID NO: 1344852 - RNA, 19 nt, Artificial Sequence
  Description of Artificial Sequence: Synthetic oligonucleotide
cacuccuauacugucucgu

SEQ ID NO: 1344853 - RNA, 19 nt, Artificial Sequence
  Description of Artificial Sequence: Synthetic oligonucleotide
gcgaucucaccuucucgga

SEQ ID NO: 1344854 - RNA, 19 nt, Artificial Sequence
  Description of Artificial Sequence: Synthetic oligonucleotide
uggucccgcugcagagagu

SEQ ID NO: 1344855 - RNA, 19 nt, Artificial Sequence
  Description of Artificial Sequence: Synthetic oligonucleotide
acccgaggacucagcauca

SEQ ID NO: 1344856 - RNA, 19 nt, Artificial Sequence
  Description of Artificial Sequence: Synthetic oligonucleotide
cuacuguuccaugcuuaaa

SEQ ID NO: 1344857 - RNA, 19 nt, Artificial Sequence
  Description of Artificial Sequence: Synthetic oligonucleotide
acccucaaaucaaggccaa

SEQ ID NO: 1344858 - RNA, 19 nt, Artificial Sequence
  Description of Artificial Sequence: Synthetic oligonucleotide
acccggcaauacuuuccau

SEQ ID NO: 1344859 - RNA, 19 nt, Artificial Sequence
  Description of Artificial Sequence: Synthetic oligonucleotide
gucaaaugugacaguggau

SEQ ID NO: 1344860 - RNA, 19 nt, Artificial Sequence
  Description of Artificial Sequence: Synthetic oligonucleotide
guuccuagagucacagcuu

SEQ ID NO: 1344861 - RNA, 19 nt, Artificial Sequence
  Description of Artificial Sequence: Synthetic oligonucleotide
gucugaggacagaaaccaa

SEQ ID NO: 1344862 - RNA, 19 nt, Artificial Sequence
  Description of Artificial Sequence: Synthetic oligonucleotide
uccacucaugaggcaccaa

SEQ ID NO: 1344863 - RNA, 19 nt, Artificial Sequence
  Description of Artificial Sequence: Synthetic oligonucleotide
guccacucaugaggcacca

SEQ ID NO: 1344864 - RNA, 19 nt, Artificial Sequence
  Description of Artificial Sequence: Synthetic oligonucleotide
gugcuaacuccaugcucua

SEQ ID NO: 1344865 - RNA, 19 nt, Artificial Sequence
  Description of Artificial Sequence: Synthetic oligonucleotide
ggacuccacucuugccggc

SEQ ID NO: 1344866 - RNA, 19 nt, Artificial Sequence
  Description of Artificial Sequence: Synthetic oligonucleotide
ggaccaggucaucagcggu

SEQ ID NO: 1344867 - RNA, 19 nt, Artificial Sequence
  Description of Artificial Sequence: Synthetic oligonucleotide
cgacugcucagacuguauc

SEQ ID NO: 1344868 - RNA, 19 nt, Artificial Sequence
  Description of Artificial Sequence: Synthetic oligonucleotide
ccuuacaccaccguacuau

SEQ ID NO: 1344869 - RNA, 19 nt, Artificial Sequence
  Description of Artificial Sequence: Synthetic oligonucleotide
cucgggcgcagacucugaa

SEQ ID NO: 1344870 - RNA, 19 nt, Artificial Sequence
  Description of Artificial Sequence: Synthetic oligonucleotide
ggggucuaugugcaacacu

SEQ ID NO: 1344871 - RNA, 19 nt, Artificial Sequence
  Description of Artificial Sequence: Synthetic oligonucleotide
cuucucggaccaggucauc

SEQ ID NO: 1344872 - RNA, 19 nt, Artificial Sequence
  Description of Artificial Sequence: Synthetic oligonucleotide
gcuguccaacugaauaugu

SEQ ID NO: 1344873 - RNA, 19 nt, Artificial Sequence
  Description of Artificial Sequence: Synthetic oligonucleotide
caccucacucaacucacuu

SEQ ID NO: 1344874 - RNA, 19 nt, Artificial Sequence
  Description of Artificial Sequence: Synthetic oligonucleotide
guaagcuguccaacugaau

SEQ ID NO: 1344875 - RNA, 19 nt, Artificial Sequence
  Description of Artificial Sequence: Synthetic oligonucleotide
ggucaucagcggugcuaac

SEQ ID NO: 1344876 - RNA, 19 nt, Artificial Sequence
  Description of Artificial Sequence: Synthetic oligonucleotide
ggugggcgggaagcuacug

SEQ ID NO: 1344877 - RNA, 19 nt, Artificial Sequence
  Description of Artificial Sequence: Synthetic oligonucleotide
cuucgacugcucagacugu

SEQ ID NO: 1344878 - RNA, 19 nt, Artificial Sequence
  Description of Artificial Sequence: Synthetic oligonucleotide
cagauacaacuaagcuagu

SEQ ID NO: 1344879 - RNA, 19 nt, Artificial Sequence
  Description of Artificial Sequence: Synthetic oligonucleotide
ggcugucccacaguuucaa

SEQ ID NO: 1344880 - RNA, 19 nt, Artificial Sequence
  Description of Artificial Sequence: Synthetic oligonucleotide
ccgcugcagagagucacag

SEQ ID NO: 1344881 - RNA, 19 nt, Artificial Sequence
  Description of Artificial Sequence: Synthetic oligonucleotide
ccaccucuugcaaaagggu

SEQ ID NO: 1344882 - RNA, 19 nt, Artificial Sequence
  Description of Artificial Sequence: Synthetic oligonucleotide
cggugcuaacuccaugcuc

SEQ ID NO: 1344883 - RNA, 19 nt, Artificial Sequence
  Description of Artificial Sequence: Synthetic oligonucleotide
cucccgccgguagcucugc

SEQ ID NO: 1344884 - RNA, 19 nt, Artificial Sequence
  Description of Artificial Sequence: Synthetic oligonucleotide
ccacucaugaggcaccaau

SEQ ID NO: 1344885 - RNA, 19 nt, Artificial Sequence
  Description of Artificial Sequence: Synthetic oligonucleotide
gcagugcauuuacggaacu

SEQ ID NO: 1344886 - RNA, 19 nt, Artificial Sequence
  Description of Artificial Sequence: Synthetic oligonucleotide
cggcaauacuuuccauuuc

SEQ ID NO: 1344887 - RNA, 19 nt, Artificial Sequence
  Description of Artificial Sequence: Synthetic oligonucleotide
cuguacuggugggcgggaa

SEQ ID NO: 1344888 - RNA, 19 nt, Artificial Sequence
  Description of Artificial Sequence: Synthetic oligonucleotide
ccggagguuacugcaggca

SEQ ID NO: 1344889 - RNA, 19 nt, Artificial Sequence
  Description of Artificial Sequence: Synthetic oligonucleotide
cccggcaauacuuuccauu

SEQ ID NO: 1344890 - RNA, 19 nt, Artificial Sequence
  Description of Artificial Sequence: Synthetic oligonucleotide
gcucccgccgguagcucug

SEQ ID NO: 1344891 - RNA, 19 nt, Artificial Sequence
  Description of Artificial Sequence: Synthetic oligonucleotide
ggucuaugugcaacacuau

SEQ ID NO: 1344892 - RNA, 19 nt, Artificial Sequence
  Description of Artificial Sequence: Synthetic oligonucleotide
cugagccgacaaacagggu

SEQ ID NO: 1344893 - RNA, 19 nt, Artificial Sequence
  Description of Artificial Sequence: Synthetic oligonucleotide
gcaaacccggcaauacuuu

SEQ ID NO: 1344894 - RNA, 19 nt, Artificial Sequence
  Description of Artificial Sequence: Synthetic oligonucleotide
ccaugcucuaugagcuucu

SEQ ID NO: 1344895 - RNA, 19 nt, Artificial Sequence
  Description of Artificial Sequence: Synthetic oligonucleotide
cccgcugcagagagucaca

SEQ ID NO: 1344896 - RNA, 19 nt, Artificial Sequence
  Description of Artificial Sequence: Synthetic oligonucleotide
cgccgguagcucugcgccg

SEQ ID NO: 1344897 - RNA, 19 nt, Artificial Sequence
  Description of Artificial Sequence: Synthetic oligonucleotide
gccuguaaucuugggcugu

SEQ ID NO: 1344898 - RNA, 19 nt, Artificial Sequence
  Description of Artificial Sequence: Synthetic oligonucleotide
cccacagaaguagguugga

SEQ ID NO: 1344899 - RNA, 19 nt, Artificial Sequence
  Description of Artificial Sequence: Synthetic oligonucleotide
ccacaguuucaacccugaa

SEQ ID NO: 1344900 - RNA, 19 nt, Artificial Sequence
  Description of Artificial Sequence: Synthetic oligonucleotide
ccuucucggaccaggucau

SEQ ID NO: 1344901 - RNA, 19 nt, Artificial Sequence
  Description of Artificial Sequence: Synthetic oligonucleotide
ccuauacugucucgucuau

SEQ ID NO: 1344902 - RNA, 19 nt, Artificial Sequence
  Description of Artificial Sequence: Synthetic oligonucleotide
ccaccguacuaugaugccu

SEQ ID NO: 1344903 - RNA, 19 nt, Artificial Sequence
  Description of Artificial Sequence: Synthetic oligonucleotide
ccguacuaugaugccucca

SEQ ID NO: 1344904 - RNA, 19 nt, Artificial Sequence
  Description of Artificial Sequence: Synthetic oligonucleotide
cgggcgcagacucugaauu

SEQ ID NO: 1344905 - RNA, 19 nt, Artificial Sequence
  Description of Artificial Sequence: Synthetic oligonucleotide
ccggagugcuauauuucuu

SEQ ID NO: 1344906 - RNA, 19 nt, Artificial Sequence
  Description of Artificial Sequence: Synthetic oligonucleotide
gccgacaaacaggguacau

SEQ ID NO: 1344907 - RNA, 19 nt, Artificial Sequence
  Description of Artificial Sequence: Synthetic oligonucleotide
ccucgggcgcagacucuga

SEQ ID NO: 1344908 - RNA, 19 nt, Artificial Sequence
  Description of Artificial Sequence: Synthetic oligonucleotide
cugcuccaucgcgccccuc

SEQ ID NO: 1344909 - RNA, 19 nt, Artificial Sequence
  Description of Artificial Sequence: Synthetic oligonucleotide
auaagggccacauagaccc

SEQ ID NO: 1344910 - RNA, 19 nt, Artificial Sequence
  Description of Artificial Sequence: Synthetic oligonucleotide
acaaaauacacacaggugg

SEQ ID NO: 1344911 - RNA, 19 nt, Artificial Sequence
  Description of Artificial Sequence: Synthetic oligonucleotide
ucuacuuugacuuaggcga

SEQ ID NO: 1344912 - RNA, 19 nt, Artificial Sequence
  Description of Artificial Sequence: Synthetic oligonucleotide
acuacuugaagacugagac

SEQ ID NO: 1344913 - RNA, 19 nt, Artificial Sequence
  Description of Artificial Sequence: Synthetic oligonucleotide
cuuuaagucaguuacagac

SEQ ID NO: 1344914 - RNA, 19 nt, Artificial Sequence
  Description of Artificial Sequence: Synthetic oligonucleotide
uuugaaguaacaaggcuag

SEQ ID NO: 1344915 - RNA, 19 nt, Artificial Sequence
  Description of Artificial Sequence: Synthetic oligonucleotide
aucccuuuaagucaguuac

SEQ ID NO: 1344916 - RNA, 19 nt, Artificial Sequence
  Description of Artificial Sequence: Synthetic oligonucleotide
uaaaguagagcauagcaca

SEQ ID NO: 1344917 - RNA, 19 nt, Artificial Sequence
  Description of Artificial Sequence: Synthetic oligonucleotide
aggcauaagagauagucac

SEQ ID NO: 1344918 - RNA, 19 nt, Artificial Sequence
  Description of Artificial Sequence: Synthetic oligonucleotide
aaggauacgaggcugccuc

SEQ ID NO: 1344919 - RNA, 19 nt, Artificial Sequence
  Description of Artificial Sequence: Synthetic oligonucleotide
uuaagcacccuucaggagc

SEQ ID NO: 1344920 - RNA, 19 nt, Artificial Sequence
  Description of Artificial Sequence: Synthetic oligonucleotide
uuuaccuuagccuugcgga

SEQ ID NO: 1344921 - RNA, 19 nt, Artificial Sequence
  Description of Artificial Sequence: Synthetic oligonucleotide
ugaaacaggaccaaucuaa

SEQ ID NO: 1344922 - RNA, 19 nt, Artificial Sequence
  Description of Artificial Sequence: Synthetic oligonucleotide
ugucauuuagaucucacuc

SEQ ID NO: 1344923 - RNA, 19 nt, Artificial Sequence
  Description of Artificial Sequence: Synthetic oligonucleotide
ucauuuagaucucacuccc

SEQ ID NO: 1344924 - RNA, 19 nt, Artificial Sequence
  Description of Artificial Sequence: Synthetic oligonucleotide
aaaauacacacagguggcc

SEQ ID NO: 1344925 - RNA, 19 nt, Artificial Sequence
  Description of Artificial Sequence: Synthetic oligonucleotide
caaccugugaaacaggacc

SEQ ID NO: 1344926 - RNA, 19 nt, Artificial Sequence
  Description of Artificial Sequence: Synthetic oligonucleotide
acuuaauaagggcacugac

SEQ ID NO: 1344927 - RNA, 19 nt, Artificial Sequence
  Description of Artificial Sequence: Synthetic oligonucleotide
uagauagacauccauucac

SEQ ID NO: 1344928 - RNA, 19 nt, Artificial Sequence
  Description of Artificial Sequence: Synthetic oligonucleotide
ugcggacagagucugaggg

SEQ ID NO: 1344929 - RNA, 19 nt, Artificial Sequence
  Description of Artificial Sequence: Synthetic oligonucleotide
aaagacauacagcuagaga

SEQ ID NO: 1344930 - RNA, 19 nt, Artificial Sequence
  Description of Artificial Sequence: Synthetic oligonucleotide
aaguaacaaggcuagacaa

SEQ ID NO: 1344931 - RNA, 19 nt, Artificial Sequence
  Description of Artificial Sequence: Synthetic oligonucleotide
uuaggcgaaggauacgagg

SEQ ID NO: 1344932 - RNA, 19 nt, Artificial Sequence
  Description of Artificial Sequence: Synthetic oligonucleotide
ucuuaagaccccaaagugu

SEQ ID NO: 1344933 - RNA, 19 nt, Artificial Sequence
  Description of Artificial Sequence: Synthetic oligonucleotide
accaucaccuuccaggagg

SEQ ID NO: 1344934 - RNA, 19 nt, Artificial Sequence
  Description of Artificial Sequence: Synthetic oligonucleotide
accaaggaaguucucauag

SEQ ID NO: 1344935 - RNA, 19 nt, Artificial Sequence
  Description of Artificial Sequence: Synthetic oligonucleotide
gaagacgagccccacaaag

SEQ ID NO: 1344936 - RNA, 19 nt, Artificial Sequence
  Description of Artificial Sequence: Synthetic oligonucleotide
cuuaagaccccaaaguguc

SEQ ID NO: 1344937 - RNA, 19 nt, Artificial Sequence
  Description of Artificial Sequence: Synthetic oligonucleotide
agguuaagcacccuucagg

SEQ ID NO: 1344938 - RNA, 19 nt, Artificial Sequence
  Description of Artificial Sequence: Synthetic oligonucleotide
uagaccccuaccaaguagg

SEQ ID NO: 1344939 - RNA, 19 nt, Artificial Sequence
  Description of Artificial Sequence: Synthetic oligonucleotide
aaguggacaugaugagugc

SEQ ID NO: 1344940 - RNA, 19 nt, Artificial Sequence
  Description of Artificial Sequence: Synthetic oligonucleotide
uucccaagaggaaaccugg

SEQ ID NO: 1344941 - RNA, 19 nt, Artificial Sequence
  Description of Artificial Sequence: Synthetic oligonucleotide
ugugccuuacgucuuaaga

SEQ ID NO: 1344942 - RNA, 19 nt, Artificial Sequence
  Description of Artificial Sequence: Synthetic oligonucleotide
aggaaaacaacacuccacu

SEQ ID NO: 1344943 - RNA, 19 nt, Artificial Sequence
  Description of Artificial Sequence: Synthetic oligonucleotide
ugauaagggccacauagac

SEQ ID NO: 1344944 - RNA, 19 nt, Artificial Sequence
  Description of Artificial Sequence: Synthetic oligonucleotide
acuuucaaccaaucuuccc

SEQ ID NO: 1344945 - RNA, 19 nt, Artificial Sequence
  Description of Artificial Sequence: Synthetic oligonucleotide
gucuacuuugacuuaggcg

SEQ ID NO: 1344946 - RNA, 19 nt, Artificial Sequence
  Description of Artificial Sequence: Synthetic oligonucleotide
agaucucacucccagggcg

SEQ ID NO: 1344947 - RNA, 19 nt, Artificial Sequence
  Description of Artificial Sequence: Synthetic oligonucleotide
aagccagagcacaaaauac

SEQ ID NO: 1344948 - RNA, 19 nt, Artificial Sequence
  Description of Artificial Sequence: Synthetic oligonucleotide
cuagacaaaggaaaacaac

SEQ ID NO: 1344949 - RNA, 19 nt, Artificial Sequence
  Description of Artificial Sequence: Synthetic oligonucleotide
gaaguaacaaggcuagaca

SEQ ID NO: 1344950 - RNA, 19 nt, Artificial Sequence
  Description of Artificial Sequence: Synthetic oligonucleotide
ugccuuacgucuuaagacc

SEQ ID NO: 1344951 - RNA, 19 nt, Artificial Sequence
  Description of Artificial Sequence: Synthetic oligonucleotide
cugagcuagguuaagcacc

SEQ ID NO: 1344952 - RNA, 19 nt, Artificial Sequence
  Description of Artificial Sequence: Synthetic oligonucleotide
ugggcaggcacuuaauaag

SEQ ID NO: 1344953 - RNA, 19 nt, Artificial Sequence
  Description of Artificial Sequence: Synthetic oligonucleotide
uuuagaucucacucccagg

SEQ ID NO: 1344954 - RNA, 19 nt, Artificial Sequence
  Description of Artificial Sequence: Synthetic oligonucleotide
auugacugugccuuacguc

SEQ ID NO: 1344955 - RNA, 19 nt, Artificial Sequence
  Description of Artificial Sequence: Synthetic oligonucleotide
uugacuuaggcgaaggaua

SEQ ID NO: 1344956 - RNA, 19 nt, Artificial Sequence
  Description of Artificial Sequence: Synthetic oligonucleotide
uuguugagagcgaugguca

SEQ ID NO: 1344957 - RNA, 19 nt, Artificial Sequence
  Description of Artificial Sequence: Synthetic oligonucleotide
aguaaguggacaugaugag

SEQ ID NO: 1344958 - RNA, 19 nt, Artificial Sequence
  Description of Artificial Sequence: Synthetic oligonucleotide
gaugguugaagccugagcu

SEQ ID NO: 1344959 - RNA, 19 nt, Artificial Sequence
  Description of Artificial Sequence: Synthetic oligonucleotide
guaacaaggcuagacaaag

SEQ ID NO: 1344960 - RNA, 19 nt, Artificial Sequence
  Description of Artificial Sequence: Synthetic oligonucleotide
cuaggcauaagagauaguc

SEQ ID NO: 1344961 - RNA, 19 nt, Artificial Sequence
  Description of Artificial Sequence: Synthetic oligonucleotide
cagguggccuuaaagaagg

SEQ ID NO: 1344962 - RNA, 19 nt, Artificial Sequence
  Description of Artificial Sequence: Synthetic oligonucleotide
accccuaccaaguagguga

SEQ ID NO: 1344963 - RNA, 19 nt, Artificial Sequence
  Description of Artificial Sequence: Synthetic oligonucleotide
uugguccuaggcauaagag

SEQ ID NO: 1344964 - RNA, 19 nt, Artificial Sequence
  Description of Artificial Sequence: Synthetic oligonucleotide
gucuuaagaccccaaagug

SEQ ID NO: 1344965 - RNA, 19 nt, Artificial Sequence
  Description of Artificial Sequence: Synthetic oligonucleotide
ucauagauagacauccauu

SEQ ID NO: 1344966 - RNA, 19 nt, Artificial Sequence
  Description of Artificial Sequence: Synthetic oligonucleotide
agacauacagcuagagacc

SEQ ID NO: 1344967 - RNA, 19 nt, Artificial Sequence
  Description of Artificial Sequence: Synthetic oligonucleotide
guuuaccuuagccuugcgg

SEQ ID NO: 1344968 - RNA, 19 nt, Artificial Sequence
  Description of Artificial Sequence: Synthetic oligonucleotide
aaucaccagaccuguccgg

SEQ ID NO: 1344969 - RNA, 19 nt, Artificial Sequence
  Description of Artificial Sequence: Synthetic oligonucleotide
aggaaagcagaacuuguug

SEQ ID NO: 1344970 - RNA, 19 nt, Artificial Sequence
  Description of Artificial Sequence: Synthetic oligonucleotide
aggugaaggcaccugacag

SEQ ID NO: 1344971 - RNA, 19 nt, Artificial Sequence
  Description of Artificial Sequence: Synthetic oligonucleotide
gaggcauagaguaugugug

SEQ ID NO: 1344972 - RNA, 19 nt, Artificial Sequence
  Description of Artificial Sequence: Synthetic oligonucleotide
ugacuuaggcgaaggauac

SEQ ID NO: 1344973 - RNA, 19 nt, Artificial Sequence
  Description of Artificial Sequence: Synthetic oligonucleotide
caugaugagugcccgagag

SEQ ID NO: 1344974 - RNA, 19 nt, Artificial Sequence
  Description of Artificial Sequence: Synthetic oligonucleotide
guaaaguagagcauagcac

SEQ ID NO: 1344975 - RNA, 19 nt, Artificial Sequence
  Description of Artificial Sequence: Synthetic oligonucleotide
uguuggugugcuaggguag

SEQ ID NO: 1344976 - RNA, 19 nt, Artificial Sequence
  Description of Artificial Sequence: Synthetic oligonucleotide
gucaacaagcaccaucacc

SEQ ID NO: 1344977 - RNA, 19 nt, Artificial Sequence
  Description of Artificial Sequence: Synthetic oligonucleotide
acgucuuaagaccccaaag

SEQ ID NO: 1344978 - RNA, 19 nt, Artificial Sequence
  Description of Artificial Sequence: Synthetic oligonucleotide
gaagccagagcacaaaaua

SEQ ID NO: 1344979 - RNA, 19 nt, Artificial Sequence
  Description of Artificial Sequence: Synthetic oligonucleotide
auugguccuaggcauaaga

SEQ ID NO: 1344980 - RNA, 19 nt, Artificial Sequence
  Description of Artificial Sequence: Synthetic oligonucleotide
cacauagaccccuaccaag

SEQ ID NO: 1344981 - RNA, 19 nt, Artificial Sequence
  Description of Artificial Sequence: Synthetic oligonucleotide
aacaacacuccacuuucaa

SEQ ID NO: 1344982 - RNA, 19 nt, Artificial Sequence
  Description of Artificial Sequence: Synthetic oligonucleotide
auagaccccuaccaaguag

SEQ ID NO: 1344983 - RNA, 19 nt, Artificial Sequence
  Description of Artificial Sequence: Synthetic oligonucleotide
cuucaguuggccuugcuca

SEQ ID NO: 1344984 - RNA, 19 nt, Artificial Sequence
  Description of Artificial Sequence: Synthetic oligonucleotide
uuugacuuaggcgaaggau

SEQ ID NO: 1344985 - RNA, 19 nt, Artificial Sequence
  Description of Artificial Sequence: Synthetic oligonucleotide
uagguuaagcacccuucag

SEQ ID NO: 1344986 - RNA, 19 nt, Artificial Sequence
  Description of Artificial Sequence: Synthetic oligonucleotide
cuaccaaguaggugaaggc

SEQ ID NO: 1344987 - RNA, 19 nt, Artificial Sequence
  Description of Artificial Sequence: Synthetic oligonucleotide
gugccuuacgucuuaagac

SEQ ID NO: 1344988 - RNA, 19 nt, Artificial Sequence
  Description of Artificial Sequence: Synthetic oligonucleotide
auccauucacuacuugaag

SEQ ID NO: 1344989 - RNA, 19 nt, Artificial Sequence
  Description of Artificial Sequence: Synthetic oligonucleotide
uccaucgccaggcugcccc

SEQ ID NO: 1344990 - RNA, 19 nt, Artificial Sequence
  Description of Artificial Sequence: Synthetic oligonucleotide
gacaugaugagugcccgag

SEQ ID NO: 1344991 - RNA, 19 nt, Artificial Sequence
  Description of Artificial Sequence: Synthetic oligonucleotide
augguugaagccugagcuc

SEQ ID NO: 1344992 - RNA, 19 nt, Artificial Sequence
  Description of Artificial Sequence: Synthetic oligonucleotide
uugaagccugagcucaacc

SEQ ID NO: 1344993 - RNA, 19 nt, Artificial Sequence
  Description of Artificial Sequence: Synthetic oligonucleotide
uaccccacgccuuaccucc

SEQ ID NO: 1344994 - RNA, 19 nt, Artificial Sequence
  Description of Artificial Sequence: Synthetic oligonucleotide
caaaggccgaggcauagag

SEQ ID NO: 1344995 - RNA, 19 nt, Artificial Sequence
  Description of Artificial Sequence: Synthetic oligonucleotide
gagcuucaagcccuggucc

SEQ ID NO: 1344996 - RNA, 19 nt, Artificial Sequence
  Description of Artificial Sequence: Synthetic oligonucleotide
acccucaaauuuccagacc

SEQ ID NO: 1344997 - RNA, 19 nt, Artificial Sequence
  Description of Artificial Sequence: Synthetic oligonucleotide
caaagucugggccccagcc

SEQ ID NO: 1344998 - RNA, 19 nt, Artificial Sequence
  Description of Artificial Sequence: Synthetic oligonucleotide
agcacuccaaucaccagac

SEQ ID NO: 1344999 - RNA, 19 nt, Artificial Sequence
  Description of Artificial Sequence: Synthetic oligonucleotide
uaagcacccuucaggagcu

SEQ ID NO: 1345000 - RNA, 19 nt, Artificial Sequence
  Description of Artificial Sequence: Synthetic oligonucleotide
gucuauagucuuccacugg

SEQ ID NO: 1345001 - RNA, 19 nt, Artificial Sequence
  Description of Artificial Sequence: Synthetic oligonucleotide
agggcacugacccacgaug

SEQ ID NO: 1345002 - RNA, 19 nt, Artificial Sequence
  Description of Artificial Sequence: Synthetic oligonucleotide
acuuaggcgaaggauacga

SEQ ID NO: 1345003 - RNA, 19 nt, Artificial Sequence
  Description of Artificial Sequence: Synthetic oligonucleotide
agcuuaccgagccagucug

SEQ ID NO: 1345004 - RNA, 19 nt, Artificial Sequence
  Description of Artificial Sequence: Synthetic oligonucleotide
uaccgagccagucugccac

SEQ ID NO: 1345005 - RNA, 19 nt, Artificial Sequence
  Description of Artificial Sequence: Synthetic oligonucleotide
acuuugacuuaggcgaagg

SEQ ID NO: 1345006 - RNA, 19 nt, Artificial Sequence
  Description of Artificial Sequence: Synthetic oligonucleotide
ucaaccugugaaacaggac

SEQ ID NO: 1345007 - RNA, 19 nt, Artificial Sequence
  Description of Artificial Sequence: Synthetic oligonucleotide
ucccaagaggaaaccuggg

SEQ ID NO: 1345008 - RNA, 19 nt, Artificial Sequence
  Description of Artificial Sequence: Synthetic oligonucleotide
gucugagaugaugaaaagc

SEQ ID NO: 1345009 - RNA, 19 nt, Artificial Sequence
  Description of Artificial Sequence: Synthetic oligonucleotide
augagugcccgagaguagg

SEQ ID NO: 1345010 - RNA, 19 nt, Artificial Sequence
  Description of Artificial Sequence: Synthetic oligonucleotide
aaccugugaaacaggacca

SEQ ID NO: 1345011 - RNA, 19 nt, Artificial Sequence
  Description of Artificial Sequence: Synthetic oligonucleotide
uuaagaccccaaaguguca

SEQ ID NO: 1345012 - RNA, 19 nt, Artificial Sequence
  Description of Artificial Sequence: Synthetic oligonucleotide
caggcacuuaauaagggca

SEQ ID NO: 1345013 - RNA, 19 nt, Artificial Sequence
  Description of Artificial Sequence: Synthetic oligonucleotide
gaggucuacuuugacuuag

SEQ ID NO: 1345014 - RNA, 19 nt, Artificial Sequence
  Description of Artificial Sequence: Synthetic oligonucleotide
uuaccuuagccuugcggac

SEQ ID NO: 1345015 - RNA, 19 nt, Artificial Sequence
  Description of Artificial Sequence: Synthetic oligonucleotide
cacuuucaaccaaucuucc

SEQ ID NO: 1345016 - RNA, 19 nt, Artificial Sequence
  Description of Artificial Sequence: Synthetic oligonucleotide
guuaagcacccuucaggag

SEQ ID NO: 1345017 - RNA, 19 nt, Artificial Sequence
  Description of Artificial Sequence: Synthetic oligonucleotide
gcaggacaaagacauacag

SEQ ID NO: 1345018 - RNA, 19 nt, Artificial Sequence
  Description of Artificial Sequence: Synthetic oligonucleotide
uacgucuuaagaccccaaa

SEQ ID NO: 1345019 - RNA, 19 nt, Artificial Sequence
  Description of Artificial Sequence: Synthetic oligonucleotide
aggcacuuaauaagggcac

SEQ ID NO: 1345020 - RNA, 19 nt, Artificial Sequence
  Description of Artificial Sequence: Synthetic oligonucleotide
gguuaagcacccuucagga

SEQ ID NO: 1345021 - RNA, 19 nt, Artificial Sequence
  Description of Artificial Sequence: Synthetic oligonucleotide
agaccaaggaaguucucau

SEQ ID NO: 1345022 - RNA, 19 nt, Artificial Sequence
  Description of Artificial Sequence: Synthetic oligonucleotide
gacauacagcuagagacca

SEQ ID NO: 1345023 - RNA, 19 nt, Artificial Sequence
  Description of Artificial Sequence: Synthetic oligonucleotide
aagacgagccccacaaaga

SEQ ID NO: 1345024 - RNA, 19 nt, Artificial Sequence
  Description of Artificial Sequence: Synthetic oligonucleotide
acgagccccacaaagauga

SEQ ID NO: 1345025 - RNA, 19 nt, Artificial Sequence
  Description of Artificial Sequence: Synthetic oligonucleotide
uccccuugcauugacugug

SEQ ID NO: 1345026 - RNA, 19 nt, Artificial Sequence
  Description of Artificial Sequence: Synthetic oligonucleotide
cuuaggcgaaggauacgag

SEQ ID NO: 1345027 - RNA, 19 nt, Artificial Sequence
  Description of Artificial Sequence: Synthetic oligonucleotide
cuuagccuugcggacagag

SEQ ID NO: 1345028 - RNA, 19 nt, Artificial Sequence
  Description of Artificial Sequence: Synthetic oligonucleotide
uagucuuccacuggcuccc

SEQ ID NO: 1345029 - RNA, 19 nt, Artificial Sequence
  Description of Artificial Sequence: Synthetic oligonucleotide
agacgagccccacaaagau

SEQ ID NO: 1345030 - RNA, 19 nt, Artificial Sequence
  Description of Artificial Sequence: Synthetic oligonucleotide
cacccucaaauuuccagac

SEQ ID NO: 1345031 - RNA, 19 nt, Artificial Sequence
  Description of Artificial Sequence: Synthetic oligonucleotide
aguggccgcaugccaaagg

SEQ ID NO: 1345032 - RNA, 19 nt, Artificial Sequence
  Description of Artificial Sequence: Synthetic oligonucleotide
acgccuuaccuccccuugc

SEQ ID NO: 1345033 - RNA, 19 nt, Artificial Sequence
  Description of Artificial Sequence: Synthetic oligonucleotide
uccggagagccaguggccg

SEQ ID NO: 1345034 - RNA, 19 nt, Artificial Sequence
  Description of Artificial Sequence: Synthetic oligonucleotide
cuugcggacagagucugag

SEQ ID NO: 1345035 - RNA, 19 nt, Artificial Sequence
  Description of Artificial Sequence: Synthetic oligonucleotide
cagcccaugaagcugauaa

SEQ ID NO: 1345036 - RNA, 19 nt, Artificial Sequence
  Description of Artificial Sequence: Synthetic oligonucleotide
cauccauucacuacuugaa

SEQ ID NO: 1345037 - RNA, 19 nt, Artificial Sequence
  Description of Artificial Sequence: Synthetic oligonucleotide
aggcauagaguaugugugu

SEQ ID NO: 1345038 - RNA, 19 nt, Artificial Sequence
  Description of Artificial Sequence: Synthetic oligonucleotide
guggccgcaugccaaaggc

SEQ ID NO: 1345039 - RNA, 19 nt, Artificial Sequence
  Description of Artificial Sequence: Synthetic oligonucleotide
acaaccagcuuucccggga

SEQ ID NO: 1345040 - RNA, 19 nt, Artificial Sequence
  Description of Artificial Sequence: Synthetic oligonucleotide
cuguuguuggugugcuagg

SEQ ID NO: 1345041 - RNA, 19 nt, Artificial Sequence
  Description of Artificial Sequence: Synthetic oligonucleotide
gcauaagagauagucacac

SEQ ID NO: 1345042 - RNA, 19 nt, Artificial Sequence
  Description of Artificial Sequence: Synthetic oligonucleotide
accuuagccuugcggacag

SEQ ID NO: 1345043 - RNA, 19 nt, Artificial Sequence
  Description of Artificial Sequence: Synthetic oligonucleotide
ucuaaaaccuuggcacccu

SEQ ID NO: 1345044 - RNA, 19 nt, Artificial Sequence
  Description of Artificial Sequence: Synthetic oligonucleotide
acauagaccccuaccaagu

SEQ ID NO: 1345045 - RNA, 19 nt, Artificial Sequence
  Description of Artificial Sequence: Synthetic oligonucleotide
gacauccauucacuacuug

SEQ ID NO: 1345046 - RNA, 19 nt, Artificial Sequence
  Description of Artificial Sequence: Synthetic oligonucleotide
gaaaggugagcagacccca

SEQ ID NO: 1345047 - RNA, 19 nt, Artificial Sequence
  Description of Artificial Sequence: Synthetic oligonucleotide
aguagggcacaggaaagca

SEQ ID NO: 1345048 - RNA, 19 nt, Artificial Sequence
  Description of Artificial Sequence: Synthetic oligonucleotide
auagaguaugugugucaca

SEQ ID NO: 1345049 - RNA, 19 nt, Artificial Sequence
  Description of Artificial Sequence: Synthetic oligonucleotide
accagaccuguccggagag

SEQ ID NO: 1345050 - RNA, 19 nt, Artificial Sequence
  Description of Artificial Sequence: Synthetic oligonucleotide
aagcugauaagggccacau

SEQ ID NO: 1345051 - RNA, 19 nt, Artificial Sequence
  Description of Artificial Sequence: Synthetic oligonucleotide
auacgaggcugccucuuug

SEQ ID NO: 1345052 - RNA, 19 nt, Artificial Sequence
  Description of Artificial Sequence: Synthetic oligonucleotide
cuagguuaagcacccuuca

SEQ ID NO: 1345053 - RNA, 19 nt, Artificial Sequence
  Description of Artificial Sequence: Synthetic oligonucleotide
uacgaggcugccucuuuga

SEQ ID NO: 1345054 - RNA, 19 nt, Artificial Sequence
  Description of Artificial Sequence: Synthetic oligonucleotide
guggacaugaugagugccc

SEQ ID NO: 1345055 - RNA, 19 nt, Artificial Sequence
  Description of Artificial Sequence: Synthetic oligonucleotide
cagucuauagucuuccacu

SEQ ID NO: 1345056 - RNA, 19 nt, Artificial Sequence
  Description of Artificial Sequence: Synthetic oligonucleotide
cagaccuguccggagagcc

SEQ ID NO: 1345057 - RNA, 19 nt, Artificial Sequence
  Description of Artificial Sequence: Synthetic oligonucleotide
ggacaaccagcuuucccgg

SEQ ID NO: 1345058 - RNA, 19 nt, Artificial Sequence
  Description of Artificial Sequence: Synthetic oligonucleotide
ugucaacaagcaccaucac

SEQ ID NO: 1345059 - RNA, 19 nt, Artificial Sequence
  Description of Artificial Sequence: Synthetic oligonucleotide
augaugagugcccgagagu

SEQ ID NO: 1345060 - RNA, 19 nt, Artificial Sequence
  Description of Artificial Sequence: Synthetic oligonucleotide
aagugucauuuagaucuca

SEQ ID NO: 1345061 - RNA, 19 nt, Artificial Sequence
  Description of Artificial Sequence: Synthetic oligonucleotide
ggcuagacaaaggaaaaca

SEQ ID NO: 1345062 - RNA, 19 nt, Artificial Sequence
  Description of Artificial Sequence: Synthetic oligonucleotide
gaugagugcccgagaguag

SEQ ID NO: 1345063 - RNA, 19 nt, Artificial Sequence
  Description of Artificial Sequence: Synthetic oligonucleotide
aggagaccauacucaaagu

SEQ ID NO: 1345064 - RNA, 19 nt, Artificial Sequence
  Description of Artificial Sequence: Synthetic oligonucleotide
caugguuuaccuuagccuu

SEQ ID NO: 1345065 - RNA, 19 nt, Artificial Sequence
  Description of Artificial Sequence: Synthetic oligonucleotide
gacuuaggcgaaggauacg

SEQ ID NO: 1345066 - RNA, 19 nt, Artificial Sequence
  Description of Artificial Sequence: Synthetic oligonucleotide
agcuagguuaagcacccuu

SEQ ID NO: 1345067 - RNA, 19 nt, Artificial Sequence
  Description of Artificial Sequence: Synthetic oligonucleotide
aagggcacugacccacgau

SEQ ID NO: 1345068 - RNA, 19 nt, Artificial Sequence
  Description of Artificial Sequence: Synthetic oligonucleotide
gagaugguugaagccugag

SEQ ID NO: 1345069 - RNA, 19 nt, Artificial Sequence
  Description of Artificial Sequence: Synthetic oligonucleotide
ggucuacuuugacuuaggc

SEQ ID NO: 1345070 - RNA, 19 nt, Artificial Sequence
  Description of Artificial Sequence: Synthetic oligonucleotide
uuaccgagccagucugcca

SEQ ID NO: 1345071 - RNA, 19 nt, Artificial Sequence
  Description of Artificial Sequence: Synthetic oligonucleotide
caaucuucccaagaggaaa

SEQ ID NO: 1345072 - RNA, 19 nt, Artificial Sequence
  Description of Artificial Sequence: Synthetic oligonucleotide
cagugcaccgcugccagcc

SEQ ID NO: 1345073 - RNA, 19 nt, Artificial Sequence
  Description of Artificial Sequence: Synthetic oligonucleotide
acgaggcugccucuuugag

SEQ ID NO: 1345074 - RNA, 19 nt, Artificial Sequence
  Description of Artificial Sequence: Synthetic oligonucleotide
agggcgagguagaaagcac

SEQ ID NO: 1345075 - RNA, 19 nt, Artificial Sequence
  Description of Artificial Sequence: Synthetic oligonucleotide
uuacgucuuaagaccccaa

SEQ ID NO: 1345076 - RNA, 19 nt, Artificial Sequence
  Description of Artificial Sequence: Synthetic oligonucleotide
gacugagacuuuugaagua

SEQ ID NO: 1345077 - RNA, 19 nt, Artificial Sequence
  Description of Artificial Sequence: Synthetic oligonucleotide
uccguccaucgccaggcug

SEQ ID NO: 1345078 - RNA, 19 nt, Artificial Sequence
  Description of Artificial Sequence: Synthetic oligonucleotide
augaagcugauaagggcca

SEQ ID NO: 1345079 - RNA, 19 nt, Artificial Sequence
  Description of Artificial Sequence: Synthetic oligonucleotide
agcuccguccaucgccagg

SEQ ID NO: 1345080 - RNA, 19 nt, Artificial Sequence
  Description of Artificial Sequence: Synthetic oligonucleotide
uuaccccacgccuuaccuc

SEQ ID NO: 1345081 - RNA, 19 nt, Artificial Sequence
  Description of Artificial Sequence: Synthetic oligonucleotide
agaaagcacuguuguuggu

SEQ ID NO: 1345082 - RNA, 19 nt, Artificial Sequence
  Description of Artificial Sequence: Synthetic oligonucleotide
ggccgcaugccaaaggccg

SEQ ID NO: 1345083 - RNA, 19 nt, Artificial Sequence
  Description of Artificial Sequence: Synthetic oligonucleotide
acaugaugagugcccgaga

SEQ ID NO: 1345084 - RNA, 19 nt, Artificial Sequence
  Description of Artificial Sequence: Synthetic oligonucleotide
ugcauugacugugccuuac

SEQ ID NO: 1345085 - RNA, 19 nt, Artificial Sequence
  Description of Artificial Sequence: Synthetic oligonucleotide
caaccagcuuucccgggag

SEQ ID NO: 1345086 - RNA, 19 nt, Artificial Sequence
  Description of Artificial Sequence: Synthetic oligonucleotide
ggagaccauacucaaagua

SEQ ID NO: 1345087 - RNA, 19 nt, Artificial Sequence
  Description of Artificial Sequence: Synthetic oligonucleotide
cccaagaggaaaccugggg

SEQ ID NO: 1345088 - RNA, 19 nt, Artificial Sequence
  Description of Artificial Sequence: Synthetic oligonucleotide
cacuccaaucaccagaccu

SEQ ID NO: 1345089 - RNA, 19 nt, Artificial Sequence
  Description of Artificial Sequence: Synthetic oligonucleotide
guagagcauagcacaggcc

SEQ ID NO: 1345090 - RNA, 19 nt, Artificial Sequence
  Description of Artificial Sequence: Synthetic oligonucleotide
cacgaugggcuggaugagg

SEQ ID NO: 1345091 - RNA, 19 nt, Artificial Sequence
  Description of Artificial Sequence: Synthetic oligonucleotide
ccaaguaggugaaggcacc

SEQ ID NO: 1345092 - RNA, 19 nt, Artificial Sequence
  Description of Artificial Sequence: Synthetic oligonucleotide
uugaaguaacaaggcuaga

SEQ ID NO: 1345093 - RNA, 19 nt, Artificial Sequence
  Description of Artificial Sequence: Synthetic oligonucleotide
gacgagccccacaaagaug

SEQ ID NO: 1345094 - RNA, 19 nt, Artificial Sequence
  Description of Artificial Sequence: Synthetic oligonucleotide
aucaccagaccuguccgga

SEQ ID NO: 1345095 - RNA, 19 nt, Artificial Sequence
  Description of Artificial Sequence: Synthetic oligonucleotide
cuuugacuuaggcgaagga

SEQ ID NO: 1345096 - RNA, 19 nt, Artificial Sequence
  Description of Artificial Sequence: Synthetic oligonucleotide
augguuuaccuuagccuug

SEQ ID NO: 1345097 - RNA, 19 nt, Artificial Sequence
  Description of Artificial Sequence: Synthetic oligonucleotide
cugagcucaaccugugaaa

SEQ ID NO: 1345098 - RNA, 19 nt, Artificial Sequence
  Description of Artificial Sequence: Synthetic oligonucleotide
auaagggcacugacccacg

SEQ ID NO: 1345099 - RNA, 19 nt, Artificial Sequence
  Description of Artificial Sequence: Synthetic oligonucleotide
cauuuagaucucacuccca

SEQ ID NO: 1345100 - RNA, 19 nt, Artificial Sequence
  Description of Artificial Sequence: Synthetic oligonucleotide
agucaguuacagacagcag

SEQ ID NO: 1345101 - RNA, 19 nt, Artificial Sequence
  Description of Artificial Sequence: Synthetic oligonucleotide
cuuacgucuuaagacccca

SEQ ID NO: 1345102 - RNA, 19 nt, Artificial Sequence
  Description of Artificial Sequence: Synthetic oligonucleotide
gcauugacugugccuuacg

SEQ ID NO: 1345103 - RNA, 19 nt, Artificial Sequence
  Description of Artificial Sequence: Synthetic oligonucleotide
ggcaggcacuuaauaaggg

SEQ ID NO: 1345104 - RNA, 19 nt, Artificial Sequence
  Description of Artificial Sequence: Synthetic oligonucleotide
guaggugaaggcaccugac

SEQ ID NO: 1345105 - RNA, 19 nt, Artificial Sequence
  Description of Artificial Sequence: Synthetic oligonucleotide
cugccagccgccagcuccg

SEQ ID NO: 1345106 - RNA, 19 nt, Artificial Sequence
  Description of Artificial Sequence: Synthetic oligonucleotide
gugaaacaggaccaaucua

SEQ ID NO: 1345107 - RNA, 19 nt, Artificial Sequence
  Description of Artificial Sequence: Synthetic oligonucleotide
cugugccuuacgucuuaag

SEQ ID NO: 1345108 - RNA, 19 nt, Artificial Sequence
  Description of Artificial Sequence: Synthetic oligonucleotide
ggcccaucccuuuaaguca

SEQ ID NO: 1345109 - RNA, 19 nt, Artificial Sequence
  Description of Artificial Sequence: Synthetic oligonucleotide
gcacccucaaauuuccaga

SEQ ID NO: 1345110 - RNA, 19 nt, Artificial Sequence
  Description of Artificial Sequence: Synthetic oligonucleotide
gcucagucuauagucuucc

SEQ ID NO: 1345111 - RNA, 19 nt, Artificial Sequence
  Description of Artificial Sequence: Synthetic oligonucleotide
gaucucacucccagggcga

SEQ ID NO: 1345112 - RNA, 19 nt, Artificial Sequence
  Description of Artificial Sequence: Synthetic oligonucleotide
gaccccuaccaaguaggug

SEQ ID NO: 1345113 - RNA, 19 nt, Artificial Sequence
  Description of Artificial Sequence: Synthetic oligonucleotide
agaccccaaagugucauuu

SEQ ID NO: 1345114 - RNA, 19 nt, Artificial Sequence
  Description of Artificial Sequence: Synthetic oligonucleotide
agaggucuacuuugacuua

SEQ ID NO: 1345115 - RNA, 19 nt, Artificial Sequence
  Description of Artificial Sequence: Synthetic oligonucleotide
gcauagaguauguguguca

SEQ ID NO: 1345116 - RNA, 19 nt, Artificial Sequence
  Description of Artificial Sequence: Synthetic oligonucleotide
cucauagauagacauccau

SEQ ID NO: 1345117 - RNA, 19 nt, Artificial Sequence
  Description of Artificial Sequence: Synthetic oligonucleotide
guaaguggacaugaugagu

SEQ ID NO: 1345118 - RNA, 19 nt, Artificial Sequence
  Description of Artificial Sequence: Synthetic oligonucleotide
gaggaaaccuggggaagga

SEQ ID NO: 1345119 - RNA, 19 nt, Artificial Sequence
  Description of Artificial Sequence: Synthetic oligonucleotide
ccguccaucgccaggcugc

SEQ ID NO: 1345120 - RNA, 19 nt, Artificial Sequence
  Description of Artificial Sequence: Synthetic oligonucleotide
aggauacgaggcugccucu

SEQ ID NO: 1345121 - RNA, 19 nt, Artificial Sequence
  Description of Artificial Sequence: Synthetic oligonucleotide
gcuagacaaaggaaaacaa

SEQ ID NO: 1345122 - RNA, 19 nt, Artificial Sequence
  Description of Artificial Sequence: Synthetic oligonucleotide
cuuucccgggagugccucc

SEQ ID NO: 1345123 - RNA, 19 nt, Artificial Sequence
  Description of Artificial Sequence: Synthetic oligonucleotide
agaagacgagccccacaaa

SEQ ID NO: 1345124 - RNA, 19 nt, Artificial Sequence
  Description of Artificial Sequence: Synthetic oligonucleotide
guuaccccacgccuuaccu

SEQ ID NO: 1345125 - RNA, 19 nt, Artificial Sequence
  Description of Artificial Sequence: Synthetic oligonucleotide
gcuagguuaagcacccuuc

SEQ ID NO: 1345126 - RNA, 19 nt, Artificial Sequence
  Description of Artificial Sequence: Synthetic oligonucleotide
guuguuggugugcuagggu

SEQ ID NO: 1345127 - RNA, 19 nt, Artificial Sequence
  Description of Artificial Sequence: Synthetic oligonucleotide
gguccuaggcauaagagau

SEQ ID NO: 1345128 - RNA, 19 nt, Artificial Sequence
  Description of Artificial Sequence: Synthetic oligonucleotide
ccuuacgucuuaagacccc

SEQ ID NO: 1345129 - RNA, 19 nt, Artificial Sequence
  Description of Artificial Sequence: Synthetic oligonucleotide
cauugacugugccuuacgu

SEQ ID NO: 1345130 - RNA, 19 nt, Artificial Sequence
  Description of Artificial Sequence: Synthetic oligonucleotide
gccuuacgucuuaagaccc

SEQ ID NO: 1345131 - RNA, 19 nt, Artificial Sequence
  Description of Artificial Sequence: Synthetic oligonucleotide
aguagccgugguccugcca

SEQ ID NO: 1345132 - RNA, 19 nt, Artificial Sequence
  Description of Artificial Sequence: Synthetic oligonucleotide
uaccuccccuugcauugac

SEQ ID NO: 1345133 - RNA, 19 nt, Artificial Sequence
  Description of Artificial Sequence: Synthetic oligonucleotide
ugggucaucuugggagaga

SEQ ID NO: 1345134 - RNA, 19 nt, Artificial Sequence
  Description of Artificial Sequence: Synthetic oligonucleotide
uuaccuccccuugcauuga

SEQ ID NO: 1345135 - RNA, 19 nt, Artificial Sequence
  Description of Artificial Sequence: Synthetic oligonucleotide
aggaccaaucuaaaaccuu

SEQ ID NO: 1345136 - RNA, 19 nt, Artificial Sequence
  Description of Artificial Sequence: Synthetic oligonucleotide
agcccugauggggugcaag

SEQ ID NO: 1345137 - RNA, 19 nt, Artificial Sequence
  Description of Artificial Sequence: Synthetic oligonucleotide
caccugacagcccugggua

SEQ ID NO: 1345138 - RNA, 19 nt, Artificial Sequence
  Description of Artificial Sequence: Synthetic oligonucleotide
agcccuggguaaaguagag

SEQ ID NO: 1345139 - RNA, 19 nt, Artificial Sequence
  Description of Artificial Sequence: Synthetic oligonucleotide
ggguaaaguagagcauagc

SEQ ID NO: 1345140 - RNA, 19 nt, Artificial Sequence
  Description of Artificial Sequence: Synthetic oligonucleotide
ggcgagguagaaagcacug

SEQ ID NO: 1345141 - RNA, 19 nt, Artificial Sequence
  Description of Artificial Sequence: Synthetic oligonucleotide
augagcaucugagcagcau

SEQ ID NO: 1345142 - RNA, 19 nt, Artificial Sequence
  Description of Artificial Sequence: Synthetic oligonucleotide
ugccaaaggccgaggcaua

SEQ ID NO: 1345143 - RNA, 19 nt, Artificial Sequence
  Description of Artificial Sequence: Synthetic oligonucleotide
cagcauaguaaguggacau

SEQ ID NO: 1345144 - RNA, 19 nt, Artificial Sequence
  Description of Artificial Sequence: Synthetic oligonucleotide
cugggucaucuugggagag

SEQ ID NO: 1345145 - RNA, 19 nt, Artificial Sequence
  Description of Artificial Sequence: Synthetic oligonucleotide
gguuuaccuuagccuugcg

SEQ ID NO: 1345146 - RNA, 19 nt, Artificial Sequence
  Description of Artificial Sequence: Synthetic oligonucleotide
ggccuuaaagaagggcacc

SEQ ID NO: 1345147 - RNA, 19 nt, Artificial Sequence
  Description of Artificial Sequence: Synthetic oligonucleotide
aucucacucccagggcgag

SEQ ID NO: 1345148 - RNA, 19 nt, Artificial Sequence
  Description of Artificial Sequence: Synthetic oligonucleotide
uugcauugacugugccuua

SEQ ID NO: 1345149 - RNA, 19 nt, Artificial Sequence
  Description of Artificial Sequence: Synthetic oligonucleotide
cucagucuauagucuucca

SEQ ID NO: 1345150 - RNA, 19 nt, Artificial Sequence
  Description of Artificial Sequence: Synthetic oligonucleotide
agcgauggucaggucugag

SEQ ID NO: 1345151 - RNA, 19 nt, Artificial Sequence
  Description of Artificial Sequence: Synthetic oligonucleotide
cauugguccuaggcauaag

SEQ ID NO: 1345152 - RNA, 19 nt, Artificial Sequence
  Description of Artificial Sequence: Synthetic oligonucleotide
ggccgaggcauagaguaug

SEQ ID NO: 1345153 - RNA, 19 nt, Artificial Sequence
  Description of Artificial Sequence: Synthetic oligonucleotide
cauagcucuccagcccaug

SEQ ID NO: 1345154 - RNA, 19 nt, Artificial Sequence
  Description of Artificial Sequence: Synthetic oligonucleotide
gcacugacccacgaugggc

SEQ ID NO: 1345155 - RNA, 19 nt, Artificial Sequence
  Description of Artificial Sequence: Synthetic oligonucleotide
gcaacccugccauagcucu

SEQ ID NO: 1345156 - RNA, 19 nt, Artificial Sequence
  Description of Artificial Sequence: Synthetic oligonucleotide
caccagaccuguccggaga

SEQ ID NO: 1345157 - RNA, 19 nt, Artificial Sequence
  Description of Artificial Sequence: Synthetic oligonucleotide
cauagaccccuaccaagua

SEQ ID NO: 1345158 - RNA, 19 nt, Artificial Sequence
  Description of Artificial Sequence: Synthetic oligonucleotide
agccuugcggacagagucu

SEQ ID NO: 1345159 - RNA, 19 nt, Artificial Sequence
  Description of Artificial Sequence: Synthetic oligonucleotide
ccgagaguagggcacagga

SEQ ID NO: 1345160 - RNA, 19 nt, Artificial Sequence
  Description of Artificial Sequence: Synthetic oligonucleotide
agcugauaagggccacaua

SEQ ID NO: 1345161 - RNA, 19 nt, Artificial Sequence
  Description of Artificial Sequence: Synthetic oligonucleotide
aaggcaccugacagcccug

SEQ ID NO: 1345162 - RNA, 19 nt, Artificial Sequence
  Description of Artificial Sequence: Synthetic oligonucleotide
accugugaaacaggaccaa

SEQ ID NO: 1345163 - RNA, 19 nt, Artificial Sequence
  Description of Artificial Sequence: Synthetic oligonucleotide
gaaggauacgaggcugccu

SEQ ID NO: 1345164 - RNA, 19 nt, Artificial Sequence
  Description of Artificial Sequence: Synthetic oligonucleotide
gcgauggucaggucugaga

SEQ ID NO: 1345165 - RNA, 19 nt, Artificial Sequence
  Description of Artificial Sequence: Synthetic oligonucleotide
cccaaagugucauuuagau

SEQ ID NO: 1345166 - RNA, 19 nt, Artificial Sequence
  Description of Artificial Sequence: Synthetic oligonucleotide
accgagccagucugccacu

SEQ ID NO: 1345167 - RNA, 19 nt, Artificial Sequence
  Description of Artificial Sequence: Synthetic oligonucleotide
ccuuuaagucaguuacaga

SEQ ID NO: 1345168 - RNA, 19 nt, Artificial Sequence
  Description of Artificial Sequence: Synthetic oligonucleotide
agucuuccacuggcucccg

SEQ ID NO: 1345169 - RNA, 19 nt, Artificial Sequence
  Description of Artificial Sequence: Synthetic oligonucleotide
agaccccuaccaaguaggu

SEQ ID NO: 1345170 - RNA, 19 nt, Artificial Sequence
  Description of Artificial Sequence: Synthetic oligonucleotide
gauacgaggcugccucuuu

SEQ ID NO: 1345171 - RNA, 19 nt, Artificial Sequence
  Description of Artificial Sequence: Synthetic oligonucleotide
cacugggguggaccagcag

SEQ ID NO: 1345172 - RNA, 19 nt, Artificial Sequence
  Description of Artificial Sequence: Synthetic oligonucleotide
ccgugguccugccagauga

SEQ ID NO: 1345173 - RNA, 19 nt, Artificial Sequence
  Description of Artificial Sequence: Synthetic oligonucleotide
caggaaagcagaacuuguu

SEQ ID NO: 1345174 - RNA, 19 nt, Artificial Sequence
  Description of Artificial Sequence: Synthetic oligonucleotide
cacaaagaugagggaggca

SEQ ID NO: 1345175 - RNA, 19 nt, Artificial Sequence
  Description of Artificial Sequence: Synthetic oligonucleotide
cugaggcccaucccuuuaa

SEQ ID NO: 1345176 - RNA, 19 nt, Artificial Sequence
  Description of Artificial Sequence: Synthetic oligonucleotide
gaagaugggcaggcacuua

SEQ ID NO: 1345177 - RNA, 19 nt, Artificial Sequence
  Description of Artificial Sequence: Synthetic oligonucleotide
accccacgccuuaccuccc

SEQ ID NO: 1345178 - RNA, 19 nt, Artificial Sequence
  Description of Artificial Sequence: Synthetic oligonucleotide
gcuagagaccagccccuuc

SEQ ID NO: 1345179 - RNA, 19 nt, Artificial Sequence
  Description of Artificial Sequence: Synthetic oligonucleotide
ccccaaagugucauuuaga

SEQ ID NO: 1345180 - RNA, 19 nt, Artificial Sequence
  Description of Artificial Sequence: Synthetic oligonucleotide
ggacaugaugagugcccga

SEQ ID NO: 1345181 - RNA, 19 nt, Artificial Sequence
  Description of Artificial Sequence: Synthetic oligonucleotide
cagcuuaccgagccagucu

SEQ ID NO: 1345182 - RNA, 19 nt, Artificial Sequence
  Description of Artificial Sequence: Synthetic oligonucleotide
gccuugcggacagagucug

SEQ ID NO: 1345183 - RNA, 19 nt, Artificial Sequence
  Description of Artificial Sequence: Synthetic oligonucleotide
gcccugauggggugcaaga

SEQ ID NO: 1345184 - RNA, 19 nt, Artificial Sequence
  Description of Artificial Sequence: Synthetic oligonucleotide
acgcucugagcuagguuaa

SEQ ID NO: 1345185 - RNA, 19 nt, Artificial Sequence
  Description of Artificial Sequence: Synthetic oligonucleotide
ccgccagcuccguccaucg

SEQ ID NO: 1345186 - RNA, 19 nt, Artificial Sequence
  Description of Artificial Sequence: Synthetic oligonucleotide
caguggccgcaugccaaag

SEQ ID NO: 1345187 - RNA, 19 nt, Artificial Sequence
  Description of Artificial Sequence: Synthetic oligonucleotide
ccagcuuaccgagccaguc

SEQ ID NO: 1345188 - RNA, 19 nt, Artificial Sequence
  Description of Artificial Sequence: Synthetic oligonucleotide
gggagugccuccagcuuac

SEQ ID NO: 1345189 - RNA, 19 nt, Artificial Sequence
  Description of Artificial Sequence: Synthetic oligonucleotide
cagcuagagaccagccccu

SEQ ID NO: 1345190 - RNA, 19 nt, Artificial Sequence
  Description of Artificial Sequence: Synthetic oligonucleotide
guccuaggcauaagagaua

SEQ ID NO: 1345191 - RNA, 19 nt, Artificial Sequence
  Description of Artificial Sequence: Synthetic oligonucleotide
caaguaggugaaggcaccu

SEQ ID NO: 1345192 - RNA, 19 nt, Artificial Sequence
  Description of Artificial Sequence: Synthetic oligonucleotide
ccacauagaccccuaccaa

SEQ ID NO: 1345193 - RNA, 19 nt, Artificial Sequence
  Description of Artificial Sequence: Synthetic oligonucleotide
accuccccuugcauugacu

SEQ ID NO: 1345194 - RNA, 19 nt, Artificial Sequence
  Description of Artificial Sequence: Synthetic oligonucleotide
gcuuaccgagccagucugc

SEQ ID NO: 1345195 - RNA, 19 nt, Artificial Sequence
  Description of Artificial Sequence: Synthetic oligonucleotide
cuccccuugcauugacugu

SEQ ID NO: 1345196 - RNA, 19 nt, Artificial Sequence
  Description of Artificial Sequence: Synthetic oligonucleotide
gggugcaagaggucuacuu

SEQ ID NO: 1345197 - RNA, 19 nt, Artificial Sequence
  Description of Artificial Sequence: Synthetic oligonucleotide
agcuuucccgggagugccu

SEQ ID NO: 1345198 - RNA, 19 nt, Artificial Sequence
  Description of Artificial Sequence: Synthetic oligonucleotide
gcauugccauugguccuag

SEQ ID NO: 1345199 - RNA, 19 nt, Artificial Sequence
  Description of Artificial Sequence: Synthetic oligonucleotide
agcuagagaccagccccuu

SEQ ID NO: 1345200 - RNA, 19 nt, Artificial Sequence
  Description of Artificial Sequence: Synthetic oligonucleotide
cgaaggauacgaggcugcc

SEQ ID NO: 1345201 - RNA, 19 nt, Artificial Sequence
  Description of Artificial Sequence: Synthetic oligonucleotide
aggccgaggcauagaguau

SEQ ID NO: 1345202 - RNA, 19 nt, Artificial Sequence
  Description of Artificial Sequence: Synthetic oligonucleotide
ggaagccagagcacaaaau

SEQ ID NO: 1345203 - RNA, 19 nt, Artificial Sequence
  Description of Artificial Sequence: Synthetic oligonucleotide
ggcacuuaauaagggcacu

SEQ ID NO: 1345204 - RNA, 19 nt, Artificial Sequence
  Description of Artificial Sequence: Synthetic oligonucleotide
ggacagagucugagggaga

SEQ ID NO: 1345205 - RNA, 19 nt, Artificial Sequence
  Description of Artificial Sequence: Synthetic oligonucleotide
gcuuucccgggagugccuc

SEQ ID NO: 1345206 - RNA, 19 nt, Artificial Sequence
  Description of Artificial Sequence: Synthetic oligonucleotide
ccgcaugccaaaggccgag

SEQ ID NO: 1345207 - RNA, 19 nt, Artificial Sequence
  Description of Artificial Sequence: Synthetic oligonucleotide
ccgaggcauagaguaugug

SEQ ID NO: 1345208 - RNA, 19 nt, Artificial Sequence
  Description of Artificial Sequence: Synthetic oligonucleotide
cucugaggcccaucccuuu

SEQ ID NO: 1345209 - RNA, 19 nt, Artificial Sequence
  Description of Artificial Sequence: Synthetic oligonucleotide
cccggcucucgacagcaga

SEQ ID NO: 1345210 - RNA, 19 nt, Artificial Sequence
  Description of Artificial Sequence: Synthetic oligonucleotide
ccuuaccuccccuugcauu

SEQ ID NO: 1345211 - RNA, 19 nt, Artificial Sequence
  Description of Artificial Sequence: Synthetic oligonucleotide
gcccgagaguagggcacag

SEQ ID NO: 1345212 - RNA, 19 nt, Artificial Sequence
  Description of Artificial Sequence: Synthetic oligonucleotide
gagcuagguuaagcacccu

SEQ ID NO: 1345213 - RNA, 19 nt, Artificial Sequence
  Description of Artificial Sequence: Synthetic oligonucleotide
gccgcaugccaaaggccga

SEQ ID NO: 1345214 - RNA, 19 nt, Artificial Sequence
  Description of Artificial Sequence: Synthetic oligonucleotide
cgcaugccaaaggccgagg

SEQ ID NO: 1345215 - RNA, 19 nt, Artificial Sequence
  Description of Artificial Sequence: Synthetic oligonucleotide
ccccuaccaaguaggugaa

SEQ ID NO: 1345216 - RNA, 19 nt, Artificial Sequence
  Description of Artificial Sequence: Synthetic oligonucleotide
cccgggagugccuccagcu

SEQ ID NO: 1345217 - RNA, 19 nt, Artificial Sequence
  Description of Artificial Sequence: Synthetic oligonucleotide
cgccuuaccuccccuugca

SEQ ID NO: 1345218 - RNA, 19 nt, Artificial Sequence
  Description of Artificial Sequence: Synthetic oligonucleotide
ccuugcggacagagucuga

SEQ ID NO: 1345219 - RNA, 19 nt, Artificial Sequence
  Description of Artificial Sequence: Synthetic oligonucleotide
cgcucugagcuagguuaag

SEQ ID NO: 1345220 - RNA, 19 nt, Artificial Sequence
  Description of Artificial Sequence: Synthetic oligonucleotide
ggauacgaggcugccucuu

SEQ ID NO: 1345221 - RNA, 19 nt, Artificial Sequence
  Description of Artificial Sequence: Synthetic oligonucleotide
gccgaggcauagaguaugu

SEQ ID NO: 1345222 - RNA, 19 nt, Artificial Sequence
  Description of Artificial Sequence: Synthetic oligonucleotide
ccuaggcauaagagauagu

SEQ ID NO: 1345223 - RNA, 19 nt, Artificial Sequence
  Description of Artificial Sequence: Synthetic oligonucleotide
gccuuaccuccccuugcau

SEQ ID NO: 1345224 - RNA, 19 nt, Artificial Sequence
  Description of Artificial Sequence: Synthetic oligonucleotide
ggggugcaagaggucuacu

SEQ ID NO: 1345225 - RNA, 19 nt, Artificial Sequence
  Description of Artificial Sequence: Synthetic oligonucleotide
cggcucucgacagcagaca

SEQ ID NO: 1345226 - RNA, 19 nt, Artificial Sequence
  Description of Artificial Sequence: Synthetic oligonucleotide
cccaaccagccgcaacccu

SEQ ID NO: 1345227 - RNA, 19 nt, Artificial Sequence
  Description of Artificial Sequence: Synthetic oligonucleotide
caccuuccaggagggcuuu

SEQ ID NO: 1345228 - RNA, 19 nt, Artificial Sequence
  Description of Artificial Sequence: Synthetic oligonucleotide
cccacgccuuaccuccccu

SEQ ID NO: 1345229 - RNA, 19 nt, Artificial Sequence
  Description of Artificial Sequence: Synthetic oligonucleotide
ccuuagccuugcggacaga

SEQ ID NO: 1345230 - RNA, 19 nt, Artificial Sequence
  Description of Artificial Sequence: Synthetic oligonucleotide
ccacgccuuaccuccccuu

SEQ ID NO: 1345231 - RNA, 19 nt, Artificial Sequence
  Description of Artificial Sequence: Synthetic oligonucleotide
ccgggagugccuccagcuu

SEQ ID NO: 1345232 - RNA, 19 nt, Artificial Sequence
  Description of Artificial Sequence: Synthetic oligonucleotide
ccgagccagucugccacuu

SEQ ID NO: 1345233 - RNA, 19 nt, Artificial Sequence
  Description of Artificial Sequence: Synthetic oligonucleotide
aaauauucgcuccuguucc

SEQ ID NO: 1345234 - RNA, 19 nt, Artificial Sequence
  Description of Artificial Sequence: Synthetic oligonucleotide
ugugcuaauuuuaauaugc

SEQ ID NO: 1345235 - RNA, 19 nt, Artificial Sequence
  Description of Artificial Sequence: Synthetic oligonucleotide
uacauaguuaguaagacac

SEQ ID NO: 1345236 - RNA, 19 nt, Artificial Sequence
  Description of Artificial Sequence: Synthetic oligonucleotide
ucacuguuaacccagaacc

SEQ ID NO: 1345237 - RNA, 19 nt, Artificial Sequence
  Description of Artificial Sequence: Synthetic oligonucleotide
uguuacauuaacuauguca

SEQ ID NO: 1345238 - RNA, 19 nt, Artificial Sequence
  Description of Artificial Sequence: Synthetic oligonucleotide
gguuauaagagccaaaugg

SEQ ID NO: 1345239 - RNA, 19 nt, Artificial Sequence
  Description of Artificial Sequence: Synthetic oligonucleotide
uuuaauaugcacucgacac

SEQ ID NO: 1345240 - RNA, 19 nt, Artificial Sequence
  Description of Artificial Sequence: Synthetic oligonucleotide
aaaggaaaaugucuguggg

SEQ ID NO: 1345241 - RNA, 19 nt, Artificial Sequence
  Description of Artificial Sequence: Synthetic oligonucleotide
aauacaugaaacugcaugu

SEQ ID NO: 1345242 - RNA, 19 nt, Artificial Sequence
  Description of Artificial Sequence: Synthetic oligonucleotide
ugcaugucaaauuacaaag

SEQ ID NO: 1345243 - RNA, 19 nt, Artificial Sequence
  Description of Artificial Sequence: Synthetic oligonucleotide
uaucccuuuauucugauca

SEQ ID NO: 1345244 - RNA, 19 nt, Artificial Sequence
  Description of Artificial Sequence: Synthetic oligonucleotide
uauacucaaaaguagaacu

SEQ ID NO: 1345245 - RNA, 19 nt, Artificial Sequence
  Description of Artificial Sequence: Synthetic oligonucleotide
uaacauuuuacaauagagc

SEQ ID NO: 1345246 - RNA, 19 nt, Artificial Sequence
  Description of Artificial Sequence: Synthetic oligonucleotide
aauuauacucaagacaaag

SEQ ID NO: 1345247 - RNA, 19 nt, Artificial Sequence
  Description of Artificial Sequence: Synthetic oligonucleotide
uauucugaucacuacauag

SEQ ID NO: 1345248 - RNA, 19 nt, Artificial Sequence
  Description of Artificial Sequence: Synthetic oligonucleotide
uuaguaagacacaauguag

SEQ ID NO: 1345249 - RNA, 19 nt, Artificial Sequence
  Description of Artificial Sequence: Synthetic oligonucleotide
uaguuaguaagacacaaug

SEQ ID NO: 1345250 - RNA, 19 nt, Artificial Sequence
  Description of Artificial Sequence: Synthetic oligonucleotide
aacugucuaacaucuaggg

SEQ ID NO: 1345251 - RNA, 19 nt, Artificial Sequence
  Description of Artificial Sequence: Synthetic oligonucleotide
uucaaguugaaauauucgc

SEQ ID NO: 1345252 - RNA, 19 nt, Artificial Sequence
  Description of Artificial Sequence: Synthetic oligonucleotide
aacuaugucaacuguccac

SEQ ID NO: 1345253 - RNA, 19 nt, Artificial Sequence
  Description of Artificial Sequence: Synthetic oligonucleotide
auggauaacggcuaucuac

SEQ ID NO: 1345254 - RNA, 19 nt, Artificial Sequence
  Description of Artificial Sequence: Synthetic oligonucleotide
ucucaaauaacauuuuaca

SEQ ID NO: 1345255 - RNA, 19 nt, Artificial Sequence
  Description of Artificial Sequence: Synthetic oligonucleotide
aaauuucucaagugaaaag

SEQ ID NO: 1345256 - RNA, 19 nt, Artificial Sequence
  Description of Artificial Sequence: Synthetic oligonucleotide
aaggaaaaugucugugggc

SEQ ID NO: 1345257 - RNA, 19 nt, Artificial Sequence
  Description of Artificial Sequence: Synthetic oligonucleotide
aaauuaaggccuccgaaug

SEQ ID NO: 1345258 - RNA, 19 nt, Artificial Sequence
  Description of Artificial Sequence: Synthetic oligonucleotide
guaccauuaaauuaaggag

SEQ ID NO: 1345259 - RNA, 19 nt, Artificial Sequence
  Description of Artificial Sequence: Synthetic oligonucleotide
ugaacugucuaacaucuag

SEQ ID NO: 1345260 - RNA, 19 nt, Artificial Sequence
  Description of Artificial Sequence: Synthetic oligonucleotide
uauaguaugcagaaagcca

SEQ ID NO: 1345261 - RNA, 19 nt, Artificial Sequence
  Description of Artificial Sequence: Synthetic oligonucleotide
aaauggaacauagacucgg

SEQ ID NO: 1345262 - RNA, 19 nt, Artificial Sequence
  Description of Artificial Sequence: Synthetic oligonucleotide
uguauuucaguacuuacaa

SEQ ID NO: 1345263 - RNA, 19 nt, Artificial Sequence
  Description of Artificial Sequence: Synthetic oligonucleotide
cauuuuacaauagagcugc

SEQ ID NO: 1345264 - RNA, 19 nt, Artificial Sequence
  Description of Artificial Sequence: Synthetic oligonucleotide
aauuucucaagugaaaagu

SEQ ID NO: 1345265 - RNA, 19 nt, Artificial Sequence
  Description of Artificial Sequence: Synthetic oligonucleotide
aguaguuuaaccuacuaaa

SEQ ID NO: 1345266 - RNA, 19 nt, Artificial Sequence
  Description of Artificial Sequence: Synthetic oligonucleotide
cugaucacuacauaguuag

SEQ ID NO: 1345267 - RNA, 19 nt, Artificial Sequence
  Description of Artificial Sequence: Synthetic oligonucleotide
cuuucguagguucagaaag

SEQ ID NO: 1345268 - RNA, 19 nt, Artificial Sequence
  Description of Artificial Sequence: Synthetic oligonucleotide
aggaaaaugucugugggcc

SEQ ID NO: 1345269 - RNA, 19 nt, Artificial Sequence
  Description of Artificial Sequence: Synthetic oligonucleotide
agaaccaaaacauuuucug

SEQ ID NO: 1345270 - RNA, 19 nt, Artificial Sequence
  Description of Artificial Sequence: Synthetic oligonucleotide
aaagcaaauguauuucagu

SEQ ID NO: 1345271 - RNA, 19 nt, Artificial Sequence
  Description of Artificial Sequence: Synthetic oligonucleotide
uuuuggaacaugaaucuac

SEQ ID NO: 1345272 - RNA, 19 nt, Artificial Sequence
  Description of Artificial Sequence: Synthetic oligonucleotide
ugaauuuugccaauacaug

SEQ ID NO: 1345273 - RNA, 19 nt, Artificial Sequence
  Description of Artificial Sequence: Synthetic oligonucleotide
aauagcuuuucucaucacu

SEQ ID NO: 1345274 - RNA, 19 nt, Artificial Sequence
  Description of Artificial Sequence: Synthetic oligonucleotide
aaauguaccauuaaauuaa

SEQ ID NO: 1345275 - RNA, 19 nt, Artificial Sequence
  Description of Artificial Sequence: Synthetic oligonucleotide
aauagagcugcucaaugca

SEQ ID NO: 1345276 - RNA, 19 nt, Artificial Sequence
  Description of Artificial Sequence: Synthetic oligonucleotide
uuuuaauaugcacucgaca

SEQ ID NO: 1345277 - RNA, 19 nt, Artificial Sequence
  Description of Artificial Sequence: Synthetic oligonucleotide
auaacggcuaucuacaagu

SEQ ID NO: 1345278 - RNA, 19 nt, Artificial Sequence
  Description of Artificial Sequence: Synthetic oligonucleotide
uaguuuaaccuacuaaaug

SEQ ID NO: 1345279 - RNA, 19 nt, Artificial Sequence
  Description of Artificial Sequence: Synthetic oligonucleotide
uucucaaauaacauuuuac

SEQ ID NO: 1345280 - RNA, 19 nt, Artificial Sequence
  Description of Artificial Sequence: Synthetic oligonucleotide
aaccucacagguuauaaga

SEQ ID NO: 1345281 - RNA, 19 nt, Artificial Sequence
  Description of Artificial Sequence: Synthetic oligonucleotide
agugaacugucuccuaucc

SEQ ID NO: 1345282 - RNA, 19 nt, Artificial Sequence
  Description of Artificial Sequence: Synthetic oligonucleotide
auaagagccaaauggaaca

SEQ ID NO: 1345283 - RNA, 19 nt, Artificial Sequence
  Description of Artificial Sequence: Synthetic oligonucleotide
gaauuuugccaauacauga

SEQ ID NO: 1345284 - RNA, 19 nt, Artificial Sequence
  Description of Artificial Sequence: Synthetic oligonucleotide
aaagauguacucucugaug

SEQ ID NO: 1345285 - RNA, 19 nt, Artificial Sequence
  Description of Artificial Sequence: Synthetic oligonucleotide
uccuuaagcagcaaguaga

SEQ ID NO: 1345286 - RNA, 19 nt, Artificial Sequence
  Description of Artificial Sequence: Synthetic oligonucleotide
cuaaaugugucuauauaug

SEQ ID NO: 1345287 - RNA, 19 nt, Artificial Sequence
  Description of Artificial Sequence: Synthetic oligonucleotide
aacuagguauaguaugcag

SEQ ID NO: 1345288 - RNA, 19 nt, Artificial Sequence
  Description of Artificial Sequence: Synthetic oligonucleotide
acugucuaacaucuagggc

SEQ ID NO: 1345289 - RNA, 19 nt, Artificial Sequence
  Description of Artificial Sequence: Synthetic oligonucleotide
uaucuuguggccuucaaaa

SEQ ID NO: 1345290 - RNA, 19 nt, Artificial Sequence
  Description of Artificial Sequence: Synthetic oligonucleotide
aagaaucucucucaagccu

SEQ ID NO: 1345291 - RNA, 19 nt, Artificial Sequence
  Description of Artificial Sequence: Synthetic oligonucleotide
caagaaugcgccgagaugc

SEQ ID NO: 1345292 - RNA, 19 nt, Artificial Sequence
  Description of Artificial Sequence: Synthetic oligonucleotide
acuacauaguuaguaagac

SEQ ID NO: 1345293 - RNA, 19 nt, Artificial Sequence
  Description of Artificial Sequence: Synthetic oligonucleotide
uuucguagguucagaaagg

SEQ ID NO: 1345294 - RNA, 19 nt, Artificial Sequence
  Description of Artificial Sequence: Synthetic oligonucleotide
uuaauaugcacucgacaca

SEQ ID NO: 1345295 - RNA, 19 nt, Artificial Sequence
  Description of Artificial Sequence: Synthetic oligonucleotide
ucaacuguccacuagugaa

SEQ ID NO: 1345296 - RNA, 19 nt, Artificial Sequence
  Description of Artificial Sequence: Synthetic oligonucleotide
uuuaaggauuugaagagua

SEQ ID NO: 1345297 - RNA, 19 nt, Artificial Sequence
  Description of Artificial Sequence: Synthetic oligonucleotide
cugucuaacaucuagggca

SEQ ID NO: 1345298 - RNA, 19 nt, Artificial Sequence
  Description of Artificial Sequence: Synthetic oligonucleotide
ugaugcaucauccuuucgu

SEQ ID NO: 1345299 - RNA, 19 nt, Artificial Sequence
  Description of Artificial Sequence: Synthetic oligonucleotide
ucuauuugugcuaauuuua

SEQ ID NO: 1345300 - RNA, 19 nt, Artificial Sequence
  Description of Artificial Sequence: Synthetic oligonucleotide
gaaauauucgcuccuguuc

SEQ ID NO: 1345301 - RNA, 19 nt, Artificial Sequence
  Description of Artificial Sequence: Synthetic oligonucleotide
uggauaacggcuaucuaca

SEQ ID NO: 1345302 - RNA, 19 nt, Artificial Sequence
  Description of Artificial Sequence: Synthetic oligonucleotide
aacaaauguaccauuaaau

SEQ ID NO: 1345303 - RNA, 19 nt, Artificial Sequence
  Description of Artificial Sequence: Synthetic oligonucleotide
uuucuuagaaaguaguauu

SEQ ID NO: 1345304 - RNA, 19 nt, Artificial Sequence
  Description of Artificial Sequence: Synthetic oligonucleotide
uguagguuucaauuggugu

SEQ ID NO: 1345305 - RNA, 19 nt, Artificial Sequence
  Description of Artificial Sequence: Synthetic oligonucleotide
uuaaauuaaggaguacucu

SEQ ID NO: 1345306 - RNA, 19 nt, Artificial Sequence
  Description of Artificial Sequence: Synthetic oligonucleotide
ucuuuccuuccugagaugg

SEQ ID NO: 1345307 - RNA, 19 nt, Artificial Sequence
  Description of Artificial Sequence: Synthetic oligonucleotide
agucaugggaacuagguau

SEQ ID NO: 1345308 - RNA, 19 nt, Artificial Sequence
  Description of Artificial Sequence: Synthetic oligonucleotide
uucucaagugaaaaguccu

SEQ ID NO: 1345309 - RNA, 19 nt, Artificial Sequence
  Description of Artificial Sequence: Synthetic oligonucleotide
uuuccuaacagcccuggga

SEQ ID NO: 1345310 - RNA, 19 nt, Artificial Sequence
  Description of Artificial Sequence: Synthetic oligonucleotide
ugccaauacaugaaacugc

SEQ ID NO: 1345311 - RNA, 19 nt, Artificial Sequence
  Description of Artificial Sequence: Synthetic oligonucleotide
ucacuacauaguuaguaag

SEQ ID NO: 1345312 - RNA, 19 nt, Artificial Sequence
  Description of Artificial Sequence: Synthetic oligonucleotide
uauacucaagacaaaggau

SEQ ID NO: 1345313 - RNA, 19 nt, Artificial Sequence
  Description of Artificial Sequence: Synthetic oligonucleotide
auuauacucaagacaaagg

SEQ ID NO: 1345314 - RNA, 19 nt, Artificial Sequence
  Description of Artificial Sequence: Synthetic oligonucleotide
augugaacugucuaacauc

SEQ ID NO: 1345315 - RNA, 19 nt, Artificial Sequence
  Description of Artificial Sequence: Synthetic oligonucleotide
gucacuaaugcagacaaag

SEQ ID NO: 1345316 - RNA, 19 nt, Artificial Sequence
  Description of Artificial Sequence: Synthetic oligonucleotide
cuaucuacaagucauggga

SEQ ID NO: 1345317 - RNA, 19 nt, Artificial Sequence
  Description of Artificial Sequence: Synthetic oligonucleotide
aauuaaggccuccgaaugu

SEQ ID NO: 1345318 - RNA, 19 nt, Artificial Sequence
  Description of Artificial Sequence: Synthetic oligonucleotide
uaauuuuaauaugcacucg

SEQ ID NO: 1345319 - RNA, 19 nt, Artificial Sequence
  Description of Artificial Sequence: Synthetic oligonucleotide
ucuuagaaaguaguauucc

SEQ ID NO: 1345320 - RNA, 19 nt, Artificial Sequence
  Description of Artificial Sequence: Synthetic oligonucleotide
guagggaaaaccucacagg

SEQ ID NO: 1345321 - RNA, 19 nt, Artificial Sequence
  Description of Artificial Sequence: Synthetic oligonucleotide
uagaaaguaguauuccuuc

SEQ ID NO: 1345322 - RNA, 19 nt, Artificial Sequence
  Description of Artificial Sequence: Synthetic oligonucleotide
uuuuaucccuuuauucuga

SEQ ID NO: 1345323 - RNA, 19 nt, Artificial Sequence
  Description of Artificial Sequence: Synthetic oligonucleotide
aucuacaagucaugggaac

SEQ ID NO: 1345324 - RNA, 19 nt, Artificial Sequence
  Description of Artificial Sequence: Synthetic oligonucleotide
uuuugccaauacaugaaac

SEQ ID NO: 1345325 - RNA, 19 nt, Artificial Sequence
  Description of Artificial Sequence: Synthetic oligonucleotide
ucaguacuuacaaacuuaa

SEQ ID NO: 1345326 - RNA, 19 nt, Artificial Sequence
  Description of Artificial Sequence: Synthetic oligonucleotide
guuaguaagacacaaugua

SEQ ID NO: 1345327 - RNA, 19 nt, Artificial Sequence
  Description of Artificial Sequence: Synthetic oligonucleotide
aacaucuagggcacuggcc

SEQ ID NO: 1345328 - RNA, 19 nt, Artificial Sequence
  Description of Artificial Sequence: Synthetic oligonucleotide
auagacucggauccagaac

SEQ ID NO: 1345329 - RNA, 19 nt, Artificial Sequence
  Description of Artificial Sequence: Synthetic oligonucleotide
uuccuaacagcccugggac

SEQ ID NO: 1345330 - RNA, 19 nt, Artificial Sequence
  Description of Artificial Sequence: Synthetic oligonucleotide
ugcuaauuuuaauaugcac

SEQ ID NO: 1345331 - RNA, 19 nt, Artificial Sequence
  Description of Artificial Sequence: Synthetic oligonucleotide
uaaccuacuaaaugugucu

SEQ ID NO: 1345332 - RNA, 19 nt, Artificial Sequence
  Description of Artificial Sequence: Synthetic oligonucleotide
gauaacggcuaucuacaag

SEQ ID NO: 1345333 - RNA, 19 nt, Artificial Sequence
  Description of Artificial Sequence: Synthetic oligonucleotide
ugggauaaaacuacaugaa

SEQ ID NO: 1345334 - RNA, 19 nt, Artificial Sequence
  Description of Artificial Sequence: Synthetic oligonucleotide
aguaagacacaauguaggu

SEQ ID NO: 1345335 - RNA, 19 nt, Artificial Sequence
  Description of Artificial Sequence: Synthetic oligonucleotide
uuuaaaauuccggccuggg

SEQ ID NO: 1345336 - RNA, 19 nt, Artificial Sequence
  Description of Artificial Sequence: Synthetic oligonucleotide
acuaaugcagacaaagaug

SEQ ID NO: 1345337 - RNA, 19 nt, Artificial Sequence
  Description of Artificial Sequence: Synthetic oligonucleotide
aacuacaugaacaaaugua

SEQ ID NO: 1345338 - RNA, 19 nt, Artificial Sequence
  Description of Artificial Sequence: Synthetic oligonucleotide
ucgaguuaucugaagaauc

SEQ ID NO: 1345339 - RNA, 19 nt, Artificial Sequence
  Description of Artificial Sequence: Synthetic oligonucleotide
uugguguuaaagcacacuu

SEQ ID NO: 1345340 - RNA, 19 nt, Artificial Sequence
  Description of Artificial Sequence: Synthetic oligonucleotide
auuuuaauaugcacucgac

SEQ ID NO: 1345341 - RNA, 19 nt, Artificial Sequence
  Description of Artificial Sequence: Synthetic oligonucleotide
uuuuaaaauuccggccugg

SEQ ID NO: 1345342 - RNA, 19 nt, Artificial Sequence
  Description of Artificial Sequence: Synthetic oligonucleotide
uuaaaauuccggccuggga

SEQ ID NO: 1345343 - RNA, 19 nt, Artificial Sequence
  Description of Artificial Sequence: Synthetic oligonucleotide
uaaucauuucacaaucuuu

SEQ ID NO: 1345344 - RNA, 19 nt, Artificial Sequence
  Description of Artificial Sequence: Synthetic oligonucleotide
uugccaauacaugaaacug

SEQ ID NO: 1345345 - RNA, 19 nt, Artificial Sequence
  Description of Artificial Sequence: Synthetic oligonucleotide
ucacucauugcccuuuucu

SEQ ID NO: 1345346 - RNA, 19 nt, Artificial Sequence
  Description of Artificial Sequence: Synthetic oligonucleotide
uucaguacuuacaaacuua

SEQ ID NO: 1345347 - RNA, 19 nt, Artificial Sequence
  Description of Artificial Sequence: Synthetic oligonucleotide
uggaacauagacucggauc

SEQ ID NO: 1345348 - RNA, 19 nt, Artificial Sequence
  Description of Artificial Sequence: Synthetic oligonucleotide
aaugcgccgagaugcauca

SEQ ID NO: 1345349 - RNA, 19 nt, Artificial Sequence
  Description of Artificial Sequence: Synthetic oligonucleotide
cagacaaagauguacucuc

SEQ ID NO: 1345350 - RNA, 19 nt, Artificial Sequence
  Description of Artificial Sequence: Synthetic oligonucleotide
uucuauuugugcuaauuuu

SEQ ID NO: 1345351 - RNA, 19 nt, Artificial Sequence
  Description of Artificial Sequence: Synthetic oligonucleotide
cugacuugucucaacagug

SEQ ID NO: 1345352 - RNA, 19 nt, Artificial Sequence
  Description of Artificial Sequence: Synthetic oligonucleotide
augcacucgacacacaagu

SEQ ID NO: 1345353 - RNA, 19 nt, Artificial Sequence
  Description of Artificial Sequence: Synthetic oligonucleotide
aacagugcagccuuccuuu

SEQ ID NO: 1345354 - RNA, 19 nt, Artificial Sequence
  Description of Artificial Sequence: Synthetic oligonucleotide
ugaacugucuccuauccuu

SEQ ID NO: 1345355 - RNA, 19 nt, Artificial Sequence
  Description of Artificial Sequence: Synthetic oligonucleotide
ggcaguuucacuguuaacc

SEQ ID NO: 1345356 - RNA, 19 nt, Artificial Sequence
  Description of Artificial Sequence: Synthetic oligonucleotide
ugacuugucucaacagugc

SEQ ID NO: 1345357 - RNA, 19 nt, Artificial Sequence
  Description of Artificial Sequence: Synthetic oligonucleotide
ucaagaaugcgccgagaug

SEQ ID NO: 1345358 - RNA, 19 nt, Artificial Sequence
  Description of Artificial Sequence: Synthetic oligonucleotide
auccuuaagcagcaaguag

SEQ ID NO: 1345359 - RNA, 19 nt, Artificial Sequence
  Description of Artificial Sequence: Synthetic oligonucleotide
gauuuacuuggagaggacc

SEQ ID NO: 1345360 - RNA, 19 nt, Artificial Sequence
  Description of Artificial Sequence: Synthetic oligonucleotide
uucgcggcugcuacgaugc

SEQ ID NO: 1345361 - RNA, 19 nt, Artificial Sequence
  Description of Artificial Sequence: Synthetic oligonucleotide
uucaagaaugcgccgagau

SEQ ID NO: 1345362 - RNA, 19 nt, Artificial Sequence
  Description of Artificial Sequence: Synthetic oligonucleotide
gauuugaagaguaauuucu

SEQ ID NO: 1345363 - RNA, 19 nt, Artificial Sequence
  Description of Artificial Sequence: Synthetic oligonucleotide
ucauggauaacggcuaucu

SEQ ID NO: 1345364 - RNA, 19 nt, Artificial Sequence
  Description of Artificial Sequence: Synthetic oligonucleotide
aauguaccauuaaauuaag

SEQ ID NO: 1345365 - RNA, 19 nt, Artificial Sequence
  Description of Artificial Sequence: Synthetic oligonucleotide
cugagucacagguuguagg

SEQ ID NO: 1345366 - RNA, 19 nt, Artificial Sequence
  Description of Artificial Sequence: Synthetic oligonucleotide
uacuaaaugugucuauaua

SEQ ID NO: 1345367 - RNA, 19 nt, Artificial Sequence
  Description of Artificial Sequence: Synthetic oligonucleotide
aucacuacauaguuaguaa

SEQ ID NO: 1345368 - RNA, 19 nt, Artificial Sequence
  Description of Artificial Sequence: Synthetic oligonucleotide
uguuggucacuaaugcaga

SEQ ID NO: 1345369 - RNA, 19 nt, Artificial Sequence
  Description of Artificial Sequence: Synthetic oligonucleotide
acuuggagaggaccauacc

SEQ ID NO: 1345370 - RNA, 19 nt, Artificial Sequence
  Description of Artificial Sequence: Synthetic oligonucleotide
aacggcuaucuacaaguca

SEQ ID NO: 1345371 - RNA, 19 nt, Artificial Sequence
  Description of Artificial Sequence: Synthetic oligonucleotide
agagccaaauggaacauag

SEQ ID NO: 1345372 - RNA, 19 nt, Artificial Sequence
  Description of Artificial Sequence: Synthetic oligonucleotide
uaugcacucgacacacaag

SEQ ID NO: 1345373 - RNA, 19 nt, Artificial Sequence
  Description of Artificial Sequence: Synthetic oligonucleotide
uaucuacaagucaugggaa

SEQ ID NO: 1345374 - RNA, 19 nt, Artificial Sequence
  Description of Artificial Sequence: Synthetic oligonucleotide
ugugucuauauauggcagu

SEQ ID NO: 1345375 - RNA, 19 nt, Artificial Sequence
  Description of Artificial Sequence: Synthetic oligonucleotide
uugaaauauucgcuccugu

SEQ ID NO: 1345376 - RNA, 19 nt, Artificial Sequence
  Description of Artificial Sequence: Synthetic oligonucleotide
uuaaggauuugaagaguaa

SEQ ID NO: 1345377 - RNA, 19 nt, Artificial Sequence
  Description of Artificial Sequence: Synthetic oligonucleotide
aaaauuccggccugggaua

SEQ ID NO: 1345378 - RNA, 19 nt, Artificial Sequence
  Description of Artificial Sequence: Synthetic oligonucleotide
ucgacacacaaguauauuu

SEQ ID NO: 1345379 - RNA, 19 nt, Artificial Sequence
  Description of Artificial Sequence: Synthetic oligonucleotide
gucagcaugggcuugcaac

SEQ ID NO: 1345380 - RNA, 19 nt, Artificial Sequence
  Description of Artificial Sequence: Synthetic oligonucleotide
uucugaucacuacauaguu

SEQ ID NO: 1345381 - RNA, 19 nt, Artificial Sequence
  Description of Artificial Sequence: Synthetic oligonucleotide
uaaggaguacucuccaaaa

SEQ ID NO: 1345382 - RNA, 19 nt, Artificial Sequence
  Description of Artificial Sequence: Synthetic oligonucleotide
aucuuguuacauuaacuau

SEQ ID NO: 1345383 - RNA, 19 nt, Artificial Sequence
  Description of Artificial Sequence: Synthetic oligonucleotide
caaggaagacuccuucgcg

SEQ ID NO: 1345384 - RNA, 19 nt, Artificial Sequence
  Description of Artificial Sequence: Synthetic oligonucleotide
auucgcuccuguuccuugc

SEQ ID NO: 1345385 - RNA, 19 nt, Artificial Sequence
  Description of Artificial Sequence: Synthetic oligonucleotide
aucucggugaucuggucag

SEQ ID NO: 1345386 - RNA, 19 nt, Artificial Sequence
  Description of Artificial Sequence: Synthetic oligonucleotide
ucucgaguuaucugaagaa

SEQ ID NO: 1345387 - RNA, 19 nt, Artificial Sequence
  Description of Artificial Sequence: Synthetic oligonucleotide
uaaggauuugaagaguaau

SEQ ID NO: 1345388 - RNA, 19 nt, Artificial Sequence
  Description of Artificial Sequence: Synthetic oligonucleotide
auacaugaaacugcauguc

SEQ ID NO: 1345389 - RNA, 19 nt, Artificial Sequence
  Description of Artificial Sequence: Synthetic oligonucleotide
ucuaacaucuagggcacug

SEQ ID NO: 1345390 - RNA, 19 nt, Artificial Sequence
  Description of Artificial Sequence: Synthetic oligonucleotide
gauauacucaaaaguagaa

SEQ ID NO: 1345391 - RNA, 19 nt, Artificial Sequence
  Description of Artificial Sequence: Synthetic oligonucleotide
ucuacaagucaugggaacu

SEQ ID NO: 1345392 - RNA, 19 nt, Artificial Sequence
  Description of Artificial Sequence: Synthetic oligonucleotide
cuagguauaguaugcagaa

SEQ ID NO: 1345393 - RNA, 19 nt, Artificial Sequence
  Description of Artificial Sequence: Synthetic oligonucleotide
agacaaaggauaaauacuu

SEQ ID NO: 1345394 - RNA, 19 nt, Artificial Sequence
  Description of Artificial Sequence: Synthetic oligonucleotide
acuccuucgcggcugcuac

SEQ ID NO: 1345395 - RNA, 19 nt, Artificial Sequence
  Description of Artificial Sequence: Synthetic oligonucleotide
ugcgccgagaugcaucaag

SEQ ID NO: 1345396 - RNA, 19 nt, Artificial Sequence
  Description of Artificial Sequence: Synthetic oligonucleotide
ugaaauauucgcuccuguu

SEQ ID NO: 1345397 - RNA, 19 nt, Artificial Sequence
  Description of Artificial Sequence: Synthetic oligonucleotide
uacugcacacacucaagca

SEQ ID NO: 1345398 - RNA, 19 nt, Artificial Sequence
  Description of Artificial Sequence: Synthetic oligonucleotide
ucauccuuucguagguuca

SEQ ID NO: 1345399 - RNA, 19 nt, Artificial Sequence
  Description of Artificial Sequence: Synthetic oligonucleotide
acauuuuacaauagagcug

SEQ ID NO: 1345400 - RNA, 19 nt, Artificial Sequence
  Description of Artificial Sequence: Synthetic oligonucleotide
auaugcacucgacacacaa

SEQ ID NO: 1345401 - RNA, 19 nt, Artificial Sequence
  Description of Artificial Sequence: Synthetic oligonucleotide
uuacaauagagcugcucaa

SEQ ID NO: 1345402 - RNA, 19 nt, Artificial Sequence
  Description of Artificial Sequence: Synthetic oligonucleotide
aguuaguaagacacaaugu

SEQ ID NO: 1345403 - RNA, 19 nt, Artificial Sequence
  Description of Artificial Sequence: Synthetic oligonucleotide
ggugcuucaagaaugcgcc

SEQ ID NO: 1345404 - RNA, 19 nt, Artificial Sequence
  Description of Artificial Sequence: Synthetic oligonucleotide
auauggcagucuuucuuag

SEQ ID NO: 1345405 - RNA, 19 nt, Artificial Sequence
  Description of Artificial Sequence: Synthetic oligonucleotide
gggaacuagguauaguaug

SEQ ID NO: 1345406 - RNA, 19 nt, Artificial Sequence
  Description of Artificial Sequence: Synthetic oligonucleotide
gucuccuauccuuaagcag

SEQ ID NO: 1345407 - RNA, 19 nt, Artificial Sequence
  Description of Artificial Sequence: Synthetic oligonucleotide
acuagguauaguaugcaga

SEQ ID NO: 1345408 - RNA, 19 nt, Artificial Sequence
  Description of Artificial Sequence: Synthetic oligonucleotide
gaaugugaacugucuaaca

SEQ ID NO: 1345409 - RNA, 19 nt, Artificial Sequence
  Description of Artificial Sequence: Synthetic oligonucleotide
agguuauaagagccaaaug

SEQ ID NO: 1345410 - RNA, 19 nt, Artificial Sequence
  Description of Artificial Sequence: Synthetic oligonucleotide
uacccaucuuguuacauua

SEQ ID NO: 1345411 - RNA, 19 nt, Artificial Sequence
  Description of Artificial Sequence: Synthetic oligonucleotide
ugguguuaaagcacacuuc

SEQ ID NO: 1345412 - RNA, 19 nt, Artificial Sequence
  Description of Artificial Sequence: Synthetic oligonucleotide
uauuugugcuaauuuuaau

SEQ ID NO: 1345413 - RNA, 19 nt, Artificial Sequence
  Description of Artificial Sequence: Synthetic oligonucleotide
ugcucaaugcauugucucu

SEQ ID NO: 1345414 - RNA, 19 nt, Artificial Sequence
  Description of Artificial Sequence: Synthetic oligonucleotide
uugcaacuccuucugauuu

SEQ ID NO: 1345415 - RNA, 19 nt, Artificial Sequence
  Description of Artificial Sequence: Synthetic oligonucleotide
agcaagucauggauaacgg

SEQ ID NO: 1345416 - RNA, 19 nt, Artificial Sequence
  Description of Artificial Sequence: Synthetic oligonucleotide
aguaugcagaaagccacuc

SEQ ID NO: 1345417 - RNA, 19 nt, Artificial Sequence
  Description of Artificial Sequence: Synthetic oligonucleotide
cacucauugcccuuuucug

SEQ ID NO: 1345418 - RNA, 19 nt, Artificial Sequence
  Description of Artificial Sequence: Synthetic oligonucleotide
augggcuugcaacuccuuc

SEQ ID NO: 1345419 - RNA, 19 nt, Artificial Sequence
  Description of Artificial Sequence: Synthetic oligonucleotide
ucuauauauggcagucuuu

SEQ ID NO: 1345420 - RNA, 19 nt, Artificial Sequence
  Description of Artificial Sequence: Synthetic oligonucleotide
ugggaacuagguauaguau

SEQ ID NO: 1345421 - RNA, 19 nt, Artificial Sequence
  Description of Artificial Sequence: Synthetic oligonucleotide
gcagcaaguagagaggagg

SEQ ID NO: 1345422 - RNA, 19 nt, Artificial Sequence
  Description of Artificial Sequence: Synthetic oligonucleotide
gaucacuacauaguuagua

SEQ ID NO: 1345423 - RNA, 19 nt, Artificial Sequence
  Description of Artificial Sequence: Synthetic oligonucleotide
uacaagucaugggaacuag

SEQ ID NO: 1345424 - RNA, 19 nt, Artificial Sequence
  Description of Artificial Sequence: Synthetic oligonucleotide
auucugaucacuacauagu

SEQ ID NO: 1345425 - RNA, 19 nt, Artificial Sequence
  Description of Artificial Sequence: Synthetic oligonucleotide
gaagaguaauuucuuaaau

SEQ ID NO: 1345426 - RNA, 19 nt, Artificial Sequence
  Description of Artificial Sequence: Synthetic oligonucleotide
caagucauggauaacggcu

SEQ ID NO: 1345427 - RNA, 19 nt, Artificial Sequence
  Description of Artificial Sequence: Synthetic oligonucleotide
cuaacaucuagggcacugg

SEQ ID NO: 1345428 - RNA, 19 nt, Artificial Sequence
  Description of Artificial Sequence: Synthetic oligonucleotide
ccgagaugcaucaaggaag

SEQ ID NO: 1345429 - RNA, 19 nt, Artificial Sequence
  Description of Artificial Sequence: Synthetic oligonucleotide
ggaacuagguauaguaugc

SEQ ID NO: 1345430 - RNA, 19 nt, Artificial Sequence
  Description of Artificial Sequence: Synthetic oligonucleotide
cuuguuacauuaacuaugu

SEQ ID NO: 1345431 - RNA, 19 nt, Artificial Sequence
  Description of Artificial Sequence: Synthetic oligonucleotide
gaugcaucauccuuucgua

SEQ ID NO: 1345432 - RNA, 19 nt, Artificial Sequence
  Description of Artificial Sequence: Synthetic oligonucleotide
uuguagggaaaaccucaca

SEQ ID NO: 1345433 - RNA, 19 nt, Artificial Sequence
  Description of Artificial Sequence: Synthetic oligonucleotide
aacuuucuauuugugcuaa

SEQ ID NO: 1345434 - RNA, 19 nt, Artificial Sequence
  Description of Artificial Sequence: Synthetic oligonucleotide
guuaacccagaaccaaaac

SEQ ID NO: 1345435 - RNA, 19 nt, Artificial Sequence
  Description of Artificial Sequence: Synthetic oligonucleotide
ugcaacuccuucugauuug

SEQ ID NO: 1345436 - RNA, 19 nt, Artificial Sequence
  Description of Artificial Sequence: Synthetic oligonucleotide
uucguagguucagaaagga

SEQ ID NO: 1345437 - RNA, 19 nt, Artificial Sequence
  Description of Artificial Sequence: Synthetic oligonucleotide
cuacauaguuaguaagaca

SEQ ID NO: 1345438 - RNA, 19 nt, Artificial Sequence
  Description of Artificial Sequence: Synthetic oligonucleotide
uccggccugggauaaaacu

SEQ ID NO: 1345439 - RNA, 19 nt, Artificial Sequence
  Description of Artificial Sequence: Synthetic oligonucleotide
aaccaauaggaaaaucuua

SEQ ID NO: 1345440 - RNA, 19 nt, Artificial Sequence
  Description of Artificial Sequence: Synthetic oligonucleotide
ggauuugaagaguaauuuc

SEQ ID NO: 1345441 - RNA, 19 nt, Artificial Sequence
  Description of Artificial Sequence: Synthetic oligonucleotide
gcugcuacgaugcaccaug

SEQ ID NO: 1345442 - RNA, 19 nt, Artificial Sequence
  Description of Artificial Sequence: Synthetic oligonucleotide
uguuccuugcaacccugcu

SEQ ID NO: 1345443 - RNA, 19 nt, Artificial Sequence
  Description of Artificial Sequence: Synthetic oligonucleotide
cuugcaacccugcuguuca

SEQ ID NO: 1345444 - RNA, 19 nt, Artificial Sequence
  Description of Artificial Sequence: Synthetic oligonucleotide
ucguagguucagaaaggac

SEQ ID NO: 1345445 - RNA, 19 nt, Artificial Sequence
  Description of Artificial Sequence: Synthetic oligonucleotide
gcuacgaugcaccauguca

SEQ ID NO: 1345446 - RNA, 19 nt, Artificial Sequence
  Description of Artificial Sequence: Synthetic oligonucleotide
uuucacuguuaacccagaa

SEQ ID NO: 1345447 - RNA, 19 nt, Artificial Sequence
  Description of Artificial Sequence: Synthetic oligonucleotide
uccgaaugugaacugucua

SEQ ID NO: 1345448 - RNA, 19 nt, Artificial Sequence
  Description of Artificial Sequence: Synthetic oligonucleotide
cagauuuacuuggagagga

SEQ ID NO: 1345449 - RNA, 19 nt, Artificial Sequence
  Description of Artificial Sequence: Synthetic oligonucleotide
gcuaauuuuaauaugcacu

SEQ ID NO: 1345450 - RNA, 19 nt, Artificial Sequence
  Description of Artificial Sequence: Synthetic oligonucleotide
augugucuauauauggcag

SEQ ID NO: 1345451 - RNA, 19 nt, Artificial Sequence
  Description of Artificial Sequence: Synthetic oligonucleotide
auuaaggaguacucuccaa

SEQ ID NO: 1345452 - RNA, 19 nt, Artificial Sequence
  Description of Artificial Sequence: Synthetic oligonucleotide
gguauaguaugcagaaagc

SEQ ID NO: 1345453 - RNA, 19 nt, Artificial Sequence
  Description of Artificial Sequence: Synthetic oligonucleotide
cugcucaaugcauugucuc

SEQ ID NO: 1345454 - RNA, 19 nt, Artificial Sequence
  Description of Artificial Sequence: Synthetic oligonucleotide
aagugccgccucuccaguc

SEQ ID NO: 1345455 - RNA, 19 nt, Artificial Sequence
  Description of Artificial Sequence: Synthetic oligonucleotide
aauggaacauagacucgga

SEQ ID NO: 1345456 - RNA, 19 nt, Artificial Sequence
  Description of Artificial Sequence: Synthetic oligonucleotide
cuacgaugcaccaugucaa

SEQ ID NO: 1345457 - RNA, 19 nt, Artificial Sequence
  Description of Artificial Sequence: Synthetic oligonucleotide
uccuuucguagguucagaa

SEQ ID NO: 1345458 - RNA, 19 nt, Artificial Sequence
  Description of Artificial Sequence: Synthetic oligonucleotide
auguaccauuaaauuaagg

SEQ ID NO: 1345459 - RNA, 19 nt, Artificial Sequence
  Description of Artificial Sequence: Synthetic oligonucleotide
ucaaugcauugucucugac

SEQ ID NO: 1345460 - RNA, 19 nt, Artificial Sequence
  Description of Artificial Sequence: Synthetic oligonucleotide
accccacucaccucaaacu

SEQ ID NO: 1345461 - RNA, 19 nt, Artificial Sequence
  Description of Artificial Sequence: Synthetic oligonucleotide
auugguguuaaagcacacu

SEQ ID NO: 1345462 - RNA, 19 nt, Artificial Sequence
  Description of Artificial Sequence: Synthetic oligonucleotide
agauuuacuuggagaggac

SEQ ID NO: 1345463 - RNA, 19 nt, Artificial Sequence
  Description of Artificial Sequence: Synthetic oligonucleotide
cucucgaguuaucugaaga

SEQ ID NO: 1345464 - RNA, 19 nt, Artificial Sequence
  Description of Artificial Sequence: Synthetic oligonucleotide
ucaugggaacuagguauag

SEQ ID NO: 1345465 - RNA, 19 nt, Artificial Sequence
  Description of Artificial Sequence: Synthetic oligonucleotide
acggcuaucuacaagucau

SEQ ID NO: 1345466 - RNA, 19 nt, Artificial Sequence
  Description of Artificial Sequence: Synthetic oligonucleotide
uaaggccuccgaaugugaa

SEQ ID NO: 1345467 - RNA, 19 nt, Artificial Sequence
  Description of Artificial Sequence: Synthetic oligonucleotide
ugucuauauauggcagucu

SEQ ID NO: 1345468 - RNA, 19 nt, Artificial Sequence
  Description of Artificial Sequence: Synthetic oligonucleotide
acucucgaguuaucugaag

SEQ ID NO: 1345469 - RNA, 19 nt, Artificial Sequence
  Description of Artificial Sequence: Synthetic oligonucleotide
aggaccauacccaucuugu

SEQ ID NO: 1345470 - RNA, 19 nt, Artificial Sequence
  Description of Artificial Sequence: Synthetic oligonucleotide
acaagucaugggaacuagg

SEQ ID NO: 1345471 - RNA, 19 nt, Artificial Sequence
  Description of Artificial Sequence: Synthetic oligonucleotide
cuuguggccuucaaaagcu

SEQ ID NO: 1345472 - RNA, 19 nt, Artificial Sequence
  Description of Artificial Sequence: Synthetic oligonucleotide
ggcuaucuacaagucaugg

SEQ ID NO: 1345473 - RNA, 19 nt, Artificial Sequence
  Description of Artificial Sequence: Synthetic oligonucleotide
uagugaacugucuccuauc

SEQ ID NO: 1345474 - RNA, 19 nt, Artificial Sequence
  Description of Artificial Sequence: Synthetic oligonucleotide
ggacucucgaguuaucuga

SEQ ID NO: 1345475 - RNA, 19 nt, Artificial Sequence
  Description of Artificial Sequence: Synthetic oligonucleotide
uaacggcuaucuacaaguc

SEQ ID NO: 1345476 - RNA, 19 nt, Artificial Sequence
  Description of Artificial Sequence: Synthetic oligonucleotide
auggguggaaaacuugcua

SEQ ID NO: 1345477 - RNA, 19 nt, Artificial Sequence
  Description of Artificial Sequence: Synthetic oligonucleotide
cauugcccuuuucugaguc

SEQ ID NO: 1345478 - RNA, 19 nt, Artificial Sequence
  Description of Artificial Sequence: Synthetic oligonucleotide
uccuaacagcccugggacc

SEQ ID NO: 1345479 - RNA, 19 nt, Artificial Sequence
  Description of Artificial Sequence: Synthetic oligonucleotide
auacccaucuuguuacauu

SEQ ID NO: 1345480 - RNA, 19 nt, Artificial Sequence
  Description of Artificial Sequence: Synthetic oligonucleotide
auacucaaaaguagaacuu

SEQ ID NO: 1345481 - RNA, 19 nt, Artificial Sequence
  Description of Artificial Sequence: Synthetic oligonucleotide
guagguuucaauugguguu

SEQ ID NO: 1345482 - RNA, 19 nt, Artificial Sequence
  Description of Artificial Sequence: Synthetic oligonucleotide
augucaaauuacaaagcaa

SEQ ID NO: 1345483 - RNA, 19 nt, Artificial Sequence
  Description of Artificial Sequence: Synthetic oligonucleotide
auggaacauagacucggau

SEQ ID NO: 1345484 - RNA, 19 nt, Artificial Sequence
  Description of Artificial Sequence: Synthetic oligonucleotide
guaugcagaaagccacuca

SEQ ID NO: 1345485 - RNA, 19 nt, Artificial Sequence
  Description of Artificial Sequence: Synthetic oligonucleotide
gaacuagguauaguaugca

SEQ ID NO: 1345486 - RNA, 19 nt, Artificial Sequence
  Description of Artificial Sequence: Synthetic oligonucleotide
agaaaggacucucgaguua

SEQ ID NO: 1345487 - RNA, 19 nt, Artificial Sequence
  Description of Artificial Sequence: Synthetic oligonucleotide
gguuguagggaaaaccuca

SEQ ID NO: 1345488 - RNA, 19 nt, Artificial Sequence
  Description of Artificial Sequence: Synthetic oligonucleotide
gugucuauauauggcaguc

SEQ ID NO: 1345489 - RNA, 19 nt, Artificial Sequence
  Description of Artificial Sequence: Synthetic oligonucleotide
uuaucccuuuauucugauc

SEQ ID NO: 1345490 - RNA, 19 nt, Artificial Sequence
  Description of Artificial Sequence: Synthetic oligonucleotide
caagucaugggaacuaggu

SEQ ID NO: 1345491 - RNA, 19 nt, Artificial Sequence
  Description of Artificial Sequence: Synthetic oligonucleotide
ggauggguggaaaacuugc

SEQ ID NO: 1345492 - RNA, 19 nt, Artificial Sequence
  Description of Artificial Sequence: Synthetic oligonucleotide
aggccuccgaaugugaacu

SEQ ID NO: 1345493 - RNA, 19 nt, Artificial Sequence
  Description of Artificial Sequence: Synthetic oligonucleotide
aaaggacucucgaguuauc

SEQ ID NO: 1345494 - RNA, 19 nt, Artificial Sequence
  Description of Artificial Sequence: Synthetic oligonucleotide
cacuaaugcagacaaagau

SEQ ID NO: 1345495 - RNA, 19 nt, Artificial Sequence
  Description of Artificial Sequence: Synthetic oligonucleotide
uggagaggaccauacccau

SEQ ID NO: 1345496 - RNA, 19 nt, Artificial Sequence
  Description of Artificial Sequence: Synthetic oligonucleotide
cucucaagccuuuguuuuc

SEQ ID NO: 1345497 - RNA, 19 nt, Artificial Sequence
  Description of Artificial Sequence: Synthetic oligonucleotide
uuguuacauuaacuauguc

SEQ ID NO: 1345498 - RNA, 19 nt, Artificial Sequence
  Description of Artificial Sequence: Synthetic oligonucleotide
guuguagggaaaaccucac

SEQ ID NO: 1345499 - RNA, 19 nt, Artificial Sequence
  Description of Artificial Sequence: Synthetic oligonucleotide
acucggauccagaacuuug

SEQ ID NO: 1345500 - RNA, 19 nt, Artificial Sequence
  Description of Artificial Sequence: Synthetic oligonucleotide
cuucgcggcugcuacgaug

SEQ ID NO: 1345501 - RNA, 19 nt, Artificial Sequence
  Description of Artificial Sequence: Synthetic oligonucleotide
uuggaacaugaaucuacuu

SEQ ID NO: 1345502 - RNA, 19 nt, Artificial Sequence
  Description of Artificial Sequence: Synthetic oligonucleotide
gcaagucauggauaacggc

SEQ ID NO: 1345503 - RNA, 19 nt, Artificial Sequence
  Description of Artificial Sequence: Synthetic oligonucleotide
cuuucuuagaaaguaguau

SEQ ID NO: 1345504 - RNA, 19 nt, Artificial Sequence
  Description of Artificial Sequence: Synthetic oligonucleotide
gacacaauguagguuucaa

SEQ ID NO: 1345505 - RNA, 19 nt, Artificial Sequence
  Description of Artificial Sequence: Synthetic oligonucleotide
auaguuaguaagacacaau

SEQ ID NO: 1345506 - RNA, 19 nt, Artificial Sequence
  Description of Artificial Sequence: Synthetic oligonucleotide
gaaugcgccgagaugcauc

SEQ ID NO: 1345507 - RNA, 19 nt, Artificial Sequence
  Description of Artificial Sequence: Synthetic oligonucleotide
gugcuucaagaaugcgccg

SEQ ID NO: 1345508 - RNA, 19 nt, Artificial Sequence
  Description of Artificial Sequence: Synthetic oligonucleotide
caucucggugaucugguca

SEQ ID NO: 1345509 - RNA, 19 nt, Artificial Sequence
  Description of Artificial Sequence: Synthetic oligonucleotide
aaauuccggccugggauaa

SEQ ID NO: 1345510 - RNA, 19 nt, Artificial Sequence
  Description of Artificial Sequence: Synthetic oligonucleotide
ucauugcccuuuucugagu

SEQ ID NO: 1345511 - RNA, 19 nt, Artificial Sequence
  Description of Artificial Sequence: Synthetic oligonucleotide
agucauggauaacggcuau

SEQ ID NO: 1345512 - RNA, 19 nt, Artificial Sequence
  Description of Artificial Sequence: Synthetic oligonucleotide
ugcacucgacacacaagua

SEQ ID NO: 1345513 - RNA, 19 nt, Artificial Sequence
  Description of Artificial Sequence: Synthetic oligonucleotide
cacucaagcaagucaugga

SEQ ID NO: 1345514 - RNA, 19 nt, Artificial Sequence
  Description of Artificial Sequence: Synthetic oligonucleotide
aagaaugcgccgagaugca

SEQ ID NO: 1345515 - RNA, 19 nt, Artificial Sequence
  Description of Artificial Sequence: Synthetic oligonucleotide
uacgaugcaccaugucaau

SEQ ID NO: 1345516 - RNA, 19 nt, Artificial Sequence
  Description of Artificial Sequence: Synthetic oligonucleotide
cugaugcaucauccuuucg

SEQ ID NO: 1345517 - RNA, 19 nt, Artificial Sequence
  Description of Artificial Sequence: Synthetic oligonucleotide
ucggauccagaacuuuguu

SEQ ID NO: 1345518 - RNA, 19 nt, Artificial Sequence
  Description of Artificial Sequence: Synthetic oligonucleotide
aauaugcacucgacacaca

SEQ ID NO: 1345519 - RNA, 19 nt, Artificial Sequence
  Description of Artificial Sequence: Synthetic oligonucleotide
gugcuaauuuuaauaugca

SEQ ID NO: 1345520 - RNA, 19 nt, Artificial Sequence
  Description of Artificial Sequence: Synthetic oligonucleotide
cuguuaacccagaaccaaa

SEQ ID NO: 1345521 - RNA, 19 nt, Artificial Sequence
  Description of Artificial Sequence: Synthetic oligonucleotide
cuguuccuugcaacccugc

SEQ ID NO: 1345522 - RNA, 19 nt, Artificial Sequence
  Description of Artificial Sequence: Synthetic oligonucleotide
acccagaaccaaaacauuu

SEQ ID NO: 1345523 - RNA, 19 nt, Artificial Sequence
  Description of Artificial Sequence: Synthetic oligonucleotide
cacucgacacacaaguaua

SEQ ID NO: 1345524 - RNA, 19 nt, Artificial Sequence
  Description of Artificial Sequence: Synthetic oligonucleotide
gucuauauauggcagucuu

SEQ ID NO: 1345525 - RNA, 19 nt, Artificial Sequence
  Description of Artificial Sequence: Synthetic oligonucleotide
ugcuacgaugcaccauguc

SEQ ID NO: 1345526 - RNA, 19 nt, Artificial Sequence
  Description of Artificial Sequence: Synthetic oligonucleotide
uccuucgcggcugcuacga

SEQ ID NO: 1345527 - RNA, 19 nt, Artificial Sequence
  Description of Artificial Sequence: Synthetic oligonucleotide
caaagauguacucucugau

SEQ ID NO: 1345528 - RNA, 19 nt, Artificial Sequence
  Description of Artificial Sequence: Synthetic oligonucleotide
cagaaccaaaacauuuucu

SEQ ID NO: 1345529 - RNA, 19 nt, Artificial Sequence
  Description of Artificial Sequence: Synthetic oligonucleotide
gguacugcacacacucaag

SEQ ID NO: 1345530 - RNA, 19 nt, Artificial Sequence
  Description of Artificial Sequence: Synthetic oligonucleotide
cuacuaaaugugucuauau

SEQ ID NO: 1345531 - RNA, 19 nt, Artificial Sequence
  Description of Artificial Sequence: Synthetic oligonucleotide
cuccuauccuuaagcagca

SEQ ID NO: 1345532 - RNA, 19 nt, Artificial Sequence
  Description of Artificial Sequence: Synthetic oligonucleotide
acuagugaacugucuccua

SEQ ID NO: 1345533 - RNA, 19 nt, Artificial Sequence
  Description of Artificial Sequence: Synthetic oligonucleotide
cucuccaguccaugcugag

SEQ ID NO: 1345534 - RNA, 19 nt, Artificial Sequence
  Description of Artificial Sequence: Synthetic oligonucleotide
ugcccuuuucugagucaca

SEQ ID NO: 1345535 - RNA, 19 nt, Artificial Sequence
  Description of Artificial Sequence: Synthetic oligonucleotide
uuccggccugggauaaaac

SEQ ID NO: 1345536 - RNA, 19 nt, Artificial Sequence
  Description of Artificial Sequence: Synthetic oligonucleotide
acucgacacacaaguauau

SEQ ID NO: 1345537 - RNA, 19 nt, Artificial Sequence
  Description of Artificial Sequence: Synthetic oligonucleotide
cguagguucagaaaggacu

SEQ ID NO: 1345538 - RNA, 19 nt, Artificial Sequence
  Description of Artificial Sequence: Synthetic oligonucleotide
acauagacucggauccaga

SEQ ID NO: 1345539 - RNA, 19 nt, Artificial Sequence
  Description of Artificial Sequence: Synthetic oligonucleotide
gauggguggaaaacuugcu

SEQ ID NO: 1345540 - RNA, 19 nt, Artificial Sequence
  Description of Artificial Sequence: Synthetic oligonucleotide
auuccggccugggauaaaa

SEQ ID NO: 1345541 - RNA, 19 nt, Artificial Sequence
  Description of Artificial Sequence: Synthetic oligonucleotide
cagguuauaagagccaaau

SEQ ID NO: 1345542 - RNA, 19 nt, Artificial Sequence
  Description of Artificial Sequence: Synthetic oligonucleotide
gccgagaugcaucaaggaa

SEQ ID NO: 1345543 - RNA, 19 nt, Artificial Sequence
  Description of Artificial Sequence: Synthetic oligonucleotide
gagccaaauggaacauaga

SEQ ID NO: 1345544 - RNA, 19 nt, Artificial Sequence
  Description of Artificial Sequence: Synthetic oligonucleotide
gacucucgaguuaucugaa

SEQ ID NO: 1345545 - RNA, 19 nt, Artificial Sequence
  Description of Artificial Sequence: Synthetic oligonucleotide
gguggaaaacuugcuaaaa

SEQ ID NO: 1345546 - RNA, 19 nt, Artificial Sequence
  Description of Artificial Sequence: Synthetic oligonucleotide
cuacaagucaugggaacua

SEQ ID NO: 1345547 - RNA, 19 nt, Artificial Sequence
  Description of Artificial Sequence: Synthetic oligonucleotide
ugcaacccugcuguucauc

SEQ ID NO: 1345548 - RNA, 19 nt, Artificial Sequence
  Description of Artificial Sequence: Synthetic oligonucleotide
cucggauccagaacuuugu

SEQ ID NO: 1345549 - RNA, 19 nt, Artificial Sequence
  Description of Artificial Sequence: Synthetic oligonucleotide
acagguuauaagagccaaa

SEQ ID NO: 1345550 - RNA, 19 nt, Artificial Sequence
  Description of Artificial Sequence: Synthetic oligonucleotide
cucugaugcaucauccuuu

SEQ ID NO: 1345551 - RNA, 19 nt, Artificial Sequence
  Description of Artificial Sequence: Synthetic oligonucleotide
agaugguacugcacacacu

SEQ ID NO: 1345552 - RNA, 19 nt, Artificial Sequence
  Description of Artificial Sequence: Synthetic oligonucleotide
auccuuucguagguucaga

SEQ ID NO: 1345553 - RNA, 19 nt, Artificial Sequence
  Description of Artificial Sequence: Synthetic oligonucleotide
gcgccgagaugcaucaagg

SEQ ID NO: 1345554 - RNA, 19 nt, Artificial Sequence
  Description of Artificial Sequence: Synthetic oligonucleotide
ggguggaaaacuugcuaaa

SEQ ID NO: 1345555 - RNA, 19 nt, Artificial Sequence
  Description of Artificial Sequence: Synthetic oligonucleotide
cgaaugugaacugucuaac

SEQ ID NO: 1345556 - RNA, 19 nt, Artificial Sequence
  Description of Artificial Sequence: Synthetic oligonucleotide
cacucaccucaaacuucag

SEQ ID NO: 1345557 - RNA, 19 nt, Artificial Sequence
  Description of Artificial Sequence: Synthetic oligonucleotide
gucaugggaacuagguaua

SEQ ID NO: 1345558 - RNA, 19 nt, Artificial Sequence
  Description of Artificial Sequence: Synthetic oligonucleotide
ccgaaugugaacugucuaa

SEQ ID NO: 1345559 - RNA, 19 nt, Artificial Sequence
  Description of Artificial Sequence: Synthetic oligonucleotide
gagaugcaucaaggaagac

SEQ ID NO: 1345560 - RNA, 19 nt, Artificial Sequence
  Description of Artificial Sequence: Synthetic oligonucleotide
ccuuuccuaacagcccugg

SEQ ID NO: 1345561 - RNA, 19 nt, Artificial Sequence
  Description of Artificial Sequence: Synthetic oligonucleotide
cauggauaacggcuaucua

SEQ ID NO: 1345562 - RNA, 19 nt, Artificial Sequence
  Description of Artificial Sequence: Synthetic oligonucleotide
cuccgaaugugaacugucu

SEQ ID NO: 1345563 - RNA, 19 nt, Artificial Sequence
  Description of Artificial Sequence: Synthetic oligonucleotide
gugaacugucuccuauccu

SEQ ID NO: 1345564 - RNA, 19 nt, Artificial Sequence
  Description of Artificial Sequence: Synthetic oligonucleotide
cgagaugcaucaaggaaga

SEQ ID NO: 1345565 - RNA, 19 nt, Artificial Sequence
  Description of Artificial Sequence: Synthetic oligonucleotide
agaaugcgccgagaugcau

SEQ ID NO: 1345566 - RNA, 19 nt, Artificial Sequence
  Description of Artificial Sequence: Synthetic oligonucleotide
cucucugaugcaucauccu

SEQ ID NO: 1345567 - RNA, 19 nt, Artificial Sequence
  Description of Artificial Sequence: Synthetic oligonucleotide
cucgaguuaucugaagaau

SEQ ID NO: 1345568 - RNA, 19 nt, Artificial Sequence
  Description of Artificial Sequence: Synthetic oligonucleotide
ggauaacggcuaucuacaa

SEQ ID NO: 1345569 - RNA, 19 nt, Artificial Sequence
  Description of Artificial Sequence: Synthetic oligonucleotide
cggccugggauaaaacuac

SEQ ID NO: 1345570 - RNA, 19 nt, Artificial Sequence
  Description of Artificial Sequence: Synthetic oligonucleotide
aauuccggccugggauaaa

SEQ ID NO: 1345571 - RNA, 19 nt, Artificial Sequence
  Description of Artificial Sequence: Synthetic oligonucleotide
cuucaagaaugcgccgaga

SEQ ID NO: 1345572 - RNA, 19 nt, Artificial Sequence
  Description of Artificial Sequence: Synthetic oligonucleotide
uugcaacccugcuguucau

SEQ ID NO: 1345573 - RNA, 19 nt, Artificial Sequence
  Description of Artificial Sequence: Synthetic oligonucleotide
ccuuucguagguucagaaa

SEQ ID NO: 1345574 - RNA, 19 nt, Artificial Sequence
  Description of Artificial Sequence: Synthetic oligonucleotide
uccuauccuuaagcagcaa

SEQ ID NO: 1345575 - RNA, 19 nt, Artificial Sequence
  Description of Artificial Sequence: Synthetic oligonucleotide
cacuggcccuuuccuaaca

SEQ ID NO: 1345576 - RNA, 19 nt, Artificial Sequence
  Description of Artificial Sequence: Synthetic oligonucleotide
acccaucuuguuacauuaa

SEQ ID NO: 1345577 - RNA, 19 nt, Artificial Sequence
  Description of Artificial Sequence: Synthetic oligonucleotide
agacucggauccagaacuu

SEQ ID NO: 1345578 - RNA, 19 nt, Artificial Sequence
  Description of Artificial Sequence: Synthetic oligonucleotide
gcccuuuccuaacagcccu

SEQ ID NO: 1345579 - RNA, 19 nt, Artificial Sequence
  Description of Artificial Sequence: Synthetic oligonucleotide
uccuugcaacccugcuguu

SEQ ID NO: 1345580 - RNA, 19 nt, Artificial Sequence
  Description of Artificial Sequence: Synthetic oligonucleotide
ccggccugggauaaaacua

SEQ ID NO: 1345581 - RNA, 19 nt, Artificial Sequence
  Description of Artificial Sequence: Synthetic oligonucleotide
cgaugcaccaugucaaucu

SEQ ID NO: 1345582 - RNA, 19 nt, Artificial Sequence
  Description of Artificial Sequence: Synthetic oligonucleotide
caugggaacuagguauagu

SEQ ID NO: 1345583 - RNA, 19 nt, Artificial Sequence
  Description of Artificial Sequence: Synthetic oligonucleotide
ucgcggcugcuacgaugca

SEQ ID NO: 1345584 - RNA, 19 nt, Artificial Sequence
  Description of Artificial Sequence: Synthetic oligonucleotide
cuguaucuuguggccuuca

SEQ ID NO: 1345585 - RNA, 19 nt, Artificial Sequence
  Description of Artificial Sequence: Synthetic oligonucleotide
ccuugcaacccugcuguuc

SEQ ID NO: 1345586 - RNA, 19 nt, Artificial Sequence
  Description of Artificial Sequence: Synthetic oligonucleotide
cauacccaucuuguuacau

SEQ ID NO: 1345587 - RNA, 19 nt, Artificial Sequence
  Description of Artificial Sequence: Synthetic oligonucleotide
gacucggauccagaacuuu

SEQ ID NO: 1345588 - RNA, 19 nt, Artificial Sequence
  Description of Artificial Sequence: Synthetic oligonucleotide
ccucaaacuucagacugaa

SEQ ID NO: 1345589 - RNA, 19 nt, Artificial Sequence
  Description of Artificial Sequence: Synthetic oligonucleotide
gugaacugucuaacaucua

SEQ ID NO: 1345590 - RNA, 19 nt, Artificial Sequence
  Description of Artificial Sequence: Synthetic oligonucleotide
cggcuaucuacaagucaug

SEQ ID NO: 1345591 - RNA, 19 nt, Artificial Sequence
  Description of Artificial Sequence: Synthetic oligonucleotide
caagugccgccucuccagu

SEQ ID NO: 1345592 - RNA, 19 nt, Artificial Sequence
  Description of Artificial Sequence: Synthetic oligonucleotide
cugcuacgaugcaccaugu

SEQ ID NO: 1345593 - RNA, 19 nt, Artificial Sequence
  Description of Artificial Sequence: Synthetic oligonucleotide
ggcccucacucauugcccu

SEQ ID NO: 1345594 - RNA, 19 nt, Artificial Sequence
  Description of Artificial Sequence: Synthetic oligonucleotide
cucgacacacaaguauauu

SEQ ID NO: 1345595 - RNA, 19 nt, Artificial Sequence
  Description of Artificial Sequence: Synthetic oligonucleotide
ggucagcaugggcuugcaa

SEQ ID NO: 1345596 - RNA, 19 nt, Artificial Sequence
  Description of Artificial Sequence: Synthetic oligonucleotide
ggaccauacccaucuuguu

SEQ ID NO: 1345597 - RNA, 19 nt, Artificial Sequence
  Description of Artificial Sequence: Synthetic oligonucleotide
ggggauggguggaaaacuu

SEQ ID NO: 1345598 - RNA, 19 nt, Artificial Sequence
  Description of Artificial Sequence: Synthetic oligonucleotide
cgccgagaugcaucaagga

SEQ ID NO: 1345599 - RNA, 19 nt, Artificial Sequence
  Description of Artificial Sequence: Synthetic oligonucleotide
gccugggauaaaacuacau

SEQ ID NO: 1345600 - RNA, 19 nt, Artificial Sequence
  Description of Artificial Sequence: Synthetic oligonucleotide
ccaauacaugaaacugcau

SEQ ID NO: 1345601 - RNA, 19 nt, Artificial Sequence
  Description of Artificial Sequence: Synthetic oligonucleotide
gccuccgaaugugaacugu

SEQ ID NO: 1345602 - RNA, 19 nt, Artificial Sequence
  Description of Artificial Sequence: Synthetic oligonucleotide
cgcggcugcuacgaugcac

SEQ ID NO: 1345603 - RNA, 19 nt, Artificial Sequence
  Description of Artificial Sequence: Synthetic oligonucleotide
ccccacucaccucaaacuu

SEQ ID NO: 1345604 - RNA, 19 nt, Artificial Sequence
  Description of Artificial Sequence: Synthetic oligonucleotide
augcgccgagaugcaucaa

SEQ ID NO: 1345605 - RNA, 19 nt, Artificial Sequence
  Description of Artificial Sequence: Synthetic oligonucleotide
ggcugcuacgaugcaccau

SEQ ID NO: 1345606 - RNA, 19 nt, Artificial Sequence
  Description of Artificial Sequence: Synthetic oligonucleotide
cggcugcuacgaugcacca

SEQ ID NO: 1345607 - RNA, 19 nt, Artificial Sequence
  Description of Artificial Sequence: Synthetic oligonucleotide
cccucacucauugcccuuu

SEQ ID NO: 1345608 - RNA, 19 nt, Artificial Sequence
  Description of Artificial Sequence: Synthetic oligonucleotide
ccuucgcggcugcuacgau

SEQ ID NO: 1345609 - RNA, 19 nt, Artificial Sequence
  Description of Artificial Sequence: Synthetic oligonucleotide
aaaaucaaaguacacacgg

SEQ ID NO: 1345610 - RNA, 19 nt, Artificial Sequence
  Description of Artificial Sequence: Synthetic oligonucleotide
ucuacaauaaauaacccgc

SEQ ID NO: 1345611 - RNA, 19 nt, Artificial Sequence
  Description of Artificial Sequence: Synthetic oligonucleotide
aucagaauaaguuaaguuc

SEQ ID NO: 1345612 - RNA, 19 nt, Artificial Sequence
  Description of Artificial Sequence: Synthetic oligonucleotide
uauacaaacauguacagcu

SEQ ID NO: 1345613 - RNA, 19 nt, Artificial Sequence
  Description of Artificial Sequence: Synthetic oligonucleotide
aaaaugcaaauuuggaaac

SEQ ID NO: 1345614 - RNA, 19 nt, Artificial Sequence
  Description of Artificial Sequence: Synthetic oligonucleotide
acuaauucuauauacauca

SEQ ID NO: 1345615 - RNA, 19 nt, Artificial Sequence
  Description of Artificial Sequence: Synthetic oligonucleotide
acagcauaaauuuauuccc

SEQ ID NO: 1345616 - RNA, 19 nt, Artificial Sequence
  Description of Artificial Sequence: Synthetic oligonucleotide
ucuuauuaaaauaagcggu

SEQ ID NO: 1345617 - RNA, 19 nt, Artificial Sequence
  Description of Artificial Sequence: Synthetic oligonucleotide
auuacaaacauguagacuu

SEQ ID NO: 1345618 - RNA, 19 nt, Artificial Sequence
  Description of Artificial Sequence: Synthetic oligonucleotide
aaugcaaauuuggaaaccc

SEQ ID NO: 1345619 - RNA, 19 nt, Artificial Sequence
  Description of Artificial Sequence: Synthetic oligonucleotide
auaaguuaaguucugaaca

SEQ ID NO: 1345620 - RNA, 19 nt, Artificial Sequence
  Description of Artificial Sequence: Synthetic oligonucleotide
aauaugauuaggcaaaaua

SEQ ID NO: 1345621 - RNA, 19 nt, Artificial Sequence
  Description of Artificial Sequence: Synthetic oligonucleotide
uauauaaccacgcaacaca

SEQ ID NO: 1345622 - RNA, 19 nt, Artificial Sequence
  Description of Artificial Sequence: Synthetic oligonucleotide
aaugaguacacuuucuaca

SEQ ID NO: 1345623 - RNA, 19 nt, Artificial Sequence
  Description of Artificial Sequence: Synthetic oligonucleotide
ucaaaugcaauccgcacgg

SEQ ID NO: 1345624 - RNA, 19 nt, Artificial Sequence
  Description of Artificial Sequence: Synthetic oligonucleotide
gucuuauuaaaauaagcgg

SEQ ID NO: 1345625 - RNA, 19 nt, Artificial Sequence
  Description of Artificial Sequence: Synthetic oligonucleotide
aguuacaaaaucaaaguac

SEQ ID NO: 1345626 - RNA, 19 nt, Artificial Sequence
  Description of Artificial Sequence: Synthetic oligonucleotide
auaaccacgcaacacauuc

SEQ ID NO: 1345627 - RNA, 19 nt, Artificial Sequence
  Description of Artificial Sequence: Synthetic oligonucleotide
ucaauuguuaagaucaagu

SEQ ID NO: 1345628 - RNA, 19 nt, Artificial Sequence
  Description of Artificial Sequence: Synthetic oligonucleotide
aaaugcaauccgcacggcc

SEQ ID NO: 1345629 - RNA, 19 nt, Artificial Sequence
  Description of Artificial Sequence: Synthetic oligonucleotide
auaaauaacccgcugggag

SEQ ID NO: 1345630 - RNA, 19 nt, Artificial Sequence
  Description of Artificial Sequence: Synthetic oligonucleotide
aacaaguuacagaaagucc

SEQ ID NO: 1345631 - RNA, 19 nt, Artificial Sequence
  Description of Artificial Sequence: Synthetic oligonucleotide
aauuuauucccucuuugca

SEQ ID NO: 1345632 - RNA, 19 nt, Artificial Sequence
  Description of Artificial Sequence: Synthetic oligonucleotide
agauaagaugguuucauag

SEQ ID NO: 1345633 - RNA, 19 nt, Artificial Sequence
  Description of Artificial Sequence: Synthetic oligonucleotide
cuuaucaacacuauggaca

SEQ ID NO: 1345634 - RNA, 19 nt, Artificial Sequence
  Description of Artificial Sequence: Synthetic oligonucleotide
auuguaaauuuacaucccg

SEQ ID NO: 1345635 - RNA, 19 nt, Artificial Sequence
  Description of Artificial Sequence: Synthetic oligonucleotide
uaaauaacccgcugggagg

SEQ ID NO: 1345636 - RNA, 19 nt, Artificial Sequence
  Description of Artificial Sequence: Synthetic oligonucleotide
aaaugcaaauuuggaaacc

SEQ ID NO: 1345637 - RNA, 19 nt, Artificial Sequence
  Description of Artificial Sequence: Synthetic oligonucleotide
acaaguuacaaaaucaaag

SEQ ID NO: 1345638 - RNA, 19 nt, Artificial Sequence
  Description of Artificial Sequence: Synthetic oligonucleotide
uaaagaacuacaccuagaa

SEQ ID NO: 1345639 - RNA, 19 nt, Artificial Sequence
  Description of Artificial Sequence: Synthetic oligonucleotide
uugcaaagcgccaagauaa

SEQ ID NO: 1345640 - RNA, 19 nt, Artificial Sequence
  Description of Artificial Sequence: Synthetic oligonucleotide
uuauaaagcaaaugaguac

SEQ ID NO: 1345641 - RNA, 19 nt, Artificial Sequence
  Description of Artificial Sequence: Synthetic oligonucleotide
aaauaacccgcugggaggc

SEQ ID NO: 1345642 - RNA, 19 nt, Artificial Sequence
  Description of Artificial Sequence: Synthetic oligonucleotide
aaauaagcgguacucugug

SEQ ID NO: 1345643 - RNA, 19 nt, Artificial Sequence
  Description of Artificial Sequence: Synthetic oligonucleotide
auguauauaaccacgcaac

SEQ ID NO: 1345644 - RNA, 19 nt, Artificial Sequence
  Description of Artificial Sequence: Synthetic oligonucleotide
uaugauuaggcaaaauaau

SEQ ID NO: 1345645 - RNA, 19 nt, Artificial Sequence
  Description of Artificial Sequence: Synthetic oligonucleotide
aucaacacuauggacaacg

SEQ ID NO: 1345646 - RNA, 19 nt, Artificial Sequence
  Description of Artificial Sequence: Synthetic oligonucleotide
uuucuauggagauauuaca

SEQ ID NO: 1345647 - RNA, 19 nt, Artificial Sequence
  Description of Artificial Sequence: Synthetic oligonucleotide
uauuaaaauaagcgguacu

SEQ ID NO: 1345648 - RNA, 19 nt, Artificial Sequence
  Description of Artificial Sequence: Synthetic oligonucleotide
aaagcgccaagauaagaug

SEQ ID NO: 1345649 - RNA, 19 nt, Artificial Sequence
  Description of Artificial Sequence: Synthetic oligonucleotide
caauuguuaagaucaagug

SEQ ID NO: 1345650 - RNA, 19 nt, Artificial Sequence
  Description of Artificial Sequence: Synthetic oligonucleotide
caaacauguagacuuaaac

SEQ ID NO: 1345651 - RNA, 19 nt, Artificial Sequence
  Description of Artificial Sequence: Synthetic oligonucleotide
uguaaauuuacaucccguc

SEQ ID NO: 1345652 - RNA, 19 nt, Artificial Sequence
  Description of Artificial Sequence: Synthetic oligonucleotide
uguauauaaccacgcaaca

SEQ ID NO: 1345653 - RNA, 19 nt, Artificial Sequence
  Description of Artificial Sequence: Synthetic oligonucleotide
auuacaaguuacaaaauca

SEQ ID NO: 1345654 - RNA, 19 nt, Artificial Sequence
  Description of Artificial Sequence: Synthetic oligonucleotide
uucuauggagauauuacaa

SEQ ID NO: 1345655 - RNA, 19 nt, Artificial Sequence
  Description of Artificial Sequence: Synthetic oligonucleotide
caaaguaccauucaaaaua

SEQ ID NO: 1345656 - RNA, 19 nt, Artificial Sequence
  Description of Artificial Sequence: Synthetic oligonucleotide
gauaagaugguuucauaga

SEQ ID NO: 1345657 - RNA, 19 nt, Artificial Sequence
  Description of Artificial Sequence: Synthetic oligonucleotide
ucagaugauucauggcucg

SEQ ID NO: 1345658 - RNA, 19 nt, Artificial Sequence
  Description of Artificial Sequence: Synthetic oligonucleotide
auaagaugguuucauagaa

SEQ ID NO: 1345659 - RNA, 19 nt, Artificial Sequence
  Description of Artificial Sequence: Synthetic oligonucleotide
uuuaugugccuguauaaaa

SEQ ID NO: 1345660 - RNA, 19 nt, Artificial Sequence
  Description of Artificial Sequence: Synthetic oligonucleotide
aaaucaaaguacacacggg

SEQ ID NO: 1345661 - RNA, 19 nt, Artificial Sequence
  Description of Artificial Sequence: Synthetic oligonucleotide
aaaguacuaauucuauaua

SEQ ID NO: 1345662 - RNA, 19 nt, Artificial Sequence
  Description of Artificial Sequence: Synthetic oligonucleotide
guuaagaucaaguguguca

SEQ ID NO: 1345663 - RNA, 19 nt, Artificial Sequence
  Description of Artificial Sequence: Synthetic oligonucleotide
ucucaucaacaccaagagg

SEQ ID NO: 1345664 - RNA, 19 nt, Artificial Sequence
  Description of Artificial Sequence: Synthetic oligonucleotide
acacauucugcucccacac

SEQ ID NO: 1345665 - RNA, 19 nt, Artificial Sequence
  Description of Artificial Sequence: Synthetic oligonucleotide
ugcauaucaauauaccuuu

SEQ ID NO: 1345666 - RNA, 19 nt, Artificial Sequence
  Description of Artificial Sequence: Synthetic oligonucleotide
ucuauggagauauuacaaa

SEQ ID NO: 1345667 - RNA, 19 nt, Artificial Sequence
  Description of Artificial Sequence: Synthetic oligonucleotide
uacaucacauguaccauac

SEQ ID NO: 1345668 - RNA, 19 nt, Artificial Sequence
  Description of Artificial Sequence: Synthetic oligonucleotide
auuauaaagcaaaugagua

SEQ ID NO: 1345669 - RNA, 19 nt, Artificial Sequence
  Description of Artificial Sequence: Synthetic oligonucleotide
aaagucccucauuguaaac

SEQ ID NO: 1345670 - RNA, 19 nt, Artificial Sequence
  Description of Artificial Sequence: Synthetic oligonucleotide
auaugauuaggcaaaauaa

SEQ ID NO: 1345671 - RNA, 19 nt, Artificial Sequence
  Description of Artificial Sequence: Synthetic oligonucleotide
ucgaucaaaugcaauccgc

SEQ ID NO: 1345672 - RNA, 19 nt, Artificial Sequence
  Description of Artificial Sequence: Synthetic oligonucleotide
gguuucauagaaaacuugg

SEQ ID NO: 1345673 - RNA, 19 nt, Artificial Sequence
  Description of Artificial Sequence: Synthetic oligonucleotide
aacacuauggacaacgcuu

SEQ ID NO: 1345674 - RNA, 19 nt, Artificial Sequence
  Description of Artificial Sequence: Synthetic oligonucleotide
guauccaaaggucuauugc

SEQ ID NO: 1345675 - RNA, 19 nt, Artificial Sequence
  Description of Artificial Sequence: Synthetic oligonucleotide
augagaacgggcccugccc

SEQ ID NO: 1345676 - RNA, 19 nt, Artificial Sequence
  Description of Artificial Sequence: Synthetic oligonucleotide
aauauaccuuugcaaauuu

SEQ ID NO: 1345677 - RNA, 19 nt, Artificial Sequence
  Description of Artificial Sequence: Synthetic oligonucleotide
uacuaauucuauauacauc

SEQ ID NO: 1345678 - RNA, 19 nt, Artificial Sequence
  Description of Artificial Sequence: Synthetic oligonucleotide
gucuauugcuaccaaagug

SEQ ID NO: 1345679 - RNA, 19 nt, Artificial Sequence
  Description of Artificial Sequence: Synthetic oligonucleotide
uguauccaaaggucuauug

SEQ ID NO: 1345680 - RNA, 19 nt, Artificial Sequence
  Description of Artificial Sequence: Synthetic oligonucleotide
gucucaucaacaccaagag

SEQ ID NO: 1345681 - RNA, 19 nt, Artificial Sequence
  Description of Artificial Sequence: Synthetic oligonucleotide
agucauguauauaaccacg

SEQ ID NO: 1345682 - RNA, 19 nt, Artificial Sequence
  Description of Artificial Sequence: Synthetic oligonucleotide
aagcgccaagauaagaugg

SEQ ID NO: 1345683 - RNA, 19 nt, Artificial Sequence
  Description of Artificial Sequence: Synthetic oligonucleotide
ugauuugcaagugaugcac

SEQ ID NO: 1345684 - RNA, 19 nt, Artificial Sequence
  Description of Artificial Sequence: Synthetic oligonucleotide
gaucaagugugucaucuac

SEQ ID NO: 1345685 - RNA, 19 nt, Artificial Sequence
  Description of Artificial Sequence: Synthetic oligonucleotide
aaaauaagcgguacucugu

SEQ ID NO: 1345686 - RNA, 19 nt, Artificial Sequence
  Description of Artificial Sequence: Synthetic oligonucleotide
uaaagagcggccccggcgc

SEQ ID NO: 1345687 - RNA, 19 nt, Artificial Sequence
  Description of Artificial Sequence: Synthetic oligonucleotide
cuauggacaacgcuuccgg

SEQ ID NO: 1345688 - RNA, 19 nt, Artificial Sequence
  Description of Artificial Sequence: Synthetic oligonucleotide
ugagaacgggcccugcccg

SEQ ID NO: 1345689 - RNA, 19 nt, Artificial Sequence
  Description of Artificial Sequence: Synthetic oligonucleotide
uuuggaaacccacccugcc

SEQ ID NO: 1345690 - RNA, 19 nt, Artificial Sequence
  Description of Artificial Sequence: Synthetic oligonucleotide
aauaaauaacccgcuggga

SEQ ID NO: 1345691 - RNA, 19 nt, Artificial Sequence
  Description of Artificial Sequence: Synthetic oligonucleotide
uggagauauuacaaacaug

SEQ ID NO: 1345692 - RNA, 19 nt, Artificial Sequence
  Description of Artificial Sequence: Synthetic oligonucleotide
ugcacaaaguaccauucaa

SEQ ID NO: 1345693 - RNA, 19 nt, Artificial Sequence
  Description of Artificial Sequence: Synthetic oligonucleotide
ugguuucauagaaaacuug

SEQ ID NO: 1345694 - RNA, 19 nt, Artificial Sequence
  Description of Artificial Sequence: Synthetic oligonucleotide
aaauuuacaucccgucuua

SEQ ID NO: 1345695 - RNA, 19 nt, Artificial Sequence
  Description of Artificial Sequence: Synthetic oligonucleotide
aaugcaauccgcacggccu

SEQ ID NO: 1345696 - RNA, 19 nt, Artificial Sequence
  Description of Artificial Sequence: Synthetic oligonucleotide
uguguaaagagcggccccg

SEQ ID NO: 1345697 - RNA, 19 nt, Artificial Sequence
  Description of Artificial Sequence: Synthetic oligonucleotide
ugcucaccgaucuucagca

SEQ ID NO: 1345698 - RNA, 19 nt, Artificial Sequence
  Description of Artificial Sequence: Synthetic oligonucleotide
cauuauaaagcaaaugagu

SEQ ID NO: 1345699 - RNA, 19 nt, Artificial Sequence
  Description of Artificial Sequence: Synthetic oligonucleotide
agcuuaucaacacuaugga

SEQ ID NO: 1345700 - RNA, 19 nt, Artificial Sequence
  Description of Artificial Sequence: Synthetic oligonucleotide
guaaagagcggccccggcg

SEQ ID NO: 1345701 - RNA, 19 nt, Artificial Sequence
  Description of Artificial Sequence: Synthetic oligonucleotide
aacgcuuccggauggcugu

SEQ ID NO: 1345702 - RNA, 19 nt, Artificial Sequence
  Description of Artificial Sequence: Synthetic oligonucleotide
uuggugauuugcaagugau

SEQ ID NO: 1345703 - RNA, 19 nt, Artificial Sequence
  Description of Artificial Sequence: Synthetic oligonucleotide
ucccaagucaauuguuaag

SEQ ID NO: 1345704 - RNA, 19 nt, Artificial Sequence
  Description of Artificial Sequence: Synthetic oligonucleotide
ugaugcacacagcauaaau

SEQ ID NO: 1345705 - RNA, 19 nt, Artificial Sequence
  Description of Artificial Sequence: Synthetic oligonucleotide
aguacuaauucuauauaca

SEQ ID NO: 1345706 - RNA, 19 nt, Artificial Sequence
  Description of Artificial Sequence: Synthetic oligonucleotide
acucguggcaucuuggggu

SEQ ID NO: 1345707 - RNA, 19 nt, Artificial Sequence
  Description of Artificial Sequence: Synthetic oligonucleotide
caagucaauuguuaagauc

SEQ ID NO: 1345708 - RNA, 19 nt, Artificial Sequence
  Description of Artificial Sequence: Synthetic oligonucleotide
uggacaacgcuuccggaug

SEQ ID NO: 1345709 - RNA, 19 nt, Artificial Sequence
  Description of Artificial Sequence: Synthetic oligonucleotide
augauucauggcucgauca

SEQ ID NO: 1345710 - RNA, 19 nt, Artificial Sequence
  Description of Artificial Sequence: Synthetic oligonucleotide
ggagauauuacaaacaugu

SEQ ID NO: 1345711 - RNA, 19 nt, Artificial Sequence
  Description of Artificial Sequence: Synthetic oligonucleotide
cucgaucaaaugcaauccg

SEQ ID NO: 1345712 - RNA, 19 nt, Artificial Sequence
  Description of Artificial Sequence: Synthetic oligonucleotide
ccuaacauaaugcuuuacc

SEQ ID NO: 1345713 - RNA, 19 nt, Artificial Sequence
  Description of Artificial Sequence: Synthetic oligonucleotide
uccuagagaugcaggaaug

SEQ ID NO: 1345714 - RNA, 19 nt, Artificial Sequence
  Description of Artificial Sequence: Synthetic oligonucleotide
auagaaaacuuggaaguga

SEQ ID NO: 1345715 - RNA, 19 nt, Artificial Sequence
  Description of Artificial Sequence: Synthetic oligonucleotide
ucaacacuauggacaacgc

SEQ ID NO: 1345716 - RNA, 19 nt, Artificial Sequence
  Description of Artificial Sequence: Synthetic oligonucleotide
auaaugccaucccaaguca

SEQ ID NO: 1345717 - RNA, 19 nt, Artificial Sequence
  Description of Artificial Sequence: Synthetic oligonucleotide
aauaagcgguacucugugu

SEQ ID NO: 1345718 - RNA, 19 nt, Artificial Sequence
  Description of Artificial Sequence: Synthetic oligonucleotide
uuuuaugugccuguauaaa

SEQ ID NO: 1345719 - RNA, 19 nt, Artificial Sequence
  Description of Artificial Sequence: Synthetic oligonucleotide
auggacccggcucagauga

SEQ ID NO: 1345720 - RNA, 19 nt, Artificial Sequence
  Description of Artificial Sequence: Synthetic oligonucleotide
gacuugggaagccacugcc

SEQ ID NO: 1345721 - RNA, 19 nt, Artificial Sequence
  Description of Artificial Sequence: Synthetic oligonucleotide
auaaaguacuaauucuaua

SEQ ID NO: 1345722 - RNA, 19 nt, Artificial Sequence
  Description of Artificial Sequence: Synthetic oligonucleotide
aaguuacagaaagucccuc

SEQ ID NO: 1345723 - RNA, 19 nt, Artificial Sequence
  Description of Artificial Sequence: Synthetic oligonucleotide
ucuguguaaagagcggccc

SEQ ID NO: 1345724 - RNA, 19 nt, Artificial Sequence
  Description of Artificial Sequence: Synthetic oligonucleotide
cacaccacccacucaaggc

SEQ ID NO: 1345725 - RNA, 19 nt, Artificial Sequence
  Description of Artificial Sequence: Synthetic oligonucleotide
uguccaaaucuucacuuua

SEQ ID NO: 1345726 - RNA, 19 nt, Artificial Sequence
  Description of Artificial Sequence: Synthetic oligonucleotide
aauccgcacggccuuccgg

SEQ ID NO: 1345727 - RNA, 19 nt, Artificial Sequence
  Description of Artificial Sequence: Synthetic oligonucleotide
aaagagcggccccggcgcc

SEQ ID NO: 1345728 - RNA, 19 nt, Artificial Sequence
  Description of Artificial Sequence: Synthetic oligonucleotide
gaugauucauggcucgauc

SEQ ID NO: 1345729 - RNA, 19 nt, Artificial Sequence
  Description of Artificial Sequence: Synthetic oligonucleotide
aacuuggaagugaaaccuc

SEQ ID NO: 1345730 - RNA, 19 nt, Artificial Sequence
  Description of Artificial Sequence: Synthetic oligonucleotide
ucugcaugugcucaccgau

SEQ ID NO: 1345731 - RNA, 19 nt, Artificial Sequence
  Description of Artificial Sequence: Synthetic oligonucleotide
acuauggacaacgcuuccg

SEQ ID NO: 1345732 - RNA, 19 nt, Artificial Sequence
  Description of Artificial Sequence: Synthetic oligonucleotide
cuuggaagugaaaccuccc

SEQ ID NO: 1345733 - RNA, 19 nt, Artificial Sequence
  Description of Artificial Sequence: Synthetic oligonucleotide
gucauguauauaaccacgc

SEQ ID NO: 1345734 - RNA, 19 nt, Artificial Sequence
  Description of Artificial Sequence: Synthetic oligonucleotide
cucuguguaaagagcggcc

SEQ ID NO: 1345735 - RNA, 19 nt, Artificial Sequence
  Description of Artificial Sequence: Synthetic oligonucleotide
cauggcucgaucaaaugca

SEQ ID NO: 1345736 - RNA, 19 nt, Artificial Sequence
  Description of Artificial Sequence: Synthetic oligonucleotide
uuacaucccgucuuauuaa

SEQ ID NO: 1345737 - RNA, 19 nt, Artificial Sequence
  Description of Artificial Sequence: Synthetic oligonucleotide
auaagcgguacucugugua

SEQ ID NO: 1345738 - RNA, 19 nt, Artificial Sequence
  Description of Artificial Sequence: Synthetic oligonucleotide
augagagggccacacuguc

SEQ ID NO: 1345739 - RNA, 19 nt, Artificial Sequence
  Description of Artificial Sequence: Synthetic oligonucleotide
uugcacaaaguaccauuca

SEQ ID NO: 1345740 - RNA, 19 nt, Artificial Sequence
  Description of Artificial Sequence: Synthetic oligonucleotide
acuguccaaaucuucacuu

SEQ ID NO: 1345741 - RNA, 19 nt, Artificial Sequence
  Description of Artificial Sequence: Synthetic oligonucleotide
cauugugguggccaggcac

SEQ ID NO: 1345742 - RNA, 19 nt, Artificial Sequence
  Description of Artificial Sequence: Synthetic oligonucleotide
agccaccucagucaauguc

SEQ ID NO: 1345743 - RNA, 19 nt, Artificial Sequence
  Description of Artificial Sequence: Synthetic oligonucleotide
uuccggaugcuagaguucc

SEQ ID NO: 1345744 - RNA, 19 nt, Artificial Sequence
  Description of Artificial Sequence: Synthetic oligonucleotide
cacucaaggccccaugccc

SEQ ID NO: 1345745 - RNA, 19 nt, Artificial Sequence
  Description of Artificial Sequence: Synthetic oligonucleotide
ugggaggcacgccugcagg

SEQ ID NO: 1345746 - RNA, 19 nt, Artificial Sequence
  Description of Artificial Sequence: Synthetic oligonucleotide
cagaauaaguuaaguucug

SEQ ID NO: 1345747 - RNA, 19 nt, Artificial Sequence
  Description of Artificial Sequence: Synthetic oligonucleotide
guaacuauuuagcuuuaaa

SEQ ID NO: 1345748 - RNA, 19 nt, Artificial Sequence
  Description of Artificial Sequence: Synthetic oligonucleotide
ugcaaagcgccaagauaag

SEQ ID NO: 1345749 - RNA, 19 nt, Artificial Sequence
  Description of Artificial Sequence: Synthetic oligonucleotide
uuggaaacccacccugccu

SEQ ID NO: 1345750 - RNA, 19 nt, Artificial Sequence
  Description of Artificial Sequence: Synthetic oligonucleotide
guaaauuuacaucccgucu

SEQ ID NO: 1345751 - RNA, 19 nt, Artificial Sequence
  Description of Artificial Sequence: Synthetic oligonucleotide
cuagagaugcaggaaugag

SEQ ID NO: 1345752 - RNA, 19 nt, Artificial Sequence
  Description of Artificial Sequence: Synthetic oligonucleotide
augauuaggcaaaauaaua

SEQ ID NO: 1345753 - RNA, 19 nt, Artificial Sequence
  Description of Artificial Sequence: Synthetic oligonucleotide
acacuauggacaacgcuuc

SEQ ID NO: 1345754 - RNA, 19 nt, Artificial Sequence
  Description of Artificial Sequence: Synthetic oligonucleotide
agcucacccagucuccuag

SEQ ID NO: 1345755 - RNA, 19 nt, Artificial Sequence
  Description of Artificial Sequence: Synthetic oligonucleotide
agaauaaguuaaguucuga

SEQ ID NO: 1345756 - RNA, 19 nt, Artificial Sequence
  Description of Artificial Sequence: Synthetic oligonucleotide
aaguacacacgggccaguc

SEQ ID NO: 1345757 - RNA, 19 nt, Artificial Sequence
  Description of Artificial Sequence: Synthetic oligonucleotide
agaacuacaccuagaaaau

SEQ ID NO: 1345758 - RNA, 19 nt, Artificial Sequence
  Description of Artificial Sequence: Synthetic oligonucleotide
ggaaccaucuuggacuugg

SEQ ID NO: 1345759 - RNA, 19 nt, Artificial Sequence
  Description of Artificial Sequence: Synthetic oligonucleotide
guacuaauucuauauacau

SEQ ID NO: 1345760 - RNA, 19 nt, Artificial Sequence
  Description of Artificial Sequence: Synthetic oligonucleotide
acacgccugccccacuugc

SEQ ID NO: 1345761 - RNA, 19 nt, Artificial Sequence
  Description of Artificial Sequence: Synthetic oligonucleotide
uauugcuaccaaaguguuc

SEQ ID NO: 1345762 - RNA, 19 nt, Artificial Sequence
  Description of Artificial Sequence: Synthetic oligonucleotide
gucaauuguuaagaucaag

SEQ ID NO: 1345763 - RNA, 19 nt, Artificial Sequence
  Description of Artificial Sequence: Synthetic oligonucleotide
uguaaagagcggccccggc

SEQ ID NO: 1345764 - RNA, 19 nt, Artificial Sequence
  Description of Artificial Sequence: Synthetic oligonucleotide
aaguuaaguucugaacaau

SEQ ID NO: 1345765 - RNA, 19 nt, Artificial Sequence
  Description of Artificial Sequence: Synthetic oligonucleotide
agucaaugucacugagguc

SEQ ID NO: 1345766 - RNA, 19 nt, Artificial Sequence
  Description of Artificial Sequence: Synthetic oligonucleotide
cucggaacacgccugcccc

SEQ ID NO: 1345767 - RNA, 19 nt, Artificial Sequence
  Description of Artificial Sequence: Synthetic oligonucleotide
ucaccgaucuucagcacau

SEQ ID NO: 1345768 - RNA, 19 nt, Artificial Sequence
  Description of Artificial Sequence: Synthetic oligonucleotide
augcauaucaauauaccuu

SEQ ID NO: 1345769 - RNA, 19 nt, Artificial Sequence
  Description of Artificial Sequence: Synthetic oligonucleotide
gcaagugaugcacacagca

SEQ ID NO: 1345770 - RNA, 19 nt, Artificial Sequence
  Description of Artificial Sequence: Synthetic oligonucleotide
uguuaagaucaaguguguc

SEQ ID NO: 1345771 - RNA, 19 nt, Artificial Sequence
  Description of Artificial Sequence: Synthetic oligonucleotide
ccgucuuauuaaaauaagc

SEQ ID NO: 1345772 - RNA, 19 nt, Artificial Sequence
  Description of Artificial Sequence: Synthetic oligonucleotide
ugccccacuugcaaagcgc

SEQ ID NO: 1345773 - RNA, 19 nt, Artificial Sequence
  Description of Artificial Sequence: Synthetic oligonucleotide
uaaccacgcaacacauucu

SEQ ID NO: 1345774 - RNA, 19 nt, Artificial Sequence
  Description of Artificial Sequence: Synthetic oligonucleotide
auggacaacgcuuccggau

SEQ ID NO: 1345775 - RNA, 19 nt, Artificial Sequence
  Description of Artificial Sequence: Synthetic oligonucleotide
cucagucaaugucacugag

SEQ ID NO: 1345776 - RNA, 19 nt, Artificial Sequence
  Description of Artificial Sequence: Synthetic oligonucleotide
uauggacaacgcuuccgga

SEQ ID NO: 1345777 - RNA, 19 nt, Artificial Sequence
  Description of Artificial Sequence: Synthetic oligonucleotide
cuguguaaagagcggcccc

SEQ ID NO: 1345778 - RNA, 19 nt, Artificial Sequence
  Description of Artificial Sequence: Synthetic oligonucleotide
acacgggccagucauguau

SEQ ID NO: 1345779 - RNA, 19 nt, Artificial Sequence
  Description of Artificial Sequence: Synthetic oligonucleotide
uacaucccgucuuauuaaa

SEQ ID NO: 1345780 - RNA, 19 nt, Artificial Sequence
  Description of Artificial Sequence: Synthetic oligonucleotide
ugaguacacuuucuacaau

SEQ ID NO: 1345781 - RNA, 19 nt, Artificial Sequence
  Description of Artificial Sequence: Synthetic oligonucleotide
gccaagauaagaugguuuc

SEQ ID NO: 1345782 - RNA, 19 nt, Artificial Sequence
  Description of Artificial Sequence: Synthetic oligonucleotide
cagucaaugucacugaggu

SEQ ID NO: 1345783 - RNA, 19 nt, Artificial Sequence
  Description of Artificial Sequence: Synthetic oligonucleotide
gguacucuguguaaagagc

SEQ ID NO: 1345784 - RNA, 19 nt, Artificial Sequence
  Description of Artificial Sequence: Synthetic oligonucleotide
ggcucgaucaaaugcaauc

SEQ ID NO: 1345785 - RNA, 19 nt, Artificial Sequence
  Description of Artificial Sequence: Synthetic oligonucleotide
ugugcucaccgaucuucag

SEQ ID NO: 1345786 - RNA, 19 nt, Artificial Sequence
  Description of Artificial Sequence: Synthetic oligonucleotide
gcaaauuuggaaacccacc

SEQ ID NO: 1345787 - RNA, 19 nt, Artificial Sequence
  Description of Artificial Sequence: Synthetic oligonucleotide
cacucguggcaucuugggg

SEQ ID NO: 1345788 - RNA, 19 nt, Artificial Sequence
  Description of Artificial Sequence: Synthetic oligonucleotide
uaacccgcugggaggcacg

SEQ ID NO: 1345789 - RNA, 19 nt, Artificial Sequence
  Description of Artificial Sequence: Synthetic oligonucleotide
uauaaccacgcaacacauu

SEQ ID NO: 1345790 - RNA, 19 nt, Artificial Sequence
  Description of Artificial Sequence: Synthetic oligonucleotide
aauuuacaucccgucuuau

SEQ ID NO: 1345791 - RNA, 19 nt, Artificial Sequence
  Description of Artificial Sequence: Synthetic oligonucleotide
acaccauugugguggccag

SEQ ID NO: 1345792 - RNA, 19 nt, Artificial Sequence
  Description of Artificial Sequence: Synthetic oligonucleotide
gaugcuagaguuccucccu

SEQ ID NO: 1345793 - RNA, 19 nt, Artificial Sequence
  Description of Artificial Sequence: Synthetic oligonucleotide
aacacgccugccccacuug

SEQ ID NO: 1345794 - RNA, 19 nt, Artificial Sequence
  Description of Artificial Sequence: Synthetic oligonucleotide
auauaaccacgcaacacau

SEQ ID NO: 1345795 - RNA, 19 nt, Artificial Sequence
  Description of Artificial Sequence: Synthetic oligonucleotide
gcuuaucaacacuauggac

SEQ ID NO: 1345796 - RNA, 19 nt, Artificial Sequence
  Description of Artificial Sequence: Synthetic oligonucleotide
acgccugcaggagucaggg

SEQ ID NO: 1345797 - RNA, 19 nt, Artificial Sequence
  Description of Artificial Sequence: Synthetic oligonucleotide
caacgcuuccggauggcug

SEQ ID NO: 1345798 - RNA, 19 nt, Artificial Sequence
  Description of Artificial Sequence: Synthetic oligonucleotide
gggccagucauguauauaa

SEQ ID NO: 1345799 - RNA, 19 nt, Artificial Sequence
  Description of Artificial Sequence: Synthetic oligonucleotide
cacgcaacacauucugcuc

SEQ ID NO: 1345800 - RNA, 19 nt, Artificial Sequence
  Description of Artificial Sequence: Synthetic oligonucleotide
caaaggucuauugcuacca

SEQ ID NO: 1345801 - RNA, 19 nt, Artificial Sequence
  Description of Artificial Sequence: Synthetic oligonucleotide
aguacacacgggccaguca

SEQ ID NO: 1345802 - RNA, 19 nt, Artificial Sequence
  Description of Artificial Sequence: Synthetic oligonucleotide
gagaacgggcccugcccgg

SEQ ID NO: 1345803 - RNA, 19 nt, Artificial Sequence
  Description of Artificial Sequence: Synthetic oligonucleotide
gcucgaucaaaugcaaucc

SEQ ID NO: 1345804 - RNA, 19 nt, Artificial Sequence
  Description of Artificial Sequence: Synthetic oligonucleotide
gcucagaugauucauggcu

SEQ ID NO: 1345805 - RNA, 19 nt, Artificial Sequence
  Description of Artificial Sequence: Synthetic oligonucleotide
auccgcacggccuuccgga

SEQ ID NO: 1345806 - RNA, 19 nt, Artificial Sequence
  Description of Artificial Sequence: Synthetic oligonucleotide
gauuugcaagugaugcaca

SEQ ID NO: 1345807 - RNA, 19 nt, Artificial Sequence
  Description of Artificial Sequence: Synthetic oligonucleotide
ucuccuagagaugcaggaa

SEQ ID NO: 1345808 - RNA, 19 nt, Artificial Sequence
  Description of Artificial Sequence: Synthetic oligonucleotide
aacccgcugggaggcacgc

SEQ ID NO: 1345809 - RNA, 19 nt, Artificial Sequence
  Description of Artificial Sequence: Synthetic oligonucleotide
acaccgcacugcucggaac

SEQ ID NO: 1345810 - RNA, 19 nt, Artificial Sequence
  Description of Artificial Sequence: Synthetic oligonucleotide
caaagcgccaagauaagau

SEQ ID NO: 1345811 - RNA, 19 nt, Artificial Sequence
  Description of Artificial Sequence: Synthetic oligonucleotide
ggucacaccacccacucaa

SEQ ID NO: 1345812 - RNA, 19 nt, Artificial Sequence
  Description of Artificial Sequence: Synthetic oligonucleotide
cuacaauaaauaacccgcu

SEQ ID NO: 1345813 - RNA, 19 nt, Artificial Sequence
  Description of Artificial Sequence: Synthetic oligonucleotide
uuggucugcaugugcucac

SEQ ID NO: 1345814 - RNA, 19 nt, Artificial Sequence
  Description of Artificial Sequence: Synthetic oligonucleotide
cacuauggacaacgcuucc

SEQ ID NO: 1345815 - RNA, 19 nt, Artificial Sequence
  Description of Artificial Sequence: Synthetic oligonucleotide
aaaguacacacgggccagu

SEQ ID NO: 1345816 - RNA, 19 nt, Artificial Sequence
  Description of Artificial Sequence: Synthetic oligonucleotide
uggggucaaugaucagugc

SEQ ID NO: 1345817 - RNA, 19 nt, Artificial Sequence
  Description of Artificial Sequence: Synthetic oligonucleotide
ucuuugcacaaaguaccau

SEQ ID NO: 1345818 - RNA, 19 nt, Artificial Sequence
  Description of Artificial Sequence: Synthetic oligonucleotide
uuccggauggcuguggcuu

SEQ ID NO: 1345819 - RNA, 19 nt, Artificial Sequence
  Description of Artificial Sequence: Synthetic oligonucleotide
caucccaagucaauuguua

SEQ ID NO: 1345820 - RNA, 19 nt, Artificial Sequence
  Description of Artificial Sequence: Synthetic oligonucleotide
cugccccacuugcaaagcg

SEQ ID NO: 1345821 - RNA, 19 nt, Artificial Sequence
  Description of Artificial Sequence: Synthetic oligonucleotide
ggacaacgcuuccggaugg

SEQ ID NO: 1345822 - RNA, 19 nt, Artificial Sequence
  Description of Artificial Sequence: Synthetic oligonucleotide
aagccaccucagucaaugu

SEQ ID NO: 1345823 - RNA, 19 nt, Artificial Sequence
  Description of Artificial Sequence: Synthetic oligonucleotide
cuuccggaugcuagaguuc

SEQ ID NO: 1345824 - RNA, 19 nt, Artificial Sequence
  Description of Artificial Sequence: Synthetic oligonucleotide
agaacgggcccugcccggc

SEQ ID NO: 1345825 - RNA, 19 nt, Artificial Sequence
  Description of Artificial Sequence: Synthetic oligonucleotide
ccaaaggucuauugcuacc

SEQ ID NO: 1345826 - RNA, 19 nt, Artificial Sequence
  Description of Artificial Sequence: Synthetic oligonucleotide
augcaaauuuggaaaccca

SEQ ID NO: 1345827 - RNA, 19 nt, Artificial Sequence
  Description of Artificial Sequence: Synthetic oligonucleotide
cccgucuuauuaaaauaag

SEQ ID NO: 1345828 - RNA, 19 nt, Artificial Sequence
  Description of Artificial Sequence: Synthetic oligonucleotide
ugcuaccaaaguguucuaa

SEQ ID NO: 1345829 - RNA, 19 nt, Artificial Sequence
  Description of Artificial Sequence: Synthetic oligonucleotide
agaugauucauggcucgau

SEQ ID NO: 1345830 - RNA, 19 nt, Artificial Sequence
  Description of Artificial Sequence: Synthetic oligonucleotide
cuuugcacaaaguaccauu

SEQ ID NO: 1345831 - RNA, 19 nt, Artificial Sequence
  Description of Artificial Sequence: Synthetic oligonucleotide
agaucaagugugucaucua

SEQ ID NO: 1345832 - RNA, 19 nt, Artificial Sequence
  Description of Artificial Sequence: Synthetic oligonucleotide
cauggacccggcucagaug

SEQ ID NO: 1345833 - RNA, 19 nt, Artificial Sequence
  Description of Artificial Sequence: Synthetic oligonucleotide
acaucacauguaccauaca

SEQ ID NO: 1345834 - RNA, 19 nt, Artificial Sequence
  Description of Artificial Sequence: Synthetic oligonucleotide
cccagucuccuagagaugc

SEQ ID NO: 1345835 - RNA, 19 nt, Artificial Sequence
  Description of Artificial Sequence: Synthetic oligonucleotide
guguaaagagcggccccgg

SEQ ID NO: 1345836 - RNA, 19 nt, Artificial Sequence
  Description of Artificial Sequence: Synthetic oligonucleotide
ggucugcaugugcucaccg

SEQ ID NO: 1345837 - RNA, 19 nt, Artificial Sequence
  Description of Artificial Sequence: Synthetic oligonucleotide
cugcaugugcucaccgauc

SEQ ID NO: 1345838 - RNA, 19 nt, Artificial Sequence
  Description of Artificial Sequence: Synthetic oligonucleotide
cuccuguaccucaggcuac

SEQ ID NO: 1345839 - RNA, 19 nt, Artificial Sequence
  Description of Artificial Sequence: Synthetic oligonucleotide
gcacucguggcaucuuggg

SEQ ID NO: 1345840 - RNA, 19 nt, Artificial Sequence
  Description of Artificial Sequence: Synthetic oligonucleotide
cagcauaaauuuauucccu

SEQ ID NO: 1345841 - RNA, 19 nt, Artificial Sequence
  Description of Artificial Sequence: Synthetic oligonucleotide
acucaaggccccaugcccu

SEQ ID NO: 1345842 - RNA, 19 nt, Artificial Sequence
  Description of Artificial Sequence: Synthetic oligonucleotide
acggccuuccggaugcuag

SEQ ID NO: 1345843 - RNA, 19 nt, Artificial Sequence
  Description of Artificial Sequence: Synthetic oligonucleotide
uccuguaccucaggcuaca

SEQ ID NO: 1345844 - RNA, 19 nt, Artificial Sequence
  Description of Artificial Sequence: Synthetic oligonucleotide
acacacgggccagucaugu

SEQ ID NO: 1345845 - RNA, 19 nt, Artificial Sequence
  Description of Artificial Sequence: Synthetic oligonucleotide
agcgccaagauaagauggu

SEQ ID NO: 1345846 - RNA, 19 nt, Artificial Sequence
  Description of Artificial Sequence: Synthetic oligonucleotide
auacaaacauguacagcuu

SEQ ID NO: 1345847 - RNA, 19 nt, Artificial Sequence
  Description of Artificial Sequence: Synthetic oligonucleotide
gcauaaauuuauucccucu

SEQ ID NO: 1345848 - RNA, 19 nt, Artificial Sequence
  Description of Artificial Sequence: Synthetic oligonucleotide
uggucugcaugugcucacc

SEQ ID NO: 1345849 - RNA, 19 nt, Artificial Sequence
  Description of Artificial Sequence: Synthetic oligonucleotide
caucccgucuuauuaaaau

SEQ ID NO: 1345850 - RNA, 19 nt, Artificial Sequence
  Description of Artificial Sequence: Synthetic oligonucleotide
auauaccuuugcaaauuua

SEQ ID NO: 1345851 - RNA, 19 nt, Artificial Sequence
  Description of Artificial Sequence: Synthetic oligonucleotide
aauaacccgcugggaggca

SEQ ID NO: 1345852 - RNA, 19 nt, Artificial Sequence
  Description of Artificial Sequence: Synthetic oligonucleotide
caauccgcacggccuuccg

SEQ ID NO: 1345853 - RNA, 19 nt, Artificial Sequence
  Description of Artificial Sequence: Synthetic oligonucleotide
caagauaagaugguuucau

SEQ ID NO: 1345854 - RNA, 19 nt, Artificial Sequence
  Description of Artificial Sequence: Synthetic oligonucleotide
gacccggcucagaugauuc

SEQ ID NO: 1345855 - RNA, 19 nt, Artificial Sequence
  Description of Artificial Sequence: Synthetic oligonucleotide
ggacuugggaagccacugc

SEQ ID NO: 1345856 - RNA, 19 nt, Artificial Sequence
  Description of Artificial Sequence: Synthetic oligonucleotide
gccaccucagucaauguca

SEQ ID NO: 1345857 - RNA, 19 nt, Artificial Sequence
  Description of Artificial Sequence: Synthetic oligonucleotide
caaaugcaauccgcacggc

SEQ ID NO: 1345858 - RNA, 19 nt, Artificial Sequence
  Description of Artificial Sequence: Synthetic oligonucleotide
agucaauuguuaagaucaa

SEQ ID NO: 1345859 - RNA, 19 nt, Artificial Sequence
  Description of Artificial Sequence: Synthetic oligonucleotide
gacaacgcuuccggauggc

SEQ ID NO: 1345860 - RNA, 19 nt, Artificial Sequence
  Description of Artificial Sequence: Synthetic oligonucleotide
uccggaugcuagaguuccu

SEQ ID NO: 1345861 - RNA, 19 nt, Artificial Sequence
  Description of Artificial Sequence: Synthetic oligonucleotide
caccgcacugcucggaaca

SEQ ID NO: 1345862 - RNA, 19 nt, Artificial Sequence
  Description of Artificial Sequence: Synthetic oligonucleotide
aggcacgccugcaggaguc

SEQ ID NO: 1345863 - RNA, 19 nt, Artificial Sequence
  Description of Artificial Sequence: Synthetic oligonucleotide
acaacgcuuccggauggcu

SEQ ID NO: 1345864 - RNA, 19 nt, Artificial Sequence
  Description of Artificial Sequence: Synthetic oligonucleotide
gcucggaacacgccugccc

SEQ ID NO: 1345865 - RNA, 19 nt, Artificial Sequence
  Description of Artificial Sequence: Synthetic oligonucleotide
ggcacucguggcaucuugg

SEQ ID NO: 1345866 - RNA, 19 nt, Artificial Sequence
  Description of Artificial Sequence: Synthetic oligonucleotide
ggcgccaccagugggacac

SEQ ID NO: 1345867 - RNA, 19 nt, Artificial Sequence
  Description of Artificial Sequence: Synthetic oligonucleotide
augccaucccaagucaauu

SEQ ID NO: 1345868 - RNA, 19 nt, Artificial Sequence
  Description of Artificial Sequence: Synthetic oligonucleotide
cuccuagagaugcaggaau

SEQ ID NO: 1345869 - RNA, 19 nt, Artificial Sequence
  Description of Artificial Sequence: Synthetic oligonucleotide
acgccugccccacuugcaa

SEQ ID NO: 1345870 - RNA, 19 nt, Artificial Sequence
  Description of Artificial Sequence: Synthetic oligonucleotide
gucacaccacccacucaag

SEQ ID NO: 1345871 - RNA, 19 nt, Artificial Sequence
  Description of Artificial Sequence: Synthetic oligonucleotide
caacacuauggacaacgcu

SEQ ID NO: 1345872 - RNA, 19 nt, Artificial Sequence
  Description of Artificial Sequence: Synthetic oligonucleotide
acauaaugcuuuaccucuu

SEQ ID NO: 1345873 - RNA, 19 nt, Artificial Sequence
  Description of Artificial Sequence: Synthetic oligonucleotide
caggagacucagggcaggc

SEQ ID NO: 1345874 - RNA, 19 nt, Artificial Sequence
  Description of Artificial Sequence: Synthetic oligonucleotide
gaggaaccaucuuggacuu

SEQ ID NO: 1345875 - RNA, 19 nt, Artificial Sequence
  Description of Artificial Sequence: Synthetic oligonucleotide
ugcucggaacacgccugcc

SEQ ID NO: 1345876 - RNA, 19 nt, Artificial Sequence
  Description of Artificial Sequence: Synthetic oligonucleotide
caccauugugguggccagg

SEQ ID NO: 1345877 - RNA, 19 nt, Artificial Sequence
  Description of Artificial Sequence: Synthetic oligonucleotide
acaucccgucuuauuaaaa

SEQ ID NO: 1345878 - RNA, 19 nt, Artificial Sequence
  Description of Artificial Sequence: Synthetic oligonucleotide
auggcucgaucaaaugcaa

SEQ ID NO: 1345879 - RNA, 19 nt, Artificial Sequence
  Description of Artificial Sequence: Synthetic oligonucleotide
guaccucaggcuacagcuc

SEQ ID NO: 1345880 - RNA, 19 nt, Artificial Sequence
  Description of Artificial Sequence: Synthetic oligonucleotide
acgggccagucauguauau

SEQ ID NO: 1345881 - RNA, 19 nt, Artificial Sequence
  Description of Artificial Sequence: Synthetic oligonucleotide
ccgaucuucagcacaucca

SEQ ID NO: 1345882 - RNA, 19 nt, Artificial Sequence
  Description of Artificial Sequence: Synthetic oligonucleotide
uccggauggcuguggcuuu

SEQ ID NO: 1345883 - RNA, 19 nt, Artificial Sequence
  Description of Artificial Sequence: Synthetic oligonucleotide
ggaggcacgccugcaggag

SEQ ID NO: 1345884 - RNA, 19 nt, Artificial Sequence
  Description of Artificial Sequence: Synthetic oligonucleotide
aggccccaugcccuccugu

SEQ ID NO: 1345885 - RNA, 19 nt, Artificial Sequence
  Description of Artificial Sequence: Synthetic oligonucleotide
gcaaagcgccaagauaaga

SEQ ID NO: 1345886 - RNA, 19 nt, Artificial Sequence
  Description of Artificial Sequence: Synthetic oligonucleotide
cggaugcuagaguuccucc

SEQ ID NO: 1345887 - RNA, 19 nt, Artificial Sequence
  Description of Artificial Sequence: Synthetic oligonucleotide
gccccacuugcaaagcgcc

SEQ ID NO: 1345888 - RNA, 19 nt, Artificial Sequence
  Description of Artificial Sequence: Synthetic oligonucleotide
ugcaauccgcacggccuuc

SEQ ID NO: 1345889 - RNA, 19 nt, Artificial Sequence
  Description of Artificial Sequence: Synthetic oligonucleotide
uccgcacggccuuccggau

SEQ ID NO: 1345890 - RNA, 19 nt, Artificial Sequence
  Description of Artificial Sequence: Synthetic oligonucleotide
gaggcacgccugcaggagu

SEQ ID NO: 1345891 - RNA, 19 nt, Artificial Sequence
  Description of Artificial Sequence: Synthetic oligonucleotide
ggccagucauguauauaac

SEQ ID NO: 1345892 - RNA, 19 nt, Artificial Sequence
  Description of Artificial Sequence: Synthetic oligonucleotide
gccaucccaagucaauugu

SEQ ID NO: 1345893 - RNA, 19 nt, Artificial Sequence
  Description of Artificial Sequence: Synthetic oligonucleotide
gaacgggcccugcccggca

SEQ ID NO: 1345894 - RNA, 19 nt, Artificial Sequence
  Description of Artificial Sequence: Synthetic oligonucleotide
cacgccugccccacuugca

SEQ ID NO: 1345895 - RNA, 19 nt, Artificial Sequence
  Description of Artificial Sequence: Synthetic oligonucleotide
gaacacgccugccccacuu

SEQ ID NO: 1345896 - RNA, 19 nt, Artificial Sequence
  Description of Artificial Sequence: Synthetic oligonucleotide
ccuagagaugcaggaauga

SEQ ID NO: 1345897 - RNA, 19 nt, Artificial Sequence
  Description of Artificial Sequence: Synthetic oligonucleotide
ccaagauaagaugguuuca

SEQ ID NO: 1345898 - RNA, 19 nt, Artificial Sequence
  Description of Artificial Sequence: Synthetic oligonucleotide
ucguggcaucuugggguca

SEQ ID NO: 1345899 - RNA, 19 nt, Artificial Sequence
  Description of Artificial Sequence: Synthetic oligonucleotide
aggaaccaucuuggacuug

SEQ ID NO: 1345900 - RNA, 19 nt, Artificial Sequence
  Description of Artificial Sequence: Synthetic oligonucleotide
cacgggccagucauguaua

SEQ ID NO: 1345901 - RNA, 19 nt, Artificial Sequence
  Description of Artificial Sequence: Synthetic oligonucleotide
ggacacccacaccgcacug

SEQ ID NO: 1345902 - RNA, 19 nt, Artificial Sequence
  Description of Artificial Sequence: Synthetic oligonucleotide
uggacccggcucagaugau

SEQ ID NO: 1345903 - RNA, 19 nt, Artificial Sequence
  Description of Artificial Sequence: Synthetic oligonucleotide
gcaauccgcacggccuucc

SEQ ID NO: 1345904 - RNA, 19 nt, Artificial Sequence
  Description of Artificial Sequence: Synthetic oligonucleotide
gggacacccacaccgcacu

SEQ ID NO: 1345905 - RNA, 19 nt, Artificial Sequence
  Description of Artificial Sequence: Synthetic oligonucleotide
cccuaacauaaugcuuuac

SEQ ID NO: 1345906 - RNA, 19 nt, Artificial Sequence
  Description of Artificial Sequence: Synthetic oligonucleotide
ccggaugcuagaguuccuc

SEQ ID NO: 1345907 - RNA, 19 nt, Artificial Sequence
  Description of Artificial Sequence: Synthetic oligonucleotide
ccaagucaauuguuaagau

SEQ ID NO: 1345908 - RNA, 19 nt, Artificial Sequence
  Description of Artificial Sequence: Synthetic oligonucleotide
gcucaccgaucuucagcac

SEQ ID NO: 1345909 - RNA, 19 nt, Artificial Sequence
  Description of Artificial Sequence: Synthetic oligonucleotide
acgcuuccggauggcugug

SEQ ID NO: 1345910 - RNA, 19 nt, Artificial Sequence
  Description of Artificial Sequence: Synthetic oligonucleotide
caccgaucuucagcacauc

SEQ ID NO: 1345911 - RNA, 19 nt, Artificial Sequence
  Description of Artificial Sequence: Synthetic oligonucleotide
gcacgccugcaggagucag

SEQ ID NO: 1345912 - RNA, 19 nt, Artificial Sequence
  Description of Artificial Sequence: Synthetic oligonucleotide
gcacugcucggaacacgcc

SEQ ID NO: 1345913 - RNA, 19 nt, Artificial Sequence
  Description of Artificial Sequence: Synthetic oligonucleotide
ccgcacugcucggaacacg

SEQ ID NO: 1345914 - RNA, 19 nt, Artificial Sequence
  Description of Artificial Sequence: Synthetic oligonucleotide
cacacgggccagucaugua

SEQ ID NO: 1345915 - RNA, 19 nt, Artificial Sequence
  Description of Artificial Sequence: Synthetic oligonucleotide
ccccacuugcaaagcgcca

SEQ ID NO: 1345916 - RNA, 19 nt, Artificial Sequence
  Description of Artificial Sequence: Synthetic oligonucleotide
cacugccagcuucucuuau

SEQ ID NO: 1345917 - RNA, 19 nt, Artificial Sequence
  Description of Artificial Sequence: Synthetic oligonucleotide
ccacaccaaaguugaauuu

SEQ ID NO: 1345918 - RNA, 19 nt, Artificial Sequence
  Description of Artificial Sequence: Synthetic oligonucleotide
ccgcacggccuuccggaug

SEQ ID NO: 1345919 - RNA, 19 nt, Artificial Sequence
  Description of Artificial Sequence: Synthetic oligonucleotide
cccgcugggaggcacgccu

SEQ ID NO: 1345920 - RNA, 19 nt, Artificial Sequence
  Description of Artificial Sequence: Synthetic oligonucleotide
ggaacacgccugccccacu

SEQ ID NO: 1345921 - RNA, 19 nt, Artificial Sequence
  Description of Artificial Sequence: Synthetic oligonucleotide
gcgccaagauaagaugguu

SEQ ID NO: 1345922 - RNA, 19 nt, Artificial Sequence
  Description of Artificial Sequence: Synthetic oligonucleotide
ccaugcccuccuguaccuc

SEQ ID NO: 1345923 - RNA, 19 nt, Artificial Sequence
  Description of Artificial Sequence: Synthetic oligonucleotide
ggacccggcucagaugauu

SEQ ID NO: 1345924 - RNA, 19 nt, Artificial Sequence
  Description of Artificial Sequence: Synthetic oligonucleotide
cccggcucagaugauucau

SEQ ID NO: 1345925 - RNA, 19 nt, Artificial Sequence
  Description of Artificial Sequence: Synthetic oligonucleotide
gcgccaccagugggacacc

SEQ ID NO: 1345926 - RNA, 19 nt, Artificial Sequence
  Description of Artificial Sequence: Synthetic oligonucleotide
ccacccacucaaggcccca

SEQ ID NO: 1345927 - RNA, 19 nt, Artificial Sequence
  Description of Artificial Sequence: Synthetic oligonucleotide
cgccugccccacuugcaaa

SEQ ID NO: 1345928 - RNA, 19 nt, Artificial Sequence
  Description of Artificial Sequence: Synthetic oligonucleotide
cggcgccaccagugggaca

SEQ ID NO: 1345929 - RNA, 19 nt, Artificial Sequence
  Description of Artificial Sequence: Synthetic oligonucleotide
gagacuaagacccagagag

SEQ ID NO: 1345930 - RNA, 19 nt, Artificial Sequence
  Description of Artificial Sequence: Synthetic oligonucleotide
auugguuagaucuccaggc

SEQ ID NO: 1345931 - RNA, 19 nt, Artificial Sequence
  Description of Artificial Sequence: Synthetic oligonucleotide
aaguauucggcuuucagca

SEQ ID NO: 1345932 - RNA, 19 nt, Artificial Sequence
  Description of Artificial Sequence: Synthetic oligonucleotide
aagauaaagugcucagugg

SEQ ID NO: 1345933 - RNA, 19 nt, Artificial Sequence
  Description of Artificial Sequence: Synthetic oligonucleotide
ugucccuucauacaggaag

SEQ ID NO: 1345934 - RNA, 19 nt, Artificial Sequence
  Description of Artificial Sequence: Synthetic oligonucleotide
aaagaccaaacccaaacca

SEQ ID NO: 1345935 - RNA, 19 nt, Artificial Sequence
  Description of Artificial Sequence: Synthetic oligonucleotide
aaggugauaagagagaggu

SEQ ID NO: 1345936 - RNA, 19 nt, Artificial Sequence
  Description of Artificial Sequence: Synthetic oligonucleotide
guagauauugguuagaucu

SEQ ID NO: 1345937 - RNA, 19 nt, Artificial Sequence
  Description of Artificial Sequence: Synthetic oligonucleotide
aacggaaacagccaugccu

SEQ ID NO: 1345938 - RNA, 19 nt, Artificial Sequence
  Description of Artificial Sequence: Synthetic oligonucleotide
aaagaaacguagauauugg

SEQ ID NO: 1345939 - RNA, 19 nt, Artificial Sequence
  Description of Artificial Sequence: Synthetic oligonucleotide
guucuuauccaucaguagc

SEQ ID NO: 1345940 - RNA, 19 nt, Artificial Sequence
  Description of Artificial Sequence: Synthetic oligonucleotide
aaacguagauauugguuag

SEQ ID NO: 1345941 - RNA, 19 nt, Artificial Sequence
  Description of Artificial Sequence: Synthetic oligonucleotide
augcucaugagcuuccggc

SEQ ID NO: 1345942 - RNA, 19 nt, Artificial Sequence
  Description of Artificial Sequence: Synthetic oligonucleotide
cucccuacaagauaaagug

SEQ ID NO: 1345943 - RNA, 19 nt, Artificial Sequence
  Description of Artificial Sequence: Synthetic oligonucleotide
uccucauuguacuugaaga

SEQ ID NO: 1345944 - RNA, 19 nt, Artificial Sequence
  Description of Artificial Sequence: Synthetic oligonucleotide
uguacuugaagauggccag

SEQ ID NO: 1345945 - RNA, 19 nt, Artificial Sequence
  Description of Artificial Sequence: Synthetic oligonucleotide
gaaacguagauauugguua

SEQ ID NO: 1345946 - RNA, 19 nt, Artificial Sequence
  Description of Artificial Sequence: Synthetic oligonucleotide
acgaggaaccaguugaagg

SEQ ID NO: 1345947 - RNA, 19 nt, Artificial Sequence
  Description of Artificial Sequence: Synthetic oligonucleotide
agauauugguuagaucucc

SEQ ID NO: 1345948 - RNA, 19 nt, Artificial Sequence
  Description of Artificial Sequence: Synthetic oligonucleotide
caaguauucggcuuucagc

SEQ ID NO: 1345949 - RNA, 19 nt, Artificial Sequence
  Description of Artificial Sequence: Synthetic oligonucleotide
aaaccuggucucaaaagac

SEQ ID NO: 1345950 - RNA, 19 nt, Artificial Sequence
  Description of Artificial Sequence: Synthetic oligonucleotide
gaagccguaagcaucauac

SEQ ID NO: 1345951 - RNA, 19 nt, Artificial Sequence
  Description of Artificial Sequence: Synthetic oligonucleotide
uacaagauaaagugcucag

SEQ ID NO: 1345952 - RNA, 19 nt, Artificial Sequence
  Description of Artificial Sequence: Synthetic oligonucleotide
ugaaggugauaagagagag

SEQ ID NO: 1345953 - RNA, 19 nt, Artificial Sequence
  Description of Artificial Sequence: Synthetic oligonucleotide
ugaaaccuggucucaaaag

SEQ ID NO: 1345954 - RNA, 19 nt, Artificial Sequence
  Description of Artificial Sequence: Synthetic oligonucleotide
ugagucggggcagagaagg

SEQ ID NO: 1345955 - RNA, 19 nt, Artificial Sequence
  Description of Artificial Sequence: Synthetic oligonucleotide
agccguaagcaucauacuc

SEQ ID NO: 1345956 - RNA, 19 nt, Artificial Sequence
  Description of Artificial Sequence: Synthetic oligonucleotide
gaaaccuggucucaaaaga

SEQ ID NO: 1345957 - RNA, 19 nt, Artificial Sequence
  Description of Artificial Sequence: Synthetic oligonucleotide
aagaaacguagauauuggu

SEQ ID NO: 1345958 - RNA, 19 nt, Artificial Sequence
  Description of Artificial Sequence: Synthetic oligonucleotide
aaccuggucucaaaagacc

SEQ ID NO: 1345959 - RNA, 19 nt, Artificial Sequence
  Description of Artificial Sequence: Synthetic oligonucleotide
ugugcagugagucggggca

SEQ ID NO: 1345960 - RNA, 19 nt, Artificial Sequence
  Description of Artificial Sequence: Synthetic oligonucleotide
ucgauccugcucuagagcc

SEQ ID NO: 1345961 - RNA, 19 nt, Artificial Sequence
  Description of Artificial Sequence: Synthetic oligonucleotide
accacgaggaaccaguuga

SEQ ID NO: 1345962 - RNA, 19 nt, Artificial Sequence
  Description of Artificial Sequence: Synthetic oligonucleotide
aaacggaaacagccaugcc

SEQ ID NO: 1345963 - RNA, 19 nt, Artificial Sequence
  Description of Artificial Sequence: Synthetic oligonucleotide
agucucgagggcuagcagg

SEQ ID NO: 1345964 - RNA, 19 nt, Artificial Sequence
  Description of Artificial Sequence: Synthetic oligonucleotide
aaggcgaugcucaugagcu

SEQ ID NO: 1345965 - RNA, 19 nt, Artificial Sequence
  Description of Artificial Sequence: Synthetic oligonucleotide
aucauacucacugauaggu

SEQ ID NO: 1345966 - RNA, 19 nt, Artificial Sequence
  Description of Artificial Sequence: Synthetic oligonucleotide
uugaguucggcugagggca

SEQ ID NO: 1345967 - RNA, 19 nt, Artificial Sequence
  Description of Artificial Sequence: Synthetic oligonucleotide
uggucuugguaaagaaacg

SEQ ID NO: 1345968 - RNA, 19 nt, Artificial Sequence
  Description of Artificial Sequence: Synthetic oligonucleotide
aucugccgcaccuugugcc

SEQ ID NO: 1345969 - RNA, 19 nt, Artificial Sequence
  Description of Artificial Sequence: Synthetic oligonucleotide
auggcgguggaccagccac

SEQ ID NO: 1345970 - RNA, 19 nt, Artificial Sequence
  Description of Artificial Sequence: Synthetic oligonucleotide
cucagugguauugugauac

SEQ ID NO: 1345971 - RNA, 19 nt, Artificial Sequence
  Description of Artificial Sequence: Synthetic oligonucleotide
cauggugaugaguuugagg

SEQ ID NO: 1345972 - RNA, 19 nt, Artificial Sequence
  Description of Artificial Sequence: Synthetic oligonucleotide
auauugguuagaucuccag

SEQ ID NO: 1345973 - RNA, 19 nt, Artificial Sequence
  Description of Artificial Sequence: Synthetic oligonucleotide
agaagggccuucuccaggg

SEQ ID NO: 1345974 - RNA, 19 nt, Artificial Sequence
  Description of Artificial Sequence: Synthetic oligonucleotide
gaaggcgaugcucaugagc

SEQ ID NO: 1345975 - RNA, 19 nt, Artificial Sequence
  Description of Artificial Sequence: Synthetic oligonucleotide
gguaaagaaacguagauau

SEQ ID NO: 1345976 - RNA, 19 nt, Artificial Sequence
  Description of Artificial Sequence: Synthetic oligonucleotide
caaacggaaacagccaugc

SEQ ID NO: 1345977 - RNA, 19 nt, Artificial Sequence
  Description of Artificial Sequence: Synthetic oligonucleotide
aggcugggagacuaagacc

SEQ ID NO: 1345978 - RNA, 19 nt, Artificial Sequence
  Description of Artificial Sequence: Synthetic oligonucleotide
agugagucggggcagagaa

SEQ ID NO: 1345979 - RNA, 19 nt, Artificial Sequence
  Description of Artificial Sequence: Synthetic oligonucleotide
cuugaguucggcugagggc

SEQ ID NO: 1345980 - RNA, 19 nt, Artificial Sequence
  Description of Artificial Sequence: Synthetic oligonucleotide
ucccuacaagauaaagugc

SEQ ID NO: 1345981 - RNA, 19 nt, Artificial Sequence
  Description of Artificial Sequence: Synthetic oligonucleotide
gaaggcaucccagacuugc

SEQ ID NO: 1345982 - RNA, 19 nt, Artificial Sequence
  Description of Artificial Sequence: Synthetic oligonucleotide
ucucgauccugcucuagag

SEQ ID NO: 1345983 - RNA, 19 nt, Artificial Sequence
  Description of Artificial Sequence: Synthetic oligonucleotide
uaagcaucauacucacuga

SEQ ID NO: 1345984 - RNA, 19 nt, Artificial Sequence
  Description of Artificial Sequence: Synthetic oligonucleotide
ucauaguccggcaccguca

SEQ ID NO: 1345985 - RNA, 19 nt, Artificial Sequence
  Description of Artificial Sequence: Synthetic oligonucleotide
uagauauugguuagaucuc

SEQ ID NO: 1345986 - RNA, 19 nt, Artificial Sequence
  Description of Artificial Sequence: Synthetic oligonucleotide
aaugcuccaggugacccag

SEQ ID NO: 1345987 - RNA, 19 nt, Artificial Sequence
  Description of Artificial Sequence: Synthetic oligonucleotide
uugccucccuacaagauaa

SEQ ID NO: 1345988 - RNA, 19 nt, Artificial Sequence
  Description of Artificial Sequence: Synthetic oligonucleotide
aagcaucauacucacugau

SEQ ID NO: 1345989 - RNA, 19 nt, Artificial Sequence
  Description of Artificial Sequence: Synthetic oligonucleotide
ucugcgaucugccgcaccu

SEQ ID NO: 1345990 - RNA, 19 nt, Artificial Sequence
  Description of Artificial Sequence: Synthetic oligonucleotide
ugugcuccugccagcaaag

SEQ ID NO: 1345991 - RNA, 19 nt, Artificial Sequence
  Description of Artificial Sequence: Synthetic oligonucleotide
uccggcugucgcaaguugg

SEQ ID NO: 1345992 - RNA, 19 nt, Artificial Sequence
  Description of Artificial Sequence: Synthetic oligonucleotide
agggcuagcaggugguggg

SEQ ID NO: 1345993 - RNA, 19 nt, Artificial Sequence
  Description of Artificial Sequence: Synthetic oligonucleotide
uugguuagaucuccaggcu

SEQ ID NO: 1345994 - RNA, 19 nt, Artificial Sequence
  Description of Artificial Sequence: Synthetic oligonucleotide
gacuaagacccagagagga

SEQ ID NO: 1345995 - RNA, 19 nt, Artificial Sequence
  Description of Artificial Sequence: Synthetic oligonucleotide
aagcgaacaaaggcuuugg

SEQ ID NO: 1345996 - RNA, 19 nt, Artificial Sequence
  Description of Artificial Sequence: Synthetic oligonucleotide
agccgcagggaucuccucc

SEQ ID NO: 1345997 - RNA, 19 nt, Artificial Sequence
  Description of Artificial Sequence: Synthetic oligonucleotide
agagucggcaaagaccacg

SEQ ID NO: 1345998 - RNA, 19 nt, Artificial Sequence
  Description of Artificial Sequence: Synthetic oligonucleotide
acguggacggugcucacgg

SEQ ID NO: 1345999 - RNA, 19 nt, Artificial Sequence
  Description of Artificial Sequence: Synthetic oligonucleotide
gcgaacaaaggcuuugggg

SEQ ID NO: 1346000 - RNA, 19 nt, Artificial Sequence
  Description of Artificial Sequence: Synthetic oligonucleotide
augccucagagaaugcucc

SEQ ID NO: 1346001 - RNA, 19 nt, Artificial Sequence
  Description of Artificial Sequence: Synthetic oligonucleotide
uguacucuugccucccuac

SEQ ID NO: 1346002 - RNA, 19 nt, Artificial Sequence
  Description of Artificial Sequence: Synthetic oligonucleotide
aggucuuagcuccaugcug

SEQ ID NO: 1346003 - RNA, 19 nt, Artificial Sequence
  Description of Artificial Sequence: Synthetic oligonucleotide
agccugagcuccaugaaac

SEQ ID NO: 1346004 - RNA, 19 nt, Artificial Sequence
  Description of Artificial Sequence: Synthetic oligonucleotide
ugcacaugcugcugaagug

SEQ ID NO: 1346005 - RNA, 19 nt, Artificial Sequence
  Description of Artificial Sequence: Synthetic oligonucleotide
agcgaacaaaggcuuuggg

SEQ ID NO: 1346006 - RNA, 19 nt, Artificial Sequence
  Description of Artificial Sequence: Synthetic oligonucleotide
cucacugauaggucuuagc

SEQ ID NO: 1346007 - RNA, 19 nt, Artificial Sequence
  Description of Artificial Sequence: Synthetic oligonucleotide
ucauacucacugauagguc

SEQ ID NO: 1346008 - RNA, 19 nt, Artificial Sequence
  Description of Artificial Sequence: Synthetic oligonucleotide
cauuguacuugaagauggc

SEQ ID NO: 1346009 - RNA, 19 nt, Artificial Sequence
  Description of Artificial Sequence: Synthetic oligonucleotide
aguauucggcuuucagcag

SEQ ID NO: 1346010 - RNA, 19 nt, Artificial Sequence
  Description of Artificial Sequence: Synthetic oligonucleotide
uggucucaaaagaccaaac

SEQ ID NO: 1346011 - RNA, 19 nt, Artificial Sequence
  Description of Artificial Sequence: Synthetic oligonucleotide
caugccucagagaaugcuc

SEQ ID NO: 1346012 - RNA, 19 nt, Artificial Sequence
  Description of Artificial Sequence: Synthetic oligonucleotide
augccuguagucugugcuc

SEQ ID NO: 1346013 - RNA, 19 nt, Artificial Sequence
  Description of Artificial Sequence: Synthetic oligonucleotide
ugguaaagaaacguagaua

SEQ ID NO: 1346014 - RNA, 19 nt, Artificial Sequence
  Description of Artificial Sequence: Synthetic oligonucleotide
gauaggucuuagcuccaug

SEQ ID NO: 1346015 - RNA, 19 nt, Artificial Sequence
  Description of Artificial Sequence: Synthetic oligonucleotide
cacucggcggagcucaucg

SEQ ID NO: 1346016 - RNA, 19 nt, Artificial Sequence
  Description of Artificial Sequence: Synthetic oligonucleotide
ugagcuuccggcugucgca

SEQ ID NO: 1346017 - RNA, 19 nt, Artificial Sequence
  Description of Artificial Sequence: Synthetic oligonucleotide
aaagaccacgaggaaccag

SEQ ID NO: 1346018 - RNA, 19 nt, Artificial Sequence
  Description of Artificial Sequence: Synthetic oligonucleotide
aaguuggucuugguaaaga

SEQ ID NO: 1346019 - RNA, 19 nt, Artificial Sequence
  Description of Artificial Sequence: Synthetic oligonucleotide
ucggcggagcucaucgggg

SEQ ID NO: 1346020 - RNA, 19 nt, Artificial Sequence
  Description of Artificial Sequence: Synthetic oligonucleotide
agagaaugcuccaggugac

SEQ ID NO: 1346021 - RNA, 19 nt, Artificial Sequence
  Description of Artificial Sequence: Synthetic oligonucleotide
cucgagggcuagcaggugg

SEQ ID NO: 1346022 - RNA, 19 nt, Artificial Sequence
  Description of Artificial Sequence: Synthetic oligonucleotide
aagccguaagcaucauacu

SEQ ID NO: 1346023 - RNA, 19 nt, Artificial Sequence
  Description of Artificial Sequence: Synthetic oligonucleotide
gguucuuauccaucaguag

SEQ ID NO: 1346024 - RNA, 19 nt, Artificial Sequence
  Description of Artificial Sequence: Synthetic oligonucleotide
guggacggugcucacgggg

SEQ ID NO: 1346025 - RNA, 19 nt, Artificial Sequence
  Description of Artificial Sequence: Synthetic oligonucleotide
agaaacguagauauugguu

SEQ ID NO: 1346026 - RNA, 19 nt, Artificial Sequence
  Description of Artificial Sequence: Synthetic oligonucleotide
guauugugauacaggcugg

SEQ ID NO: 1346027 - RNA, 19 nt, Artificial Sequence
  Description of Artificial Sequence: Synthetic oligonucleotide
cuuuggggagcagaguggc

SEQ ID NO: 1346028 - RNA, 19 nt, Artificial Sequence
  Description of Artificial Sequence: Synthetic oligonucleotide
gagcauggugaugaguuug

SEQ ID NO: 1346029 - RNA, 19 nt, Artificial Sequence
  Description of Artificial Sequence: Synthetic oligonucleotide
ugcucaugagcuuccggcu

SEQ ID NO: 1346030 - RNA, 19 nt, Artificial Sequence
  Description of Artificial Sequence: Synthetic oligonucleotide
gagggcacgagcucaguca

SEQ ID NO: 1346031 - RNA, 19 nt, Artificial Sequence
  Description of Artificial Sequence: Synthetic oligonucleotide
ugcgaucugccgcaccuug

SEQ ID NO: 1346032 - RNA, 19 nt, Artificial Sequence
  Description of Artificial Sequence: Synthetic oligonucleotide
aguucuagcucccgcaguu

SEQ ID NO: 1346033 - RNA, 19 nt, Artificial Sequence
  Description of Artificial Sequence: Synthetic oligonucleotide
agugcucagugguauugug

SEQ ID NO: 1346034 - RNA, 19 nt, Artificial Sequence
  Description of Artificial Sequence: Synthetic oligonucleotide
ugucgcaaguuggucuugg

SEQ ID NO: 1346035 - RNA, 19 nt, Artificial Sequence
  Description of Artificial Sequence: Synthetic oligonucleotide
agagagaggucuauguggu

SEQ ID NO: 1346036 - RNA, 19 nt, Artificial Sequence
  Description of Artificial Sequence: Synthetic oligonucleotide
ugacacagcucucgggcac

SEQ ID NO: 1346037 - RNA, 19 nt, Artificial Sequence
  Description of Artificial Sequence: Synthetic oligonucleotide
cucgcugacacagcucucg

SEQ ID NO: 1346038 - RNA, 19 nt, Artificial Sequence
  Description of Artificial Sequence: Synthetic oligonucleotide
ggaacaccaccuuuguccc

SEQ ID NO: 1346039 - RNA, 19 nt, Artificial Sequence
  Description of Artificial Sequence: Synthetic oligonucleotide
accgucaggaagccguaag

SEQ ID NO: 1346040 - RNA, 19 nt, Artificial Sequence
  Description of Artificial Sequence: Synthetic oligonucleotide
cucgauccugcucuagagc

SEQ ID NO: 1346041 - RNA, 19 nt, Artificial Sequence
  Description of Artificial Sequence: Synthetic oligonucleotide
uagugggcgcuccacaguc

SEQ ID NO: 1346042 - RNA, 19 nt, Artificial Sequence
  Description of Artificial Sequence: Synthetic oligonucleotide
cuacaagauaaagugcuca

SEQ ID NO: 1346043 - RNA, 19 nt, Artificial Sequence
  Description of Artificial Sequence: Synthetic oligonucleotide
cauacucacugauaggucu

SEQ ID NO: 1346044 - RNA, 19 nt, Artificial Sequence
  Description of Artificial Sequence: Synthetic oligonucleotide
ucgcugacacagcucucgg

SEQ ID NO: 1346045 - RNA, 19 nt, Artificial Sequence
  Description of Artificial Sequence: Synthetic oligonucleotide
aacguagauauugguuaga

SEQ ID NO: 1346046 - RNA, 19 nt, Artificial Sequence
  Description of Artificial Sequence: Synthetic oligonucleotide
ugcuccagcaggccggacu

SEQ ID NO: 1346047 - RNA, 19 nt, Artificial Sequence
  Description of Artificial Sequence: Synthetic oligonucleotide
ggacucaugcgccaggcgc

SEQ ID NO: 1346048 - RNA, 19 nt, Artificial Sequence
  Description of Artificial Sequence: Synthetic oligonucleotide
aagugcuuguuggugggga

SEQ ID NO: 1346049 - RNA, 19 nt, Artificial Sequence
  Description of Artificial Sequence: Synthetic oligonucleotide
ugcaccuguugcuccagca

SEQ ID NO: 1346050 - RNA, 19 nt, Artificial Sequence
  Description of Artificial Sequence: Synthetic oligonucleotide
cagcaggccggacucaugc

SEQ ID NO: 1346051 - RNA, 19 nt, Artificial Sequence
  Description of Artificial Sequence: Synthetic oligonucleotide
cucggcggagcucaucggg

SEQ ID NO: 1346052 - RNA, 19 nt, Artificial Sequence
  Description of Artificial Sequence: Synthetic oligonucleotide
gauauugguuagaucucca

SEQ ID NO: 1346053 - RNA, 19 nt, Artificial Sequence
  Description of Artificial Sequence: Synthetic oligonucleotide
ucuugccucccuacaagau

SEQ ID NO: 1346054 - RNA, 19 nt, Artificial Sequence
  Description of Artificial Sequence: Synthetic oligonucleotide
ugcugucugaggccucucc

SEQ ID NO: 1346055 - RNA, 19 nt, Artificial Sequence
  Description of Artificial Sequence: Synthetic oligonucleotide
ucagcaguucuagcucccg

SEQ ID NO: 1346056 - RNA, 19 nt, Artificial Sequence
  Description of Artificial Sequence: Synthetic oligonucleotide
gcugcuucaugggaaaggg

SEQ ID NO: 1346057 - RNA, 19 nt, Artificial Sequence
  Description of Artificial Sequence: Synthetic oligonucleotide
caccucauaguccggcacc

SEQ ID NO: 1346058 - RNA, 19 nt, Artificial Sequence
  Description of Artificial Sequence: Synthetic oligonucleotide
cacgagcucagucagggca

SEQ ID NO: 1346059 - RNA, 19 nt, Artificial Sequence
  Description of Artificial Sequence: Synthetic oligonucleotide
gcaaguauucggcuuucag

SEQ ID NO: 1346060 - RNA, 19 nt, Artificial Sequence
  Description of Artificial Sequence: Synthetic oligonucleotide
cagguggugggaucgcacc

SEQ ID NO: 1346061 - RNA, 19 nt, Artificial Sequence
  Description of Artificial Sequence: Synthetic oligonucleotide
gaucugccgcaccuugugc

SEQ ID NO: 1346062 - RNA, 19 nt, Artificial Sequence
  Description of Artificial Sequence: Synthetic oligonucleotide
aucggaacaccaccuuugu

SEQ ID NO: 1346063 - RNA, 19 nt, Artificial Sequence
  Description of Artificial Sequence: Synthetic oligonucleotide
gacacguggacggugcuca

SEQ ID NO: 1346064 - RNA, 19 nt, Artificial Sequence
  Description of Artificial Sequence: Synthetic oligonucleotide
uccccuucguccucgcuga

SEQ ID NO: 1346065 - RNA, 19 nt, Artificial Sequence
  Description of Artificial Sequence: Synthetic oligonucleotide
cugcuucaugggaaagggg

SEQ ID NO: 1346066 - RNA, 19 nt, Artificial Sequence
  Description of Artificial Sequence: Synthetic oligonucleotide
uggcaugucuggccacggg

SEQ ID NO: 1346067 - RNA, 19 nt, Artificial Sequence
  Description of Artificial Sequence: Synthetic oligonucleotide
cagugguauugugauacag

SEQ ID NO: 1346068 - RNA, 19 nt, Artificial Sequence
  Description of Artificial Sequence: Synthetic oligonucleotide
agacuaagacccagagagg

SEQ ID NO: 1346069 - RNA, 19 nt, Artificial Sequence
  Description of Artificial Sequence: Synthetic oligonucleotide
uucaugggaaagggguuca

SEQ ID NO: 1346070 - RNA, 19 nt, Artificial Sequence
  Description of Artificial Sequence: Synthetic oligonucleotide
uauucggcuuucagcaguu

SEQ ID NO: 1346071 - RNA, 19 nt, Artificial Sequence
  Description of Artificial Sequence: Synthetic oligonucleotide
aagugcucagugguauugu

SEQ ID NO: 1346072 - RNA, 19 nt, Artificial Sequence
  Description of Artificial Sequence: Synthetic oligonucleotide
agacuugcaagaggauguc

SEQ ID NO: 1346073 - RNA, 19 nt, Artificial Sequence
  Description of Artificial Sequence: Synthetic oligonucleotide
agcgcucccguagugggcg

SEQ ID NO: 1346074 - RNA, 19 nt, Artificial Sequence
  Description of Artificial Sequence: Synthetic oligonucleotide
acuaagacccagagaggag

SEQ ID NO: 1346075 - RNA, 19 nt, Artificial Sequence
  Description of Artificial Sequence: Synthetic oligonucleotide
agcucgaucuggcgggcag

SEQ ID NO: 1346076 - RNA, 19 nt, Artificial Sequence
  Description of Artificial Sequence: Synthetic oligonucleotide
gaaugcuccaggugaccca

SEQ ID NO: 1346077 - RNA, 19 nt, Artificial Sequence
  Description of Artificial Sequence: Synthetic oligonucleotide
cucauaguccggcaccguc

SEQ ID NO: 1346078 - RNA, 19 nt, Artificial Sequence
  Description of Artificial Sequence: Synthetic oligonucleotide
ucgagggcuagcagguggu

SEQ ID NO: 1346079 - RNA, 19 nt, Artificial Sequence
  Description of Artificial Sequence: Synthetic oligonucleotide
gaagugccugcaccuguug

SEQ ID NO: 1346080 - RNA, 19 nt, Artificial Sequence
  Description of Artificial Sequence: Synthetic oligonucleotide
gugggaucgcaccuccaag

SEQ ID NO: 1346081 - RNA, 19 nt, Artificial Sequence
  Description of Artificial Sequence: Synthetic oligonucleotide
acguagauauugguuagau

SEQ ID NO: 1346082 - RNA, 19 nt, Artificial Sequence
  Description of Artificial Sequence: Synthetic oligonucleotide
uccaccucauaguccggca

SEQ ID NO: 1346083 - RNA, 19 nt, Artificial Sequence
  Description of Artificial Sequence: Synthetic oligonucleotide
caggccggacucaugcgcc

SEQ ID NO: 1346084 - RNA, 19 nt, Artificial Sequence
  Description of Artificial Sequence: Synthetic oligonucleotide
gacauggcgguggaccagc

SEQ ID NO: 1346085 - RNA, 19 nt, Artificial Sequence
  Description of Artificial Sequence: Synthetic oligonucleotide
ggcaucccagacuugcaag

SEQ ID NO: 1346086 - RNA, 19 nt, Artificial Sequence
  Description of Artificial Sequence: Synthetic oligonucleotide
agcaggccggacucaugcg

SEQ ID NO: 1346087 - RNA, 19 nt, Artificial Sequence
  Description of Artificial Sequence: Synthetic oligonucleotide
uuccggcugucgcaaguug

SEQ ID NO: 1346088 - RNA, 19 nt, Artificial Sequence
  Description of Artificial Sequence: Synthetic oligonucleotide
gaucgcaccuccaaggccu

SEQ ID NO: 1346089 - RNA, 19 nt, Artificial Sequence
  Description of Artificial Sequence: Synthetic oligonucleotide
agaccaaacccaaaccaaa

SEQ ID NO: 1346090 - RNA, 19 nt, Artificial Sequence
  Description of Artificial Sequence: Synthetic oligonucleotide
cagggcauaucggaacacc

SEQ ID NO: 1346091 - RNA, 19 nt, Artificial Sequence
  Description of Artificial Sequence: Synthetic oligonucleotide
ugggcgcuccacagucucg

SEQ ID NO: 1346092 - RNA, 19 nt, Artificial Sequence
  Description of Artificial Sequence: Synthetic oligonucleotide
ggcaugucuggccacgggc

SEQ ID NO: 1346093 - RNA, 19 nt, Artificial Sequence
  Description of Artificial Sequence: Synthetic oligonucleotide
uccgguugagguccagcuc

SEQ ID NO: 1346094 - RNA, 19 nt, Artificial Sequence
  Description of Artificial Sequence: Synthetic oligonucleotide
uccugguagcagccuggag

SEQ ID NO: 1346095 - RNA, 19 nt, Artificial Sequence
  Description of Artificial Sequence: Synthetic oligonucleotide
caugggaaagggguucaug

SEQ ID NO: 1346096 - RNA, 19 nt, Artificial Sequence
  Description of Artificial Sequence: Synthetic oligonucleotide
ucggaacaccaccuuuguc

SEQ ID NO: 1346097 - RNA, 19 nt, Artificial Sequence
  Description of Artificial Sequence: Synthetic oligonucleotide
ucuuagcuccaugcugucu

SEQ ID NO: 1346098 - RNA, 19 nt, Artificial Sequence
  Description of Artificial Sequence: Synthetic oligonucleotide
aggagcacucggcggagcu

SEQ ID NO: 1346099 - RNA, 19 nt, Artificial Sequence
  Description of Artificial Sequence: Synthetic oligonucleotide
agugcuuguugguggggaa

SEQ ID NO: 1346100 - RNA, 19 nt, Artificial Sequence
  Description of Artificial Sequence: Synthetic oligonucleotide
agucggcugggcaaggucu

SEQ ID NO: 1346101 - RNA, 19 nt, Artificial Sequence
  Description of Artificial Sequence: Synthetic oligonucleotide
guauucggcuuucagcagu

SEQ ID NO: 1346102 - RNA, 19 nt, Artificial Sequence
  Description of Artificial Sequence: Synthetic oligonucleotide
cacugaugagagagucggc

SEQ ID NO: 1346103 - RNA, 19 nt, Artificial Sequence
  Description of Artificial Sequence: Synthetic oligonucleotide
gguggggaagguccgguug

SEQ ID NO: 1346104 - RNA, 19 nt, Artificial Sequence
  Description of Artificial Sequence: Synthetic oligonucleotide
acucacugauaggucuuag

SEQ ID NO: 1346105 - RNA, 19 nt, Artificial Sequence
  Description of Artificial Sequence: Synthetic oligonucleotide
agacacguggacggugcuc

SEQ ID NO: 1346106 - RNA, 19 nt, Artificial Sequence
  Description of Artificial Sequence: Synthetic oligonucleotide
acaaaggcuuuggggagca

SEQ ID NO: 1346107 - RNA, 19 nt, Artificial Sequence
  Description of Artificial Sequence: Synthetic oligonucleotide
aggcaucccagacuugcaa

SEQ ID NO: 1346108 - RNA, 19 nt, Artificial Sequence
  Description of Artificial Sequence: Synthetic oligonucleotide
cacgaggaaccaguugaag

SEQ ID NO: 1346109 - RNA, 19 nt, Artificial Sequence
  Description of Artificial Sequence: Synthetic oligonucleotide
accaccuuugucccuucau

SEQ ID NO: 1346110 - RNA, 19 nt, Artificial Sequence
  Description of Artificial Sequence: Synthetic oligonucleotide
uggcgguggaccagccacc

SEQ ID NO: 1346111 - RNA, 19 nt, Artificial Sequence
  Description of Artificial Sequence: Synthetic oligonucleotide
uggccagggcauaucggaa

SEQ ID NO: 1346112 - RNA, 19 nt, Artificial Sequence
  Description of Artificial Sequence: Synthetic oligonucleotide
acucggcggagcucaucgg

SEQ ID NO: 1346113 - RNA, 19 nt, Artificial Sequence
  Description of Artificial Sequence: Synthetic oligonucleotide
cugggagacuaagacccag

SEQ ID NO: 1346114 - RNA, 19 nt, Artificial Sequence
  Description of Artificial Sequence: Synthetic oligonucleotide
acgagcucagucagggcag

SEQ ID NO: 1346115 - RNA, 19 nt, Artificial Sequence
  Description of Artificial Sequence: Synthetic oligonucleotide
cucuugccucccuacaaga

SEQ ID NO: 1346116 - RNA, 19 nt, Artificial Sequence
  Description of Artificial Sequence: Synthetic oligonucleotide
gcaguucuagcucccgcag

SEQ ID NO: 1346117 - RNA, 19 nt, Artificial Sequence
  Description of Artificial Sequence: Synthetic oligonucleotide
agggcagcccagcgcuccc

SEQ ID NO: 1346118 - RNA, 19 nt, Artificial Sequence
  Description of Artificial Sequence: Synthetic oligonucleotide
ugaguucggcugagggcac

SEQ ID NO: 1346119 - RNA, 19 nt, Artificial Sequence
  Description of Artificial Sequence: Synthetic oligonucleotide
cucacggggcacaccugcc

SEQ ID NO: 1346120 - RNA, 19 nt, Artificial Sequence
  Description of Artificial Sequence: Synthetic oligonucleotide
agcauggugaugaguuuga

SEQ ID NO: 1346121 - RNA, 19 nt, Artificial Sequence
  Description of Artificial Sequence: Synthetic oligonucleotide
gggaucgcaccuccaaggc

SEQ ID NO: 1346122 - RNA, 19 nt, Artificial Sequence
  Description of Artificial Sequence: Synthetic oligonucleotide
caaggcugggagacuaaga

SEQ ID NO: 1346123 - RNA, 19 nt, Artificial Sequence
  Description of Artificial Sequence: Synthetic oligonucleotide
auaguccggcaccgucagg

SEQ ID NO: 1346124 - RNA, 19 nt, Artificial Sequence
  Description of Artificial Sequence: Synthetic oligonucleotide
ugcagccgcagggaucucc

SEQ ID NO: 1346125 - RNA, 19 nt, Artificial Sequence
  Description of Artificial Sequence: Synthetic oligonucleotide
uugugccggaccaguucca

SEQ ID NO: 1346126 - RNA, 19 nt, Artificial Sequence
  Description of Artificial Sequence: Synthetic oligonucleotide
ugcaaguauucggcuuuca

SEQ ID NO: 1346127 - RNA, 19 nt, Artificial Sequence
  Description of Artificial Sequence: Synthetic oligonucleotide
guacucuugccucccuaca

SEQ ID NO: 1346128 - RNA, 19 nt, Artificial Sequence
  Description of Artificial Sequence: Synthetic oligonucleotide
ucaugucauugaaggcgau

SEQ ID NO: 1346129 - RNA, 19 nt, Artificial Sequence
  Description of Artificial Sequence: Synthetic oligonucleotide
gucuugguaaagaaacgua

SEQ ID NO: 1346130 - RNA, 19 nt, Artificial Sequence
  Description of Artificial Sequence: Synthetic oligonucleotide
gccguaagcaucauacuca

SEQ ID NO: 1346131 - RNA, 19 nt, Artificial Sequence
  Description of Artificial Sequence: Synthetic oligonucleotide
cucgaucuggcgggcagcc

SEQ ID NO: 1346132 - RNA, 19 nt, Artificial Sequence
  Description of Artificial Sequence: Synthetic oligonucleotide
ggaucgcaccuccaaggcc

SEQ ID NO: 1346133 - RNA, 19 nt, Artificial Sequence
  Description of Artificial Sequence: Synthetic oligonucleotide
gagaggucuauguggugcu

SEQ ID NO: 1346134 - RNA, 19 nt, Artificial Sequence
  Description of Artificial Sequence: Synthetic oligonucleotide
ggagacuaagacccagaga

SEQ ID NO: 1346135 - RNA, 19 nt, Artificial Sequence
  Description of Artificial Sequence: Synthetic oligonucleotide
ccagacuugcaagaggaug

SEQ ID NO: 1346136 - RNA, 19 nt, Artificial Sequence
  Description of Artificial Sequence: Synthetic oligonucleotide
uugucccuucauacaggaa

SEQ ID NO: 1346137 - RNA, 19 nt, Artificial Sequence
  Description of Artificial Sequence: Synthetic oligonucleotide
acggggcacaccugcccgg

SEQ ID NO: 1346138 - RNA, 19 nt, Artificial Sequence
  Description of Artificial Sequence: Synthetic oligonucleotide
gacuugcaagaggauguca

SEQ ID NO: 1346139 - RNA, 19 nt, Artificial Sequence
  Description of Artificial Sequence: Synthetic oligonucleotide
acacguggacggugcucac

SEQ ID NO: 1346140 - RNA, 19 nt, Artificial Sequence
  Description of Artificial Sequence: Synthetic oligonucleotide
ccagacacguggacggugc

SEQ ID NO: 1346141 - RNA, 19 nt, Artificial Sequence
  Description of Artificial Sequence: Synthetic oligonucleotide
ugauaggucuuagcuccau

SEQ ID NO: 1346142 - RNA, 19 nt, Artificial Sequence
  Description of Artificial Sequence: Synthetic oligonucleotide
ccguaagcaucauacucac

SEQ ID NO: 1346143 - RNA, 19 nt, Artificial Sequence
  Description of Artificial Sequence: Synthetic oligonucleotide
ucaugcgccaggcgcucuc

SEQ ID NO: 1346144 - RNA, 19 nt, Artificial Sequence
  Description of Artificial Sequence: Synthetic oligonucleotide
ugcccgucucugcaaguau

SEQ ID NO: 1346145 - RNA, 19 nt, Artificial Sequence
  Description of Artificial Sequence: Synthetic oligonucleotide
uggaugcccgucucugcaa

SEQ ID NO: 1346146 - RNA, 19 nt, Artificial Sequence
  Description of Artificial Sequence: Synthetic oligonucleotide
cccuacaagauaaagugcu

SEQ ID NO: 1346147 - RNA, 19 nt, Artificial Sequence
  Description of Artificial Sequence: Synthetic oligonucleotide
gcucaugagcuuccggcug

SEQ ID NO: 1346148 - RNA, 19 nt, Artificial Sequence
  Description of Artificial Sequence: Synthetic oligonucleotide
agcaucauacucacugaua

SEQ ID NO: 1346149 - RNA, 19 nt, Artificial Sequence
  Description of Artificial Sequence: Synthetic oligonucleotide
cugcacaugcugcugaagu

SEQ ID NO: 1346150 - RNA, 19 nt, Artificial Sequence
  Description of Artificial Sequence: Synthetic oligonucleotide
gaguucggcugagggcacg

SEQ ID NO: 1346151 - RNA, 19 nt, Artificial Sequence
  Description of Artificial Sequence: Synthetic oligonucleotide
acucaugcgccaggcgcuc

SEQ ID NO: 1346152 - RNA, 19 nt, Artificial Sequence
  Description of Artificial Sequence: Synthetic oligonucleotide
ucaggucuuccaccucaua

SEQ ID NO: 1346153 - RNA, 19 nt, Artificial Sequence
  Description of Artificial Sequence: Synthetic oligonucleotide
ccagcgcucccguaguggg

SEQ ID NO: 1346154 - RNA, 19 nt, Artificial Sequence
  Description of Artificial Sequence: Synthetic oligonucleotide
cucaucggggaagcuggag

SEQ ID NO: 1346155 - RNA, 19 nt, Artificial Sequence
  Description of Artificial Sequence: Synthetic oligonucleotide
gcaggccggacucaugcgc

SEQ ID NO: 1346156 - RNA, 19 nt, Artificial Sequence
  Description of Artificial Sequence: Synthetic oligonucleotide
cucccgguggacugcccgc

SEQ ID NO: 1346157 - RNA, 19 nt, Artificial Sequence
  Description of Artificial Sequence: Synthetic oligonucleotide
cucagagaaugcuccaggu

SEQ ID NO: 1346158 - RNA, 19 nt, Artificial Sequence
  Description of Artificial Sequence: Synthetic oligonucleotide
gcucuagagccuccacccg

SEQ ID NO: 1346159 - RNA, 19 nt, Artificial Sequence
  Description of Artificial Sequence: Synthetic oligonucleotide
cucuggcccaugccuguag

SEQ ID NO: 1346160 - RNA, 19 nt, Artificial Sequence
  Description of Artificial Sequence: Synthetic oligonucleotide
uacucacugauaggucuua

SEQ ID NO: 1346161 - RNA, 19 nt, Artificial Sequence
  Description of Artificial Sequence: Synthetic oligonucleotide
cacguggacggugcucacg

SEQ ID NO: 1346162 - RNA, 19 nt, Artificial Sequence
  Description of Artificial Sequence: Synthetic oligonucleotide
ucgaucuggcgggcagccg

SEQ ID NO: 1346163 - RNA, 19 nt, Artificial Sequence
  Description of Artificial Sequence: Synthetic oligonucleotide
ugccagcaaagcgaacaaa

SEQ ID NO: 1346164 - RNA, 19 nt, Artificial Sequence
  Description of Artificial Sequence: Synthetic oligonucleotide
cugccucaggugugcagug

SEQ ID NO: 1346165 - RNA, 19 nt, Artificial Sequence
  Description of Artificial Sequence: Synthetic oligonucleotide
ggcccaugccuguagucug

SEQ ID NO: 1346166 - RNA, 19 nt, Artificial Sequence
  Description of Artificial Sequence: Synthetic oligonucleotide
ggucuugguaaagaaacgu

SEQ ID NO: 1346167 - RNA, 19 nt, Artificial Sequence
  Description of Artificial Sequence: Synthetic oligonucleotide
cgcaaguuggucuugguaa

SEQ ID NO: 1346168 - RNA, 19 nt, Artificial Sequence
  Description of Artificial Sequence: Synthetic oligonucleotide
cgguggaccagccaccucc

SEQ ID NO: 1346169 - RNA, 19 nt, Artificial Sequence
  Description of Artificial Sequence: Synthetic oligonucleotide
cuggcaugucuggccacgg

SEQ ID NO: 1346170 - RNA, 19 nt, Artificial Sequence
  Description of Artificial Sequence: Synthetic oligonucleotide
auacucacugauaggucuu

SEQ ID NO: 1346171 - RNA, 19 nt, Artificial Sequence
  Description of Artificial Sequence: Synthetic oligonucleotide
cugugcuccugccagcaaa

SEQ ID NO: 1346172 - RNA, 19 nt, Artificial Sequence
  Description of Artificial Sequence: Synthetic oligonucleotide
gugggcgcuccacagucuc

SEQ ID NO: 1346173 - RNA, 19 nt, Artificial Sequence
  Description of Artificial Sequence: Synthetic oligonucleotide
ccgucaggaagccguaagc

SEQ ID NO: 1346174 - RNA, 19 nt, Artificial Sequence
  Description of Artificial Sequence: Synthetic oligonucleotide
ggauguacucuugccuccc

SEQ ID NO: 1346175 - RNA, 19 nt, Artificial Sequence
  Description of Artificial Sequence: Synthetic oligonucleotide
gcucccgguggacugcccg

SEQ ID NO: 1346176 - RNA, 19 nt, Artificial Sequence
  Description of Artificial Sequence: Synthetic oligonucleotide
caugcgccaggcgcucucg

SEQ ID NO: 1346177 - RNA, 19 nt, Artificial Sequence
  Description of Artificial Sequence: Synthetic oligonucleotide
uggugggaucgcaccucca

SEQ ID NO: 1346178 - RNA, 19 nt, Artificial Sequence
  Description of Artificial Sequence: Synthetic oligonucleotide
ccgcaguucggcuuccagc

SEQ ID NO: 1346179 - RNA, 19 nt, Artificial Sequence
  Description of Artificial Sequence: Synthetic oligonucleotide
gcuggcaugucuggccacg

SEQ ID NO: 1346180 - RNA, 19 nt, Artificial Sequence
  Description of Artificial Sequence: Synthetic oligonucleotide
gagucggggcagagaaggc

SEQ ID NO: 1346181 - RNA, 19 nt, Artificial Sequence
  Description of Artificial Sequence: Synthetic oligonucleotide
guuagaucuccaggcuguc

SEQ ID NO: 1346182 - RNA, 19 nt, Artificial Sequence
  Description of Artificial Sequence: Synthetic oligonucleotide
gcgcuccacagucucgagg

SEQ ID NO: 1346183 - RNA, 19 nt, Artificial Sequence
  Description of Artificial Sequence: Synthetic oligonucleotide
cugauaggucuuagcucca

SEQ ID NO: 1346184 - RNA, 19 nt, Artificial Sequence
  Description of Artificial Sequence: Synthetic oligonucleotide
ggcgaugcucaugagcuuc

SEQ ID NO: 1346185 - RNA, 19 nt, Artificial Sequence
  Description of Artificial Sequence: Synthetic oligonucleotide
cucugcgaucugccgcacc

SEQ ID NO: 1346186 - RNA, 19 nt, Artificial Sequence
  Description of Artificial Sequence: Synthetic oligonucleotide
ggugacccaggauguacuc

SEQ ID NO: 1346187 - RNA, 19 nt, Artificial Sequence
  Description of Artificial Sequence: Synthetic oligonucleotide
ggcacugcucugccccugg

SEQ ID NO: 1346188 - RNA, 19 nt, Artificial Sequence
  Description of Artificial Sequence: Synthetic oligonucleotide
cucgggcacugcucugccc

SEQ ID NO: 1346189 - RNA, 19 nt, Artificial Sequence
  Description of Artificial Sequence: Synthetic oligonucleotide
ugcuggcaugucuggccac

SEQ ID NO: 1346190 - RNA, 19 nt, Artificial Sequence
  Description of Artificial Sequence: Synthetic oligonucleotide
gccucccuacaagauaaag

SEQ ID NO: 1346191 - RNA, 19 nt, Artificial Sequence
  Description of Artificial Sequence: Synthetic oligonucleotide
agcccagcgcucccguagu

SEQ ID NO: 1346192 - RNA, 19 nt, Artificial Sequence
  Description of Artificial Sequence: Synthetic oligonucleotide
ggugggaucgcaccuccaa

SEQ ID NO: 1346193 - RNA, 19 nt, Artificial Sequence
  Description of Artificial Sequence: Synthetic oligonucleotide
gguuagaucuccaggcugu

SEQ ID NO: 1346194 - RNA, 19 nt, Artificial Sequence
  Description of Artificial Sequence: Synthetic oligonucleotide
gugauaagagagaggucua

SEQ ID NO: 1346195 - RNA, 19 nt, Artificial Sequence
  Description of Artificial Sequence: Synthetic oligonucleotide
ggugcugccucaggugugc

SEQ ID NO: 1346196 - RNA, 19 nt, Artificial Sequence
  Description of Artificial Sequence: Synthetic oligonucleotide
aguucggcugagggcacga

SEQ ID NO: 1346197 - RNA, 19 nt, Artificial Sequence
  Description of Artificial Sequence: Synthetic oligonucleotide
gugcagugagucggggcag

SEQ ID NO: 1346198 - RNA, 19 nt, Artificial Sequence
  Description of Artificial Sequence: Synthetic oligonucleotide
gauguacucuugccucccu

SEQ ID NO: 1346199 - RNA, 19 nt, Artificial Sequence
  Description of Artificial Sequence: Synthetic oligonucleotide
ugccucccuacaagauaaa

SEQ ID NO: 1346200 - RNA, 19 nt, Artificial Sequence
  Description of Artificial Sequence: Synthetic oligonucleotide
cuccugccagcaaagcgaa

SEQ ID NO: 1346201 - RNA, 19 nt, Artificial Sequence
  Description of Artificial Sequence: Synthetic oligonucleotide
ugcgccaggcgcucucgau

SEQ ID NO: 1346202 - RNA, 19 nt, Artificial Sequence
  Description of Artificial Sequence: Synthetic oligonucleotide
cagcucucgggcacugcuc

SEQ ID NO: 1346203 - RNA, 19 nt, Artificial Sequence
  Description of Artificial Sequence: Synthetic oligonucleotide
cagcgcucccguagugggc

SEQ ID NO: 1346204 - RNA, 19 nt, Artificial Sequence
  Description of Artificial Sequence: Synthetic oligonucleotide
agcuuccggcugucgcaag

SEQ ID NO: 1346205 - RNA, 19 nt, Artificial Sequence
  Description of Artificial Sequence: Synthetic oligonucleotide
gugagucggggcagagaag

SEQ ID NO: 1346206 - RNA, 19 nt, Artificial Sequence
  Description of Artificial Sequence: Synthetic oligonucleotide
cuggcucagcucugcgauc

SEQ ID NO: 1346207 - RNA, 19 nt, Artificial Sequence
  Description of Artificial Sequence: Synthetic oligonucleotide
ucugccccuggaugcccgu

SEQ ID NO: 1346208 - RNA, 19 nt, Artificial Sequence
  Description of Artificial Sequence: Synthetic oligonucleotide
gacggugcucacggggcac

SEQ ID NO: 1346209 - RNA, 19 nt, Artificial Sequence
  Description of Artificial Sequence: Synthetic oligonucleotide
cacagucucgagggcuagc

SEQ ID NO: 1346210 - RNA, 19 nt, Artificial Sequence
  Description of Artificial Sequence: Synthetic oligonucleotide
uccugccagcaaagcgaac

SEQ ID NO: 1346211 - RNA, 19 nt, Artificial Sequence
  Description of Artificial Sequence: Synthetic oligonucleotide
gccagggcauaucggaaca

SEQ ID NO: 1346212 - RNA, 19 nt, Artificial Sequence
  Description of Artificial Sequence: Synthetic oligonucleotide
ucaugagcuuccggcuguc

SEQ ID NO: 1346213 - RNA, 19 nt, Artificial Sequence
  Description of Artificial Sequence: Synthetic oligonucleotide
ugccgcaccuugugccgga

SEQ ID NO: 1346214 - RNA, 19 nt, Artificial Sequence
  Description of Artificial Sequence: Synthetic oligonucleotide
cugcaaguauucggcuuuc

SEQ ID NO: 1346215 - RNA, 19 nt, Artificial Sequence
  Description of Artificial Sequence: Synthetic oligonucleotide
ucccgguggacugcccgca

SEQ ID NO: 1346216 - RNA, 19 nt, Artificial Sequence
  Description of Artificial Sequence: Synthetic oligonucleotide
guucuagcucccgcaguuc

SEQ ID NO: 1346217 - RNA, 19 nt, Artificial Sequence
  Description of Artificial Sequence: Synthetic oligonucleotide
ccucccuacaagauaaagu

SEQ ID NO: 1346218 - RNA, 19 nt, Artificial Sequence
  Description of Artificial Sequence: Synthetic oligonucleotide
ccgggugcuggcaugucug

SEQ ID NO: 1346219 - RNA, 19 nt, Artificial Sequence
  Description of Artificial Sequence: Synthetic oligonucleotide
ccuugugccggaccaguuc

SEQ ID NO: 1346220 - RNA, 19 nt, Artificial Sequence
  Description of Artificial Sequence: Synthetic oligonucleotide
gucucgagggcuagcaggu

SEQ ID NO: 1346221 - RNA, 19 nt, Artificial Sequence
  Description of Artificial Sequence: Synthetic oligonucleotide
guagugggcgcuccacagu

SEQ ID NO: 1346222 - RNA, 19 nt, Artificial Sequence
  Description of Artificial Sequence: Synthetic oligonucleotide
ggaagucggcugggcaagg

SEQ ID NO: 1346223 - RNA, 19 nt, Artificial Sequence
  Description of Artificial Sequence: Synthetic oligonucleotide
augcccgucucugcaagua

SEQ ID NO: 1346224 - RNA, 19 nt, Artificial Sequence
  Description of Artificial Sequence: Synthetic oligonucleotide
ccaccucauaguccggcac

SEQ ID NO: 1346225 - RNA, 19 nt, Artificial Sequence
  Description of Artificial Sequence: Synthetic oligonucleotide
gagcuuccggcugucgcaa

SEQ ID NO: 1346226 - RNA, 19 nt, Artificial Sequence
  Description of Artificial Sequence: Synthetic oligonucleotide
ccgucucugcaaguauucg

SEQ ID NO: 1346227 - RNA, 19 nt, Artificial Sequence
  Description of Artificial Sequence: Synthetic oligonucleotide
acacagcucucgggcacug

SEQ ID NO: 1346228 - RNA, 19 nt, Artificial Sequence
  Description of Artificial Sequence: Synthetic oligonucleotide
gagagucggcaaagaccac

SEQ ID NO: 1346229 - RNA, 19 nt, Artificial Sequence
  Description of Artificial Sequence: Synthetic oligonucleotide
cucccguagugggcgcucc

SEQ ID NO: 1346230 - RNA, 19 nt, Artificial Sequence
  Description of Artificial Sequence: Synthetic oligonucleotide
gugcuccugccagcaaagc

SEQ ID NO: 1346231 - RNA, 19 nt, Artificial Sequence
  Description of Artificial Sequence: Synthetic oligonucleotide
gccggacucaugcgccagg

SEQ ID NO: 1346232 - RNA, 19 nt, Artificial Sequence
  Description of Artificial Sequence: Synthetic oligonucleotide
cauggcgguggaccagcca

SEQ ID NO: 1346233 - RNA, 19 nt, Artificial Sequence
  Description of Artificial Sequence: Synthetic oligonucleotide
cagggucacacagaccucu

SEQ ID NO: 1346234 - RNA, 19 nt, Artificial Sequence
  Description of Artificial Sequence: Synthetic oligonucleotide
agugggcgcuccacagucu

SEQ ID NO: 1346235 - RNA, 19 nt, Artificial Sequence
  Description of Artificial Sequence: Synthetic oligonucleotide
cugucgcaaguuggucuug

SEQ ID NO: 1346236 - RNA, 19 nt, Artificial Sequence
  Description of Artificial Sequence: Synthetic oligonucleotide
augcgccaggcgcucucga

SEQ ID NO: 1346237 - RNA, 19 nt, Artificial Sequence
  Description of Artificial Sequence: Synthetic oligonucleotide
guugcuccagcaggccgga

SEQ ID NO: 1346238 - RNA, 19 nt, Artificial Sequence
  Description of Artificial Sequence: Synthetic oligonucleotide
gcauaucggaacaccaccu

SEQ ID NO: 1346239 - RNA, 19 nt, Artificial Sequence
  Description of Artificial Sequence: Synthetic oligonucleotide
acggugcucacggggcaca

SEQ ID NO: 1346240 - RNA, 19 nt, Artificial Sequence
  Description of Artificial Sequence: Synthetic oligonucleotide
aagguccgguugaggucca

SEQ ID NO: 1346241 - RNA, 19 nt, Artificial Sequence
  Description of Artificial Sequence: Synthetic oligonucleotide
ggaagccguaagcaucaua

SEQ ID NO: 1346242 - RNA, 19 nt, Artificial Sequence
  Description of Artificial Sequence: Synthetic oligonucleotide
ucggcugggcaaggucuuc

SEQ ID NO: 1346243 - RNA, 19 nt, Artificial Sequence
  Description of Artificial Sequence: Synthetic oligonucleotide
gcagccgggugcuggcaug

SEQ ID NO: 1346244 - RNA, 19 nt, Artificial Sequence
  Description of Artificial Sequence: Synthetic oligonucleotide
gugacccaggauguacucu

SEQ ID NO: 1346245 - RNA, 19 nt, Artificial Sequence
  Description of Artificial Sequence: Synthetic oligonucleotide
gaagucggcugggcaaggu

SEQ ID NO: 1346246 - RNA, 19 nt, Artificial Sequence
  Description of Artificial Sequence: Synthetic oligonucleotide
cuccacagucucgagggcu

SEQ ID NO: 1346247 - RNA, 19 nt, Artificial Sequence
  Description of Artificial Sequence: Synthetic oligonucleotide
cccagcgcucccguagugg

SEQ ID NO: 1346248 - RNA, 19 nt, Artificial Sequence
  Description of Artificial Sequence: Synthetic oligonucleotide
gucgcaaguuggucuuggu

SEQ ID NO: 1346249 - RNA, 19 nt, Artificial Sequence
  Description of Artificial Sequence: Synthetic oligonucleotide
gcacgagcucagucagggc

SEQ ID NO: 1346250 - RNA, 19 nt, Artificial Sequence
  Description of Artificial Sequence: Synthetic oligonucleotide
gcgccaggcgcucucgauc

SEQ ID NO: 1346251 - RNA, 19 nt, Artificial Sequence
  Description of Artificial Sequence: Synthetic oligonucleotide
gcagugagucggggcagag

SEQ ID NO: 1346252 - RNA, 19 nt, Artificial Sequence
  Description of Artificial Sequence: Synthetic oligonucleotide
guccucgcugacacagcuc

SEQ ID NO: 1346253 - RNA, 19 nt, Artificial Sequence
  Description of Artificial Sequence: Synthetic oligonucleotide
caguucuagcucccgcagu

SEQ ID NO: 1346254 - RNA, 19 nt, Artificial Sequence
  Description of Artificial Sequence: Synthetic oligonucleotide
cagugagucggggcagaga

SEQ ID NO: 1346255 - RNA, 19 nt, Artificial Sequence
  Description of Artificial Sequence: Synthetic oligonucleotide
cuccugguagcagccugga

SEQ ID NO: 1346256 - RNA, 19 nt, Artificial Sequence
  Description of Artificial Sequence: Synthetic oligonucleotide
gcugucgcaaguuggucuu

SEQ ID NO: 1346257 - RNA, 19 nt, Artificial Sequence
  Description of Artificial Sequence: Synthetic oligonucleotide
gcugccucaggugugcagu

SEQ ID NO: 1346258 - RNA, 19 nt, Artificial Sequence
  Description of Artificial Sequence: Synthetic oligonucleotide
gcucgaucuggcgggcagc

SEQ ID NO: 1346259 - RNA, 19 nt, Artificial Sequence
  Description of Artificial Sequence: Synthetic oligonucleotide
gggcacgagcucagucagg

SEQ ID NO: 1346260 - RNA, 19 nt, Artificial Sequence
  Description of Artificial Sequence: Synthetic oligonucleotide
ggccugguucuuauccauc

SEQ ID NO: 1346261 - RNA, 19 nt, Artificial Sequence
  Description of Artificial Sequence: Synthetic oligonucleotide
gcucagugguauugugaua

SEQ ID NO: 1346262 - RNA, 19 nt, Artificial Sequence
  Description of Artificial Sequence: Synthetic oligonucleotide
gggcgcuccacagucucga

SEQ ID NO: 1346263 - RNA, 19 nt, Artificial Sequence
  Description of Artificial Sequence: Synthetic oligonucleotide
gcucucgggcacugcucug

SEQ ID NO: 1346264 - RNA, 19 nt, Artificial Sequence
  Description of Artificial Sequence: Synthetic oligonucleotide
agguccgguugagguccag

SEQ ID NO: 1346265 - RNA, 19 nt, Artificial Sequence
  Description of Artificial Sequence: Synthetic oligonucleotide
ccagggcauaucggaacac

SEQ ID NO: 1346266 - RNA, 19 nt, Artificial Sequence
  Description of Artificial Sequence: Synthetic oligonucleotide
cggacucaugcgccaggcg

SEQ ID NO: 1346267 - RNA, 19 nt, Artificial Sequence
  Description of Artificial Sequence: Synthetic oligonucleotide
ggccggacucaugcgccag

SEQ ID NO: 1346268 - RNA, 19 nt, Artificial Sequence
  Description of Artificial Sequence: Synthetic oligonucleotide
aucuggcgggcagccgggu

SEQ ID NO: 1346269 - RNA, 19 nt, Artificial Sequence
  Description of Artificial Sequence: Synthetic oligonucleotide
cccggagcagcugcuugag

SEQ ID NO: 1346270 - RNA, 19 nt, Artificial Sequence
  Description of Artificial Sequence: Synthetic oligonucleotide
ccacgaggaaccaguugaa

SEQ ID NO: 1346271 - RNA, 19 nt, Artificial Sequence
  Description of Artificial Sequence: Synthetic oligonucleotide
cgaugcucaugagcuuccg

SEQ ID NO: 1346272 - RNA, 19 nt, Artificial Sequence
  Description of Artificial Sequence: Synthetic oligonucleotide
gcugggagacuaagaccca

SEQ ID NO: 1346273 - RNA, 19 nt, Artificial Sequence
  Description of Artificial Sequence: Synthetic oligonucleotide
cguggacggugcucacggg

SEQ ID NO: 1346274 - RNA, 19 nt, Artificial Sequence
  Description of Artificial Sequence: Synthetic oligonucleotide
cacgggccagaagcuccug

SEQ ID NO: 1346275 - RNA, 19 nt, Artificial Sequence
  Description of Artificial Sequence: Synthetic oligonucleotide
gcuuccggcugucgcaagu

SEQ ID NO: 1346276 - RNA, 19 nt, Artificial Sequence
  Description of Artificial Sequence: Synthetic oligonucleotide
ccaggagcacucggcggag

SEQ ID NO: 1346277 - RNA, 19 nt, Artificial Sequence
  Description of Artificial Sequence: Synthetic oligonucleotide
cacagaccucuggcccaug

SEQ ID NO: 1346278 - RNA, 19 nt, Artificial Sequence
  Description of Artificial Sequence: Synthetic oligonucleotide
cccguagugggcgcuccac

SEQ ID NO: 1346279 - RNA, 19 nt, Artificial Sequence
  Description of Artificial Sequence: Synthetic oligonucleotide
ccguagugggcgcuccaca

SEQ ID NO: 1346280 - RNA, 19 nt, Artificial Sequence
  Description of Artificial Sequence: Synthetic oligonucleotide
cagacacguggacggugcu

SEQ ID NO: 1346281 - RNA, 19 nt, Artificial Sequence
  Description of Artificial Sequence: Synthetic oligonucleotide
ccucgcugacacagcucuc

SEQ ID NO: 1346282 - RNA, 19 nt, Artificial Sequence
  Description of Artificial Sequence: Synthetic oligonucleotide
ccggcaccgucaggaagcc

SEQ ID NO: 1346283 - RNA, 19 nt, Artificial Sequence
  Description of Artificial Sequence: Synthetic oligonucleotide
cuccagcaggccggacuca

SEQ ID NO: 1346284 - RNA, 19 nt, Artificial Sequence
  Description of Artificial Sequence: Synthetic oligonucleotide
cagccaugccucagagaau

SEQ ID NO: 1346285 - RNA, 19 nt, Artificial Sequence
  Description of Artificial Sequence: Synthetic oligonucleotide
caccgucaggaagccguaa

SEQ ID NO: 1346286 - RNA, 19 nt, Artificial Sequence
  Description of Artificial Sequence: Synthetic oligonucleotide
cccgguggacugcccgcag

SEQ ID NO: 1346287 - RNA, 19 nt, Artificial Sequence
  Description of Artificial Sequence: Synthetic oligonucleotide
gccgcucccgguggacugc

SEQ ID NO: 1346288 - RNA, 19 nt, Artificial Sequence
  Description of Artificial Sequence: Synthetic oligonucleotide
cagcucgaucuggcgggca

SEQ ID NO: 1346289 - RNA, 19 nt, Artificial Sequence
  Description of Artificial Sequence: Synthetic oligonucleotide
gcagccgcagggaucuccu

SEQ ID NO: 1346290 - RNA, 19 nt, Artificial Sequence
  Description of Artificial Sequence: Synthetic oligonucleotide
agcacucggcggagcucau

SEQ ID NO: 1346291 - RNA, 19 nt, Artificial Sequence
  Description of Artificial Sequence: Synthetic oligonucleotide
gcucaucggggaagcugga

SEQ ID NO: 1346292 - RNA, 19 nt, Artificial Sequence
  Description of Artificial Sequence: Synthetic oligonucleotide
gucggcugggcaaggucuu

SEQ ID NO: 1346293 - RNA, 19 nt, Artificial Sequence
  Description of Artificial Sequence: Synthetic oligonucleotide
gcucccguagugggcgcuc

SEQ ID NO: 1346294 - RNA, 19 nt, Artificial Sequence
  Description of Artificial Sequence: Synthetic oligonucleotide
ggcgguggaccagccaccu

SEQ ID NO: 1346295 - RNA, 19 nt, Artificial Sequence
  Description of Artificial Sequence: Synthetic oligonucleotide
cccuucguccucgcugaca

SEQ ID NO: 1346296 - RNA, 19 nt, Artificial Sequence
  Description of Artificial Sequence: Synthetic oligonucleotide
gcacucggcggagcucauc

SEQ ID NO: 1346297 - RNA, 19 nt, Artificial Sequence
  Description of Artificial Sequence: Synthetic oligonucleotide
ccgcucccgguggacugcc

SEQ ID NO: 1346298 - RNA, 19 nt, Artificial Sequence
  Description of Artificial Sequence: Synthetic oligonucleotide
cgauccugcucuagagccu

SEQ ID NO: 1346299 - RNA, 19 nt, Artificial Sequence
  Description of Artificial Sequence: Synthetic oligonucleotide
gcgaucugccgcaccuugu

SEQ ID NO: 1346300 - RNA, 19 nt, Artificial Sequence
  Description of Artificial Sequence: Synthetic oligonucleotide
cucaugcgccaggcgcucu

SEQ ID NO: 1346301 - RNA, 19 nt, Artificial Sequence
  Description of Artificial Sequence: Synthetic oligonucleotide
gcccaugccuguagucugu

SEQ ID NO: 1346302 - RNA, 19 nt, Artificial Sequence
  Description of Artificial Sequence: Synthetic oligonucleotide
cggcugucgcaaguugguc

SEQ ID NO: 1346303 - RNA, 19 nt, Artificial Sequence
  Description of Artificial Sequence: Synthetic oligonucleotide
ccacgggccagaagcuccu

SEQ ID NO: 1346304 - RNA, 19 nt, Artificial Sequence
  Description of Artificial Sequence: Synthetic oligonucleotide
gccgcaccuugugccggac

SEQ ID NO: 1346305 - RNA, 19 nt, Artificial Sequence
  Description of Artificial Sequence: Synthetic oligonucleotide
gcccgucucugcaaguauu

SEQ ID NO: 1346306 - RNA, 19 nt, Artificial Sequence
  Description of Artificial Sequence: Synthetic oligonucleotide
ccccuucguccucgcugac

SEQ ID NO: 1346307 - RNA, 19 nt, Artificial Sequence
  Description of Artificial Sequence: Synthetic oligonucleotide
gggcagccgggugcuggca

SEQ ID NO: 1346308 - RNA, 19 nt, Artificial Sequence
  Description of Artificial Sequence: Synthetic oligonucleotide
cugcgaucugccgcaccuu

SEQ ID NO: 1346309 - RNA, 19 nt, Artificial Sequence
  Description of Artificial Sequence: Synthetic oligonucleotide
cggcaccgucaggaagccg

SEQ ID NO: 1346310 - RNA, 19 nt, Artificial Sequence
  Description of Artificial Sequence: Synthetic oligonucleotide
ccucauaguccggcaccgu

SEQ ID NO: 1346311 - RNA, 19 nt, Artificial Sequence
  Description of Artificial Sequence: Synthetic oligonucleotide
ccccuggaugcccgucucu

SEQ ID NO: 1346312 - RNA, 19 nt, Artificial Sequence
  Description of Artificial Sequence: Synthetic oligonucleotide
cggggcacaccugcccgga

SEQ ID NO: 1346313 - RNA, 19 nt, Artificial Sequence
  Description of Artificial Sequence: Synthetic oligonucleotide
cgcucccguagugggcgcu

SEQ ID NO: 1346314 - RNA, 19 nt, Artificial Sequence
  Description of Artificial Sequence: Synthetic oligonucleotide
aaugauugacuucaggagc

SEQ ID NO: 1346315 - RNA, 19 nt, Artificial Sequence
  Description of Artificial Sequence: Synthetic oligonucleotide
auuaccauacaacugaggc

SEQ ID NO: 1346316 - RNA, 19 nt, Artificial Sequence
  Description of Artificial Sequence: Synthetic oligonucleotide
ugaagacucauacugaugg

SEQ ID NO: 1346317 - RNA, 19 nt, Artificial Sequence
  Description of Artificial Sequence: Synthetic oligonucleotide
aaaaccgucuaauuucucc

SEQ ID NO: 1346318 - RNA, 19 nt, Artificial Sequence
  Description of Artificial Sequence: Synthetic oligonucleotide
aaauauaaauccagaaucc

SEQ ID NO: 1346319 - RNA, 19 nt, Artificial Sequence
  Description of Artificial Sequence: Synthetic oligonucleotide
uguagagauucccagaugg

SEQ ID NO: 1346320 - RNA, 19 nt, Artificial Sequence
  Description of Artificial Sequence: Synthetic oligonucleotide
aauauagaagaaaugaaag

SEQ ID NO: 1346321 - RNA, 19 nt, Artificial Sequence
  Description of Artificial Sequence: Synthetic oligonucleotide
aauauuacauuugugacug

SEQ ID NO: 1346322 - RNA, 19 nt, Artificial Sequence
  Description of Artificial Sequence: Synthetic oligonucleotide
uugcaaucaauuaucaugg

SEQ ID NO: 1346323 - RNA, 19 nt, Artificial Sequence
  Description of Artificial Sequence: Synthetic oligonucleotide
uauuacuacaaaauguacc

SEQ ID NO: 1346324 - RNA, 19 nt, Artificial Sequence
  Description of Artificial Sequence: Synthetic oligonucleotide
aagucuauuucccuccugc

SEQ ID NO: 1346325 - RNA, 19 nt, Artificial Sequence
  Description of Artificial Sequence: Synthetic oligonucleotide
aaugccacaagcaagaucu

SEQ ID NO: 1346326 - RNA, 19 nt, Artificial Sequence
  Description of Artificial Sequence: Synthetic oligonucleotide
uuacauaaagucuauuucc

SEQ ID NO: 1346327 - RNA, 19 nt, Artificial Sequence
  Description of Artificial Sequence: Synthetic oligonucleotide
aguauaugcagucacaaug

SEQ ID NO: 1346328 - RNA, 19 nt, Artificial Sequence
  Description of Artificial Sequence: Synthetic oligonucleotide
auaaagucuauuucccucc

SEQ ID NO: 1346329 - RNA, 19 nt, Artificial Sequence
  Description of Artificial Sequence: Synthetic oligonucleotide
acuacaauagauucaagug

SEQ ID NO: 1346330 - RNA, 19 nt, Artificial Sequence
  Description of Artificial Sequence: Synthetic oligonucleotide
aaaacagccugcuugucuc

SEQ ID NO: 1346331 - RNA, 19 nt, Artificial Sequence
  Description of Artificial Sequence: Synthetic oligonucleotide
aagucaaacaaauuuuaca

SEQ ID NO: 1346332 - RNA, 19 nt, Artificial Sequence
  Description of Artificial Sequence: Synthetic oligonucleotide
cuacaauagauucaagugg

SEQ ID NO: 1346333 - RNA, 19 nt, Artificial Sequence
  Description of Artificial Sequence: Synthetic oligonucleotide
aacauaacaugcuacacaa

SEQ ID NO: 1346334 - RNA, 19 nt, Artificial Sequence
  Description of Artificial Sequence: Synthetic oligonucleotide
uaccauaagcaccagaagc

SEQ ID NO: 1346335 - RNA, 19 nt, Artificial Sequence
  Description of Artificial Sequence: Synthetic oligonucleotide
uguucauugcuccugaaga

SEQ ID NO: 1346336 - RNA, 19 nt, Artificial Sequence
  Description of Artificial Sequence: Synthetic oligonucleotide
gagauuauuacucugaacu

SEQ ID NO: 1346337 - RNA, 19 nt, Artificial Sequence
  Description of Artificial Sequence: Synthetic oligonucleotide
gaugcaucaaaacagccug

SEQ ID NO: 1346338 - RNA, 19 nt, Artificial Sequence
  Description of Artificial Sequence: Synthetic oligonucleotide
aaacaggacaguugcauag

SEQ ID NO: 1346339 - RNA, 19 nt, Artificial Sequence
  Description of Artificial Sequence: Synthetic oligonucleotide
uguuuugauaaccuguuac

SEQ ID NO: 1346340 - RNA, 19 nt, Artificial Sequence
  Description of Artificial Sequence: Synthetic oligonucleotide
caugcuacacaaaacagag

SEQ ID NO: 1346341 - RNA, 19 nt, Artificial Sequence
  Description of Artificial Sequence: Synthetic oligonucleotide
aggauaaugaggcaagguc

SEQ ID NO: 1346342 - RNA, 19 nt, Artificial Sequence
  Description of Artificial Sequence: Synthetic oligonucleotide
uaaccuguuacauaaaguc

SEQ ID NO: 1346343 - RNA, 19 nt, Artificial Sequence
  Description of Artificial Sequence: Synthetic oligonucleotide
gauuauuacucugaacugg

SEQ ID NO: 1346344 - RNA, 19 nt, Artificial Sequence
  Description of Artificial Sequence: Synthetic oligonucleotide
uugauaaccuguuacauaa

SEQ ID NO: 1346345 - RNA, 19 nt, Artificial Sequence
  Description of Artificial Sequence: Synthetic oligonucleotide
agucaaacaaauuuuacaa

SEQ ID NO: 1346346 - RNA, 19 nt, Artificial Sequence
  Description of Artificial Sequence: Synthetic oligonucleotide
uacuucuugcucaagauac

SEQ ID NO: 1346347 - RNA, 19 nt, Artificial Sequence
  Description of Artificial Sequence: Synthetic oligonucleotide
gauucaaguggugaaaggg

SEQ ID NO: 1346348 - RNA, 19 nt, Artificial Sequence
  Description of Artificial Sequence: Synthetic oligonucleotide
uucagugaucugaaaaccg

SEQ ID NO: 1346349 - RNA, 19 nt, Artificial Sequence
  Description of Artificial Sequence: Synthetic oligonucleotide
ucuaacauaacaugcuaca

SEQ ID NO: 1346350 - RNA, 19 nt, Artificial Sequence
  Description of Artificial Sequence: Synthetic oligonucleotide
agucaugaaaagcagaagu

SEQ ID NO: 1346351 - RNA, 19 nt, Artificial Sequence
  Description of Artificial Sequence: Synthetic oligonucleotide
gaauuaucauuguucauug

SEQ ID NO: 1346352 - RNA, 19 nt, Artificial Sequence
  Description of Artificial Sequence: Synthetic oligonucleotide
uacuacaaaauguaccaag

SEQ ID NO: 1346353 - RNA, 19 nt, Artificial Sequence
  Description of Artificial Sequence: Synthetic oligonucleotide
uaauauuacauuugugacu

SEQ ID NO: 1346354 - RNA, 19 nt, Artificial Sequence
  Description of Artificial Sequence: Synthetic oligonucleotide
aaaauguaccaagaaguag

SEQ ID NO: 1346355 - RNA, 19 nt, Artificial Sequence
  Description of Artificial Sequence: Synthetic oligonucleotide
uccaguauggccuggaucu

SEQ ID NO: 1346356 - RNA, 19 nt, Artificial Sequence
  Description of Artificial Sequence: Synthetic oligonucleotide
ucuauuucccuccugcuga

SEQ ID NO: 1346357 - RNA, 19 nt, Artificial Sequence
  Description of Artificial Sequence: Synthetic oligonucleotide
uaacauaacaugcuacaca

SEQ ID NO: 1346358 - RNA, 19 nt, Artificial Sequence
  Description of Artificial Sequence: Synthetic oligonucleotide
uuaccauacaacugaggcg

SEQ ID NO: 1346359 - RNA, 19 nt, Artificial Sequence
  Description of Artificial Sequence: Synthetic oligonucleotide
augguuuauaucuuuaagu

SEQ ID NO: 1346360 - RNA, 19 nt, Artificial Sequence
  Description of Artificial Sequence: Synthetic oligonucleotide
uacugaauuaucauuguuc

SEQ ID NO: 1346361 - RNA, 19 nt, Artificial Sequence
  Description of Artificial Sequence: Synthetic oligonucleotide
agaaucuaguucuaaaagu

SEQ ID NO: 1346362 - RNA, 19 nt, Artificial Sequence
  Description of Artificial Sequence: Synthetic oligonucleotide
ucggauuauguuuugauaa

SEQ ID NO: 1346363 - RNA, 19 nt, Artificial Sequence
  Description of Artificial Sequence: Synthetic oligonucleotide
aagacucauacugauggac

SEQ ID NO: 1346364 - RNA, 19 nt, Artificial Sequence
  Description of Artificial Sequence: Synthetic oligonucleotide
aaguagauaauauuacauu

SEQ ID NO: 1346365 - RNA, 19 nt, Artificial Sequence
  Description of Artificial Sequence: Synthetic oligonucleotide
agaucucuaacauaacaug

SEQ ID NO: 1346366 - RNA, 19 nt, Artificial Sequence
  Description of Artificial Sequence: Synthetic oligonucleotide
accauaagcaccagaagcc

SEQ ID NO: 1346367 - RNA, 19 nt, Artificial Sequence
  Description of Artificial Sequence: Synthetic oligonucleotide
ucugaguucguaccuaucu

SEQ ID NO: 1346368 - RNA, 19 nt, Artificial Sequence
  Description of Artificial Sequence: Synthetic oligonucleotide
agaaguagauaauauuaca

SEQ ID NO: 1346369 - RNA, 19 nt, Artificial Sequence
  Description of Artificial Sequence: Synthetic oligonucleotide
gauaagaagcagccuagag

SEQ ID NO: 1346370 - RNA, 19 nt, Artificial Sequence
  Description of Artificial Sequence: Synthetic oligonucleotide
ugguuauaggaguacgagg

SEQ ID NO: 1346371 - RNA, 19 nt, Artificial Sequence
  Description of Artificial Sequence: Synthetic oligonucleotide
acaccauuugaacaccuac

SEQ ID NO: 1346372 - RNA, 19 nt, Artificial Sequence
  Description of Artificial Sequence: Synthetic oligonucleotide
gguuauaggaguacgaggg

SEQ ID NO: 1346373 - RNA, 19 nt, Artificial Sequence
  Description of Artificial Sequence: Synthetic oligonucleotide
ugguuuauaucuuuaaguu

SEQ ID NO: 1346374 - RNA, 19 nt, Artificial Sequence
  Description of Artificial Sequence: Synthetic oligonucleotide
gaucucuaacauaacaugc

SEQ ID NO: 1346375 - RNA, 19 nt, Artificial Sequence
  Description of Artificial Sequence: Synthetic oligonucleotide
gaagaucucuaacauaaca

SEQ ID NO: 1346376 - RNA, 19 nt, Artificial Sequence
  Description of Artificial Sequence: Synthetic oligonucleotide
agacaggucacuaacauug

SEQ ID NO: 1346377 - RNA, 19 nt, Artificial Sequence
  Description of Artificial Sequence: Synthetic oligonucleotide
uaccauacaacugaggcgu

SEQ ID NO: 1346378 - RNA, 19 nt, Artificial Sequence
  Description of Artificial Sequence: Synthetic oligonucleotide
uucaauaucuugauauaau

SEQ ID NO: 1346379 - RNA, 19 nt, Artificial Sequence
  Description of Artificial Sequence: Synthetic oligonucleotide
ugaaaaccgucuaauuucu

SEQ ID NO: 1346380 - RNA, 19 nt, Artificial Sequence
  Description of Artificial Sequence: Synthetic oligonucleotide
agauuauuacucugaacug

SEQ ID NO: 1346381 - RNA, 19 nt, Artificial Sequence
  Description of Artificial Sequence: Synthetic oligonucleotide
aacagaaucuaguucuaaa

SEQ ID NO: 1346382 - RNA, 19 nt, Artificial Sequence
  Description of Artificial Sequence: Synthetic oligonucleotide
uguauuggacuugagaauc

SEQ ID NO: 1346383 - RNA, 19 nt, Artificial Sequence
  Description of Artificial Sequence: Synthetic oligonucleotide
ugaaguauaugcagucaca

SEQ ID NO: 1346384 - RNA, 19 nt, Artificial Sequence
  Description of Artificial Sequence: Synthetic oligonucleotide
cauaaagucuauuucccuc

SEQ ID NO: 1346385 - RNA, 19 nt, Artificial Sequence
  Description of Artificial Sequence: Synthetic oligonucleotide
auaggaguacgagggaucc

SEQ ID NO: 1346386 - RNA, 19 nt, Artificial Sequence
  Description of Artificial Sequence: Synthetic oligonucleotide
aaucaauuaucaugguuua

SEQ ID NO: 1346387 - RNA, 19 nt, Artificial Sequence
  Description of Artificial Sequence: Synthetic oligonucleotide
aacacaugaaguauaugca

SEQ ID NO: 1346388 - RNA, 19 nt, Artificial Sequence
  Description of Artificial Sequence: Synthetic oligonucleotide
auauuacuacaaaauguac

SEQ ID NO: 1346389 - RNA, 19 nt, Artificial Sequence
  Description of Artificial Sequence: Synthetic oligonucleotide
accuacaguaguaaaugcc

SEQ ID NO: 1346390 - RNA, 19 nt, Artificial Sequence
  Description of Artificial Sequence: Synthetic oligonucleotide
aguaaaugccacaagcaag

SEQ ID NO: 1346391 - RNA, 19 nt, Artificial Sequence
  Description of Artificial Sequence: Synthetic oligonucleotide
auaacaugcuacacaaaac

SEQ ID NO: 1346392 - RNA, 19 nt, Artificial Sequence
  Description of Artificial Sequence: Synthetic oligonucleotide
agauucaaguggugaaagg

SEQ ID NO: 1346393 - RNA, 19 nt, Artificial Sequence
  Description of Artificial Sequence: Synthetic oligonucleotide
aagaucucuaacauaacau

SEQ ID NO: 1346394 - RNA, 19 nt, Artificial Sequence
  Description of Artificial Sequence: Synthetic oligonucleotide
guuaccaucuccauaagga

SEQ ID NO: 1346395 - RNA, 19 nt, Artificial Sequence
  Description of Artificial Sequence: Synthetic oligonucleotide
aguacgagggauccuuggg

SEQ ID NO: 1346396 - RNA, 19 nt, Artificial Sequence
  Description of Artificial Sequence: Synthetic oligonucleotide
gucuagaugcaucaaaaca

SEQ ID NO: 1346397 - RNA, 19 nt, Artificial Sequence
  Description of Artificial Sequence: Synthetic oligonucleotide
gucauguagagauucccag

SEQ ID NO: 1346398 - RNA, 19 nt, Artificial Sequence
  Description of Artificial Sequence: Synthetic oligonucleotide
aaagcugugccgguucacg

SEQ ID NO: 1346399 - RNA, 19 nt, Artificial Sequence
  Description of Artificial Sequence: Synthetic oligonucleotide
cauaacaugcuacacaaaa

SEQ ID NO: 1346400 - RNA, 19 nt, Artificial Sequence
  Description of Artificial Sequence: Synthetic oligonucleotide
  modified_base (19)..(19): a, c, u, g, unknown or other
uauaugcagucacaaugcn

SEQ ID NO: 1346401 - RNA, 19 nt, Artificial Sequence
  Description of Artificial Sequence: Synthetic oligonucleotide
acgguuaccaucuccauaa

SEQ ID NO: 1346402 - RNA, 19 nt, Artificial Sequence
  Description of Artificial Sequence: Synthetic oligonucleotide
guauaugcagucacaaugc

SEQ ID NO: 1346403 - RNA, 19 nt, Artificial Sequence
  Description of Artificial Sequence: Synthetic oligonucleotide
aguugcauagucaugaaaa

SEQ ID NO: 1346404 - RNA, 19 nt, Artificial Sequence
  Description of Artificial Sequence: Synthetic oligonucleotide
uccccauaccauaagcacc

SEQ ID NO: 1346405 - RNA, 19 nt, Artificial Sequence
  Description of Artificial Sequence: Synthetic oligonucleotide
uuugauaaccuguuacaua

SEQ ID NO: 1346406 - RNA, 19 nt, Artificial Sequence
  Description of Artificial Sequence: Synthetic oligonucleotide
cugcugauaagaagcagcc

SEQ ID NO: 1346407 - RNA, 19 nt, Artificial Sequence
  Description of Artificial Sequence: Synthetic oligonucleotide
uauuacucugaacuggauu

SEQ ID NO: 1346408 - RNA, 19 nt, Artificial Sequence
  Description of Artificial Sequence: Synthetic oligonucleotide
aaccgucuaauuucuccag

SEQ ID NO: 1346409 - RNA, 19 nt, Artificial Sequence
  Description of Artificial Sequence: Synthetic oligonucleotide
cuggaucuuacagacagcc

SEQ ID NO: 1346410 - RNA, 19 nt, Artificial Sequence
  Description of Artificial Sequence: Synthetic oligonucleotide
ugacagucuagaugcauca

SEQ ID NO: 1346411 - RNA, 19 nt, Artificial Sequence
  Description of Artificial Sequence: Synthetic oligonucleotide
uacaguaguaaaugccaca

SEQ ID NO: 1346412 - RNA, 19 nt, Artificial Sequence
  Description of Artificial Sequence: Synthetic oligonucleotide
uccaguuauuaaauauaga

SEQ ID NO: 1346413 - RNA, 19 nt, Artificial Sequence
  Description of Artificial Sequence: Synthetic oligonucleotide
ucugucauguagagauucc

SEQ ID NO: 1346414 - RNA, 19 nt, Artificial Sequence
  Description of Artificial Sequence: Synthetic oligonucleotide
uuuugauaaccuguuacau

SEQ ID NO: 1346415 - RNA, 19 nt, Artificial Sequence
  Description of Artificial Sequence: Synthetic oligonucleotide
uauaggaguacgagggauc

SEQ ID NO: 1346416 - RNA, 19 nt, Artificial Sequence
  Description of Artificial Sequence: Synthetic oligonucleotide
uucaaguggugaaagggua

SEQ ID NO: 1346417 - RNA, 19 nt, Artificial Sequence
  Description of Artificial Sequence: Synthetic oligonucleotide
aaacagccugcuugucucg

SEQ ID NO: 1346418 - RNA, 19 nt, Artificial Sequence
  Description of Artificial Sequence: Synthetic oligonucleotide
guaaaugccacaagcaaga

SEQ ID NO: 1346419 - RNA, 19 nt, Artificial Sequence
  Description of Artificial Sequence: Synthetic oligonucleotide
acaccuacaguaguaaaug

SEQ ID NO: 1346420 - RNA, 19 nt, Artificial Sequence
  Description of Artificial Sequence: Synthetic oligonucleotide
agccuagagaugcccaugg

SEQ ID NO: 1346421 - RNA, 19 nt, Artificial Sequence
  Description of Artificial Sequence: Synthetic oligonucleotide
  modified_base (18)..(18): a, c, u, g, unknown or other
auaugcagucacaaugcnc

SEQ ID NO: 1346422 - RNA, 19 nt, Artificial Sequence
  Description of Artificial Sequence: Synthetic oligonucleotide
aaagucuauuucccuccug

SEQ ID NO: 1346423 - RNA, 19 nt, Artificial Sequence
  Description of Artificial Sequence: Synthetic oligonucleotide
uugaacaccuacaguagua

SEQ ID NO: 1346424 - RNA, 19 nt, Artificial Sequence
  Description of Artificial Sequence: Synthetic oligonucleotide
uguggcacaguacgguuac

SEQ ID NO: 1346425 - RNA, 19 nt, Artificial Sequence
  Description of Artificial Sequence: Synthetic oligonucleotide
aacaccuacaguaguaaau

SEQ ID NO: 1346426 - RNA, 19 nt, Artificial Sequence
  Description of Artificial Sequence: Synthetic oligonucleotide
ucagggagauuauuacucu

SEQ ID NO: 1346427 - RNA, 19 nt, Artificial Sequence
  Description of Artificial Sequence: Synthetic oligonucleotide
gacugguuauaggaguacg

SEQ ID NO: 1346428 - RNA, 19 nt, Artificial Sequence
  Description of Artificial Sequence: Synthetic oligonucleotide
aguuucaacagaaucuagu

SEQ ID NO: 1346429 - RNA, 19 nt, Artificial Sequence
  Description of Artificial Sequence: Synthetic oligonucleotide
auagucaugaaaagcagaa

SEQ ID NO: 1346430 - RNA, 19 nt, Artificial Sequence
  Description of Artificial Sequence: Synthetic oligonucleotide
uuaucuggcugccaguauu

SEQ ID NO: 1346431 - RNA, 19 nt, Artificial Sequence
  Description of Artificial Sequence: Synthetic oligonucleotide
aaggauaaugaggcaaggu

SEQ ID NO: 1346432 - RNA, 19 nt, Artificial Sequence
  Description of Artificial Sequence: Synthetic oligonucleotide
ucacgcuuuggcccgacug

SEQ ID NO: 1346433 - RNA, 19 nt, Artificial Sequence
  Description of Artificial Sequence: Synthetic oligonucleotide
auacaacugaggcgucagc

SEQ ID NO: 1346434 - RNA, 19 nt, Artificial Sequence
  Description of Artificial Sequence: Synthetic oligonucleotide
caaucaauuaucaugguuu

SEQ ID NO: 1346435 - RNA, 19 nt, Artificial Sequence
  Description of Artificial Sequence: Synthetic oligonucleotide
agcagaagugggaagaucu

SEQ ID NO: 1346436 - RNA, 19 nt, Artificial Sequence
  Description of Artificial Sequence: Synthetic oligonucleotide
guacaguugcuccuguggc

SEQ ID NO: 1346437 - RNA, 19 nt, Artificial Sequence
  Description of Artificial Sequence: Synthetic oligonucleotide
auacugauggacacugcac

SEQ ID NO: 1346438 - RNA, 19 nt, Artificial Sequence
  Description of Artificial Sequence: Synthetic oligonucleotide
uucguaccuaucuucaaua

SEQ ID NO: 1346439 - RNA, 19 nt, Artificial Sequence
  Description of Artificial Sequence: Synthetic oligonucleotide
cuaacauaacaugcuacac

SEQ ID NO: 1346440 - RNA, 19 nt, Artificial Sequence
  Description of Artificial Sequence: Synthetic oligonucleotide
gaguacgagggauccuugg

SEQ ID NO: 1346441 - RNA, 19 nt, Artificial Sequence
  Description of Artificial Sequence: Synthetic oligonucleotide
uuaccaucuccauaaggau

SEQ ID NO: 1346442 - RNA, 19 nt, Artificial Sequence
  Description of Artificial Sequence: Synthetic oligonucleotide
gguaauacugauaauucca

SEQ ID NO: 1346443 - RNA, 19 nt, Artificial Sequence
  Description of Artificial Sequence: Synthetic oligonucleotide
ugcucaagauacugaaccu

SEQ ID NO: 1346444 - RNA, 19 nt, Artificial Sequence
  Description of Artificial Sequence: Synthetic oligonucleotide
ucucggauuauguuuugau

SEQ ID NO: 1346445 - RNA, 19 nt, Artificial Sequence
  Description of Artificial Sequence: Synthetic oligonucleotide
uaaagucuauuucccuccu

SEQ ID NO: 1346446 - RNA, 19 nt, Artificial Sequence
  Description of Artificial Sequence: Synthetic oligonucleotide
gguuuauaucuuuaaguuc

SEQ ID NO: 1346447 - RNA, 19 nt, Artificial Sequence
  Description of Artificial Sequence: Synthetic oligonucleotide
cugguuauaggaguacgag

SEQ ID NO: 1346448 - RNA, 19 nt, Artificial Sequence
  Description of Artificial Sequence: Synthetic oligonucleotide
uaaugaggcaaggucaauc

SEQ ID NO: 1346449 - RNA, 19 nt, Artificial Sequence
  Description of Artificial Sequence: Synthetic oligonucleotide
accuaucuucaauaucuug

SEQ ID NO: 1346450 - RNA, 19 nt, Artificial Sequence
  Description of Artificial Sequence: Synthetic oligonucleotide
uuauaggaguacgagggau

SEQ ID NO: 1346451 - RNA, 19 nt, Artificial Sequence
  Description of Artificial Sequence: Synthetic oligonucleotide
gaaguauaugcagucacaa

SEQ ID NO: 1346452 - RNA, 19 nt, Artificial Sequence
  Description of Artificial Sequence: Synthetic oligonucleotide
ugaggcgucagcacuguau

SEQ ID NO: 1346453 - RNA, 19 nt, Artificial Sequence
  Description of Artificial Sequence: Synthetic oligonucleotide
uggccauuugcaaucaauu

SEQ ID NO: 1346454 - RNA, 19 nt, Artificial Sequence
  Description of Artificial Sequence: Synthetic oligonucleotide
auuucccuccugcugauaa

SEQ ID NO: 1346455 - RNA, 19 nt, Artificial Sequence
  Description of Artificial Sequence: Synthetic oligonucleotide
uagucaugaaaagcagaag

SEQ ID NO: 1346456 - RNA, 19 nt, Artificial Sequence
  Description of Artificial Sequence: Synthetic oligonucleotide
aggucacuaacauugcuuu

SEQ ID NO: 1346457 - RNA, 19 nt, Artificial Sequence
  Description of Artificial Sequence: Synthetic oligonucleotide
aauguaccaagaaguagau

SEQ ID NO: 1346458 - RNA, 19 nt, Artificial Sequence
  Description of Artificial Sequence: Synthetic oligonucleotide
aagcagaagugggaagauc

SEQ ID NO: 1346459 - RNA, 19 nt, Artificial Sequence
  Description of Artificial Sequence: Synthetic oligonucleotide
uuuaaguucugaguucgua

SEQ ID NO: 1346460 - RNA, 19 nt, Artificial Sequence
  Description of Artificial Sequence: Synthetic oligonucleotide
gaggcaaggucaaucccgg

SEQ ID NO: 1346461 - RNA, 19 nt, Artificial Sequence
  Description of Artificial Sequence: Synthetic oligonucleotide
ugccgguucacgcuuuggc

SEQ ID NO: 1346462 - RNA, 19 nt, Artificial Sequence
  Description of Artificial Sequence: Synthetic oligonucleotide
ugauggacacugcacggaa

SEQ ID NO: 1346463 - RNA, 19 nt, Artificial Sequence
  Description of Artificial Sequence: Synthetic oligonucleotide
gguuaccaucuccauaagg

SEQ ID NO: 1346464 - RNA, 19 nt, Artificial Sequence
  Description of Artificial Sequence: Synthetic oligonucleotide
acaugcuacacaaaacaga

SEQ ID NO: 1346465 - RNA, 19 nt, Artificial Sequence
  Description of Artificial Sequence: Synthetic oligonucleotide
cauuugcaaucaauuauca

SEQ ID NO: 1346466 - RNA, 19 nt, Artificial Sequence
  Description of Artificial Sequence: Synthetic oligonucleotide
agaugcaucaaaacagccu

SEQ ID NO: 1346467 - RNA, 19 nt, Artificial Sequence
  Description of Artificial Sequence: Synthetic oligonucleotide
caccuacaguaguaaaugc

SEQ ID NO: 1346468 - RNA, 19 nt, Artificial Sequence
  Description of Artificial Sequence: Synthetic oligonucleotide
ugcuugucucggauuaugu

SEQ ID NO: 1346469 - RNA, 19 nt, Artificial Sequence
  Description of Artificial Sequence: Synthetic oligonucleotide
ugaacaccuacaguaguaa

SEQ ID NO: 1346470 - RNA, 19 nt, Artificial Sequence
  Description of Artificial Sequence: Synthetic oligonucleotide
gauaaugaggcaaggucaa

SEQ ID NO: 1346471 - RNA, 19 nt, Artificial Sequence
  Description of Artificial Sequence: Synthetic oligonucleotide
cacgcuuuggcccgacugg

SEQ ID NO: 1346472 - RNA, 19 nt, Artificial Sequence
  Description of Artificial Sequence: Synthetic oligonucleotide
guccccauaccauaagcac

SEQ ID NO: 1346473 - RNA, 19 nt, Artificial Sequence
  Description of Artificial Sequence: Synthetic oligonucleotide
uauuggacuugagaaucca

SEQ ID NO: 1346474 - RNA, 19 nt, Artificial Sequence
  Description of Artificial Sequence: Synthetic oligonucleotide
cacaagcaagaucugccag

SEQ ID NO: 1346475 - RNA, 19 nt, Artificial Sequence
  Description of Artificial Sequence: Synthetic oligonucleotide
guggucguacaguugcucc

SEQ ID NO: 1346476 - RNA, 19 nt, Artificial Sequence
  Description of Artificial Sequence: Synthetic oligonucleotide
aguauggccuggaucuuac

SEQ ID NO: 1346477 - RNA, 19 nt, Artificial Sequence
  Description of Artificial Sequence: Synthetic oligonucleotide
guaacggguccccauacca

SEQ ID NO: 1346478 - RNA, 19 nt, Artificial Sequence
  Description of Artificial Sequence: Synthetic oligonucleotide
uuacucugaacuggauugc

SEQ ID NO: 1346479 - RNA, 19 nt, Artificial Sequence
  Description of Artificial Sequence: Synthetic oligonucleotide
cacuacaauagauucaagu

SEQ ID NO: 1346480 - RNA, 19 nt, Artificial Sequence
  Description of Artificial Sequence: Synthetic oligonucleotide
ggauaaugaggcaagguca

SEQ ID NO: 1346481 - RNA, 19 nt, Artificial Sequence
  Description of Artificial Sequence: Synthetic oligonucleotide
uaccaagaaguagauaaua

SEQ ID NO: 1346482 - RNA, 19 nt, Artificial Sequence
  Description of Artificial Sequence: Synthetic oligonucleotide
ccauuugcaaucaauuauc

SEQ ID NO: 1346483 - RNA, 19 nt, Artificial Sequence
  Description of Artificial Sequence: Synthetic oligonucleotide
agugggucuacuugguaau

SEQ ID NO: 1346484 - RNA, 19 nt, Artificial Sequence
  Description of Artificial Sequence: Synthetic oligonucleotide
aucaucuuguggucguaca

SEQ ID NO: 1346485 - RNA, 19 nt, Artificial Sequence
  Description of Artificial Sequence: Synthetic oligonucleotide
uacuuggagguguaccuuc

SEQ ID NO: 1346486 - RNA, 19 nt, Artificial Sequence
  Description of Artificial Sequence: Synthetic oligonucleotide
gaaucuaguucuaaaaguu

SEQ ID NO: 1346487 - RNA, 19 nt, Artificial Sequence
  Description of Artificial Sequence: Synthetic oligonucleotide
cauacaacugaggcgucag

SEQ ID NO: 1346488 - RNA, 19 nt, Artificial Sequence
  Description of Artificial Sequence: Synthetic oligonucleotide
auagauucaaguggugaaa

SEQ ID NO: 1346489 - RNA, 19 nt, Artificial Sequence
  Description of Artificial Sequence: Synthetic oligonucleotide
agcagaaacaggacaguug

SEQ ID NO: 1346490 - RNA, 19 nt, Artificial Sequence
  Description of Artificial Sequence: Synthetic oligonucleotide
agucuauuucccuccugcu

SEQ ID NO: 1346491 - RNA, 19 nt, Artificial Sequence
  Description of Artificial Sequence: Synthetic oligonucleotide
gagguguaccuucaccuga

SEQ ID NO: 1346492 - RNA, 19 nt, Artificial Sequence
  Description of Artificial Sequence: Synthetic oligonucleotide
agcaccagaagcccaugca

SEQ ID NO: 1346493 - RNA, 19 nt, Artificial Sequence
  Description of Artificial Sequence: Synthetic oligonucleotide
cuucaggagcucacuacac

SEQ ID NO: 1346494 - RNA, 19 nt, Artificial Sequence
  Description of Artificial Sequence: Synthetic oligonucleotide
auuugugacugcagauaac

SEQ ID NO: 1346495 - RNA, 19 nt, Artificial Sequence
  Description of Artificial Sequence: Synthetic oligonucleotide
uacgguuaccaucuccaua

SEQ ID NO: 1346496 - RNA, 19 nt, Artificial Sequence
  Description of Artificial Sequence: Synthetic oligonucleotide
cugcccauuuaucuggcug

SEQ ID NO: 1346497 - RNA, 19 nt, Artificial Sequence
  Description of Artificial Sequence: Synthetic oligonucleotide
ggauccuuggguuguuggg

SEQ ID NO: 1346498 - RNA, 19 nt, Artificial Sequence
  Description of Artificial Sequence: Synthetic oligonucleotide
aacggguccccauaccaua

SEQ ID NO: 1346499 - RNA, 19 nt, Artificial Sequence
  Description of Artificial Sequence: Synthetic oligonucleotide
ugauaagaagcagccuaga

SEQ ID NO: 1346500 - RNA, 19 nt, Artificial Sequence
  Description of Artificial Sequence: Synthetic oligonucleotide
gaagacucauacugaugga

SEQ ID NO: 1346501 - RNA, 19 nt, Artificial Sequence
  Description of Artificial Sequence: Synthetic oligonucleotide
uguugccaggccaggguga

SEQ ID NO: 1346502 - RNA, 19 nt, Artificial Sequence
  Description of Artificial Sequence: Synthetic oligonucleotide
auguagagauucccagaug

SEQ ID NO: 1346503 - RNA, 19 nt, Artificial Sequence
  Description of Artificial Sequence: Synthetic oligonucleotide
caguuucaacagaaucuag

SEQ ID NO: 1346504 - RNA, 19 nt, Artificial Sequence
  Description of Artificial Sequence: Synthetic oligonucleotide
gugaaaggguaugaauuug

SEQ ID NO: 1346505 - RNA, 19 nt, Artificial Sequence
  Description of Artificial Sequence: Synthetic oligonucleotide
  modified_base (14)..(14): a, c, u, g, unknown or other
gcagucacaaugcncaaaa

SEQ ID NO: 1346506 - RNA, 19 nt, Artificial Sequence
  Description of Artificial Sequence: Synthetic oligonucleotide
gcugauaagaagcagccua

SEQ ID NO: 1346507 - RNA, 19 nt, Artificial Sequence
  Description of Artificial Sequence: Synthetic oligonucleotide
caccauuugaacaccuaca

SEQ ID NO: 1346508 - RNA, 19 nt, Artificial Sequence
  Description of Artificial Sequence: Synthetic oligonucleotide
cacaguacgguuaccaucu

SEQ ID NO: 1346509 - RNA, 19 nt, Artificial Sequence
  Description of Artificial Sequence: Synthetic oligonucleotide
cagggagauuauuacucug

SEQ ID NO: 1346510 - RNA, 19 nt, Artificial Sequence
  Description of Artificial Sequence: Synthetic oligonucleotide
ccuacaguaguaaaugcca

SEQ ID NO: 1346511 - RNA, 19 nt, Artificial Sequence
  Description of Artificial Sequence: Synthetic oligonucleotide
ggcgucagcacuguauugg

SEQ ID NO: 1346512 - RNA, 19 nt, Artificial Sequence
  Description of Artificial Sequence: Synthetic oligonucleotide
ucguaccuaucuucaauau

SEQ ID NO: 1346513 - RNA, 19 nt, Artificial Sequence
  Description of Artificial Sequence: Synthetic oligonucleotide
uaucuggcugccaguauuu

SEQ ID NO: 1346514 - RNA, 19 nt, Artificial Sequence
  Description of Artificial Sequence: Synthetic oligonucleotide
uggucguacaguugcuccu

SEQ ID NO: 1346515 - RNA, 19 nt, Artificial Sequence
  Description of Artificial Sequence: Synthetic oligonucleotide
cugaaggccagggguaacg

SEQ ID NO: 1346516 - RNA, 19 nt, Artificial Sequence
  Description of Artificial Sequence: Synthetic oligonucleotide
ugcaaucaauuaucauggu

SEQ ID NO: 1346517 - RNA, 19 nt, Artificial Sequence
  Description of Artificial Sequence: Synthetic oligonucleotide
guuauaggaguacgaggga

SEQ ID NO: 1346518 - RNA, 19 nt, Artificial Sequence
  Description of Artificial Sequence: Synthetic oligonucleotide
agggagauuauuacucuga

SEQ ID NO: 1346519 - RNA, 19 nt, Artificial Sequence
  Description of Artificial Sequence: Synthetic oligonucleotide
caguaguaaaugccacaag

SEQ ID NO: 1346520 - RNA, 19 nt, Artificial Sequence
  Description of Artificial Sequence: Synthetic oligonucleotide
guauuggacuugagaaucc

SEQ ID NO: 1346521 - RNA, 19 nt, Artificial Sequence
  Description of Artificial Sequence: Synthetic oligonucleotide
caguacgguuaccaucucc

SEQ ID NO: 1346522 - RNA, 19 nt, Artificial Sequence
  Description of Artificial Sequence: Synthetic oligonucleotide
gauaacacaugaaguauau

SEQ ID NO: 1346523 - RNA, 19 nt, Artificial Sequence
  Description of Artificial Sequence: Synthetic oligonucleotide
gaguucguaccuaucuuca

SEQ ID NO: 1346524 - RNA, 19 nt, Artificial Sequence
  Description of Artificial Sequence: Synthetic oligonucleotide
ugggucuacuugguaauac

SEQ ID NO: 1346525 - RNA, 19 nt, Artificial Sequence
  Description of Artificial Sequence: Synthetic oligonucleotide
uacgagggauccuuggguu

SEQ ID NO: 1346526 - RNA, 19 nt, Artificial Sequence
  Description of Artificial Sequence: Synthetic oligonucleotide
uacaccauuugaacaccua

SEQ ID NO: 1346527 - RNA, 19 nt, Artificial Sequence
  Description of Artificial Sequence: Synthetic oligonucleotide
agcacuguauuggacuuga

SEQ ID NO: 1346528 - RNA, 19 nt, Artificial Sequence
  Description of Artificial Sequence: Synthetic oligonucleotide
agauaacacaugaaguaua

SEQ ID NO: 1346529 - RNA, 19 nt, Artificial Sequence
  Description of Artificial Sequence: Synthetic oligonucleotide
caaguggugaaaggguaug

SEQ ID NO: 1346530 - RNA, 19 nt, Artificial Sequence
  Description of Artificial Sequence: Synthetic oligonucleotide
accgucuaauuucuccagu

SEQ ID NO: 1346531 - RNA, 19 nt, Artificial Sequence
  Description of Artificial Sequence: Synthetic oligonucleotide
ugugacagucuagaugcau

SEQ ID NO: 1346532 - RNA, 19 nt, Artificial Sequence
  Description of Artificial Sequence: Synthetic oligonucleotide
aguaugcuuugucugucuu

SEQ ID NO: 1346533 - RNA, 19 nt, Artificial Sequence
  Description of Artificial Sequence: Synthetic oligonucleotide
cauaagcaccagaagccca

SEQ ID NO: 1346534 - RNA, 19 nt, Artificial Sequence
  Description of Artificial Sequence: Synthetic oligonucleotide
uggccugacggacggaguc

SEQ ID NO: 1346535 - RNA, 19 nt, Artificial Sequence
  Description of Artificial Sequence: Synthetic oligonucleotide
gaacaccuacaguaguaaa

SEQ ID NO: 1346536 - RNA, 19 nt, Artificial Sequence
  Description of Artificial Sequence: Synthetic oligonucleotide
cugacggacggaguccugg

SEQ ID NO: 1346537 - RNA, 19 nt, Artificial Sequence
  Description of Artificial Sequence: Synthetic oligonucleotide
ggucuacuugguaauacug

SEQ ID NO: 1346538 - RNA, 19 nt, Artificial Sequence
  Description of Artificial Sequence: Synthetic oligonucleotide
cauuguucauugcuccuga

SEQ ID NO: 1346539 - RNA, 19 nt, Artificial Sequence
  Description of Artificial Sequence: Synthetic oligonucleotide
uccuguggcacaguacggu

SEQ ID NO: 1346540 - RNA, 19 nt, Artificial Sequence
  Description of Artificial Sequence: Synthetic oligonucleotide
ugacggacggaguccuggc

SEQ ID NO: 1346541 - RNA, 19 nt, Artificial Sequence
  Description of Artificial Sequence: Synthetic oligonucleotide
cuggauugcuggcaugguc

SEQ ID NO: 1346542 - RNA, 19 nt, Artificial Sequence
  Description of Artificial Sequence: Synthetic oligonucleotide
acaauagauucaaguggug

SEQ ID NO: 1346543 - RNA, 19 nt, Artificial Sequence
  Description of Artificial Sequence: Synthetic oligonucleotide
aguucguaccuaucuucaa

SEQ ID NO: 1346544 - RNA, 19 nt, Artificial Sequence
  Description of Artificial Sequence: Synthetic oligonucleotide
uucugaguucguaccuauc

SEQ ID NO: 1346545 - RNA, 19 nt, Artificial Sequence
  Description of Artificial Sequence: Synthetic oligonucleotide
gauugacuucaggagcuca

SEQ ID NO: 1346546 - RNA, 19 nt, Artificial Sequence
  Description of Artificial Sequence: Synthetic oligonucleotide
uaccuaucuucaauaucuu

SEQ ID NO: 1346547 - RNA, 19 nt, Artificial Sequence
  Description of Artificial Sequence: Synthetic oligonucleotide
ucguacaguugcuccugug

SEQ ID NO: 1346548 - RNA, 19 nt, Artificial Sequence
  Description of Artificial Sequence: Synthetic oligonucleotide
auguuuugauaaccuguua

SEQ ID NO: 1346549 - RNA, 19 nt, Artificial Sequence
  Description of Artificial Sequence: Synthetic oligonucleotide
cucggauuauguuuugaua

SEQ ID NO: 1346550 - RNA, 19 nt, Artificial Sequence
  Description of Artificial Sequence: Synthetic oligonucleotide
ucuuacagacagccucuuu

SEQ ID NO: 1346551 - RNA, 19 nt, Artificial Sequence
  Description of Artificial Sequence: Synthetic oligonucleotide
gugacagucuagaugcauc

SEQ ID NO: 1346552 - RNA, 19 nt, Artificial Sequence
  Description of Artificial Sequence: Synthetic oligonucleotide
gacggacggaguccuggcc

SEQ ID NO: 1346553 - RNA, 19 nt, Artificial Sequence
  Description of Artificial Sequence: Synthetic oligonucleotide
uuguggucguacaguugcu

SEQ ID NO: 1346554 - RNA, 19 nt, Artificial Sequence
  Description of Artificial Sequence: Synthetic oligonucleotide
gagauucccagauggugcu

SEQ ID NO: 1346555 - RNA, 19 nt, Artificial Sequence
  Description of Artificial Sequence: Synthetic oligonucleotide
auaagcaccagaagcccau

SEQ ID NO: 1346556 - RNA, 19 nt, Artificial Sequence
  Description of Artificial Sequence: Synthetic oligonucleotide
caggacaguugcauaguca

SEQ ID NO: 1346557 - RNA, 19 nt, Artificial Sequence
  Description of Artificial Sequence: Synthetic oligonucleotide
uguggucguacaguugcuc

SEQ ID NO: 1346558 - RNA, 19 nt, Artificial Sequence
  Description of Artificial Sequence: Synthetic oligonucleotide
ggagguguaccuucaccug

SEQ ID NO: 1346559 - RNA, 19 nt, Artificial Sequence
  Description of Artificial Sequence: Synthetic oligonucleotide
ugcugauaagaagcagccu

SEQ ID NO: 1346560 - RNA, 19 nt, Artificial Sequence
  Description of Artificial Sequence: Synthetic oligonucleotide
acaguugcauagucaugaa

SEQ ID NO: 1346561 - RNA, 19 nt, Artificial Sequence
  Description of Artificial Sequence: Synthetic oligonucleotide
gaucuuacagacagccucu

SEQ ID NO: 1346562 - RNA, 19 nt, Artificial Sequence
  Description of Artificial Sequence: Synthetic oligonucleotide
acaguacgguuaccaucuc

SEQ ID NO: 1346563 - RNA, 19 nt, Artificial Sequence
  Description of Artificial Sequence: Synthetic oligonucleotide
caagcaagaucugccagga

SEQ ID NO: 1346564 - RNA, 19 nt, Artificial Sequence
  Description of Artificial Sequence: Synthetic oligonucleotide
aggaguacgagggauccuu

SEQ ID NO: 1346565 - RNA, 19 nt, Artificial Sequence
  Description of Artificial Sequence: Synthetic oligonucleotide
auuguucauugcuccugaa

SEQ ID NO: 1346566 - RNA, 19 nt, Artificial Sequence
  Description of Artificial Sequence: Synthetic oligonucleotide
ccgguucacgcuuuggccc

SEQ ID NO: 1346567 - RNA, 19 nt, Artificial Sequence
  Description of Artificial Sequence: Synthetic oligonucleotide
cuacuucuugcucaagaua

SEQ ID NO: 1346568 - RNA, 19 nt, Artificial Sequence
  Description of Artificial Sequence: Synthetic oligonucleotide
aucaauuaucaugguuuau

SEQ ID NO: 1346569 - RNA, 19 nt, Artificial Sequence
  Description of Artificial Sequence: Synthetic oligonucleotide
guggugaaggagguugcug

SEQ ID NO: 1346570 - RNA, 19 nt, Artificial Sequence
  Description of Artificial Sequence: Synthetic oligonucleotide
uuguucagaacugcccauu

SEQ ID NO: 1346571 - RNA, 19 nt, Artificial Sequence
  Description of Artificial Sequence: Synthetic oligonucleotide
ucccuccugcugauaagaa

SEQ ID NO: 1346572 - RNA, 19 nt, Artificial Sequence
  Description of Artificial Sequence: Synthetic oligonucleotide
uuggcccgacugguuauag

SEQ ID NO: 1346573 - RNA, 19 nt, Artificial Sequence
  Description of Artificial Sequence: Synthetic oligonucleotide
aggcgucagcacuguauug

SEQ ID NO: 1346574 - RNA, 19 nt, Artificial Sequence
  Description of Artificial Sequence: Synthetic oligonucleotide
gguaacggguccccauacc

SEQ ID NO: 1346575 - RNA, 19 nt, Artificial Sequence
  Description of Artificial Sequence: Synthetic oligonucleotide
auacaccauuugaacaccu

SEQ ID NO: 1346576 - RNA, 19 nt, Artificial Sequence
  Description of Artificial Sequence: Synthetic oligonucleotide
gccauuugcaaucaauuau

SEQ ID NO: 1346577 - RNA, 19 nt, Artificial Sequence
  Description of Artificial Sequence: Synthetic oligonucleotide
gccgguucacgcuuuggcc

SEQ ID NO: 1346578 - RNA, 19 nt, Artificial Sequence
  Description of Artificial Sequence: Synthetic oligonucleotide
ccauaagcaccagaagccc

SEQ ID NO: 1346579 - RNA, 19 nt, Artificial Sequence
  Description of Artificial Sequence: Synthetic oligonucleotide
ggguccccauaccauaagc

SEQ ID NO: 1346580 - RNA, 19 nt, Artificial Sequence
  Description of Artificial Sequence: Synthetic oligonucleotide
ugauugacuucaggagcuc

SEQ ID NO: 1346581 - RNA, 19 nt, Artificial Sequence
  Description of Artificial Sequence: Synthetic oligonucleotide
guacgagggauccuugggu

SEQ ID NO: 1346582 - RNA, 19 nt, Artificial Sequence
  Description of Artificial Sequence: Synthetic oligonucleotide
gaaagcugugccgguucac

SEQ ID NO: 1346583 - RNA, 19 nt, Artificial Sequence
  Description of Artificial Sequence: Synthetic oligonucleotide
caggagaggcaaauucuaa

SEQ ID NO: 1346584 - RNA, 19 nt, Artificial Sequence
  Description of Artificial Sequence: Synthetic oligonucleotide
cuguauuggacuugagaau

SEQ ID NO: 1346585 - RNA, 19 nt, Artificial Sequence
  Description of Artificial Sequence: Synthetic oligonucleotide
gguacugaauuaucauugu

SEQ ID NO: 1346586 - RNA, 19 nt, Artificial Sequence
  Description of Artificial Sequence: Synthetic oligonucleotide
agggguaacggguccccau

SEQ ID NO: 1346587 - RNA, 19 nt, Artificial Sequence
  Description of Artificial Sequence: Synthetic oligonucleotide
ggccauuugcaaucaauua

SEQ ID NO: 1346588 - RNA, 19 nt, Artificial Sequence
  Description of Artificial Sequence: Synthetic oligonucleotide
ccucuuuucuggccugacg

SEQ ID NO: 1346589 - RNA, 19 nt, Artificial Sequence
  Description of Artificial Sequence: Synthetic oligonucleotide
auaaugaggcaaggucaau

SEQ ID NO: 1346590 - RNA, 19 nt, Artificial Sequence
  Description of Artificial Sequence: Synthetic oligonucleotide
uucacgcuuuggcccgacu

SEQ ID NO: 1346591 - RNA, 19 nt, Artificial Sequence
  Description of Artificial Sequence: Synthetic oligonucleotide
ccccauaccauaagcacca

SEQ ID NO: 1346592 - RNA, 19 nt, Artificial Sequence
  Description of Artificial Sequence: Synthetic oligonucleotide
cugauaauuccaguuuccu

SEQ ID NO: 1346593 - RNA, 19 nt, Artificial Sequence
  Description of Artificial Sequence: Synthetic oligonucleotide
gaaaggguaugaauuuguu

SEQ ID NO: 1346594 - RNA, 19 nt, Artificial Sequence
  Description of Artificial Sequence: Synthetic oligonucleotide
ggagaacuguugccaggcc

SEQ ID NO: 1346595 - RNA, 19 nt, Artificial Sequence
  Description of Artificial Sequence: Synthetic oligonucleotide
gaggcgucagcacuguauu

SEQ ID NO: 1346596 - RNA, 19 nt, Artificial Sequence
  Description of Artificial Sequence: Synthetic oligonucleotide
gauggacacugcacggaaa

SEQ ID NO: 1346597 - RNA, 19 nt, Artificial Sequence
  Description of Artificial Sequence: Synthetic oligonucleotide
gacagucuagaugcaucaa

SEQ ID NO: 1346598 - RNA, 19 nt, Artificial Sequence
  Description of Artificial Sequence: Synthetic oligonucleotide
cauuuaucuggcugccagu

SEQ ID NO: 1346599 - RNA, 19 nt, Artificial Sequence
  Description of Artificial Sequence: Synthetic oligonucleotide
gcaaucaauuaucaugguu

SEQ ID NO: 1346600 - RNA, 19 nt, Artificial Sequence
  Description of Artificial Sequence: Synthetic oligonucleotide
ggaagaucucuaacauaac

SEQ ID NO: 1346601 - RNA, 19 nt, Artificial Sequence
  Description of Artificial Sequence: Synthetic oligonucleotide
cccauggauuucuucagga

SEQ ID NO: 1346602 - RNA, 19 nt, Artificial Sequence
  Description of Artificial Sequence: Synthetic oligonucleotide
cguaccuaucuucaauauc

SEQ ID NO: 1346603 - RNA, 19 nt, Artificial Sequence
  Description of Artificial Sequence: Synthetic oligonucleotide
ggcugccaguauuugauua

SEQ ID NO: 1346604 - RNA, 19 nt, Artificial Sequence
  Description of Artificial Sequence: Synthetic oligonucleotide
gucucggauuauguuuuga

SEQ ID NO: 1346605 - RNA, 19 nt, Artificial Sequence
  Description of Artificial Sequence: Synthetic oligonucleotide
uuuggcccgacugguuaua

SEQ ID NO: 1346606 - RNA, 19 nt, Artificial Sequence
  Description of Artificial Sequence: Synthetic oligonucleotide
ggguaacggguccccauac

SEQ ID NO: 1346607 - RNA, 19 nt, Artificial Sequence
  Description of Artificial Sequence: Synthetic oligonucleotide
ccuggaucuuacagacagc

SEQ ID NO: 1346608 - RNA, 19 nt, Artificial Sequence
  Description of Artificial Sequence: Synthetic oligonucleotide
agaagccaguaugcuuugu

SEQ ID NO: 1346609 - RNA, 19 nt, Artificial Sequence
  Description of Artificial Sequence: Synthetic oligonucleotide
acgcuuuggcccgacuggu

SEQ ID NO: 1346610 - RNA, 19 nt, Artificial Sequence
  Description of Artificial Sequence: Synthetic oligonucleotide
agguguaccuucaccugaa

SEQ ID NO: 1346611 - RNA, 19 nt, Artificial Sequence
  Description of Artificial Sequence: Synthetic oligonucleotide
ggacacugcacggaaagcu

SEQ ID NO: 1346612 - RNA, 19 nt, Artificial Sequence
  Description of Artificial Sequence: Synthetic oligonucleotide
guagagauucccagauggu

SEQ ID NO: 1346613 - RNA, 19 nt, Artificial Sequence
  Description of Artificial Sequence: Synthetic oligonucleotide
cuuuaaguucugaguucgu

SEQ ID NO: 1346614 - RNA, 19 nt, Artificial Sequence
  Description of Artificial Sequence: Synthetic oligonucleotide
cagcacuguauuggacuug

SEQ ID NO: 1346615 - RNA, 19 nt, Artificial Sequence
  Description of Artificial Sequence: Synthetic oligonucleotide
ccaguuucaacagaaucua

SEQ ID NO: 1346616 - RNA, 19 nt, Artificial Sequence
  Description of Artificial Sequence: Synthetic oligonucleotide
gggucuacuugguaauacu

SEQ ID NO: 1346617 - RNA, 19 nt, Artificial Sequence
  Description of Artificial Sequence: Synthetic oligonucleotide
gugccgguucacgcuuugg

SEQ ID NO: 1346618 - RNA, 19 nt, Artificial Sequence
  Description of Artificial Sequence: Synthetic oligonucleotide
gcucacuacacacuacaau

SEQ ID NO: 1346619 - RNA, 19 nt, Artificial Sequence
  Description of Artificial Sequence: Synthetic oligonucleotide
uauuucccuccugcugaua

SEQ ID NO: 1346620 - RNA, 19 nt, Artificial Sequence
  Description of Artificial Sequence: Synthetic oligonucleotide
aucuuacagacagccucuu

SEQ ID NO: 1346621 - RNA, 19 nt, Artificial Sequence
  Description of Artificial Sequence: Synthetic oligonucleotide
ggaguacgagggauccuug

SEQ ID NO: 1346622 - RNA, 19 nt, Artificial Sequence
  Description of Artificial Sequence: Synthetic oligonucleotide
cgguucacgcuuuggcccg

SEQ ID NO: 1346623 - RNA, 19 nt, Artificial Sequence
  Description of Artificial Sequence: Synthetic oligonucleotide
gccugcuugucucggauua

SEQ ID NO: 1346624 - RNA, 19 nt, Artificial Sequence
  Description of Artificial Sequence: Synthetic oligonucleotide
gcgucagcacuguauugga

SEQ ID NO: 1346625 - RNA, 19 nt, Artificial Sequence
  Description of Artificial Sequence: Synthetic oligonucleotide
caguaugcuuugucugucu

SEQ ID NO: 1346626 - RNA, 19 nt, Artificial Sequence
  Description of Artificial Sequence: Synthetic oligonucleotide
gcccgacugguuauaggag

SEQ ID NO: 1346627 - RNA, 19 nt, Artificial Sequence
  Description of Artificial Sequence: Synthetic oligonucleotide
guugccaggccagggugaa

SEQ ID NO: 1346628 - RNA, 19 nt, Artificial Sequence
  Description of Artificial Sequence: Synthetic oligonucleotide
acggaaagcugugccgguu

SEQ ID NO: 1346629 - RNA, 19 nt, Artificial Sequence
  Description of Artificial Sequence: Synthetic oligonucleotide
acggguccccauaccauaa

SEQ ID NO: 1346630 - RNA, 19 nt, Artificial Sequence
  Description of Artificial Sequence: Synthetic oligonucleotide
gcugccaguauuugauuau

SEQ ID NO: 1346631 - RNA, 19 nt, Artificial Sequence
  Description of Artificial Sequence: Synthetic oligonucleotide
guacgguuaccaucuccau

SEQ ID NO: 1346632 - RNA, 19 nt, Artificial Sequence
  Description of Artificial Sequence: Synthetic oligonucleotide
gacggaguccuggccucca

SEQ ID NO: 1346633 - RNA, 19 nt, Artificial Sequence
  Description of Artificial Sequence: Synthetic oligonucleotide
ggccugacggacggagucc

SEQ ID NO: 1346634 - RNA, 19 nt, Artificial Sequence
  Description of Artificial Sequence: Synthetic oligonucleotide
cuuuggcccgacugguuau

SEQ ID NO: 1346635 - RNA, 19 nt, Artificial Sequence
  Description of Artificial Sequence: Synthetic oligonucleotide
cuauuucccuccugcugau

SEQ ID NO: 1346636 - RNA, 19 nt, Artificial Sequence
  Description of Artificial Sequence: Synthetic oligonucleotide
gggguaacggguccccaua

SEQ ID NO: 1346637 - RNA, 19 nt, Artificial Sequence
  Description of Artificial Sequence: Synthetic oligonucleotide
gugggucuacuugguaaua

SEQ ID NO: 1346638 - RNA, 19 nt, Artificial Sequence
  Description of Artificial Sequence: Synthetic oligonucleotide
ccagggguaacgggucccc

SEQ ID NO: 1346639 - RNA, 19 nt, Artificial Sequence
  Description of Artificial Sequence: Synthetic oligonucleotide
ccgacugguuauaggagua

SEQ ID NO: 1346640 - RNA, 19 nt, Artificial Sequence
  Description of Artificial Sequence: Synthetic oligonucleotide
ccuguuacauaaagucuau

SEQ ID NO: 1346641 - RNA, 19 nt, Artificial Sequence
  Description of Artificial Sequence: Synthetic oligonucleotide
cccgacugguuauaggagu

SEQ ID NO: 1346642 - RNA, 19 nt, Artificial Sequence
  Description of Artificial Sequence: Synthetic oligonucleotide
gcucaagauacugaaccuu

SEQ ID NO: 1346643 - RNA, 19 nt, Artificial Sequence
  Description of Artificial Sequence: Synthetic oligonucleotide
ccauacaacugaggcguca

SEQ ID NO: 1346644 - RNA, 19 nt, Artificial Sequence
  Description of Artificial Sequence: Synthetic oligonucleotide
ggucacuaacauugcuuuu

SEQ ID NO: 1346645 - RNA, 19 nt, Artificial Sequence
  Description of Artificial Sequence: Synthetic oligonucleotide
cgacugguuauaggaguac

SEQ ID NO: 1346646 - RNA, 19 nt, Artificial Sequence
  Description of Artificial Sequence: Synthetic oligonucleotide
gcagccuagagaugcccau

SEQ ID NO: 1346647 - RNA, 19 nt, Artificial Sequence
  Description of Artificial Sequence: Synthetic oligonucleotide
cuucaggagugggucuacu

SEQ ID NO: 1346648 - RNA, 19 nt, Artificial Sequence
  Description of Artificial Sequence: Synthetic oligonucleotide
cuggccugacggacggagu

SEQ ID NO: 1346649 - RNA, 19 nt, Artificial Sequence
  Description of Artificial Sequence: Synthetic oligonucleotide
gguggugaaggagguugcu

SEQ ID NO: 1346650 - RNA, 19 nt, Artificial Sequence
  Description of Artificial Sequence: Synthetic oligonucleotide
cccauaccauaagcaccag

SEQ ID NO: 1346651 - RNA, 19 nt, Artificial Sequence
  Description of Artificial Sequence: Synthetic oligonucleotide
gcugugccgguucacgcuu

SEQ ID NO: 1346652 - RNA, 19 nt, Artificial Sequence
  Description of Artificial Sequence: Synthetic oligonucleotide
cggguccccauaccauaag

SEQ ID NO: 1346653 - RNA, 19 nt, Artificial Sequence
  Description of Artificial Sequence: Synthetic oligonucleotide
ggccuggaucuuacagaca

SEQ ID NO: 1346654 - RNA, 19 nt, Artificial Sequence
  Description of Artificial Sequence: Synthetic oligonucleotide
cugaggcgucagcacugua

SEQ ID NO: 1346655 - RNA, 19 nt, Artificial Sequence
  Description of Artificial Sequence: Synthetic oligonucleotide
gccugacggacggaguccu

SEQ ID NO: 1346656 - RNA, 19 nt, Artificial Sequence
  Description of Artificial Sequence: Synthetic oligonucleotide
cugugccgguucacgcuuu

SEQ ID NO: 1346657 - RNA, 19 nt, Artificial Sequence
  Description of Artificial Sequence: Synthetic oligonucleotide
cgcuuuggcccgacugguu

SEQ ID NO: 1346658 - RNA, 19 nt, Artificial Sequence
  Description of Artificial Sequence: Synthetic oligonucleotide
aaaguuauuacgaacaucc

SEQ ID NO: 1346659 - RNA, 19 nt, Artificial Sequence
  Description of Artificial Sequence: Synthetic oligonucleotide
uuaucuauaacugaguacg

SEQ ID NO: 1346660 - RNA, 19 nt, Artificial Sequence
  Description of Artificial Sequence: Synthetic oligonucleotide
aaauuuaguuauauuaucc

SEQ ID NO: 1346661 - RNA, 19 nt, Artificial Sequence
  Description of Artificial Sequence: Synthetic oligonucleotide
acagauacguaauacauuc

SEQ ID NO: 1346662 - RNA, 19 nt, Artificial Sequence
  Description of Artificial Sequence: Synthetic oligonucleotide
uauauuauccaaacaagug

SEQ ID NO: 1346663 - RNA, 19 nt, Artificial Sequence
  Description of Artificial Sequence: Synthetic oligonucleotide
aaccuaaacacacucgaac

SEQ ID NO: 1346664 - RNA, 19 nt, Artificial Sequence
  Description of Artificial Sequence: Synthetic oligonucleotide
ucuuugaagugcaugauag

SEQ ID NO: 1346665 - RNA, 19 nt, Artificial Sequence
  Description of Artificial Sequence: Synthetic oligonucleotide
uacaguaguaacaaacagg

SEQ ID NO: 1346666 - RNA, 19 nt, Artificial Sequence
  Description of Artificial Sequence: Synthetic oligonucleotide
uuuaauccaaauaaucuga

SEQ ID NO: 1346667 - RNA, 19 nt, Artificial Sequence
  Description of Artificial Sequence: Synthetic oligonucleotide
aaagguagaauuaacaacu

SEQ ID NO: 1346668 - RNA, 19 nt, Artificial Sequence
  Description of Artificial Sequence: Synthetic oligonucleotide
aauuuaguuauauuaucca

SEQ ID NO: 1346669 - RNA, 19 nt, Artificial Sequence
  Description of Artificial Sequence: Synthetic oligonucleotide
auaguaauuguguucuacc

SEQ ID NO: 1346670 - RNA, 19 nt, Artificial Sequence
  Description of Artificial Sequence: Synthetic oligonucleotide
auuuaauccaaauaaucug

SEQ ID NO: 1346671 - RNA, 19 nt, Artificial Sequence
  Description of Artificial Sequence: Synthetic oligonucleotide
ucuagcaacauauacagau

SEQ ID NO: 1346672 - RNA, 19 nt, Artificial Sequence
  Description of Artificial Sequence: Synthetic oligonucleotide
uuugaagugcaugauaggg

SEQ ID NO: 1346673 - RNA, 19 nt, Artificial Sequence
  Description of Artificial Sequence: Synthetic oligonucleotide
gagaauauaacugacacuc

SEQ ID NO: 1346674 - RNA, 19 nt, Artificial Sequence
  Description of Artificial Sequence: Synthetic oligonucleotide
aguaguuucuuguaccucg

SEQ ID NO: 1346675 - RNA, 19 nt, Artificial Sequence
  Description of Artificial Sequence: Synthetic oligonucleotide
ugagaguaaacugacaucc

SEQ ID NO: 1346676 - RNA, 19 nt, Artificial Sequence
  Description of Artificial Sequence: Synthetic oligonucleotide
ugaaacgugcaauaauugg

SEQ ID NO: 1346677 - RNA, 19 nt, Artificial Sequence
  Description of Artificial Sequence: Synthetic oligonucleotide
aauaccuguuauuuucuuc

SEQ ID NO: 1346678 - RNA, 19 nt, Artificial Sequence
  Description of Artificial Sequence: Synthetic oligonucleotide
ucuacuauuacuaccacua

SEQ ID NO: 1346679 - RNA, 19 nt, Artificial Sequence
  Description of Artificial Sequence: Synthetic oligonucleotide
aagauaaguaguuucuugu

SEQ ID NO: 1346680 - RNA, 19 nt, Artificial Sequence
  Description of Artificial Sequence: Synthetic oligonucleotide
accuaaacacacucgaacc

SEQ ID NO: 1346681 - RNA, 19 nt, Artificial Sequence
  Description of Artificial Sequence: Synthetic oligonucleotide
ucuauaacugaguacgaag

SEQ ID NO: 1346682 - RNA, 19 nt, Artificial Sequence
  Description of Artificial Sequence: Synthetic oligonucleotide
gaaucuuacuauuuuaaac

SEQ ID NO: 1346683 - RNA, 19 nt, Artificial Sequence
  Description of Artificial Sequence: Synthetic oligonucleotide
uuaaccuaaacacacucga

SEQ ID NO: 1346684 - RNA, 19 nt, Artificial Sequence
  Description of Artificial Sequence: Synthetic oligonucleotide
auuacgaacauccuuguga

SEQ ID NO: 1346685 - RNA, 19 nt, Artificial Sequence
  Description of Artificial Sequence: Synthetic oligonucleotide
acauucuacuauuacuacc

SEQ ID NO: 1346686 - RNA, 19 nt, Artificial Sequence
  Description of Artificial Sequence: Synthetic oligonucleotide
acgguguuuuauuuaaucc

SEQ ID NO: 1346687 - RNA, 19 nt, Artificial Sequence
  Description of Artificial Sequence: Synthetic oligonucleotide
ucguuuaucuauaacugag

SEQ ID NO: 1346688 - RNA, 19 nt, Artificial Sequence
  Description of Artificial Sequence: Synthetic oligonucleotide
ucuguauuucaauacaugu

SEQ ID NO: 1346689 - RNA, 19 nt, Artificial Sequence
  Description of Artificial Sequence: Synthetic oligonucleotide
agaaacuacacacaagcug

SEQ ID NO: 1346690 - RNA, 19 nt, Artificial Sequence
  Description of Artificial Sequence: Synthetic oligonucleotide
uuaguuauauuauccaaac

SEQ ID NO: 1346691 - RNA, 19 nt, Artificial Sequence
  Description of Artificial Sequence: Synthetic oligonucleotide
agaagcauggauuccacuc

SEQ ID NO: 1346692 - RNA, 19 nt, Artificial Sequence
  Description of Artificial Sequence: Synthetic oligonucleotide
aaagccaugugcuuuaaau

SEQ ID NO: 1346693 - RNA, 19 nt, Artificial Sequence
  Description of Artificial Sequence: Synthetic oligonucleotide
ucucguuuaucuauaacug

SEQ ID NO: 1346694 - RNA, 19 nt, Artificial Sequence
  Description of Artificial Sequence: Synthetic oligonucleotide
uuacaguaguaacaaacag

SEQ ID NO: 1346695 - RNA, 19 nt, Artificial Sequence
  Description of Artificial Sequence: Synthetic oligonucleotide
aaacagccuaaauucuagc

SEQ ID NO: 1346696 - RNA, 19 nt, Artificial Sequence
  Description of Artificial Sequence: Synthetic oligonucleotide
aauguaacaggcaagcugu

SEQ ID NO: 1346697 - RNA, 19 nt, Artificial Sequence
  Description of Artificial Sequence: Synthetic oligonucleotide
aggaguguguuguaagucc

SEQ ID NO: 1346698 - RNA, 19 nt, Artificial Sequence
  Description of Artificial Sequence: Synthetic oligonucleotide
aucucguuuaucuauaacu

SEQ ID NO: 1346699 - RNA, 19 nt, Artificial Sequence
  Description of Artificial Sequence: Synthetic oligonucleotide
uuuagggacuucaaguuca

SEQ ID NO: 1346700 - RNA, 19 nt, Artificial Sequence
  Description of Artificial Sequence: Synthetic oligonucleotide
aguaaacugacauccgagg

SEQ ID NO: 1346701 - RNA, 19 nt, Artificial Sequence
  Description of Artificial Sequence: Synthetic oligonucleotide
uuaauccaaauaaucugag

SEQ ID NO: 1346702 - RNA, 19 nt, Artificial Sequence
  Description of Artificial Sequence: Synthetic oligonucleotide
acaggguucacucuaauga

SEQ ID NO: 1346703 - RNA, 19 nt, Artificial Sequence
  Description of Artificial Sequence: Synthetic oligonucleotide
ugaaauguaacaggcaagc

SEQ ID NO: 1346704 - RNA, 19 nt, Artificial Sequence
  Description of Artificial Sequence: Synthetic oligonucleotide
aaucucguuuaucuauaac

SEQ ID NO: 1346705 - RNA, 19 nt, Artificial Sequence
  Description of Artificial Sequence: Synthetic oligonucleotide
uuaaaucucguuuaucuau

SEQ ID NO: 1346706 - RNA, 19 nt, Artificial Sequence
  Description of Artificial Sequence: Synthetic oligonucleotide
uaauuguguucuaccaugg

SEQ ID NO: 1346707 - RNA, 19 nt, Artificial Sequence
  Description of Artificial Sequence: Synthetic oligonucleotide
uucugggagaauauaacug

SEQ ID NO: 1346708 - RNA, 19 nt, Artificial Sequence
  Description of Artificial Sequence: Synthetic oligonucleotide
aagugauuaaaucucguuu

SEQ ID NO: 1346709 - RNA, 19 nt, Artificial Sequence
  Description of Artificial Sequence: Synthetic oligonucleotide
uauaacugacacucaagcc

SEQ ID NO: 1346710 - RNA, 19 nt, Artificial Sequence
  Description of Artificial Sequence: Synthetic oligonucleotide
gauaaguaguuucuuguac

SEQ ID NO: 1346711 - RNA, 19 nt, Artificial Sequence
  Description of Artificial Sequence: Synthetic oligonucleotide
uuuaucuauaacugaguac

SEQ ID NO: 1346712 - RNA, 19 nt, Artificial Sequence
  Description of Artificial Sequence: Synthetic oligonucleotide
aacgugcaauaauuggugg

SEQ ID NO: 1346713 - RNA, 19 nt, Artificial Sequence
  Description of Artificial Sequence: Synthetic oligonucleotide
aucuuacuauuuuaaacag

SEQ ID NO: 1346714 - RNA, 19 nt, Artificial Sequence
  Description of Artificial Sequence: Synthetic oligonucleotide
uuaacaacuccuuuucacu

SEQ ID NO: 1346715 - RNA, 19 nt, Artificial Sequence
  Description of Artificial Sequence: Synthetic oligonucleotide
aaauuggugccacaguuaa

SEQ ID NO: 1346716 - RNA, 19 nt, Artificial Sequence
  Description of Artificial Sequence: Synthetic oligonucleotide
guaauuguguucuaccaug

SEQ ID NO: 1346717 - RNA, 19 nt, Artificial Sequence
  Description of Artificial Sequence: Synthetic oligonucleotide
ucuuacuauuuuaaacagc

SEQ ID NO: 1346718 - RNA, 19 nt, Artificial Sequence
  Description of Artificial Sequence: Synthetic oligonucleotide
guucaaaaccaaaagguag

SEQ ID NO: 1346719 - RNA, 19 nt, Artificial Sequence
  Description of Artificial Sequence: Synthetic oligonucleotide
aaacacacucgaaccaucc

SEQ ID NO: 1346720 - RNA, 19 nt, Artificial Sequence
  Description of Artificial Sequence: Synthetic oligonucleotide
agugacagauacguaauac

SEQ ID NO: 1346721 - RNA, 19 nt, Artificial Sequence
  Description of Artificial Sequence: Synthetic oligonucleotide
auacguaauacauucuacu

SEQ ID NO: 1346722 - RNA, 19 nt, Artificial Sequence
  Description of Artificial Sequence: Synthetic oligonucleotide
ucuaccaugguagauccag

SEQ ID NO: 1346723 - RNA, 19 nt, Artificial Sequence
  Description of Artificial Sequence: Synthetic oligonucleotide
uucaggucgauuugcagcc

SEQ ID NO: 1346724 - RNA, 19 nt, Artificial Sequence
  Description of Artificial Sequence: Synthetic oligonucleotide
caccuuuaaagcaagauga

SEQ ID NO: 1346725 - RNA, 19 nt, Artificial Sequence
  Description of Artificial Sequence: Synthetic oligonucleotide
acauauacagauaucaagu

SEQ ID NO: 1346726 - RNA, 19 nt, Artificial Sequence
  Description of Artificial Sequence: Synthetic oligonucleotide
aauaucuuguccugcucca

SEQ ID NO: 1346727 - RNA, 19 nt, Artificial Sequence
  Description of Artificial Sequence: Synthetic oligonucleotide
uauaggcagacacauagua

SEQ ID NO: 1346728 - RNA, 19 nt, Artificial Sequence
  Description of Artificial Sequence: Synthetic oligonucleotide
uguuguaaguccccaggag

SEQ ID NO: 1346729 - RNA, 19 nt, Artificial Sequence
  Description of Artificial Sequence: Synthetic oligonucleotide
ucuguaucagacauguaau

SEQ ID NO: 1346730 - RNA, 19 nt, Artificial Sequence
  Description of Artificial Sequence: Synthetic oligonucleotide
agugauuaaaucucguuua

SEQ ID NO: 1346731 - RNA, 19 nt, Artificial Sequence
  Description of Artificial Sequence: Synthetic oligonucleotide
auuuaguuauauuauccaa

SEQ ID NO: 1346732 - RNA, 19 nt, Artificial Sequence
  Description of Artificial Sequence: Synthetic oligonucleotide
uuuaccauuccuagugcca

SEQ ID NO: 1346733 - RNA, 19 nt, Artificial Sequence
  Description of Artificial Sequence: Synthetic oligonucleotide
cauucuacuauuacuacca

SEQ ID NO: 1346734 - RNA, 19 nt, Artificial Sequence
  Description of Artificial Sequence: Synthetic oligonucleotide
aagacacacauauaauuua

SEQ ID NO: 1346735 - RNA, 19 nt, Artificial Sequence
  Description of Artificial Sequence: Synthetic oligonucleotide
uaguaauuguguucuacca

SEQ ID NO: 1346736 - RNA, 19 nt, Artificial Sequence
  Description of Artificial Sequence: Synthetic oligonucleotide
acucgaaccauccaacuca

SEQ ID NO: 1346737 - RNA, 19 nt, Artificial Sequence
  Description of Artificial Sequence: Synthetic oligonucleotide
auuagaaucuuacuauuuu

SEQ ID NO: 1346738 - RNA, 19 nt, Artificial Sequence
  Description of Artificial Sequence: Synthetic oligonucleotide
ugauugucuuccaaagucu

SEQ ID NO: 1346739 - RNA, 19 nt, Artificial Sequence
  Description of Artificial Sequence: Synthetic oligonucleotide
uugaagugcaugauaggga

SEQ ID NO: 1346740 - RNA, 19 nt, Artificial Sequence
  Description of Artificial Sequence: Synthetic oligonucleotide
uuugauugucuuccaaagu

SEQ ID NO: 1346741 - RNA, 19 nt, Artificial Sequence
  Description of Artificial Sequence: Synthetic oligonucleotide
cuagguuucuuugaagugc

SEQ ID NO: 1346742 - RNA, 19 nt, Artificial Sequence
  Description of Artificial Sequence: Synthetic oligonucleotide
aaacgugcaauaauuggug

SEQ ID NO: 1346743 - RNA, 19 nt, Artificial Sequence
  Description of Artificial Sequence: Synthetic oligonucleotide
auucugggagaauauaacu

SEQ ID NO: 1346744 - RNA, 19 nt, Artificial Sequence
  Description of Artificial Sequence: Synthetic oligonucleotide
agugacuacaguacaugcc

SEQ ID NO: 1346745 - RNA, 19 nt, Artificial Sequence
  Description of Artificial Sequence: Synthetic oligonucleotide
ucacucuaaugaaacgugc

SEQ ID NO: 1346746 - RNA, 19 nt, Artificial Sequence
  Description of Artificial Sequence: Synthetic oligonucleotide
uaaguaguuucuuguaccu

SEQ ID NO: 1346747 - RNA, 19 nt, Artificial Sequence
  Description of Artificial Sequence: Synthetic oligonucleotide
uccucuguauuucaauaca

SEQ ID NO: 1346748 - RNA, 19 nt, Artificial Sequence
  Description of Artificial Sequence: Synthetic oligonucleotide
gacgcuguuagaauucagg

SEQ ID NO: 1346749 - RNA, 19 nt, Artificial Sequence
  Description of Artificial Sequence: Synthetic oligonucleotide
uccccuaaccacuucagug

SEQ ID NO: 1346750 - RNA, 19 nt, Artificial Sequence
  Description of Artificial Sequence: Synthetic oligonucleotide
gagcaagacacacauauaa

SEQ ID NO: 1346751 - RNA, 19 nt, Artificial Sequence
  Description of Artificial Sequence: Synthetic oligonucleotide
cuaaccacuucagugacag

SEQ ID NO: 1346752 - RNA, 19 nt, Artificial Sequence
  Description of Artificial Sequence: Synthetic oligonucleotide
aaccacuucagugacagau

SEQ ID NO: 1346753 - RNA, 19 nt, Artificial Sequence
  Description of Artificial Sequence: Synthetic oligonucleotide
uuggaagacggccuuugag

SEQ ID NO: 1346754 - RNA, 19 nt, Artificial Sequence
  Description of Artificial Sequence: Synthetic oligonucleotide
aaagucucuguaucagaca

SEQ ID NO: 1346755 - RNA, 19 nt, Artificial Sequence
  Description of Artificial Sequence: Synthetic oligonucleotide
acacucaagccauuuucac

SEQ ID NO: 1346756 - RNA, 19 nt, Artificial Sequence
  Description of Artificial Sequence: Synthetic oligonucleotide
guaaaugugccacacagua

SEQ ID NO: 1346757 - RNA, 19 nt, Artificial Sequence
  Description of Artificial Sequence: Synthetic oligonucleotide
acucaagccauuuucacuu

SEQ ID NO: 1346758 - RNA, 19 nt, Artificial Sequence
  Description of Artificial Sequence: Synthetic oligonucleotide
cauaccaggcucucuauac

SEQ ID NO: 1346759 - RNA, 19 nt, Artificial Sequence
  Description of Artificial Sequence: Synthetic oligonucleotide
acuacacacaagcuggacu

SEQ ID NO: 1346760 - RNA, 19 nt, Artificial Sequence
  Description of Artificial Sequence: Synthetic oligonucleotide
ucgauuugcagccacugau

SEQ ID NO: 1346761 - RNA, 19 nt, Artificial Sequence
  Description of Artificial Sequence: Synthetic oligonucleotide
accaugguagauccagugg

SEQ ID NO: 1346762 - RNA, 19 nt, Artificial Sequence
  Description of Artificial Sequence: Synthetic oligonucleotide
uuauucaggucgauuugca

SEQ ID NO: 1346763 - RNA, 19 nt, Artificial Sequence
  Description of Artificial Sequence: Synthetic oligonucleotide
aguuauuacgaacauccuu

SEQ ID NO: 1346764 - RNA, 19 nt, Artificial Sequence
  Description of Artificial Sequence: Synthetic oligonucleotide
agaguaaacugacauccga

SEQ ID NO: 1346765 - RNA, 19 nt, Artificial Sequence
  Description of Artificial Sequence: Synthetic oligonucleotide
uacguaauacauucuacua

SEQ ID NO: 1346766 - RNA, 19 nt, Artificial Sequence
  Description of Artificial Sequence: Synthetic oligonucleotide
uuacgaacauccuugugau

SEQ ID NO: 1346767 - RNA, 19 nt, Artificial Sequence
  Description of Artificial Sequence: Synthetic oligonucleotide
guucuaccaugguagaucc

SEQ ID NO: 1346768 - RNA, 19 nt, Artificial Sequence
  Description of Artificial Sequence: Synthetic oligonucleotide
gauacguaauacauucuac

SEQ ID NO: 1346769 - RNA, 19 nt, Artificial Sequence
  Description of Artificial Sequence: Synthetic oligonucleotide
aguaagcuuuggaagacgg

SEQ ID NO: 1346770 - RNA, 19 nt, Artificial Sequence
  Description of Artificial Sequence: Synthetic oligonucleotide
auuuucuagguuucuuuga

SEQ ID NO: 1346771 - RNA, 19 nt, Artificial Sequence
  Description of Artificial Sequence: Synthetic oligonucleotide
agauacguaauacauucua

SEQ ID NO: 1346772 - RNA, 19 nt, Artificial Sequence
  Description of Artificial Sequence: Synthetic oligonucleotide
auucuacuauuacuaccac

SEQ ID NO: 1346773 - RNA, 19 nt, Artificial Sequence
  Description of Artificial Sequence: Synthetic oligonucleotide
ugggagaauauaacugaca

SEQ ID NO: 1346774 - RNA, 19 nt, Artificial Sequence
  Description of Artificial Sequence: Synthetic oligonucleotide
aguaauuguguucuaccau

SEQ ID NO: 1346775 - RNA, 19 nt, Artificial Sequence
  Description of Artificial Sequence: Synthetic oligonucleotide
acguaauacauucuacuau

SEQ ID NO: 1346776 - RNA, 19 nt, Artificial Sequence
  Description of Artificial Sequence: Synthetic oligonucleotide
gggagaauauaacugacac

SEQ ID NO: 1346777 - RNA, 19 nt, Artificial Sequence
  Description of Artificial Sequence: Synthetic oligonucleotide
aguuuagggacuucaaguu

SEQ ID NO: 1346778 - RNA, 19 nt, Artificial Sequence
  Description of Artificial Sequence: Synthetic oligonucleotide
uacauucuacuauuacuac

SEQ ID NO: 1346779 - RNA, 19 nt, Artificial Sequence
  Description of Artificial Sequence: Synthetic oligonucleotide
uaaaucucguuuaucuaua

SEQ ID NO: 1346780 - RNA, 19 nt, Artificial Sequence
  Description of Artificial Sequence: Synthetic oligonucleotide
aauuguguucuaccauggu

SEQ ID NO: 1346781 - RNA, 19 nt, Artificial Sequence
  Description of Artificial Sequence: Synthetic oligonucleotide
uucagguucccaaaauuua

SEQ ID NO: 1346782 - RNA, 19 nt, Artificial Sequence
  Description of Artificial Sequence: Synthetic oligonucleotide
cagccuaaauucuagcaac

SEQ ID NO: 1346783 - RNA, 19 nt, Artificial Sequence
  Description of Artificial Sequence: Synthetic oligonucleotide
agauccagugguuacaaua

SEQ ID NO: 1346784 - RNA, 19 nt, Artificial Sequence
  Description of Artificial Sequence: Synthetic oligonucleotide
uaacugacacucaagccau

SEQ ID NO: 1346785 - RNA, 19 nt, Artificial Sequence
  Description of Artificial Sequence: Synthetic oligonucleotide
cucuguauuucaauacaug

SEQ ID NO: 1346786 - RNA, 19 nt, Artificial Sequence
  Description of Artificial Sequence: Synthetic oligonucleotide
gauccagugguuacaauac

SEQ ID NO: 1346787 - RNA, 19 nt, Artificial Sequence
  Description of Artificial Sequence: Synthetic oligonucleotide
uagaauuaacaacuccuuu

SEQ ID NO: 1346788 - RNA, 19 nt, Artificial Sequence
  Description of Artificial Sequence: Synthetic oligonucleotide
uauccaaacaagugauuaa

SEQ ID NO: 1346789 - RNA, 19 nt, Artificial Sequence
  Description of Artificial Sequence: Synthetic oligonucleotide
uguaccucggucaccacau

SEQ ID NO: 1346790 - RNA, 19 nt, Artificial Sequence
  Description of Artificial Sequence: Synthetic oligonucleotide
uucuacuauuacuaccacu

SEQ ID NO: 1346791 - RNA, 19 nt, Artificial Sequence
  Description of Artificial Sequence: Synthetic oligonucleotide
aacuacacacaagcuggac

SEQ ID NO: 1346792 - RNA, 19 nt, Artificial Sequence
  Description of Artificial Sequence: Synthetic oligonucleotide
aaauaguguuuuacaguag

SEQ ID NO: 1346793 - RNA, 19 nt, Artificial Sequence
  Description of Artificial Sequence: Synthetic oligonucleotide
ugccgagguaagaaaauac

SEQ ID NO: 1346794 - RNA, 19 nt, Artificial Sequence
  Description of Artificial Sequence: Synthetic oligonucleotide
uauuacgaacauccuugug

SEQ ID NO: 1346795 - RNA, 19 nt, Artificial Sequence
  Description of Artificial Sequence: Synthetic oligonucleotide
aaguaguuucuuguaccuc

SEQ ID NO: 1346796 - RNA, 19 nt, Artificial Sequence
  Description of Artificial Sequence: Synthetic oligonucleotide
auuaaaucucguuuaucua

SEQ ID NO: 1346797 - RNA, 19 nt, Artificial Sequence
  Description of Artificial Sequence: Synthetic oligonucleotide
auuguguucuaccauggua

SEQ ID NO: 1346798 - RNA, 19 nt, Artificial Sequence
  Description of Artificial Sequence: Synthetic oligonucleotide
uaucuauaacugaguacga

SEQ ID NO: 1346799 - RNA, 19 nt, Artificial Sequence
  Description of Artificial Sequence: Synthetic oligonucleotide
uuauuacgaacauccuugu

SEQ ID NO: 1346800 - RNA, 19 nt, Artificial Sequence
  Description of Artificial Sequence: Synthetic oligonucleotide
aaaucucguuuaucuauaa

SEQ ID NO: 1346801 - RNA, 19 nt, Artificial Sequence
  Description of Artificial Sequence: Synthetic oligonucleotide
uaccaugguagauccagug

SEQ ID NO: 1346802 - RNA, 19 nt, Artificial Sequence
  Description of Artificial Sequence: Synthetic oligonucleotide
uugagaguaaacugacauc

SEQ ID NO: 1346803 - RNA, 19 nt, Artificial Sequence
  Description of Artificial Sequence: Synthetic oligonucleotide
accaaaagguagaauuaac

SEQ ID NO: 1346804 - RNA, 19 nt, Artificial Sequence
  Description of Artificial Sequence: Synthetic oligonucleotide
auaacugaguacgaagcca

SEQ ID NO: 1346805 - RNA, 19 nt, Artificial Sequence
  Description of Artificial Sequence: Synthetic oligonucleotide
aggagcaacugucaguccu

SEQ ID NO: 1346806 - RNA, 19 nt, Artificial Sequence
  Description of Artificial Sequence: Synthetic oligonucleotide
acgcuguuagaauucaggu

SEQ ID NO: 1346807 - RNA, 19 nt, Artificial Sequence
  Description of Artificial Sequence: Synthetic oligonucleotide
cauaguaauuguguucuac

SEQ ID NO: 1346808 - RNA, 19 nt, Artificial Sequence
  Description of Artificial Sequence: Synthetic oligonucleotide
cugacauccgaggaguucc

SEQ ID NO: 1346809 - RNA, 19 nt, Artificial Sequence
  Description of Artificial Sequence: Synthetic oligonucleotide
guaaacugacauccgagga

SEQ ID NO: 1346810 - RNA, 19 nt, Artificial Sequence
  Description of Artificial Sequence: Synthetic oligonucleotide
uccugcuacuuccugggug

SEQ ID NO: 1346811 - RNA, 19 nt, Artificial Sequence
  Description of Artificial Sequence: Synthetic oligonucleotide
uaaaugugccacacaguaa

SEQ ID NO: 1346812 - RNA, 19 nt, Artificial Sequence
  Description of Artificial Sequence: Synthetic oligonucleotide
gggacuucaaguucaaaac

SEQ ID NO: 1346813 - RNA, 19 nt, Artificial Sequence
  Description of Artificial Sequence: Synthetic oligonucleotide
aguaacaccuuuaaagcaa

SEQ ID NO: 1346814 - RNA, 19 nt, Artificial Sequence
  Description of Artificial Sequence: Synthetic oligonucleotide
ucguccagaagcauggauu

SEQ ID NO: 1346815 - RNA, 19 nt, Artificial Sequence
  Description of Artificial Sequence: Synthetic oligonucleotide
acucuaaugaaacgugcaa

SEQ ID NO: 1346816 - RNA, 19 nt, Artificial Sequence
  Description of Artificial Sequence: Synthetic oligonucleotide
ucuauacacaguccaucuc

SEQ ID NO: 1346817 - RNA, 19 nt, Artificial Sequence
  Description of Artificial Sequence: Synthetic oligonucleotide
aacacacucgaaccaucca

SEQ ID NO: 1346818 - RNA, 19 nt, Artificial Sequence
  Description of Artificial Sequence: Synthetic oligonucleotide
acuacaguacaugccgagg

SEQ ID NO: 1346819 - RNA, 19 nt, Artificial Sequence
  Description of Artificial Sequence: Synthetic oligonucleotide
ggacuucaaguucaaaacc

SEQ ID NO: 1346820 - RNA, 19 nt, Artificial Sequence
  Description of Artificial Sequence: Synthetic oligonucleotide
aagacggccuuugagagua

SEQ ID NO: 1346821 - RNA, 19 nt, Artificial Sequence
  Description of Artificial Sequence: Synthetic oligonucleotide
uuguaccucggucaccaca

SEQ ID NO: 1346822 - RNA, 19 nt, Artificial Sequence
  Description of Artificial Sequence: Synthetic oligonucleotide
uaaacacacucgaaccauc

SEQ ID NO: 1346823 - RNA, 19 nt, Artificial Sequence
  Description of Artificial Sequence: Synthetic oligonucleotide
agaauucagguucccaaaa

SEQ ID NO: 1346824 - RNA, 19 nt, Artificial Sequence
  Description of Artificial Sequence: Synthetic oligonucleotide
uaaccuaaacacacucgaa

SEQ ID NO: 1346825 - RNA, 19 nt, Artificial Sequence
  Description of Artificial Sequence: Synthetic oligonucleotide
ggaagacggccuuugagag

SEQ ID NO: 1346826 - RNA, 19 nt, Artificial Sequence
  Description of Artificial Sequence: Synthetic oligonucleotide
agauaaguaguuucuugua

SEQ ID NO: 1346827 - RNA, 19 nt, Artificial Sequence
  Description of Artificial Sequence: Synthetic oligonucleotide
gagaguaaacugacauccg

SEQ ID NO: 1346828 - RNA, 19 nt, Artificial Sequence
  Description of Artificial Sequence: Synthetic oligonucleotide
aaauccucguccagaagca

SEQ ID NO: 1346829 - RNA, 19 nt, Artificial Sequence
  Description of Artificial Sequence: Synthetic oligonucleotide
ucguacugagcccggcccg

SEQ ID NO: 1346830 - RNA, 19 nt, Artificial Sequence
  Description of Artificial Sequence: Synthetic oligonucleotide
gaaacgugcaauaauuggu

SEQ ID NO: 1346831 - RNA, 19 nt, Artificial Sequence
  Description of Artificial Sequence: Synthetic oligonucleotide
uucggggugucguacugag

SEQ ID NO: 1346832 - RNA, 19 nt, Artificial Sequence
  Description of Artificial Sequence: Synthetic oligonucleotide
uccaucucugcccaucguc

SEQ ID NO: 1346833 - RNA, 19 nt, Artificial Sequence
  Description of Artificial Sequence: Synthetic oligonucleotide
uccaacucacuagauuuug

SEQ ID NO: 1346834 - RNA, 19 nt, Artificial Sequence
  Description of Artificial Sequence: Synthetic oligonucleotide
guuuagggacuucaaguuc

SEQ ID NO: 1346835 - RNA, 19 nt, Artificial Sequence
  Description of Artificial Sequence: Synthetic oligonucleotide
guaacaccuuuaaagcaag

SEQ ID NO: 1346836 - RNA, 19 nt, Artificial Sequence
  Description of Artificial Sequence: Synthetic oligonucleotide
uccacuuucauggcaauuu

SEQ ID NO: 1346837 - RNA, 19 nt, Artificial Sequence
  Description of Artificial Sequence: Synthetic oligonucleotide
guaacaggcaagcuguaaa

SEQ ID NO: 1346838 - RNA, 19 nt, Artificial Sequence
  Description of Artificial Sequence: Synthetic oligonucleotide
gaguaagcuuuggaagacg

SEQ ID NO: 1346839 - RNA, 19 nt, Artificial Sequence
  Description of Artificial Sequence: Synthetic oligonucleotide
ugcccaucgucacuguaca

SEQ ID NO: 1346840 - RNA, 19 nt, Artificial Sequence
  Description of Artificial Sequence: Synthetic oligonucleotide
uacagauaucaagugacua

SEQ ID NO: 1346841 - RNA, 19 nt, Artificial Sequence
  Description of Artificial Sequence: Synthetic oligonucleotide
agaugacgcuguuagaauu

SEQ ID NO: 1346842 - RNA, 19 nt, Artificial Sequence
  Description of Artificial Sequence: Synthetic oligonucleotide
cacacucgaaccauccaac

SEQ ID NO: 1346843 - RNA, 19 nt, Artificial Sequence
  Description of Artificial Sequence: Synthetic oligonucleotide
guguuuuacaguaguaaca

SEQ ID NO: 1346844 - RNA, 19 nt, Artificial Sequence
  Description of Artificial Sequence: Synthetic oligonucleotide
ugucguacugagcccggcc

SEQ ID NO: 1346845 - RNA, 19 nt, Artificial Sequence
  Description of Artificial Sequence: Synthetic oligonucleotide
uuuggaagacggccuuuga

SEQ ID NO: 1346846 - RNA, 19 nt, Artificial Sequence
  Description of Artificial Sequence: Synthetic oligonucleotide
augaaacgugcaauaauug

SEQ ID NO: 1346847 - RNA, 19 nt, Artificial Sequence
  Description of Artificial Sequence: Synthetic oligonucleotide
aaaauuggugccacaguua

SEQ ID NO: 1346848 - RNA, 19 nt, Artificial Sequence
  Description of Artificial Sequence: Synthetic oligonucleotide
aagcauggauuccacucau

SEQ ID NO: 1346849 - RNA, 19 nt, Artificial Sequence
  Description of Artificial Sequence: Synthetic oligonucleotide
ugauuaaaucucguuuauc

SEQ ID NO: 1346850 - RNA, 19 nt, Artificial Sequence
  Description of Artificial Sequence: Synthetic oligonucleotide
caacucacuagauuuugca

SEQ ID NO: 1346851 - RNA, 19 nt, Artificial Sequence
  Description of Artificial Sequence: Synthetic oligonucleotide
acaagagaaacuacacaca

SEQ ID NO: 1346852 - RNA, 19 nt, Artificial Sequence
  Description of Artificial Sequence: Synthetic oligonucleotide
uacaugccgagguaagaaa

SEQ ID NO: 1346853 - RNA, 19 nt, Artificial Sequence
  Description of Artificial Sequence: Synthetic oligonucleotide
gaugacgcuguuagaauuc

SEQ ID NO: 1346854 - RNA, 19 nt, Artificial Sequence
  Description of Artificial Sequence: Synthetic oligonucleotide
cucguuuaucuauaacuga

SEQ ID NO: 1346855 - RNA, 19 nt, Artificial Sequence
  Description of Artificial Sequence: Synthetic oligonucleotide
uucuagcaacauauacaga

SEQ ID NO: 1346856 - RNA, 19 nt, Artificial Sequence
  Description of Artificial Sequence: Synthetic oligonucleotide
cugagcaagacacacauau

SEQ ID NO: 1346857 - RNA, 19 nt, Artificial Sequence
  Description of Artificial Sequence: Synthetic oligonucleotide
ugcaauaauugguggcaaa

SEQ ID NO: 1346858 - RNA, 19 nt, Artificial Sequence
  Description of Artificial Sequence: Synthetic oligonucleotide
cuacacacaagcuggacua

SEQ ID NO: 1346859 - RNA, 19 nt, Artificial Sequence
  Description of Artificial Sequence: Synthetic oligonucleotide
gacaagauaaguaguuucu

SEQ ID NO: 1346860 - RNA, 19 nt, Artificial Sequence
  Description of Artificial Sequence: Synthetic oligonucleotide
uugcaguuuagggacuuca

SEQ ID NO: 1346861 - RNA, 19 nt, Artificial Sequence
  Description of Artificial Sequence: Synthetic oligonucleotide
ugcaguuuagggacuucaa

SEQ ID NO: 1346862 - RNA, 19 nt, Artificial Sequence
  Description of Artificial Sequence: Synthetic oligonucleotide
auaccaggcucucuauaca

SEQ ID NO: 1346863 - RNA, 19 nt, Artificial Sequence
  Description of Artificial Sequence: Synthetic oligonucleotide
agaugacaagauaaguagu

SEQ ID NO: 1346864 - RNA, 19 nt, Artificial Sequence
  Description of Artificial Sequence: Synthetic oligonucleotide
ugcucaucaguggcaaaag

SEQ ID NO: 1346865 - RNA, 19 nt, Artificial Sequence
  Description of Artificial Sequence: Synthetic oligonucleotide
cacuucagugacagauacg

SEQ ID NO: 1346866 - RNA, 19 nt, Artificial Sequence
  Description of Artificial Sequence: Synthetic oligonucleotide
ucaccacauuccccuaacc

SEQ ID NO: 1346867 - RNA, 19 nt, Artificial Sequence
  Description of Artificial Sequence: Synthetic oligonucleotide
gacacucaagccauuuuca

SEQ ID NO: 1346868 - RNA, 19 nt, Artificial Sequence
  Description of Artificial Sequence: Synthetic oligonucleotide
agauaucaagugacuacag

SEQ ID NO: 1346869 - RNA, 19 nt, Artificial Sequence
  Description of Artificial Sequence: Synthetic oligonucleotide
cuggcuucccgccuuucgg

SEQ ID NO: 1346870 - RNA, 19 nt, Artificial Sequence
  Description of Artificial Sequence: Synthetic oligonucleotide
ucucugcccaucgucacug

SEQ ID NO: 1346871 - RNA, 19 nt, Artificial Sequence
  Description of Artificial Sequence: Synthetic oligonucleotide
ugguuacaauaccuguuau

SEQ ID NO: 1346872 - RNA, 19 nt, Artificial Sequence
  Description of Artificial Sequence: Synthetic oligonucleotide
uacuaccacuacaaaugaa

SEQ ID NO: 1346873 - RNA, 19 nt, Artificial Sequence
  Description of Artificial Sequence: Synthetic oligonucleotide
ugucaacgguguuuuauuu

SEQ ID NO: 1346874 - RNA, 19 nt, Artificial Sequence
  Description of Artificial Sequence: Synthetic oligonucleotide
cacucuaaugaaacgugca

SEQ ID NO: 1346875 - RNA, 19 nt, Artificial Sequence
  Description of Artificial Sequence: Synthetic oligonucleotide
ccaaaagguagaauuaaca

SEQ ID NO: 1346876 - RNA, 19 nt, Artificial Sequence
  Description of Artificial Sequence: Synthetic oligonucleotide
uacaguacaugccgaggua

SEQ ID NO: 1346877 - RNA, 19 nt, Artificial Sequence
  Description of Artificial Sequence: Synthetic oligonucleotide
cugcccaucgucacuguac

SEQ ID NO: 1346878 - RNA, 19 nt, Artificial Sequence
  Description of Artificial Sequence: Synthetic oligonucleotide
aagcuuuggaagacggccu

SEQ ID NO: 1346879 - RNA, 19 nt, Artificial Sequence
  Description of Artificial Sequence: Synthetic oligonucleotide
caguacaugccgagguaag

SEQ ID NO: 1346880 - RNA, 19 nt, Artificial Sequence
  Description of Artificial Sequence: Synthetic oligonucleotide
cuaccacuacaaaugaaaa

SEQ ID NO: 1346881 - RNA, 19 nt, Artificial Sequence
  Description of Artificial Sequence: Synthetic oligonucleotide
gucguacugagcccggccc

SEQ ID NO: 1346882 - RNA, 19 nt, Artificial Sequence
  Description of Artificial Sequence: Synthetic oligonucleotide
acauccgaggaguuccacu

SEQ ID NO: 1346883 - RNA, 19 nt, Artificial Sequence
  Description of Artificial Sequence: Synthetic oligonucleotide
accgucaaaggauuucuuu

SEQ ID NO: 1346884 - RNA, 19 nt, Artificial Sequence
  Description of Artificial Sequence: Synthetic oligonucleotide
gugguuacaauaccuguua

SEQ ID NO: 1346885 - RNA, 19 nt, Artificial Sequence
  Description of Artificial Sequence: Synthetic oligonucleotide
uaccucggucaccacauuc

SEQ ID NO: 1346886 - RNA, 19 nt, Artificial Sequence
  Description of Artificial Sequence: Synthetic oligonucleotide
accaccgucaaaggauuuc

SEQ ID NO: 1346887 - RNA, 19 nt, Artificial Sequence
  Description of Artificial Sequence: Synthetic oligonucleotide
uguaacaggcaagcuguaa

SEQ ID NO: 1346888 - RNA, 19 nt, Artificial Sequence
  Description of Artificial Sequence: Synthetic oligonucleotide
cucgaaccauccaacucac

SEQ ID NO: 1346889 - RNA, 19 nt, Artificial Sequence
  Description of Artificial Sequence: Synthetic oligonucleotide
acaauaccuguuauuuucu

SEQ ID NO: 1346890 - RNA, 19 nt, Artificial Sequence
  Description of Artificial Sequence: Synthetic oligonucleotide
uuagggacuucaaguucaa

SEQ ID NO: 1346891 - RNA, 19 nt, Artificial Sequence
  Description of Artificial Sequence: Synthetic oligonucleotide
caggauguuugaaauguaa

SEQ ID NO: 1346892 - RNA, 19 nt, Artificial Sequence
  Description of Artificial Sequence: Synthetic oligonucleotide
ccuuugagaguaaacugac

SEQ ID NO: 1346893 - RNA, 19 nt, Artificial Sequence
  Description of Artificial Sequence: Synthetic oligonucleotide
ugccauuggacaggguuca

SEQ ID NO: 1346894 - RNA, 19 nt, Artificial Sequence
  Description of Artificial Sequence: Synthetic oligonucleotide
gaacauccuugugauaauc

SEQ ID NO: 1346895 - RNA, 19 nt, Artificial Sequence
  Description of Artificial Sequence: Synthetic oligonucleotide
aaacuacacacaagcugga

SEQ ID NO: 1346896 - RNA, 19 nt, Artificial Sequence
  Description of Artificial Sequence: Synthetic oligonucleotide
aucuauaacugaguacgaa

SEQ ID NO: 1346897 - RNA, 19 nt, Artificial Sequence
  Description of Artificial Sequence: Synthetic oligonucleotide
aguuccacuuucauggcaa

SEQ ID NO: 1346898 - RNA, 19 nt, Artificial Sequence
  Description of Artificial Sequence: Synthetic oligonucleotide
aaauacauucugggagaau

SEQ ID NO: 1346899 - RNA, 19 nt, Artificial Sequence
  Description of Artificial Sequence: Synthetic oligonucleotide
cacacaguaacaccuuuaa

SEQ ID NO: 1346900 - RNA, 19 nt, Artificial Sequence
  Description of Artificial Sequence: Synthetic oligonucleotide
auacagauaucaagugacu

SEQ ID NO: 1346901 - RNA, 19 nt, Artificial Sequence
  Description of Artificial Sequence: Synthetic oligonucleotide
uucuccgguccuuccagcu

SEQ ID NO: 1346902 - RNA, 19 nt, Artificial Sequence
  Description of Artificial Sequence: Synthetic oligonucleotide
cuaaugaaacgugcaauaa

SEQ ID NO: 1346903 - RNA, 19 nt, Artificial Sequence
  Description of Artificial Sequence: Synthetic oligonucleotide
cacucgaaccauccaacuc

SEQ ID NO: 1346904 - RNA, 19 nt, Artificial Sequence
  Description of Artificial Sequence: Synthetic oligonucleotide
agaauauaacugacacuca

SEQ ID NO: 1346905 - RNA, 19 nt, Artificial Sequence
  Description of Artificial Sequence: Synthetic oligonucleotide
gagcaacugucaguccugg

SEQ ID NO: 1346906 - RNA, 19 nt, Artificial Sequence
  Description of Artificial Sequence: Synthetic oligonucleotide
caccacauuccccuaacca

SEQ ID NO: 1346907 - RNA, 19 nt, Artificial Sequence
  Description of Artificial Sequence: Synthetic oligonucleotide
uguaaguccccaggaggcu

SEQ ID NO: 1346908 - RNA, 19 nt, Artificial Sequence
  Description of Artificial Sequence: Synthetic oligonucleotide
cauuccccuaaccacuuca

SEQ ID NO: 1346909 - RNA, 19 nt, Artificial Sequence
  Description of Artificial Sequence: Synthetic oligonucleotide
uacugagcccggcccgagg

SEQ ID NO: 1346910 - RNA, 19 nt, Artificial Sequence
  Description of Artificial Sequence: Synthetic oligonucleotide
guaagcuuuggaagacggc

SEQ ID NO: 1346911 - RNA, 19 nt, Artificial Sequence
  Description of Artificial Sequence: Synthetic oligonucleotide
acaguacaugccgagguaa

SEQ ID NO: 1346912 - RNA, 19 nt, Artificial Sequence
  Description of Artificial Sequence: Synthetic oligonucleotide
ugacauccgaggaguucca

SEQ ID NO: 1346913 - RNA, 19 nt, Artificial Sequence
  Description of Artificial Sequence: Synthetic oligonucleotide
auaggcagacacauaguaa

SEQ ID NO: 1346914 - RNA, 19 nt, Artificial Sequence
  Description of Artificial Sequence: Synthetic oligonucleotide
acggccuuugagaguaaac

SEQ ID NO: 1346915 - RNA, 19 nt, Artificial Sequence
  Description of Artificial Sequence: Synthetic oligonucleotide
caucucugcccaucgucac

SEQ ID NO: 1346916 - RNA, 19 nt, Artificial Sequence
  Description of Artificial Sequence: Synthetic oligonucleotide
cuuucggggugucguacug

SEQ ID NO: 1346917 - RNA, 19 nt, Artificial Sequence
  Description of Artificial Sequence: Synthetic oligonucleotide
acaugccgagguaagaaaa

SEQ ID NO: 1346918 - RNA, 19 nt, Artificial Sequence
  Description of Artificial Sequence: Synthetic oligonucleotide
cuacaguacaugccgaggu

SEQ ID NO: 1346919 - RNA, 19 nt, Artificial Sequence
  Description of Artificial Sequence: Synthetic oligonucleotide
aucucugcccaucgucacu

SEQ ID NO: 1346920 - RNA, 19 nt, Artificial Sequence
  Description of Artificial Sequence: Synthetic oligonucleotide
agccuaaauucuagcaaca

SEQ ID NO: 1346921 - RNA, 19 nt, Artificial Sequence
  Description of Artificial Sequence: Synthetic oligonucleotide
auacauucugggagaauau

SEQ ID NO: 1346922 - RNA, 19 nt, Artificial Sequence
  Description of Artificial Sequence: Synthetic oligonucleotide
cuguauuucaauacauguu

SEQ ID NO: 1346923 - RNA, 19 nt, Artificial Sequence
  Description of Artificial Sequence: Synthetic oligonucleotide
gaggagcaacugucagucc

SEQ ID NO: 1346924 - RNA, 19 nt, Artificial Sequence
  Description of Artificial Sequence: Synthetic oligonucleotide
guacaugccgagguaagaa

SEQ ID NO: 1346925 - RNA, 19 nt, Artificial Sequence
  Description of Artificial Sequence: Synthetic oligonucleotide
augacgcuguuagaauuca

SEQ ID NO: 1346926 - RNA, 19 nt, Artificial Sequence
  Description of Artificial Sequence: Synthetic oligonucleotide
gucgauuugcagccacuga

SEQ ID NO: 1346927 - RNA, 19 nt, Artificial Sequence
  Description of Artificial Sequence: Synthetic oligonucleotide
ccuuauucaggucgauuug

SEQ ID NO: 1346928 - RNA, 19 nt, Artificial Sequence
  Description of Artificial Sequence: Synthetic oligonucleotide
agcuuuggaagacggccuu

SEQ ID NO: 1346929 - RNA, 19 nt, Artificial Sequence
  Description of Artificial Sequence: Synthetic oligonucleotide
gcaagacacacauauaauu

SEQ ID NO: 1346930 - RNA, 19 nt, Artificial Sequence
  Description of Artificial Sequence: Synthetic oligonucleotide
gugauuaaaucucguuuau

SEQ ID NO: 1346931 - RNA, 19 nt, Artificial Sequence
  Description of Artificial Sequence: Synthetic oligonucleotide
aauccucguccagaagcau

SEQ ID NO: 1346932 - RNA, 19 nt, Artificial Sequence
  Description of Artificial Sequence: Synthetic oligonucleotide
caggucgauuugcagccac

SEQ ID NO: 1346933 - RNA, 19 nt, Artificial Sequence
  Description of Artificial Sequence: Synthetic oligonucleotide
ccuaaacacacucgaacca

SEQ ID NO: 1346934 - RNA, 19 nt, Artificial Sequence
  Description of Artificial Sequence: Synthetic oligonucleotide
ucugcccaucgucacugua

SEQ ID NO: 1346935 - RNA, 19 nt, Artificial Sequence
  Description of Artificial Sequence: Synthetic oligonucleotide
acugacacucaagccauuu

SEQ ID NO: 1346936 - RNA, 19 nt, Artificial Sequence
  Description of Artificial Sequence: Synthetic oligonucleotide
gggugucguacugagcccg

SEQ ID NO: 1346937 - RNA, 19 nt, Artificial Sequence
  Description of Artificial Sequence: Synthetic oligonucleotide
cuucccgccuuucggggug

SEQ ID NO: 1346938 - RNA, 19 nt, Artificial Sequence
  Description of Artificial Sequence: Synthetic oligonucleotide
guagauccagugguuacaa

SEQ ID NO: 1346939 - RNA, 19 nt, Artificial Sequence
  Description of Artificial Sequence: Synthetic oligonucleotide
ggagaauauaacugacacu

SEQ ID NO: 1346940 - RNA, 19 nt, Artificial Sequence
  Description of Artificial Sequence: Synthetic oligonucleotide
ucggggugucguacugagc

SEQ ID NO: 1346941 - RNA, 19 nt, Artificial Sequence
  Description of Artificial Sequence: Synthetic oligonucleotide
augguagauccagugguua

SEQ ID NO: 1346942 - RNA, 19 nt, Artificial Sequence
  Description of Artificial Sequence: Synthetic oligonucleotide
acauaguaauuguguucua

SEQ ID NO: 1346943 - RNA, 19 nt, Artificial Sequence
  Description of Artificial Sequence: Synthetic oligonucleotide
ucgaaccauccaacucacu

SEQ ID NO: 1346944 - RNA, 19 nt, Artificial Sequence
  Description of Artificial Sequence: Synthetic oligonucleotide
gcaauaauugguggcaaaa

SEQ ID NO: 1346945 - RNA, 19 nt, Artificial Sequence
  Description of Artificial Sequence: Synthetic oligonucleotide
accauuccuagugccaaaa

SEQ ID NO: 1346946 - RNA, 19 nt, Artificial Sequence
  Description of Artificial Sequence: Synthetic oligonucleotide
cacucaagccauuuucacu

SEQ ID NO: 1346947 - RNA, 19 nt, Artificial Sequence
  Description of Artificial Sequence: Synthetic oligonucleotide
cgguguuuuauuuaaucca

SEQ ID NO: 1346948 - RNA, 19 nt, Artificial Sequence
  Description of Artificial Sequence: Synthetic oligonucleotide
ggucgauuugcagccacug

SEQ ID NO: 1346949 - RNA, 19 nt, Artificial Sequence
  Description of Artificial Sequence: Synthetic oligonucleotide
ggcuucccgccuuucgggg

SEQ ID NO: 1346950 - RNA, 19 nt, Artificial Sequence
  Description of Artificial Sequence: Synthetic oligonucleotide
gguagauccagugguuaca

SEQ ID NO: 1346951 - RNA, 19 nt, Artificial Sequence
  Description of Artificial Sequence: Synthetic oligonucleotide
gucacuguacagaacucua

SEQ ID NO: 1346952 - RNA, 19 nt, Artificial Sequence
  Description of Artificial Sequence: Synthetic oligonucleotide
uacgaacauccuugugaua

SEQ ID NO: 1346953 - RNA, 19 nt, Artificial Sequence
  Description of Artificial Sequence: Synthetic oligonucleotide
augccgagguaagaaaaua

SEQ ID NO: 1346954 - RNA, 19 nt, Artificial Sequence
  Description of Artificial Sequence: Synthetic oligonucleotide
gaagacggccuuugagagu

SEQ ID NO: 1346955 - RNA, 19 nt, Artificial Sequence
  Description of Artificial Sequence: Synthetic oligonucleotide
ucucuguaucagacaugua

SEQ ID NO: 1346956 - RNA, 19 nt, Artificial Sequence
  Description of Artificial Sequence: Synthetic oligonucleotide
gaugcucaucaguggcaaa

SEQ ID NO: 1346957 - RNA, 19 nt, Artificial Sequence
  Description of Artificial Sequence: Synthetic oligonucleotide
cucuaaugaaacgugcaau

SEQ ID NO: 1346958 - RNA, 19 nt, Artificial Sequence
  Description of Artificial Sequence: Synthetic oligonucleotide
cagguucccaaaauuuagu

SEQ ID NO: 1346959 - RNA, 19 nt, Artificial Sequence
  Description of Artificial Sequence: Synthetic oligonucleotide
cuaaacacacucgaaccau

SEQ ID NO: 1346960 - RNA, 19 nt, Artificial Sequence
  Description of Artificial Sequence: Synthetic oligonucleotide
ucaggucgauuugcagcca

SEQ ID NO: 1346961 - RNA, 19 nt, Artificial Sequence
  Description of Artificial Sequence: Synthetic oligonucleotide
gcccagguuucucagccug

SEQ ID NO: 1346962 - RNA, 19 nt, Artificial Sequence
  Description of Artificial Sequence: Synthetic oligonucleotide
ccccuaaccacuucaguga

SEQ ID NO: 1346963 - RNA, 19 nt, Artificial Sequence
  Description of Artificial Sequence: Synthetic oligonucleotide
gacauccgaggaguuccac

SEQ ID NO: 1346964 - RNA, 19 nt, Artificial Sequence
  Description of Artificial Sequence: Synthetic oligonucleotide
ugaugucaacgguguuuua

SEQ ID NO: 1346965 - RNA, 19 nt, Artificial Sequence
  Description of Artificial Sequence: Synthetic oligonucleotide
cuuguaccucggucaccac

SEQ ID NO: 1346966 - RNA, 19 nt, Artificial Sequence
  Description of Artificial Sequence: Synthetic oligonucleotide
cacagaugacgcuguuaga

SEQ ID NO: 1346967 - RNA, 19 nt, Artificial Sequence
  Description of Artificial Sequence: Synthetic oligonucleotide
cauccgaggaguuccacuu

SEQ ID NO: 1346968 - RNA, 19 nt, Artificial Sequence
  Description of Artificial Sequence: Synthetic oligonucleotide
ugcuccauaccaggcucuc

SEQ ID NO: 1346969 - RNA, 19 nt, Artificial Sequence
  Description of Artificial Sequence: Synthetic oligonucleotide
ccuucuccgguccuuccag

SEQ ID NO: 1346970 - RNA, 19 nt, Artificial Sequence
  Description of Artificial Sequence: Synthetic oligonucleotide
gcagcggcuggcuucccgc

SEQ ID NO: 1346971 - RNA, 19 nt, Artificial Sequence
  Description of Artificial Sequence: Synthetic oligonucleotide
caugccgagguaagaaaau

SEQ ID NO: 1346972 - RNA, 19 nt, Artificial Sequence
  Description of Artificial Sequence: Synthetic oligonucleotide
cagauacguaauacauucu

SEQ ID NO: 1346973 - RNA, 19 nt, Artificial Sequence
  Description of Artificial Sequence: Synthetic oligonucleotide
cccuaaccacuucagugac

SEQ ID NO: 1346974 - RNA, 19 nt, Artificial Sequence
  Description of Artificial Sequence: Synthetic oligonucleotide
gugcaauaauugguggcaa

SEQ ID NO: 1346975 - RNA, 19 nt, Artificial Sequence
  Description of Artificial Sequence: Synthetic oligonucleotide
ggggugucguacugagccc

SEQ ID NO: 1346976 - RNA, 19 nt, Artificial Sequence
  Description of Artificial Sequence: Synthetic oligonucleotide
acaggauguuugaaaugua

SEQ ID NO: 1346977 - RNA, 19 nt, Artificial Sequence
  Description of Artificial Sequence: Synthetic oligonucleotide
cucuauaggcagacacaua

SEQ ID NO: 1346978 - RNA, 19 nt, Artificial Sequence
  Description of Artificial Sequence: Synthetic oligonucleotide
cagaugacgcuguuagaau

SEQ ID NO: 1346979 - RNA, 19 nt, Artificial Sequence
  Description of Artificial Sequence: Synthetic oligonucleotide
ccaugguagauccaguggu

SEQ ID NO: 1346980 - RNA, 19 nt, Artificial Sequence
  Description of Artificial Sequence: Synthetic oligonucleotide
ggugucguacugagcccgg

SEQ ID NO: 1346981 - RNA, 19 nt, Artificial Sequence
  Description of Artificial Sequence: Synthetic oligonucleotide
gugguaccugguacaccag

SEQ ID NO: 1346982 - RNA, 19 nt, Artificial Sequence
  Description of Artificial Sequence: Synthetic oligonucleotide
aggucgauuugcagccacu

SEQ ID NO: 1346983 - RNA, 19 nt, Artificial Sequence
  Description of Artificial Sequence: Synthetic oligonucleotide
caugguagauccagugguu

SEQ ID NO: 1346984 - RNA, 19 nt, Artificial Sequence
  Description of Artificial Sequence: Synthetic oligonucleotide
cgugcaauaauugguggca

SEQ ID NO: 1346985 - RNA, 19 nt, Artificial Sequence
  Description of Artificial Sequence: Synthetic oligonucleotide
agugcaugauagggaguuu

SEQ ID NO: 1346986 - RNA, 19 nt, Artificial Sequence
  Description of Artificial Sequence: Synthetic oligonucleotide
cagcacugugauuuucacu

SEQ ID NO: 1346987 - RNA, 19 nt, Artificial Sequence
  Description of Artificial Sequence: Synthetic oligonucleotide
gugucguacugagcccggc

SEQ ID NO: 1346988 - RNA, 19 nt, Artificial Sequence
  Description of Artificial Sequence: Synthetic oligonucleotide
gacggccuuugagaguaaa

SEQ ID NO: 1346989 - RNA, 19 nt, Artificial Sequence
  Description of Artificial Sequence: Synthetic oligonucleotide
guacugagcccggcccgag

SEQ ID NO: 1346990 - RNA, 19 nt, Artificial Sequence
  Description of Artificial Sequence: Synthetic oligonucleotide
cccaucgucacuguacaga

SEQ ID NO: 1346991 - RNA, 19 nt, Artificial Sequence
  Description of Artificial Sequence: Synthetic oligonucleotide
cuccgguccuuccagcugu

SEQ ID NO: 1346992 - RNA, 19 nt, Artificial Sequence
  Description of Artificial Sequence: Synthetic oligonucleotide
aacugacacucaagccauu

SEQ ID NO: 1346993 - RNA, 19 nt, Artificial Sequence
  Description of Artificial Sequence: Synthetic oligonucleotide
gugcaugauagggaguuuu

SEQ ID NO: 1346994 - RNA, 19 nt, Artificial Sequence
  Description of Artificial Sequence: Synthetic oligonucleotide
gcuacuuccugggugcucu

SEQ ID NO: 1346995 - RNA, 19 nt, Artificial Sequence
  Description of Artificial Sequence: Synthetic oligonucleotide
ccacauuccccuaaccacu

SEQ ID NO: 1346996 - RNA, 19 nt, Artificial Sequence
  Description of Artificial Sequence: Synthetic oligonucleotide
gcccaucgucacuguacag

SEQ ID NO: 1346997 - RNA, 19 nt, Artificial Sequence
  Description of Artificial Sequence: Synthetic oligonucleotide
cguuuaucuauaacugagu

SEQ ID NO: 1346998 - RNA, 19 nt, Artificial Sequence
  Description of Artificial Sequence: Synthetic oligonucleotide
ccuaaccacuucagugaca

SEQ ID NO: 1346999 - RNA, 19 nt, Artificial Sequence
  Description of Artificial Sequence: Synthetic oligonucleotide
caggcucucuauacacagu

SEQ ID NO: 1347000 - RNA, 19 nt, Artificial Sequence
  Description of Artificial Sequence: Synthetic oligonucleotide
ccacacaguaacaccuuua

SEQ ID NO: 1347001 - RNA, 19 nt, Artificial Sequence
  Description of Artificial Sequence: Synthetic oligonucleotide
cugcuccauaccaggcucu

SEQ ID NO: 1347002 - RNA, 19 nt, Artificial Sequence
  Description of Artificial Sequence: Synthetic oligonucleotide
ccaugugcuuuaaauggau

SEQ ID NO: 1347003 - RNA, 19 nt, Artificial Sequence
  Description of Artificial Sequence: Synthetic oligonucleotide
caguccacuccagcacaga

SEQ ID NO: 1347004 - RNA, 19 nt, Artificial Sequence
  Description of Artificial Sequence: Synthetic oligonucleotide
ccgaggaguuccacuuuca

SEQ ID NO: 1347005 - RNA, 19 nt, Artificial Sequence
  Description of Artificial Sequence: Synthetic oligonucleotide
agcccggcccgaggaggag

SEQ ID NO: 1347006 - RNA, 19 nt, Artificial Sequence
  Description of Artificial Sequence: Synthetic oligonucleotide
ccauaccaggcucucuaua

SEQ ID NO: 1347007 - RNA, 19 nt, Artificial Sequence
  Description of Artificial Sequence: Synthetic oligonucleotide
caccgucaaaggauuucuu

SEQ ID NO: 1347008 - RNA, 19 nt, Artificial Sequence
  Description of Artificial Sequence: Synthetic oligonucleotide
cggccuuugagaguaaacu

SEQ ID NO: 1347009 - RNA, 19 nt, Artificial Sequence
  Description of Artificial Sequence: Synthetic oligonucleotide
ggacaggguucacucuaau

SEQ ID NO: 1347010 - RNA, 19 nt, Artificial Sequence
  Description of Artificial Sequence: Synthetic oligonucleotide
cccgccuuucggggugucg

SEQ ID NO: 1347011 - RNA, 19 nt, Artificial Sequence
  Description of Artificial Sequence: Synthetic oligonucleotide
cuccugcuacuuccugggu

SEQ ID NO: 1347012 - RNA, 19 nt, Artificial Sequence
  Description of Artificial Sequence: Synthetic oligonucleotide
cccggcccgaggaggagca

SEQ ID NO: 1347013 - RNA, 19 nt, Artificial Sequence
  Description of Artificial Sequence: Synthetic oligonucleotide
cgucacuguacagaacucu

SEQ ID NO: 1347014 - RNA, 19 nt, Artificial Sequence
  Description of Artificial Sequence: Synthetic oligonucleotide
ccauuggacaggguucacu

SEQ ID NO: 1347015 - RNA, 19 nt, Artificial Sequence
  Description of Artificial Sequence: Synthetic oligonucleotide
guaccucggucaccacauu

SEQ ID NO: 1347016 - RNA, 19 nt, Artificial Sequence
  Description of Artificial Sequence: Synthetic oligonucleotide
agacggccuuugagaguaa

SEQ ID NO: 1347017 - RNA, 19 nt, Artificial Sequence
  Description of Artificial Sequence: Synthetic oligonucleotide
ucccgccuuucgggguguc

SEQ ID NO: 1347018 - RNA, 19 nt, Artificial Sequence
  Description of Artificial Sequence: Synthetic oligonucleotide
caccaccgucaaaggauuu

SEQ ID NO: 1347019 - RNA, 19 nt, Artificial Sequence
  Description of Artificial Sequence: Synthetic oligonucleotide
gcaccaccgucaaaggauu

SEQ ID NO: 1347020 - RNA, 19 nt, Artificial Sequence
  Description of Artificial Sequence: Synthetic oligonucleotide
gcuccauaccaggcucucu

SEQ ID NO: 1347021 - RNA, 19 nt, Artificial Sequence
  Description of Artificial Sequence: Synthetic oligonucleotide
cgaacauccuugugauaau

SEQ ID NO: 1347022 - RNA, 19 nt, Artificial Sequence
  Description of Artificial Sequence: Synthetic oligonucleotide
cccauguggucaguccacu

SEQ ID NO: 1347023 - RNA, 19 nt, Artificial Sequence
  Description of Artificial Sequence: Synthetic oligonucleotide
ccgccuuucggggugucgu

SEQ ID NO: 1347024 - RNA, 19 nt, Artificial Sequence
  Description of Artificial Sequence: Synthetic oligonucleotide
gggcagcggcuggcuuccc

SEQ ID NO: 1347025 - RNA, 19 nt, Artificial Sequence
  Description of Artificial Sequence: Synthetic oligonucleotide
ccggcccgaggaggagcaa

SEQ ID NO: 1347026 - RNA, 19 nt, Artificial Sequence
  Description of Artificial Sequence: Synthetic oligonucleotide
aacagugcagauuucaacc

SEQ ID NO: 1347027 - RNA, 19 nt, Artificial Sequence
  Description of Artificial Sequence: Synthetic oligonucleotide
aauaacuggucaaagaugg

SEQ ID NO: 1347028 - RNA, 19 nt, Artificial Sequence
  Description of Artificial Sequence: Synthetic oligonucleotide
aagguaacgaccauaaccc

SEQ ID NO: 1347029 - RNA, 19 nt, Artificial Sequence
  Description of Artificial Sequence: Synthetic oligonucleotide
ucaaauuccacugacauug

SEQ ID NO: 1347030 - RNA, 19 nt, Artificial Sequence
  Description of Artificial Sequence: Synthetic oligonucleotide
acauuucaggccuaaagcc

SEQ ID NO: 1347031 - RNA, 19 nt, Artificial Sequence
  Description of Artificial Sequence: Synthetic oligonucleotide
caugccaugagcaugacgc

SEQ ID NO: 1347032 - RNA, 19 nt, Artificial Sequence
  Description of Artificial Sequence: Synthetic oligonucleotide
guuaauguacuuaagguag

SEQ ID NO: 1347033 - RNA, 19 nt, Artificial Sequence
  Description of Artificial Sequence: Synthetic oligonucleotide
caagguaacgaccauaacc

SEQ ID NO: 1347034 - RNA, 19 nt, Artificial Sequence
  Description of Artificial Sequence: Synthetic oligonucleotide
aauuguuuccauuuucccu

SEQ ID NO: 1347035 - RNA, 19 nt, Artificial Sequence
  Description of Artificial Sequence: Synthetic oligonucleotide
ucgaaguccaucuuuauca

SEQ ID NO: 1347036 - RNA, 19 nt, Artificial Sequence
  Description of Artificial Sequence: Synthetic oligonucleotide
aaguaagugauguaaucca

SEQ ID NO: 1347037 - RNA, 19 nt, Artificial Sequence
  Description of Artificial Sequence: Synthetic oligonucleotide
aggaaagguaccauuaucc

SEQ ID NO: 1347038 - RNA, 19 nt, Artificial Sequence
  Description of Artificial Sequence: Synthetic oligonucleotide
ucagaauugaucugguccc

SEQ ID NO: 1347039 - RNA, 19 nt, Artificial Sequence
  Description of Artificial Sequence: Synthetic oligonucleotide
auuucaaccuguccagacc

SEQ ID NO: 1347040 - RNA, 19 nt, Artificial Sequence
  Description of Artificial Sequence: Synthetic oligonucleotide
aggaggagaaugcagagag

SEQ ID NO: 1347041 - RNA, 19 nt, Artificial Sequence
  Description of Artificial Sequence: Synthetic oligonucleotide
aaugcagagagaucaagau

SEQ ID NO: 1347042 - RNA, 19 nt, Artificial Sequence
  Description of Artificial Sequence: Synthetic oligonucleotide
auuuucucgagccuucagg

SEQ ID NO: 1347043 - RNA, 19 nt, Artificial Sequence
  Description of Artificial Sequence: Synthetic oligonucleotide
ugaacagccucugagcucg

SEQ ID NO: 1347044 - RNA, 19 nt, Artificial Sequence
  Description of Artificial Sequence: Synthetic oligonucleotide
cagguuaauguacuuaagg

SEQ ID NO: 1347045 - RNA, 19 nt, Artificial Sequence
  Description of Artificial Sequence: Synthetic oligonucleotide
ucucuuucggccauccagg

SEQ ID NO: 1347046 - RNA, 19 nt, Artificial Sequence
  Description of Artificial Sequence: Synthetic oligonucleotide
agaagugucgagugacucc

SEQ ID NO: 1347047 - RNA, 19 nt, Artificial Sequence
  Description of Artificial Sequence: Synthetic oligonucleotide
uguaguuuccacaaaucuc

SEQ ID NO: 1347048 - RNA, 19 nt, Artificial Sequence
  Description of Artificial Sequence: Synthetic oligonucleotide
augauagcgccguugcugc

SEQ ID NO: 1347049 - RNA, 19 nt, Artificial Sequence
  Description of Artificial Sequence: Synthetic oligonucleotide
uguacuuaagguagcaguc

SEQ ID NO: 1347050 - RNA, 19 nt, Artificial Sequence
  Description of Artificial Sequence: Synthetic oligonucleotide
uguaaaugaucucauucuc

SEQ ID NO: 1347051 - RNA, 19 nt, Artificial Sequence
  Description of Artificial Sequence: Synthetic oligonucleotide
uugucuuuucagauccucg

SEQ ID NO: 1347052 - RNA, 19 nt, Artificial Sequence
  Description of Artificial Sequence: Synthetic oligonucleotide
uuauacagccaguagggga

SEQ ID NO: 1347053 - RNA, 19 nt, Artificial Sequence
  Description of Artificial Sequence: Synthetic oligonucleotide
aaauaacuggucaaagaug

SEQ ID NO: 1347054 - RNA, 19 nt, Artificial Sequence
  Description of Artificial Sequence: Synthetic oligonucleotide
auucugauccugaaggggc

SEQ ID NO: 1347055 - RNA, 19 nt, Artificial Sequence
  Description of Artificial Sequence: Synthetic oligonucleotide
aaagauggacaaguaagug

SEQ ID NO: 1347056 - RNA, 19 nt, Artificial Sequence
  Description of Artificial Sequence: Synthetic oligonucleotide
agcauuuccagguaucucu

SEQ ID NO: 1347057 - RNA, 19 nt, Artificial Sequence
  Description of Artificial Sequence: Synthetic oligonucleotide
uagaauucagcaaacucau

SEQ ID NO: 1347058 - RNA, 19 nt, Artificial Sequence
  Description of Artificial Sequence: Synthetic oligonucleotide
uucagguuaauguacuuaa

SEQ ID NO: 1347059 - RNA, 19 nt, Artificial Sequence
  Description of Artificial Sequence: Synthetic oligonucleotide
ugucgagugacuccaagga

SEQ ID NO: 1347060 - RNA, 19 nt, Artificial Sequence
  Description of Artificial Sequence: Synthetic oligonucleotide
auguacuuaagguagcagu

SEQ ID NO: 1347061 - RNA, 19 nt, Artificial Sequence
  Description of Artificial Sequence: Synthetic oligonucleotide
acaacauugccacuggagu

SEQ ID NO: 1347062 - RNA, 19 nt, Artificial Sequence
  Description of Artificial Sequence: Synthetic oligonucleotide
acgaccauaacccucuuca

SEQ ID NO: 1347063 - RNA, 19 nt, Artificial Sequence
  Description of Artificial Sequence: Synthetic oligonucleotide
uaauccagcuucucagacg

SEQ ID NO: 1347064 - RNA, 19 nt, Artificial Sequence
  Description of Artificial Sequence: Synthetic oligonucleotide
ugagcuuccaggaaagcaa

SEQ ID NO: 1347065 - RNA, 19 nt, Artificial Sequence
  Description of Artificial Sequence: Synthetic oligonucleotide
ucgagugacuccaaggacu

SEQ ID NO: 1347066 - RNA, 19 nt, Artificial Sequence
  Description of Artificial Sequence: Synthetic oligonucleotide
uguacauuuucaugaguga

SEQ ID NO: 1347067 - RNA, 19 nt, Artificial Sequence
  Description of Artificial Sequence: Synthetic oligonucleotide
uguguaauccuggagguac

SEQ ID NO: 1347068 - RNA, 19 nt, Artificial Sequence
  Description of Artificial Sequence: Synthetic oligonucleotide
uccugaaauagcauugagu

SEQ ID NO: 1347069 - RNA, 19 nt, Artificial Sequence
  Description of Artificial Sequence: Synthetic oligonucleotide
aaaucucacaguuguaguu

SEQ ID NO: 1347070 - RNA, 19 nt, Artificial Sequence
  Description of Artificial Sequence: Synthetic oligonucleotide
ucugagcucgcucuucuag

SEQ ID NO: 1347071 - RNA, 19 nt, Artificial Sequence
  Description of Artificial Sequence: Synthetic oligonucleotide
aagguagcagucaugaaga

SEQ ID NO: 1347072 - RNA, 19 nt, Artificial Sequence
  Description of Artificial Sequence: Synthetic oligonucleotide
uuuccgaugaaauuccuuu

SEQ ID NO: 1347073 - RNA, 19 nt, Artificial Sequence
  Description of Artificial Sequence: Synthetic oligonucleotide
aagcuuauacagccaguag

SEQ ID NO: 1347074 - RNA, 19 nt, Artificial Sequence
  Description of Artificial Sequence: Synthetic oligonucleotide
cauugaguuccucuuuucg

SEQ ID NO: 1347075 - RNA, 19 nt, Artificial Sequence
  Description of Artificial Sequence: Synthetic oligonucleotide
acagaucucauuugggugu

SEQ ID NO: 1347076 - RNA, 19 nt, Artificial Sequence
  Description of Artificial Sequence: Synthetic oligonucleotide
aauguacuuaagguagcag

SEQ ID NO: 1347077 - RNA, 19 nt, Artificial Sequence
  Description of Artificial Sequence: Synthetic oligonucleotide
aagucggucugaaucuucc

SEQ ID NO: 1347078 - RNA, 19 nt, Artificial Sequence
  Description of Artificial Sequence: Synthetic oligonucleotide
acuagagcaguccuugucu

SEQ ID NO: 1347079 - RNA, 19 nt, Artificial Sequence
  Description of Artificial Sequence: Synthetic oligonucleotide
agaaucuccacguauucau

SEQ ID NO: 1347080 - RNA, 19 nt, Artificial Sequence
  Description of Artificial Sequence: Synthetic oligonucleotide
agcaugacgccauucagca

SEQ ID NO: 1347081 - RNA, 19 nt, Artificial Sequence
  Description of Artificial Sequence: Synthetic oligonucleotide
auuuggguguuuccgauga

SEQ ID NO: 1347082 - RNA, 19 nt, Artificial Sequence
  Description of Artificial Sequence: Synthetic oligonucleotide
aaucccucaaguucccacu

SEQ ID NO: 1347083 - RNA, 19 nt, Artificial Sequence
  Description of Artificial Sequence: Synthetic oligonucleotide
uuuguacccuuugauuugg

SEQ ID NO: 1347084 - RNA, 19 nt, Artificial Sequence
  Description of Artificial Sequence: Synthetic oligonucleotide
acucauuggguccugaaau

SEQ ID NO: 1347085 - RNA, 19 nt, Artificial Sequence
  Description of Artificial Sequence: Synthetic oligonucleotide
uugagucuguuauagaauu

SEQ ID NO: 1347086 - RNA, 19 nt, Artificial Sequence
  Description of Artificial Sequence: Synthetic oligonucleotide
ucagguuaauguacuuaag

SEQ ID NO: 1347087 - RNA, 19 nt, Artificial Sequence
  Description of Artificial Sequence: Synthetic oligonucleotide
aaacagagaagugucgagu

SEQ ID NO: 1347088 - RNA, 19 nt, Artificial Sequence
  Description of Artificial Sequence: Synthetic oligonucleotide
ucuugcauggcccgcgugc

SEQ ID NO: 1347089 - RNA, 19 nt, Artificial Sequence
  Description of Artificial Sequence: Synthetic oligonucleotide
uugggaugcccaaacaccu

SEQ ID NO: 1347090 - RNA, 19 nt, Artificial Sequence
  Description of Artificial Sequence: Synthetic oligonucleotide
ugucuuuucagauccucgu

SEQ ID NO: 1347091 - RNA, 19 nt, Artificial Sequence
  Description of Artificial Sequence: Synthetic oligonucleotide
gacgccauucagcaaagug

SEQ ID NO: 1347092 - RNA, 19 nt, Artificial Sequence
  Description of Artificial Sequence: Synthetic oligonucleotide
gcagucaugaagaucaagg

SEQ ID NO: 1347093 - RNA, 19 nt, Artificial Sequence
  Description of Artificial Sequence: Synthetic oligonucleotide
cacaacauugccacuggag

SEQ ID NO: 1347094 - RNA, 19 nt, Artificial Sequence
  Description of Artificial Sequence: Synthetic oligonucleotide
ucguucugaagccuucugc

SEQ ID NO: 1347095 - RNA, 19 nt, Artificial Sequence
  Description of Artificial Sequence: Synthetic oligonucleotide
aggaaagcaauaucuuugu

SEQ ID NO: 1347096 - RNA, 19 nt, Artificial Sequence
  Description of Artificial Sequence: Synthetic oligonucleotide
cucaugauagcgccguugc

SEQ ID NO: 1347097 - RNA, 19 nt, Artificial Sequence
  Description of Artificial Sequence: Synthetic oligonucleotide
ucgcuguuccccuagaauc

SEQ ID NO: 1347098 - RNA, 19 nt, Artificial Sequence
  Description of Artificial Sequence: Synthetic oligonucleotide
aacgaccauaacccucuuc

SEQ ID NO: 1347099 - RNA, 19 nt, Artificial Sequence
  Description of Artificial Sequence: Synthetic oligonucleotide
aacucauuggguccugaaa

SEQ ID NO: 1347100 - RNA, 19 nt, Artificial Sequence
  Description of Artificial Sequence: Synthetic oligonucleotide
ucuuuguuccucucagugu

SEQ ID NO: 1347101 - RNA, 19 nt, Artificial Sequence
  Description of Artificial Sequence: Synthetic oligonucleotide
caaacagagaagugucgag

SEQ ID NO: 1347102 - RNA, 19 nt, Artificial Sequence
  Description of Artificial Sequence: Synthetic oligonucleotide
uucgaaguccaucuuuauc

SEQ ID NO: 1347103 - RNA, 19 nt, Artificial Sequence
  Description of Artificial Sequence: Synthetic oligonucleotide
augcagagagaucaagaug

SEQ ID NO: 1347104 - RNA, 19 nt, Artificial Sequence
  Description of Artificial Sequence: Synthetic oligonucleotide
aaacaccucaugccaugag

SEQ ID NO: 1347105 - RNA, 19 nt, Artificial Sequence
  Description of Artificial Sequence: Synthetic oligonucleotide
agagaucaagaugggcucc

SEQ ID NO: 1347106 - RNA, 19 nt, Artificial Sequence
  Description of Artificial Sequence: Synthetic oligonucleotide
gagagaucaagaugggcuc

SEQ ID NO: 1347107 - RNA, 19 nt, Artificial Sequence
  Description of Artificial Sequence: Synthetic oligonucleotide
ucaugccaugagcaugacg

SEQ ID NO: 1347108 - RNA, 19 nt, Artificial Sequence
  Description of Artificial Sequence: Synthetic oligonucleotide
aggccuaaagccaacagug

SEQ ID NO: 1347109 - RNA, 19 nt, Artificial Sequence
  Description of Artificial Sequence: Synthetic oligonucleotide
uccgaugaaauuccuuuau

SEQ ID NO: 1347110 - RNA, 19 nt, Artificial Sequence
  Description of Artificial Sequence: Synthetic oligonucleotide
aguaagugauguaauccag

SEQ ID NO: 1347111 - RNA, 19 nt, Artificial Sequence
  Description of Artificial Sequence: Synthetic oligonucleotide
gugucgagugacuccaagg

SEQ ID NO: 1347112 - RNA, 19 nt, Artificial Sequence
  Description of Artificial Sequence: Synthetic oligonucleotide
uggcacacagaucucauuu

SEQ ID NO: 1347113 - RNA, 19 nt, Artificial Sequence
  Description of Artificial Sequence: Synthetic oligonucleotide
uaauguacuuaagguagca

SEQ ID NO: 1347114 - RNA, 19 nt, Artificial Sequence
  Description of Artificial Sequence: Synthetic oligonucleotide
caugauagcgccguugcug

SEQ ID NO: 1347115 - RNA, 19 nt, Artificial Sequence
  Description of Artificial Sequence: Synthetic oligonucleotide
agucggucugaaucuuccc

SEQ ID NO: 1347116 - RNA, 19 nt, Artificial Sequence
  Description of Artificial Sequence: Synthetic oligonucleotide
auggguuugccgucccagc

SEQ ID NO: 1347117 - RNA, 19 nt, Artificial Sequence
  Description of Artificial Sequence: Synthetic oligonucleotide
gacgccuucagguuaaugu

SEQ ID NO: 1347118 - RNA, 19 nt, Artificial Sequence
  Description of Artificial Sequence: Synthetic oligonucleotide
uuggcccacaaggagacag

SEQ ID NO: 1347119 - RNA, 19 nt, Artificial Sequence
  Description of Artificial Sequence: Synthetic oligonucleotide
ggaaagguaccauuauccc

SEQ ID NO: 1347120 - RNA, 19 nt, Artificial Sequence
  Description of Artificial Sequence: Synthetic oligonucleotide
cauuggguccugaaauagc

SEQ ID NO: 1347121 - RNA, 19 nt, Artificial Sequence
  Description of Artificial Sequence: Synthetic oligonucleotide
aaagugccucuggaaggcc

SEQ ID NO: 1347122 - RNA, 19 nt, Artificial Sequence
  Description of Artificial Sequence: Synthetic oligonucleotide
uccucaaauuccacugaca

SEQ ID NO: 1347123 - RNA, 19 nt, Artificial Sequence
  Description of Artificial Sequence: Synthetic oligonucleotide
gauuuucucgagccuucag

SEQ ID NO: 1347124 - RNA, 19 nt, Artificial Sequence
  Description of Artificial Sequence: Synthetic oligonucleotide
uacccuuugauuugggauu

SEQ ID NO: 1347125 - RNA, 19 nt, Artificial Sequence
  Description of Artificial Sequence: Synthetic oligonucleotide
uguacccuuugauuuggga

SEQ ID NO: 1347126 - RNA, 19 nt, Artificial Sequence
  Description of Artificial Sequence: Synthetic oligonucleotide
uggguguuuccgaugaaau

SEQ ID NO: 1347127 - RNA, 19 nt, Artificial Sequence
  Description of Artificial Sequence: Synthetic oligonucleotide
guagguguaguuuccacaa

SEQ ID NO: 1347128 - RNA, 19 nt, Artificial Sequence
  Description of Artificial Sequence: Synthetic oligonucleotide
cauuucaggccuaaagcca

SEQ ID NO: 1347129 - RNA, 19 nt, Artificial Sequence
  Description of Artificial Sequence: Synthetic oligonucleotide
cauuaucccacuucuucuc

SEQ ID NO: 1347130 - RNA, 19 nt, Artificial Sequence
  Description of Artificial Sequence: Synthetic oligonucleotide
agguguaguuuccacaaau

SEQ ID NO: 1347131 - RNA, 19 nt, Artificial Sequence
  Description of Artificial Sequence: Synthetic oligonucleotide
cuuauacagccaguagggg

SEQ ID NO: 1347132 - RNA, 19 nt, Artificial Sequence
  Description of Artificial Sequence: Synthetic oligonucleotide
uccaggaaagcaauaucuu

SEQ ID NO: 1347133 - RNA, 19 nt, Artificial Sequence
  Description of Artificial Sequence: Synthetic oligonucleotide
gaagugucgagugacucca

SEQ ID NO: 1347134 - RNA, 19 nt, Artificial Sequence
  Description of Artificial Sequence: Synthetic oligonucleotide
cuuucggccauccaggaaa

SEQ ID NO: 1347135 - RNA, 19 nt, Artificial Sequence
  Description of Artificial Sequence: Synthetic oligonucleotide
caugacgccauucagcaaa

SEQ ID NO: 1347136 - RNA, 19 nt, Artificial Sequence
  Description of Artificial Sequence: Synthetic oligonucleotide
gguuaauguacuuaaggua

SEQ ID NO: 1347137 - RNA, 19 nt, Artificial Sequence
  Description of Artificial Sequence: Synthetic oligonucleotide
uccucguaugucuucuugu

SEQ ID NO: 1347138 - RNA, 19 nt, Artificial Sequence
  Description of Artificial Sequence: Synthetic oligonucleotide
agugucgagugacuccaag

SEQ ID NO: 1347139 - RNA, 19 nt, Artificial Sequence
  Description of Artificial Sequence: Synthetic oligonucleotide
caugaagaucaagguaacg

SEQ ID NO: 1347140 - RNA, 19 nt, Artificial Sequence
  Description of Artificial Sequence: Synthetic oligonucleotide
cugcucgucucuuucggcc

SEQ ID NO: 1347141 - RNA, 19 nt, Artificial Sequence
  Description of Artificial Sequence: Synthetic oligonucleotide
caaagugccucuggaaggc

SEQ ID NO: 1347142 - RNA, 19 nt, Artificial Sequence
  Description of Artificial Sequence: Synthetic oligonucleotide
ucauuuggguguuuccgau

SEQ ID NO: 1347143 - RNA, 19 nt, Artificial Sequence
  Description of Artificial Sequence: Synthetic oligonucleotide
gagcaugacgccauucagc

SEQ ID NO: 1347144 - RNA, 19 nt, Artificial Sequence
  Description of Artificial Sequence: Synthetic oligonucleotide
uaucucuuauacucugcau

SEQ ID NO: 1347145 - RNA, 19 nt, Artificial Sequence
  Description of Artificial Sequence: Synthetic oligonucleotide
aucaagguaacgaccauaa

SEQ ID NO: 1347146 - RNA, 19 nt, Artificial Sequence
  Description of Artificial Sequence: Synthetic oligonucleotide
ugcaaagugggcaguguuu

SEQ ID NO: 1347147 - RNA, 19 nt, Artificial Sequence
  Description of Artificial Sequence: Synthetic oligonucleotide
cacguauucauagaucuga

SEQ ID NO: 1347148 - RNA, 19 nt, Artificial Sequence
  Description of Artificial Sequence: Synthetic oligonucleotide
uuucccuucgccgcggcgc

SEQ ID NO: 1347149 - RNA, 19 nt, Artificial Sequence
  Description of Artificial Sequence: Synthetic oligonucleotide
ucggucugaaucuucccaa

SEQ ID NO: 1347150 - RNA, 19 nt, Artificial Sequence
  Description of Artificial Sequence: Synthetic oligonucleotide
uggauuuucucgagccuuc

SEQ ID NO: 1347151 - RNA, 19 nt, Artificial Sequence
  Description of Artificial Sequence: Synthetic oligonucleotide
uccagguaucucuuauacu

SEQ ID NO: 1347152 - RNA, 19 nt, Artificial Sequence
  Description of Artificial Sequence: Synthetic oligonucleotide
gaagcuuauacagccagua

SEQ ID NO: 1347153 - RNA, 19 nt, Artificial Sequence
  Description of Artificial Sequence: Synthetic oligonucleotide
uuuucccuucgccgcggcg

SEQ ID NO: 1347154 - RNA, 19 nt, Artificial Sequence
  Description of Artificial Sequence: Synthetic oligonucleotide
cagagaagugucgagugac

SEQ ID NO: 1347155 - RNA, 19 nt, Artificial Sequence
  Description of Artificial Sequence: Synthetic oligonucleotide
uuguacccuuugauuuggg

SEQ ID NO: 1347156 - RNA, 19 nt, Artificial Sequence
  Description of Artificial Sequence: Synthetic oligonucleotide
ucaagguaacgaccauaac

SEQ ID NO: 1347157 - RNA, 19 nt, Artificial Sequence
  Description of Artificial Sequence: Synthetic oligonucleotide
aaggccuucggcccucggu

SEQ ID NO: 1347158 - RNA, 19 nt, Artificial Sequence
  Description of Artificial Sequence: Synthetic oligonucleotide
caggaaagguaccauuauc

SEQ ID NO: 1347159 - RNA, 19 nt, Artificial Sequence
  Description of Artificial Sequence: Synthetic oligonucleotide
gaauugaucuggucccgga

SEQ ID NO: 1347160 - RNA, 19 nt, Artificial Sequence
  Description of Artificial Sequence: Synthetic oligonucleotide
auuuucccuucgccgcggc

SEQ ID NO: 1347161 - RNA, 19 nt, Artificial Sequence
  Description of Artificial Sequence: Synthetic oligonucleotide
uccaugagccguucuuucu

SEQ ID NO: 1347162 - RNA, 19 nt, Artificial Sequence
  Description of Artificial Sequence: Synthetic oligonucleotide
guccugaaauagcauugag

SEQ ID NO: 1347163 - RNA, 19 nt, Artificial Sequence
  Description of Artificial Sequence: Synthetic oligonucleotide
ucaaguucccacugaccuc

SEQ ID NO: 1347164 - RNA, 19 nt, Artificial Sequence
  Description of Artificial Sequence: Synthetic oligonucleotide
cucaaguucccacugaccu

SEQ ID NO: 1347165 - RNA, 19 nt, Artificial Sequence
  Description of Artificial Sequence: Synthetic oligonucleotide
guucccacugaccuccaug

SEQ ID NO: 1347166 - RNA, 19 nt, Artificial Sequence
  Description of Artificial Sequence: Synthetic oligonucleotide
uucacucuaucuguguaau

SEQ ID NO: 1347167 - RNA, 19 nt, Artificial Sequence
  Description of Artificial Sequence: Synthetic oligonucleotide
uaguuuccacaaaucucac

SEQ ID NO: 1347168 - RNA, 19 nt, Artificial Sequence
  Description of Artificial Sequence: Synthetic oligonucleotide
ucggccauccaggaaaggu

SEQ ID NO: 1347169 - RNA, 19 nt, Artificial Sequence
  Description of Artificial Sequence: Synthetic oligonucleotide
cuguuauagaauucagcaa

SEQ ID NO: 1347170 - RNA, 19 nt, Artificial Sequence
  Description of Artificial Sequence: Synthetic oligonucleotide
caaagauggacaaguaagu

SEQ ID NO: 1347171 - RNA, 19 nt, Artificial Sequence
  Description of Artificial Sequence: Synthetic oligonucleotide
uuugccgucccagcccagg

SEQ ID NO: 1347172 - RNA, 19 nt, Artificial Sequence
  Description of Artificial Sequence: Synthetic oligonucleotide
ucacaacauugccacugga

SEQ ID NO: 1347173 - RNA, 19 nt, Artificial Sequence
  Description of Artificial Sequence: Synthetic oligonucleotide
ucuaucuugcauggcccgc

SEQ ID NO: 1347174 - RNA, 19 nt, Artificial Sequence
  Description of Artificial Sequence: Synthetic oligonucleotide
uuccgaugaaauuccuuua

SEQ ID NO: 1347175 - RNA, 19 nt, Artificial Sequence
  Description of Artificial Sequence: Synthetic oligonucleotide
ucaugauagcgccguugcu

SEQ ID NO: 1347176 - RNA, 19 nt, Artificial Sequence
  Description of Artificial Sequence: Synthetic oligonucleotide
cauuuggguguuuccgaug

SEQ ID NO: 1347177 - RNA, 19 nt, Artificial Sequence
  Description of Artificial Sequence: Synthetic oligonucleotide
cucuuuucgaaguccaucu

SEQ ID NO: 1347178 - RNA, 19 nt, Artificial Sequence
  Description of Artificial Sequence: Synthetic oligonucleotide
cucauuuggguguuuccga

SEQ ID NO: 1347179 - RNA, 19 nt, Artificial Sequence
  Description of Artificial Sequence: Synthetic oligonucleotide
acaccucaugccaugagca

SEQ ID NO: 1347180 - RNA, 19 nt, Artificial Sequence
  Description of Artificial Sequence: Synthetic oligonucleotide
cucguaugucuucuuguuc

SEQ ID NO: 1347181 - RNA, 19 nt, Artificial Sequence
  Description of Artificial Sequence: Synthetic oligonucleotide
gagaagugucgagugacuc

SEQ ID NO: 1347182 - RNA, 19 nt, Artificial Sequence
  Description of Artificial Sequence: Synthetic oligonucleotide
uuggguguuuccgaugaaa

SEQ ID NO: 1347183 - RNA, 19 nt, Artificial Sequence
  Description of Artificial Sequence: Synthetic oligonucleotide
cuugcauggcccgcgugcg

SEQ ID NO: 1347184 - RNA, 19 nt, Artificial Sequence
  Description of Artificial Sequence: Synthetic oligonucleotide
gaucuggucccggagcgug

SEQ ID NO: 1347185 - RNA, 19 nt, Artificial Sequence
  Description of Artificial Sequence: Synthetic oligonucleotide
gucgagugacuccaaggac

SEQ ID NO: 1347186 - RNA, 19 nt, Artificial Sequence
  Description of Artificial Sequence: Synthetic oligonucleotide
gucggucugaaucuuccca

SEQ ID NO: 1347187 - RNA, 19 nt, Artificial Sequence
  Description of Artificial Sequence: Synthetic oligonucleotide
acguauucauagaucugag

SEQ ID NO: 1347188 - RNA, 19 nt, Artificial Sequence
  Description of Artificial Sequence: Synthetic oligonucleotide
gcgcuguacauuuucauga

SEQ ID NO: 1347189 - RNA, 19 nt, Artificial Sequence
  Description of Artificial Sequence: Synthetic oligonucleotide
cagugcagauuucaaccug

SEQ ID NO: 1347190 - RNA, 19 nt, Artificial Sequence
  Description of Artificial Sequence: Synthetic oligonucleotide
agauccucguaugucuucu

SEQ ID NO: 1347191 - RNA, 19 nt, Artificial Sequence
  Description of Artificial Sequence: Synthetic oligonucleotide
guacuuaagguagcaguca

SEQ ID NO: 1347192 - RNA, 19 nt, Artificial Sequence
  Description of Artificial Sequence: Synthetic oligonucleotide
ccugaaauagcauugaguu

SEQ ID NO: 1347193 - RNA, 19 nt, Artificial Sequence
  Description of Artificial Sequence: Synthetic oligonucleotide
cuguuccccuagaaucucc

SEQ ID NO: 1347194 - RNA, 19 nt, Artificial Sequence
  Description of Artificial Sequence: Synthetic oligonucleotide
ucuuucggccauccaggaa

SEQ ID NO: 1347195 - RNA, 19 nt, Artificial Sequence
  Description of Artificial Sequence: Synthetic oligonucleotide
cuugcgcuguacauuuuca

SEQ ID NO: 1347196 - RNA, 19 nt, Artificial Sequence
  Description of Artificial Sequence: Synthetic oligonucleotide
agguaacgaccauaacccu

SEQ ID NO: 1347197 - RNA, 19 nt, Artificial Sequence
  Description of Artificial Sequence: Synthetic oligonucleotide
agcagucaugaagaucaag

SEQ ID NO: 1347198 - RNA, 19 nt, Artificial Sequence
  Description of Artificial Sequence: Synthetic oligonucleotide
cuucacucuaucuguguaa

SEQ ID NO: 1347199 - RNA, 19 nt, Artificial Sequence
  Description of Artificial Sequence: Synthetic oligonucleotide
ggacaaguaagugauguaa

SEQ ID NO: 1347200 - RNA, 19 nt, Artificial Sequence
  Description of Artificial Sequence: Synthetic oligonucleotide
uaucuugcauggcccgcgu

SEQ ID NO: 1347201 - RNA, 19 nt, Artificial Sequence
  Description of Artificial Sequence: Synthetic oligonucleotide
cugaacagccucugagcuc

SEQ ID NO: 1347202 - RNA, 19 nt, Artificial Sequence
  Description of Artificial Sequence: Synthetic oligonucleotide
guaacgaccauaacccucu

SEQ ID NO: 1347203 - RNA, 19 nt, Artificial Sequence
  Description of Artificial Sequence: Synthetic oligonucleotide
uucuagggucccaccacau

SEQ ID NO: 1347204 - RNA, 19 nt, Artificial Sequence
  Description of Artificial Sequence: Synthetic oligonucleotide
uuucgcucucacugaucug

SEQ ID NO: 1347205 - RNA, 19 nt, Artificial Sequence
  Description of Artificial Sequence: Synthetic oligonucleotide
ucuagggucccaccacauu

SEQ ID NO: 1347206 - RNA, 19 nt, Artificial Sequence
  Description of Artificial Sequence: Synthetic oligonucleotide
gaucaagguaacgaccaua

SEQ ID NO: 1347207 - RNA, 19 nt, Artificial Sequence
  Description of Artificial Sequence: Synthetic oligonucleotide
uuuggguguuuccgaugaa

SEQ ID NO: 1347208 - RNA, 19 nt, Artificial Sequence
  Description of Artificial Sequence: Synthetic oligonucleotide
gauagcgccguugcugcuc

SEQ ID NO: 1347209 - RNA, 19 nt, Artificial Sequence
  Description of Artificial Sequence: Synthetic oligonucleotide
ucucacaguuguaguugau

SEQ ID NO: 1347210 - RNA, 19 nt, Artificial Sequence
  Description of Artificial Sequence: Synthetic oligonucleotide
cuggucaaagauggacaag

SEQ ID NO: 1347211 - RNA, 19 nt, Artificial Sequence
  Description of Artificial Sequence: Synthetic oligonucleotide
cuucuagggucccaccaca

SEQ ID NO: 1347212 - RNA, 19 nt, Artificial Sequence
  Description of Artificial Sequence: Synthetic oligonucleotide
ugcuccuccuccuccuccu

SEQ ID NO: 1347213 - RNA, 19 nt, Artificial Sequence
  Description of Artificial Sequence: Synthetic oligonucleotide
cgugcggugaucagaauug

SEQ ID NO: 1347214 - RNA, 19 nt, Artificial Sequence
  Description of Artificial Sequence: Synthetic oligonucleotide
gagaucaagaugggcucca

SEQ ID NO: 1347215 - RNA, 19 nt, Artificial Sequence
  Description of Artificial Sequence: Synthetic oligonucleotide
gacaaguaagugauguaau

SEQ ID NO: 1347216 - RNA, 19 nt, Artificial Sequence
  Description of Artificial Sequence: Synthetic oligonucleotide
cauuuucccuucgccgcgg

SEQ ID NO: 1347217 - RNA, 19 nt, Artificial Sequence
  Description of Artificial Sequence: Synthetic oligonucleotide
gguaacgaccauaacccuc

SEQ ID NO: 1347218 - RNA, 19 nt, Artificial Sequence
  Description of Artificial Sequence: Synthetic oligonucleotide
ggguccugaaauagcauug

SEQ ID NO: 1347219 - RNA, 19 nt, Artificial Sequence
  Description of Artificial Sequence: Synthetic oligonucleotide
uggacuucuuagugagcau

SEQ ID NO: 1347220 - RNA, 19 nt, Artificial Sequence
  Description of Artificial Sequence: Synthetic oligonucleotide
gguguaguuuccacaaauc

SEQ ID NO: 1347221 - RNA, 19 nt, Artificial Sequence
  Description of Artificial Sequence: Synthetic oligonucleotide
cguauucauagaucugagc

SEQ ID NO: 1347222 - RNA, 19 nt, Artificial Sequence
  Description of Artificial Sequence: Synthetic oligonucleotide
cucauuggguccugaaaua

SEQ ID NO: 1347223 - RNA, 19 nt, Artificial Sequence
  Description of Artificial Sequence: Synthetic oligonucleotide
gacuccaaggacuuuccuu

SEQ ID NO: 1347224 - RNA, 19 nt, Artificial Sequence
  Description of Artificial Sequence: Synthetic oligonucleotide
cagauccucguaugucuuc

SEQ ID NO: 1347225 - RNA, 19 nt, Artificial Sequence
  Description of Artificial Sequence: Synthetic oligonucleotide
uucggcccucgguaggugu

SEQ ID NO: 1347226 - RNA, 19 nt, Artificial Sequence
  Description of Artificial Sequence: Synthetic oligonucleotide
gccaugaagcuuauacagc

SEQ ID NO: 1347227 - RNA, 19 nt, Artificial Sequence
  Description of Artificial Sequence: Synthetic oligonucleotide
aggccuucggcccucggua

SEQ ID NO: 1347228 - RNA, 19 nt, Artificial Sequence
  Description of Artificial Sequence: Synthetic oligonucleotide
uucccuucgccgcggcgcu

SEQ ID NO: 1347229 - RNA, 19 nt, Artificial Sequence
  Description of Artificial Sequence: Synthetic oligonucleotide
gcggugaucagaauugauc

SEQ ID NO: 1347230 - RNA, 19 nt, Artificial Sequence
  Description of Artificial Sequence: Synthetic oligonucleotide
auaacuggucaaagaugga

SEQ ID NO: 1347231 - RNA, 19 nt, Artificial Sequence
  Description of Artificial Sequence: Synthetic oligonucleotide
ugcauggcccgcgugcggu

SEQ ID NO: 1347232 - RNA, 19 nt, Artificial Sequence
  Description of Artificial Sequence: Synthetic oligonucleotide
auuggcacacagaucucau

SEQ ID NO: 1347233 - RNA, 19 nt, Artificial Sequence
  Description of Artificial Sequence: Synthetic oligonucleotide
aucuugcauggcccgcgug

SEQ ID NO: 1347234 - RNA, 19 nt, Artificial Sequence
  Description of Artificial Sequence: Synthetic oligonucleotide
ccucaaguucccacugacc

SEQ ID NO: 1347235 - RNA, 19 nt, Artificial Sequence
  Description of Artificial Sequence: Synthetic oligonucleotide
uccuccuccuccuccucuc

SEQ ID NO: 1347236 - RNA, 19 nt, Artificial Sequence
  Description of Artificial Sequence: Synthetic oligonucleotide
ccacugaccuccauguauc

SEQ ID NO: 1347237 - RNA, 19 nt, Artificial Sequence
  Description of Artificial Sequence: Synthetic oligonucleotide
uucggccauccaggaaagg

SEQ ID NO: 1347238 - RNA, 19 nt, Artificial Sequence
  Description of Artificial Sequence: Synthetic oligonucleotide
uagcagucaugaagaucaa

SEQ ID NO: 1347239 - RNA, 19 nt, Artificial Sequence
  Description of Artificial Sequence: Synthetic oligonucleotide
uggucccggagcguggacu

SEQ ID NO: 1347240 - RNA, 19 nt, Artificial Sequence
  Description of Artificial Sequence: Synthetic oligonucleotide
guaugucuucuuguucaca

SEQ ID NO: 1347241 - RNA, 19 nt, Artificial Sequence
  Description of Artificial Sequence: Synthetic oligonucleotide
gaaggccuucggcccucgg

SEQ ID NO: 1347242 - RNA, 19 nt, Artificial Sequence
  Description of Artificial Sequence: Synthetic oligonucleotide
ugauagcgccguugcugcu

SEQ ID NO: 1347243 - RNA, 19 nt, Artificial Sequence
  Description of Artificial Sequence: Synthetic oligonucleotide
ucgggcugccaucguucug

SEQ ID NO: 1347244 - RNA, 19 nt, Artificial Sequence
  Description of Artificial Sequence: Synthetic oligonucleotide
cucuuucggccauccagga

SEQ ID NO: 1347245 - RNA, 19 nt, Artificial Sequence
  Description of Artificial Sequence: Synthetic oligonucleotide
caggccuaaagccaacagu

SEQ ID NO: 1347246 - RNA, 19 nt, Artificial Sequence
  Description of Artificial Sequence: Synthetic oligonucleotide
ggcaguguuugggaugccc

SEQ ID NO: 1347247 - RNA, 19 nt, Artificial Sequence
  Description of Artificial Sequence: Synthetic oligonucleotide
ccgaugaaauuccuuuauc

SEQ ID NO: 1347248 - RNA, 19 nt, Artificial Sequence
  Description of Artificial Sequence: Synthetic oligonucleotide
ugccaucguucugaagccu

SEQ ID NO: 1347249 - RNA, 19 nt, Artificial Sequence
  Description of Artificial Sequence: Synthetic oligonucleotide
cuuggauuuucucgagccu

SEQ ID NO: 1347250 - RNA, 19 nt, Artificial Sequence
  Description of Artificial Sequence: Synthetic oligonucleotide
cagcauuuccagguaucuc

SEQ ID NO: 1347251 - RNA, 19 nt, Artificial Sequence
  Description of Artificial Sequence: Synthetic oligonucleotide
caaacaccucaugccauga

SEQ ID NO: 1347252 - RNA, 19 nt, Artificial Sequence
  Description of Artificial Sequence: Synthetic oligonucleotide
ggccuaaagccaacagugc

SEQ ID NO: 1347253 - RNA, 19 nt, Artificial Sequence
  Description of Artificial Sequence: Synthetic oligonucleotide
gguuugccgucccagccca

SEQ ID NO: 1347254 - RNA, 19 nt, Artificial Sequence
  Description of Artificial Sequence: Synthetic oligonucleotide
gcauugaguuccucuuuuc

SEQ ID NO: 1347255 - RNA, 19 nt, Artificial Sequence
  Description of Artificial Sequence: Synthetic oligonucleotide
ucggcccucgguaggugua

SEQ ID NO: 1347256 - RNA, 19 nt, Artificial Sequence
  Description of Artificial Sequence: Synthetic oligonucleotide
ccacguauucauagaucug

SEQ ID NO: 1347257 - RNA, 19 nt, Artificial Sequence
  Description of Artificial Sequence: Synthetic oligonucleotide
agacgccuucagguuaaug

SEQ ID NO: 1347258 - RNA, 19 nt, Artificial Sequence
  Description of Artificial Sequence: Synthetic oligonucleotide
gcuuggcccacaaggagac

SEQ ID NO: 1347259 - RNA, 19 nt, Artificial Sequence
  Description of Artificial Sequence: Synthetic oligonucleotide
agccguucuuucuccucau

SEQ ID NO: 1347260 - RNA, 19 nt, Artificial Sequence
  Description of Artificial Sequence: Synthetic oligonucleotide
gucgcuguuccccuagaau

SEQ ID NO: 1347261 - RNA, 19 nt, Artificial Sequence
  Description of Artificial Sequence: Synthetic oligonucleotide
ccucaaauuccacugacau

SEQ ID NO: 1347262 - RNA, 19 nt, Artificial Sequence
  Description of Artificial Sequence: Synthetic oligonucleotide
cugaaggggcuucacucua

SEQ ID NO: 1347263 - RNA, 19 nt, Artificial Sequence
  Description of Artificial Sequence: Synthetic oligonucleotide
gugcagauuucaaccuguc

SEQ ID NO: 1347264 - RNA, 19 nt, Artificial Sequence
  Description of Artificial Sequence: Synthetic oligonucleotide
uaacgaccauaacccucuu

SEQ ID NO: 1347265 - RNA, 19 nt, Artificial Sequence
  Description of Artificial Sequence: Synthetic oligonucleotide
ccguucuuucuccucauga

SEQ ID NO: 1347266 - RNA, 19 nt, Artificial Sequence
  Description of Artificial Sequence: Synthetic oligonucleotide
ggagcguggacuucuuagu

SEQ ID NO: 1347267 - RNA, 19 nt, Artificial Sequence
  Description of Artificial Sequence: Synthetic oligonucleotide
uggcuugcuugcgcuguac

SEQ ID NO: 1347268 - RNA, 19 nt, Artificial Sequence
  Description of Artificial Sequence: Synthetic oligonucleotide
cguaugucuucuuguucac

SEQ ID NO: 1347269 - RNA, 19 nt, Artificial Sequence
  Description of Artificial Sequence: Synthetic oligonucleotide
ggccuucggcccucgguag

SEQ ID NO: 1347270 - RNA, 19 nt, Artificial Sequence
  Description of Artificial Sequence: Synthetic oligonucleotide
ccucaugauagcgccguug

SEQ ID NO: 1347271 - RNA, 19 nt, Artificial Sequence
  Description of Artificial Sequence: Synthetic oligonucleotide
ccaucguucugaagccuuc

SEQ ID NO: 1347272 - RNA, 19 nt, Artificial Sequence
  Description of Artificial Sequence: Synthetic oligonucleotide
gccuucggcccucgguagg

SEQ ID NO: 1347273 - RNA, 19 nt, Artificial Sequence
  Description of Artificial Sequence: Synthetic oligonucleotide
ggauuuucucgagccuuca

SEQ ID NO: 1347274 - RNA, 19 nt, Artificial Sequence
  Description of Artificial Sequence: Synthetic oligonucleotide
aagugucgagugacuccaa

SEQ ID NO: 1347275 - RNA, 19 nt, Artificial Sequence
  Description of Artificial Sequence: Synthetic oligonucleotide
gagcugucgcuguuccccu

SEQ ID NO: 1347276 - RNA, 19 nt, Artificial Sequence
  Description of Artificial Sequence: Synthetic oligonucleotide
ggagcuccucaaauuccac

SEQ ID NO: 1347277 - RNA, 19 nt, Artificial Sequence
  Description of Artificial Sequence: Synthetic oligonucleotide
cucaugccaugagcaugac

SEQ ID NO: 1347278 - RNA, 19 nt, Artificial Sequence
  Description of Artificial Sequence: Synthetic oligonucleotide
ggcccacaaggagacagca

SEQ ID NO: 1347279 - RNA, 19 nt, Artificial Sequence
  Description of Artificial Sequence: Synthetic oligonucleotide
cuucggcccucgguaggug

SEQ ID NO: 1347280 - RNA, 19 nt, Artificial Sequence
  Description of Artificial Sequence: Synthetic oligonucleotide
agcgccguugcugcuccaa

SEQ ID NO: 1347281 - RNA, 19 nt, Artificial Sequence
  Description of Artificial Sequence: Synthetic oligonucleotide
ccuccuccuccuccucucg

SEQ ID NO: 1347282 - RNA, 19 nt, Artificial Sequence
  Description of Artificial Sequence: Synthetic oligonucleotide
gucgggcugccaucguucu

SEQ ID NO: 1347283 - RNA, 19 nt, Artificial Sequence
  Description of Artificial Sequence: Synthetic oligonucleotide
ggguguuuccgaugaaauu

SEQ ID NO: 1347284 - RNA, 19 nt, Artificial Sequence
  Description of Artificial Sequence: Synthetic oligonucleotide
guuugccgucccagcccag

SEQ ID NO: 1347285 - RNA, 19 nt, Artificial Sequence
  Description of Artificial Sequence: Synthetic oligonucleotide
gcuugcuugcgcuguacau

SEQ ID NO: 1347286 - RNA, 19 nt, Artificial Sequence
  Description of Artificial Sequence: Synthetic oligonucleotide
cacuuucgcucucacugau

SEQ ID NO: 1347287 - RNA, 19 nt, Artificial Sequence
  Description of Artificial Sequence: Synthetic oligonucleotide
cucgucucuuucggccauc

SEQ ID NO: 1347288 - RNA, 19 nt, Artificial Sequence
  Description of Artificial Sequence: Synthetic oligonucleotide
ccugaaggggcuucacucu

SEQ ID NO: 1347289 - RNA, 19 nt, Artificial Sequence
  Description of Artificial Sequence: Synthetic oligonucleotide
cucugagcucgcucuucua

SEQ ID NO: 1347290 - RNA, 19 nt, Artificial Sequence
  Description of Artificial Sequence: Synthetic oligonucleotide
auggcccgcgugcggugau

SEQ ID NO: 1347291 - RNA, 19 nt, Artificial Sequence
  Description of Artificial Sequence: Synthetic oligonucleotide
gaccacuagagcaguccuu

SEQ ID NO: 1347292 - RNA, 19 nt, Artificial Sequence
  Description of Artificial Sequence: Synthetic oligonucleotide
ggaaggccuucggcccucg

SEQ ID NO: 1347293 - RNA, 19 nt, Artificial Sequence
  Description of Artificial Sequence: Synthetic oligonucleotide
gcgugcggugaucagaauu

SEQ ID NO: 1347294 - RNA, 19 nt, Artificial Sequence
  Description of Artificial Sequence: Synthetic oligonucleotide
caccacauuucaggccuaa

SEQ ID NO: 1347295 - RNA, 19 nt, Artificial Sequence
  Description of Artificial Sequence: Synthetic oligonucleotide
cccacugaccuccauguau

SEQ ID NO: 1347296 - RNA, 19 nt, Artificial Sequence
  Description of Artificial Sequence: Synthetic oligonucleotide
cauggcccgcgugcgguga

SEQ ID NO: 1347297 - RNA, 19 nt, Artificial Sequence
  Description of Artificial Sequence: Synthetic oligonucleotide
uagcgccguugcugcucca

SEQ ID NO: 1347298 - RNA, 19 nt, Artificial Sequence
  Description of Artificial Sequence: Synthetic oligonucleotide
cuuggcccacaaggagaca

SEQ ID NO: 1347299 - RNA, 19 nt, Artificial Sequence
  Description of Artificial Sequence: Synthetic oligonucleotide
cuccuccuccuccuccucu

SEQ ID NO: 1347300 - RNA, 19 nt, Artificial Sequence
  Description of Artificial Sequence: Synthetic oligonucleotide
ccgcgugcggugaucagaa

SEQ ID NO: 1347301 - RNA, 19 nt, Artificial Sequence
  Description of Artificial Sequence: Synthetic oligonucleotide
gugucgggcugccaucguu

SEQ ID NO: 1347302 - RNA, 19 nt, Artificial Sequence
  Description of Artificial Sequence: Synthetic oligonucleotide
ccucguaugucuucuuguu

SEQ ID NO: 1347303 - RNA, 19 nt, Artificial Sequence
  Description of Artificial Sequence: Synthetic oligonucleotide
cgggcugccaucguucuga

SEQ ID NO: 1347304 - RNA, 19 nt, Artificial Sequence
  Description of Artificial Sequence: Synthetic oligonucleotide
gccaugagcaugacgccau

SEQ ID NO: 1347305 - RNA, 19 nt, Artificial Sequence
  Description of Artificial Sequence: Synthetic oligonucleotide
uggcccgcgugcggugauc

SEQ ID NO: 1347306 - RNA, 19 nt, Artificial Sequence
  Description of Artificial Sequence: Synthetic oligonucleotide
cagaucucauuuggguguu

SEQ ID NO: 1347307 - RNA, 19 nt, Artificial Sequence
  Description of Artificial Sequence: Synthetic oligonucleotide
cccaaacaccucaugccau

SEQ ID NO: 1347308 - RNA, 19 nt, Artificial Sequence
  Description of Artificial Sequence: Synthetic oligonucleotide
ggcccgcgugcggugauca

SEQ ID NO: 1347309 - RNA, 19 nt, Artificial Sequence
  Description of Artificial Sequence: Synthetic oligonucleotide
gcuccuccuccuccuccuc

SEQ ID NO: 1347310 - RNA, 19 nt, Artificial Sequence
  Description of Artificial Sequence: Synthetic oligonucleotide
gcccgcgugcggugaucag

SEQ ID NO: 1347311 - RNA, 19 nt, Artificial Sequence
  Description of Artificial Sequence: Synthetic oligonucleotide
gcgccguugcugcuccaaa

SEQ ID NO: 1347312 - RNA, 19 nt, Artificial Sequence
  Description of Artificial Sequence: Synthetic oligonucleotide
cccgcgugcggugaucaga

SEQ ID NO: 1347313 - RNA, 19 nt, Artificial Sequence
  Description of Artificial Sequence: Synthetic oligonucleotide
gccaucguucugaagccuu

SEQ ID NO: 1347314 - RNA, 19 nt, Artificial Sequence
  Description of Artificial Sequence: Synthetic oligonucleotide
cagcaugggucagggcacu

SEQ ID NO: 1347315 - RNA, 19 nt, Artificial Sequence
  Description of Artificial Sequence: Synthetic oligonucleotide
cgaccacuagagcaguccu

SEQ ID NO: 1347316 - RNA, 19 nt, Artificial Sequence
  Description of Artificial Sequence: Synthetic oligonucleotide
gcucgucucuuucggccau

SEQ ID NO: 1347317 - RNA, 19 nt, Artificial Sequence
  Description of Artificial Sequence: Synthetic oligonucleotide
cccuucgccgcggcgcuuc

SEQ ID NO: 1347318 - RNA, 19 nt, Artificial Sequence
  Description of Artificial Sequence: Synthetic oligonucleotide
ggugucgggcugccaucgu

SEQ ID NO: 1347319 - RNA, 19 nt, Artificial Sequence
  Description of Artificial Sequence: Synthetic oligonucleotide
ccguugcugcuccaaaauu

SEQ ID NO: 1347320 - RNA, 19 nt, Artificial Sequence
  Description of Artificial Sequence: Synthetic oligonucleotide
ucccuucgccgcggcgcuu

SEQ ID NO: 1347321 - RNA, 19 nt, Artificial Sequence
  Description of Artificial Sequence: Synthetic oligonucleotide
cuucgccgcggcgcuucaa

SEQ ID NO: 1347322 - RNA, 19 nt, Artificial Sequence
  Description of Artificial Sequence: Synthetic oligonucleotide
cccucgguagguguaguuu

SEQ ID NO: 1347323 - RNA, 19 nt, Artificial Sequence
  Description of Artificial Sequence: Synthetic oligonucleotide
gcccucgguagguguaguu

SEQ ID NO: 1347324 - RNA, 19 nt, Artificial Sequence
  Description of Artificial Sequence: Synthetic oligonucleotide
ccuucgccgcggcgcuuca

SEQ ID NO: 1347325 - RNA, 19 nt, Artificial Sequence
  Description of Artificial Sequence: Synthetic oligonucleotide
cagacgccuucagguuaau

SEQ ID NO: 1347326 - RNA, 19 nt, Artificial Sequence
  Description of Artificial Sequence: Synthetic oligonucleotide
cgcgugcggugaucagaau

SEQ ID NO: 1347327 - RNA, 19 nt, Artificial Sequence
  Description of Artificial Sequence: Synthetic oligonucleotide
aaguagaacaccaugaugc

SEQ ID NO: 1347328 - RNA, 19 nt, Artificial Sequence
  Description of Artificial Sequence: Synthetic oligonucleotide
aauguaucuaucuuaacag

SEQ ID NO: 1347329 - RNA, 19 nt, Artificial Sequence
  Description of Artificial Sequence: Synthetic oligonucleotide
aaauaggaaacacauuucg

SEQ ID NO: 1347330 - RNA, 19 nt, Artificial Sequence
  Description of Artificial Sequence: Synthetic oligonucleotide
aaaucacacacacacacac

SEQ ID NO: 1347331 - RNA, 19 nt, Artificial Sequence
  Description of Artificial Sequence: Synthetic oligonucleotide
ucaacuauauuacacaucu

SEQ ID NO: 1347332 - RNA, 19 nt, Artificial Sequence
  Description of Artificial Sequence: Synthetic oligonucleotide
aaaauacggaucugcaugc

SEQ ID NO: 1347333 - RNA, 19 nt, Artificial Sequence
  Description of Artificial Sequence: Synthetic oligonucleotide
auuagugacgaguagcucc

SEQ ID NO: 1347334 - RNA, 19 nt, Artificial Sequence
  Description of Artificial Sequence: Synthetic oligonucleotide
aacuauauuacacaucugu

SEQ ID NO: 1347335 - RNA, 19 nt, Artificial Sequence
  Description of Artificial Sequence: Synthetic oligonucleotide
aaugaguuaaugcuucagg

SEQ ID NO: 1347336 - RNA, 19 nt, Artificial Sequence
  Description of Artificial Sequence: Synthetic oligonucleotide
aagaaaucauuucugcugg

SEQ ID NO: 1347337 - RNA, 19 nt, Artificial Sequence
  Description of Artificial Sequence: Synthetic oligonucleotide
uaaaauacggaucugcaug

SEQ ID NO: 1347338 - RNA, 19 nt, Artificial Sequence
  Description of Artificial Sequence: Synthetic oligonucleotide
uguaauucagaacauaggu

SEQ ID NO: 1347339 - RNA, 19 nt, Artificial Sequence
  Description of Artificial Sequence: Synthetic oligonucleotide
ucuguaauucagaacauag

SEQ ID NO: 1347340 - RNA, 19 nt, Artificial Sequence
  Description of Artificial Sequence: Synthetic oligonucleotide
aaccaaauaucuucaggcc

SEQ ID NO: 1347341 - RNA, 19 nt, Artificial Sequence
  Description of Artificial Sequence: Synthetic oligonucleotide
uauauuacacaucuguucu

SEQ ID NO: 1347342 - RNA, 19 nt, Artificial Sequence
  Description of Artificial Sequence: Synthetic oligonucleotide
ugugguaugcuaaaauacg

SEQ ID NO: 1347343 - RNA, 19 nt, Artificial Sequence
  Description of Artificial Sequence: Synthetic oligonucleotide
uguagaugaguuaacacug

SEQ ID NO: 1347344 - RNA, 19 nt, Artificial Sequence
  Description of Artificial Sequence: Synthetic oligonucleotide
uaaucgaagguauacauga

SEQ ID NO: 1347345 - RNA, 19 nt, Artificial Sequence
  Description of Artificial Sequence: Synthetic oligonucleotide
cuauguagaaugaagguag

SEQ ID NO: 1347346 - RNA, 19 nt, Artificial Sequence
  Description of Artificial Sequence: Synthetic oligonucleotide
gaagaaaucauuucugcug

SEQ ID NO: 1347347 - RNA, 19 nt, Artificial Sequence
  Description of Artificial Sequence: Synthetic oligonucleotide
ucaaguucaacuauauuac

SEQ ID NO: 1347348 - RNA, 19 nt, Artificial Sequence
  Description of Artificial Sequence: Synthetic oligonucleotide
uucagguuagaccauggcg

SEQ ID NO: 1347349 - RNA, 19 nt, Artificial Sequence
  Description of Artificial Sequence: Synthetic oligonucleotide
gucuaaaucacacacacac

SEQ ID NO: 1347350 - RNA, 19 nt, Artificial Sequence
  Description of Artificial Sequence: Synthetic oligonucleotide
auauaguguauguagauga

SEQ ID NO: 1347351 - RNA, 19 nt, Artificial Sequence
  Description of Artificial Sequence: Synthetic oligonucleotide
uuauaaguugucuucaagu

SEQ ID NO: 1347352 - RNA, 19 nt, Artificial Sequence
  Description of Artificial Sequence: Synthetic oligonucleotide
aucacacacacacacacac

SEQ ID NO: 1347353 - RNA, 19 nt, Artificial Sequence
  Description of Artificial Sequence: Synthetic oligonucleotide
aguuuguccacgugaaacc

SEQ ID NO: 1347354 - RNA, 19 nt, Artificial Sequence
  Description of Artificial Sequence: Synthetic oligonucleotide
aucguuaccaucuugauuu

SEQ ID NO: 1347355 - RNA, 19 nt, Artificial Sequence
  Description of Artificial Sequence: Synthetic oligonucleotide
cuaaaucacacacacacac

SEQ ID NO: 1347356 - RNA, 19 nt, Artificial Sequence
  Description of Artificial Sequence: Synthetic oligonucleotide
aaguucaacuauauuacac

SEQ ID NO: 1347357 - RNA, 19 nt, Artificial Sequence
  Description of Artificial Sequence: Synthetic oligonucleotide
uguauauaguguauguaga

SEQ ID NO: 1347358 - RNA, 19 nt, Artificial Sequence
  Description of Artificial Sequence: Synthetic oligonucleotide
aucgaagguauacaugagc

SEQ ID NO: 1347359 - RNA, 19 nt, Artificial Sequence
  Description of Artificial Sequence: Synthetic oligonucleotide
caaaagaucugugauagcc

SEQ ID NO: 1347360 - RNA, 19 nt, Artificial Sequence
  Description of Artificial Sequence: Synthetic oligonucleotide
aucaaaagaucugugauag

SEQ ID NO: 1347361 - RNA, 19 nt, Artificial Sequence
  Description of Artificial Sequence: Synthetic oligonucleotide
acauaggugaaaucaaaag

SEQ ID NO: 1347362 - RNA, 19 nt, Artificial Sequence
  Description of Artificial Sequence: Synthetic oligonucleotide
agauauuuuagaaauagga

SEQ ID NO: 1347363 - RNA, 19 nt, Artificial Sequence
  Description of Artificial Sequence: Synthetic oligonucleotide
uuaacagaagcagagauau

SEQ ID NO: 1347364 - RNA, 19 nt, Artificial Sequence
  Description of Artificial Sequence: Synthetic oligonucleotide
uuuaaaucacagaacucca

SEQ ID NO: 1347365 - RNA, 19 nt, Artificial Sequence
  Description of Artificial Sequence: Synthetic oligonucleotide
uagaccauggcguauacac

SEQ ID NO: 1347366 - RNA, 19 nt, Artificial Sequence
  Description of Artificial Sequence: Synthetic oligonucleotide
uucucaacuuucauuagug

SEQ ID NO: 1347367 - RNA, 19 nt, Artificial Sequence
  Description of Artificial Sequence: Synthetic oligonucleotide
aggaaacacauuucguggc

SEQ ID NO: 1347368 - RNA, 19 nt, Artificial Sequence
  Description of Artificial Sequence: Synthetic oligonucleotide
ugugauagccuguacauuc

SEQ ID NO: 1347369 - RNA, 19 nt, Artificial Sequence
  Description of Artificial Sequence: Synthetic oligonucleotide
ucuuaacagaagcagagau

SEQ ID NO: 1347370 - RNA, 19 nt, Artificial Sequence
  Description of Artificial Sequence: Synthetic oligonucleotide
aguucaacuauauuacaca

SEQ ID NO: 1347371 - RNA, 19 nt, Artificial Sequence
  Description of Artificial Sequence: Synthetic oligonucleotide
uugugguaugcuaaaauac

SEQ ID NO: 1347372 - RNA, 19 nt, Artificial Sequence
  Description of Artificial Sequence: Synthetic oligonucleotide
acgaguagcuccuaaguuc

SEQ ID NO: 1347373 - RNA, 19 nt, Artificial Sequence
  Description of Artificial Sequence: Synthetic oligonucleotide
uggcuaaugaguuaaugcu

SEQ ID NO: 1347374 - RNA, 19 nt, Artificial Sequence
  Description of Artificial Sequence: Synthetic oligonucleotide
aagaguagcaccucccgcu

SEQ ID NO: 1347375 - RNA, 19 nt, Artificial Sequence
  Description of Artificial Sequence: Synthetic oligonucleotide
uuuguaaucgaagguauac

SEQ ID NO: 1347376 - RNA, 19 nt, Artificial Sequence
  Description of Artificial Sequence: Synthetic oligonucleotide
uauaguguauguagaugag

SEQ ID NO: 1347377 - RNA, 19 nt, Artificial Sequence
  Description of Artificial Sequence: Synthetic oligonucleotide
aaucaaaagaucugugaua

SEQ ID NO: 1347378 - RNA, 19 nt, Artificial Sequence
  Description of Artificial Sequence: Synthetic oligonucleotide
ucuaaucgguucaagauuu

SEQ ID NO: 1347379 - RNA, 19 nt, Artificial Sequence
  Description of Artificial Sequence: Synthetic oligonucleotide
auauuuauccuuucccaug

SEQ ID NO: 1347380 - RNA, 19 nt, Artificial Sequence
  Description of Artificial Sequence: Synthetic oligonucleotide
uguaaucgaagguauacau

SEQ ID NO: 1347381 - RNA, 19 nt, Artificial Sequence
  Description of Artificial Sequence: Synthetic oligonucleotide
guauacaccacauuaaugu

SEQ ID NO: 1347382 - RNA, 19 nt, Artificial Sequence
  Description of Artificial Sequence: Synthetic oligonucleotide
uaaaguuauaaguugucuu

SEQ ID NO: 1347383 - RNA, 19 nt, Artificial Sequence
  Description of Artificial Sequence: Synthetic oligonucleotide
guggcuaaugaguuaaugc

SEQ ID NO: 1347384 - RNA, 19 nt, Artificial Sequence
  Description of Artificial Sequence: Synthetic oligonucleotide
uuaccaucuugauuugagg

SEQ ID NO: 1347385 - RNA, 19 nt, Artificial Sequence
  Description of Artificial Sequence: Synthetic oligonucleotide
ugaguuaaugcuucaggga

SEQ ID NO: 1347386 - RNA, 19 nt, Artificial Sequence
  Description of Artificial Sequence: Synthetic oligonucleotide
guagaauuuugguugguug

SEQ ID NO: 1347387 - RNA, 19 nt, Artificial Sequence
  Description of Artificial Sequence: Synthetic oligonucleotide
cacacacacacacacaccc

SEQ ID NO: 1347388 - RNA, 19 nt, Artificial Sequence
  Description of Artificial Sequence: Synthetic oligonucleotide
uaccaucuugauuugagga

SEQ ID NO: 1347389 - RNA, 19 nt, Artificial Sequence
  Description of Artificial Sequence: Synthetic oligonucleotide
cauaggugaaaucaaaaga

SEQ ID NO: 1347390 - RNA, 19 nt, Artificial Sequence
  Description of Artificial Sequence: Synthetic oligonucleotide
gaagcagagauauuuuaga

SEQ ID NO: 1347391 - RNA, 19 nt, Artificial Sequence
  Description of Artificial Sequence: Synthetic oligonucleotide
guuauaaguugucuucaag

SEQ ID NO: 1347392 - RNA, 19 nt, Artificial Sequence
  Description of Artificial Sequence: Synthetic oligonucleotide
aagaacaaaggcagccagc

SEQ ID NO: 1347393 - RNA, 19 nt, Artificial Sequence
  Description of Artificial Sequence: Synthetic oligonucleotide
agaagaguagcaccucccg

SEQ ID NO: 1347394 - RNA, 19 nt, Artificial Sequence
  Description of Artificial Sequence: Synthetic oligonucleotide
guagcuccuaaguucaucc

SEQ ID NO: 1347395 - RNA, 19 nt, Artificial Sequence
  Description of Artificial Sequence: Synthetic oligonucleotide
gaagguauacaugagcuga

SEQ ID NO: 1347396 - RNA, 19 nt, Artificial Sequence
  Description of Artificial Sequence: Synthetic oligonucleotide
agagaguuuguccacguga

SEQ ID NO: 1347397 - RNA, 19 nt, Artificial Sequence
  Description of Artificial Sequence: Synthetic oligonucleotide
ucuaaaucacacacacaca

SEQ ID NO: 1347398 - RNA, 19 nt, Artificial Sequence
  Description of Artificial Sequence: Synthetic oligonucleotide
acugaaauauguucugcca

SEQ ID NO: 1347399 - RNA, 19 nt, Artificial Sequence
  Description of Artificial Sequence: Synthetic oligonucleotide
uccagaguuggucugcuca

SEQ ID NO: 1347400 - RNA, 19 nt, Artificial Sequence
  Description of Artificial Sequence: Synthetic oligonucleotide
ugaaauauguucugccaaa

SEQ ID NO: 1347401 - RNA, 19 nt, Artificial Sequence
  Description of Artificial Sequence: Synthetic oligonucleotide
ugaaguagaacaccaugau

SEQ ID NO: 1347402 - RNA, 19 nt, Artificial Sequence
  Description of Artificial Sequence: Synthetic oligonucleotide
ugcuaaaauacggaucugc

SEQ ID NO: 1347403 - RNA, 19 nt, Artificial Sequence
  Description of Artificial Sequence: Synthetic oligonucleotide
ugguaugcuaaaauacgga

SEQ ID NO: 1347404 - RNA, 19 nt, Artificial Sequence
  Description of Artificial Sequence: Synthetic oligonucleotide
aauacggaucugcaugcca

SEQ ID NO: 1347405 - RNA, 19 nt, Artificial Sequence
  Description of Artificial Sequence: Synthetic oligonucleotide
ucugugauagccuguacau

SEQ ID NO: 1347406 - RNA, 19 nt, Artificial Sequence
  Description of Artificial Sequence: Synthetic oligonucleotide
uaaaucacacacacacaca

SEQ ID NO: 1347407 - RNA, 19 nt, Artificial Sequence
  Description of Artificial Sequence: Synthetic oligonucleotide
gaguuaaugcuucagggaa

SEQ ID NO: 1347408 - RNA, 19 nt, Artificial Sequence
  Description of Artificial Sequence: Synthetic oligonucleotide
uuaucagaucuucauuuuc

SEQ ID NO: 1347409 - RNA, 19 nt, Artificial Sequence
  Description of Artificial Sequence: Synthetic oligonucleotide
gcuauuggccuucacaagg

SEQ ID NO: 1347410 - RNA, 19 nt, Artificial Sequence
  Description of Artificial Sequence: Synthetic oligonucleotide
ucuauguagaaugaaggua

SEQ ID NO: 1347411 - RNA, 19 nt, Artificial Sequence
  Description of Artificial Sequence: Synthetic oligonucleotide
aauaggaaacacauuucgu

SEQ ID NO: 1347412 - RNA, 19 nt, Artificial Sequence
  Description of Artificial Sequence: Synthetic oligonucleotide
aaauacggaucugcaugcc

SEQ ID NO: 1347413 - RNA, 19 nt, Artificial Sequence
  Description of Artificial Sequence: Synthetic oligonucleotide
uggcuuagcacccacugcu

SEQ ID NO: 1347414 - RNA, 19 nt, Artificial Sequence
  Description of Artificial Sequence: Synthetic oligonucleotide
caugaugcugguagaagag

SEQ ID NO: 1347415 - RNA, 19 nt, Artificial Sequence
  Description of Artificial Sequence: Synthetic oligonucleotide
aucagaaucguuaccaucu

SEQ ID NO: 1347416 - RNA, 19 nt, Artificial Sequence
  Description of Artificial Sequence: Synthetic oligonucleotide
uuagugacgaguagcuccu

SEQ ID NO: 1347417 - RNA, 19 nt, Artificial Sequence
  Description of Artificial Sequence: Synthetic oligonucleotide
cacacacacacacacacac

SEQ ID NO: 1347418 - RNA, 19 nt, Artificial Sequence
  Description of Artificial Sequence: Synthetic oligonucleotide
uggcguauacaccacauua

SEQ ID NO: 1347419 - RNA, 19 nt, Artificial Sequence
  Description of Artificial Sequence: Synthetic oligonucleotide
ugcucagcucacaugaacu

SEQ ID NO: 1347420 - RNA, 19 nt, Artificial Sequence
  Description of Artificial Sequence: Synthetic oligonucleotide
gugguaugcuaaaauacgg

SEQ ID NO: 1347421 - RNA, 19 nt, Artificial Sequence
  Description of Artificial Sequence: Synthetic oligonucleotide
uguauguagaugaguuaac

SEQ ID NO: 1347422 - RNA, 19 nt, Artificial Sequence
  Description of Artificial Sequence: Synthetic oligonucleotide
uucaacuauauuacacauc

SEQ ID NO: 1347423 - RNA, 19 nt, Artificial Sequence
  Description of Artificial Sequence: Synthetic oligonucleotide
acauuugcugaagaaauca

SEQ ID NO: 1347424 - RNA, 19 nt, Artificial Sequence
  Description of Artificial Sequence: Synthetic oligonucleotide
uuuacauccuucugccugu

SEQ ID NO: 1347425 - RNA, 19 nt, Artificial Sequence
  Description of Artificial Sequence: Synthetic oligonucleotide
cauaccccuuucaaugugg

SEQ ID NO: 1347426 - RNA, 19 nt, Artificial Sequence
  Description of Artificial Sequence: Synthetic oligonucleotide
ugguuuugcccauacuuca

SEQ ID NO: 1347427 - RNA, 19 nt, Artificial Sequence
  Description of Artificial Sequence: Synthetic oligonucleotide
ugacgaguagcuccuaagu

SEQ ID NO: 1347428 - RNA, 19 nt, Artificial Sequence
  Description of Artificial Sequence: Synthetic oligonucleotide
aaaucgcccagcucaagau

SEQ ID NO: 1347429 - RNA, 19 nt, Artificial Sequence
  Description of Artificial Sequence: Synthetic oligonucleotide
ucacuuugugguaugcuaa

SEQ ID NO: 1347430 - RNA, 19 nt, Artificial Sequence
  Description of Artificial Sequence: Synthetic oligonucleotide
guuaccaucuugauuugag

SEQ ID NO: 1347431 - RNA, 19 nt, Artificial Sequence
  Description of Artificial Sequence: Synthetic oligonucleotide
uaaugaguuaaugcuucag

SEQ ID NO: 1347432 - RNA, 19 nt, Artificial Sequence
  Description of Artificial Sequence: Synthetic oligonucleotide
uuggucugcucaaaugucu

SEQ ID NO: 1347433 - RNA, 19 nt, Artificial Sequence
  Description of Artificial Sequence: Synthetic oligonucleotide
gaccauggcguauacacca

SEQ ID NO: 1347434 - RNA, 19 nt, Artificial Sequence
  Description of Artificial Sequence: Synthetic oligonucleotide
uauguagaaugaagguaga

SEQ ID NO: 1347435 - RNA, 19 nt, Artificial Sequence
  Description of Artificial Sequence: Synthetic oligonucleotide
ucgguucaagauuucauuc

SEQ ID NO: 1347436 - RNA, 19 nt, Artificial Sequence
  Description of Artificial Sequence: Synthetic oligonucleotide
uucacgucuucccaggguc

SEQ ID NO: 1347437 - RNA, 19 nt, Artificial Sequence
  Description of Artificial Sequence: Synthetic oligonucleotide
agccuguacauucacgucu

SEQ ID NO: 1347438 - RNA, 19 nt, Artificial Sequence
  Description of Artificial Sequence: Synthetic oligonucleotide
ugcuaggucaggaaacuuc

SEQ ID NO: 1347439 - RNA, 19 nt, Artificial Sequence
  Description of Artificial Sequence: Synthetic oligonucleotide
uuagcacccacugcugugg

SEQ ID NO: 1347440 - RNA, 19 nt, Artificial Sequence
  Description of Artificial Sequence: Synthetic oligonucleotide
augucuauguagaaugaag

SEQ ID NO: 1347441 - RNA, 19 nt, Artificial Sequence
  Description of Artificial Sequence: Synthetic oligonucleotide
auguaucuaucuuaacaga

SEQ ID NO: 1347442 - RNA, 19 nt, Artificial Sequence
  Description of Artificial Sequence: Synthetic oligonucleotide
uagaugaguuaacacugcu

SEQ ID NO: 1347443 - RNA, 19 nt, Artificial Sequence
  Description of Artificial Sequence: Synthetic oligonucleotide
ggggucaccaguuuucugg

SEQ ID NO: 1347444 - RNA, 19 nt, Artificial Sequence
  Description of Artificial Sequence: Synthetic oligonucleotide
cucccuuuuguaaucgaag

SEQ ID NO: 1347445 - RNA, 19 nt, Artificial Sequence
  Description of Artificial Sequence: Synthetic oligonucleotide
agaaucguuaccaucuuga

SEQ ID NO: 1347446 - RNA, 19 nt, Artificial Sequence
  Description of Artificial Sequence: Synthetic oligonucleotide
ugagguacugaaauauguu

SEQ ID NO: 1347447 - RNA, 19 nt, Artificial Sequence
  Description of Artificial Sequence: Synthetic oligonucleotide
auauuauucuuuuccuaaa

SEQ ID NO: 1347448 - RNA, 19 nt, Artificial Sequence
  Description of Artificial Sequence: Synthetic oligonucleotide
aacacauuucguggcaucu

SEQ ID NO: 1347449 - RNA, 19 nt, Artificial Sequence
  Description of Artificial Sequence: Synthetic oligonucleotide
ugccccacauccaugucag

SEQ ID NO: 1347450 - RNA, 19 nt, Artificial Sequence
  Description of Artificial Sequence: Synthetic oligonucleotide
caucuguucuuuucauggg

SEQ ID NO: 1347451 - RNA, 19 nt, Artificial Sequence
  Description of Artificial Sequence: Synthetic oligonucleotide
uacauuugcugaagaaauc

SEQ ID NO: 1347452 - RNA, 19 nt, Artificial Sequence
  Description of Artificial Sequence: Synthetic oligonucleotide
ucucaacuuucauuaguga

SEQ ID NO: 1347453 - RNA, 19 nt, Artificial Sequence
  Description of Artificial Sequence: Synthetic oligonucleotide
uugcccauacuucagugau

SEQ ID NO: 1347454 - RNA, 19 nt, Artificial Sequence
  Description of Artificial Sequence: Synthetic oligonucleotide
auacggaucugcaugccac

SEQ ID NO: 1347455 - RNA, 19 nt, Artificial Sequence
  Description of Artificial Sequence: Synthetic oligonucleotide
ugcuucagggaauuuucca

SEQ ID NO: 1347456 - RNA, 19 nt, Artificial Sequence
  Description of Artificial Sequence: Synthetic oligonucleotide
aagagaguuuguccacgug

SEQ ID NO: 1347457 - RNA, 19 nt, Artificial Sequence
  Description of Artificial Sequence: Synthetic oligonucleotide
guagaaugaagguagaauu

SEQ ID NO: 1347458 - RNA, 19 nt, Artificial Sequence
  Description of Artificial Sequence: Synthetic oligonucleotide
acacacacacaccccuccc

SEQ ID NO: 1347459 - RNA, 19 nt, Artificial Sequence
  Description of Artificial Sequence: Synthetic oligonucleotide
caugagguacugaaauaug

SEQ ID NO: 1347460 - RNA, 19 nt, Artificial Sequence
  Description of Artificial Sequence: Synthetic oligonucleotide
ugggguucccuuaaacacu

SEQ ID NO: 1347461 - RNA, 19 nt, Artificial Sequence
  Description of Artificial Sequence: Synthetic oligonucleotide
gaguuggucugcucaaaug

SEQ ID NO: 1347462 - RNA, 19 nt, Artificial Sequence
  Description of Artificial Sequence: Synthetic oligonucleotide
ucuacugggguucccuuaa

SEQ ID NO: 1347463 - RNA, 19 nt, Artificial Sequence
  Description of Artificial Sequence: Synthetic oligonucleotide
uauacaccacauuaauguu

SEQ ID NO: 1347464 - RNA, 19 nt, Artificial Sequence
  Description of Artificial Sequence: Synthetic oligonucleotide
uuuuguaaucgaagguaua

SEQ ID NO: 1347465 - RNA, 19 nt, Artificial Sequence
  Description of Artificial Sequence: Synthetic oligonucleotide
gcucaaaucgcccagcuca

SEQ ID NO: 1347466 - RNA, 19 nt, Artificial Sequence
  Description of Artificial Sequence: Synthetic oligonucleotide
agccauacuuuaucagauc

SEQ ID NO: 1347467 - RNA, 19 nt, Artificial Sequence
  Description of Artificial Sequence: Synthetic oligonucleotide
cuuucauuagugacgagua

SEQ ID NO: 1347468 - RNA, 19 nt, Artificial Sequence
  Description of Artificial Sequence: Synthetic oligonucleotide
aaucgaagguauacaugag

SEQ ID NO: 1347469 - RNA, 19 nt, Artificial Sequence
  Description of Artificial Sequence: Synthetic oligonucleotide
uuucuguaauucagaacau

SEQ ID NO: 1347470 - RNA, 19 nt, Artificial Sequence
  Description of Artificial Sequence: Synthetic oligonucleotide
uaaucgguucaagauuuca

SEQ ID NO: 1347471 - RNA, 19 nt, Artificial Sequence
  Description of Artificial Sequence: Synthetic oligonucleotide
ucaaaagaucugugauagc

SEQ ID NO: 1347472 - RNA, 19 nt, Artificial Sequence
  Description of Artificial Sequence: Synthetic oligonucleotide
aucgguucaagauuucauu

SEQ ID NO: 1347473 - RNA, 19 nt, Artificial Sequence
  Description of Artificial Sequence: Synthetic oligonucleotide
agaguagcaccucccgcuc

SEQ ID NO: 1347474 - RNA, 19 nt, Artificial Sequence
  Description of Artificial Sequence: Synthetic oligonucleotide
agaauuuugguugguuggu

SEQ ID NO: 1347475 - RNA, 19 nt, Artificial Sequence
  Description of Artificial Sequence: Synthetic oligonucleotide
uccauaccccuuucaaugu

SEQ ID NO: 1347476 - RNA, 19 nt, Artificial Sequence
  Description of Artificial Sequence: Synthetic oligonucleotide
guaugcuaaaauacggauc

SEQ ID NO: 1347477 - RNA, 19 nt, Artificial Sequence
  Description of Artificial Sequence: Synthetic oligonucleotide
guauguagaugaguuaaca

SEQ ID NO: 1347478 - RNA, 19 nt, Artificial Sequence
  Description of Artificial Sequence: Synthetic oligonucleotide
gguucaagauuucauucac

SEQ ID NO: 1347479 - RNA, 19 nt, Artificial Sequence
  Description of Artificial Sequence: Synthetic oligonucleotide
gugacgaguagcuccuaag

SEQ ID NO: 1347480 - RNA, 19 nt, Artificial Sequence
  Description of Artificial Sequence: Synthetic oligonucleotide
aguagcuccuaaguucauc

SEQ ID NO: 1347481 - RNA, 19 nt, Artificial Sequence
  Description of Artificial Sequence: Synthetic oligonucleotide
auaguguauguagaugagu

SEQ ID NO: 1347482 - RNA, 19 nt, Artificial Sequence
  Description of Artificial Sequence: Synthetic oligonucleotide
uguuugcugugucucuacu

SEQ ID NO: 1347483 - RNA, 19 nt, Artificial Sequence
  Description of Artificial Sequence: Synthetic oligonucleotide
guguauguagaugaguuaa

SEQ ID NO: 1347484 - RNA, 19 nt, Artificial Sequence
  Description of Artificial Sequence: Synthetic oligonucleotide
ucacacacacacacacaca

SEQ ID NO: 1347485 - RNA, 19 nt, Artificial Sequence
  Description of Artificial Sequence: Synthetic oligonucleotide
gcucacaugaacucaucag

SEQ ID NO: 1347486 - RNA, 19 nt, Artificial Sequence
  Description of Artificial Sequence: Synthetic oligonucleotide
agaccauggcguauacacc

SEQ ID NO: 1347487 - RNA, 19 nt, Artificial Sequence
  Description of Artificial Sequence: Synthetic oligonucleotide
guacugaaauauguucugc

SEQ ID NO: 1347488 - RNA, 19 nt, Artificial Sequence
  Description of Artificial Sequence: Synthetic oligonucleotide
cuuagcacccacugcugug

SEQ ID NO: 1347489 - RNA, 19 nt, Artificial Sequence
  Description of Artificial Sequence: Synthetic oligonucleotide
aguguauguagaugaguua

SEQ ID NO: 1347490 - RNA, 19 nt, Artificial Sequence
  Description of Artificial Sequence: Synthetic oligonucleotide
ugugucucuacugggguuc

SEQ ID NO: 1347491 - RNA, 19 nt, Artificial Sequence
  Description of Artificial Sequence: Synthetic oligonucleotide
auaccccuuucaauguggc

SEQ ID NO: 1347492 - RNA, 19 nt, Artificial Sequence
  Description of Artificial Sequence: Synthetic oligonucleotide
cugaaauauguucugccaa

SEQ ID NO: 1347493 - RNA, 19 nt, Artificial Sequence
  Description of Artificial Sequence: Synthetic oligonucleotide
cuuaacagaagcagagaua

SEQ ID NO: 1347494 - RNA, 19 nt, Artificial Sequence
  Description of Artificial Sequence: Synthetic oligonucleotide
guagaugaguuaacacugc

SEQ ID NO: 1347495 - RNA, 19 nt, Artificial Sequence
  Description of Artificial Sequence: Synthetic oligonucleotide
aacuuucauuagugacgag

SEQ ID NO: 1347496 - RNA, 19 nt, Artificial Sequence
  Description of Artificial Sequence: Synthetic oligonucleotide
aaucacacacacacacaca

SEQ ID NO: 1347497 - RNA, 19 nt, Artificial Sequence
  Description of Artificial Sequence: Synthetic oligonucleotide
acacacacacacacacacc

SEQ ID NO: 1347498 - RNA, 19 nt, Artificial Sequence
  Description of Artificial Sequence: Synthetic oligonucleotide
cacacacacacaccccucc

SEQ ID NO: 1347499 - RNA, 19 nt, Artificial Sequence
  Description of Artificial Sequence: Synthetic oligonucleotide
agcuccuaaguucauccau

SEQ ID NO: 1347500 - RNA, 19 nt, Artificial Sequence
  Description of Artificial Sequence: Synthetic oligonucleotide
ggucuuuucuaaucgguuc

SEQ ID NO: 1347501 - RNA, 19 nt, Artificial Sequence
  Description of Artificial Sequence: Synthetic oligonucleotide
uccuaaguucauccauuuc

SEQ ID NO: 1347502 - RNA, 19 nt, Artificial Sequence
  Description of Artificial Sequence: Synthetic oligonucleotide
ucagggaauuuuccagguc

SEQ ID NO: 1347503 - RNA, 19 nt, Artificial Sequence
  Description of Artificial Sequence: Synthetic oligonucleotide
guggcgggcuuccauaccc

SEQ ID NO: 1347504 - RNA, 19 nt, Artificial Sequence
  Description of Artificial Sequence: Synthetic oligonucleotide
uugaaugcuauuggccuuc

SEQ ID NO: 1347505 - RNA, 19 nt, Artificial Sequence
  Description of Artificial Sequence: Synthetic oligonucleotide
acacacacacacacacccc

SEQ ID NO: 1347506 - RNA, 19 nt, Artificial Sequence
  Description of Artificial Sequence: Synthetic oligonucleotide
cuuuucuaaucgguucaag

SEQ ID NO: 1347507 - RNA, 19 nt, Artificial Sequence
  Description of Artificial Sequence: Synthetic oligonucleotide
gguauacaugagcugaaga

SEQ ID NO: 1347508 - RNA, 19 nt, Artificial Sequence
  Description of Artificial Sequence: Synthetic oligonucleotide
agaaccuccuuuggaaugu

SEQ ID NO: 1347509 - RNA, 19 nt, Artificial Sequence
  Description of Artificial Sequence: Synthetic oligonucleotide
guauauaguguauguagau

SEQ ID NO: 1347510 - RNA, 19 nt, Artificial Sequence
  Description of Artificial Sequence: Synthetic oligonucleotide
cauucacgucuucccaggg

SEQ ID NO: 1347511 - RNA, 19 nt, Artificial Sequence
  Description of Artificial Sequence: Synthetic oligonucleotide
auucacgucuucccagggu

SEQ ID NO: 1347512 - RNA, 19 nt, Artificial Sequence
  Description of Artificial Sequence: Synthetic oligonucleotide
gucacuuugugguaugcua

SEQ ID NO: 1347513 - RNA, 19 nt, Artificial Sequence
  Description of Artificial Sequence: Synthetic oligonucleotide
aggacauguucucaacuuu

SEQ ID NO: 1347514 - RNA, 19 nt, Artificial Sequence
  Description of Artificial Sequence: Synthetic oligonucleotide
guucaacuauauuacacau

SEQ ID NO: 1347515 - RNA, 19 nt, Artificial Sequence
  Description of Artificial Sequence: Synthetic oligonucleotide
auauuacacaucuguucuu

SEQ ID NO: 1347516 - RNA, 19 nt, Artificial Sequence
  Description of Artificial Sequence: Synthetic oligonucleotide
uguggucacuuugugguau

SEQ ID NO: 1347517 - RNA, 19 nt, Artificial Sequence
  Description of Artificial Sequence: Synthetic oligonucleotide
cuaaugaguuaaugcuuca

SEQ ID NO: 1347518 - RNA, 19 nt, Artificial Sequence
  Description of Artificial Sequence: Synthetic oligonucleotide
cauuccucucuucucgguc

SEQ ID NO: 1347519 - RNA, 19 nt, Artificial Sequence
  Description of Artificial Sequence: Synthetic oligonucleotide
gcuaaugaguuaaugcuuc

SEQ ID NO: 1347520 - RNA, 19 nt, Artificial Sequence
  Description of Artificial Sequence: Synthetic oligonucleotide
cagaaucguuaccaucuug

SEQ ID NO: 1347521 - RNA, 19 nt, Artificial Sequence
  Description of Artificial Sequence: Synthetic oligonucleotide
accccuuucaauguggcua

SEQ ID NO: 1347522 - RNA, 19 nt, Artificial Sequence
  Description of Artificial Sequence: Synthetic oligonucleotide
uugguugguugguuucugu

SEQ ID NO: 1347523 - RNA, 19 nt, Artificial Sequence
  Description of Artificial Sequence: Synthetic oligonucleotide
cuggcuuagcacccacugc

SEQ ID NO: 1347524 - RNA, 19 nt, Artificial Sequence
  Description of Artificial Sequence: Synthetic oligonucleotide
ugguugguugguuucugua

SEQ ID NO: 1347525 - RNA, 19 nt, Artificial Sequence
  Description of Artificial Sequence: Synthetic oligonucleotide
ccuaaaguuauaaguuguc

SEQ ID NO: 1347526 - RNA, 19 nt, Artificial Sequence
  Description of Artificial Sequence: Synthetic oligonucleotide
caaaucgcccagcucaaga

SEQ ID NO: 1347527 - RNA, 19 nt, Artificial Sequence
  Description of Artificial Sequence: Synthetic oligonucleotide
cuucacaaggugggcacag

SEQ ID NO: 1347528 - RNA, 19 nt, Artificial Sequence
  Description of Artificial Sequence: Synthetic oligonucleotide
agccuaucugccccacauc

SEQ ID NO: 1347529 - RNA, 19 nt, Artificial Sequence
  Description of Artificial Sequence: Synthetic oligonucleotide
uagcuccuaaguucaucca

SEQ ID NO: 1347530 - RNA, 19 nt, Artificial Sequence
  Description of Artificial Sequence: Synthetic oligonucleotide
uuuuccaggucaguucaua

SEQ ID NO: 1347531 - RNA, 19 nt, Artificial Sequence
  Description of Artificial Sequence: Synthetic oligonucleotide
agugacgaguagcuccuaa

SEQ ID NO: 1347532 - RNA, 19 nt, Artificial Sequence
  Description of Artificial Sequence: Synthetic oligonucleotide
agggaauuuuccaggucag

SEQ ID NO: 1347533 - RNA, 19 nt, Artificial Sequence
  Description of Artificial Sequence: Synthetic oligonucleotide
uacggaucugcaugccacu

SEQ ID NO: 1347534 - RNA, 19 nt, Artificial Sequence
  Description of Artificial Sequence: Synthetic oligonucleotide
uuagaccauggcguauaca

SEQ ID NO: 1347535 - RNA, 19 nt, Artificial Sequence
  Description of Artificial Sequence: Synthetic oligonucleotide
cuaaucgguucaagauuuc

SEQ ID NO: 1347536 - RNA, 19 nt, Artificial Sequence
  Description of Artificial Sequence: Synthetic oligonucleotide
ucguuaccaucuugauuug

SEQ ID NO: 1347537 - RNA, 19 nt, Artificial Sequence
  Description of Artificial Sequence: Synthetic oligonucleotide
guuuguccacgugaaacca

SEQ ID NO: 1347538 - RNA, 19 nt, Artificial Sequence
  Description of Artificial Sequence: Synthetic oligonucleotide
ccacgugaaaccaaauauc

SEQ ID NO: 1347539 - RNA, 19 nt, Artificial Sequence
  Description of Artificial Sequence: Synthetic oligonucleotide
cugcaugccacuucccuga

SEQ ID NO: 1347540 - RNA, 19 nt, Artificial Sequence
  Description of Artificial Sequence: Synthetic oligonucleotide
guuagaccauggcguauac

SEQ ID NO: 1347541 - RNA, 19 nt, Artificial Sequence
  Description of Artificial Sequence: Synthetic oligonucleotide
ucaaaucgcccagcucaag

SEQ ID NO: 1347542 - RNA, 19 nt, Artificial Sequence
  Description of Artificial Sequence: Synthetic oligonucleotide
aguuaacacugcugcuggu

SEQ ID NO: 1347543 - RNA, 19 nt, Artificial Sequence
  Description of Artificial Sequence: Synthetic oligonucleotide
uugguugguuucuguaauu

SEQ ID NO: 1347544 - RNA, 19 nt, Artificial Sequence
  Description of Artificial Sequence: Synthetic oligonucleotide
ucugccugugaaagccuau

SEQ ID NO: 1347545 - RNA, 19 nt, Artificial Sequence
  Description of Artificial Sequence: Synthetic oligonucleotide
cagaagcagagauauuuua

SEQ ID NO: 1347546 - RNA, 19 nt, Artificial Sequence
  Description of Artificial Sequence: Synthetic oligonucleotide
agaucugugauagccugua

SEQ ID NO: 1347547 - RNA, 19 nt, Artificial Sequence
  Description of Artificial Sequence: Synthetic oligonucleotide
auguagaaugaagguagaa

SEQ ID NO: 1347548 - RNA, 19 nt, Artificial Sequence
  Description of Artificial Sequence: Synthetic oligonucleotide
uguccacgugaaaccaaau

SEQ ID NO: 1347549 - RNA, 19 nt, Artificial Sequence
  Description of Artificial Sequence: Synthetic oligonucleotide
cuuugugguaugcuaaaau

SEQ ID NO: 1347550 - RNA, 19 nt, Artificial Sequence
  Description of Artificial Sequence: Synthetic oligonucleotide
uggucacuuugugguaugc

SEQ ID NO: 1347551 - RNA, 19 nt, Artificial Sequence
  Description of Artificial Sequence: Synthetic oligonucleotide
gaaucguuaccaucuugau

SEQ ID NO: 1347552 - RNA, 19 nt, Artificial Sequence
  Description of Artificial Sequence: Synthetic oligonucleotide
cauuagugacgaguagcuc

SEQ ID NO: 1347553 - RNA, 19 nt, Artificial Sequence
  Description of Artificial Sequence: Synthetic oligonucleotide
accauggcguauacaccac

SEQ ID NO: 1347554 - RNA, 19 nt, Artificial Sequence
  Description of Artificial Sequence: Synthetic oligonucleotide
guggucacuuugugguaug

SEQ ID NO: 1347555 - RNA, 19 nt, Artificial Sequence
  Description of Artificial Sequence: Synthetic oligonucleotide
uagcaccucccgcucaaau

SEQ ID NO: 1347556 - RNA, 19 nt, Artificial Sequence
  Description of Artificial Sequence: Synthetic oligonucleotide
gguuuugcccauacuucag

SEQ ID NO: 1347557 - RNA, 19 nt, Artificial Sequence
  Description of Artificial Sequence: Synthetic oligonucleotide
acacacacacacaccccuc

SEQ ID NO: 1347558 - RNA, 19 nt, Artificial Sequence
  Description of Artificial Sequence: Synthetic oligonucleotide
gacgaguagcuccuaaguu

SEQ ID NO: 1347559 - RNA, 19 nt, Artificial Sequence
  Description of Artificial Sequence: Synthetic oligonucleotide
uggcgggcuuccauacccc

SEQ ID NO: 1347560 - RNA, 19 nt, Artificial Sequence
  Description of Artificial Sequence: Synthetic oligonucleotide
auggcguauacaccacauu

SEQ ID NO: 1347561 - RNA, 19 nt, Artificial Sequence
  Description of Artificial Sequence: Synthetic oligonucleotide
ggacauguucucaacuuuc

SEQ ID NO: 1347562 - RNA, 19 nt, Artificial Sequence
  Description of Artificial Sequence: Synthetic oligonucleotide
cucagcucacaugaacuca

SEQ ID NO: 1347563 - RNA, 19 nt, Artificial Sequence
  Description of Artificial Sequence: Synthetic oligonucleotide
uuacauccuucugccugug

SEQ ID NO: 1347564 - RNA, 19 nt, Artificial Sequence
  Description of Artificial Sequence: Synthetic oligonucleotide
cuauuggccuucacaaggu

SEQ ID NO: 1347565 - RNA, 19 nt, Artificial Sequence
  Description of Artificial Sequence: Synthetic oligonucleotide
gugauagccuguacauuca

SEQ ID NO: 1347566 - RNA, 19 nt, Artificial Sequence
  Description of Artificial Sequence: Synthetic oligonucleotide
augcuaaaauacggaucug

SEQ ID NO: 1347567 - RNA, 19 nt, Artificial Sequence
  Description of Artificial Sequence: Synthetic oligonucleotide
gcccauacuucagugauga

SEQ ID NO: 1347568 - RNA, 19 nt, Artificial Sequence
  Description of Artificial Sequence: Synthetic oligonucleotide
gaaagccuaucugccccac

SEQ ID NO: 1347569 - RNA, 19 nt, Artificial Sequence
  Description of Artificial Sequence: Synthetic oligonucleotide
caaaaugaaugaugucuau

SEQ ID NO: 1347570 - RNA, 19 nt, Artificial Sequence
  Description of Artificial Sequence: Synthetic oligonucleotide
uucacaaggugggcacagu

SEQ ID NO: 1347571 - RNA, 19 nt, Artificial Sequence
  Description of Artificial Sequence: Synthetic oligonucleotide
gggguucccuuaaacacug

SEQ ID NO: 1347572 - RNA, 19 nt, Artificial Sequence
  Description of Artificial Sequence: Synthetic oligonucleotide
cauuugcugaagaaaucau

SEQ ID NO: 1347573 - RNA, 19 nt, Artificial Sequence
  Description of Artificial Sequence: Synthetic oligonucleotide
gcucagcucacaugaacuc

SEQ ID NO: 1347574 - RNA, 19 nt, Artificial Sequence
  Description of Artificial Sequence: Synthetic oligonucleotide
cacacacacacacaccccu

SEQ ID NO: 1347575 - RNA, 19 nt, Artificial Sequence
  Description of Artificial Sequence: Synthetic oligonucleotide
acacacacacacacacaca

SEQ ID NO: 1347576 - RNA, 19 nt, Artificial Sequence
  Description of Artificial Sequence: Synthetic oligonucleotide
ucguggcaucuguuuccag

SEQ ID NO: 1347577 - RNA, 19 nt, Artificial Sequence
  Description of Artificial Sequence: Synthetic oligonucleotide
gcacuuuccagaguugguc

SEQ ID NO: 1347578 - RNA, 19 nt, Artificial Sequence
  Description of Artificial Sequence: Synthetic oligonucleotide
cacauuucguggcaucugu

SEQ ID NO: 1347579 - RNA, 19 nt, Artificial Sequence
  Description of Artificial Sequence: Synthetic oligonucleotide
cugccugugaaagccuauc

SEQ ID NO: 1347580 - RNA, 19 nt, Artificial Sequence
  Description of Artificial Sequence: Synthetic oligonucleotide
ccagucuaaaucacacaca

SEQ ID NO: 1347581 - RNA, 19 nt, Artificial Sequence
  Description of Artificial Sequence: Synthetic oligonucleotide
uuccagaguuggucugcuc

SEQ ID NO: 1347582 - RNA, 19 nt, Artificial Sequence
  Description of Artificial Sequence: Synthetic oligonucleotide
cugcugcuaggucaggaaa

SEQ ID NO: 1347583 - RNA, 19 nt, Artificial Sequence
  Description of Artificial Sequence: Synthetic oligonucleotide
cgaguagcuccuaaguuca

SEQ ID NO: 1347584 - RNA, 19 nt, Artificial Sequence
  Description of Artificial Sequence: Synthetic oligonucleotide
cagguuagaccauggcgua

SEQ ID NO: 1347585 - RNA, 19 nt, Artificial Sequence
  Description of Artificial Sequence: Synthetic oligonucleotide
cauggcguauacaccacau

SEQ ID NO: 1347586 - RNA, 19 nt, Artificial Sequence
  Description of Artificial Sequence: Synthetic oligonucleotide
cuugaaugcuauuggccuu

SEQ ID NO: 1347587 - RNA, 19 nt, Artificial Sequence
  Description of Artificial Sequence: Synthetic oligonucleotide
cucucccuuuuguaaucga

SEQ ID NO: 1347588 - RNA, 19 nt, Artificial Sequence
  Description of Artificial Sequence: Synthetic oligonucleotide
gaauuuugguugguugguu

SEQ ID NO: 1347589 - RNA, 19 nt, Artificial Sequence
  Description of Artificial Sequence: Synthetic oligonucleotide
cacagaacuccagucuaaa

SEQ ID NO: 1347590 - RNA, 19 nt, Artificial Sequence
  Description of Artificial Sequence: Synthetic oligonucleotide
ccauaccccuuucaaugug

SEQ ID NO: 1347591 - RNA, 19 nt, Artificial Sequence
  Description of Artificial Sequence: Synthetic oligonucleotide
gugaugacagcugguacau

SEQ ID NO: 1347592 - RNA, 19 nt, Artificial Sequence
  Description of Artificial Sequence: Synthetic oligonucleotide
cucuacugggguucccuua

SEQ ID NO: 1347593 - RNA, 19 nt, Artificial Sequence
  Description of Artificial Sequence: Synthetic oligonucleotide
ucucggucucggcuuucuu

SEQ ID NO: 1347594 - RNA, 19 nt, Artificial Sequence
  Description of Artificial Sequence: Synthetic oligonucleotide
ucccucgugguggcgggcu

SEQ ID NO: 1347595 - RNA, 19 nt, Artificial Sequence
  Description of Artificial Sequence: Synthetic oligonucleotide
cugcuggcuuagcacccac

SEQ ID NO: 1347596 - RNA, 19 nt, Artificial Sequence
  Description of Artificial Sequence: Synthetic oligonucleotide
gguuagaccauggcguaua

SEQ ID NO: 1347597 - RNA, 19 nt, Artificial Sequence
  Description of Artificial Sequence: Synthetic oligonucleotide
gugguggcgggcuuccaua

SEQ ID NO: 1347598 - RNA, 19 nt, Artificial Sequence
  Description of Artificial Sequence: Synthetic oligonucleotide
agguuagaccauggcguau

SEQ ID NO: 1347599 - RNA, 19 nt, Artificial Sequence
  Description of Artificial Sequence: Synthetic oligonucleotide
auuuuccaggucaguucau

SEQ ID NO: 1347600 - RNA, 19 nt, Artificial Sequence
  Description of Artificial Sequence: Synthetic oligonucleotide
acauuucguggcaucuguu

SEQ ID NO: 1347601 - RNA, 19 nt, Artificial Sequence
  Description of Artificial Sequence: Synthetic oligonucleotide
cuccuaaguucauccauuu

SEQ ID NO: 1347602 - RNA, 19 nt, Artificial Sequence
  Description of Artificial Sequence: Synthetic oligonucleotide
ggcuuagcacccacugcug

SEQ ID NO: 1347603 - RNA, 19 nt, Artificial Sequence
  Description of Artificial Sequence: Synthetic oligonucleotide
acggaucugcaugccacuu

SEQ ID NO: 1347604 - RNA, 19 nt, Artificial Sequence
  Description of Artificial Sequence: Synthetic oligonucleotide
ggcuaaugaguuaaugcuu

SEQ ID NO: 1347605 - RNA, 19 nt, Artificial Sequence
  Description of Artificial Sequence: Synthetic oligonucleotide
ccagaguuggucugcucaa

SEQ ID NO: 1347606 - RNA, 19 nt, Artificial Sequence
  Description of Artificial Sequence: Synthetic oligonucleotide
ccucccucgugguggcggg

SEQ ID NO: 1347607 - RNA, 19 nt, Artificial Sequence
  Description of Artificial Sequence: Synthetic oligonucleotide
cuacugggguucccuuaaa

SEQ ID NO: 1347608 - RNA, 19 nt, Artificial Sequence
  Description of Artificial Sequence: Synthetic oligonucleotide
cccucccucgugguggcgg

SEQ ID NO: 1347609 - RNA, 19 nt, Artificial Sequence
  Description of Artificial Sequence: Synthetic oligonucleotide
ccauggcguauacaccaca

SEQ ID NO: 1347610 - RNA, 19 nt, Artificial Sequence
  Description of Artificial Sequence: Synthetic oligonucleotide
ccaggguccuuugcucagc

SEQ ID NO: 1347611 - RNA, 19 nt, Artificial Sequence
  Description of Artificial Sequence: Synthetic oligonucleotide
cucccucgugguggcgggc

SEQ ID NO: 1347612 - RNA, 19 nt, Artificial Sequence
  Description of Artificial Sequence: Synthetic oligonucleotide
cugugauagccuguacauu

SEQ ID NO: 1347613 - RNA, 19 nt, Artificial Sequence
  Description of Artificial Sequence: Synthetic oligonucleotide
cgcucaaaucgcccagcuc

SEQ ID NO: 1347614 - RNA, 19 nt, Artificial Sequence
  Description of Artificial Sequence: Synthetic oligonucleotide
gaguagcuccuaaguucau

SEQ ID NO: 1347615 - RNA, 19 nt, Artificial Sequence
  Description of Artificial Sequence: Synthetic oligonucleotide
ccacauuaauguuguucau

SEQ ID NO: 1347616 - RNA, 19 nt, Artificial Sequence
  Description of Artificial Sequence: Synthetic oligonucleotide
ggucaccaguuuucugguu

SEQ ID NO: 1347617 - RNA, 19 nt, Artificial Sequence
  Description of Artificial Sequence: Synthetic oligonucleotide
ccgcucaaaucgcccagcu

SEQ ID NO: 1347618 - RNA, 19 nt, Artificial Sequence
  Description of Artificial Sequence: Synthetic oligonucleotide
ggguucccuuaaacacugu

SEQ ID NO: 1347619 - RNA, 19 nt, Artificial Sequence
  Description of Artificial Sequence: Synthetic oligonucleotide
ccccucccucgugguggcg

SEQ ID NO: 1347620 - RNA, 19 nt, Artificial Sequence
  Description of Artificial Sequence: Synthetic oligonucleotide
cgugguggcgggcuuccau

SEQ ID NO: 1347621 - RNA, 19 nt, Artificial Sequence
  Description of Artificial Sequence: Synthetic oligonucleotide
cggucucggcuuucuuucu

SEQ ID NO: 1347622 - RNA, 19 nt, Artificial Sequence
  Description of Artificial Sequence: Synthetic oligonucleotide
cccuuucaauguggcuaau

SEQ ID NO: 1347623 - RNA, 19 nt, Artificial Sequence
  Description of Artificial Sequence: Synthetic oligonucleotide
aauauugcaucucugaugc

SEQ ID NO: 1347624 - RNA, 19 nt, Artificial Sequence
  Description of Artificial Sequence: Synthetic oligonucleotide
aauauauauauauauauuu

SEQ ID NO: 1347625 - RNA, 19 nt, Artificial Sequence
  Description of Artificial Sequence: Synthetic oligonucleotide
auauauauauauuuaaaag

SEQ ID NO: 1347626 - RNA, 19 nt, Artificial Sequence
  Description of Artificial Sequence: Synthetic oligonucleotide
aauauguaaccacagggac

SEQ ID NO: 1347627 - RNA, 19 nt, Artificial Sequence
  Description of Artificial Sequence: Synthetic oligonucleotide
ugaacauucauucagacaa

SEQ ID NO: 1347628 - RNA, 19 nt, Artificial Sequence
  Description of Artificial Sequence: Synthetic oligonucleotide
uaauccuugguaaacaagg

SEQ ID NO: 1347629 - RNA, 19 nt, Artificial Sequence
  Description of Artificial Sequence: Synthetic oligonucleotide
aaagucuaaacccacagcu

SEQ ID NO: 1347630 - RNA, 19 nt, Artificial Sequence
  Description of Artificial Sequence: Synthetic oligonucleotide
ucuaaauucuuuauuacug

SEQ ID NO: 1347631 - RNA, 19 nt, Artificial Sequence
  Description of Artificial Sequence: Synthetic oligonucleotide
ucugaaauaugauacagcc

SEQ ID NO: 1347632 - RNA, 19 nt, Artificial Sequence
  Description of Artificial Sequence: Synthetic oligonucleotide
uguguuuagguuaacaggc

SEQ ID NO: 1347633 - RNA, 19 nt, Artificial Sequence
  Description of Artificial Sequence: Synthetic oligonucleotide
uauauauauauauuuaaaa

SEQ ID NO: 1347634 - RNA, 19 nt, Artificial Sequence
  Description of Artificial Sequence: Synthetic oligonucleotide
ucuauauucguaauucucc

SEQ ID NO: 1347635 - RNA, 19 nt, Artificial Sequence
  Description of Artificial Sequence: Synthetic oligonucleotide
auauauuuaaaagucacuc

SEQ ID NO: 1347636 - RNA, 19 nt, Artificial Sequence
  Description of Artificial Sequence: Synthetic oligonucleotide
uauauauauauauauuuaa

SEQ ID NO: 1347637 - RNA, 19 nt, Artificial Sequence
  Description of Artificial Sequence: Synthetic oligonucleotide
aaauauugcaucucugaug

SEQ ID NO: 1347638 - RNA, 19 nt, Artificial Sequence
  Description of Artificial Sequence: Synthetic oligonucleotide
auaacuccuaccuuaaauc

SEQ ID NO: 1347639 - RNA, 19 nt, Artificial Sequence
  Description of Artificial Sequence: Synthetic oligonucleotide
uuaguuauaucccaacaca

SEQ ID NO: 1347640 - RNA, 19 nt, Artificial Sequence
  Description of Artificial Sequence: Synthetic oligonucleotide
ugauuuacaugcaacagga

SEQ ID NO: 1347641 - RNA, 19 nt, Artificial Sequence
  Description of Artificial Sequence: Synthetic oligonucleotide
guagcuaagaaauauuuug

SEQ ID NO: 1347642 - RNA, 19 nt, Artificial Sequence
  Description of Artificial Sequence: Synthetic oligonucleotide
auuaccaauuuauuaaaag

SEQ ID NO: 1347643 - RNA, 19 nt, Artificial Sequence
  Description of Artificial Sequence: Synthetic oligonucleotide
aauaaacauucaugaaaac

SEQ ID NO: 1347644 - RNA, 19 nt, Artificial Sequence
  Description of Artificial Sequence: Synthetic oligonucleotide
cauacagucagaaugcgcc

SEQ ID NO: 1347645 - RNA, 19 nt, Artificial Sequence
  Description of Artificial Sequence: Synthetic oligonucleotide
uguauaaacuucacuauga

SEQ ID NO: 1347646 - RNA, 19 nt, Artificial Sequence
  Description of Artificial Sequence: Synthetic oligonucleotide
aaauaucagagaauaaguc

SEQ ID NO: 1347647 - RNA, 19 nt, Artificial Sequence
  Description of Artificial Sequence: Synthetic oligonucleotide
aaauauaacuccuaccuua

SEQ ID NO: 1347648 - RNA, 19 nt, Artificial Sequence
  Description of Artificial Sequence: Synthetic oligonucleotide
ucugcuaauaaauauguaa

SEQ ID NO: 1347649 - RNA, 19 nt, Artificial Sequence
  Description of Artificial Sequence: Synthetic oligonucleotide
uauaucccaacacaaaaca

SEQ ID NO: 1347650 - RNA, 19 nt, Artificial Sequence
  Description of Artificial Sequence: Synthetic oligonucleotide
auaauuaccagaauuaugu

SEQ ID NO: 1347651 - RNA, 19 nt, Artificial Sequence
  Description of Artificial Sequence: Synthetic oligonucleotide
uuuaguuauaucccaacac

SEQ ID NO: 1347652 - RNA, 19 nt, Artificial Sequence
  Description of Artificial Sequence: Synthetic oligonucleotide
acaaauaucagagaauaag

SEQ ID NO: 1347653 - RNA, 19 nt, Artificial Sequence
  Description of Artificial Sequence: Synthetic oligonucleotide
uuguguuuagguuaacagg

SEQ ID NO: 1347654 - RNA, 19 nt, Artificial Sequence
  Description of Artificial Sequence: Synthetic oligonucleotide
aguuuaaauaauuaccaga

SEQ ID NO: 1347655 - RNA, 19 nt, Artificial Sequence
  Description of Artificial Sequence: Synthetic oligonucleotide
aaaacaaucaauggcccuc

SEQ ID NO: 1347656 - RNA, 19 nt, Artificial Sequence
  Description of Artificial Sequence: Synthetic oligonucleotide
auuaaaagucaauggauug

SEQ ID NO: 1347657 - RNA, 19 nt, Artificial Sequence
  Description of Artificial Sequence: Synthetic oligonucleotide
uuaacaggcaccaucuuga

SEQ ID NO: 1347658 - RNA, 19 nt, Artificial Sequence
  Description of Artificial Sequence: Synthetic oligonucleotide
uuugcagacaaauaucaga

SEQ ID NO: 1347659 - RNA, 19 nt, Artificial Sequence
  Description of Artificial Sequence: Synthetic oligonucleotide
ugaauguuuugucauuuag

SEQ ID NO: 1347660 - RNA, 19 nt, Artificial Sequence
  Description of Artificial Sequence: Synthetic oligonucleotide
ugaaauauauauauauaua

SEQ ID NO: 1347661 - RNA, 19 nt, Artificial Sequence
  Description of Artificial Sequence: Synthetic oligonucleotide
gaaauauauauauauauau

SEQ ID NO: 1347662 - RNA, 19 nt, Artificial Sequence
  Description of Artificial Sequence: Synthetic oligonucleotide
aaaacuggcuaaaauacug

SEQ ID NO: 1347663 - RNA, 19 nt, Artificial Sequence
  Description of Artificial Sequence: Synthetic oligonucleotide
uugacaguacuuaaaauau

SEQ ID NO: 1347664 - RNA, 19 nt, Artificial Sequence
  Description of Artificial Sequence: Synthetic oligonucleotide
ugaaguaagugucaacaca

SEQ ID NO: 1347665 - RNA, 19 nt, Artificial Sequence
  Description of Artificial Sequence: Synthetic oligonucleotide
cuuguguuuagguuaacag

SEQ ID NO: 1347666 - RNA, 19 nt, Artificial Sequence
  Description of Artificial Sequence: Synthetic oligonucleotide
aauauaucuuguguuuagg

SEQ ID NO: 1347667 - RNA, 19 nt, Artificial Sequence
  Description of Artificial Sequence: Synthetic oligonucleotide
acaggcaccaucuugauaa

SEQ ID NO: 1347668 - RNA, 19 nt, Artificial Sequence
  Description of Artificial Sequence: Synthetic oligonucleotide
uuucuguagaagaugguga

SEQ ID NO: 1347669 - RNA, 19 nt, Artificial Sequence
  Description of Artificial Sequence: Synthetic oligonucleotide
aaacugucuagaaaguuuc

SEQ ID NO: 1347670 - RNA, 19 nt, Artificial Sequence
  Description of Artificial Sequence: Synthetic oligonucleotide
gauguaauccugaaguaag

SEQ ID NO: 1347671 - RNA, 19 nt, Artificial Sequence
  Description of Artificial Sequence: Synthetic oligonucleotide
uuuaguaguuuucugcuaa

SEQ ID NO: 1347672 - RNA, 19 nt, Artificial Sequence
  Description of Artificial Sequence: Synthetic oligonucleotide
cugcuaauaaauauguaac

SEQ ID NO: 1347673 - RNA, 19 nt, Artificial Sequence
  Description of Artificial Sequence: Synthetic oligonucleotide
aauaauuaccagaauuaug

SEQ ID NO: 1347674 - RNA, 19 nt, Artificial Sequence
  Description of Artificial Sequence: Synthetic oligonucleotide
uauaccacacuacuuaauc

SEQ ID NO: 1347675 - RNA, 19 nt, Artificial Sequence
  Description of Artificial Sequence: Synthetic oligonucleotide
uguuaaugaugaaagccug

SEQ ID NO: 1347676 - RNA, 19 nt, Artificial Sequence
  Description of Artificial Sequence: Synthetic oligonucleotide
acuguuuacaaguagcuaa

SEQ ID NO: 1347677 - RNA, 19 nt, Artificial Sequence
  Description of Artificial Sequence: Synthetic oligonucleotide
uaaucuauauucguaauuc

SEQ ID NO: 1347678 - RNA, 19 nt, Artificial Sequence
  Description of Artificial Sequence: Synthetic oligonucleotide
gauaugaucugaauggcug

SEQ ID NO: 1347679 - RNA, 19 nt, Artificial Sequence
  Description of Artificial Sequence: Synthetic oligonucleotide
uauaacuccuaccuuaaau

SEQ ID NO: 1347680 - RNA, 19 nt, Artificial Sequence
  Description of Artificial Sequence: Synthetic oligonucleotide
accagaauuauguauaaau

SEQ ID NO: 1347681 - RNA, 19 nt, Artificial Sequence
  Description of Artificial Sequence: Synthetic oligonucleotide
uuauaucccaacacaaaac

SEQ ID NO: 1347682 - RNA, 19 nt, Artificial Sequence
  Description of Artificial Sequence: Synthetic oligonucleotide
cuguaaauauccauccagg

SEQ ID NO: 1347683 - RNA, 19 nt, Artificial Sequence
  Description of Artificial Sequence: Synthetic oligonucleotide
acuuaaucuacuugcuuuc

SEQ ID NO: 1347684 - RNA, 19 nt, Artificial Sequence
  Description of Artificial Sequence: Synthetic oligonucleotide
acaggaaucuguuggucgc

SEQ ID NO: 1347685 - RNA, 19 nt, Artificial Sequence
  Description of Artificial Sequence: Synthetic oligonucleotide
aaauauguaaccacaggga

SEQ ID NO: 1347686 - RNA, 19 nt, Artificial Sequence
  Description of Artificial Sequence: Synthetic oligonucleotide
aaacacgaaagccuuuuca

SEQ ID NO: 1347687 - RNA, 19 nt, Artificial Sequence
  Description of Artificial Sequence: Synthetic oligonucleotide
aucacuguuuacaaguagc

SEQ ID NO: 1347688 - RNA, 19 nt, Artificial Sequence
  Description of Artificial Sequence: Synthetic oligonucleotide
aaucuauauucguaauucu

SEQ ID NO: 1347689 - RNA, 19 nt, Artificial Sequence
  Description of Artificial Sequence: Synthetic oligonucleotide
uuuuggucuagucuguacu

SEQ ID NO: 1347690 - RNA, 19 nt, Artificial Sequence
  Description of Artificial Sequence: Synthetic oligonucleotide
uacauuuaguuauauccca

SEQ ID NO: 1347691 - RNA, 19 nt, Artificial Sequence
  Description of Artificial Sequence: Synthetic oligonucleotide
uucauauagcaccaaauuu

SEQ ID NO: 1347692 - RNA, 19 nt, Artificial Sequence
  Description of Artificial Sequence: Synthetic oligonucleotide
aaaagucacucucuugaca

SEQ ID NO: 1347693 - RNA, 19 nt, Artificial Sequence
  Description of Artificial Sequence: Synthetic oligonucleotide
aacacgaaagccuuuucau

SEQ ID NO: 1347694 - RNA, 19 nt, Artificial Sequence
  Description of Artificial Sequence: Synthetic oligonucleotide
uguaaauauccauccaggu

SEQ ID NO: 1347695 - RNA, 19 nt, Artificial Sequence
  Description of Artificial Sequence: Synthetic oligonucleotide
ucauauuucugccuucacu

SEQ ID NO: 1347696 - RNA, 19 nt, Artificial Sequence
  Description of Artificial Sequence: Synthetic oligonucleotide
aaaacacgaaagccuuuuc

SEQ ID NO: 1347697 - RNA, 19 nt, Artificial Sequence
  Description of Artificial Sequence: Synthetic oligonucleotide
aaauauauauauauauauu

SEQ ID NO: 1347698 - RNA, 19 nt, Artificial Sequence
  Description of Artificial Sequence: Synthetic oligonucleotide
gacuaaguaacagagaaaa

SEQ ID NO: 1347699 - RNA, 19 nt, Artificial Sequence
  Description of Artificial Sequence: Synthetic oligonucleotide
auuuaguuauaucccaaca

SEQ ID NO: 1347700 - RNA, 19 nt, Artificial Sequence
  Description of Artificial Sequence: Synthetic oligonucleotide
guuucugaaaauauaacuc

SEQ ID NO: 1347701 - RNA, 19 nt, Artificial Sequence
  Description of Artificial Sequence: Synthetic oligonucleotide
agcauagaugucaauuucc

SEQ ID NO: 1347702 - RNA, 19 nt, Artificial Sequence
  Description of Artificial Sequence: Synthetic oligonucleotide
uuuagguuaacaggcacca

SEQ ID NO: 1347703 - RNA, 19 nt, Artificial Sequence
  Description of Artificial Sequence: Synthetic oligonucleotide
gucaauugaagacagaaua

SEQ ID NO: 1347704 - RNA, 19 nt, Artificial Sequence
  Description of Artificial Sequence: Synthetic oligonucleotide
uucauucagacaaaacauc

SEQ ID NO: 1347705 - RNA, 19 nt, Artificial Sequence
  Description of Artificial Sequence: Synthetic oligonucleotide
aaucuacuugcuuucaaua

SEQ ID NO: 1347706 - RNA, 19 nt, Artificial Sequence
  Description of Artificial Sequence: Synthetic oligonucleotide
agcgauuccucacuccagc

SEQ ID NO: 1347707 - RNA, 19 nt, Artificial Sequence
  Description of Artificial Sequence: Synthetic oligonucleotide
uacuuaaucuacuugcuuu

SEQ ID NO: 1347708 - RNA, 19 nt, Artificial Sequence
  Description of Artificial Sequence: Synthetic oligonucleotide
cuugacaguacuuaaaaua

SEQ ID NO: 1347709 - RNA, 19 nt, Artificial Sequence
  Description of Artificial Sequence: Synthetic oligonucleotide
auggcuguuacuucgagau

SEQ ID NO: 1347710 - RNA, 19 nt, Artificial Sequence
  Description of Artificial Sequence: Synthetic oligonucleotide
ucuugauaacaaaaguuuu

SEQ ID NO: 1347711 - RNA, 19 nt, Artificial Sequence
  Description of Artificial Sequence: Synthetic oligonucleotide
uuaaaauaguggccaagaa

SEQ ID NO: 1347712 - RNA, 19 nt, Artificial Sequence
  Description of Artificial Sequence: Synthetic oligonucleotide
uauguaaccacagggacau

SEQ ID NO: 1347713 - RNA, 19 nt, Artificial Sequence
  Description of Artificial Sequence: Synthetic oligonucleotide
uuagcauagaugucaauuu

SEQ ID NO: 1347714 - RNA, 19 nt, Artificial Sequence
  Description of Artificial Sequence: Synthetic oligonucleotide
ugagaauuugcugauguaa

SEQ ID NO: 1347715 - RNA, 19 nt, Artificial Sequence
  Description of Artificial Sequence: Synthetic oligonucleotide
aguaguuuucugcuaauaa

SEQ ID NO: 1347716 - RNA, 19 nt, Artificial Sequence
  Description of Artificial Sequence: Synthetic oligonucleotide
auguuuugucauuuaguag

SEQ ID NO: 1347717 - RNA, 19 nt, Artificial Sequence
  Description of Artificial Sequence: Synthetic oligonucleotide
ucacuguuuacaaguagcu

SEQ ID NO: 1347718 - RNA, 19 nt, Artificial Sequence
  Description of Artificial Sequence: Synthetic oligonucleotide
gauuccucacuccagccgc

SEQ ID NO: 1347719 - RNA, 19 nt, Artificial Sequence
  Description of Artificial Sequence: Synthetic oligonucleotide
uguuuagguuaacaggcac

SEQ ID NO: 1347720 - RNA, 19 nt, Artificial Sequence
  Description of Artificial Sequence: Synthetic oligonucleotide
acugaaaacacgaaagccu

SEQ ID NO: 1347721 - RNA, 19 nt, Artificial Sequence
  Description of Artificial Sequence: Synthetic oligonucleotide
uauaucuuguguuuagguu

SEQ ID NO: 1347722 - RNA, 19 nt, Artificial Sequence
  Description of Artificial Sequence: Synthetic oligonucleotide
guuauaucccaacacaaaa

SEQ ID NO: 1347723 - RNA, 19 nt, Artificial Sequence
  Description of Artificial Sequence: Synthetic oligonucleotide
aucuauauucguaauucuc

SEQ ID NO: 1347724 - RNA, 19 nt, Artificial Sequence
  Description of Artificial Sequence: Synthetic oligonucleotide
aucccagcaaagucuaaac

SEQ ID NO: 1347725 - RNA, 19 nt, Artificial Sequence
  Description of Artificial Sequence: Synthetic oligonucleotide
uguaauccugaaguaagug

SEQ ID NO: 1347726 - RNA, 19 nt, Artificial Sequence
  Description of Artificial Sequence: Synthetic oligonucleotide
uauucguaauucuccauuc

SEQ ID NO: 1347727 - RNA, 19 nt, Artificial Sequence
  Description of Artificial Sequence: Synthetic oligonucleotide
auugcccuaguuuucauau

SEQ ID NO: 1347728 - RNA, 19 nt, Artificial Sequence
  Description of Artificial Sequence: Synthetic oligonucleotide
ugucuagaaaguuucugaa

SEQ ID NO: 1347729 - RNA, 19 nt, Artificial Sequence
  Description of Artificial Sequence: Synthetic oligonucleotide
cuguauaaacuucacuaug

SEQ ID NO: 1347730 - RNA, 19 nt, Artificial Sequence
  Description of Artificial Sequence: Synthetic oligonucleotide
uucguaauucuccauucaa

SEQ ID NO: 1347731 - RNA, 19 nt, Artificial Sequence
  Description of Artificial Sequence: Synthetic oligonucleotide
agcauuuuaauugcccuag

SEQ ID NO: 1347732 - RNA, 19 nt, Artificial Sequence
  Description of Artificial Sequence: Synthetic oligonucleotide
gaagcagcgcgguagcucc

SEQ ID NO: 1347733 - RNA, 19 nt, Artificial Sequence
  Description of Artificial Sequence: Synthetic oligonucleotide
aaucaauggcccucauuca

SEQ ID NO: 1347734 - RNA, 19 nt, Artificial Sequence
  Description of Artificial Sequence: Synthetic oligonucleotide
aaauaucaauuaccaauuu

SEQ ID NO: 1347735 - RNA, 19 nt, Artificial Sequence
  Description of Artificial Sequence: Synthetic oligonucleotide
ucgaguugcagacaugcuc

SEQ ID NO: 1347736 - RNA, 19 nt, Artificial Sequence
  Description of Artificial Sequence: Synthetic oligonucleotide
auaaucuauauucguaauu

SEQ ID NO: 1347737 - RNA, 19 nt, Artificial Sequence
  Description of Artificial Sequence: Synthetic oligonucleotide
uuugcucccaaaguguggc

SEQ ID NO: 1347738 - RNA, 19 nt, Artificial Sequence
  Description of Artificial Sequence: Synthetic oligonucleotide
auauauauauauauuuaaa

SEQ ID NO: 1347739 - RNA, 19 nt, Artificial Sequence
  Description of Artificial Sequence: Synthetic oligonucleotide
agagaauaagucuuugauu

SEQ ID NO: 1347740 - RNA, 19 nt, Artificial Sequence
  Description of Artificial Sequence: Synthetic oligonucleotide
agcuauaccacacuacuua

SEQ ID NO: 1347741 - RNA, 19 nt, Artificial Sequence
  Description of Artificial Sequence: Synthetic oligonucleotide
uuaauugcccuaguuuuca

SEQ ID NO: 1347742 - RNA, 19 nt, Artificial Sequence
  Description of Artificial Sequence: Synthetic oligonucleotide
auucauucagacaaaacau

SEQ ID NO: 1347743 - RNA, 19 nt, Artificial Sequence
  Description of Artificial Sequence: Synthetic oligonucleotide
agacaaauaucagagaaua

SEQ ID NO: 1347744 - RNA, 19 nt, Artificial Sequence
  Description of Artificial Sequence: Synthetic oligonucleotide
uuaaugaugaaagccugaa

SEQ ID NO: 1347745 - RNA, 19 nt, Artificial Sequence
  Description of Artificial Sequence: Synthetic oligonucleotide
cugaaauauauauauauau

SEQ ID NO: 1347746 - RNA, 19 nt, Artificial Sequence
  Description of Artificial Sequence: Synthetic oligonucleotide
auauauauauauauauuua

SEQ ID NO: 1347747 - RNA, 19 nt, Artificial Sequence
  Description of Artificial Sequence: Synthetic oligonucleotide
uaucaauuaccaauuuauu

SEQ ID NO: 1347748 - RNA, 19 nt, Artificial Sequence
  Description of Artificial Sequence: Synthetic oligonucleotide
acaaguagcuaagaaauau

SEQ ID NO: 1347749 - RNA, 19 nt, Artificial Sequence
  Description of Artificial Sequence: Synthetic oligonucleotide
uaaucuacuugcuuucaau

SEQ ID NO: 1347750 - RNA, 19 nt, Artificial Sequence
  Description of Artificial Sequence: Synthetic oligonucleotide
agcgcgguagcuccgcugc

SEQ ID NO: 1347751 - RNA, 19 nt, Artificial Sequence
  Description of Artificial Sequence: Synthetic oligonucleotide
auauucguaauucuccauu

SEQ ID NO: 1347752 - RNA, 19 nt, Artificial Sequence
  Description of Artificial Sequence: Synthetic oligonucleotide
cuuggcucgaguugcagac

SEQ ID NO: 1347753 - RNA, 19 nt, Artificial Sequence
  Description of Artificial Sequence: Synthetic oligonucleotide
aaguagcuaagaaauauuu

SEQ ID NO: 1347754 - RNA, 19 nt, Artificial Sequence
  Description of Artificial Sequence: Synthetic oligonucleotide
ucucugaauguuuugucau

SEQ ID NO: 1347755 - RNA, 19 nt, Artificial Sequence
  Description of Artificial Sequence: Synthetic oligonucleotide
aauauaacuccuaccuuaa

SEQ ID NO: 1347756 - RNA, 19 nt, Artificial Sequence
  Description of Artificial Sequence: Synthetic oligonucleotide
cacgaaagccuuuucauca

SEQ ID NO: 1347757 - RNA, 19 nt, Artificial Sequence
  Description of Artificial Sequence: Synthetic oligonucleotide
ucggggcacgauuuggugg

SEQ ID NO: 1347758 - RNA, 19 nt, Artificial Sequence
  Description of Artificial Sequence: Synthetic oligonucleotide
acacuacuuaaucuacuug

SEQ ID NO: 1347759 - RNA, 19 nt, Artificial Sequence
  Description of Artificial Sequence: Synthetic oligonucleotide
uaccacacuacuuaaucua

SEQ ID NO: 1347760 - RNA, 19 nt, Artificial Sequence
  Description of Artificial Sequence: Synthetic oligonucleotide
ucguaauucuccauucaau

SEQ ID NO: 1347761 - RNA, 19 nt, Artificial Sequence
  Description of Artificial Sequence: Synthetic oligonucleotide
aacuggcuaaaauacugua

SEQ ID NO: 1347762 - RNA, 19 nt, Artificial Sequence
  Description of Artificial Sequence: Synthetic oligonucleotide
auaucagagaauaagucuu

SEQ ID NO: 1347763 - RNA, 19 nt, Artificial Sequence
  Description of Artificial Sequence: Synthetic oligonucleotide
auaugaucugaauggcugu

SEQ ID NO: 1347764 - RNA, 19 nt, Artificial Sequence
  Description of Artificial Sequence: Synthetic oligonucleotide
caaggcgacugaaaacacg

SEQ ID NO: 1347765 - RNA, 19 nt, Artificial Sequence
  Description of Artificial Sequence: Synthetic oligonucleotide
agaauaagucuuugauuga

SEQ ID NO: 1347766 - RNA, 19 nt, Artificial Sequence
  Description of Artificial Sequence: Synthetic oligonucleotide
ucucuugacaguacuuaaa

SEQ ID NO: 1347767 - RNA, 19 nt, Artificial Sequence
  Description of Artificial Sequence: Synthetic oligonucleotide
cuauauucguaauucucca

SEQ ID NO: 1347768 - RNA, 19 nt, Artificial Sequence
  Description of Artificial Sequence: Synthetic oligonucleotide
cugaaguaagugucaacac

SEQ ID NO: 1347769 - RNA, 19 nt, Artificial Sequence
  Description of Artificial Sequence: Synthetic oligonucleotide
auauccauccagguuuggg

SEQ ID NO: 1347770 - RNA, 19 nt, Artificial Sequence
  Description of Artificial Sequence: Synthetic oligonucleotide
uucgagaucucuuucuguu

SEQ ID NO: 1347771 - RNA, 19 nt, Artificial Sequence
  Description of Artificial Sequence: Synthetic oligonucleotide
augguuuaacacuggaaaa

SEQ ID NO: 1347772 - RNA, 19 nt, Artificial Sequence
  Description of Artificial Sequence: Synthetic oligonucleotide
aguaagugucaacacacuu

SEQ ID NO: 1347773 - RNA, 19 nt, Artificial Sequence
  Description of Artificial Sequence: Synthetic oligonucleotide
guuuagguuaacaggcacc

SEQ ID NO: 1347774 - RNA, 19 nt, Artificial Sequence
  Description of Artificial Sequence: Synthetic oligonucleotide
ucuaaacccacagcuuugc

SEQ ID NO: 1347775 - RNA, 19 nt, Artificial Sequence
  Description of Artificial Sequence: Synthetic oligonucleotide
uguuacuucgagaucucuu

SEQ ID NO: 1347776 - RNA, 19 nt, Artificial Sequence
  Description of Artificial Sequence: Synthetic oligonucleotide
cuguuggucgcacucgggg

SEQ ID NO: 1347777 - RNA, 19 nt, Artificial Sequence
  Description of Artificial Sequence: Synthetic oligonucleotide
ucuugacaguacuuaaaau

SEQ ID NO: 1347778 - RNA, 19 nt, Artificial Sequence
  Description of Artificial Sequence: Synthetic oligonucleotide
cagaaugcgccugagaguc

SEQ ID NO: 1347779 - RNA, 19 nt, Artificial Sequence
  Description of Artificial Sequence: Synthetic oligonucleotide
uuauuacuguaguaauuua

SEQ ID NO: 1347780 - RNA, 19 nt, Artificial Sequence
  Description of Artificial Sequence: Synthetic oligonucleotide
agagagguuagcauagaug

SEQ ID NO: 1347781 - RNA, 19 nt, Artificial Sequence
  Description of Artificial Sequence: Synthetic oligonucleotide
ugagaguccagaacuguuu

SEQ ID NO: 1347782 - RNA, 19 nt, Artificial Sequence
  Description of Artificial Sequence: Synthetic oligonucleotide
uucacucuacuccuucagu

SEQ ID NO: 1347783 - RNA, 19 nt, Artificial Sequence
  Description of Artificial Sequence: Synthetic oligonucleotide
auucguaauucuccauuca

SEQ ID NO: 1347784 - RNA, 19 nt, Artificial Sequence
  Description of Artificial Sequence: Synthetic oligonucleotide
cugucuagaaaguuucuga

SEQ ID NO: 1347785 - RNA, 19 nt, Artificial Sequence
  Description of Artificial Sequence: Synthetic oligonucleotide
uauauucguaauucuccau

SEQ ID NO: 1347786 - RNA, 19 nt, Artificial Sequence
  Description of Artificial Sequence: Synthetic oligonucleotide
aauccuugguaaacaagga

SEQ ID NO: 1347787 - RNA, 19 nt, Artificial Sequence
  Description of Artificial Sequence: Synthetic oligonucleotide
uguuggucgcacucggggc

SEQ ID NO: 1347788 - RNA, 19 nt, Artificial Sequence
  Description of Artificial Sequence: Synthetic oligonucleotide
ucuguuggucgcacucggg

SEQ ID NO: 1347789 - RNA, 19 nt, Artificial Sequence
  Description of Artificial Sequence: Synthetic oligonucleotide
accacacuacuuaaucuac

SEQ ID NO: 1347790 - RNA, 19 nt, Artificial Sequence
  Description of Artificial Sequence: Synthetic oligonucleotide
aggucaauugaagacagaa

SEQ ID NO: 1347791 - RNA, 19 nt, Artificial Sequence
  Description of Artificial Sequence: Synthetic oligonucleotide
aauugcccuaguuuucaua

SEQ ID NO: 1347792 - RNA, 19 nt, Artificial Sequence
  Description of Artificial Sequence: Synthetic oligonucleotide
caucacuguuuacaaguag

SEQ ID NO: 1347793 - RNA, 19 nt, Artificial Sequence
  Description of Artificial Sequence: Synthetic oligonucleotide
aaucccagcaaagucuaaa

SEQ ID NO: 1347794 - RNA, 19 nt, Artificial Sequence
  Description of Artificial Sequence: Synthetic oligonucleotide
acagagcgauuccucacuc

SEQ ID NO: 1347795 - RNA, 19 nt, Artificial Sequence
  Description of Artificial Sequence: Synthetic oligonucleotide
uaucagagaauaagucuuu

SEQ ID NO: 1347796 - RNA, 19 nt, Artificial Sequence
  Description of Artificial Sequence: Synthetic oligonucleotide
aucaauggcccucauucau

SEQ ID NO: 1347797 - RNA, 19 nt, Artificial Sequence
  Description of Artificial Sequence: Synthetic oligonucleotide
cuguuaaugaugaaagccu

SEQ ID NO: 1347798 - RNA, 19 nt, Artificial Sequence
  Description of Artificial Sequence: Synthetic oligonucleotide
uaauuaccagaauuaugua

SEQ ID NO: 1347799 - RNA, 19 nt, Artificial Sequence
  Description of Artificial Sequence: Synthetic oligonucleotide
aagugucaacacacuuugc

SEQ ID NO: 1347800 - RNA, 19 nt, Artificial Sequence
  Description of Artificial Sequence: Synthetic oligonucleotide
uggcacccgacuaaguaac

SEQ ID NO: 1347801 - RNA, 19 nt, Artificial Sequence
  Description of Artificial Sequence: Synthetic oligonucleotide
uuuggucuagucuguacuu

SEQ ID NO: 1347802 - RNA, 19 nt, Artificial Sequence
  Description of Artificial Sequence: Synthetic oligonucleotide
caauggcccucauucauac

SEQ ID NO: 1347803 - RNA, 19 nt, Artificial Sequence
  Description of Artificial Sequence: Synthetic oligonucleotide
ucgucugauaugaucugaa

SEQ ID NO: 1347804 - RNA, 19 nt, Artificial Sequence
  Description of Artificial Sequence: Synthetic oligonucleotide
cccucauucauacagucag

SEQ ID NO: 1347805 - RNA, 19 nt, Artificial Sequence
  Description of Artificial Sequence: Synthetic oligonucleotide
gcgacugaaaacacgaaag

SEQ ID NO: 1347806 - RNA, 19 nt, Artificial Sequence
  Description of Artificial Sequence: Synthetic oligonucleotide
acaugcaacaggaaucugu

SEQ ID NO: 1347807 - RNA, 19 nt, Artificial Sequence
  Description of Artificial Sequence: Synthetic oligonucleotide
ugacaguacuuaaaauauu

SEQ ID NO: 1347808 - RNA, 19 nt, Artificial Sequence
  Description of Artificial Sequence: Synthetic oligonucleotide
guaauccugaaguaagugu

SEQ ID NO: 1347809 - RNA, 19 nt, Artificial Sequence
  Description of Artificial Sequence: Synthetic oligonucleotide
uucauauuucugccuucac

SEQ ID NO: 1347810 - RNA, 19 nt, Artificial Sequence
  Description of Artificial Sequence: Synthetic oligonucleotide
acccgacuaaguaacagag

SEQ ID NO: 1347811 - RNA, 19 nt, Artificial Sequence
  Description of Artificial Sequence: Synthetic oligonucleotide
caucucugaugcaagccug

SEQ ID NO: 1347812 - RNA, 19 nt, Artificial Sequence
  Description of Artificial Sequence: Synthetic oligonucleotide
aauauccauccagguuugg

SEQ ID NO: 1347813 - RNA, 19 nt, Artificial Sequence
  Description of Artificial Sequence: Synthetic oligonucleotide
auauguaaccacagggaca

SEQ ID NO: 1347814 - RNA, 19 nt, Artificial Sequence
  Description of Artificial Sequence: Synthetic oligonucleotide
ucaauggcccucauucaua

SEQ ID NO: 1347815 - RNA, 19 nt, Artificial Sequence
  Description of Artificial Sequence: Synthetic oligonucleotide
cuccuaacucucucugucc

SEQ ID NO: 1347816 - RNA, 19 nt, Artificial Sequence
  Description of Artificial Sequence: Synthetic oligonucleotide
acuacuuaaucuacuugcu

SEQ ID NO: 1347817 - RNA, 19 nt, Artificial Sequence
  Description of Artificial Sequence: Synthetic oligonucleotide
auuuaguaguuuucugcua

SEQ ID NO: 1347818 - RNA, 19 nt, Artificial Sequence
  Description of Artificial Sequence: Synthetic oligonucleotide
uugcaucucugaugcaagc

SEQ ID NO: 1347819 - RNA, 19 nt, Artificial Sequence
  Description of Artificial Sequence: Synthetic oligonucleotide
agguuaacaggcaccaucu

SEQ ID NO: 1347820 - RNA, 19 nt, Artificial Sequence
  Description of Artificial Sequence: Synthetic oligonucleotide
uucugcuaauaaauaugua

SEQ ID NO: 1347821 - RNA, 19 nt, Artificial Sequence
  Description of Artificial Sequence: Synthetic oligonucleotide
acacacuuugcagacaaau

SEQ ID NO: 1347822 - RNA, 19 nt, Artificial Sequence
  Description of Artificial Sequence: Synthetic oligonucleotide
cuugguaaacaaggaaauc

SEQ ID NO: 1347823 - RNA, 19 nt, Artificial Sequence
  Description of Artificial Sequence: Synthetic oligonucleotide
uacagucagaaugcgccug

SEQ ID NO: 1347824 - RNA, 19 nt, Artificial Sequence
  Description of Artificial Sequence: Synthetic oligonucleotide
aacuccuaccuuaaaucau

SEQ ID NO: 1347825 - RNA, 19 nt, Artificial Sequence
  Description of Artificial Sequence: Synthetic oligonucleotide
agacaaaacaucacuguuu

SEQ ID NO: 1347826 - RNA, 19 nt, Artificial Sequence
  Description of Artificial Sequence: Synthetic oligonucleotide
auguauaaaugaacauuca

SEQ ID NO: 1347827 - RNA, 19 nt, Artificial Sequence
  Description of Artificial Sequence: Synthetic oligonucleotide
cgaguugcagacaugcucc

SEQ ID NO: 1347828 - RNA, 19 nt, Artificial Sequence
  Description of Artificial Sequence: Synthetic oligonucleotide
aguagcuaagaaauauuuu

SEQ ID NO: 1347829 - RNA, 19 nt, Artificial Sequence
  Description of Artificial Sequence: Synthetic oligonucleotide
guaaauauccauccagguu

SEQ ID NO: 1347830 - RNA, 19 nt, Artificial Sequence
  Description of Artificial Sequence: Synthetic oligonucleotide
uccugaaguaagugucaac

SEQ ID NO: 1347831 - RNA, 19 nt, Artificial Sequence
  Description of Artificial Sequence: Synthetic oligonucleotide
guuagcauagaugucaauu

SEQ ID NO: 1347832 - RNA, 19 nt, Artificial Sequence
  Description of Artificial Sequence: Synthetic oligonucleotide
aauggcccucauucauaca

SEQ ID NO: 1347833 - RNA, 19 nt, Artificial Sequence
  Description of Artificial Sequence: Synthetic oligonucleotide
aguguggcacccgacuaag

SEQ ID NO: 1347834 - RNA, 19 nt, Artificial Sequence
  Description of Artificial Sequence: Synthetic oligonucleotide
uggcucgaguugcagacau

SEQ ID NO: 1347835 - RNA, 19 nt, Artificial Sequence
  Description of Artificial Sequence: Synthetic oligonucleotide
agagguuagcauagauguc

SEQ ID NO: 1347836 - RNA, 19 nt, Artificial Sequence
  Description of Artificial Sequence: Synthetic oligonucleotide
gaaaucccagcaaagucua

SEQ ID NO: 1347837 - RNA, 19 nt, Artificial Sequence
  Description of Artificial Sequence: Synthetic oligonucleotide
agaucucuuucuguuuucu

SEQ ID NO: 1347838 - RNA, 19 nt, Artificial Sequence
  Description of Artificial Sequence: Synthetic oligonucleotide
gccugaaauauauauauau

SEQ ID NO: 1347839 - RNA, 19 nt, Artificial Sequence
  Description of Artificial Sequence: Synthetic oligonucleotide
agucagaaugcgccugaga

SEQ ID NO: 1347840 - RNA, 19 nt, Artificial Sequence
  Description of Artificial Sequence: Synthetic oligonucleotide
cagagaauaagucuuugau

SEQ ID NO: 1347841 - RNA, 19 nt, Artificial Sequence
  Description of Artificial Sequence: Synthetic oligonucleotide
ccuaccuuaaaucauuaaa

SEQ ID NO: 1347842 - RNA, 19 nt, Artificial Sequence
  Description of Artificial Sequence: Synthetic oligonucleotide
acauuuaguuauaucccaa

SEQ ID NO: 1347843 - RNA, 19 nt, Artificial Sequence
  Description of Artificial Sequence: Synthetic oligonucleotide
gacaaauaucagagaauaa

SEQ ID NO: 1347844 - RNA, 19 nt, Artificial Sequence
  Description of Artificial Sequence: Synthetic oligonucleotide
cagagcgauuccucacucc

SEQ ID NO: 1347845 - RNA, 19 nt, Artificial Sequence
  Description of Artificial Sequence: Synthetic oligonucleotide
gcucgaguugcagacaugc

SEQ ID NO: 1347846 - RNA, 19 nt, Artificial Sequence
  Description of Artificial Sequence: Synthetic oligonucleotide
ccugaaguaagugucaaca

SEQ ID NO: 1347847 - RNA, 19 nt, Artificial Sequence
  Description of Artificial Sequence: Synthetic oligonucleotide
guuggucgcacucggggca

SEQ ID NO: 1347848 - RNA, 19 nt, Artificial Sequence
  Description of Artificial Sequence: Synthetic oligonucleotide
auguaauccugaaguaagu

SEQ ID NO: 1347849 - RNA, 19 nt, Artificial Sequence
  Description of Artificial Sequence: Synthetic oligonucleotide
aacaaucaauggcccucau

SEQ ID NO: 1347850 - RNA, 19 nt, Artificial Sequence
  Description of Artificial Sequence: Synthetic oligonucleotide
ccgacuaaguaacagagaa

SEQ ID NO: 1347851 - RNA, 19 nt, Artificial Sequence
  Description of Artificial Sequence: Synthetic oligonucleotide
gaaugcgccugagagucca

SEQ ID NO: 1347852 - RNA, 19 nt, Artificial Sequence
  Description of Artificial Sequence: Synthetic oligonucleotide
ugcgccugagaguccagaa

SEQ ID NO: 1347853 - RNA, 19 nt, Artificial Sequence
  Description of Artificial Sequence: Synthetic oligonucleotide
aagcuauaccacacuacuu

SEQ ID NO: 1347854 - RNA, 19 nt, Artificial Sequence
  Description of Artificial Sequence: Synthetic oligonucleotide
ucagagagguuagcauaga

SEQ ID NO: 1347855 - RNA, 19 nt, Artificial Sequence
  Description of Artificial Sequence: Synthetic oligonucleotide
cacccgacuaaguaacaga

SEQ ID NO: 1347856 - RNA, 19 nt, Artificial Sequence
  Description of Artificial Sequence: Synthetic oligonucleotide
acuccuaccuuaaaucauu

SEQ ID NO: 1347857 - RNA, 19 nt, Artificial Sequence
  Description of Artificial Sequence: Synthetic oligonucleotide
uaauugcccuaguuuucau

SEQ ID NO: 1347858 - RNA, 19 nt, Artificial Sequence
  Description of Artificial Sequence: Synthetic oligonucleotide
cucccaaaguguggcaccc

SEQ ID NO: 1347859 - RNA, 19 nt, Artificial Sequence
  Description of Artificial Sequence: Synthetic oligonucleotide
guggaagcagcgcgguagc

SEQ ID NO: 1347860 - RNA, 19 nt, Artificial Sequence
  Description of Artificial Sequence: Synthetic oligonucleotide
gaaaacacgaaagccuuuu

SEQ ID NO: 1347861 - RNA, 19 nt, Artificial Sequence
  Description of Artificial Sequence: Synthetic oligonucleotide
cugauguaauccugaagua

SEQ ID NO: 1347862 - RNA, 19 nt, Artificial Sequence
  Description of Artificial Sequence: Synthetic oligonucleotide
cucggggcacgauuuggug

SEQ ID NO: 1347863 - RNA, 19 nt, Artificial Sequence
  Description of Artificial Sequence: Synthetic oligonucleotide
augcaagccugaaaacucu

SEQ ID NO: 1347864 - RNA, 19 nt, Artificial Sequence
  Description of Artificial Sequence: Synthetic oligonucleotide
uucugccuucacucuacuc

SEQ ID NO: 1347865 - RNA, 19 nt, Artificial Sequence
  Description of Artificial Sequence: Synthetic oligonucleotide
ccugaaauauauauauaua

SEQ ID NO: 1347866 - RNA, 19 nt, Artificial Sequence
  Description of Artificial Sequence: Synthetic oligonucleotide
agaaugcgccugagagucc

SEQ ID NO: 1347867 - RNA, 19 nt, Artificial Sequence
  Description of Artificial Sequence: Synthetic oligonucleotide
aaggucaauugaagacaga

SEQ ID NO: 1347868 - RNA, 19 nt, Artificial Sequence
  Description of Artificial Sequence: Synthetic oligonucleotide
ggcgacugaaaacacgaaa

SEQ ID NO: 1347869 - RNA, 19 nt, Artificial Sequence
  Description of Artificial Sequence: Synthetic oligonucleotide
ucccaaaguguggcacccg

SEQ ID NO: 1347870 - RNA, 19 nt, Artificial Sequence
  Description of Artificial Sequence: Synthetic oligonucleotide
agcagcgcgguagcuccgc

SEQ ID NO: 1347871 - RNA, 19 nt, Artificial Sequence
  Description of Artificial Sequence: Synthetic oligonucleotide
uggcuguuacuucgagauc

SEQ ID NO: 1347872 - RNA, 19 nt, Artificial Sequence
  Description of Artificial Sequence: Synthetic oligonucleotide
auuccucacuccagccgcg

SEQ ID NO: 1347873 - RNA, 19 nt, Artificial Sequence
  Description of Artificial Sequence: Synthetic oligonucleotide
ucucugaugcaagccugaa

SEQ ID NO: 1347874 - RNA, 19 nt, Artificial Sequence
  Description of Artificial Sequence: Synthetic oligonucleotide
gcuauaccacacuacuuaa

SEQ ID NO: 1347875 - RNA, 19 nt, Artificial Sequence
  Description of Artificial Sequence: Synthetic oligonucleotide
ggcuguuacuucgagaucu

SEQ ID NO: 1347876 - RNA, 19 nt, Artificial Sequence
  Description of Artificial Sequence: Synthetic oligonucleotide
aucuuguguuuagguuaac

SEQ ID NO: 1347877 - RNA, 19 nt, Artificial Sequence
  Description of Artificial Sequence: Synthetic oligonucleotide
gagaguccagaacuguuuu

SEQ ID NO: 1347878 - RNA, 19 nt, Artificial Sequence
  Description of Artificial Sequence: Synthetic oligonucleotide
uuagguuaacaggcaccau

SEQ ID NO: 1347879 - RNA, 19 nt, Artificial Sequence
  Description of Artificial Sequence: Synthetic oligonucleotide
ucgcacucggggcacgauu

SEQ ID NO: 1347880 - RNA, 19 nt, Artificial Sequence
  Description of Artificial Sequence: Synthetic oligonucleotide
cuccgcugcuccacagagc

SEQ ID NO: 1347881 - RNA, 19 nt, Artificial Sequence
  Description of Artificial Sequence: Synthetic oligonucleotide
acaucacuguuuacaagua

SEQ ID NO: 1347882 - RNA, 19 nt, Artificial Sequence
  Description of Artificial Sequence: Synthetic oligonucleotide
aaugcgccugagaguccag

SEQ ID NO: 1347883 - RNA, 19 nt, Artificial Sequence
  Description of Artificial Sequence: Synthetic oligonucleotide
cucgucugauaugaucuga

SEQ ID NO: 1347884 - RNA, 19 nt, Artificial Sequence
  Description of Artificial Sequence: Synthetic oligonucleotide
uugcccuaguuuucauauu

SEQ ID NO: 1347885 - RNA, 19 nt, Artificial Sequence
  Description of Artificial Sequence: Synthetic oligonucleotide
gcgauuccucacuccagcc

SEQ ID NO: 1347886 - RNA, 19 nt, Artificial Sequence
  Description of Artificial Sequence: Synthetic oligonucleotide
cgauuccucacuccagccg

SEQ ID NO: 1347887 - RNA, 19 nt, Artificial Sequence
  Description of Artificial Sequence: Synthetic oligonucleotide
ggcccucauucauacaguc

SEQ ID NO: 1347888 - RNA, 19 nt, Artificial Sequence
  Description of Artificial Sequence: Synthetic oligonucleotide
aaaucccagcaaagucuaa

SEQ ID NO: 1347889 - RNA, 19 nt, Artificial Sequence
  Description of Artificial Sequence: Synthetic oligonucleotide
aacacacuuugcagacaaa

SEQ ID NO: 1347890 - RNA, 19 nt, Artificial Sequence
  Description of Artificial Sequence: Synthetic oligonucleotide
cuucgagaucucuuucugu

SEQ ID NO: 1347891 - RNA, 19 nt, Artificial Sequence
  Description of Artificial Sequence: Synthetic oligonucleotide
gcacccgacuaaguaacag

SEQ ID NO: 1347892 - RNA, 19 nt, Artificial Sequence
  Description of Artificial Sequence: Synthetic oligonucleotide
acucggggcacgauuuggu

SEQ ID NO: 1347893 - RNA, 19 nt, Artificial Sequence
  Description of Artificial Sequence: Synthetic oligonucleotide
aagcagcgcgguagcuccg

SEQ ID NO: 1347894 - RNA, 19 nt, Artificial Sequence
  Description of Artificial Sequence: Synthetic oligonucleotide
cuauaccacacuacuuaau

SEQ ID NO: 1347895 - RNA, 19 nt, Artificial Sequence
  Description of Artificial Sequence: Synthetic oligonucleotide
cucugaugcaagccugaaa

SEQ ID NO: 1347896 - RNA, 19 nt, Artificial Sequence
  Description of Artificial Sequence: Synthetic oligonucleotide
cuccuaccuuaaaucauua

SEQ ID NO: 1347897 - RNA, 19 nt, Artificial Sequence
  Description of Artificial Sequence: Synthetic oligonucleotide
uuggucgcacucggggcac

SEQ ID NO: 1347898 - RNA, 19 nt, Artificial Sequence
  Description of Artificial Sequence: Synthetic oligonucleotide
ccaaggcgacugaaaacac

SEQ ID NO: 1347899 - RNA, 19 nt, Artificial Sequence
  Description of Artificial Sequence: Synthetic oligonucleotide
cacgauuugguggccaucu

SEQ ID NO: 1347900 - RNA, 19 nt, Artificial Sequence
  Description of Artificial Sequence: Synthetic oligonucleotide
uuccucacuccagccgcga

SEQ ID NO: 1347901 - RNA, 19 nt, Artificial Sequence
  Description of Artificial Sequence: Synthetic oligonucleotide
cacuguuuacaaguagcua

SEQ ID NO: 1347902 - RNA, 19 nt, Artificial Sequence
  Description of Artificial Sequence: Synthetic oligonucleotide
ccaaaguguggcacccgac

SEQ ID NO: 1347903 - RNA, 19 nt, Artificial Sequence
  Description of Artificial Sequence: Synthetic oligonucleotide
gcaacaggaaucuguuggu

SEQ ID NO: 1347904 - RNA, 19 nt, Artificial Sequence
  Description of Artificial Sequence: Synthetic oligonucleotide
ggaagcagcgcgguagcuc

SEQ ID NO: 1347905 - RNA, 19 nt, Artificial Sequence
  Description of Artificial Sequence: Synthetic oligonucleotide
acgauuugguggccaucuu

SEQ ID NO: 1347906 - RNA, 19 nt, Artificial Sequence
  Description of Artificial Sequence: Synthetic oligonucleotide
uggccucgugcuuguuuuc

SEQ ID NO: 1347907 - RNA, 19 nt, Artificial Sequence
  Description of Artificial Sequence: Synthetic oligonucleotide
cagcgcgguagcuccgcug

SEQ ID NO: 1347908 - RNA, 19 nt, Artificial Sequence
  Description of Artificial Sequence: Synthetic oligonucleotide
gcgccugagaguccagaac

SEQ ID NO: 1347909 - RNA, 19 nt, Artificial Sequence
  Description of Artificial Sequence: Synthetic oligonucleotide
cagagagguuagcauagau

SEQ ID NO: 1347910 - RNA, 19 nt, Artificial Sequence
  Description of Artificial Sequence: Synthetic oligonucleotide
gccucgugcuuguuuucug

SEQ ID NO: 1347911 - RNA, 19 nt, Artificial Sequence
  Description of Artificial Sequence: Synthetic oligonucleotide
augcgccugagaguccaga

SEQ ID NO: 1347912 - RNA, 19 nt, Artificial Sequence
  Description of Artificial Sequence: Synthetic oligonucleotide
cuaaacccacagcuuugcu

SEQ ID NO: 1347913 - RNA, 19 nt, Artificial Sequence
  Description of Artificial Sequence: Synthetic oligonucleotide
caggaaucuguuggucgca

SEQ ID NO: 1347914 - RNA, 19 nt, Artificial Sequence
  Description of Artificial Sequence: Synthetic oligonucleotide
cccuaguuuucauauuucu

SEQ ID NO: 1347915 - RNA, 19 nt, Artificial Sequence
  Description of Artificial Sequence: Synthetic oligonucleotide
cucgaguugcagacaugcu

SEQ ID NO: 1347916 - RNA, 19 nt, Artificial Sequence
  Description of Artificial Sequence: Synthetic oligonucleotide
gcccuaguuuucauauuuc

SEQ ID NO: 1347917 - RNA, 19 nt, Artificial Sequence
  Description of Artificial Sequence: Synthetic oligonucleotide
cccgacuaaguaacagaga

SEQ ID NO: 1347918 - RNA, 19 nt, Artificial Sequence
  Description of Artificial Sequence: Synthetic oligonucleotide
gcuguuacuucgagaucuc

SEQ ID NO: 1347919 - RNA, 19 nt, Artificial Sequence
  Description of Artificial Sequence: Synthetic oligonucleotide
aggcgacugaaaacacgaa

SEQ ID NO: 1347920 - RNA, 19 nt, Artificial Sequence
  Description of Artificial Sequence: Synthetic oligonucleotide
auguaaccacagggacaug

SEQ ID NO: 1347921 - RNA, 19 nt, Artificial Sequence
  Description of Artificial Sequence: Synthetic oligonucleotide
cuguuacuucgagaucucu

SEQ ID NO: 1347922 - RNA, 19 nt, Artificial Sequence
  Description of Artificial Sequence: Synthetic oligonucleotide
cgacuaaguaacagagaaa

SEQ ID NO: 1347923 - RNA, 19 nt, Artificial Sequence
  Description of Artificial Sequence: Synthetic oligonucleotide
ggcacgauuugguggccau

SEQ ID NO: 1347924 - RNA, 19 nt, Artificial Sequence
  Description of Artificial Sequence: Synthetic oligonucleotide
ggcacccgacuaaguaaca

SEQ ID NO: 1347925 - RNA, 19 nt, Artificial Sequence
  Description of Artificial Sequence: Synthetic oligonucleotide
gcacgauuugguggccauc

SEQ ID NO: 1347926 - RNA, 19 nt, Artificial Sequence
  Description of Artificial Sequence: Synthetic oligonucleotide
ccucgugcuuguuuucugu

SEQ ID NO: 1347927 - RNA, 19 nt, Artificial Sequence
  Description of Artificial Sequence: Synthetic oligonucleotide
gggcacgauuugguggcca

SEQ ID NO: 1347928 - RNA, 19 nt, Artificial Sequence
  Description of Artificial Sequence: Synthetic oligonucleotide
ggggcacgauuugguggcc

SEQ ID NO: 1347929 - RNA, 19 nt, Artificial Sequence
  Description of Artificial Sequence: Synthetic oligonucleotide
cgagaucucuuucuguuuu

SEQ ID NO: 1347930 - RNA, 19 nt, Artificial Sequence
  Description of Artificial Sequence: Synthetic oligonucleotide
ggccucgugcuuguuuucu

SEQ ID NO: 1347931 - RNA, 19 nt, Artificial Sequence
  Description of Artificial Sequence: Synthetic oligonucleotide
guguggcacccgacuaagu

SEQ ID NO: 1347932 - RNA, 19 nt, Artificial Sequence
  Description of Artificial Sequence: Synthetic oligonucleotide
gucgcacucggggcacgau

SEQ ID NO: 1347933 - RNA, 19 nt, Artificial Sequence
  Description of Artificial Sequence: Synthetic oligonucleotide
gcagcgcgguagcuccgcu

SEQ ID NO: 1347934 - RNA, 19 nt, Artificial Sequence
  Description of Artificial Sequence: Synthetic oligonucleotide
gcgcgguagcuccgcugcu

SEQ ID NO: 1347935 - RNA, 19 nt, Artificial Sequence
  Description of Artificial Sequence: Synthetic oligonucleotide
uauaagguagagaugagcg

SEQ ID NO: 1347936 - RNA, 19 nt, Artificial Sequence
  Description of Artificial Sequence: Synthetic oligonucleotide
aauuauaagguagagauga

SEQ ID NO: 1347937 - RNA, 19 nt, Artificial Sequence
  Description of Artificial Sequence: Synthetic oligonucleotide
aaucucaugagguguaugg

SEQ ID NO: 1347938 - RNA, 19 nt, Artificial Sequence
  Description of Artificial Sequence: Synthetic oligonucleotide
uucuaauugacuaugcagc

SEQ ID NO: 1347939 - RNA, 19 nt, Artificial Sequence
  Description of Artificial Sequence: Synthetic oligonucleotide
agugaucacgcccaaaucc

SEQ ID NO: 1347940 - RNA, 19 nt, Artificial Sequence
  Description of Artificial Sequence: Synthetic oligonucleotide
aauaagaguccaucauucc

SEQ ID NO: 1347941 - RNA, 19 nt, Artificial Sequence
  Description of Artificial Sequence: Synthetic oligonucleotide
aguauauccaucaggaucc

SEQ ID NO: 1347942 - RNA, 19 nt, Artificial Sequence
  Description of Artificial Sequence: Synthetic oligonucleotide
uguuguguaaaccaaccag

SEQ ID NO: 1347943 - RNA, 19 nt, Artificial Sequence
  Description of Artificial Sequence: Synthetic oligonucleotide
agaaggugugaguauaucc

SEQ ID NO: 1347944 - RNA, 19 nt, Artificial Sequence
  Description of Artificial Sequence: Synthetic oligonucleotide
ugugaguauauccaucagg

SEQ ID NO: 1347945 - RNA, 19 nt, Artificial Sequence
  Description of Artificial Sequence: Synthetic oligonucleotide
auucuaauugacuaugcag

SEQ ID NO: 1347946 - RNA, 19 nt, Artificial Sequence
  Description of Artificial Sequence: Synthetic oligonucleotide
cauaauguacuucaggcug

SEQ ID NO: 1347947 - RNA, 19 nt, Artificial Sequence
  Description of Artificial Sequence: Synthetic oligonucleotide
auuaccuccuacugugucc

SEQ ID NO: 1347948 - RNA, 19 nt, Artificial Sequence
  Description of Artificial Sequence: Synthetic oligonucleotide
gagauaagcaguuucccgc

SEQ ID NO: 1347949 - RNA, 19 nt, Artificial Sequence
  Description of Artificial Sequence: Synthetic oligonucleotide
aauuaccuccuacuguguc

SEQ ID NO: 1347950 - RNA, 19 nt, Artificial Sequence
  Description of Artificial Sequence: Synthetic oligonucleotide
guaaugaccaaagucagcc

SEQ ID NO: 1347951 - RNA, 19 nt, Artificial Sequence
  Description of Artificial Sequence: Synthetic oligonucleotide
aggucuaccaucuaaacau

SEQ ID NO: 1347952 - RNA, 19 nt, Artificial Sequence
  Description of Artificial Sequence: Synthetic oligonucleotide
gaguauauccaucaggauc

SEQ ID NO: 1347953 - RNA, 19 nt, Artificial Sequence
  Description of Artificial Sequence: Synthetic oligonucleotide
acaguaaugaccaaaguca

SEQ ID NO: 1347954 - RNA, 19 nt, Artificial Sequence
  Description of Artificial Sequence: Synthetic oligonucleotide
ugaaaagggacacuccucu

SEQ ID NO: 1347955 - RNA, 19 nt, Artificial Sequence
  Description of Artificial Sequence: Synthetic oligonucleotide
acaugggagucguugaagc

SEQ ID NO: 1347956 - RNA, 19 nt, Artificial Sequence
  Description of Artificial Sequence: Synthetic oligonucleotide
ucuuuaaggucuaccaucu

SEQ ID NO: 1347957 - RNA, 19 nt, Artificial Sequence
  Description of Artificial Sequence: Synthetic oligonucleotide
gaagaaacagcgcagggca

SEQ ID NO: 1347958 - RNA, 19 nt, Artificial Sequence
  Description of Artificial Sequence: Synthetic oligonucleotide
ucuaccaucuaaacauugc

SEQ ID NO: 1347959 - RNA, 19 nt, Artificial Sequence
  Description of Artificial Sequence: Synthetic oligonucleotide
uugacuaugcagcaaacau

SEQ ID NO: 1347960 - RNA, 19 nt, Artificial Sequence
  Description of Artificial Sequence: Synthetic oligonucleotide
guuguguaaaccaaccagg

SEQ ID NO: 1347961 - RNA, 19 nt, Artificial Sequence
  Description of Artificial Sequence: Synthetic oligonucleotide
ucuaauugacuaugcagca

SEQ ID NO: 1347962 - RNA, 19 nt, Artificial Sequence
  Description of Artificial Sequence: Synthetic oligonucleotide
aaggucuaccaucuaaaca

SEQ ID NO: 1347963 - RNA, 19 nt, Artificial Sequence
  Description of Artificial Sequence: Synthetic oligonucleotide
cugugauuuccauaggugc

SEQ ID NO: 1347964 - RNA, 19 nt, Artificial Sequence
  Description of Artificial Sequence: Synthetic oligonucleotide
uaauucuaauugacuaugc

SEQ ID NO: 1347965 - RNA, 19 nt, Artificial Sequence
  Description of Artificial Sequence: Synthetic oligonucleotide
auaggugcacuggacaucc

SEQ ID NO: 1347966 - RNA, 19 nt, Artificial Sequence
  Description of Artificial Sequence: Synthetic oligonucleotide
uuaaggucuaccaucuaaa

SEQ ID NO: 1347967 - RNA, 19 nt, Artificial Sequence
  Description of Artificial Sequence: Synthetic oligonucleotide
uuccaaauuauaagguaga

SEQ ID NO: 1347968 - RNA, 19 nt, Artificial Sequence
  Description of Artificial Sequence: Synthetic oligonucleotide
gaucccauggaccaauuac

SEQ ID NO: 1347969 - RNA, 19 nt, Artificial Sequence
  Description of Artificial Sequence: Synthetic oligonucleotide
auuagugcgcagaagagag

SEQ ID NO: 1347970 - RNA, 19 nt, Artificial Sequence
  Description of Artificial Sequence: Synthetic oligonucleotide
cacaguaaugaccaaaguc

SEQ ID NO: 1347971 - RNA, 19 nt, Artificial Sequence
  Description of Artificial Sequence: Synthetic oligonucleotide
ugacugaaauccaagcacu

SEQ ID NO: 1347972 - RNA, 19 nt, Artificial Sequence
  Description of Artificial Sequence: Synthetic oligonucleotide
caucuaaacauugccaugc

SEQ ID NO: 1347973 - RNA, 19 nt, Artificial Sequence
  Description of Artificial Sequence: Synthetic oligonucleotide
ucagccacgucuaacuggc

SEQ ID NO: 1347974 - RNA, 19 nt, Artificial Sequence
  Description of Artificial Sequence: Synthetic oligonucleotide
acguuguacuucuggaggc

SEQ ID NO: 1347975 - RNA, 19 nt, Artificial Sequence
  Description of Artificial Sequence: Synthetic oligonucleotide
ugcagcacaguccaaacaa

SEQ ID NO: 1347976 - RNA, 19 nt, Artificial Sequence
  Description of Artificial Sequence: Synthetic oligonucleotide
agcacugagggaaauacac

SEQ ID NO: 1347977 - RNA, 19 nt, Artificial Sequence
  Description of Artificial Sequence: Synthetic oligonucleotide
agggaaauacacugagugg

SEQ ID NO: 1347978 - RNA, 19 nt, Artificial Sequence
  Description of Artificial Sequence: Synthetic oligonucleotide
uuauaagguagagaugagc

SEQ ID NO: 1347979 - RNA, 19 nt, Artificial Sequence
  Description of Artificial Sequence: Synthetic oligonucleotide
cugaaauccaagcacugag

SEQ ID NO: 1347980 - RNA, 19 nt, Artificial Sequence
  Description of Artificial Sequence: Synthetic oligonucleotide
uagugcgcagaagagagcg

SEQ ID NO: 1347981 - RNA, 19 nt, Artificial Sequence
  Description of Artificial Sequence: Synthetic oligonucleotide
augcuggacauacaaggac

SEQ ID NO: 1347982 - RNA, 19 nt, Artificial Sequence
  Description of Artificial Sequence: Synthetic oligonucleotide
aaaccuguuuccugggugu

SEQ ID NO: 1347983 - RNA, 19 nt, Artificial Sequence
  Description of Artificial Sequence: Synthetic oligonucleotide
aaaucagggacuccuucgu

SEQ ID NO: 1347984 - RNA, 19 nt, Artificial Sequence
  Description of Artificial Sequence: Synthetic oligonucleotide
aauuaaggcaacaggucug

SEQ ID NO: 1347985 - RNA, 19 nt, Artificial Sequence
  Description of Artificial Sequence: Synthetic oligonucleotide
ugcccauuagugaucacgc

SEQ ID NO: 1347986 - RNA, 19 nt, Artificial Sequence
  Description of Artificial Sequence: Synthetic oligonucleotide
uggaagaaacagcgcaggg

SEQ ID NO: 1347987 - RNA, 19 nt, Artificial Sequence
  Description of Artificial Sequence: Synthetic oligonucleotide
aacauagguaugggaaagg

SEQ ID NO: 1347988 - RNA, 19 nt, Artificial Sequence
  Description of Artificial Sequence: Synthetic oligonucleotide
aaauuauaagguagagaug

SEQ ID NO: 1347989 - RNA, 19 nt, Artificial Sequence
  Description of Artificial Sequence: Synthetic oligonucleotide
aucccauggaccaauuacc

SEQ ID NO: 1347990 - RNA, 19 nt, Artificial Sequence
  Description of Artificial Sequence: Synthetic oligonucleotide
aauugacuaugcagcaaac

SEQ ID NO: 1347991 - RNA, 19 nt, Artificial Sequence
  Description of Artificial Sequence: Synthetic oligonucleotide
aaucagggacuccuucguc

SEQ ID NO: 1347992 - RNA, 19 nt, Artificial Sequence
  Description of Artificial Sequence: Synthetic oligonucleotide
auagguaugggaaaggaaa

SEQ ID NO: 1347993 - RNA, 19 nt, Artificial Sequence
  Description of Artificial Sequence: Synthetic oligonucleotide
uccaaauuauaagguagag

SEQ ID NO: 1347994 - RNA, 19 nt, Artificial Sequence
  Description of Artificial Sequence: Synthetic oligonucleotide
ugcuaaggaccacacgucc

SEQ ID NO: 1347995 - RNA, 19 nt, Artificial Sequence
  Description of Artificial Sequence: Synthetic oligonucleotide
agcaacugaaaagggacac

SEQ ID NO: 1347996 - RNA, 19 nt, Artificial Sequence
  Description of Artificial Sequence: Synthetic oligonucleotide
agagcgaucccauggacca

SEQ ID NO: 1347997 - RNA, 19 nt, Artificial Sequence
  Description of Artificial Sequence: Synthetic oligonucleotide
cuauuagugcgcagaagag

SEQ ID NO: 1347998 - RNA, 19 nt, Artificial Sequence
  Description of Artificial Sequence: Synthetic oligonucleotide
agaacuauuagugcgcaga

SEQ ID NO: 1347999 - RNA, 19 nt, Artificial Sequence
  Description of Artificial Sequence: Synthetic oligonucleotide
uuucccgccagcgauaucu

SEQ ID NO: 1348000 - RNA, 19 nt, Artificial Sequence
  Description of Artificial Sequence: Synthetic oligonucleotide
caguaaugaccaaagucag

SEQ ID NO: 1348001 - RNA, 19 nt, Artificial Sequence
  Description of Artificial Sequence: Synthetic oligonucleotide
uuaggagacaagccauagc

SEQ ID NO: 1348002 - RNA, 19 nt, Artificial Sequence
  Description of Artificial Sequence: Synthetic oligonucleotide
cauugccaugcuaaggacc

SEQ ID NO: 1348003 - RNA, 19 nt, Artificial Sequence
  Description of Artificial Sequence: Synthetic oligonucleotide
ugaucacgcccaaaucccg

SEQ ID NO: 1348004 - RNA, 19 nt, Artificial Sequence
  Description of Artificial Sequence: Synthetic oligonucleotide
gucuuuaaggucuaccauc

SEQ ID NO: 1348005 - RNA, 19 nt, Artificial Sequence
  Description of Artificial Sequence: Synthetic oligonucleotide
accguuauccucuucagua

SEQ ID NO: 1348006 - RNA, 19 nt, Artificial Sequence
  Description of Artificial Sequence: Synthetic oligonucleotide
cacaggauuccgaauguag

SEQ ID NO: 1348007 - RNA, 19 nt, Artificial Sequence
  Description of Artificial Sequence: Synthetic oligonucleotide
gagaugagcggcgucaugc

SEQ ID NO: 1348008 - RNA, 19 nt, Artificial Sequence
  Description of Artificial Sequence: Synthetic oligonucleotide
ugguccuuagucagguucc

SEQ ID NO: 1348009 - RNA, 19 nt, Artificial Sequence
  Description of Artificial Sequence: Synthetic oligonucleotide
aguaaugaccaaagucagc

SEQ ID NO: 1348010 - RNA, 19 nt, Artificial Sequence
  Description of Artificial Sequence: Synthetic oligonucleotide
guauggucaggguuugggg

SEQ ID NO: 1348011 - RNA, 19 nt, Artificial Sequence
  Description of Artificial Sequence: Synthetic oligonucleotide
gaccaauuaccuccuacug

SEQ ID NO: 1348012 - RNA, 19 nt, Artificial Sequence
  Description of Artificial Sequence: Synthetic oligonucleotide
gaguccaucauucccagaa

SEQ ID NO: 1348013 - RNA, 19 nt, Artificial Sequence
  Description of Artificial Sequence: Synthetic oligonucleotide
ugugucuuuaaggucuacc

SEQ ID NO: 1348014 - RNA, 19 nt, Artificial Sequence
  Description of Artificial Sequence: Synthetic oligonucleotide
uugcaucacagugugguag

SEQ ID NO: 1348015 - RNA, 19 nt, Artificial Sequence
  Description of Artificial Sequence: Synthetic oligonucleotide
aagaacuauuagugcgcag

SEQ ID NO: 1348016 - RNA, 19 nt, Artificial Sequence
  Description of Artificial Sequence: Synthetic oligonucleotide
accaauuaccuccuacugu

SEQ ID NO: 1348017 - RNA, 19 nt, Artificial Sequence
  Description of Artificial Sequence: Synthetic oligonucleotide
gguaucaccgaguucuucc

SEQ ID NO: 1348018 - RNA, 19 nt, Artificial Sequence
  Description of Artificial Sequence: Synthetic oligonucleotide
cauguaaaccaagagauaa

SEQ ID NO: 1348019 - RNA, 19 nt, Artificial Sequence
  Description of Artificial Sequence: Synthetic oligonucleotide
ucagugaucugguccuuag

SEQ ID NO: 1348020 - RNA, 19 nt, Artificial Sequence
  Description of Artificial Sequence: Synthetic oligonucleotide
ccauggaccaauuaccucc

SEQ ID NO: 1348021 - RNA, 19 nt, Artificial Sequence
  Description of Artificial Sequence: Synthetic oligonucleotide
aaggugugaguauauccau

SEQ ID NO: 1348022 - RNA, 19 nt, Artificial Sequence
  Description of Artificial Sequence: Synthetic oligonucleotide
uguaaaccaaccaggccau

SEQ ID NO: 1348023 - RNA, 19 nt, Artificial Sequence
  Description of Artificial Sequence: Synthetic oligonucleotide
uaaggucuaccaucuaaac

SEQ ID NO: 1348024 - RNA, 19 nt, Artificial Sequence
  Description of Artificial Sequence: Synthetic oligonucleotide
guguucucuagacagcccc

SEQ ID NO: 1348025 - RNA, 19 nt, Artificial Sequence
  Description of Artificial Sequence: Synthetic oligonucleotide
uagguaugggaaaggaaaa

SEQ ID NO: 1348026 - RNA, 19 nt, Artificial Sequence
  Description of Artificial Sequence: Synthetic oligonucleotide
agaguucauaauguacuuc

SEQ ID NO: 1348027 - RNA, 19 nt, Artificial Sequence
  Description of Artificial Sequence: Synthetic oligonucleotide
caaaucccgagucugggac

SEQ ID NO: 1348028 - RNA, 19 nt, Artificial Sequence
  Description of Artificial Sequence: Synthetic oligonucleotide
aagguagagaugagcggcg

SEQ ID NO: 1348029 - RNA, 19 nt, Artificial Sequence
  Description of Artificial Sequence: Synthetic oligonucleotide
auaagcaguuucccgccag

SEQ ID NO: 1348030 - RNA, 19 nt, Artificial Sequence
  Description of Artificial Sequence: Synthetic oligonucleotide
ucccauggaccaauuaccu

SEQ ID NO: 1348031 - RNA, 19 nt, Artificial Sequence
  Description of Artificial Sequence: Synthetic oligonucleotide
uccucaguugccagaaccu

SEQ ID NO: 1348032 - RNA, 19 nt, Artificial Sequence
  Description of Artificial Sequence: Synthetic oligonucleotide
uuuuaggagacaagccaua

SEQ ID NO: 1348033 - RNA, 19 nt, Artificial Sequence
  Description of Artificial Sequence: Synthetic oligonucleotide
aagcacuugucugggcucg

SEQ ID NO: 1348034 - RNA, 19 nt, Artificial Sequence
  Description of Artificial Sequence: Synthetic oligonucleotide
ccaauuaccuccuacugug

SEQ ID NO: 1348035 - RNA, 19 nt, Artificial Sequence
  Description of Artificial Sequence: Synthetic oligonucleotide
uccacgacuucacuuccug

SEQ ID NO: 1348036 - RNA, 19 nt, Artificial Sequence
  Description of Artificial Sequence: Synthetic oligonucleotide
caugcuaaggaccacacgu

SEQ ID NO: 1348037 - RNA, 19 nt, Artificial Sequence
  Description of Artificial Sequence: Synthetic oligonucleotide
cuaaggaccacacguccug

SEQ ID NO: 1348038 - RNA, 19 nt, Artificial Sequence
  Description of Artificial Sequence: Synthetic oligonucleotide
ucuaaacauugccaugcua

SEQ ID NO: 1348039 - RNA, 19 nt, Artificial Sequence
  Description of Artificial Sequence: Synthetic oligonucleotide
aaaucccgagucugggacu

SEQ ID NO: 1348040 - RNA, 19 nt, Artificial Sequence
  Description of Artificial Sequence: Synthetic oligonucleotide
auguuguguaaaccaacca

SEQ ID NO: 1348041 - RNA, 19 nt, Artificial Sequence
  Description of Artificial Sequence: Synthetic oligonucleotide
auugccaugcuaaggacca

SEQ ID NO: 1348042 - RNA, 19 nt, Artificial Sequence
  Description of Artificial Sequence: Synthetic oligonucleotide
ugggacugccugacuaagg

SEQ ID NO: 1348043 - RNA, 19 nt, Artificial Sequence
  Description of Artificial Sequence: Synthetic oligonucleotide
ucauguaaaccaagagaua

SEQ ID NO: 1348044 - RNA, 19 nt, Artificial Sequence
  Description of Artificial Sequence: Synthetic oligonucleotide
uguccgauguuguguaaac

SEQ ID NO: 1348045 - RNA, 19 nt, Artificial Sequence
  Description of Artificial Sequence: Synthetic oligonucleotide
agcacaguccaaacaaauc

SEQ ID NO: 1348046 - RNA, 19 nt, Artificial Sequence
  Description of Artificial Sequence: Synthetic oligonucleotide
uaaugaccaaagucagcca

SEQ ID NO: 1348047 - RNA, 19 nt, Artificial Sequence
  Description of Artificial Sequence: Synthetic oligonucleotide
agccacgucuaacuggcag

SEQ ID NO: 1348048 - RNA, 19 nt, Artificial Sequence
  Description of Artificial Sequence: Synthetic oligonucleotide
uauuuuccggaaguccuca

SEQ ID NO: 1348049 - RNA, 19 nt, Artificial Sequence
  Description of Artificial Sequence: Synthetic oligonucleotide
ucuaacuggcagguuuucc

SEQ ID NO: 1348050 - RNA, 19 nt, Artificial Sequence
  Description of Artificial Sequence: Synthetic oligonucleotide
guugccagaaccugacuga

SEQ ID NO: 1348051 - RNA, 19 nt, Artificial Sequence
  Description of Artificial Sequence: Synthetic oligonucleotide
agcggcgucaugcuggaca

SEQ ID NO: 1348052 - RNA, 19 nt, Artificial Sequence
  Description of Artificial Sequence: Synthetic oligonucleotide
uuagugcgcagaagagagc

SEQ ID NO: 1348053 - RNA, 19 nt, Artificial Sequence
  Description of Artificial Sequence: Synthetic oligonucleotide
caugagggcggucccaagc

SEQ ID NO: 1348054 - RNA, 19 nt, Artificial Sequence
  Description of Artificial Sequence: Synthetic oligonucleotide
ucuguccgugaguuccugg

SEQ ID NO: 1348055 - RNA, 19 nt, Artificial Sequence
  Description of Artificial Sequence: Synthetic oligonucleotide
gugaucacgcccaaauccc

SEQ ID NO: 1348056 - RNA, 19 nt, Artificial Sequence
  Description of Artificial Sequence: Synthetic oligonucleotide
auguaaaccaagagauaag

SEQ ID NO: 1348057 - RNA, 19 nt, Artificial Sequence
  Description of Artificial Sequence: Synthetic oligonucleotide
augagcggcgucaugcugg

SEQ ID NO: 1348058 - RNA, 19 nt, Artificial Sequence
  Description of Artificial Sequence: Synthetic oligonucleotide
gacugccugacuaaggcuc

SEQ ID NO: 1348059 - RNA, 19 nt, Artificial Sequence
  Description of Artificial Sequence: Synthetic oligonucleotide
acgucuaacuggcagguuu

SEQ ID NO: 1348060 - RNA, 19 nt, Artificial Sequence
  Description of Artificial Sequence: Synthetic oligonucleotide
auuaaggcaacaggucugu

SEQ ID NO: 1348061 - RNA, 19 nt, Artificial Sequence
  Description of Artificial Sequence: Synthetic oligonucleotide
accugaaucaaggaauuaa

SEQ ID NO: 1348062 - RNA, 19 nt, Artificial Sequence
  Description of Artificial Sequence: Synthetic oligonucleotide
uuaccuccuacuguguccu

SEQ ID NO: 1348063 - RNA, 19 nt, Artificial Sequence
  Description of Artificial Sequence: Synthetic oligonucleotide
auauccaucaggauccaau

SEQ ID NO: 1348064 - RNA, 19 nt, Artificial Sequence
  Description of Artificial Sequence: Synthetic oligonucleotide
uuccauaggugcacuggac

SEQ ID NO: 1348065 - RNA, 19 nt, Artificial Sequence
  Description of Artificial Sequence: Synthetic oligonucleotide
auuauaagguagagaugag

SEQ ID NO: 1348066 - RNA, 19 nt, Artificial Sequence
  Description of Artificial Sequence: Synthetic oligonucleotide
acauagguaugggaaagga

SEQ ID NO: 1348067 - RNA, 19 nt, Artificial Sequence
  Description of Artificial Sequence: Synthetic oligonucleotide
gaaacagcgcagggcaucc

SEQ ID NO: 1348068 - RNA, 19 nt, Artificial Sequence
  Description of Artificial Sequence: Synthetic oligonucleotide
ucguccagauugugaacag

SEQ ID NO: 1348069 - RNA, 19 nt, Artificial Sequence
  Description of Artificial Sequence: Synthetic oligonucleotide
accgaguucuuccucaguu

SEQ ID NO: 1348070 - RNA, 19 nt, Artificial Sequence
  Description of Artificial Sequence: Synthetic oligonucleotide
uccuugguaucaccgaguu

SEQ ID NO: 1348071 - RNA, 19 nt, Artificial Sequence
  Description of Artificial Sequence: Synthetic oligonucleotide
uagugaucacgcccaaauc

SEQ ID NO: 1348072 - RNA, 19 nt, Artificial Sequence
  Description of Artificial Sequence: Synthetic oligonucleotide
ucgggauuccacgacuuca

SEQ ID NO: 1348073 - RNA, 19 nt, Artificial Sequence
  Description of Artificial Sequence: Synthetic oligonucleotide
agaagagagcgaucccaug

SEQ ID NO: 1348074 - RNA, 19 nt, Artificial Sequence
  Description of Artificial Sequence: Synthetic oligonucleotide
aucacgcccaaaucccgag

SEQ ID NO: 1348075 - RNA, 19 nt, Artificial Sequence
  Description of Artificial Sequence: Synthetic oligonucleotide
guaagccagcuccaugggc

SEQ ID NO: 1348076 - RNA, 19 nt, Artificial Sequence
  Description of Artificial Sequence: Synthetic oligonucleotide
auaauguacuucaggcugu

SEQ ID NO: 1348077 - RNA, 19 nt, Artificial Sequence
  Description of Artificial Sequence: Synthetic oligonucleotide
gaugagcggcgucaugcug

SEQ ID NO: 1348078 - RNA, 19 nt, Artificial Sequence
  Description of Artificial Sequence: Synthetic oligonucleotide
auuccgaauguaggcacag

SEQ ID NO: 1348079 - RNA, 19 nt, Artificial Sequence
  Description of Artificial Sequence: Synthetic oligonucleotide
agaucuucucuguccguga

SEQ ID NO: 1348080 - RNA, 19 nt, Artificial Sequence
  Description of Artificial Sequence: Synthetic oligonucleotide
cacgacuucacuuccugga

SEQ ID NO: 1348081 - RNA, 19 nt, Artificial Sequence
  Description of Artificial Sequence: Synthetic oligonucleotide
gggacugccugacuaaggc

SEQ ID NO: 1348082 - RNA, 19 nt, Artificial Sequence
  Description of Artificial Sequence: Synthetic oligonucleotide
guagagaugagcggcguca

SEQ ID NO: 1348083 - RNA, 19 nt, Artificial Sequence
  Description of Artificial Sequence: Synthetic oligonucleotide
gaaucucaugagguguaug

SEQ ID NO: 1348084 - RNA, 19 nt, Artificial Sequence
  Description of Artificial Sequence: Synthetic oligonucleotide
aggauuccgaauguaggca

SEQ ID NO: 1348085 - RNA, 19 nt, Artificial Sequence
  Description of Artificial Sequence: Synthetic oligonucleotide
cuuuugcccauuagugauc

SEQ ID NO: 1348086 - RNA, 19 nt, Artificial Sequence
  Description of Artificial Sequence: Synthetic oligonucleotide
ucugggacugccugacuaa

SEQ ID NO: 1348087 - RNA, 19 nt, Artificial Sequence
  Description of Artificial Sequence: Synthetic oligonucleotide
augcuaaggaccacacguc

SEQ ID NO: 1348088 - RNA, 19 nt, Artificial Sequence
  Description of Artificial Sequence: Synthetic oligonucleotide
ucuucugguccccgaggca

SEQ ID NO: 1348089 - RNA, 19 nt, Artificial Sequence
  Description of Artificial Sequence: Synthetic oligonucleotide
ugacuaaggcucgggauuc

SEQ ID NO: 1348090 - RNA, 19 nt, Artificial Sequence
  Description of Artificial Sequence: Synthetic oligonucleotide
gugugaguauauccaucag

SEQ ID NO: 1348091 - RNA, 19 nt, Artificial Sequence
  Description of Artificial Sequence: Synthetic oligonucleotide
cauccuccaguguuuucag

SEQ ID NO: 1348092 - RNA, 19 nt, Artificial Sequence
  Description of Artificial Sequence: Synthetic oligonucleotide
acaagccauagcaauauua

SEQ ID NO: 1348093 - RNA, 19 nt, Artificial Sequence
  Description of Artificial Sequence: Synthetic oligonucleotide
cuaaggcucgggauuccac

SEQ ID NO: 1348094 - RNA, 19 nt, Artificial Sequence
  Description of Artificial Sequence: Synthetic oligonucleotide
uuugcaucacaguguggua

SEQ ID NO: 1348095 - RNA, 19 nt, Artificial Sequence
  Description of Artificial Sequence: Synthetic oligonucleotide
cauagguaugggaaaggaa

SEQ ID NO: 1348096 - RNA, 19 nt, Artificial Sequence
  Description of Artificial Sequence: Synthetic oligonucleotide
aggugugaguauauccauc

SEQ ID NO: 1348097 - RNA, 19 nt, Artificial Sequence
  Description of Artificial Sequence: Synthetic oligonucleotide
aggaccacacguccugugu

SEQ ID NO: 1348098 - RNA, 19 nt, Artificial Sequence
  Description of Artificial Sequence: Synthetic oligonucleotide
ccaacaaacaugggagucg

SEQ ID NO: 1348099 - RNA, 19 nt, Artificial Sequence
  Description of Artificial Sequence: Synthetic oligonucleotide
gauugugaacagagccugc

SEQ ID NO: 1348100 - RNA, 19 nt, Artificial Sequence
  Description of Artificial Sequence: Synthetic oligonucleotide
cauucccagaaggugugag

SEQ ID NO: 1348101 - RNA, 19 nt, Artificial Sequence
  Description of Artificial Sequence: Synthetic oligonucleotide
ggauuccgaauguaggcac

SEQ ID NO: 1348102 - RNA, 19 nt, Artificial Sequence
  Description of Artificial Sequence: Synthetic oligonucleotide
gccacgucuaacuggcagg

SEQ ID NO: 1348103 - RNA, 19 nt, Artificial Sequence
  Description of Artificial Sequence: Synthetic oligonucleotide
cacacguccugugugugag

SEQ ID NO: 1348104 - RNA, 19 nt, Artificial Sequence
  Description of Artificial Sequence: Synthetic oligonucleotide
ugggcucgcuaacucuuug

SEQ ID NO: 1348105 - RNA, 19 nt, Artificial Sequence
  Description of Artificial Sequence: Synthetic oligonucleotide
aggcucgggauuccacgac

SEQ ID NO: 1348106 - RNA, 19 nt, Artificial Sequence
  Description of Artificial Sequence: Synthetic oligonucleotide
cauacaaggacacguugua

SEQ ID NO: 1348107 - RNA, 19 nt, Artificial Sequence
  Description of Artificial Sequence: Synthetic oligonucleotide
acugccugacuaaggcucg

SEQ ID NO: 1348108 - RNA, 19 nt, Artificial Sequence
  Description of Artificial Sequence: Synthetic oligonucleotide
uucaggcuguuccuuggua

SEQ ID NO: 1348109 - RNA, 19 nt, Artificial Sequence
  Description of Artificial Sequence: Synthetic oligonucleotide
acacguccugugugugagc

SEQ ID NO: 1348110 - RNA, 19 nt, Artificial Sequence
  Description of Artificial Sequence: Synthetic oligonucleotide
cuggacauacaaggacacg

SEQ ID NO: 1348111 - RNA, 19 nt, Artificial Sequence
  Description of Artificial Sequence: Synthetic oligonucleotide
cuugucugggcucgcuaac

SEQ ID NO: 1348112 - RNA, 19 nt, Artificial Sequence
  Description of Artificial Sequence: Synthetic oligonucleotide
uccgugaguuccuggugga

SEQ ID NO: 1348113 - RNA, 19 nt, Artificial Sequence
  Description of Artificial Sequence: Synthetic oligonucleotide
cacgcccaaaucccgaguc

SEQ ID NO: 1348114 - RNA, 19 nt, Artificial Sequence
  Description of Artificial Sequence: Synthetic oligonucleotide
aacaggucuguccgauguu

SEQ ID NO: 1348115 - RNA, 19 nt, Artificial Sequence
  Description of Artificial Sequence: Synthetic oligonucleotide
cuggacauccucccagguc

SEQ ID NO: 1348116 - RNA, 19 nt, Artificial Sequence
  Description of Artificial Sequence: Synthetic oligonucleotide
cagauugugaacagagccu

SEQ ID NO: 1348117 - RNA, 19 nt, Artificial Sequence
  Description of Artificial Sequence: Synthetic oligonucleotide
uuauccucuucaguauuuu

SEQ ID NO: 1348118 - RNA, 19 nt, Artificial Sequence
  Description of Artificial Sequence: Synthetic oligonucleotide
gauuccgaauguaggcaca

SEQ ID NO: 1348119 - RNA, 19 nt, Artificial Sequence
  Description of Artificial Sequence: Synthetic oligonucleotide
gaaccugacugaaauccaa

SEQ ID NO: 1348120 - RNA, 19 nt, Artificial Sequence
  Description of Artificial Sequence: Synthetic oligonucleotide
ugccugacuaaggcucggg

SEQ ID NO: 1348121 - RNA, 19 nt, Artificial Sequence
  Description of Artificial Sequence: Synthetic oligonucleotide
ucacgcccaaaucccgagu

SEQ ID NO: 1348122 - RNA, 19 nt, Artificial Sequence
  Description of Artificial Sequence: Synthetic oligonucleotide
agguguauggucaggguuu

SEQ ID NO: 1348123 - RNA, 19 nt, Artificial Sequence
  Description of Artificial Sequence: Synthetic oligonucleotide
ggcagguuuuccucaggag

SEQ ID NO: 1348124 - RNA, 19 nt, Artificial Sequence
  Description of Artificial Sequence: Synthetic oligonucleotide
uugucugggcucgcuaacu

SEQ ID NO: 1348125 - RNA, 19 nt, Artificial Sequence
  Description of Artificial Sequence: Synthetic oligonucleotide
agguaugggaaaggaaaau

SEQ ID NO: 1348126 - RNA, 19 nt, Artificial Sequence
  Description of Artificial Sequence: Synthetic oligonucleotide
ugagcggcgucaugcugga

SEQ ID NO: 1348127 - RNA, 19 nt, Artificial Sequence
  Description of Artificial Sequence: Synthetic oligonucleotide
gagucugggacugccugac

SEQ ID NO: 1348128 - RNA, 19 nt, Artificial Sequence
  Description of Artificial Sequence: Synthetic oligonucleotide
gcacuggacauccucccag

SEQ ID NO: 1348129 - RNA, 19 nt, Artificial Sequence
  Description of Artificial Sequence: Synthetic oligonucleotide
cauaggugcacuggacauc

SEQ ID NO: 1348130 - RNA, 19 nt, Artificial Sequence
  Description of Artificial Sequence: Synthetic oligonucleotide
auacacugaguggcagauc

SEQ ID NO: 1348131 - RNA, 19 nt, Artificial Sequence
  Description of Artificial Sequence: Synthetic oligonucleotide
guauuuuccggaaguccuc

SEQ ID NO: 1348132 - RNA, 19 nt, Artificial Sequence
  Description of Artificial Sequence: Synthetic oligonucleotide
guccgauguuguguaaacc

SEQ ID NO: 1348133 - RNA, 19 nt, Artificial Sequence
  Description of Artificial Sequence: Synthetic oligonucleotide
ccauuagugaucacgccca

SEQ ID NO: 1348134 - RNA, 19 nt, Artificial Sequence
  Description of Artificial Sequence: Synthetic oligonucleotide
ugcgcagaagagagcgauc

SEQ ID NO: 1348135 - RNA, 19 nt, Artificial Sequence
  Description of Artificial Sequence: Synthetic oligonucleotide
ucgucaugcucuucucuuu

SEQ ID NO: 1348136 - RNA, 19 nt, Artificial Sequence
  Description of Artificial Sequence: Synthetic oligonucleotide
uaaggaccacacguccugu

SEQ ID NO: 1348137 - RNA, 19 nt, Artificial Sequence
  Description of Artificial Sequence: Synthetic oligonucleotide
gagaaucucaugaggugua

SEQ ID NO: 1348138 - RNA, 19 nt, Artificial Sequence
  Description of Artificial Sequence: Synthetic oligonucleotide
ggcgucaugcuggacauac

SEQ ID NO: 1348139 - RNA, 19 nt, Artificial Sequence
  Description of Artificial Sequence: Synthetic oligonucleotide
gguaugggaaaggaaaaua

SEQ ID NO: 1348140 - RNA, 19 nt, Artificial Sequence
  Description of Artificial Sequence: Synthetic oligonucleotide
ggagacaagccauagcaau

SEQ ID NO: 1348141 - RNA, 19 nt, Artificial Sequence
  Description of Artificial Sequence: Synthetic oligonucleotide
auuuuccggaaguccucau

SEQ ID NO: 1348142 - RNA, 19 nt, Artificial Sequence
  Description of Artificial Sequence: Synthetic oligonucleotide
gaucacgcccaaaucccga

SEQ ID NO: 1348143 - RNA, 19 nt, Artificial Sequence
  Description of Artificial Sequence: Synthetic oligonucleotide
cuaauugacuaugcagcaa

SEQ ID NO: 1348144 - RNA, 19 nt, Artificial Sequence
  Description of Artificial Sequence: Synthetic oligonucleotide
ggaccaauuaccuccuacu

SEQ ID NO: 1348145 - RNA, 19 nt, Artificial Sequence
  Description of Artificial Sequence: Synthetic oligonucleotide
acgcccaaaucccgagucu

SEQ ID NO: 1348146 - RNA, 19 nt, Artificial Sequence
  Description of Artificial Sequence: Synthetic oligonucleotide
acuaaggcucgggauucca

SEQ ID NO: 1348147 - RNA, 19 nt, Artificial Sequence
  Description of Artificial Sequence: Synthetic oligonucleotide
cugggacugccugacuaag

SEQ ID NO: 1348148 - RNA, 19 nt, Artificial Sequence
  Description of Artificial Sequence: Synthetic oligonucleotide
agcacuugucugggcucgc

SEQ ID NO: 1348149 - RNA, 19 nt, Artificial Sequence
  Description of Artificial Sequence: Synthetic oligonucleotide
ccaaauuauaagguagaga

SEQ ID NO: 1348150 - RNA, 19 nt, Artificial Sequence
  Description of Artificial Sequence: Synthetic oligonucleotide
gcaguaagccagcuccaug

SEQ ID NO: 1348151 - RNA, 19 nt, Artificial Sequence
  Description of Artificial Sequence: Synthetic oligonucleotide
agaaucucaugagguguau

SEQ ID NO: 1348152 - RNA, 19 nt, Artificial Sequence
  Description of Artificial Sequence: Synthetic oligonucleotide
caacaggucuguccgaugu

SEQ ID NO: 1348153 - RNA, 19 nt, Artificial Sequence
  Description of Artificial Sequence: Synthetic oligonucleotide
ucccgagucugggacugcc

SEQ ID NO: 1348154 - RNA, 19 nt, Artificial Sequence
  Description of Artificial Sequence: Synthetic oligonucleotide
auuagugaucacgcccaaa

SEQ ID NO: 1348155 - RNA, 19 nt, Artificial Sequence
  Description of Artificial Sequence: Synthetic oligonucleotide
gacuaaggcucgggauucc

SEQ ID NO: 1348156 - RNA, 19 nt, Artificial Sequence
  Description of Artificial Sequence: Synthetic oligonucleotide
guaucaccgaguucuuccu

SEQ ID NO: 1348157 - RNA, 19 nt, Artificial Sequence
  Description of Artificial Sequence: Synthetic oligonucleotide
acuccuucguccagauugu

SEQ ID NO: 1348158 - RNA, 19 nt, Artificial Sequence
  Description of Artificial Sequence: Synthetic oligonucleotide
aguuucccgccagcgauau

SEQ ID NO: 1348159 - RNA, 19 nt, Artificial Sequence
  Description of Artificial Sequence: Synthetic oligonucleotide
ugguaucaccgaguucuuc

SEQ ID NO: 1348160 - RNA, 19 nt, Artificial Sequence
  Description of Artificial Sequence: Synthetic oligonucleotide
caugggcaaucacagcaaa

SEQ ID NO: 1348161 - RNA, 19 nt, Artificial Sequence
  Description of Artificial Sequence: Synthetic oligonucleotide
uuccgaauguaggcacagu

SEQ ID NO: 1348162 - RNA, 19 nt, Artificial Sequence
  Description of Artificial Sequence: Synthetic oligonucleotide
gguguauggucaggguuug

SEQ ID NO: 1348163 - RNA, 19 nt, Artificial Sequence
  Description of Artificial Sequence: Synthetic oligonucleotide
ccaugcuaaggaccacacg

SEQ ID NO: 1348164 - RNA, 19 nt, Artificial Sequence
  Description of Artificial Sequence: Synthetic oligonucleotide
agcgaucccauggaccaau

SEQ ID NO: 1348165 - RNA, 19 nt, Artificial Sequence
  Description of Artificial Sequence: Synthetic oligonucleotide
agguagagaugagcggcgu

SEQ ID NO: 1348166 - RNA, 19 nt, Artificial Sequence
  Description of Artificial Sequence: Synthetic oligonucleotide
ggcaaucacagcaaagagu

SEQ ID NO: 1348167 - RNA, 19 nt, Artificial Sequence
  Description of Artificial Sequence: Synthetic oligonucleotide
ccacgacuucacuuccugg

SEQ ID NO: 1348168 - RNA, 19 nt, Artificial Sequence
  Description of Artificial Sequence: Synthetic oligonucleotide
gcucgcuaacucuuugguc

SEQ ID NO: 1348169 - RNA, 19 nt, Artificial Sequence
  Description of Artificial Sequence: Synthetic oligonucleotide
aaacagcgcagggcauccu

SEQ ID NO: 1348170 - RNA, 19 nt, Artificial Sequence
  Description of Artificial Sequence: Synthetic oligonucleotide
cccgccagcgauaucugug

SEQ ID NO: 1348171 - RNA, 19 nt, Artificial Sequence
  Description of Artificial Sequence: Synthetic oligonucleotide
cccaaaucccgagucuggg

SEQ ID NO: 1348172 - RNA, 19 nt, Artificial Sequence
  Description of Artificial Sequence: Synthetic oligonucleotide
cauggaccaauuaccuccu

SEQ ID NO: 1348173 - RNA, 19 nt, Artificial Sequence
  Description of Artificial Sequence: Synthetic oligonucleotide
ugguccccgaggcaccguu

SEQ ID NO: 1348174 - RNA, 19 nt, Artificial Sequence
  Description of Artificial Sequence: Synthetic oligonucleotide
cccaacaaacaugggaguc

SEQ ID NO: 1348175 - RNA, 19 nt, Artificial Sequence
  Description of Artificial Sequence: Synthetic oligonucleotide
cacacaagccagacacaaa

SEQ ID NO: 1348176 - RNA, 19 nt, Artificial Sequence
  Description of Artificial Sequence: Synthetic oligonucleotide
ugaguuccugguggagaau

SEQ ID NO: 1348177 - RNA, 19 nt, Artificial Sequence
  Description of Artificial Sequence: Synthetic oligonucleotide
agggcggucccaagcacca

SEQ ID NO: 1348178 - RNA, 19 nt, Artificial Sequence
  Description of Artificial Sequence: Synthetic oligonucleotide
uaggugcacuggacauccu

SEQ ID NO: 1348179 - RNA, 19 nt, Artificial Sequence
  Description of Artificial Sequence: Synthetic oligonucleotide
aggcaccguuauccucuuc

SEQ ID NO: 1348180 - RNA, 19 nt, Artificial Sequence
  Description of Artificial Sequence: Synthetic oligonucleotide
gucuaacuggcagguuuuc

SEQ ID NO: 1348181 - RNA, 19 nt, Artificial Sequence
  Description of Artificial Sequence: Synthetic oligonucleotide
cucgucaugcucuucucuu

SEQ ID NO: 1348182 - RNA, 19 nt, Artificial Sequence
  Description of Artificial Sequence: Synthetic oligonucleotide
cauuagugaucacgcccaa

SEQ ID NO: 1348183 - RNA, 19 nt, Artificial Sequence
  Description of Artificial Sequence: Synthetic oligonucleotide
uaccuccuacuguguccug

SEQ ID NO: 1348184 - RNA, 19 nt, Artificial Sequence
  Description of Artificial Sequence: Synthetic oligonucleotide
caaaaccuguuuccugggu

SEQ ID NO: 1348185 - RNA, 19 nt, Artificial Sequence
  Description of Artificial Sequence: Synthetic oligonucleotide
ccuuuugcccauuagugau

SEQ ID NO: 1348186 - RNA, 19 nt, Artificial Sequence
  Description of Artificial Sequence: Synthetic oligonucleotide
cuguccgauguuguguaaa

SEQ ID NO: 1348187 - RNA, 19 nt, Artificial Sequence
  Description of Artificial Sequence: Synthetic oligonucleotide
ggagucguugaagcagaac

SEQ ID NO: 1348188 - RNA, 19 nt, Artificial Sequence
  Description of Artificial Sequence: Synthetic oligonucleotide
guuauccucuucaguauuu

SEQ ID NO: 1348189 - RNA, 19 nt, Artificial Sequence
  Description of Artificial Sequence: Synthetic oligonucleotide
cccauggaccaauuaccuc

SEQ ID NO: 1348190 - RNA, 19 nt, Artificial Sequence
  Description of Artificial Sequence: Synthetic oligonucleotide
agugcgcagaagagagcga

SEQ ID NO: 1348191 - RNA, 19 nt, Artificial Sequence
  Description of Artificial Sequence: Synthetic oligonucleotide
ccgagucugggacugccug

SEQ ID NO: 1348192 - RNA, 19 nt, Artificial Sequence
  Description of Artificial Sequence: Synthetic oligonucleotide
caauuaccuccuacugugu

SEQ ID NO: 1348193 - RNA, 19 nt, Artificial Sequence
  Description of Artificial Sequence: Synthetic oligonucleotide
ccgauguuguguaaaccaa

SEQ ID NO: 1348194 - RNA, 19 nt, Artificial Sequence
  Description of Artificial Sequence: Synthetic oligonucleotide
ggcggucccaagcaccaca

SEQ ID NO: 1348195 - RNA, 19 nt, Artificial Sequence
  Description of Artificial Sequence: Synthetic oligonucleotide
gcaguuucccgccagcgau

SEQ ID NO: 1348196 - RNA, 19 nt, Artificial Sequence
  Description of Artificial Sequence: Synthetic oligonucleotide
cauccccacaugggcaauc

SEQ ID NO: 1348197 - RNA, 19 nt, Artificial Sequence
  Description of Artificial Sequence: Synthetic oligonucleotide
gcgauaucugugauuucca

SEQ ID NO: 1348198 - RNA, 19 nt, Artificial Sequence
  Description of Artificial Sequence: Synthetic oligonucleotide
cagaaccacuuuccaucca

SEQ ID NO: 1348199 - RNA, 19 nt, Artificial Sequence
  Description of Artificial Sequence: Synthetic oligonucleotide
cgggauuccacgacuucac

SEQ ID NO: 1348200 - RNA, 19 nt, Artificial Sequence
  Description of Artificial Sequence: Synthetic oligonucleotide
gccaugcuaaggaccacac

SEQ ID NO: 1348201 - RNA, 19 nt, Artificial Sequence
  Description of Artificial Sequence: Synthetic oligonucleotide
ggcucgcuaacucuuuggu

SEQ ID NO: 1348202 - RNA, 19 nt, Artificial Sequence
  Description of Artificial Sequence: Synthetic oligonucleotide
cuccuucguccagauugug

SEQ ID NO: 1348203 - RNA, 19 nt, Artificial Sequence
  Description of Artificial Sequence: Synthetic oligonucleotide
guacuucuggaggcaguaa

SEQ ID NO: 1348204 - RNA, 19 nt, Artificial Sequence
  Description of Artificial Sequence: Synthetic oligonucleotide
gcggucccaagcaccacag

SEQ ID NO: 1348205 - RNA, 19 nt, Artificial Sequence
  Description of Artificial Sequence: Synthetic oligonucleotide
gcuaacucuuuggucugga

SEQ ID NO: 1348206 - RNA, 19 nt, Artificial Sequence
  Description of Artificial Sequence: Synthetic oligonucleotide
gcacugaggcucagccacg

SEQ ID NO: 1348207 - RNA, 19 nt, Artificial Sequence
  Description of Artificial Sequence: Synthetic oligonucleotide
ccaggucacccaacaaaca

SEQ ID NO: 1348208 - RNA, 19 nt, Artificial Sequence
  Description of Artificial Sequence: Synthetic oligonucleotide
gugcgcagaagagagcgau

SEQ ID NO: 1348209 - RNA, 19 nt, Artificial Sequence
  Description of Artificial Sequence: Synthetic oligonucleotide
caccguuauccucuucagu

SEQ ID NO: 1348210 - RNA, 19 nt, Artificial Sequence
  Description of Artificial Sequence: Synthetic oligonucleotide
gucagugaucugguccuua

SEQ ID NO: 1348211 - RNA, 19 nt, Artificial Sequence
  Description of Artificial Sequence: Synthetic oligonucleotide
cacuugucugggcucgcua

SEQ ID NO: 1348212 - RNA, 19 nt, Artificial Sequence
  Description of Artificial Sequence: Synthetic oligonucleotide
caguuucccgccagcgaua

SEQ ID NO: 1348213 - RNA, 19 nt, Artificial Sequence
  Description of Artificial Sequence: Synthetic oligonucleotide
gguccuuagucagguucca

SEQ ID NO: 1348214 - RNA, 19 nt, Artificial Sequence
  Description of Artificial Sequence: Synthetic oligonucleotide
ccgccagcgauaucuguga

SEQ ID NO: 1348215 - RNA, 19 nt, Artificial Sequence
  Description of Artificial Sequence: Synthetic oligonucleotide
cagugaucugguccuuagu

SEQ ID NO: 1348216 - RNA, 19 nt, Artificial Sequence
  Description of Artificial Sequence: Synthetic oligonucleotide
gcuaaggaccacacguccu

SEQ ID NO: 1348217 - RNA, 19 nt, Artificial Sequence
  Description of Artificial Sequence: Synthetic oligonucleotide
ggcucgggauuccacgacu

SEQ ID NO: 1348218 - RNA, 19 nt, Artificial Sequence
  Description of Artificial Sequence: Synthetic oligonucleotide
guuucccgccagcgauauc

SEQ ID NO: 1348219 - RNA, 19 nt, Artificial Sequence
  Description of Artificial Sequence: Synthetic oligonucleotide
ccaugagggcggucccaag

SEQ ID NO: 1348220 - RNA, 19 nt, Artificial Sequence
  Description of Artificial Sequence: Synthetic oligonucleotide
ggacauacaaggacacguu

SEQ ID NO: 1348221 - RNA, 19 nt, Artificial Sequence
  Description of Artificial Sequence: Synthetic oligonucleotide
gagcgaucccauggaccaa

SEQ ID NO: 1348222 - RNA, 19 nt, Artificial Sequence
  Description of Artificial Sequence: Synthetic oligonucleotide
cgugaguuccugguggaga

SEQ ID NO: 1348223 - RNA, 19 nt, Artificial Sequence
  Description of Artificial Sequence: Synthetic oligonucleotide
ccacacguccuguguguga

SEQ ID NO: 1348224 - RNA, 19 nt, Artificial Sequence
  Description of Artificial Sequence: Synthetic oligonucleotide
cgcuaacucuuuggucugg

SEQ ID NO: 1348225 - RNA, 19 nt, Artificial Sequence
  Description of Artificial Sequence: Synthetic oligonucleotide
ccgugaguuccugguggag

SEQ ID NO: 1348226 - RNA, 19 nt, Artificial Sequence
  Description of Artificial Sequence: Synthetic oligonucleotide
ccguuauccucuucaguau

SEQ ID NO: 1348227 - RNA, 19 nt, Artificial Sequence
  Description of Artificial Sequence: Synthetic oligonucleotide
gcggcgucaugcuggacau

SEQ ID NO: 1348228 - RNA, 19 nt, Artificial Sequence
  Description of Artificial Sequence: Synthetic oligonucleotide
ggcaguaagccagcuccau

SEQ ID NO: 1348229 - RNA, 19 nt, Artificial Sequence
  Description of Artificial Sequence: Synthetic oligonucleotide
gagcggcgucaugcuggac

SEQ ID NO: 1348230 - RNA, 19 nt, Artificial Sequence
  Description of Artificial Sequence: Synthetic oligonucleotide
gggagucguugaagcagaa

SEQ ID NO: 1348231 - RNA, 19 nt, Artificial Sequence
  Description of Artificial Sequence: Synthetic oligonucleotide
ccgacuguccugcaucuuu

SEQ ID NO: 1348232 - RNA, 19 nt, Artificial Sequence
  Description of Artificial Sequence: Synthetic oligonucleotide
ccacgucuaacuggcaggu

SEQ ID NO: 1348233 - RNA, 19 nt, Artificial Sequence
  Description of Artificial Sequence: Synthetic oligonucleotide
cguccagauugugaacaga

SEQ ID NO: 1348234 - RNA, 19 nt, Artificial Sequence
  Description of Artificial Sequence: Synthetic oligonucleotide
ccacaggauuccgaaugua

SEQ ID NO: 1348235 - RNA, 19 nt, Artificial Sequence
  Description of Artificial Sequence: Synthetic oligonucleotide
cgucuaacuggcagguuuu

SEQ ID NO: 1348236 - RNA, 19 nt, Artificial Sequence
  Description of Artificial Sequence: Synthetic oligonucleotide
ggucaggguuuggggcaga

SEQ ID NO: 1348237 - RNA, 19 nt, Artificial Sequence
  Description of Artificial Sequence: Synthetic oligonucleotide
cgaucccauggaccaauua

SEQ ID NO: 1348238 - RNA, 19 nt, Artificial Sequence
  Description of Artificial Sequence: Synthetic oligonucleotide
gggcggucccaagcaccac

SEQ ID NO: 1348239 - RNA, 19 nt, Artificial Sequence
  Description of Artificial Sequence: Synthetic oligonucleotide
gcacuugucugggcucgcu

SEQ ID NO: 1348240 - RNA, 19 nt, Artificial Sequence
  Description of Artificial Sequence: Synthetic oligonucleotide
cacgucuaacuggcagguu

SEQ ID NO: 1348241 - RNA, 19 nt, Artificial Sequence
  Description of Artificial Sequence: Synthetic oligonucleotide
ccaggccaugagggcgguc

SEQ ID NO: 1348242 - RNA, 19 nt, Artificial Sequence
  Description of Artificial Sequence: Synthetic oligonucleotide
cugguccccgaggcaccgu

SEQ ID NO: 1348243 - RNA, 19 nt, Artificial Sequence
  Description of Artificial Sequence: Synthetic oligonucleotide
gcgaucccauggaccaauu

SEQ ID NO: 1348244 - RNA, 19 nt, Artificial Sequence
  Description of Artificial Sequence: Synthetic oligonucleotide
cgccagcgauaucugugau

SEQ ID NO: 1348245 - RNA, 19 nt, Artificial Sequence
  Description of Artificial Sequence: Synthetic oligonucleotide
cggcgucaugcuggacaua

SEQ ID NO: 1348246 - RNA, 19 nt, Artificial Sequence
  Description of Artificial Sequence: Synthetic oligonucleotide
aauacgaaaccuuuggugg

SEQ ID NO: 1348247 - RNA, 19 nt, Artificial Sequence
  Description of Artificial Sequence: Synthetic oligonucleotide
cuaaucucaucuuaaaugg

SEQ ID NO: 1348248 - RNA, 19 nt, Artificial Sequence
  Description of Artificial Sequence: Synthetic oligonucleotide
aaauacgaaaccuuuggug

SEQ ID NO: 1348249 - RNA, 19 nt, Artificial Sequence
  Description of Artificial Sequence: Synthetic oligonucleotide
aaugugaugcucaacaggg

SEQ ID NO: 1348250 - RNA, 19 nt, Artificial Sequence
  Description of Artificial Sequence: Synthetic oligonucleotide
acuaaucucaucuuaaaug

SEQ ID NO: 1348251 - RNA, 19 nt, Artificial Sequence
  Description of Artificial Sequence: Synthetic oligonucleotide
aagaugauuccuugcagac

SEQ ID NO: 1348252 - RNA, 19 nt, Artificial Sequence
  Description of Artificial Sequence: Synthetic oligonucleotide
uccaaaugaacuaaucuca

SEQ ID NO: 1348253 - RNA, 19 nt, Artificial Sequence
  Description of Artificial Sequence: Synthetic oligonucleotide
uaaugugaugcucaacagg

SEQ ID NO: 1348254 - RNA, 19 nt, Artificial Sequence
  Description of Artificial Sequence: Synthetic oligonucleotide
uucauacucaaugaggagg

SEQ ID NO: 1348255 - RNA, 19 nt, Artificial Sequence
  Description of Artificial Sequence: Synthetic oligonucleotide
aaauggucguaccucugcc

SEQ ID NO: 1348256 - RNA, 19 nt, Artificial Sequence
  Description of Artificial Sequence: Synthetic oligonucleotide
ucucaguaaccucagagug

SEQ ID NO: 1348257 - RNA, 19 nt, Artificial Sequence
  Description of Artificial Sequence: Synthetic oligonucleotide
gaucucaguaaccucagag

SEQ ID NO: 1348258 - RNA, 19 nt, Artificial Sequence
  Description of Artificial Sequence: Synthetic oligonucleotide
aacgucgucaccaaagccg

SEQ ID NO: 1348259 - RNA, 19 nt, Artificial Sequence
  Description of Artificial Sequence: Synthetic oligonucleotide
aaaaccucagagaaauacg

SEQ ID NO: 1348260 - RNA, 19 nt, Artificial Sequence
  Description of Artificial Sequence: Synthetic oligonucleotide
ucauacucaaugaggaggc

SEQ ID NO: 1348261 - RNA, 19 nt, Artificial Sequence
  Description of Artificial Sequence: Synthetic oligonucleotide
caugcuuuagcacaaacuc

SEQ ID NO: 1348262 - RNA, 19 nt, Artificial Sequence
  Description of Artificial Sequence: Synthetic oligonucleotide
aguauauccacagagcugu

SEQ ID NO: 1348263 - RNA, 19 nt, Artificial Sequence
  Description of Artificial Sequence: Synthetic oligonucleotide
aaagccgccguguacaagu

SEQ ID NO: 1348264 - RNA, 19 nt, Artificial Sequence
  Description of Artificial Sequence: Synthetic oligonucleotide
acaccaaggguguugugcc

SEQ ID NO: 1348265 - RNA, 19 nt, Artificial Sequence
  Description of Artificial Sequence: Synthetic oligonucleotide
aauuuugcguggcuguucu

SEQ ID NO: 1348266 - RNA, 19 nt, Artificial Sequence
  Description of Artificial Sequence: Synthetic oligonucleotide
guugaggcaccccagaugc

SEQ ID NO: 1348267 - RNA, 19 nt, Artificial Sequence
  Description of Artificial Sequence: Synthetic oligonucleotide
uuaacgucgucaccaaagc

SEQ ID NO: 1348268 - RNA, 19 nt, Artificial Sequence
  Description of Artificial Sequence: Synthetic oligonucleotide
uguacaagugacuguagac

SEQ ID NO: 1348269 - RNA, 19 nt, Artificial Sequence
  Description of Artificial Sequence: Synthetic oligonucleotide
aguaguagaccucaucaca

SEQ ID NO: 1348270 - RNA, 19 nt, Artificial Sequence
  Description of Artificial Sequence: Synthetic oligonucleotide
acagagaaauggucguacc

SEQ ID NO: 1348271 - RNA, 19 nt, Artificial Sequence
  Description of Artificial Sequence: Synthetic oligonucleotide
uucacggagauguacaaaa

SEQ ID NO: 1348272 - RNA, 19 nt, Artificial Sequence
  Description of Artificial Sequence: Synthetic oligonucleotide
guggagacuaauuugugug

SEQ ID NO: 1348273 - RNA, 19 nt, Artificial Sequence
  Description of Artificial Sequence: Synthetic oligonucleotide
auuugcacccagugcaugg

SEQ ID NO: 1348274 - RNA, 19 nt, Artificial Sequence
  Description of Artificial Sequence: Synthetic oligonucleotide
agagaaauggucguaccuc

SEQ ID NO: 1348275 - RNA, 19 nt, Artificial Sequence
  Description of Artificial Sequence: Synthetic oligonucleotide
guccaaaugaacuaaucuc

SEQ ID NO: 1348276 - RNA, 19 nt, Artificial Sequence
  Description of Artificial Sequence: Synthetic oligonucleotide
ugucgucccacaccaaggg

SEQ ID NO: 1348277 - RNA, 19 nt, Artificial Sequence
  Description of Artificial Sequence: Synthetic oligonucleotide
uuaagguccaaaugaacua

SEQ ID NO: 1348278 - RNA, 19 nt, Artificial Sequence
  Description of Artificial Sequence: Synthetic oligonucleotide
aaaccucagagaaauacga

SEQ ID NO: 1348279 - RNA, 19 nt, Artificial Sequence
  Description of Artificial Sequence: Synthetic oligonucleotide
gagacuaauuugugugacg

SEQ ID NO: 1348280 - RNA, 19 nt, Artificial Sequence
  Description of Artificial Sequence: Synthetic oligonucleotide
gaaguauauccacagagcu

SEQ ID NO: 1348281 - RNA, 19 nt, Artificial Sequence
  Description of Artificial Sequence: Synthetic oligonucleotide
gaaauggucguaccucugc

SEQ ID NO: 1348282 - RNA, 19 nt, Artificial Sequence
  Description of Artificial Sequence: Synthetic oligonucleotide
uguccggguagaaagucag

SEQ ID NO: 1348283 - RNA, 19 nt, Artificial Sequence
  Description of Artificial Sequence: Synthetic oligonucleotide
caagggaacaaccuccagc

SEQ ID NO: 1348284 - RNA, 19 nt, Artificial Sequence
  Description of Artificial Sequence: Synthetic oligonucleotide
uguaugugcuggaucauaa

SEQ ID NO: 1348285 - RNA, 19 nt, Artificial Sequence
  Description of Artificial Sequence: Synthetic oligonucleotide
caugucuuuuaccaaugcc

SEQ ID NO: 1348286 - RNA, 19 nt, Artificial Sequence
  Description of Artificial Sequence: Synthetic oligonucleotide
cucaguaaccucagagugg

SEQ ID NO: 1348287 - RNA, 19 nt, Artificial Sequence
  Description of Artificial Sequence: Synthetic oligonucleotide
acgguguccggguagaaag

SEQ ID NO: 1348288 - RNA, 19 nt, Artificial Sequence
  Description of Artificial Sequence: Synthetic oligonucleotide
uaauuugugugacgagggc

SEQ ID NO: 1348289 - RNA, 19 nt, Artificial Sequence
  Description of Artificial Sequence: Synthetic oligonucleotide
auauccacagagcugugca

SEQ ID NO: 1348290 - RNA, 19 nt, Artificial Sequence
  Description of Artificial Sequence: Synthetic oligonucleotide
cucaucuuaaauggugugg

SEQ ID NO: 1348291 - RNA, 19 nt, Artificial Sequence
  Description of Artificial Sequence: Synthetic oligonucleotide
aucucaguaaccucagagu

SEQ ID NO: 1348292 - RNA, 19 nt, Artificial Sequence
  Description of Artificial Sequence: Synthetic oligonucleotide
uaggggcugaaccagccag

SEQ ID NO: 1348293 - RNA, 19 nt, Artificial Sequence
  Description of Artificial Sequence: Synthetic oligonucleotide
auauacuuccuccugcgau

SEQ ID NO: 1348294 - RNA, 19 nt, Artificial Sequence
  Description of Artificial Sequence: Synthetic oligonucleotide
aauguggagccaccggaca

SEQ ID NO: 1348295 - RNA, 19 nt, Artificial Sequence
  Description of Artificial Sequence: Synthetic oligonucleotide
guaguagaccucaucacag

SEQ ID NO: 1348296 - RNA, 19 nt, Artificial Sequence
  Description of Artificial Sequence: Synthetic oligonucleotide
gaugguaggggcugaacca

SEQ ID NO: 1348297 - RNA, 19 nt, Artificial Sequence
  Description of Artificial Sequence: Synthetic oligonucleotide
agacucagcuucgugaggg

SEQ ID NO: 1348298 - RNA, 19 nt, Artificial Sequence
  Description of Artificial Sequence: Synthetic oligonucleotide
agcaugucgucccacacca

SEQ ID NO: 1348299 - RNA, 19 nt, Artificial Sequence
  Description of Artificial Sequence: Synthetic oligonucleotide
aauggucguaccucugcca

SEQ ID NO: 1348300 - RNA, 19 nt, Artificial Sequence
  Description of Artificial Sequence: Synthetic oligonucleotide
cacggagauguacaaaagc

SEQ ID NO: 1348301 - RNA, 19 nt, Artificial Sequence
  Description of Artificial Sequence: Synthetic oligonucleotide
gauuccuugcagacuaucc

SEQ ID NO: 1348302 - RNA, 19 nt, Artificial Sequence
  Description of Artificial Sequence: Synthetic oligonucleotide
uaaucucaucuuaaauggu

SEQ ID NO: 1348303 - RNA, 19 nt, Artificial Sequence
  Description of Artificial Sequence: Synthetic oligonucleotide
agacuaauuugugugacga

SEQ ID NO: 1348304 - RNA, 19 nt, Artificial Sequence
  Description of Artificial Sequence: Synthetic oligonucleotide
aggaaucugggugcuaccc

SEQ ID NO: 1348305 - RNA, 19 nt, Artificial Sequence
  Description of Artificial Sequence: Synthetic oligonucleotide
ucacggagauguacaaaag

SEQ ID NO: 1348306 - RNA, 19 nt, Artificial Sequence
  Description of Artificial Sequence: Synthetic oligonucleotide
ugcagguggagacuaauuu

SEQ ID NO: 1348307 - RNA, 19 nt, Artificial Sequence
  Description of Artificial Sequence: Synthetic oligonucleotide
gucaagaugauuccuugca

SEQ ID NO: 1348308 - RNA, 19 nt, Artificial Sequence
  Description of Artificial Sequence: Synthetic oligonucleotide
aguaaccucagaguggcug

SEQ ID NO: 1348309 - RNA, 19 nt, Artificial Sequence
  Description of Artificial Sequence: Synthetic oligonucleotide
uguuuugaggucucucccu

SEQ ID NO: 1348310 - RNA, 19 nt, Artificial Sequence
  Description of Artificial Sequence: Synthetic oligonucleotide
ucucccucacccaaguagu

SEQ ID NO: 1348311 - RNA, 19 nt, Artificial Sequence
  Description of Artificial Sequence: Synthetic oligonucleotide
uaacgucgucaccaaagcc

SEQ ID NO: 1348312 - RNA, 19 nt, Artificial Sequence
  Description of Artificial Sequence: Synthetic oligonucleotide
uggagacuaauuuguguga

SEQ ID NO: 1348313 - RNA, 19 nt, Artificial Sequence
  Description of Artificial Sequence: Synthetic oligonucleotide
gagaaauacgaaaccuuug

SEQ ID NO: 1348314 - RNA, 19 nt, Artificial Sequence
  Description of Artificial Sequence: Synthetic oligonucleotide
guuucuaaugugaugcuca

SEQ ID NO: 1348315 - RNA, 19 nt, Artificial Sequence
  Description of Artificial Sequence: Synthetic oligonucleotide
uccauagucccagagcaca

SEQ ID NO: 1348316 - RNA, 19 nt, Artificial Sequence
  Description of Artificial Sequence: Synthetic oligonucleotide
gugcugugacaccacaugg

SEQ ID NO: 1348317 - RNA, 19 nt, Artificial Sequence
  Description of Artificial Sequence: Synthetic oligonucleotide
ugcagucgcugcauacucg

SEQ ID NO: 1348318 - RNA, 19 nt, Artificial Sequence
  Description of Artificial Sequence: Synthetic oligonucleotide
auguggagccaccggacac

SEQ ID NO: 1348319 - RNA, 19 nt, Artificial Sequence
  Description of Artificial Sequence: Synthetic oligonucleotide
uguccgaaugucugcacca

SEQ ID NO: 1348320 - RNA, 19 nt, Artificial Sequence
  Description of Artificial Sequence: Synthetic oligonucleotide
uuugaggucucucccucac

SEQ ID NO: 1348321 - RNA, 19 nt, Artificial Sequence
  Description of Artificial Sequence: Synthetic oligonucleotide
aucauaacugggugaauau

SEQ ID NO: 1348322 - RNA, 19 nt, Artificial Sequence
  Description of Artificial Sequence: Synthetic oligonucleotide
ucagcuuaacgucgucacc

SEQ ID NO: 1348323 - RNA, 19 nt, Artificial Sequence
  Description of Artificial Sequence: Synthetic oligonucleotide
acggagauguacaaaagcu

SEQ ID NO: 1348324 - RNA, 19 nt, Artificial Sequence
  Description of Artificial Sequence: Synthetic oligonucleotide
agccggucaagaugauucc

SEQ ID NO: 1348325 - RNA, 19 nt, Artificial Sequence
  Description of Artificial Sequence: Synthetic oligonucleotide
ucccucacucacaggaucc

SEQ ID NO: 1348326 - RNA, 19 nt, Artificial Sequence
  Description of Artificial Sequence: Synthetic oligonucleotide
aguugaggcaccccagaug

SEQ ID NO: 1348327 - RNA, 19 nt, Artificial Sequence
  Description of Artificial Sequence: Synthetic oligonucleotide
caugucgucccacaccaag

SEQ ID NO: 1348328 - RNA, 19 nt, Artificial Sequence
  Description of Artificial Sequence: Synthetic oligonucleotide
uggaucauaacugggugaa

SEQ ID NO: 1348329 - RNA, 19 nt, Artificial Sequence
  Description of Artificial Sequence: Synthetic oligonucleotide
uuuugcguggcuguucugu

SEQ ID NO: 1348330 - RNA, 19 nt, Artificial Sequence
  Description of Artificial Sequence: Synthetic oligonucleotide
acucacaggauccaugguu

SEQ ID NO: 1348331 - RNA, 19 nt, Artificial Sequence
  Description of Artificial Sequence: Synthetic oligonucleotide
agacacaauuuugcguggc

SEQ ID NO: 1348332 - RNA, 19 nt, Artificial Sequence
  Description of Artificial Sequence: Synthetic oligonucleotide
agugccucgggcuguaugu

SEQ ID NO: 1348333 - RNA, 19 nt, Artificial Sequence
  Description of Artificial Sequence: Synthetic oligonucleotide
cugacuagccccuguggcc

SEQ ID NO: 1348334 - RNA, 19 nt, Artificial Sequence
  Description of Artificial Sequence: Synthetic oligonucleotide
aggcuugaaaccccaagga

SEQ ID NO: 1348335 - RNA, 19 nt, Artificial Sequence
  Description of Artificial Sequence: Synthetic oligonucleotide
gggugaauauacuuccucc

SEQ ID NO: 1348336 - RNA, 19 nt, Artificial Sequence
  Description of Artificial Sequence: Synthetic oligonucleotide
auacgaaaccuuugguggu

SEQ ID NO: 1348337 - RNA, 19 nt, Artificial Sequence
  Description of Artificial Sequence: Synthetic oligonucleotide
cacaccaaggguguugugc

SEQ ID NO: 1348338 - RNA, 19 nt, Artificial Sequence
  Description of Artificial Sequence: Synthetic oligonucleotide
gcuugaaaccccaaggaag

SEQ ID NO: 1348339 - RNA, 19 nt, Artificial Sequence
  Description of Artificial Sequence: Synthetic oligonucleotide
guacaagugacuguagaca

SEQ ID NO: 1348340 - RNA, 19 nt, Artificial Sequence
  Description of Artificial Sequence: Synthetic oligonucleotide
ugcaugcuuuagcacaaac

SEQ ID NO: 1348341 - RNA, 19 nt, Artificial Sequence
  Description of Artificial Sequence: Synthetic oligonucleotide
cacauggcuggcuaccgcc

SEQ ID NO: 1348342 - RNA, 19 nt, Artificial Sequence
  Description of Artificial Sequence: Synthetic oligonucleotide
augguuuccaggcuugaaa

SEQ ID NO: 1348343 - RNA, 19 nt, Artificial Sequence
  Description of Artificial Sequence: Synthetic oligonucleotide
uugugugacgagggcaugg

SEQ ID NO: 1348344 - RNA, 19 nt, Artificial Sequence
  Description of Artificial Sequence: Synthetic oligonucleotide
uuugguggugcuccuuuaa

SEQ ID NO: 1348345 - RNA, 19 nt, Artificial Sequence
  Description of Artificial Sequence: Synthetic oligonucleotide
ccucaggugacccucauag

SEQ ID NO: 1348346 - RNA, 19 nt, Artificial Sequence
  Description of Artificial Sequence: Synthetic oligonucleotide
uccgaaugucugcaccaag

SEQ ID NO: 1348347 - RNA, 19 nt, Artificial Sequence
  Description of Artificial Sequence: Synthetic oligonucleotide
ccucagagaaauacgaaac

SEQ ID NO: 1348348 - RNA, 19 nt, Artificial Sequence
  Description of Artificial Sequence: Synthetic oligonucleotide
gaucauaacugggugaaua

SEQ ID NO: 1348349 - RNA, 19 nt, Artificial Sequence
  Description of Artificial Sequence: Synthetic oligonucleotide
agagaaauacgaaaccuuu

SEQ ID NO: 1348350 - RNA, 19 nt, Artificial Sequence
  Description of Artificial Sequence: Synthetic oligonucleotide
caguagacccugcagucgc

SEQ ID NO: 1348351 - RNA, 19 nt, Artificial Sequence
  Description of Artificial Sequence: Synthetic oligonucleotide
ugguguggaacaagacaug

SEQ ID NO: 1348352 - RNA, 19 nt, Artificial Sequence
  Description of Artificial Sequence: Synthetic oligonucleotide
gucgcugcauacucgggag

SEQ ID NO: 1348353 - RNA, 19 nt, Artificial Sequence
  Description of Artificial Sequence: Synthetic oligonucleotide
gaaauacgaaaccuuuggu

SEQ ID NO: 1348354 - RNA, 19 nt, Artificial Sequence
  Description of Artificial Sequence: Synthetic oligonucleotide
ugacuagccccuguggccc

SEQ ID NO: 1348355 - RNA, 19 nt, Artificial Sequence
  Description of Artificial Sequence: Synthetic oligonucleotide
ugcacgagguugcuccacc

SEQ ID NO: 1348356 - RNA, 19 nt, Artificial Sequence
  Description of Artificial Sequence: Synthetic oligonucleotide
agucgcugcauacucggga

SEQ ID NO: 1348357 - RNA, 19 nt, Artificial Sequence
  Description of Artificial Sequence: Synthetic oligonucleotide
gauucccacagggagcagc

SEQ ID NO: 1348358 - RNA, 19 nt, Artificial Sequence
  Description of Artificial Sequence: Synthetic oligonucleotide
agacuauccacuggcccac

SEQ ID NO: 1348359 - RNA, 19 nt, Artificial Sequence
  Description of Artificial Sequence: Synthetic oligonucleotide
ugcguggcuguucuguuuc

SEQ ID NO: 1348360 - RNA, 19 nt, Artificial Sequence
  Description of Artificial Sequence: Synthetic oligonucleotide
uuuugaggucucucccuca

SEQ ID NO: 1348361 - RNA, 19 nt, Artificial Sequence
  Description of Artificial Sequence: Synthetic oligonucleotide
cuugaaaccccaaggaagu

SEQ ID NO: 1348362 - RNA, 19 nt, Artificial Sequence
  Description of Artificial Sequence: Synthetic oligonucleotide
cagacacaauuuugcgugg

SEQ ID NO: 1348363 - RNA, 19 nt, Artificial Sequence
  Description of Artificial Sequence: Synthetic oligonucleotide
auacucaaugaggaggcca

SEQ ID NO: 1348364 - RNA, 19 nt, Artificial Sequence
  Description of Artificial Sequence: Synthetic oligonucleotide
acacaauuuugcguggcug

SEQ ID NO: 1348365 - RNA, 19 nt, Artificial Sequence
  Description of Artificial Sequence: Synthetic oligonucleotide
ugugccggggugcugugac

SEQ ID NO: 1348366 - RNA, 19 nt, Artificial Sequence
  Description of Artificial Sequence: Synthetic oligonucleotide
caauguggagccaccggac

SEQ ID NO: 1348367 - RNA, 19 nt, Artificial Sequence
  Description of Artificial Sequence: Synthetic oligonucleotide
agauguacaaaagcugcau

SEQ ID NO: 1348368 - RNA, 19 nt, Artificial Sequence
  Description of Artificial Sequence: Synthetic oligonucleotide
gucgucaccaaagccgccg

SEQ ID NO: 1348369 - RNA, 19 nt, Artificial Sequence
  Description of Artificial Sequence: Synthetic oligonucleotide
aaucugggugcuacccagg

SEQ ID NO: 1348370 - RNA, 19 nt, Artificial Sequence
  Description of Artificial Sequence: Synthetic oligonucleotide
auaacugggugaauauacu

SEQ ID NO: 1348371 - RNA, 19 nt, Artificial Sequence
  Description of Artificial Sequence: Synthetic oligonucleotide
gagaaauggucguaccucu

SEQ ID NO: 1348372 - RNA, 19 nt, Artificial Sequence
  Description of Artificial Sequence: Synthetic oligonucleotide
gcagguggagacuaauuug

SEQ ID NO: 1348373 - RNA, 19 nt, Artificial Sequence
  Description of Artificial Sequence: Synthetic oligonucleotide
ucagaguggcuguaugcau

SEQ ID NO: 1348374 - RNA, 19 nt, Artificial Sequence
  Description of Artificial Sequence: Synthetic oligonucleotide
ugcacccagugcauggaac

SEQ ID NO: 1348375 - RNA, 19 nt, Artificial Sequence
  Description of Artificial Sequence: Synthetic oligonucleotide
guguacaagugacuguaga

SEQ ID NO: 1348376 - RNA, 19 nt, Artificial Sequence
  Description of Artificial Sequence: Synthetic oligonucleotide
guguccgaaugucugcacc

SEQ ID NO: 1348377 - RNA, 19 nt, Artificial Sequence
  Description of Artificial Sequence: Synthetic oligonucleotide
ccgaaugucugcaccaagg

SEQ ID NO: 1348378 - RNA, 19 nt, Artificial Sequence
  Description of Artificial Sequence: Synthetic oligonucleotide
acucgggagcacauucucc

SEQ ID NO: 1348379 - RNA, 19 nt, Artificial Sequence
  Description of Artificial Sequence: Synthetic oligonucleotide
cucaggugacccucauagg

SEQ ID NO: 1348380 - RNA, 19 nt, Artificial Sequence
  Description of Artificial Sequence: Synthetic oligonucleotide
cuauccacuggcccacggc

SEQ ID NO: 1348381 - RNA, 19 nt, Artificial Sequence
  Description of Artificial Sequence: Synthetic oligonucleotide
ugguuucuaaugugaugcu

SEQ ID NO: 1348382 - RNA, 19 nt, Artificial Sequence
  Description of Artificial Sequence: Synthetic oligonucleotide
agcuucgugaggguucagg

SEQ ID NO: 1348383 - RNA, 19 nt, Artificial Sequence
  Description of Artificial Sequence: Synthetic oligonucleotide
acaaaagcugcaugcuuua

SEQ ID NO: 1348384 - RNA, 19 nt, Artificial Sequence
  Description of Artificial Sequence: Synthetic oligonucleotide
auuugugugacgagggcau

SEQ ID NO: 1348385 - RNA, 19 nt, Artificial Sequence
  Description of Artificial Sequence: Synthetic oligonucleotide
uguggagccaccggacacc

SEQ ID NO: 1348386 - RNA, 19 nt, Artificial Sequence
  Description of Artificial Sequence: Synthetic oligonucleotide
gagauguacaaaagcugca

SEQ ID NO: 1348387 - RNA, 19 nt, Artificial Sequence
  Description of Artificial Sequence: Synthetic oligonucleotide
ucauaacugggugaauaua

SEQ ID NO: 1348388 - RNA, 19 nt, Artificial Sequence
  Description of Artificial Sequence: Synthetic oligonucleotide
gcagucgcugcauacucgg

SEQ ID NO: 1348389 - RNA, 19 nt, Artificial Sequence
  Description of Artificial Sequence: Synthetic oligonucleotide
cacuucacggagauguaca

SEQ ID NO: 1348390 - RNA, 19 nt, Artificial Sequence
  Description of Artificial Sequence: Synthetic oligonucleotide
cccaugaggaagauuuugc

SEQ ID NO: 1348391 - RNA, 19 nt, Artificial Sequence
  Description of Artificial Sequence: Synthetic oligonucleotide
augucgucccacaccaagg

SEQ ID NO: 1348392 - RNA, 19 nt, Artificial Sequence
  Description of Artificial Sequence: Synthetic oligonucleotide
ucagcuucgugaggguuca

SEQ ID NO: 1348393 - RNA, 19 nt, Artificial Sequence
  Description of Artificial Sequence: Synthetic oligonucleotide
gguuuccaggcuugaaacc

SEQ ID NO: 1348394 - RNA, 19 nt, Artificial Sequence
  Description of Artificial Sequence: Synthetic oligonucleotide
ucuacgguguccggguaga

SEQ ID NO: 1348395 - RNA, 19 nt, Artificial Sequence
  Description of Artificial Sequence: Synthetic oligonucleotide
ggucaagaugauuccuugc

SEQ ID NO: 1348396 - RNA, 19 nt, Artificial Sequence
  Description of Artificial Sequence: Synthetic oligonucleotide
guagcaugucgucccacac

SEQ ID NO: 1348397 - RNA, 19 nt, Artificial Sequence
  Description of Artificial Sequence: Synthetic oligonucleotide
cuggaucauaacuggguga

SEQ ID NO: 1348398 - RNA, 19 nt, Artificial Sequence
  Description of Artificial Sequence: Synthetic oligonucleotide
gcagacuauccacuggccc

SEQ ID NO: 1348399 - RNA, 19 nt, Artificial Sequence
  Description of Artificial Sequence: Synthetic oligonucleotide
agugcauggaacaggggaa

SEQ ID NO: 1348400 - RNA, 19 nt, Artificial Sequence
  Description of Artificial Sequence: Synthetic oligonucleotide
aaccucagagaaauacgaa

SEQ ID NO: 1348401 - RNA, 19 nt, Artificial Sequence
  Description of Artificial Sequence: Synthetic oligonucleotide
acccaaguaguagaccuca

SEQ ID NO: 1348402 - RNA, 19 nt, Artificial Sequence
  Description of Artificial Sequence: Synthetic oligonucleotide
ugcauacucgggagcacau

SEQ ID NO: 1348403 - RNA, 19 nt, Artificial Sequence
  Description of Artificial Sequence: Synthetic oligonucleotide
gacgagggcauggauguca

SEQ ID NO: 1348404 - RNA, 19 nt, Artificial Sequence
  Description of Artificial Sequence: Synthetic oligonucleotide
aagccacacuccugguacu

SEQ ID NO: 1348405 - RNA, 19 nt, Artificial Sequence
  Description of Artificial Sequence: Synthetic oligonucleotide
gaaaccuuugguggugcuc

SEQ ID NO: 1348406 - RNA, 19 nt, Artificial Sequence
  Description of Artificial Sequence: Synthetic oligonucleotide
gaugggauucccacaggga

SEQ ID NO: 1348407 - RNA, 19 nt, Artificial Sequence
  Description of Artificial Sequence: Synthetic oligonucleotide
aggugacccucauagggaa

SEQ ID NO: 1348408 - RNA, 19 nt, Artificial Sequence
  Description of Artificial Sequence: Synthetic oligonucleotide
cagcuuaacgucgucacca

SEQ ID NO: 1348409 - RNA, 19 nt, Artificial Sequence
  Description of Artificial Sequence: Synthetic oligonucleotide
uguguccgaaugucugcac

SEQ ID NO: 1348410 - RNA, 19 nt, Artificial Sequence
  Description of Artificial Sequence: Synthetic oligonucleotide
aggcagauauccagggcuc

SEQ ID NO: 1348411 - RNA, 19 nt, Artificial Sequence
  Description of Artificial Sequence: Synthetic oligonucleotide
agggaacaaccuccagcuc

SEQ ID NO: 1348412 - RNA, 19 nt, Artificial Sequence
  Description of Artificial Sequence: Synthetic oligonucleotide
augugaugcucaacagggg

SEQ ID NO: 1348413 - RNA, 19 nt, Artificial Sequence
  Description of Artificial Sequence: Synthetic oligonucleotide
cucuacgguguccggguag

SEQ ID NO: 1348414 - RNA, 19 nt, Artificial Sequence
  Description of Artificial Sequence: Synthetic oligonucleotide
uccugcgaugguaggggcu

SEQ ID NO: 1348415 - RNA, 19 nt, Artificial Sequence
  Description of Artificial Sequence: Synthetic oligonucleotide
cucacccaaguaguagacc

SEQ ID NO: 1348416 - RNA, 19 nt, Artificial Sequence
  Description of Artificial Sequence: Synthetic oligonucleotide
cagguggagacuaauuugu

SEQ ID NO: 1348417 - RNA, 19 nt, Artificial Sequence
  Description of Artificial Sequence: Synthetic oligonucleotide
ucgcugcauacucgggagc

SEQ ID NO: 1348418 - RNA, 19 nt, Artificial Sequence
  Description of Artificial Sequence: Synthetic oligonucleotide
agugacaaaccuguuccuu

SEQ ID NO: 1348419 - RNA, 19 nt, Artificial Sequence
  Description of Artificial Sequence: Synthetic oligonucleotide
gguagcgccugacuagccc

SEQ ID NO: 1348420 - RNA, 19 nt, Artificial Sequence
  Description of Artificial Sequence: Synthetic oligonucleotide
gagugccucgggcuguaug

SEQ ID NO: 1348421 - RNA, 19 nt, Artificial Sequence
  Description of Artificial Sequence: Synthetic oligonucleotide
caggaaucugggugcuacc

SEQ ID NO: 1348422 - RNA, 19 nt, Artificial Sequence
  Description of Artificial Sequence: Synthetic oligonucleotide
uuugcguggcuguucuguu

SEQ ID NO: 1348423 - RNA, 19 nt, Artificial Sequence
  Description of Artificial Sequence: Synthetic oligonucleotide
uuugugugacgagggcaug

SEQ ID NO: 1348424 - RNA, 19 nt, Artificial Sequence
  Description of Artificial Sequence: Synthetic oligonucleotide
ggagacuaauuugugugac

SEQ ID NO: 1348425 - RNA, 19 nt, Artificial Sequence
  Description of Artificial Sequence: Synthetic oligonucleotide
ccugacuagccccuguggc

SEQ ID NO: 1348426 - RNA, 19 nt, Artificial Sequence
  Description of Artificial Sequence: Synthetic oligonucleotide
cuggcuaccgccugcaugu

SEQ ID NO: 1348427 - RNA, 19 nt, Artificial Sequence
  Description of Artificial Sequence: Synthetic oligonucleotide
ggugaauauacuuccuccu

SEQ ID NO: 1348428 - RNA, 19 nt, Artificial Sequence
  Description of Artificial Sequence: Synthetic oligonucleotide
cuccauguguccgaauguc

SEQ ID NO: 1348429 - RNA, 19 nt, Artificial Sequence
  Description of Artificial Sequence: Synthetic oligonucleotide
cauacucaaugaggaggcc

SEQ ID NO: 1348430 - RNA, 19 nt, Artificial Sequence
  Description of Artificial Sequence: Synthetic oligonucleotide
cugcagucgcugcauacuc

SEQ ID NO: 1348431 - RNA, 19 nt, Artificial Sequence
  Description of Artificial Sequence: Synthetic oligonucleotide
cagauauccagggcuccag

SEQ ID NO: 1348432 - RNA, 19 nt, Artificial Sequence
  Description of Artificial Sequence: Synthetic oligonucleotide
uccaccaguugaggcaccc

SEQ ID NO: 1348433 - RNA, 19 nt, Artificial Sequence
  Description of Artificial Sequence: Synthetic oligonucleotide
gagguugcuccaccuguuc

SEQ ID NO: 1348434 - RNA, 19 nt, Artificial Sequence
  Description of Artificial Sequence: Synthetic oligonucleotide
cuccucuacgguguccggg

SEQ ID NO: 1348435 - RNA, 19 nt, Artificial Sequence
  Description of Artificial Sequence: Synthetic oligonucleotide
cucgggcuguaugugcugg

SEQ ID NO: 1348436 - RNA, 19 nt, Artificial Sequence
  Description of Artificial Sequence: Synthetic oligonucleotide
ucgucaccaaagccgccgu

SEQ ID NO: 1348437 - RNA, 19 nt, Artificial Sequence
  Description of Artificial Sequence: Synthetic oligonucleotide
aggcgcaggaucucaguaa

SEQ ID NO: 1348438 - RNA, 19 nt, Artificial Sequence
  Description of Artificial Sequence: Synthetic oligonucleotide
cagcugaagugcugccucc

SEQ ID NO: 1348439 - RNA, 19 nt, Artificial Sequence
  Description of Artificial Sequence: Synthetic oligonucleotide
cacaauuuugcguggcugu

SEQ ID NO: 1348440 - RNA, 19 nt, Artificial Sequence
  Description of Artificial Sequence: Synthetic oligonucleotide
cgaaugucugcaccaaggg

SEQ ID NO: 1348441 - RNA, 19 nt, Artificial Sequence
  Description of Artificial Sequence: Synthetic oligonucleotide
agaaauggucguaccucug

SEQ ID NO: 1348442 - RNA, 19 nt, Artificial Sequence
  Description of Artificial Sequence: Synthetic oligonucleotide
cuuaaaugguguggaacaa

SEQ ID NO: 1348443 - RNA, 19 nt, Artificial Sequence
  Description of Artificial Sequence: Synthetic oligonucleotide
gacacaauuuugcguggcu

SEQ ID NO: 1348444 - RNA, 19 nt, Artificial Sequence
  Description of Artificial Sequence: Synthetic oligonucleotide
agcuuaacgucgucaccaa

SEQ ID NO: 1348445 - RNA, 19 nt, Artificial Sequence
  Description of Artificial Sequence: Synthetic oligonucleotide
aaacuccauguguccgaau

SEQ ID NO: 1348446 - RNA, 19 nt, Artificial Sequence
  Description of Artificial Sequence: Synthetic oligonucleotide
ggcgcaggaucucaguaac

SEQ ID NO: 1348447 - RNA, 19 nt, Artificial Sequence
  Description of Artificial Sequence: Synthetic oligonucleotide
acuccucuacgguguccgg

SEQ ID NO: 1348448 - RNA, 19 nt, Artificial Sequence
  Description of Artificial Sequence: Synthetic oligonucleotide
accgccugcaugugagaca

SEQ ID NO: 1348449 - RNA, 19 nt, Artificial Sequence
  Description of Artificial Sequence: Synthetic oligonucleotide
ggccauuugcacccagugc

SEQ ID NO: 1348450 - RNA, 19 nt, Artificial Sequence
  Description of Artificial Sequence: Synthetic oligonucleotide
ucagcuccauagucccaga

SEQ ID NO: 1348451 - RNA, 19 nt, Artificial Sequence
  Description of Artificial Sequence: Synthetic oligonucleotide
gcuaccgccugcaugugag

SEQ ID NO: 1348452 - RNA, 19 nt, Artificial Sequence
  Description of Artificial Sequence: Synthetic oligonucleotide
auuuugcguggcuguucug

SEQ ID NO: 1348453 - RNA, 19 nt, Artificial Sequence
  Description of Artificial Sequence: Synthetic oligonucleotide
cacggccugccacuuguag

SEQ ID NO: 1348454 - RNA, 19 nt, Artificial Sequence
  Description of Artificial Sequence: Synthetic oligonucleotide
cggagauguacaaaagcug

SEQ ID NO: 1348455 - RNA, 19 nt, Artificial Sequence
  Description of Artificial Sequence: Synthetic oligonucleotide
cacgagguugcuccaccug

SEQ ID NO: 1348456 - RNA, 19 nt, Artificial Sequence
  Description of Artificial Sequence: Synthetic oligonucleotide
cauuugcacccagugcaug

SEQ ID NO: 1348457 - RNA, 19 nt, Artificial Sequence
  Description of Artificial Sequence: Synthetic oligonucleotide
gguuucuaaugugaugcuc

SEQ ID NO: 1348458 - RNA, 19 nt, Artificial Sequence
  Description of Artificial Sequence: Synthetic oligonucleotide
cagagaaauacgaaaccuu

SEQ ID NO: 1348459 - RNA, 19 nt, Artificial Sequence
  Description of Artificial Sequence: Synthetic oligonucleotide
uucccaugaggaagauuuu

SEQ ID NO: 1348460 - RNA, 19 nt, Artificial Sequence
  Description of Artificial Sequence: Synthetic oligonucleotide
gcaguagacccugcagucg

SEQ ID NO: 1348461 - RNA, 19 nt, Artificial Sequence
  Description of Artificial Sequence: Synthetic oligonucleotide
ugccggggugcugugacac

SEQ ID NO: 1348462 - RNA, 19 nt, Artificial Sequence
  Description of Artificial Sequence: Synthetic oligonucleotide
accuguucagaaggcugag

SEQ ID NO: 1348463 - RNA, 19 nt, Artificial Sequence
  Description of Artificial Sequence: Synthetic oligonucleotide
cuccugcgaugguaggggc

SEQ ID NO: 1348464 - RNA, 19 nt, Artificial Sequence
  Description of Artificial Sequence: Synthetic oligonucleotide
auacucgggagcacauucu

SEQ ID NO: 1348465 - RNA, 19 nt, Artificial Sequence
  Description of Artificial Sequence: Synthetic oligonucleotide
cucgggagcacauucuccu

SEQ ID NO: 1348466 - RNA, 19 nt, Artificial Sequence
  Description of Artificial Sequence: Synthetic oligonucleotide
gucccguagcaugucgucc

SEQ ID NO: 1348467 - RNA, 19 nt, Artificial Sequence
  Description of Artificial Sequence: Synthetic oligonucleotide
acaauuuugcguggcuguu

SEQ ID NO: 1348468 - RNA, 19 nt, Artificial Sequence
  Description of Artificial Sequence: Synthetic oligonucleotide
uagcgccugacuagccccu

SEQ ID NO: 1348469 - RNA, 19 nt, Artificial Sequence
  Description of Artificial Sequence: Synthetic oligonucleotide
ccuugcagacuauccacug

SEQ ID NO: 1348470 - RNA, 19 nt, Artificial Sequence
  Description of Artificial Sequence: Synthetic oligonucleotide
cagagaaauggucguaccu

SEQ ID NO: 1348471 - RNA, 19 nt, Artificial Sequence
  Description of Artificial Sequence: Synthetic oligonucleotide
ggaaucugggugcuaccca

SEQ ID NO: 1348472 - RNA, 19 nt, Artificial Sequence
  Description of Artificial Sequence: Synthetic oligonucleotide
gcuggcuaccgccugcaug

SEQ ID NO: 1348473 - RNA, 19 nt, Artificial Sequence
  Description of Artificial Sequence: Synthetic oligonucleotide
gcaccaagggaacaaccuc

SEQ ID NO: 1348474 - RNA, 19 nt, Artificial Sequence
  Description of Artificial Sequence: Synthetic oligonucleotide
ucgggcuguaugugcugga

SEQ ID NO: 1348475 - RNA, 19 nt, Artificial Sequence
  Description of Artificial Sequence: Synthetic oligonucleotide
guagacccugcagucgcug

SEQ ID NO: 1348476 - RNA, 19 nt, Artificial Sequence
  Description of Artificial Sequence: Synthetic oligonucleotide
gugcuacccaggcagauau

SEQ ID NO: 1348477 - RNA, 19 nt, Artificial Sequence
  Description of Artificial Sequence: Synthetic oligonucleotide
gccugcaugugagacagac

SEQ ID NO: 1348478 - RNA, 19 nt, Artificial Sequence
  Description of Artificial Sequence: Synthetic oligonucleotide
acucucagcuuaacgucgu

SEQ ID NO: 1348479 - RNA, 19 nt, Artificial Sequence
  Description of Artificial Sequence: Synthetic oligonucleotide
gacuagccccuguggcccc

SEQ ID NO: 1348480 - RNA, 19 nt, Artificial Sequence
  Description of Artificial Sequence: Synthetic oligonucleotide
uugcguggcuguucuguuu

SEQ ID NO: 1348481 - RNA, 19 nt, Artificial Sequence
  Description of Artificial Sequence: Synthetic oligonucleotide
cuggcccacggccugccac

SEQ ID NO: 1348482 - RNA, 19 nt, Artificial Sequence
  Description of Artificial Sequence: Synthetic oligonucleotide
caaggguguugugccgggg

SEQ ID NO: 1348483 - RNA, 19 nt, Artificial Sequence
  Description of Artificial Sequence: Synthetic oligonucleotide
aagccgccguguacaagug

SEQ ID NO: 1348484 - RNA, 19 nt, Artificial Sequence
  Description of Artificial Sequence: Synthetic oligonucleotide
ugcuacccaggcagauauc

SEQ ID NO: 1348485 - RNA, 19 nt, Artificial Sequence
  Description of Artificial Sequence: Synthetic oligonucleotide
ccucacccaaguaguagac

SEQ ID NO: 1348486 - RNA, 19 nt, Artificial Sequence
  Description of Artificial Sequence: Synthetic oligonucleotide
guauauccacagagcugug

SEQ ID NO: 1348487 - RNA, 19 nt, Artificial Sequence
  Description of Artificial Sequence: Synthetic oligonucleotide
caaagccgccguguacaag

SEQ ID NO: 1348488 - RNA, 19 nt, Artificial Sequence
  Description of Artificial Sequence: Synthetic oligonucleotide
uaaccucagaguggcugua

SEQ ID NO: 1348489 - RNA, 19 nt, Artificial Sequence
  Description of Artificial Sequence: Synthetic oligonucleotide
cugcauacucgggagcaca

SEQ ID NO: 1348490 - RNA, 19 nt, Artificial Sequence
  Description of Artificial Sequence: Synthetic oligonucleotide
gucugcaccaagggaacaa

SEQ ID NO: 1348491 - RNA, 19 nt, Artificial Sequence
  Description of Artificial Sequence: Synthetic oligonucleotide
agccgccguguacaaguga

SEQ ID NO: 1348492 - RNA, 19 nt, Artificial Sequence
  Description of Artificial Sequence: Synthetic oligonucleotide
guguccggguagaaaguca

SEQ ID NO: 1348493 - RNA, 19 nt, Artificial Sequence
  Description of Artificial Sequence: Synthetic oligonucleotide
ccgccugcaugugagacag

SEQ ID NO: 1348494 - RNA, 19 nt, Artificial Sequence
  Description of Artificial Sequence: Synthetic oligonucleotide
uguggacauccaggucagc

SEQ ID NO: 1348495 - RNA, 19 nt, Artificial Sequence
  Description of Artificial Sequence: Synthetic oligonucleotide
guugugccggggugcugug

SEQ ID NO: 1348496 - RNA, 19 nt, Artificial Sequence
  Description of Artificial Sequence: Synthetic oligonucleotide
ggcagauauccagggcucc

SEQ ID NO: 1348497 - RNA, 19 nt, Artificial Sequence
  Description of Artificial Sequence: Synthetic oligonucleotide
gguguccggguagaaaguc

SEQ ID NO: 1348498 - RNA, 19 nt, Artificial Sequence
  Description of Artificial Sequence: Synthetic oligonucleotide
gggguagcgccugacuagc

SEQ ID NO: 1348499 - RNA, 19 nt, Artificial Sequence
  Description of Artificial Sequence: Synthetic oligonucleotide
gucaccaaagccgccgugu

SEQ ID NO: 1348500 - RNA, 19 nt, Artificial Sequence
  Description of Artificial Sequence: Synthetic oligonucleotide
ggagccaccggacaccccu

SEQ ID NO: 1348501 - RNA, 19 nt, Artificial Sequence
  Description of Artificial Sequence: Synthetic oligonucleotide
gccgccguguacaagugac

SEQ ID NO: 1348502 - RNA, 19 nt, Artificial Sequence
  Description of Artificial Sequence: Synthetic oligonucleotide
cggucaagaugauuccuug

SEQ ID NO: 1348503 - RNA, 19 nt, Artificial Sequence
  Description of Artificial Sequence: Synthetic oligonucleotide
guccggguagaaagucagc

SEQ ID NO: 1348504 - RNA, 19 nt, Artificial Sequence
  Description of Artificial Sequence: Synthetic oligonucleotide
gcaugcuuuagcacaaacu

SEQ ID NO: 1348505 - RNA, 19 nt, Artificial Sequence
  Description of Artificial Sequence: Synthetic oligonucleotide
caggcgcaggaucucagua

SEQ ID NO: 1348506 - RNA, 19 nt, Artificial Sequence
  Description of Artificial Sequence: Synthetic oligonucleotide
ggguguugugccggggugc

SEQ ID NO: 1348507 - RNA, 19 nt, Artificial Sequence
  Description of Artificial Sequence: Synthetic oligonucleotide
guguggaacaagacaugcu

SEQ ID NO: 1348508 - RNA, 19 nt, Artificial Sequence
  Description of Artificial Sequence: Synthetic oligonucleotide
gacucagcuucgugagggu

SEQ ID NO: 1348509 - RNA, 19 nt, Artificial Sequence
  Description of Artificial Sequence: Synthetic oligonucleotide
ggaucucaguaaccucaga

SEQ ID NO: 1348510 - RNA, 19 nt, Artificial Sequence
  Description of Artificial Sequence: Synthetic oligonucleotide
cugcacgagguugcuccac

SEQ ID NO: 1348511 - RNA, 19 nt, Artificial Sequence
  Description of Artificial Sequence: Synthetic oligonucleotide
caccggacaccccugugua

SEQ ID NO: 1348512 - RNA, 19 nt, Artificial Sequence
  Description of Artificial Sequence: Synthetic oligonucleotide
ccaaaugaacuaaucucau

SEQ ID NO: 1348513 - RNA, 19 nt, Artificial Sequence
  Description of Artificial Sequence: Synthetic oligonucleotide
gagccaccggacaccccug

SEQ ID NO: 1348514 - RNA, 19 nt, Artificial Sequence
  Description of Artificial Sequence: Synthetic oligonucleotide
cuaccgccugcaugugaga

SEQ ID NO: 1348515 - RNA, 19 nt, Artificial Sequence
  Description of Artificial Sequence: Synthetic oligonucleotide
ugacgagggcauggauguc

SEQ ID NO: 1348516 - RNA, 19 nt, Artificial Sequence
  Description of Artificial Sequence: Synthetic oligonucleotide
gucgucccacaccaagggu

SEQ ID NO: 1348517 - RNA, 19 nt, Artificial Sequence
  Description of Artificial Sequence: Synthetic oligonucleotide
uggcuaccgccugcaugug

SEQ ID NO: 1348518 - RNA, 19 nt, Artificial Sequence
  Description of Artificial Sequence: Synthetic oligonucleotide
ccguguacaagugacugua

SEQ ID NO: 1348519 - RNA, 19 nt, Artificial Sequence
  Description of Artificial Sequence: Synthetic oligonucleotide
cguagcaugucgucccaca

SEQ ID NO: 1348520 - RNA, 19 nt, Artificial Sequence
  Description of Artificial Sequence: Synthetic oligonucleotide
caguugaggcaccccagau

SEQ ID NO: 1348521 - RNA, 19 nt, Artificial Sequence
  Description of Artificial Sequence: Synthetic oligonucleotide
ggcuaccgccugcauguga

SEQ ID NO: 1348522 - RNA, 19 nt, Artificial Sequence
  Description of Artificial Sequence: Synthetic oligonucleotide
gcugcauacucgggagcac

SEQ ID NO: 1348523 - RNA, 19 nt, Artificial Sequence
  Description of Artificial Sequence: Synthetic oligonucleotide
aggaggccauuugcaccca

SEQ ID NO: 1348524 - RNA, 19 nt, Artificial Sequence
  Description of Artificial Sequence: Synthetic oligonucleotide
gcgcaggaucucaguaacc

SEQ ID NO: 1348525 - RNA, 19 nt, Artificial Sequence
  Description of Artificial Sequence: Synthetic oligonucleotide
gugccggggugcugugaca

SEQ ID NO: 1348526 - RNA, 19 nt, Artificial Sequence
  Description of Artificial Sequence: Synthetic oligonucleotide
ccguggggcggcugccucg

SEQ ID NO: 1348527 - RNA, 19 nt, Artificial Sequence
  Description of Artificial Sequence: Synthetic oligonucleotide
ggugcuacccaggcagaua

SEQ ID NO: 1348528 - RNA, 19 nt, Artificial Sequence
  Description of Artificial Sequence: Synthetic oligonucleotide
ugagugccucgggcuguau

SEQ ID NO: 1348529 - RNA, 19 nt, Artificial Sequence
  Description of Artificial Sequence: Synthetic oligonucleotide
gcgaugguaggggcugaac

SEQ ID NO: 1348530 - RNA, 19 nt, Artificial Sequence
  Description of Artificial Sequence: Synthetic oligonucleotide
ggguagcgccugacuagcc

SEQ ID NO: 1348531 - RNA, 19 nt, Artificial Sequence
  Description of Artificial Sequence: Synthetic oligonucleotide
gccggggugcugugacacc

SEQ ID NO: 1348532 - RNA, 19 nt, Artificial Sequence
  Description of Artificial Sequence: Synthetic oligonucleotide
ccaccaguugaggcacccc

SEQ ID NO: 1348533 - RNA, 19 nt, Artificial Sequence
  Description of Artificial Sequence: Synthetic oligonucleotide
gguguugugccggggugcu

SEQ ID NO: 1348534 - RNA, 19 nt, Artificial Sequence
  Description of Artificial Sequence: Synthetic oligonucleotide
cuggcgggugguggccgug

SEQ ID NO: 1348535 - RNA, 19 nt, Artificial Sequence
  Description of Artificial Sequence: Synthetic oligonucleotide
ggugacccucauagggaaa

SEQ ID NO: 1348536 - RNA, 19 nt, Artificial Sequence
  Description of Artificial Sequence: Synthetic oligonucleotide
ggauucccacagggagcag

SEQ ID NO: 1348537 - RNA, 19 nt, Artificial Sequence
  Description of Artificial Sequence: Synthetic oligonucleotide
cugcaugcuuuagcacaaa

SEQ ID NO: 1348538 - RNA, 19 nt, Artificial Sequence
  Description of Artificial Sequence: Synthetic oligonucleotide
gcacgagguugcuccaccu

SEQ ID NO: 1348539 - RNA, 19 nt, Artificial Sequence
  Description of Artificial Sequence: Synthetic oligonucleotide
ccaaagccgccguguacaa

SEQ ID NO: 1348540 - RNA, 19 nt, Artificial Sequence
  Description of Artificial Sequence: Synthetic oligonucleotide
ccacaccaaggguguugug

SEQ ID NO: 1348541 - RNA, 19 nt, Artificial Sequence
  Description of Artificial Sequence: Synthetic oligonucleotide
cgucgucaccaaagccgcc

SEQ ID NO: 1348542 - RNA, 19 nt, Artificial Sequence
  Description of Artificial Sequence: Synthetic oligonucleotide
ccggggugcugugacacca

SEQ ID NO: 1348543 - RNA, 19 nt, Artificial Sequence
  Description of Artificial Sequence: Synthetic oligonucleotide
cuacgguguccggguagaa

SEQ ID NO: 1348544 - RNA, 19 nt, Artificial Sequence
  Description of Artificial Sequence: Synthetic oligonucleotide
caguaaccucagaguggcu

SEQ ID NO: 1348545 - RNA, 19 nt, Artificial Sequence
  Description of Artificial Sequence: Synthetic oligonucleotide
gccggucaagaugauuccu

SEQ ID NO: 1348546 - RNA, 19 nt, Artificial Sequence
  Description of Artificial Sequence: Synthetic oligonucleotide
cgucaccaaagccgccgug

SEQ ID NO: 1348547 - RNA, 19 nt, Artificial Sequence
  Description of Artificial Sequence: Synthetic oligonucleotide
ccugcagucgcugcauacu

SEQ ID NO: 1348548 - RNA, 19 nt, Artificial Sequence
  Description of Artificial Sequence: Synthetic oligonucleotide
cugagugccucgggcugua

SEQ ID NO: 1348549 - RNA, 19 nt, Artificial Sequence
  Description of Artificial Sequence: Synthetic oligonucleotide
cccuguguagcuccagaau

SEQ ID NO: 1348550 - RNA, 19 nt, Artificial Sequence
  Description of Artificial Sequence: Synthetic oligonucleotide
ccguagcaugucgucccac

SEQ ID NO: 1348551 - RNA, 19 nt, Artificial Sequence
  Description of Artificial Sequence: Synthetic oligonucleotide
ggaucauaacugggugaau

SEQ ID NO: 1348552 - RNA, 19 nt, Artificial Sequence
  Description of Artificial Sequence: Synthetic oligonucleotide
cugccucgcccagguccug

SEQ ID NO: 1348553 - RNA, 19 nt, Artificial Sequence
  Description of Artificial Sequence: Synthetic oligonucleotide
ccaugguuuccaggcuuga

SEQ ID NO: 1348554 - RNA, 19 nt, Artificial Sequence
  Description of Artificial Sequence: Synthetic oligonucleotide
cccacaccaaggguguugu

SEQ ID NO: 1348555 - RNA, 19 nt, Artificial Sequence
  Description of Artificial Sequence: Synthetic oligonucleotide
gcguggcuguucuguuucu

SEQ ID NO: 1348556 - RNA, 19 nt, Artificial Sequence
  Description of Artificial Sequence: Synthetic oligonucleotide
ggcaggaaucugggugcua

SEQ ID NO: 1348557 - RNA, 19 nt, Artificial Sequence
  Description of Artificial Sequence: Synthetic oligonucleotide
cccaaguaguagaccucau

SEQ ID NO: 1348558 - RNA, 19 nt, Artificial Sequence
  Description of Artificial Sequence: Synthetic oligonucleotide
gcauacucgggagcacauu

SEQ ID NO: 1348559 - RNA, 19 nt, Artificial Sequence
  Description of Artificial Sequence: Synthetic oligonucleotide
ccgccguguacaagugacu

SEQ ID NO: 1348560 - RNA, 19 nt, Artificial Sequence
  Description of Artificial Sequence: Synthetic oligonucleotide
cgaaaccuuugguggugcu

SEQ ID NO: 1348561 - RNA, 19 nt, Artificial Sequence
  Description of Artificial Sequence: Synthetic oligonucleotide
gcgccugacuagccccugu

SEQ ID NO: 1348562 - RNA, 19 nt, Artificial Sequence
  Description of Artificial Sequence: Synthetic oligonucleotide
cgagguugcuccaccuguu

SEQ ID NO: 1348563 - RNA, 19 nt, Artificial Sequence
  Description of Artificial Sequence: Synthetic oligonucleotide
uaauauaucgaucauaggc

SEQ ID NO: 1348564 - RNA, 19 nt, Artificial Sequence
  Description of Artificial Sequence: Synthetic oligonucleotide
uuuaauauaucgaucauag

SEQ ID NO: 1348565 - RNA, 19 nt, Artificial Sequence
  Description of Artificial Sequence: Synthetic oligonucleotide
uuuacaauugaauacauga

SEQ ID NO: 1348566 - RNA, 19 nt, Artificial Sequence
  Description of Artificial Sequence: Synthetic oligonucleotide
uucacauugauaaagacca

SEQ ID NO: 1348567 - RNA, 19 nt, Artificial Sequence
  Description of Artificial Sequence: Synthetic oligonucleotide
acauaacuuacauaaagcc

SEQ ID NO: 1348568 - RNA, 19 nt, Artificial Sequence
  Description of Artificial Sequence: Synthetic oligonucleotide
aaauauuccccagaguugc

SEQ ID NO: 1348569 - RNA, 19 nt, Artificial Sequence
  Description of Artificial Sequence: Synthetic oligonucleotide
aagcccauuauauaacagc

SEQ ID NO: 1348570 - RNA, 19 nt, Artificial Sequence
  Description of Artificial Sequence: Synthetic oligonucleotide
uuauauaacagccuaacau

SEQ ID NO: 1348571 - RNA, 19 nt, Artificial Sequence
  Description of Artificial Sequence: Synthetic oligonucleotide
aaugcaaauauugacaagu

SEQ ID NO: 1348572 - RNA, 19 nt, Artificial Sequence
  Description of Artificial Sequence: Synthetic oligonucleotide
ucuguugaucccaugaccg

SEQ ID NO: 1348573 - RNA, 19 nt, Artificial Sequence
  Description of Artificial Sequence: Synthetic oligonucleotide
aauacaugaacagaauauc

SEQ ID NO: 1348574 - RNA, 19 nt, Artificial Sequence
  Description of Artificial Sequence: Synthetic oligonucleotide
cacauuaucauuuacagca

SEQ ID NO: 1348575 - RNA, 19 nt, Artificial Sequence
  Description of Artificial Sequence: Synthetic oligonucleotide
aauaguguucuucccauag

SEQ ID NO: 1348576 - RNA, 19 nt, Artificial Sequence
  Description of Artificial Sequence: Synthetic oligonucleotide
ucguaaagcuuucaggucg

SEQ ID NO: 1348577 - RNA, 19 nt, Artificial Sequence
  Description of Artificial Sequence: Synthetic oligonucleotide
ucuagaacggggcuuaggg

SEQ ID NO: 1348578 - RNA, 19 nt, Artificial Sequence
  Description of Artificial Sequence: Synthetic oligonucleotide
ucgaucauaggcaauagug

SEQ ID NO: 1348579 - RNA, 19 nt, Artificial Sequence
  Description of Artificial Sequence: Synthetic oligonucleotide
agauuggucccauaaacac

SEQ ID NO: 1348580 - RNA, 19 nt, Artificial Sequence
  Description of Artificial Sequence: Synthetic oligonucleotide
ucauuuacagcaauauuac

SEQ ID NO: 1348581 - RNA, 19 nt, Artificial Sequence
  Description of Artificial Sequence: Synthetic oligonucleotide
uuacaugguaaauuaacug

SEQ ID NO: 1348582 - RNA, 19 nt, Artificial Sequence
  Description of Artificial Sequence: Synthetic oligonucleotide
aacacuacauaacuuacau

SEQ ID NO: 1348583 - RNA, 19 nt, Artificial Sequence
  Description of Artificial Sequence: Synthetic oligonucleotide
uuacagcaauauuacaugg

SEQ ID NO: 1348584 - RNA, 19 nt, Artificial Sequence
  Description of Artificial Sequence: Synthetic oligonucleotide
ucaucaguuaccuguaaag

SEQ ID NO: 1348585 - RNA, 19 nt, Artificial Sequence
  Description of Artificial Sequence: Synthetic oligonucleotide
uuuaacucauggcagagaa

SEQ ID NO: 1348586 - RNA, 19 nt, Artificial Sequence
  Description of Artificial Sequence: Synthetic oligonucleotide
aaacucguccuccacuugg

SEQ ID NO: 1348587 - RNA, 19 nt, Artificial Sequence
  Description of Artificial Sequence: Synthetic oligonucleotide
uuauuuagcuucauuuaca

SEQ ID NO: 1348588 - RNA, 19 nt, Artificial Sequence
  Description of Artificial Sequence: Synthetic oligonucleotide
uuugaaucagaacuuccug

SEQ ID NO: 1348589 - RNA, 19 nt, Artificial Sequence
  Description of Artificial Sequence: Synthetic oligonucleotide
agucguaaagcuuucaggu

SEQ ID NO: 1348590 - RNA, 19 nt, Artificial Sequence
  Description of Artificial Sequence: Synthetic oligonucleotide
uugauaaagaccagaaaau

SEQ ID NO: 1348591 - RNA, 19 nt, Artificial Sequence
  Description of Artificial Sequence: Synthetic oligonucleotide
cacuacauaacuuacauaa

SEQ ID NO: 1348592 - RNA, 19 nt, Artificial Sequence
  Description of Artificial Sequence: Synthetic oligonucleotide
aguuugaucuguugauccc

SEQ ID NO: 1348593 - RNA, 19 nt, Artificial Sequence
  Description of Artificial Sequence: Synthetic oligonucleotide
augguaaauuaacugauca

SEQ ID NO: 1348594 - RNA, 19 nt, Artificial Sequence
  Description of Artificial Sequence: Synthetic oligonucleotide
uguaacacucaccauacau

SEQ ID NO: 1348595 - RNA, 19 nt, Artificial Sequence
  Description of Artificial Sequence: Synthetic oligonucleotide
uuaauauaucgaucauagg

SEQ ID NO: 1348596 - RNA, 19 nt, Artificial Sequence
  Description of Artificial Sequence: Synthetic oligonucleotide
uacaugucuaacuuuggug

SEQ ID NO: 1348597 - RNA, 19 nt, Artificial Sequence
  Description of Artificial Sequence: Synthetic oligonucleotide
gagucguaaagcuuucagg

SEQ ID NO: 1348598 - RNA, 19 nt, Artificial Sequence
  Description of Artificial Sequence: Synthetic oligonucleotide
uguguaacacucaccauac

SEQ ID NO: 1348599 - RNA, 19 nt, Artificial Sequence
  Description of Artificial Sequence: Synthetic oligonucleotide
uaacucauggcagagaagu

SEQ ID NO: 1348600 - RNA, 19 nt, Artificial Sequence
  Description of Artificial Sequence: Synthetic oligonucleotide
ucauuuaugagaagcuuuc

SEQ ID NO: 1348601 - RNA, 19 nt, Artificial Sequence
  Description of Artificial Sequence: Synthetic oligonucleotide
uccaaauuaacacuacaua

SEQ ID NO: 1348602 - RNA, 19 nt, Artificial Sequence
  Description of Artificial Sequence: Synthetic oligonucleotide
cuagauuggucccauaaac

SEQ ID NO: 1348603 - RNA, 19 nt, Artificial Sequence
  Description of Artificial Sequence: Synthetic oligonucleotide
agaacaucuagaacggggc

SEQ ID NO: 1348604 - RNA, 19 nt, Artificial Sequence
  Description of Artificial Sequence: Synthetic oligonucleotide
acaugaacagaauaucugu

SEQ ID NO: 1348605 - RNA, 19 nt, Artificial Sequence
  Description of Artificial Sequence: Synthetic oligonucleotide
acaugguuaaaauccacug

SEQ ID NO: 1348606 - RNA, 19 nt, Artificial Sequence
  Description of Artificial Sequence: Synthetic oligonucleotide
aaguuauccugugaacucg

SEQ ID NO: 1348607 - RNA, 19 nt, Artificial Sequence
  Description of Artificial Sequence: Synthetic oligonucleotide
uuacaauugaauacaugaa

SEQ ID NO: 1348608 - RNA, 19 nt, Artificial Sequence
  Description of Artificial Sequence: Synthetic oligonucleotide
cuaagauacuaccucacac

SEQ ID NO: 1348609 - RNA, 19 nt, Artificial Sequence
  Description of Artificial Sequence: Synthetic oligonucleotide
uccaaaucaaacucguccu

SEQ ID NO: 1348610 - RNA, 19 nt, Artificial Sequence
  Description of Artificial Sequence: Synthetic oligonucleotide
cuguaugagagaaaacuac

SEQ ID NO: 1348611 - RNA, 19 nt, Artificial Sequence
  Description of Artificial Sequence: Synthetic oligonucleotide
uucucaucaagacacuuuc

SEQ ID NO: 1348612 - RNA, 19 nt, Artificial Sequence
  Description of Artificial Sequence: Synthetic oligonucleotide
auaaacacaugguuaaaau

SEQ ID NO: 1348613 - RNA, 19 nt, Artificial Sequence
  Description of Artificial Sequence: Synthetic oligonucleotide
uauuuagcuucauuuacaa

SEQ ID NO: 1348614 - RNA, 19 nt, Artificial Sequence
  Description of Artificial Sequence: Synthetic oligonucleotide
uaacacucaccauacauaa

SEQ ID NO: 1348615 - RNA, 19 nt, Artificial Sequence
  Description of Artificial Sequence: Synthetic oligonucleotide
acgacuauacuucuuaaau

SEQ ID NO: 1348616 - RNA, 19 nt, Artificial Sequence
  Description of Artificial Sequence: Synthetic oligonucleotide
cacacacuaagauacuacc

SEQ ID NO: 1348617 - RNA, 19 nt, Artificial Sequence
  Description of Artificial Sequence: Synthetic oligonucleotide
caugguuaaaauccacugc

SEQ ID NO: 1348618 - RNA, 19 nt, Artificial Sequence
  Description of Artificial Sequence: Synthetic oligonucleotide
ucuguaugagagaaaacua

SEQ ID NO: 1348619 - RNA, 19 nt, Artificial Sequence
  Description of Artificial Sequence: Synthetic oligonucleotide
aagauacuaccucacacua

SEQ ID NO: 1348620 - RNA, 19 nt, Artificial Sequence
  Description of Artificial Sequence: Synthetic oligonucleotide
uagugcuauuccaagcucc

SEQ ID NO: 1348621 - RNA, 19 nt, Artificial Sequence
  Description of Artificial Sequence: Synthetic oligonucleotide
auaaagcccauuauauaac

SEQ ID NO: 1348622 - RNA, 19 nt, Artificial Sequence
  Description of Artificial Sequence: Synthetic oligonucleotide
gauggauuccagguugucg

SEQ ID NO: 1348623 - RNA, 19 nt, Artificial Sequence
  Description of Artificial Sequence: Synthetic oligonucleotide
aaucucuuuguuaacucug

SEQ ID NO: 1348624 - RNA, 19 nt, Artificial Sequence
  Description of Artificial Sequence: Synthetic oligonucleotide
ugaccgacgacuauacuuc

SEQ ID NO: 1348625 - RNA, 19 nt, Artificial Sequence
  Description of Artificial Sequence: Synthetic oligonucleotide
caaauauuccccagaguug

SEQ ID NO: 1348626 - RNA, 19 nt, Artificial Sequence
  Description of Artificial Sequence: Synthetic oligonucleotide
uucucuuguaucuugcaau

SEQ ID NO: 1348627 - RNA, 19 nt, Artificial Sequence
  Description of Artificial Sequence: Synthetic oligonucleotide
uuaaauuuguugggagucc

SEQ ID NO: 1348628 - RNA, 19 nt, Artificial Sequence
  Description of Artificial Sequence: Synthetic oligonucleotide
agacacuuucaucugucuc

SEQ ID NO: 1348629 - RNA, 19 nt, Artificial Sequence
  Description of Artificial Sequence: Synthetic oligonucleotide
auuacaugguaaauuaacu

SEQ ID NO: 1348630 - RNA, 19 nt, Artificial Sequence
  Description of Artificial Sequence: Synthetic oligonucleotide
cacacuaagauacuaccuc

SEQ ID NO: 1348631 - RNA, 19 nt, Artificial Sequence
  Description of Artificial Sequence: Synthetic oligonucleotide
gaggacauagacuccuuug

SEQ ID NO: 1348632 - RNA, 19 nt, Artificial Sequence
  Description of Artificial Sequence: Synthetic oligonucleotide
aaauauugacaaguuuaca

SEQ ID NO: 1348633 - RNA, 19 nt, Artificial Sequence
  Description of Artificial Sequence: Synthetic oligonucleotide
agccaaauauuccccagag

SEQ ID NO: 1348634 - RNA, 19 nt, Artificial Sequence
  Description of Artificial Sequence: Synthetic oligonucleotide
cugacugagauuucaucag

SEQ ID NO: 1348635 - RNA, 19 nt, Artificial Sequence
  Description of Artificial Sequence: Synthetic oligonucleotide
uaucuguacacauuaucau

SEQ ID NO: 1348636 - RNA, 19 nt, Artificial Sequence
  Description of Artificial Sequence: Synthetic oligonucleotide
uccaagcuccaaauuaaca

SEQ ID NO: 1348637 - RNA, 19 nt, Artificial Sequence
  Description of Artificial Sequence: Synthetic oligonucleotide
caauucucagagcacacac

SEQ ID NO: 1348638 - RNA, 19 nt, Artificial Sequence
  Description of Artificial Sequence: Synthetic oligonucleotide
ucccauaaacacaugguua

SEQ ID NO: 1348639 - RNA, 19 nt, Artificial Sequence
  Description of Artificial Sequence: Synthetic oligonucleotide
ggaccucuuuaauauaucg

SEQ ID NO: 1348640 - RNA, 19 nt, Artificial Sequence
  Description of Artificial Sequence: Synthetic oligonucleotide
acucgucugggauucagag

SEQ ID NO: 1348641 - RNA, 19 nt, Artificial Sequence
  Description of Artificial Sequence: Synthetic oligonucleotide
ucuagauuggucccauaaa

SEQ ID NO: 1348642 - RNA, 19 nt, Artificial Sequence
  Description of Artificial Sequence: Synthetic oligonucleotide
gauacuaccucacacuagu

SEQ ID NO: 1348643 - RNA, 19 nt, Artificial Sequence
  Description of Artificial Sequence: Synthetic oligonucleotide
acagcaauauuacauggua

SEQ ID NO: 1348644 - RNA, 19 nt, Artificial Sequence
  Description of Artificial Sequence: Synthetic oligonucleotide
guuuucaccggcgucgugg

SEQ ID NO: 1348645 - RNA, 19 nt, Artificial Sequence
  Description of Artificial Sequence: Synthetic oligonucleotide
ugacaaguuuacaauugaa

SEQ ID NO: 1348646 - RNA, 19 nt, Artificial Sequence
  Description of Artificial Sequence: Synthetic oligonucleotide
gacuauacuucuuaaauuu

SEQ ID NO: 1348647 - RNA, 19 nt, Artificial Sequence
  Description of Artificial Sequence: Synthetic oligonucleotide
aggacauagacuccuuuga

SEQ ID NO: 1348648 - RNA, 19 nt, Artificial Sequence
  Description of Artificial Sequence: Synthetic oligonucleotide
ugcuauuccaagcuccaaa

SEQ ID NO: 1348649 - RNA, 19 nt, Artificial Sequence
  Description of Artificial Sequence: Synthetic oligonucleotide
agcauccaaaucaaacucg

SEQ ID NO: 1348650 - RNA, 19 nt, Artificial Sequence
  Description of Artificial Sequence: Synthetic oligonucleotide
augaccgacgacuauacuu

SEQ ID NO: 1348651 - RNA, 19 nt, Artificial Sequence
  Description of Artificial Sequence: Synthetic oligonucleotide
ugguaaauuaacugaucau

SEQ ID NO: 1348652 - RNA, 19 nt, Artificial Sequence
  Description of Artificial Sequence: Synthetic oligonucleotide
ugcaaucucuuuguuaacu

SEQ ID NO: 1348653 - RNA, 19 nt, Artificial Sequence
  Description of Artificial Sequence: Synthetic oligonucleotide
acacuagugcuauuccaag

SEQ ID NO: 1348654 - RNA, 19 nt, Artificial Sequence
  Description of Artificial Sequence: Synthetic oligonucleotide
aacacaugguuaaaaucca

SEQ ID NO: 1348655 - RNA, 19 nt, Artificial Sequence
  Description of Artificial Sequence: Synthetic oligonucleotide
aggucgacggucugcaauc

SEQ ID NO: 1348656 - RNA, 19 nt, Artificial Sequence
  Description of Artificial Sequence: Synthetic oligonucleotide
ucacacuagugcuauucca

SEQ ID NO: 1348657 - RNA, 19 nt, Artificial Sequence
  Description of Artificial Sequence: Synthetic oligonucleotide
cugacucuagauugguccc

SEQ ID NO: 1348658 - RNA, 19 nt, Artificial Sequence
  Description of Artificial Sequence: Synthetic oligonucleotide
ccaagcuccaaauuaacac

SEQ ID NO: 1348659 - RNA, 19 nt, Artificial Sequence
  Description of Artificial Sequence: Synthetic oligonucleotide
gaauacaugaacagaauau

SEQ ID NO: 1348660 - RNA, 19 nt, Artificial Sequence
  Description of Artificial Sequence: Synthetic oligonucleotide
uaaauuuguugggaguccu

SEQ ID NO: 1348661 - RNA, 19 nt, Artificial Sequence
  Description of Artificial Sequence: Synthetic oligonucleotide
ucuaacuuuggugggugug

SEQ ID NO: 1348662 - RNA, 19 nt, Artificial Sequence
  Description of Artificial Sequence: Synthetic oligonucleotide
uauaacagccuaacauuuu

SEQ ID NO: 1348663 - RNA, 19 nt, Artificial Sequence
  Description of Artificial Sequence: Synthetic oligonucleotide
uuagccagccuuccaagau

SEQ ID NO: 1348664 - RNA, 19 nt, Artificial Sequence
  Description of Artificial Sequence: Synthetic oligonucleotide
uucaccggcgucguggcgg

SEQ ID NO: 1348665 - RNA, 19 nt, Artificial Sequence
  Description of Artificial Sequence: Synthetic oligonucleotide
aacuuccugaugaugauuu

SEQ ID NO: 1348666 - RNA, 19 nt, Artificial Sequence
  Description of Artificial Sequence: Synthetic oligonucleotide
ucacauugauaaagaccag

SEQ ID NO: 1348667 - RNA, 19 nt, Artificial Sequence
  Description of Artificial Sequence: Synthetic oligonucleotide
cuagaacggggcuuagggc

SEQ ID NO: 1348668 - RNA, 19 nt, Artificial Sequence
  Description of Artificial Sequence: Synthetic oligonucleotide
cuaacuuuggugggugugc

SEQ ID NO: 1348669 - RNA, 19 nt, Artificial Sequence
  Description of Artificial Sequence: Synthetic oligonucleotide
aaucuggcgcucgcuuucc

SEQ ID NO: 1348670 - RNA, 19 nt, Artificial Sequence
  Description of Artificial Sequence: Synthetic oligonucleotide
ucucaucaagacacuuuca

SEQ ID NO: 1348671 - RNA, 19 nt, Artificial Sequence
  Description of Artificial Sequence: Synthetic oligonucleotide
acucaccauacauaaaaua

SEQ ID NO: 1348672 - RNA, 19 nt, Artificial Sequence
  Description of Artificial Sequence: Synthetic oligonucleotide
ugcuuagccagccuuccaa

SEQ ID NO: 1348673 - RNA, 19 nt, Artificial Sequence
  Description of Artificial Sequence: Synthetic oligonucleotide
acuauacuucuuaaauuug

SEQ ID NO: 1348674 - RNA, 19 nt, Artificial Sequence
  Description of Artificial Sequence: Synthetic oligonucleotide
aucucuuuguuaacucugg

SEQ ID NO: 1348675 - RNA, 19 nt, Artificial Sequence
  Description of Artificial Sequence: Synthetic oligonucleotide
ucuggggaccucuuuaaua

SEQ ID NO: 1348676 - RNA, 19 nt, Artificial Sequence
  Description of Artificial Sequence: Synthetic oligonucleotide
acucauggcagagaagucu

SEQ ID NO: 1348677 - RNA, 19 nt, Artificial Sequence
  Description of Artificial Sequence: Synthetic oligonucleotide
uagccagccuuccaagaug

SEQ ID NO: 1348678 - RNA, 19 nt, Artificial Sequence
  Description of Artificial Sequence: Synthetic oligonucleotide
aaacuacauucacauugau

SEQ ID NO: 1348679 - RNA, 19 nt, Artificial Sequence
  Description of Artificial Sequence: Synthetic oligonucleotide
cuggcgcucgcuuuccucg

SEQ ID NO: 1348680 - RNA, 19 nt, Artificial Sequence
  Description of Artificial Sequence: Synthetic oligonucleotide
uaucgaucauaggcaauag

SEQ ID NO: 1348681 - RNA, 19 nt, Artificial Sequence
  Description of Artificial Sequence: Synthetic oligonucleotide
uuuucaccggcgucguggc

SEQ ID NO: 1348682 - RNA, 19 nt, Artificial Sequence
  Description of Artificial Sequence: Synthetic oligonucleotide
ucucgcaggggaccgcggg

SEQ ID NO: 1348683 - RNA, 19 nt, Artificial Sequence
  Description of Artificial Sequence: Synthetic oligonucleotide
ugucuaacuuuggugggug

SEQ ID NO: 1348684 - RNA, 19 nt, Artificial Sequence
  Description of Artificial Sequence: Synthetic oligonucleotide
ucaugcuuagccagccuuc

SEQ ID NO: 1348685 - RNA, 19 nt, Artificial Sequence
  Description of Artificial Sequence: Synthetic oligonucleotide
uguugggaguccugggaug

SEQ ID NO: 1348686 - RNA, 19 nt, Artificial Sequence
  Description of Artificial Sequence: Synthetic oligonucleotide
accggggugggcuucuagg

SEQ ID NO: 1348687 - RNA, 19 nt, Artificial Sequence
  Description of Artificial Sequence: Synthetic oligonucleotide
auaguguucuucccauagu

SEQ ID NO: 1348688 - RNA, 19 nt, Artificial Sequence
  Description of Artificial Sequence: Synthetic oligonucleotide
uggcaacugaaaucucaag

SEQ ID NO: 1348689 - RNA, 19 nt, Artificial Sequence
  Description of Artificial Sequence: Synthetic oligonucleotide
guugaucccaugaccgacg

SEQ ID NO: 1348690 - RNA, 19 nt, Artificial Sequence
  Description of Artificial Sequence: Synthetic oligonucleotide
ggagucguaaagcuuucag

SEQ ID NO: 1348691 - RNA, 19 nt, Artificial Sequence
  Description of Artificial Sequence: Synthetic oligonucleotide
acaugguaaauuaacugau

SEQ ID NO: 1348692 - RNA, 19 nt, Artificial Sequence
  Description of Artificial Sequence: Synthetic oligonucleotide
aacucauggcagagaaguc

SEQ ID NO: 1348693 - RNA, 19 nt, Artificial Sequence
  Description of Artificial Sequence: Synthetic oligonucleotide
auauaacagccuaacauuu

SEQ ID NO: 1348694 - RNA, 19 nt, Artificial Sequence
  Description of Artificial Sequence: Synthetic oligonucleotide
uaacuuacauaaagcccau

SEQ ID NO: 1348695 - RNA, 19 nt, Artificial Sequence
  Description of Artificial Sequence: Synthetic oligonucleotide
aagcuuucaggucgacggu

SEQ ID NO: 1348696 - RNA, 19 nt, Artificial Sequence
  Description of Artificial Sequence: Synthetic oligonucleotide
uugaucccaugaccgacga

SEQ ID NO: 1348697 - RNA, 19 nt, Artificial Sequence
  Description of Artificial Sequence: Synthetic oligonucleotide
aucgaucauaggcaauagu

SEQ ID NO: 1348698 - RNA, 19 nt, Artificial Sequence
  Description of Artificial Sequence: Synthetic oligonucleotide
cacaagguggcauuuaacu

SEQ ID NO: 1348699 - RNA, 19 nt, Artificial Sequence
  Description of Artificial Sequence: Synthetic oligonucleotide
acacaugguuaaaauccac

SEQ ID NO: 1348700 - RNA, 19 nt, Artificial Sequence
  Description of Artificial Sequence: Synthetic oligonucleotide
cuuugaaucagaacuuccu

SEQ ID NO: 1348701 - RNA, 19 nt, Artificial Sequence
  Description of Artificial Sequence: Synthetic oligonucleotide
uucaggagucguaaagcuu

SEQ ID NO: 1348702 - RNA, 19 nt, Artificial Sequence
  Description of Artificial Sequence: Synthetic oligonucleotide
ugcacuugcccagucagaa

SEQ ID NO: 1348703 - RNA, 19 nt, Artificial Sequence
  Description of Artificial Sequence: Synthetic oligonucleotide
gacgacuauacuucuuaaa

SEQ ID NO: 1348704 - RNA, 19 nt, Artificial Sequence
  Description of Artificial Sequence: Synthetic oligonucleotide
accgcggguuuucaccggc

SEQ ID NO: 1348705 - RNA, 19 nt, Artificial Sequence
  Description of Artificial Sequence: Synthetic oligonucleotide
uccugugaacucgucuggg

SEQ ID NO: 1348706 - RNA, 19 nt, Artificial Sequence
  Description of Artificial Sequence: Synthetic oligonucleotide
ugugaacucgucugggauu

SEQ ID NO: 1348707 - RNA, 19 nt, Artificial Sequence
  Description of Artificial Sequence: Synthetic oligonucleotide
uuccggucccuuccguccg

SEQ ID NO: 1348708 - RNA, 19 nt, Artificial Sequence
  Description of Artificial Sequence: Synthetic oligonucleotide
uccaucucgcaggggaccg

SEQ ID NO: 1348709 - RNA, 19 nt, Artificial Sequence
  Description of Artificial Sequence: Synthetic oligonucleotide
uccuuugaaucagaacuuc

SEQ ID NO: 1348710 - RNA, 19 nt, Artificial Sequence
  Description of Artificial Sequence: Synthetic oligonucleotide
guucagagcucuguaugag

SEQ ID NO: 1348711 - RNA, 19 nt, Artificial Sequence
  Description of Artificial Sequence: Synthetic oligonucleotide
cuagugcuauuccaagcuc

SEQ ID NO: 1348712 - RNA, 19 nt, Artificial Sequence
  Description of Artificial Sequence: Synthetic oligonucleotide
gucguaaagcuuucagguc

SEQ ID NO: 1348713 - RNA, 19 nt, Artificial Sequence
  Description of Artificial Sequence: Synthetic oligonucleotide
ugcgcuuccguccgaggcu

SEQ ID NO: 1348714 - RNA, 19 nt, Artificial Sequence
  Description of Artificial Sequence: Synthetic oligonucleotide
cacacuagugcuauuccaa

SEQ ID NO: 1348715 - RNA, 19 nt, Artificial Sequence
  Description of Artificial Sequence: Synthetic oligonucleotide
uuucaggucgacggucugc

SEQ ID NO: 1348716 - RNA, 19 nt, Artificial Sequence
  Description of Artificial Sequence: Synthetic oligonucleotide
acacacuaagauacuaccu

SEQ ID NO: 1348717 - RNA, 19 nt, Artificial Sequence
  Description of Artificial Sequence: Synthetic oligonucleotide
agauacuaccucacacuag

SEQ ID NO: 1348718 - RNA, 19 nt, Artificial Sequence
  Description of Artificial Sequence: Synthetic oligonucleotide
caucaguuaccuguaaaga

SEQ ID NO: 1348719 - RNA, 19 nt, Artificial Sequence
  Description of Artificial Sequence: Synthetic oligonucleotide
ccuuugaaucagaacuucc

SEQ ID NO: 1348720 - RNA, 19 nt, Artificial Sequence
  Description of Artificial Sequence: Synthetic oligonucleotide
caugcuuagccagccuucc

SEQ ID NO: 1348721 - RNA, 19 nt, Artificial Sequence
  Description of Artificial Sequence: Synthetic oligonucleotide
cucuagauuggucccauaa

SEQ ID NO: 1348722 - RNA, 19 nt, Artificial Sequence
  Description of Artificial Sequence: Synthetic oligonucleotide
uaggucugcaggccauggc

SEQ ID NO: 1348723 - RNA, 19 nt, Artificial Sequence
  Description of Artificial Sequence: Synthetic oligonucleotide
auuuaacucauggcagaga

SEQ ID NO: 1348724 - RNA, 19 nt, Artificial Sequence
  Description of Artificial Sequence: Synthetic oligonucleotide
cacauugauaaagaccaga

SEQ ID NO: 1348725 - RNA, 19 nt, Artificial Sequence
  Description of Artificial Sequence: Synthetic oligonucleotide
ugcaaucuggcgcucgcuu

SEQ ID NO: 1348726 - RNA, 19 nt, Artificial Sequence
  Description of Artificial Sequence: Synthetic oligonucleotide
ccugacugagauuucauca

SEQ ID NO: 1348727 - RNA, 19 nt, Artificial Sequence
  Description of Artificial Sequence: Synthetic oligonucleotide
cauugauaaagaccagaaa

SEQ ID NO: 1348728 - RNA, 19 nt, Artificial Sequence
  Description of Artificial Sequence: Synthetic oligonucleotide
gguuaaaauccacugccaa

SEQ ID NO: 1348729 - RNA, 19 nt, Artificial Sequence
  Description of Artificial Sequence: Synthetic oligonucleotide
guaacacucaccauacaua

SEQ ID NO: 1348730 - RNA, 19 nt, Artificial Sequence
  Description of Artificial Sequence: Synthetic oligonucleotide
cuuguaucuugcaaucucu

SEQ ID NO: 1348731 - RNA, 19 nt, Artificial Sequence
  Description of Artificial Sequence: Synthetic oligonucleotide
guuaaacaagcauccaaau

SEQ ID NO: 1348732 - RNA, 19 nt, Artificial Sequence
  Description of Artificial Sequence: Synthetic oligonucleotide
cugcgcuuccguccgaggc

SEQ ID NO: 1348733 - RNA, 19 nt, Artificial Sequence
  Description of Artificial Sequence: Synthetic oligonucleotide
cauccaaaucaaacucguc

SEQ ID NO: 1348734 - RNA, 19 nt, Artificial Sequence
  Description of Artificial Sequence: Synthetic oligonucleotide
aucuagaacggggcuuagg

SEQ ID NO: 1348735 - RNA, 19 nt, Artificial Sequence
  Description of Artificial Sequence: Synthetic oligonucleotide
cuccaaauuaacacuacau

SEQ ID NO: 1348736 - RNA, 19 nt, Artificial Sequence
  Description of Artificial Sequence: Synthetic oligonucleotide
gucguggcggcucccauac

SEQ ID NO: 1348737 - RNA, 19 nt, Artificial Sequence
  Description of Artificial Sequence: Synthetic oligonucleotide
acacuacauaacuuacaua

SEQ ID NO: 1348738 - RNA, 19 nt, Artificial Sequence
  Description of Artificial Sequence: Synthetic oligonucleotide
uuucaccggcgucguggcg

SEQ ID NO: 1348739 - RNA, 19 nt, Artificial Sequence
  Description of Artificial Sequence: Synthetic oligonucleotide
cagcaauauuacaugguaa

SEQ ID NO: 1348740 - RNA, 19 nt, Artificial Sequence
  Description of Artificial Sequence: Synthetic oligonucleotide
ucugcgcuuccguccgagg

SEQ ID NO: 1348741 - RNA, 19 nt, Artificial Sequence
  Description of Artificial Sequence: Synthetic oligonucleotide
ugacucuagauugguccca

SEQ ID NO: 1348742 - RNA, 19 nt, Artificial Sequence
  Description of Artificial Sequence: Synthetic oligonucleotide
gggcuuagggccuucagga

SEQ ID NO: 1348743 - RNA, 19 nt, Artificial Sequence
  Description of Artificial Sequence: Synthetic oligonucleotide
gguaaauuaacugaucauu

SEQ ID NO: 1348744 - RNA, 19 nt, Artificial Sequence
  Description of Artificial Sequence: Synthetic oligonucleotide
ggaccgcggguuuucaccg

SEQ ID NO: 1348745 - RNA, 19 nt, Artificial Sequence
  Description of Artificial Sequence: Synthetic oligonucleotide
cuaggucugcaggccaugg

SEQ ID NO: 1348746 - RNA, 19 nt, Artificial Sequence
  Description of Artificial Sequence: Synthetic oligonucleotide
uggcggcucccauaccggg

SEQ ID NO: 1348747 - RNA, 19 nt, Artificial Sequence
  Description of Artificial Sequence: Synthetic oligonucleotide
agugcuauuccaagcucca

SEQ ID NO: 1348748 - RNA, 19 nt, Artificial Sequence
  Description of Artificial Sequence: Synthetic oligonucleotide
caaucuggcgcucgcuuuc

SEQ ID NO: 1348749 - RNA, 19 nt, Artificial Sequence
  Description of Artificial Sequence: Synthetic oligonucleotide
cacaugguuaaaauccacu

SEQ ID NO: 1348750 - RNA, 19 nt, Artificial Sequence
  Description of Artificial Sequence: Synthetic oligonucleotide
augucuaacuuuggugggu

SEQ ID NO: 1348751 - RNA, 19 nt, Artificial Sequence
  Description of Artificial Sequence: Synthetic oligonucleotide
cagagcacacacuaagaua

SEQ ID NO: 1348752 - RNA, 19 nt, Artificial Sequence
  Description of Artificial Sequence: Synthetic oligonucleotide
aacucgucugggauucaga

SEQ ID NO: 1348753 - RNA, 19 nt, Artificial Sequence
  Description of Artificial Sequence: Synthetic oligonucleotide
ucaaguuauuuagcuucau

SEQ ID NO: 1348754 - RNA, 19 nt, Artificial Sequence
  Description of Artificial Sequence: Synthetic oligonucleotide
ugccugacugagauuucau

SEQ ID NO: 1348755 - RNA, 19 nt, Artificial Sequence
  Description of Artificial Sequence: Synthetic oligonucleotide
aguuauccugugaacucgu

SEQ ID NO: 1348756 - RNA, 19 nt, Artificial Sequence
  Description of Artificial Sequence: Synthetic oligonucleotide
gcuuagccagccuuccaag

SEQ ID NO: 1348757 - RNA, 19 nt, Artificial Sequence
  Description of Artificial Sequence: Synthetic oligonucleotide
gggaccgcggguuuucacc

SEQ ID NO: 1348758 - RNA, 19 nt, Artificial Sequence
  Description of Artificial Sequence: Synthetic oligonucleotide
uccguccgaggcuccaucu

SEQ ID NO: 1348759 - RNA, 19 nt, Artificial Sequence
  Description of Artificial Sequence: Synthetic oligonucleotide
caucucgcaggggaccgcg

SEQ ID NO: 1348760 - RNA, 19 nt, Artificial Sequence
  Description of Artificial Sequence: Synthetic oligonucleotide
uggcgcucgcuuuccucgg

SEQ ID NO: 1348761 - RNA, 19 nt, Artificial Sequence
  Description of Artificial Sequence: Synthetic oligonucleotide
cuacaugucuaacuuuggu

SEQ ID NO: 1348762 - RNA, 19 nt, Artificial Sequence
  Description of Artificial Sequence: Synthetic oligonucleotide
uaccggggugggcuucuag

SEQ ID NO: 1348763 - RNA, 19 nt, Artificial Sequence
  Description of Artificial Sequence: Synthetic oligonucleotide
cuucuaggucugcaggcca

SEQ ID NO: 1348764 - RNA, 19 nt, Artificial Sequence
  Description of Artificial Sequence: Synthetic oligonucleotide
gucccauaaacacaugguu

SEQ ID NO: 1348765 - RNA, 19 nt, Artificial Sequence
  Description of Artificial Sequence: Synthetic oligonucleotide
gaccgcggguuuucaccgg

SEQ ID NO: 1348766 - RNA, 19 nt, Artificial Sequence
  Description of Artificial Sequence: Synthetic oligonucleotide
augcaaauauugacaaguu

SEQ ID NO: 1348767 - RNA, 19 nt, Artificial Sequence
  Description of Artificial Sequence: Synthetic oligonucleotide
uccgcucugcgcuuccguc

SEQ ID NO: 1348768 - RNA, 19 nt, Artificial Sequence
  Description of Artificial Sequence: Synthetic oligonucleotide
ugaucccaugaccgacgac

SEQ ID NO: 1348769 - RNA, 19 nt, Artificial Sequence
  Description of Artificial Sequence: Synthetic oligonucleotide
gucauuuaugagaagcuuu

SEQ ID NO: 1348770 - RNA, 19 nt, Artificial Sequence
  Description of Artificial Sequence: Synthetic oligonucleotide
auacuaccucacacuagug

SEQ ID NO: 1348771 - RNA, 19 nt, Artificial Sequence
  Description of Artificial Sequence: Synthetic oligonucleotide
caggagucguaaagcuuuc

SEQ ID NO: 1348772 - RNA, 19 nt, Artificial Sequence
  Description of Artificial Sequence: Synthetic oligonucleotide
uuccguccgaggcuccauc

SEQ ID NO: 1348773 - RNA, 19 nt, Artificial Sequence
  Description of Artificial Sequence: Synthetic oligonucleotide
ccaugaccgacgacuauac

SEQ ID NO: 1348774 - RNA, 19 nt, Artificial Sequence
  Description of Artificial Sequence: Synthetic oligonucleotide
ucaccggcgucguggcggc

SEQ ID NO: 1348775 - RNA, 19 nt, Artificial Sequence
  Description of Artificial Sequence: Synthetic oligonucleotide
aacuuacauaaagcccauu

SEQ ID NO: 1348776 - RNA, 19 nt, Artificial Sequence
  Description of Artificial Sequence: Synthetic oligonucleotide
uggggaccucuuuaauaua

SEQ ID NO: 1348777 - RNA, 19 nt, Artificial Sequence
  Description of Artificial Sequence: Synthetic oligonucleotide
gcuucuaggucugcaggcc

SEQ ID NO: 1348778 - RNA, 19 nt, Artificial Sequence
  Description of Artificial Sequence: Synthetic oligonucleotide
gcagucuacaugucuaacu

SEQ ID NO: 1348779 - RNA, 19 nt, Artificial Sequence
  Description of Artificial Sequence: Synthetic oligonucleotide
cagucuacaugucuaacuu

SEQ ID NO: 1348780 - RNA, 19 nt, Artificial Sequence
  Description of Artificial Sequence: Synthetic oligonucleotide
guggcggcucccauaccgg

SEQ ID NO: 1348781 - RNA, 19 nt, Artificial Sequence
  Description of Artificial Sequence: Synthetic oligonucleotide
ucccaugaccgacgacuau

SEQ ID NO: 1348782 - RNA, 19 nt, Artificial Sequence
  Description of Artificial Sequence: Synthetic oligonucleotide
cuugcccagucagaacauc

SEQ ID NO: 1348783 - RNA, 19 nt, Artificial Sequence
  Description of Artificial Sequence: Synthetic oligonucleotide
gcuauuccaagcuccaaau

SEQ ID NO: 1348784 - RNA, 19 nt, Artificial Sequence
  Description of Artificial Sequence: Synthetic oligonucleotide
guugccacaagguggcauu

SEQ ID NO: 1348785 - RNA, 19 nt, Artificial Sequence
  Description of Artificial Sequence: Synthetic oligonucleotide
agacuccuuugaaucagaa

SEQ ID NO: 1348786 - RNA, 19 nt, Artificial Sequence
  Description of Artificial Sequence: Synthetic oligonucleotide
guuauccugugaacucguc

SEQ ID NO: 1348787 - RNA, 19 nt, Artificial Sequence
  Description of Artificial Sequence: Synthetic oligonucleotide
aggagucguaaagcuuuca

SEQ ID NO: 1348788 - RNA, 19 nt, Artificial Sequence
  Description of Artificial Sequence: Synthetic oligonucleotide
guguaacacucaccauaca

SEQ ID NO: 1348789 - RNA, 19 nt, Artificial Sequence
  Description of Artificial Sequence: Synthetic oligonucleotide
gacugagauuucaucaguu

SEQ ID NO: 1348790 - RNA, 19 nt, Artificial Sequence
  Description of Artificial Sequence: Synthetic oligonucleotide
cggguuuucaccggcgucg

SEQ ID NO: 1348791 - RNA, 19 nt, Artificial Sequence
  Description of Artificial Sequence: Synthetic oligonucleotide
aacggggcuuagggccuuc

SEQ ID NO: 1348792 - RNA, 19 nt, Artificial Sequence
  Description of Artificial Sequence: Synthetic oligonucleotide
accggcgucguggcggcuc

SEQ ID NO: 1348793 - RNA, 19 nt, Artificial Sequence
  Description of Artificial Sequence: Synthetic oligonucleotide
cguccgaggcuccaucucg

SEQ ID NO: 1348794 - RNA, 19 nt, Artificial Sequence
  Description of Artificial Sequence: Synthetic oligonucleotide
cugccugacugagauuuca

SEQ ID NO: 1348795 - RNA, 19 nt, Artificial Sequence
  Description of Artificial Sequence: Synthetic oligonucleotide
ucggaguccucgggcuucc

SEQ ID NO: 1348796 - RNA, 19 nt, Artificial Sequence
  Description of Artificial Sequence: Synthetic oligonucleotide
guccgaggcuccaucucgc

SEQ ID NO: 1348797 - RNA, 19 nt, Artificial Sequence
  Description of Artificial Sequence: Synthetic oligonucleotide
cauuuaugagaagcuuucu

SEQ ID NO: 1348798 - RNA, 19 nt, Artificial Sequence
  Description of Artificial Sequence: Synthetic oligonucleotide
uugggaguccugggaugga

SEQ ID NO: 1348799 - RNA, 19 nt, Artificial Sequence
  Description of Artificial Sequence: Synthetic oligonucleotide
ggcacugaggacauagacu

SEQ ID NO: 1348800 - RNA, 19 nt, Artificial Sequence
  Description of Artificial Sequence: Synthetic oligonucleotide
gaccgacgacuauacuucu

SEQ ID NO: 1348801 - RNA, 19 nt, Artificial Sequence
  Description of Artificial Sequence: Synthetic oligonucleotide
cucaugcuuagccagccuu

SEQ ID NO: 1348802 - RNA, 19 nt, Artificial Sequence
  Description of Artificial Sequence: Synthetic oligonucleotide
acucuagauuggucccaua

SEQ ID NO: 1348803 - RNA, 19 nt, Artificial Sequence
  Description of Artificial Sequence: Synthetic oligonucleotide
ggcagucuacaugucuaac

SEQ ID NO: 1348804 - RNA, 19 nt, Artificial Sequence
  Description of Artificial Sequence: Synthetic oligonucleotide
ccaagauggccaggcagag

SEQ ID NO: 1348805 - RNA, 19 nt, Artificial Sequence
  Description of Artificial Sequence: Synthetic oligonucleotide
ugccacaagguggcauuua

SEQ ID NO: 1348806 - RNA, 19 nt, Artificial Sequence
  Description of Artificial Sequence: Synthetic oligonucleotide
ucguggcggcucccauacc

SEQ ID NO: 1348807 - RNA, 19 nt, Artificial Sequence
  Description of Artificial Sequence: Synthetic oligonucleotide
gcucccauaccgggguggg

SEQ ID NO: 1348808 - RNA, 19 nt, Artificial Sequence
  Description of Artificial Sequence: Synthetic oligonucleotide
gcauccaaaucaaacucgu

SEQ ID NO: 1348809 - RNA, 19 nt, Artificial Sequence
  Description of Artificial Sequence: Synthetic oligonucleotide
gggaccucuuuaauauauc

SEQ ID NO: 1348810 - RNA, 19 nt, Artificial Sequence
  Description of Artificial Sequence: Synthetic oligonucleotide
aucccaugaccgacgacua

SEQ ID NO: 1348811 - RNA, 19 nt, Artificial Sequence
  Description of Artificial Sequence: Synthetic oligonucleotide
cgaucauaggcaauagugu

SEQ ID NO: 1348812 - RNA, 19 nt, Artificial Sequence
  Description of Artificial Sequence: Synthetic oligonucleotide
aucucgcaggggaccgcgg

SEQ ID NO: 1348813 - RNA, 19 nt, Artificial Sequence
  Description of Artificial Sequence: Synthetic oligonucleotide
ccgcucugcgcuuccgucc

SEQ ID NO: 1348814 - RNA, 19 nt, Artificial Sequence
  Description of Artificial Sequence: Synthetic oligonucleotide
gacucuagauuggucccau

SEQ ID NO: 1348815 - RNA, 19 nt, Artificial Sequence
  Description of Artificial Sequence: Synthetic oligonucleotide
ccgacgacuauacuucuua

SEQ ID NO: 1348816 - RNA, 19 nt, Artificial Sequence
  Description of Artificial Sequence: Synthetic oligonucleotide
gcuuccggucccuuccguc

SEQ ID NO: 1348817 - RNA, 19 nt, Artificial Sequence
  Description of Artificial Sequence: Synthetic oligonucleotide
gguuuucaccggcgucgug

SEQ ID NO: 1348818 - RNA, 19 nt, Artificial Sequence
  Description of Artificial Sequence: Synthetic oligonucleotide
caggucgacggucugcaau

SEQ ID NO: 1348819 - RNA, 19 nt, Artificial Sequence
  Description of Artificial Sequence: Synthetic oligonucleotide
cacugccaacccaucugaa

SEQ ID NO: 1348820 - RNA, 19 nt, Artificial Sequence
  Description of Artificial Sequence: Synthetic oligonucleotide
ggggaccucuuuaauauau

SEQ ID NO: 1348821 - RNA, 19 nt, Artificial Sequence
  Description of Artificial Sequence: Synthetic oligonucleotide
cgggcuuccggucccuucc

SEQ ID NO: 1348822 - RNA, 19 nt, Artificial Sequence
  Description of Artificial Sequence: Synthetic oligonucleotide
agggccuucaggagucgua

SEQ ID NO: 1348823 - RNA, 19 nt, Artificial Sequence
  Description of Artificial Sequence: Synthetic oligonucleotide
cugggauggauuccagguu

SEQ ID NO: 1348824 - RNA, 19 nt, Artificial Sequence
  Description of Artificial Sequence: Synthetic oligonucleotide
gcggguuuucaccggcguc

SEQ ID NO: 1348825 - RNA, 19 nt, Artificial Sequence
  Description of Artificial Sequence: Synthetic oligonucleotide
accgacgacuauacuucuu

SEQ ID NO: 1348826 - RNA, 19 nt, Artificial Sequence
  Description of Artificial Sequence: Synthetic oligonucleotide
uccguccgcucugcgcuuc

SEQ ID NO: 1348827 - RNA, 19 nt, Artificial Sequence
  Description of Artificial Sequence: Synthetic oligonucleotide
caugaccgacgacuauacu

SEQ ID NO: 1348828 - RNA, 19 nt, Artificial Sequence
  Description of Artificial Sequence: Synthetic oligonucleotide
gaguugccacaagguggca

SEQ ID NO: 1348829 - RNA, 19 nt, Artificial Sequence
  Description of Artificial Sequence: Synthetic oligonucleotide
ccgcggguuuucaccggcg

SEQ ID NO: 1348830 - RNA, 19 nt, Artificial Sequence
  Description of Artificial Sequence: Synthetic oligonucleotide
ggggaccgcggguuuucac

SEQ ID NO: 1348831 - RNA, 19 nt, Artificial Sequence
  Description of Artificial Sequence: Synthetic oligonucleotide
aggggaccgcggguuuuca

SEQ ID NO: 1348832 - RNA, 19 nt, Artificial Sequence
  Description of Artificial Sequence: Synthetic oligonucleotide
acggggcuuagggccuuca

SEQ ID NO: 1348833 - RNA, 19 nt, Artificial Sequence
  Description of Artificial Sequence: Synthetic oligonucleotide
gggugggcuucuaggucug

SEQ ID NO: 1348834 - RNA, 19 nt, Artificial Sequence
  Description of Artificial Sequence: Synthetic oligonucleotide
ccauaaacacaugguuaaa

SEQ ID NO: 1348835 - RNA, 19 nt, Artificial Sequence
  Description of Artificial Sequence: Synthetic oligonucleotide
cccaugaccgacgacuaua

SEQ ID NO: 1348836 - RNA, 19 nt, Artificial Sequence
  Description of Artificial Sequence: Synthetic oligonucleotide
cccaaggucuacagguugu

SEQ ID NO: 1348837 - RNA, 19 nt, Artificial Sequence
  Description of Artificial Sequence: Synthetic oligonucleotide
ggccuucaggagucguaaa

SEQ ID NO: 1348838 - RNA, 19 nt, Artificial Sequence
  Description of Artificial Sequence: Synthetic oligonucleotide
gcaaucuggcgcucgcuuu

SEQ ID NO: 1348839 - RNA, 19 nt, Artificial Sequence
  Description of Artificial Sequence: Synthetic oligonucleotide
ccguccgaggcuccaucuc

SEQ ID NO: 1348840 - RNA, 19 nt, Artificial Sequence
  Description of Artificial Sequence: Synthetic oligonucleotide
gggauggauuccagguugu

SEQ ID NO: 1348841 - RNA, 19 nt, Artificial Sequence
  Description of Artificial Sequence: Synthetic oligonucleotide
cgacgacuauacuucuuaa

SEQ ID NO: 1348842 - RNA, 19 nt, Artificial Sequence
  Description of Artificial Sequence: Synthetic oligonucleotide
cauaccggggugggcuucu

SEQ ID NO: 1348843 - RNA, 19 nt, Artificial Sequence
  Description of Artificial Sequence: Synthetic oligonucleotide
ccggcgucguggcggcucc

SEQ ID NO: 1348844 - RNA, 19 nt, Artificial Sequence
  Description of Artificial Sequence: Synthetic oligonucleotide
ccaucucgcaggggaccgc

SEQ ID NO: 1348845 - RNA, 19 nt, Artificial Sequence
  Description of Artificial Sequence: Synthetic oligonucleotide
ccggggugggcuucuaggu

SEQ ID NO: 1348846 - RNA, 19 nt, Artificial Sequence
  Description of Artificial Sequence: Synthetic oligonucleotide
ggucgacggucugcaaucu

SEQ ID NO: 1348847 - RNA, 19 nt, Artificial Sequence
  Description of Artificial Sequence: Synthetic oligonucleotide
auaccggggugggcuucua

SEQ ID NO: 1348848 - RNA, 19 nt, Artificial Sequence
  Description of Artificial Sequence: Synthetic oligonucleotide
ggcuuccggucccuuccgu

SEQ ID NO: 1348849 - RNA, 19 nt, Artificial Sequence
  Description of Artificial Sequence: Synthetic oligonucleotide
cuuccguccgaggcuccau

SEQ ID NO: 1348850 - RNA, 19 nt, Artificial Sequence
  Description of Artificial Sequence: Synthetic oligonucleotide
gaacggggcuuagggccuu

SEQ ID NO: 1348851 - RNA, 19 nt, Artificial Sequence
  Description of Artificial Sequence: Synthetic oligonucleotide
gggaguccugggauggauu

SEQ ID NO: 1348852 - RNA, 19 nt, Artificial Sequence
  Description of Artificial Sequence: Synthetic oligonucleotide
cgucguggcggcucccaua

SEQ ID NO: 1348853 - RNA, 19 nt, Artificial Sequence
  Description of Artificial Sequence: Synthetic oligonucleotide
cgcggguuuucaccggcgu

SEQ ID NO: 1348854 - RNA, 19 nt, Artificial Sequence
  Description of Artificial Sequence: Synthetic oligonucleotide
gcgucguggcggcucccau

SEQ ID NO: 1348855 - RNA, 19 nt, Artificial Sequence
  Description of Artificial Sequence: Synthetic oligonucleotide
ccggucccuuccguccgcu

SEQ ID NO: 1348856 - RNA, 19 nt, Artificial Sequence
  Description of Artificial Sequence: Synthetic oligonucleotide
caccggcgucguggcggcu

SEQ ID NO: 1348857 - RNA, 19 nt, Artificial Sequence
  Description of Artificial Sequence: Synthetic oligonucleotide
cgcaggggaccgcggguuu

SEQ ID NO: 1348858 - RNA, 19 nt, Artificial Sequence
  Description of Artificial Sequence: Synthetic oligonucleotide
aauauauccauacauaauc

SEQ ID NO: 1348859 - RNA, 19 nt, Artificial Sequence
  Description of Artificial Sequence: Synthetic oligonucleotide
uacuauuucaaauauaucc

SEQ ID NO: 1348860 - RNA, 19 nt, Artificial Sequence
  Description of Artificial Sequence: Synthetic oligonucleotide
aaagcugcgaguuucaccg

SEQ ID NO: 1348861 - RNA, 19 nt, Artificial Sequence
  Description of Artificial Sequence: Synthetic oligonucleotide
auuaucauaagauuucccg

SEQ ID NO: 1348862 - RNA, 19 nt, Artificial Sequence
  Description of Artificial Sequence: Synthetic oligonucleotide
ucuagauuaaccuugugga

SEQ ID NO: 1348863 - RNA, 19 nt, Artificial Sequence
  Description of Artificial Sequence: Synthetic oligonucleotide
uguagauuaccacaaacgc

SEQ ID NO: 1348864 - RNA, 19 nt, Artificial Sequence
  Description of Artificial Sequence: Synthetic oligonucleotide
aagauuucccgucggaagc

SEQ ID NO: 1348865 - RNA, 19 nt, Artificial Sequence
  Description of Artificial Sequence: Synthetic oligonucleotide
aauacuguauuguguaguc

SEQ ID NO: 1348866 - RNA, 19 nt, Artificial Sequence
  Description of Artificial Sequence: Synthetic oligonucleotide
aauguauacuauuucaaau

SEQ ID NO: 1348867 - RNA, 19 nt, Artificial Sequence
  Description of Artificial Sequence: Synthetic oligonucleotide
agauuaaccuuguggaugc

SEQ ID NO: 1348868 - RNA, 19 nt, Artificial Sequence
  Description of Artificial Sequence: Synthetic oligonucleotide
gaagcuucgccccagaugc

SEQ ID NO: 1348869 - RNA, 19 nt, Artificial Sequence
  Description of Artificial Sequence: Synthetic oligonucleotide
ugaaucguuccaaugacag

SEQ ID NO: 1348870 - RNA, 19 nt, Artificial Sequence
  Description of Artificial Sequence: Synthetic oligonucleotide
ucaaauauagcuguaguac

SEQ ID NO: 1348871 - RNA, 19 nt, Artificial Sequence
  Description of Artificial Sequence: Synthetic oligonucleotide
aaucaaauauagcuguagu

SEQ ID NO: 1348872 - RNA, 19 nt, Artificial Sequence
  Description of Artificial Sequence: Synthetic oligonucleotide
cucuagauuaaccuugugg

SEQ ID NO: 1348873 - RNA, 19 nt, Artificial Sequence
  Description of Artificial Sequence: Synthetic oligonucleotide
ucuaauacuguauugugua

SEQ ID NO: 1348874 - RNA, 19 nt, Artificial Sequence
  Description of Artificial Sequence: Synthetic oligonucleotide
gucaauguugcauacacac

SEQ ID NO: 1348875 - RNA, 19 nt, Artificial Sequence
  Description of Artificial Sequence: Synthetic oligonucleotide
ucuugcauaaugcccaucu

SEQ ID NO: 1348876 - RNA, 19 nt, Artificial Sequence
  Description of Artificial Sequence: Synthetic oligonucleotide
acagacgcaagucacagug

SEQ ID NO: 1348877 - RNA, 19 nt, Artificial Sequence
  Description of Artificial Sequence: Synthetic oligonucleotide
ugaaguugguuugagaaca

SEQ ID NO: 1348878 - RNA, 19 nt, Artificial Sequence
  Description of Artificial Sequence: Synthetic oligonucleotide
uuaucauaagauuucccgu

SEQ ID NO: 1348879 - RNA, 19 nt, Artificial Sequence
  Description of Artificial Sequence: Synthetic oligonucleotide
aucaagacaauguauacua

SEQ ID NO: 1348880 - RNA, 19 nt, Artificial Sequence
  Description of Artificial Sequence: Synthetic oligonucleotide
aacaacguagagaacacug

SEQ ID NO: 1348881 - RNA, 19 nt, Artificial Sequence
  Description of Artificial Sequence: Synthetic oligonucleotide
uccauacauaaucaaauau

SEQ ID NO: 1348882 - RNA, 19 nt, Artificial Sequence
  Description of Artificial Sequence: Synthetic oligonucleotide
aucauaagauuucccgucg

SEQ ID NO: 1348883 - RNA, 19 nt, Artificial Sequence
  Description of Artificial Sequence: Synthetic oligonucleotide
uuaaccuuguggaugcucu

SEQ ID NO: 1348884 - RNA, 19 nt, Artificial Sequence
  Description of Artificial Sequence: Synthetic oligonucleotide
ucagauuuagugguuguag

SEQ ID NO: 1348885 - RNA, 19 nt, Artificial Sequence
  Description of Artificial Sequence: Synthetic oligonucleotide
aacauguguagaucucguc

SEQ ID NO: 1348886 - RNA, 19 nt, Artificial Sequence
  Description of Artificial Sequence: Synthetic oligonucleotide
aguauaaccagcaucacau

SEQ ID NO: 1348887 - RNA, 19 nt, Artificial Sequence
  Description of Artificial Sequence: Synthetic oligonucleotide
ugauuugacacgcauuauc

SEQ ID NO: 1348888 - RNA, 19 nt, Artificial Sequence
  Description of Artificial Sequence: Synthetic oligonucleotide
uaucauaagauuucccguc

SEQ ID NO: 1348889 - RNA, 19 nt, Artificial Sequence
  Description of Artificial Sequence: Synthetic oligonucleotide
ucugaagaacacgggaucg

SEQ ID NO: 1348890 - RNA, 19 nt, Artificial Sequence
  Description of Artificial Sequence: Synthetic oligonucleotide
ggaguguucacauuucccg

SEQ ID NO: 1348891 - RNA, 19 nt, Artificial Sequence
  Description of Artificial Sequence: Synthetic oligonucleotide
ucugaaucguuccaaugac

SEQ ID NO: 1348892 - RNA, 19 nt, Artificial Sequence
  Description of Artificial Sequence: Synthetic oligonucleotide
acauguguagaucucgucu

SEQ ID NO: 1348893 - RNA, 19 nt, Artificial Sequence
  Description of Artificial Sequence: Synthetic oligonucleotide
ucauaagauuucccgucgg

SEQ ID NO: 1348894 - RNA, 19 nt, Artificial Sequence
  Description of Artificial Sequence: Synthetic oligonucleotide
auaaggaacaggguugggg

SEQ ID NO: 1348895 - RNA, 19 nt, Artificial Sequence
  Description of Artificial Sequence: Synthetic oligonucleotide
caagacauacugaaaucgc

SEQ ID NO: 1348896 - RNA, 19 nt, Artificial Sequence
  Description of Artificial Sequence: Synthetic oligonucleotide
ucauugguguagauuacca

SEQ ID NO: 1348897 - RNA, 19 nt, Artificial Sequence
  Description of Artificial Sequence: Synthetic oligonucleotide
acauaaucaaauauagcug

SEQ ID NO: 1348898 - RNA, 19 nt, Artificial Sequence
  Description of Artificial Sequence: Synthetic oligonucleotide
uucacuuaaggagguaggg

SEQ ID NO: 1348899 - RNA, 19 nt, Artificial Sequence
  Description of Artificial Sequence: Synthetic oligonucleotide
aggaacaacguagagaaca

SEQ ID NO: 1348900 - RNA, 19 nt, Artificial Sequence
  Description of Artificial Sequence: Synthetic oligonucleotide
auaaugcccaucuucagau

SEQ ID NO: 1348901 - RNA, 19 nt, Artificial Sequence
  Description of Artificial Sequence: Synthetic oligonucleotide
aauauagcuguaguacaug

SEQ ID NO: 1348902 - RNA, 19 nt, Artificial Sequence
  Description of Artificial Sequence: Synthetic oligonucleotide
ucccucuagauuaaccuug

SEQ ID NO: 1348903 - RNA, 19 nt, Artificial Sequence
  Description of Artificial Sequence: Synthetic oligonucleotide
ggauaguccacugagaagc

SEQ ID NO: 1348904 - RNA, 19 nt, Artificial Sequence
  Description of Artificial Sequence: Synthetic oligonucleotide
uauauccauacauaaucaa

SEQ ID NO: 1348905 - RNA, 19 nt, Artificial Sequence
  Description of Artificial Sequence: Synthetic oligonucleotide
ucgcaaaguguccagcugc

SEQ ID NO: 1348906 - RNA, 19 nt, Artificial Sequence
  Description of Artificial Sequence: Synthetic oligonucleotide
ucgucuuacucuuuugucu

SEQ ID NO: 1348907 - RNA, 19 nt, Artificial Sequence
  Description of Artificial Sequence: Synthetic oligonucleotide
gauuugacacgcauuauca

SEQ ID NO: 1348908 - RNA, 19 nt, Artificial Sequence
  Description of Artificial Sequence: Synthetic oligonucleotide
aacguagagaacacuguag

SEQ ID NO: 1348909 - RNA, 19 nt, Artificial Sequence
  Description of Artificial Sequence: Synthetic oligonucleotide
auauagcuguaguacaugu

SEQ ID NO: 1348910 - RNA, 19 nt, Artificial Sequence
  Description of Artificial Sequence: Synthetic oligonucleotide
ucacauuucccgugcaugc

SEQ ID NO: 1348911 - RNA, 19 nt, Artificial Sequence
  Description of Artificial Sequence: Synthetic oligonucleotide
aaugcccaucuucagauuu

SEQ ID NO: 1348912 - RNA, 19 nt, Artificial Sequence
  Description of Artificial Sequence: Synthetic oligonucleotide
uuugacacgcauuaucaua

SEQ ID NO: 1348913 - RNA, 19 nt, Artificial Sequence
  Description of Artificial Sequence: Synthetic oligonucleotide
agacgcaagucacaguguc

SEQ ID NO: 1348914 - RNA, 19 nt, Artificial Sequence
  Description of Artificial Sequence: Synthetic oligonucleotide
ucaccgaacgggcuuauga

SEQ ID NO: 1348915 - RNA, 19 nt, Artificial Sequence
  Description of Artificial Sequence: Synthetic oligonucleotide
agucacagugucuccaauc

SEQ ID NO: 1348916 - RNA, 19 nt, Artificial Sequence
  Description of Artificial Sequence: Synthetic oligonucleotide
ugaagaacacgggaucgcg

SEQ ID NO: 1348917 - RNA, 19 nt, Artificial Sequence
  Description of Artificial Sequence: Synthetic oligonucleotide
agacauacugaaaucgcac

SEQ ID NO: 1348918 - RNA, 19 nt, Artificial Sequence
  Description of Artificial Sequence: Synthetic oligonucleotide
agacgucccaucuucauca

SEQ ID NO: 1348919 - RNA, 19 nt, Artificial Sequence
  Description of Artificial Sequence: Synthetic oligonucleotide
acaaacgcaaggcaacaug

SEQ ID NO: 1348920 - RNA, 19 nt, Artificial Sequence
  Description of Artificial Sequence: Synthetic oligonucleotide
uuaccacaaacgcaaggca

SEQ ID NO: 1348921 - RNA, 19 nt, Artificial Sequence
  Description of Artificial Sequence: Synthetic oligonucleotide
aggagguagggaaagcugc

SEQ ID NO: 1348922 - RNA, 19 nt, Artificial Sequence
  Description of Artificial Sequence: Synthetic oligonucleotide
gauuuagugguuguaguuc

SEQ ID NO: 1348923 - RNA, 19 nt, Artificial Sequence
  Description of Artificial Sequence: Synthetic oligonucleotide
acauaugacagcaaucuga

SEQ ID NO: 1348924 - RNA, 19 nt, Artificial Sequence
  Description of Artificial Sequence: Synthetic oligonucleotide
ugccauaaggaacaggguu

SEQ ID NO: 1348925 - RNA, 19 nt, Artificial Sequence
  Description of Artificial Sequence: Synthetic oligonucleotide
cuccauuggagccacacac

SEQ ID NO: 1348926 - RNA, 19 nt, Artificial Sequence
  Description of Artificial Sequence: Synthetic oligonucleotide
aucaaauauagcuguagua

SEQ ID NO: 1348927 - RNA, 19 nt, Artificial Sequence
  Description of Artificial Sequence: Synthetic oligonucleotide
ugucucuaauacuguauug

SEQ ID NO: 1348928 - RNA, 19 nt, Artificial Sequence
  Description of Artificial Sequence: Synthetic oligonucleotide
cuccaauccuuaaacauuc

SEQ ID NO: 1348929 - RNA, 19 nt, Artificial Sequence
  Description of Artificial Sequence: Synthetic oligonucleotide
aaacaugcucccucuagau

SEQ ID NO: 1348930 - RNA, 19 nt, Artificial Sequence
  Description of Artificial Sequence: Synthetic oligonucleotide
ugcagaagccauuguaaug

SEQ ID NO: 1348931 - RNA, 19 nt, Artificial Sequence
  Description of Artificial Sequence: Synthetic oligonucleotide
accacggcaacagaggagg

SEQ ID NO: 1348932 - RNA, 19 nt, Artificial Sequence
  Description of Artificial Sequence: Synthetic oligonucleotide
acaugcucccucuagauua

SEQ ID NO: 1348933 - RNA, 19 nt, Artificial Sequence
  Description of Artificial Sequence: Synthetic oligonucleotide
caaauauagcuguaguaca

SEQ ID NO: 1348934 - RNA, 19 nt, Artificial Sequence
  Description of Artificial Sequence: Synthetic oligonucleotide
aaauauagcuguaguacau

SEQ ID NO: 1348935 - RNA, 19 nt, Artificial Sequence
  Description of Artificial Sequence: Synthetic oligonucleotide
accaugacuacuucgcgca

SEQ ID NO: 1348936 - RNA, 19 nt, Artificial Sequence
  Description of Artificial Sequence: Synthetic oligonucleotide
uauugauggaguguucaca

SEQ ID NO: 1348937 - RNA, 19 nt, Artificial Sequence
  Description of Artificial Sequence: Synthetic oligonucleotide
auacuguauuguguagucc

SEQ ID NO: 1348938 - RNA, 19 nt, Artificial Sequence
  Description of Artificial Sequence: Synthetic oligonucleotide
gagcgcaugaucucaggag

SEQ ID NO: 1348939 - RNA, 19 nt, Artificial Sequence
  Description of Artificial Sequence: Synthetic oligonucleotide
cauucacuuaaggagguag

SEQ ID NO: 1348940 - RNA, 19 nt, Artificial Sequence
  Description of Artificial Sequence: Synthetic oligonucleotide
gaggauaguccacugagaa

SEQ ID NO: 1348941 - RNA, 19 nt, Artificial Sequence
  Description of Artificial Sequence: Synthetic oligonucleotide
cuucgcgcaacucugcagc

SEQ ID NO: 1348942 - RNA, 19 nt, Artificial Sequence
  Description of Artificial Sequence: Synthetic oligonucleotide
cuuaaggagguagggaaag

SEQ ID NO: 1348943 - RNA, 19 nt, Artificial Sequence
  Description of Artificial Sequence: Synthetic oligonucleotide
uugucucuaauacuguauu

SEQ ID NO: 1348944 - RNA, 19 nt, Artificial Sequence
  Description of Artificial Sequence: Synthetic oligonucleotide
caaccaacggcuucugaag

SEQ ID NO: 1348945 - RNA, 19 nt, Artificial Sequence
  Description of Artificial Sequence: Synthetic oligonucleotide
auauauccauacauaauca

SEQ ID NO: 1348946 - RNA, 19 nt, Artificial Sequence
  Description of Artificial Sequence: Synthetic oligonucleotide
accacaaguaucucacucu

SEQ ID NO: 1348947 - RNA, 19 nt, Artificial Sequence
  Description of Artificial Sequence: Synthetic oligonucleotide
uaugugguguucucuggca

SEQ ID NO: 1348948 - RNA, 19 nt, Artificial Sequence
  Description of Artificial Sequence: Synthetic oligonucleotide
aaacccucgcaaagugucc

SEQ ID NO: 1348949 - RNA, 19 nt, Artificial Sequence
  Description of Artificial Sequence: Synthetic oligonucleotide
aaccaacggcuucugaaga

SEQ ID NO: 1348950 - RNA, 19 nt, Artificial Sequence
  Description of Artificial Sequence: Synthetic oligonucleotide
ugacaugaugcuucuuuga

SEQ ID NO: 1348951 - RNA, 19 nt, Artificial Sequence
  Description of Artificial Sequence: Synthetic oligonucleotide
gauaagcagcgucaccggc

SEQ ID NO: 1348952 - RNA, 19 nt, Artificial Sequence
  Description of Artificial Sequence: Synthetic oligonucleotide
ugacagacgcaagucacag

SEQ ID NO: 1348953 - RNA, 19 nt, Artificial Sequence
  Description of Artificial Sequence: Synthetic oligonucleotide
ugugaugcagaggaccacc

SEQ ID NO: 1348954 - RNA, 19 nt, Artificial Sequence
  Description of Artificial Sequence: Synthetic oligonucleotide
ugcauauugauggaguguu

SEQ ID NO: 1348955 - RNA, 19 nt, Artificial Sequence
  Description of Artificial Sequence: Synthetic oligonucleotide
auucacuuaaggagguagg

SEQ ID NO: 1348956 - RNA, 19 nt, Artificial Sequence
  Description of Artificial Sequence: Synthetic oligonucleotide
agcgcaugaucucaggagu

SEQ ID NO: 1348957 - RNA, 19 nt, Artificial Sequence
  Description of Artificial Sequence: Synthetic oligonucleotide
acgggcuuaugauaagcag

SEQ ID NO: 1348958 - RNA, 19 nt, Artificial Sequence
  Description of Artificial Sequence: Synthetic oligonucleotide
agccauuguaauguucugg

SEQ ID NO: 1348959 - RNA, 19 nt, Artificial Sequence
  Description of Artificial Sequence: Synthetic oligonucleotide
agcgcagagggguugaagu

SEQ ID NO: 1348960 - RNA, 19 nt, Artificial Sequence
  Description of Artificial Sequence: Synthetic oligonucleotide
acauuucccgugcaugcag

SEQ ID NO: 1348961 - RNA, 19 nt, Artificial Sequence
  Description of Artificial Sequence: Synthetic oligonucleotide
cacacucugcaccaaacug

SEQ ID NO: 1348962 - RNA, 19 nt, Artificial Sequence
  Description of Artificial Sequence: Synthetic oligonucleotide
aggauaguccacugagaag

SEQ ID NO: 1348963 - RNA, 19 nt, Artificial Sequence
  Description of Artificial Sequence: Synthetic oligonucleotide
cauaugacagcaaucugaa

SEQ ID NO: 1348964 - RNA, 19 nt, Artificial Sequence
  Description of Artificial Sequence: Synthetic oligonucleotide
cauugguguagauuaccac

SEQ ID NO: 1348965 - RNA, 19 nt, Artificial Sequence
  Description of Artificial Sequence: Synthetic oligonucleotide
cacucugcaccaaacuggc

SEQ ID NO: 1348966 - RNA, 19 nt, Artificial Sequence
  Description of Artificial Sequence: Synthetic oligonucleotide
cugcauaaucuguucuugc

SEQ ID NO: 1348967 - RNA, 19 nt, Artificial Sequence
  Description of Artificial Sequence: Synthetic oligonucleotide
acgcaagucacagugucuc

SEQ ID NO: 1348968 - RNA, 19 nt, Artificial Sequence
  Description of Artificial Sequence: Synthetic oligonucleotide
agguagggaaagcugcgag

SEQ ID NO: 1348969 - RNA, 19 nt, Artificial Sequence
  Description of Artificial Sequence: Synthetic oligonucleotide
aggcaacauguguagaucu

SEQ ID NO: 1348970 - RNA, 19 nt, Artificial Sequence
  Description of Artificial Sequence: Synthetic oligonucleotide
ugcucccucuagauuaacc

SEQ ID NO: 1348971 - RNA, 19 nt, Artificial Sequence
  Description of Artificial Sequence: Synthetic oligonucleotide
gggcuuaugauaagcagcg

SEQ ID NO: 1348972 - RNA, 19 nt, Artificial Sequence
  Description of Artificial Sequence: Synthetic oligonucleotide
aacauucacuuaaggaggu

SEQ ID NO: 1348973 - RNA, 19 nt, Artificial Sequence
  Description of Artificial Sequence: Synthetic oligonucleotide
gaagaacacgggaucgcgg

SEQ ID NO: 1348974 - RNA, 19 nt, Artificial Sequence
  Description of Artificial Sequence: Synthetic oligonucleotide
guagauuaccacaaacgca

SEQ ID NO: 1348975 - RNA, 19 nt, Artificial Sequence
  Description of Artificial Sequence: Synthetic oligonucleotide
ugaaaucgcacagggccag

SEQ ID NO: 1348976 - RNA, 19 nt, Artificial Sequence
  Description of Artificial Sequence: Synthetic oligonucleotide
uuucccgucggaagcgcag

SEQ ID NO: 1348977 - RNA, 19 nt, Artificial Sequence
  Description of Artificial Sequence: Synthetic oligonucleotide
auauccauacauaaucaaa

SEQ ID NO: 1348978 - RNA, 19 nt, Artificial Sequence
  Description of Artificial Sequence: Synthetic oligonucleotide
gaacagucaauguugcaua

SEQ ID NO: 1348979 - RNA, 19 nt, Artificial Sequence
  Description of Artificial Sequence: Synthetic oligonucleotide
ucacuuaaggagguaggga

SEQ ID NO: 1348980 - RNA, 19 nt, Artificial Sequence
  Description of Artificial Sequence: Synthetic oligonucleotide
cacuuaaggagguagggaa

SEQ ID NO: 1348981 - RNA, 19 nt, Artificial Sequence
  Description of Artificial Sequence: Synthetic oligonucleotide
cacugagaagcuucgcccc

SEQ ID NO: 1348982 - RNA, 19 nt, Artificial Sequence
  Description of Artificial Sequence: Synthetic oligonucleotide
gaagccauuguaauguucu

SEQ ID NO: 1348983 - RNA, 19 nt, Artificial Sequence
  Description of Artificial Sequence: Synthetic oligonucleotide
uguugcacuugaacugaca

SEQ ID NO: 1348984 - RNA, 19 nt, Artificial Sequence
  Description of Artificial Sequence: Synthetic oligonucleotide
acacgcauuaucauaagau

SEQ ID NO: 1348985 - RNA, 19 nt, Artificial Sequence
  Description of Artificial Sequence: Synthetic oligonucleotide
uaguccaagcugucgguug

SEQ ID NO: 1348986 - RNA, 19 nt, Artificial Sequence
  Description of Artificial Sequence: Synthetic oligonucleotide
agcaaucugaaucguucca

SEQ ID NO: 1348987 - RNA, 19 nt, Artificial Sequence
  Description of Artificial Sequence: Synthetic oligonucleotide
gaguuucagcaacauccag

SEQ ID NO: 1348988 - RNA, 19 nt, Artificial Sequence
  Description of Artificial Sequence: Synthetic oligonucleotide
uauagcuguaguacauguu

SEQ ID NO: 1348989 - RNA, 19 nt, Artificial Sequence
  Description of Artificial Sequence: Synthetic oligonucleotide
augacuacuucgcgcaacu

SEQ ID NO: 1348990 - RNA, 19 nt, Artificial Sequence
  Description of Artificial Sequence: Synthetic oligonucleotide
cauaaugcccaucuucaga

SEQ ID NO: 1348991 - RNA, 19 nt, Artificial Sequence
  Description of Artificial Sequence: Synthetic oligonucleotide
acuacuucgcgcaacucug

SEQ ID NO: 1348992 - RNA, 19 nt, Artificial Sequence
  Description of Artificial Sequence: Synthetic oligonucleotide
agugguuguaguucuguuu

SEQ ID NO: 1348993 - RNA, 19 nt, Artificial Sequence
  Description of Artificial Sequence: Synthetic oligonucleotide
ucguuccaaugacagcugc

SEQ ID NO: 1348994 - RNA, 19 nt, Artificial Sequence
  Description of Artificial Sequence: Synthetic oligonucleotide
uuacucuuuugucucuaau

SEQ ID NO: 1348995 - RNA, 19 nt, Artificial Sequence
  Description of Artificial Sequence: Synthetic oligonucleotide
cugcgaguuucaccgaacg

SEQ ID NO: 1348996 - RNA, 19 nt, Artificial Sequence
  Description of Artificial Sequence: Synthetic oligonucleotide
agcauucucugcauaaucu

SEQ ID NO: 1348997 - RNA, 19 nt, Artificial Sequence
  Description of Artificial Sequence: Synthetic oligonucleotide
aagguaugugguguucucu

SEQ ID NO: 1348998 - RNA, 19 nt, Artificial Sequence
  Description of Artificial Sequence: Synthetic oligonucleotide
auuugacacgcauuaucau

SEQ ID NO: 1348999 - RNA, 19 nt, Artificial Sequence
  Description of Artificial Sequence: Synthetic oligonucleotide
ugggaaacaugcucccucu

SEQ ID NO: 1349000 - RNA, 19 nt, Artificial Sequence
  Description of Artificial Sequence: Synthetic oligonucleotide
gaugcggggagcugcugcc

SEQ ID NO: 1349001 - RNA, 19 nt, Artificial Sequence
  Description of Artificial Sequence: Synthetic oligonucleotide
cacgcagcgggcuacugag

SEQ ID NO: 1349002 - RNA, 19 nt, Artificial Sequence
  Description of Artificial Sequence: Synthetic oligonucleotide
agauuucccgucggaagcg

SEQ ID NO: 1349003 - RNA, 19 nt, Artificial Sequence
  Description of Artificial Sequence: Synthetic oligonucleotide
gaacgggcuuaugauaagc

SEQ ID NO: 1349004 - RNA, 19 nt, Artificial Sequence
  Description of Artificial Sequence: Synthetic oligonucleotide
cuggcaaaugucacaggug

SEQ ID NO: 1349005 - RNA, 19 nt, Artificial Sequence
  Description of Artificial Sequence: Synthetic oligonucleotide
aacgggcuuaugauaagca

SEQ ID NO: 1349006 - RNA, 19 nt, Artificial Sequence
  Description of Artificial Sequence: Synthetic oligonucleotide
cucgucuuacucuuuuguc

SEQ ID NO: 1349007 - RNA, 19 nt, Artificial Sequence
  Description of Artificial Sequence: Synthetic oligonucleotide
uuaaggagguagggaaagc

SEQ ID NO: 1349008 - RNA, 19 nt, Artificial Sequence
  Description of Artificial Sequence: Synthetic oligonucleotide
ugguuugagaacagucaau

SEQ ID NO: 1349009 - RNA, 19 nt, Artificial Sequence
  Description of Artificial Sequence: Synthetic oligonucleotide
gcuuaugauaagcagcguc

SEQ ID NO: 1349010 - RNA, 19 nt, Artificial Sequence
  Description of Artificial Sequence: Synthetic oligonucleotide
acuguugcacuugaacuga

SEQ ID NO: 1349011 - RNA, 19 nt, Artificial Sequence
  Description of Artificial Sequence: Synthetic oligonucleotide
caugaugcuucuuugauuu

SEQ ID NO: 1349012 - RNA, 19 nt, Artificial Sequence
  Description of Artificial Sequence: Synthetic oligonucleotide
gcaacauguguagaucucg

SEQ ID NO: 1349013 - RNA, 19 nt, Artificial Sequence
  Description of Artificial Sequence: Synthetic oligonucleotide
uguucacauuucccgugca

SEQ ID NO: 1349014 - RNA, 19 nt, Artificial Sequence
  Description of Artificial Sequence: Synthetic oligonucleotide
acuucgcgcaacucugcag

SEQ ID NO: 1349015 - RNA, 19 nt, Artificial Sequence
  Description of Artificial Sequence: Synthetic oligonucleotide
guguucacauuucccgugc

SEQ ID NO: 1349016 - RNA, 19 nt, Artificial Sequence
  Description of Artificial Sequence: Synthetic oligonucleotide
uacuucgcgcaacucugca

SEQ ID NO: 1349017 - RNA, 19 nt, Artificial Sequence
  Description of Artificial Sequence: Synthetic oligonucleotide
uccaauccuuaaacauuca

SEQ ID NO: 1349018 - RNA, 19 nt, Artificial Sequence
  Description of Artificial Sequence: Synthetic oligonucleotide
guagaucucgucuuacucu

SEQ ID NO: 1349019 - RNA, 19 nt, Artificial Sequence
  Description of Artificial Sequence: Synthetic oligonucleotide
uguguagaucucgucuuac

SEQ ID NO: 1349020 - RNA, 19 nt, Artificial Sequence
  Description of Artificial Sequence: Synthetic oligonucleotide
uguuagcauucucugcaua

SEQ ID NO: 1349021 - RNA, 19 nt, Artificial Sequence
  Description of Artificial Sequence: Synthetic oligonucleotide
uucuuugauuugacacgca

SEQ ID NO: 1349022 - RNA, 19 nt, Artificial Sequence
  Description of Artificial Sequence: Synthetic oligonucleotide
gacuacuucgcgcaacucu

SEQ ID NO: 1349023 - RNA, 19 nt, Artificial Sequence
  Description of Artificial Sequence: Synthetic oligonucleotide
aguuucaccgaacgggcuu

SEQ ID NO: 1349024 - RNA, 19 nt, Artificial Sequence
  Description of Artificial Sequence: Synthetic oligonucleotide
auguugcauacacaccaga

SEQ ID NO: 1349025 - RNA, 19 nt, Artificial Sequence
  Description of Artificial Sequence: Synthetic oligonucleotide
caucuucagauuuaguggu

SEQ ID NO: 1349026 - RNA, 19 nt, Artificial Sequence
  Description of Artificial Sequence: Synthetic oligonucleotide
gaacugacagacgcaaguc

SEQ ID NO: 1349027 - RNA, 19 nt, Artificial Sequence
  Description of Artificial Sequence: Synthetic oligonucleotide
aguccaagcugucgguugu

SEQ ID NO: 1349028 - RNA, 19 nt, Artificial Sequence
  Description of Artificial Sequence: Synthetic oligonucleotide
acgcauuaucauaagauuu

SEQ ID NO: 1349029 - RNA, 19 nt, Artificial Sequence
  Description of Artificial Sequence: Synthetic oligonucleotide
caaaggagcgcaugaucuc

SEQ ID NO: 1349030 - RNA, 19 nt, Artificial Sequence
  Description of Artificial Sequence: Synthetic oligonucleotide
acaacguagagaacacugu

SEQ ID NO: 1349031 - RNA, 19 nt, Artificial Sequence
  Description of Artificial Sequence: Synthetic oligonucleotide
aaucgcacagggccaggaa

SEQ ID NO: 1349032 - RNA, 19 nt, Artificial Sequence
  Description of Artificial Sequence: Synthetic oligonucleotide
caguauaaccagcaucaca

SEQ ID NO: 1349033 - RNA, 19 nt, Artificial Sequence
  Description of Artificial Sequence: Synthetic oligonucleotide
guaguucuguuucugacau

SEQ ID NO: 1349034 - RNA, 19 nt, Artificial Sequence
  Description of Artificial Sequence: Synthetic oligonucleotide
aacccucgcaaagugucca

SEQ ID NO: 1349035 - RNA, 19 nt, Artificial Sequence
  Description of Artificial Sequence: Synthetic oligonucleotide
aaaucgcacagggccagga

SEQ ID NO: 1349036 - RNA, 19 nt, Artificial Sequence
  Description of Artificial Sequence: Synthetic oligonucleotide
ccuuaaacauucacuuaag

SEQ ID NO: 1349037 - RNA, 19 nt, Artificial Sequence
  Description of Artificial Sequence: Synthetic oligonucleotide
cauaagauuucccgucgga

SEQ ID NO: 1349038 - RNA, 19 nt, Artificial Sequence
  Description of Artificial Sequence: Synthetic oligonucleotide
uuccaaugacagcugcaau

SEQ ID NO: 1349039 - RNA, 19 nt, Artificial Sequence
  Description of Artificial Sequence: Synthetic oligonucleotide
caaacgcaaggcaacaugu

SEQ ID NO: 1349040 - RNA, 19 nt, Artificial Sequence
  Description of Artificial Sequence: Synthetic oligonucleotide
aggagcgcaugaucucagg

SEQ ID NO: 1349041 - RNA, 19 nt, Artificial Sequence
  Description of Artificial Sequence: Synthetic oligonucleotide
cuacuucgcgcaacucugc

SEQ ID NO: 1349042 - RNA, 19 nt, Artificial Sequence
  Description of Artificial Sequence: Synthetic oligonucleotide
cugaaaucgcacagggcca

SEQ ID NO: 1349043 - RNA, 19 nt, Artificial Sequence
  Description of Artificial Sequence: Synthetic oligonucleotide
cucuaauacuguauugugu

SEQ ID NO: 1349044 - RNA, 19 nt, Artificial Sequence
  Description of Artificial Sequence: Synthetic oligonucleotide
gccauaaggaacaggguug

SEQ ID NO: 1349045 - RNA, 19 nt, Artificial Sequence
  Description of Artificial Sequence: Synthetic oligonucleotide
cucgcaaaguguccagcug

SEQ ID NO: 1349046 - RNA, 19 nt, Artificial Sequence
  Description of Artificial Sequence: Synthetic oligonucleotide
cugaaucguuccaaugaca

SEQ ID NO: 1349047 - RNA, 19 nt, Artificial Sequence
  Description of Artificial Sequence: Synthetic oligonucleotide
uuagcccggggagcgagag

SEQ ID NO: 1349048 - RNA, 19 nt, Artificial Sequence
  Description of Artificial Sequence: Synthetic oligonucleotide
acacaccagacgucccauc

SEQ ID NO: 1349049 - RNA, 19 nt, Artificial Sequence
  Description of Artificial Sequence: Synthetic oligonucleotide
guuccaaugacagcugcaa

SEQ ID NO: 1349050 - RNA, 19 nt, Artificial Sequence
  Description of Artificial Sequence: Synthetic oligonucleotide
ccuugugaugcagaggacc

SEQ ID NO: 1349051 - RNA, 19 nt, Artificial Sequence
  Description of Artificial Sequence: Synthetic oligonucleotide
caugacuacuucgcgcaac

SEQ ID NO: 1349052 - RNA, 19 nt, Artificial Sequence
  Description of Artificial Sequence: Synthetic oligonucleotide
gcuacugagcaucccgcag

SEQ ID NO: 1349053 - RNA, 19 nt, Artificial Sequence
  Description of Artificial Sequence: Synthetic oligonucleotide
ccgucggaagcgcagaggg

SEQ ID NO: 1349054 - RNA, 19 nt, Artificial Sequence
  Description of Artificial Sequence: Synthetic oligonucleotide
cuucgccccagaugcgggg

SEQ ID NO: 1349055 - RNA, 19 nt, Artificial Sequence
  Description of Artificial Sequence: Synthetic oligonucleotide
uucgcgcaacucugcagca

SEQ ID NO: 1349056 - RNA, 19 nt, Artificial Sequence
  Description of Artificial Sequence: Synthetic oligonucleotide
uaguucuguuucugacaug

SEQ ID NO: 1349057 - RNA, 19 nt, Artificial Sequence
  Description of Artificial Sequence: Synthetic oligonucleotide
gaaaucgcacagggccagg

SEQ ID NO: 1349058 - RNA, 19 nt, Artificial Sequence
  Description of Artificial Sequence: Synthetic oligonucleotide
cgggcuuaugauaagcagc

SEQ ID NO: 1349059 - RNA, 19 nt, Artificial Sequence
  Description of Artificial Sequence: Synthetic oligonucleotide
accgaacgggcuuaugaua

SEQ ID NO: 1349060 - RNA, 19 nt, Artificial Sequence
  Description of Artificial Sequence: Synthetic oligonucleotide
gauuucccgucggaagcgc

SEQ ID NO: 1349061 - RNA, 19 nt, Artificial Sequence
  Description of Artificial Sequence: Synthetic oligonucleotide
gcauaaugcccaucuucag

SEQ ID NO: 1349062 - RNA, 19 nt, Artificial Sequence
  Description of Artificial Sequence: Synthetic oligonucleotide
ggccaguauaaccagcauc

SEQ ID NO: 1349063 - RNA, 19 nt, Artificial Sequence
  Description of Artificial Sequence: Synthetic oligonucleotide
cugcuugcaggcagccugc

SEQ ID NO: 1349064 - RNA, 19 nt, Artificial Sequence
  Description of Artificial Sequence: Synthetic oligonucleotide
uagugguuguaguucuguu

SEQ ID NO: 1349065 - RNA, 19 nt, Artificial Sequence
  Description of Artificial Sequence: Synthetic oligonucleotide
guagugcccuguauuuugc

SEQ ID NO: 1349066 - RNA, 19 nt, Artificial Sequence
  Description of Artificial Sequence: Synthetic oligonucleotide
ggaacaacguagagaacac

SEQ ID NO: 1349067 - RNA, 19 nt, Artificial Sequence
  Description of Artificial Sequence: Synthetic oligonucleotide
ucccgucggaagcgcagag

SEQ ID NO: 1349068 - RNA, 19 nt, Artificial Sequence
  Description of Artificial Sequence: Synthetic oligonucleotide
auaugacagcaaucugaau

SEQ ID NO: 1349069 - RNA, 19 nt, Artificial Sequence
  Description of Artificial Sequence: Synthetic oligonucleotide
caacguagagaacacugua

SEQ ID NO: 1349070 - RNA, 19 nt, Artificial Sequence
  Description of Artificial Sequence: Synthetic oligonucleotide
gcaaccaacggcuucugaa

SEQ ID NO: 1349071 - RNA, 19 nt, Artificial Sequence
  Description of Artificial Sequence: Synthetic oligonucleotide
cagcaucacaucugcaaga

SEQ ID NO: 1349072 - RNA, 19 nt, Artificial Sequence
  Description of Artificial Sequence: Synthetic oligonucleotide
cugacagacgcaagucaca

SEQ ID NO: 1349073 - RNA, 19 nt, Artificial Sequence
  Description of Artificial Sequence: Synthetic oligonucleotide
caucccgcagaccacggca

SEQ ID NO: 1349074 - RNA, 19 nt, Artificial Sequence
  Description of Artificial Sequence: Synthetic oligonucleotide
gcagagggguugaaguugg

SEQ ID NO: 1349075 - RNA, 19 nt, Artificial Sequence
  Description of Artificial Sequence: Synthetic oligonucleotide
ucacagguggaggucuccu

SEQ ID NO: 1349076 - RNA, 19 nt, Artificial Sequence
  Description of Artificial Sequence: Synthetic oligonucleotide
uuucacaguguuggccagu

SEQ ID NO: 1349077 - RNA, 19 nt, Artificial Sequence
  Description of Artificial Sequence: Synthetic oligonucleotide
agcugcgaguuucaccgaa

SEQ ID NO: 1349078 - RNA, 19 nt, Artificial Sequence
  Description of Artificial Sequence: Synthetic oligonucleotide
cggcuucugaagaacacgg

SEQ ID NO: 1349079 - RNA, 19 nt, Artificial Sequence
  Description of Artificial Sequence: Synthetic oligonucleotide
ugacagcaaucugaaucgu

SEQ ID NO: 1349080 - RNA, 19 nt, Artificial Sequence
  Description of Artificial Sequence: Synthetic oligonucleotide
ggggcaaagggaggaauag

SEQ ID NO: 1349081 - RNA, 19 nt, Artificial Sequence
  Description of Artificial Sequence: Synthetic oligonucleotide
cauccagugacccggcuua

SEQ ID NO: 1349082 - RNA, 19 nt, Artificial Sequence
  Description of Artificial Sequence: Synthetic oligonucleotide
gguugaaguugguuugaga

SEQ ID NO: 1349083 - RNA, 19 nt, Artificial Sequence
  Description of Artificial Sequence: Synthetic oligonucleotide
cuagauuaaccuuguggau

SEQ ID NO: 1349084 - RNA, 19 nt, Artificial Sequence
  Description of Artificial Sequence: Synthetic oligonucleotide
ucuguugcacaggauccuu

SEQ ID NO: 1349085 - RNA, 19 nt, Artificial Sequence
  Description of Artificial Sequence: Synthetic oligonucleotide
cauuucccgugcaugcaga

SEQ ID NO: 1349086 - RNA, 19 nt, Artificial Sequence
  Description of Artificial Sequence: Synthetic oligonucleotide
acccucgcaaaguguccag

SEQ ID NO: 1349087 - RNA, 19 nt, Artificial Sequence
  Description of Artificial Sequence: Synthetic oligonucleotide
caucaagacaauguauacu

SEQ ID NO: 1349088 - RNA, 19 nt, Artificial Sequence
  Description of Artificial Sequence: Synthetic oligonucleotide
gggagcgagaggauagucc

SEQ ID NO: 1349089 - RNA, 19 nt, Artificial Sequence
  Description of Artificial Sequence: Synthetic oligonucleotide
caagauggcucuugcauau

SEQ ID NO: 1349090 - RNA, 19 nt, Artificial Sequence
  Description of Artificial Sequence: Synthetic oligonucleotide
aagcugcgaguuucaccga

SEQ ID NO: 1349091 - RNA, 19 nt, Artificial Sequence
  Description of Artificial Sequence: Synthetic oligonucleotide
cuuacucuuuugucucuaa

SEQ ID NO: 1349092 - RNA, 19 nt, Artificial Sequence
  Description of Artificial Sequence: Synthetic oligonucleotide
ggggacagccggcagugag

SEQ ID NO: 1349093 - RNA, 19 nt, Artificial Sequence
  Description of Artificial Sequence: Synthetic oligonucleotide
cacgcauuaucauaagauu

SEQ ID NO: 1349094 - RNA, 19 nt, Artificial Sequence
  Description of Artificial Sequence: Synthetic oligonucleotide
agcaaccaacggcuucuga

SEQ ID NO: 1349095 - RNA, 19 nt, Artificial Sequence
  Description of Artificial Sequence: Synthetic oligonucleotide
agcgggcuacugagcaucc

SEQ ID NO: 1349096 - RNA, 19 nt, Artificial Sequence
  Description of Artificial Sequence: Synthetic oligonucleotide
uaaccuuguggaugcucuu

SEQ ID NO: 1349097 - RNA, 19 nt, Artificial Sequence
  Description of Artificial Sequence: Synthetic oligonucleotide
ggcuucugaagaacacggg

SEQ ID NO: 1349098 - RNA, 19 nt, Artificial Sequence
  Description of Artificial Sequence: Synthetic oligonucleotide
cugucgguuguccggccac

SEQ ID NO: 1349099 - RNA, 19 nt, Artificial Sequence
  Description of Artificial Sequence: Synthetic oligonucleotide
cuuugauuugacacgcauu

SEQ ID NO: 1349100 - RNA, 19 nt, Artificial Sequence
  Description of Artificial Sequence: Synthetic oligonucleotide
ucgccccagaugcggggag

SEQ ID NO: 1349101 - RNA, 19 nt, Artificial Sequence
  Description of Artificial Sequence: Synthetic oligonucleotide
ccauuguaauguucuggac

SEQ ID NO: 1349102 - RNA, 19 nt, Artificial Sequence
  Description of Artificial Sequence: Synthetic oligonucleotide
aagcuucgccccagaugcg

SEQ ID NO: 1349103 - RNA, 19 nt, Artificial Sequence
  Description of Artificial Sequence: Synthetic oligonucleotide
cgucuuacucuuuugucuc

SEQ ID NO: 1349104 - RNA, 19 nt, Artificial Sequence
  Description of Artificial Sequence: Synthetic oligonucleotide
ggagcgcaugaucucagga

SEQ ID NO: 1349105 - RNA, 19 nt, Artificial Sequence
  Description of Artificial Sequence: Synthetic oligonucleotide
ccaaaggagcgcaugaucu

SEQ ID NO: 1349106 - RNA, 19 nt, Artificial Sequence
  Description of Artificial Sequence: Synthetic oligonucleotide
acgucccaucuucaucaca

SEQ ID NO: 1349107 - RNA, 19 nt, Artificial Sequence
  Description of Artificial Sequence: Synthetic oligonucleotide
gcucccucuagauuaaccu

SEQ ID NO: 1349108 - RNA, 19 nt, Artificial Sequence
  Description of Artificial Sequence: Synthetic oligonucleotide
uucccgucggaagcgcaga

SEQ ID NO: 1349109 - RNA, 19 nt, Artificial Sequence
  Description of Artificial Sequence: Synthetic oligonucleotide
ucccgcagaccacggcaac

SEQ ID NO: 1349110 - RNA, 19 nt, Artificial Sequence
  Description of Artificial Sequence: Synthetic oligonucleotide
guagggaaagcugcgaguu

SEQ ID NO: 1349111 - RNA, 19 nt, Artificial Sequence
  Description of Artificial Sequence: Synthetic oligonucleotide
uucgccccagaugcgggga

SEQ ID NO: 1349112 - RNA, 19 nt, Artificial Sequence
  Description of Artificial Sequence: Synthetic oligonucleotide
guuguccggccacugggaa

SEQ ID NO: 1349113 - RNA, 19 nt, Artificial Sequence
  Description of Artificial Sequence: Synthetic oligonucleotide
uucaccgaacgggcuuaug

SEQ ID NO: 1349114 - RNA, 19 nt, Artificial Sequence
  Description of Artificial Sequence: Synthetic oligonucleotide
gacccggcuuagcccgggg

SEQ ID NO: 1349115 - RNA, 19 nt, Artificial Sequence
  Description of Artificial Sequence: Synthetic oligonucleotide
ugacccggcuuagcccggg

SEQ ID NO: 1349116 - RNA, 19 nt, Artificial Sequence
  Description of Artificial Sequence: Synthetic oligonucleotide
uucuugcauaaugcccauc

SEQ ID NO: 1349117 - RNA, 19 nt, Artificial Sequence
  Description of Artificial Sequence: Synthetic oligonucleotide
caugcucccucuagauuaa

SEQ ID NO: 1349118 - RNA, 19 nt, Artificial Sequence
  Description of Artificial Sequence: Synthetic oligonucleotide
gguagcacucauucuggua

SEQ ID NO: 1349119 - RNA, 19 nt, Artificial Sequence
  Description of Artificial Sequence: Synthetic oligonucleotide
gagaacacuguaguccuuu

SEQ ID NO: 1349120 - RNA, 19 nt, Artificial Sequence
  Description of Artificial Sequence: Synthetic oligonucleotide
ugacuacuucgcgcaacuc

SEQ ID NO: 1349121 - RNA, 19 nt, Artificial Sequence
  Description of Artificial Sequence: Synthetic oligonucleotide
ccgaacgggcuuaugauaa

SEQ ID NO: 1349122 - RNA, 19 nt, Artificial Sequence
  Description of Artificial Sequence: Synthetic oligonucleotide
ccggggagcgagaggauag

SEQ ID NO: 1349123 - RNA, 19 nt, Artificial Sequence
  Description of Artificial Sequence: Synthetic oligonucleotide
ugucgguuguccggccacu

SEQ ID NO: 1349124 - RNA, 19 nt, Artificial Sequence
  Description of Artificial Sequence: Synthetic oligonucleotide
cgggcuacugagcaucccg

SEQ ID NO: 1349125 - RNA, 19 nt, Artificial Sequence
  Description of Artificial Sequence: Synthetic oligonucleotide
gguagggaaagcugcgagu

SEQ ID NO: 1349126 - RNA, 19 nt, Artificial Sequence
  Description of Artificial Sequence: Synthetic oligonucleotide
cucugcauaaucuguucuu

SEQ ID NO: 1349127 - RNA, 19 nt, Artificial Sequence
  Description of Artificial Sequence: Synthetic oligonucleotide
gcgagaggauaguccacug

SEQ ID NO: 1349128 - RNA, 19 nt, Artificial Sequence
  Description of Artificial Sequence: Synthetic oligonucleotide
gacagacgcaagucacagu

SEQ ID NO: 1349129 - RNA, 19 nt, Artificial Sequence
  Description of Artificial Sequence: Synthetic oligonucleotide
guuucaccgaacgggcuua

SEQ ID NO: 1349130 - RNA, 19 nt, Artificial Sequence
  Description of Artificial Sequence: Synthetic oligonucleotide
acccggcuuagcccgggga

SEQ ID NO: 1349131 - RNA, 19 nt, Artificial Sequence
  Description of Artificial Sequence: Synthetic oligonucleotide
cucagguagcacucauucu

SEQ ID NO: 1349132 - RNA, 19 nt, Artificial Sequence
  Description of Artificial Sequence: Synthetic oligonucleotide
ggcaacauguguagaucuc

SEQ ID NO: 1349133 - RNA, 19 nt, Artificial Sequence
  Description of Artificial Sequence: Synthetic oligonucleotide
acauucacuuaaggaggua

SEQ ID NO: 1349134 - RNA, 19 nt, Artificial Sequence
  Description of Artificial Sequence: Synthetic oligonucleotide
ggcuacugagcaucccgca

SEQ ID NO: 1349135 - RNA, 19 nt, Artificial Sequence
  Description of Artificial Sequence: Synthetic oligonucleotide
cugagaccacaaguaucuc

SEQ ID NO: 1349136 - RNA, 19 nt, Artificial Sequence
  Description of Artificial Sequence: Synthetic oligonucleotide
gggcuacugagcaucccgc

SEQ ID NO: 1349137 - RNA, 19 nt, Artificial Sequence
  Description of Artificial Sequence: Synthetic oligonucleotide
gacgcaagucacagugucu

SEQ ID NO: 1349138 - RNA, 19 nt, Artificial Sequence
  Description of Artificial Sequence: Synthetic oligonucleotide
cauagucacuguugcacuu

SEQ ID NO: 1349139 - RNA, 19 nt, Artificial Sequence
  Description of Artificial Sequence: Synthetic oligonucleotide
accagacgucccaucuuca

SEQ ID NO: 1349140 - RNA, 19 nt, Artificial Sequence
  Description of Artificial Sequence: Synthetic oligonucleotide
uuucaccgaacgggcuuau

SEQ ID NO: 1349141 - RNA, 19 nt, Artificial Sequence
  Description of Artificial Sequence: Synthetic oligonucleotide
gucgguuguccggccacug

SEQ ID NO: 1349142 - RNA, 19 nt, Artificial Sequence
  Description of Artificial Sequence: Synthetic oligonucleotide
ucgcgcaacucugcagcaa

SEQ ID NO: 1349143 - RNA, 19 nt, Artificial Sequence
  Description of Artificial Sequence: Synthetic oligonucleotide
gcuuagcccggggagcgag

SEQ ID NO: 1349144 - RNA, 19 nt, Artificial Sequence
  Description of Artificial Sequence: Synthetic oligonucleotide
caccgaacgggcuuaugau

SEQ ID NO: 1349145 - RNA, 19 nt, Artificial Sequence
  Description of Artificial Sequence: Synthetic oligonucleotide
gcuucgccccagaugcggg

SEQ ID NO: 1349146 - RNA, 19 nt, Artificial Sequence
  Description of Artificial Sequence: Synthetic oligonucleotide
cugccauaaggaacagggu

SEQ ID NO: 1349147 - RNA, 19 nt, Artificial Sequence
  Description of Artificial Sequence: Synthetic oligonucleotide
uccggccacugggaaacau

SEQ ID NO: 1349148 - RNA, 19 nt, Artificial Sequence
  Description of Artificial Sequence: Synthetic oligonucleotide
cuuagcccggggagcgaga

SEQ ID NO: 1349149 - RNA, 19 nt, Artificial Sequence
  Description of Artificial Sequence: Synthetic oligonucleotide
gcugcggccaaaggagcgc

SEQ ID NO: 1349150 - RNA, 19 nt, Artificial Sequence
  Description of Artificial Sequence: Synthetic oligonucleotide
ccaguauaaccagcaucac

SEQ ID NO: 1349151 - RNA, 19 nt, Artificial Sequence
  Description of Artificial Sequence: Synthetic oligonucleotide
cagacgcaagucacagugu

SEQ ID NO: 1349152 - RNA, 19 nt, Artificial Sequence
  Description of Artificial Sequence: Synthetic oligonucleotide
agucacuguugcacuugaa

SEQ ID NO: 1349153 - RNA, 19 nt, Artificial Sequence
  Description of Artificial Sequence: Synthetic oligonucleotide
ccucuagauuaaccuugug

SEQ ID NO: 1349154 - RNA, 19 nt, Artificial Sequence
  Description of Artificial Sequence: Synthetic oligonucleotide
cgcgcaacucugcagcaac

SEQ ID NO: 1349155 - RNA, 19 nt, Artificial Sequence
  Description of Artificial Sequence: Synthetic oligonucleotide
ggacucccacagcaccaug

SEQ ID NO: 1349156 - RNA, 19 nt, Artificial Sequence
  Description of Artificial Sequence: Synthetic oligonucleotide
cgaacgggcuuaugauaag

SEQ ID NO: 1349157 - RNA, 19 nt, Artificial Sequence
  Description of Artificial Sequence: Synthetic oligonucleotide
gcugcgaguuucaccgaac

SEQ ID NO: 1349158 - RNA, 19 nt, Artificial Sequence
  Description of Artificial Sequence: Synthetic oligonucleotide
gguuguccggccacuggga

SEQ ID NO: 1349159 - RNA, 19 nt, Artificial Sequence
  Description of Artificial Sequence: Synthetic oligonucleotide
gggccaggaacaacguaga

SEQ ID NO: 1349160 - RNA, 19 nt, Artificial Sequence
  Description of Artificial Sequence: Synthetic oligonucleotide
cgucggaagcgcagagggg

SEQ ID NO: 1349161 - RNA, 19 nt, Artificial Sequence
  Description of Artificial Sequence: Synthetic oligonucleotide
gcugucgguuguccggcca

SEQ ID NO: 1349162 - RNA, 19 nt, Artificial Sequence
  Description of Artificial Sequence: Synthetic oligonucleotide
gcggccaaaggagcgcaug

SEQ ID NO: 1349163 - RNA, 19 nt, Artificial Sequence
  Description of Artificial Sequence: Synthetic oligonucleotide
ggaagcgcagagggguuga

SEQ ID NO: 1349164 - RNA, 19 nt, Artificial Sequence
  Description of Artificial Sequence: Synthetic oligonucleotide
caggcacauagucacuguu

SEQ ID NO: 1349165 - RNA, 19 nt, Artificial Sequence
  Description of Artificial Sequence: Synthetic oligonucleotide
cguuccaaugacagcugca

SEQ ID NO: 1349166 - RNA, 19 nt, Artificial Sequence
  Description of Artificial Sequence: Synthetic oligonucleotide
cccucgcaaaguguccagc

SEQ ID NO: 1349167 - RNA, 19 nt, Artificial Sequence
  Description of Artificial Sequence: Synthetic oligonucleotide
gcgcaacucugcagcaacc

SEQ ID NO: 1349168 - RNA, 19 nt, Artificial Sequence
  Description of Artificial Sequence: Synthetic oligonucleotide
guaguccaagcugucgguu

SEQ ID NO: 1349169 - RNA, 19 nt, Artificial Sequence
  Description of Artificial Sequence: Synthetic oligonucleotide
ggggagcgagaggauaguc

SEQ ID NO: 1349170 - RNA, 19 nt, Artificial Sequence
  Description of Artificial Sequence: Synthetic oligonucleotide
cccgucggaagcgcagagg

SEQ ID NO: 1349171 - RNA, 19 nt, Artificial Sequence
  Description of Artificial Sequence: Synthetic oligonucleotide
gggaaacaugcucccucua

SEQ ID NO: 1349172 - RNA, 19 nt, Artificial Sequence
  Description of Artificial Sequence: Synthetic oligonucleotide
cacaaacgcaaggcaacau

SEQ ID NO: 1349173 - RNA, 19 nt, Artificial Sequence
  Description of Artificial Sequence: Synthetic oligonucleotide
gcaggggacagccggcagu

SEQ ID NO: 1349174 - RNA, 19 nt, Artificial Sequence
  Description of Artificial Sequence: Synthetic oligonucleotide
cgcggggacucccacagca

SEQ ID NO: 1349175 - RNA, 19 nt, Artificial Sequence
  Description of Artificial Sequence: Synthetic oligonucleotide
cuguagugcccuguauuuu

SEQ ID NO: 1349176 - RNA, 19 nt, Artificial Sequence
  Description of Artificial Sequence: Synthetic oligonucleotide
gccggcagugaggcugcgg

SEQ ID NO: 1349177 - RNA, 19 nt, Artificial Sequence
  Description of Artificial Sequence: Synthetic oligonucleotide
gcgggcuacugagcauccc

SEQ ID NO: 1349178 - RNA, 19 nt, Artificial Sequence
  Description of Artificial Sequence: Synthetic oligonucleotide
ggcuuaugauaagcagcgu

SEQ ID NO: 1349179 - RNA, 19 nt, Artificial Sequence
  Description of Artificial Sequence: Synthetic oligonucleotide
gcgcagagggguugaaguu

SEQ ID NO: 1349180 - RNA, 19 nt, Artificial Sequence
  Description of Artificial Sequence: Synthetic oligonucleotide
ccaugacuacuucgcgcaa

SEQ ID NO: 1349181 - RNA, 19 nt, Artificial Sequence
  Description of Artificial Sequence: Synthetic oligonucleotide
gggccacgcagcgggcuac

SEQ ID NO: 1349182 - RNA, 19 nt, Artificial Sequence
  Description of Artificial Sequence: Synthetic oligonucleotide
cccgcagaccacggcaaca

SEQ ID NO: 1349183 - RNA, 19 nt, Artificial Sequence
  Description of Artificial Sequence: Synthetic oligonucleotide
ggcuuagcccggggagcga

SEQ ID NO: 1349184 - RNA, 19 nt, Artificial Sequence
  Description of Artificial Sequence: Synthetic oligonucleotide
gcgcaugaucucaggaguu

SEQ ID NO: 1349185 - RNA, 19 nt, Artificial Sequence
  Description of Artificial Sequence: Synthetic oligonucleotide
ccgcggggacucccacagc

SEQ ID NO: 1349186 - RNA, 19 nt, Artificial Sequence
  Description of Artificial Sequence: Synthetic oligonucleotide
cccggggagcgagaggaua

SEQ ID NO: 1349187 - RNA, 19 nt, Artificial Sequence
  Description of Artificial Sequence: Synthetic oligonucleotide
gcccggggagcgagaggau

SEQ ID NO: 1349188 - RNA, 19 nt, Artificial Sequence
  Description of Artificial Sequence: Synthetic oligonucleotide
aaagcacaaauuuaggcac

SEQ ID NO: 1349189 - RNA, 19 nt, Artificial Sequence
  Description of Artificial Sequence: Synthetic oligonucleotide
uacaaaagcacaaauuuag

SEQ ID NO: 1349190 - RNA, 19 nt, Artificial Sequence
  Description of Artificial Sequence: Synthetic oligonucleotide
uagaguaccauacaaaagc

SEQ ID NO: 1349191 - RNA, 19 nt, Artificial Sequence
  Description of Artificial Sequence: Synthetic oligonucleotide
aacuuuauaguugucgggc

SEQ ID NO: 1349192 - RNA, 19 nt, Artificial Sequence
  Description of Artificial Sequence: Synthetic oligonucleotide
ugugauacugaccagaggu

SEQ ID NO: 1349193 - RNA, 19 nt, Artificial Sequence
  Description of Artificial Sequence: Synthetic oligonucleotide
acagcauccccuuacaacc

SEQ ID NO: 1349194 - RNA, 19 nt, Artificial Sequence
  Description of Artificial Sequence: Synthetic oligonucleotide
uuuaaagaauguaaguucu

SEQ ID NO: 1349195 - RNA, 19 nt, Artificial Sequence
  Description of Artificial Sequence: Synthetic oligonucleotide
acaguuagcauguuuugcc

SEQ ID NO: 1349196 - RNA, 19 nt, Artificial Sequence
  Description of Artificial Sequence: Synthetic oligonucleotide
ucaacuuuauaguugucgg

SEQ ID NO: 1349197 - RNA, 19 nt, Artificial Sequence
  Description of Artificial Sequence: Synthetic oligonucleotide
uuuuagauaggcuccaacc

SEQ ID NO: 1349198 - RNA, 19 nt, Artificial Sequence
  Description of Artificial Sequence: Synthetic oligonucleotide
aacagcauccccuuacaac

SEQ ID NO: 1349199 - RNA, 19 nt, Artificial Sequence
  Description of Artificial Sequence: Synthetic oligonucleotide
uuuagauaggcuccaaccc

SEQ ID NO: 1349200 - RNA, 19 nt, Artificial Sequence
  Description of Artificial Sequence: Synthetic oligonucleotide
aaaaucacaacugagguuu

SEQ ID NO: 1349201 - RNA, 19 nt, Artificial Sequence
  Description of Artificial Sequence: Synthetic oligonucleotide
guaacugugauacugacca

SEQ ID NO: 1349202 - RNA, 19 nt, Artificial Sequence
  Description of Artificial Sequence: Synthetic oligonucleotide
acugggacgaaguauuggc

SEQ ID NO: 1349203 - RNA, 19 nt, Artificial Sequence
  Description of Artificial Sequence: Synthetic oligonucleotide
agauagcacggucugagcc

SEQ ID NO: 1349204 - RNA, 19 nt, Artificial Sequence
  Description of Artificial Sequence: Synthetic oligonucleotide
aauuuaggcacuuuaucaa

SEQ ID NO: 1349205 - RNA, 19 nt, Artificial Sequence
  Description of Artificial Sequence: Synthetic oligonucleotide
uuucuagaagacaugagaa

SEQ ID NO: 1349206 - RNA, 19 nt, Artificial Sequence
  Description of Artificial Sequence: Synthetic oligonucleotide
ucuagaagacaugagaaug

SEQ ID NO: 1349207 - RNA, 19 nt, Artificial Sequence
  Description of Artificial Sequence: Synthetic oligonucleotide
aaaccaaugaucaacagua

SEQ ID NO: 1349208 - RNA, 19 nt, Artificial Sequence
  Description of Artificial Sequence: Synthetic oligonucleotide
accaaugaucaacaguagc

SEQ ID NO: 1349209 - RNA, 19 nt, Artificial Sequence
  Description of Artificial Sequence: Synthetic oligonucleotide
uuagaguaccauacaaaag

SEQ ID NO: 1349210 - RNA, 19 nt, Artificial Sequence
  Description of Artificial Sequence: Synthetic oligonucleotide
uguauguguacauggacug

SEQ ID NO: 1349211 - RNA, 19 nt, Artificial Sequence
  Description of Artificial Sequence: Synthetic oligonucleotide
aggaggaccgcgcacagcc

SEQ ID NO: 1349212 - RNA, 19 nt, Artificial Sequence
  Description of Artificial Sequence: Synthetic oligonucleotide
acuuuauaguugucgggcc

SEQ ID NO: 1349213 - RNA, 19 nt, Artificial Sequence
  Description of Artificial Sequence: Synthetic oligonucleotide
cacugcaacacucugacag

SEQ ID NO: 1349214 - RNA, 19 nt, Artificial Sequence
  Description of Artificial Sequence: Synthetic oligonucleotide
gucggcaucauuguaaucg

SEQ ID NO: 1349215 - RNA, 19 nt, Artificial Sequence
  Description of Artificial Sequence: Synthetic oligonucleotide
uccccuuacaaccacagga

SEQ ID NO: 1349216 - RNA, 19 nt, Artificial Sequence
  Description of Artificial Sequence: Synthetic oligonucleotide
uuagauaggcuccaaccca

SEQ ID NO: 1349217 - RNA, 19 nt, Artificial Sequence
  Description of Artificial Sequence: Synthetic oligonucleotide
ucaucugauaugcagguuc

SEQ ID NO: 1349218 - RNA, 19 nt, Artificial Sequence
  Description of Artificial Sequence: Synthetic oligonucleotide
uaaucucccaggcauagcu

SEQ ID NO: 1349219 - RNA, 19 nt, Artificial Sequence
  Description of Artificial Sequence: Synthetic oligonucleotide
uuuucaagaugcucucagg

SEQ ID NO: 1349220 - RNA, 19 nt, Artificial Sequence
  Description of Artificial Sequence: Synthetic oligonucleotide
gaaguaugccaccugcuag

SEQ ID NO: 1349221 - RNA, 19 nt, Artificial Sequence
  Description of Artificial Sequence: Synthetic oligonucleotide
aagauagcacggucugagc

SEQ ID NO: 1349222 - RNA, 19 nt, Artificial Sequence
  Description of Artificial Sequence: Synthetic oligonucleotide
agucaacaggugcagaggg

SEQ ID NO: 1349223 - RNA, 19 nt, Artificial Sequence
  Description of Artificial Sequence: Synthetic oligonucleotide
ucuagagugacaucagcac

SEQ ID NO: 1349224 - RNA, 19 nt, Artificial Sequence
  Description of Artificial Sequence: Synthetic oligonucleotide
auaugcagguuccucacuc

SEQ ID NO: 1349225 - RNA, 19 nt, Artificial Sequence
  Description of Artificial Sequence: Synthetic oligonucleotide
guuggcauugaacaggcug

SEQ ID NO: 1349226 - RNA, 19 nt, Artificial Sequence
  Description of Artificial Sequence: Synthetic oligonucleotide
uguacauggacuguucuga

SEQ ID NO: 1349227 - RNA, 19 nt, Artificial Sequence
  Description of Artificial Sequence: Synthetic oligonucleotide
gaagauagcacggucugag

SEQ ID NO: 1349228 - RNA, 19 nt, Artificial Sequence
  Description of Artificial Sequence: Synthetic oligonucleotide
uuugccaggguacaccugu

SEQ ID NO: 1349229 - RNA, 19 nt, Artificial Sequence
  Description of Artificial Sequence: Synthetic oligonucleotide
aaguuuccaugucagguga

SEQ ID NO: 1349230 - RNA, 19 nt, Artificial Sequence
  Description of Artificial Sequence: Synthetic oligonucleotide
augaggcucacucuggaag

SEQ ID NO: 1349231 - RNA, 19 nt, Artificial Sequence
  Description of Artificial Sequence: Synthetic oligonucleotide
caauucuccacacugcaac

SEQ ID NO: 1349232 - RNA, 19 nt, Artificial Sequence
  Description of Artificial Sequence: Synthetic oligonucleotide
gauagcacggucugagccc

SEQ ID NO: 1349233 - RNA, 19 nt, Artificial Sequence
  Description of Artificial Sequence: Synthetic oligonucleotide
aaacaucuaucaaguuucc

SEQ ID NO: 1349234 - RNA, 19 nt, Artificial Sequence
  Description of Artificial Sequence: Synthetic oligonucleotide
ugggacgaaguauuggcag

SEQ ID NO: 1349235 - RNA, 19 nt, Artificial Sequence
  Description of Artificial Sequence: Synthetic oligonucleotide
cacaugagaaagaacagca

SEQ ID NO: 1349236 - RNA, 19 nt, Artificial Sequence
  Description of Artificial Sequence: Synthetic oligonucleotide
aguagcacaccauuagagu

SEQ ID NO: 1349237 - RNA, 19 nt, Artificial Sequence
  Description of Artificial Sequence: Synthetic oligonucleotide
acucaccagauacaagagg

SEQ ID NO: 1349238 - RNA, 19 nt, Artificial Sequence
  Description of Artificial Sequence: Synthetic oligonucleotide
aauucuccacacugcaaca

SEQ ID NO: 1349239 - RNA, 19 nt, Artificial Sequence
  Description of Artificial Sequence: Synthetic oligonucleotide
aguaacugugauacugacc

SEQ ID NO: 1349240 - RNA, 19 nt, Artificial Sequence
  Description of Artificial Sequence: Synthetic oligonucleotide
aagucaacaggugcagagg

SEQ ID NO: 1349241 - RNA, 19 nt, Artificial Sequence
  Description of Artificial Sequence: Synthetic oligonucleotide
caguagcacaccauuagag

SEQ ID NO: 1349242 - RNA, 19 nt, Artificial Sequence
  Description of Artificial Sequence: Synthetic oligonucleotide
ugacagacaauggaucucc

SEQ ID NO: 1349243 - RNA, 19 nt, Artificial Sequence
  Description of Artificial Sequence: Synthetic oligonucleotide
aucauuguaaucgcggaug

SEQ ID NO: 1349244 - RNA, 19 nt, Artificial Sequence
  Description of Artificial Sequence: Synthetic oligonucleotide
aguuagcauguuuugccag

SEQ ID NO: 1349245 - RNA, 19 nt, Artificial Sequence
  Description of Artificial Sequence: Synthetic oligonucleotide
aguauuggcagcaggguag

SEQ ID NO: 1349246 - RNA, 19 nt, Artificial Sequence
  Description of Artificial Sequence: Synthetic oligonucleotide
ucauuguaaucgcggaugu

SEQ ID NO: 1349247 - RNA, 19 nt, Artificial Sequence
  Description of Artificial Sequence: Synthetic oligonucleotide
acaagagguacaaaacauc

SEQ ID NO: 1349248 - RNA, 19 nt, Artificial Sequence
  Description of Artificial Sequence: Synthetic oligonucleotide
agugacacuuucuagccau

SEQ ID NO: 1349249 - RNA, 19 nt, Artificial Sequence
  Description of Artificial Sequence: Synthetic oligonucleotide
cuaccaaucacaaagcccu

SEQ ID NO: 1349250 - RNA, 19 nt, Artificial Sequence
  Description of Artificial Sequence: Synthetic oligonucleotide
caauggaucuccugaacug

SEQ ID NO: 1349251 - RNA, 19 nt, Artificial Sequence
  Description of Artificial Sequence: Synthetic oligonucleotide
aauggaucuccugaacuga

SEQ ID NO: 1349252 - RNA, 19 nt, Artificial Sequence
  Description of Artificial Sequence: Synthetic oligonucleotide
aucuaucaaguuuccaugu

SEQ ID NO: 1349253 - RNA, 19 nt, Artificial Sequence
  Description of Artificial Sequence: Synthetic oligonucleotide
caucugauaugcagguucc

SEQ ID NO: 1349254 - RNA, 19 nt, Artificial Sequence
  Description of Artificial Sequence: Synthetic oligonucleotide
uggacuguucugaauuucu

SEQ ID NO: 1349255 - RNA, 19 nt, Artificial Sequence
  Description of Artificial Sequence: Synthetic oligonucleotide
aucaaguuuccaugucagg

SEQ ID NO: 1349256 - RNA, 19 nt, Artificial Sequence
  Description of Artificial Sequence: Synthetic oligonucleotide
cagaagucgcgccaugucg

SEQ ID NO: 1349257 - RNA, 19 nt, Artificial Sequence
  Description of Artificial Sequence: Synthetic oligonucleotide
uaaagaauguaaguucuua

SEQ ID NO: 1349258 - RNA, 19 nt, Artificial Sequence
  Description of Artificial Sequence: Synthetic oligonucleotide
uguguacauggacuguucu

SEQ ID NO: 1349259 - RNA, 19 nt, Artificial Sequence
  Description of Artificial Sequence: Synthetic oligonucleotide
gacaugagaaugucaucug

SEQ ID NO: 1349260 - RNA, 19 nt, Artificial Sequence
  Description of Artificial Sequence: Synthetic oligonucleotide
uguuuugccaguguccgcu

SEQ ID NO: 1349261 - RNA, 19 nt, Artificial Sequence
  Description of Artificial Sequence: Synthetic oligonucleotide
acgaaguauuggcagcagg

SEQ ID NO: 1349262 - RNA, 19 nt, Artificial Sequence
  Description of Artificial Sequence: Synthetic oligonucleotide
acuuagaaauacugcagau

SEQ ID NO: 1349263 - RNA, 19 nt, Artificial Sequence
  Description of Artificial Sequence: Synthetic oligonucleotide
ucuaugucgucaucuuucu

SEQ ID NO: 1349264 - RNA, 19 nt, Artificial Sequence
  Description of Artificial Sequence: Synthetic oligonucleotide
cauccucacagaaauguuc

SEQ ID NO: 1349265 - RNA, 19 nt, Artificial Sequence
  Description of Artificial Sequence: Synthetic oligonucleotide
acuuucuagccauguaugu

SEQ ID NO: 1349266 - RNA, 19 nt, Artificial Sequence
  Description of Artificial Sequence: Synthetic oligonucleotide
uccacugggacgaaguauu

SEQ ID NO: 1349267 - RNA, 19 nt, Artificial Sequence
  Description of Artificial Sequence: Synthetic oligonucleotide
gagcaugaagauagcacgg

SEQ ID NO: 1349268 - RNA, 19 nt, Artificial Sequence
  Description of Artificial Sequence: Synthetic oligonucleotide
uaggcacuuuaucaaagaa

SEQ ID NO: 1349269 - RNA, 19 nt, Artificial Sequence
  Description of Artificial Sequence: Synthetic oligonucleotide
ugacaaacaucaucagggu

SEQ ID NO: 1349270 - RNA, 19 nt, Artificial Sequence
  Description of Artificial Sequence: Synthetic oligonucleotide
auaguugucgggccaugag

SEQ ID NO: 1349271 - RNA, 19 nt, Artificial Sequence
  Description of Artificial Sequence: Synthetic oligonucleotide
cucuccucacaugagaaag

SEQ ID NO: 1349272 - RNA, 19 nt, Artificial Sequence
  Description of Artificial Sequence: Synthetic oligonucleotide
uuguaaucgcggauguccu

SEQ ID NO: 1349273 - RNA, 19 nt, Artificial Sequence
  Description of Artificial Sequence: Synthetic oligonucleotide
agcacaccauuagaguacc

SEQ ID NO: 1349274 - RNA, 19 nt, Artificial Sequence
  Description of Artificial Sequence: Synthetic oligonucleotide
caccugucccucuagagug

SEQ ID NO: 1349275 - RNA, 19 nt, Artificial Sequence
  Description of Artificial Sequence: Synthetic oligonucleotide
agauucugcuggucccucc

SEQ ID NO: 1349276 - RNA, 19 nt, Artificial Sequence
  Description of Artificial Sequence: Synthetic oligonucleotide
cuucauacaguaacuguga

SEQ ID NO: 1349277 - RNA, 19 nt, Artificial Sequence
  Description of Artificial Sequence: Synthetic oligonucleotide
aaccucugaacaucauagu

SEQ ID NO: 1349278 - RNA, 19 nt, Artificial Sequence
  Description of Artificial Sequence: Synthetic oligonucleotide
aguugucgggccaugagag

SEQ ID NO: 1349279 - RNA, 19 nt, Artificial Sequence
  Description of Artificial Sequence: Synthetic oligonucleotide
cacgaugaaccucugaaca

SEQ ID NO: 1349280 - RNA, 19 nt, Artificial Sequence
  Description of Artificial Sequence: Synthetic oligonucleotide
cuaucaaguuuccauguca

SEQ ID NO: 1349281 - RNA, 19 nt, Artificial Sequence
  Description of Artificial Sequence: Synthetic oligonucleotide
gugucaaggacucaccaga

SEQ ID NO: 1349282 - RNA, 19 nt, Artificial Sequence
  Description of Artificial Sequence: Synthetic oligonucleotide
cuuaaucucccaggcauag

SEQ ID NO: 1349283 - RNA, 19 nt, Artificial Sequence
  Description of Artificial Sequence: Synthetic oligonucleotide
uuugccaguguccgcuacc

SEQ ID NO: 1349284 - RNA, 19 nt, Artificial Sequence
  Description of Artificial Sequence: Synthetic oligonucleotide
aaagcccugccuucaugug

SEQ ID NO: 1349285 - RNA, 19 nt, Artificial Sequence
  Description of Artificial Sequence: Synthetic oligonucleotide
aaaccccagaugcaacagu

SEQ ID NO: 1349286 - RNA, 19 nt, Artificial Sequence
  Description of Artificial Sequence: Synthetic oligonucleotide
ucggcaucauuguaaucgc

SEQ ID NO: 1349287 - RNA, 19 nt, Artificial Sequence
  Description of Artificial Sequence: Synthetic oligonucleotide
cucuagagugacaucagca

SEQ ID NO: 1349288 - RNA, 19 nt, Artificial Sequence
  Description of Artificial Sequence: Synthetic oligonucleotide
ucuccucacaugagaaaga

SEQ ID NO: 1349289 - RNA, 19 nt, Artificial Sequence
  Description of Artificial Sequence: Synthetic oligonucleotide
agugacaucagcacaccug

SEQ ID NO: 1349290 - RNA, 19 nt, Artificial Sequence
  Description of Artificial Sequence: Synthetic oligonucleotide
aaggacucaccagauacaa

SEQ ID NO: 1349291 - RNA, 19 nt, Artificial Sequence
  Description of Artificial Sequence: Synthetic oligonucleotide
accucugaacaucauaguu

SEQ ID NO: 1349292 - RNA, 19 nt, Artificial Sequence
  Description of Artificial Sequence: Synthetic oligonucleotide
aguguccgcuaccaaucac

SEQ ID NO: 1349293 - RNA, 19 nt, Artificial Sequence
  Description of Artificial Sequence: Synthetic oligonucleotide
cuuucuagccauguaugug

SEQ ID NO: 1349294 - RNA, 19 nt, Artificial Sequence
  Description of Artificial Sequence: Synthetic oligonucleotide
uccacgggccugcaagggg

SEQ ID NO: 1349295 - RNA, 19 nt, Artificial Sequence
  Description of Artificial Sequence: Synthetic oligonucleotide
uuagcauguuuugccagug

SEQ ID NO: 1349296 - RNA, 19 nt, Artificial Sequence
  Description of Artificial Sequence: Synthetic oligonucleotide
acagacaauggaucuccug

SEQ ID NO: 1349297 - RNA, 19 nt, Artificial Sequence
  Description of Artificial Sequence: Synthetic oligonucleotide
cacggugacaaacaucauc

SEQ ID NO: 1349298 - RNA, 19 nt, Artificial Sequence
  Description of Artificial Sequence: Synthetic oligonucleotide
ggcaucauuguaaucgcgg

SEQ ID NO: 1349299 - RNA, 19 nt, Artificial Sequence
  Description of Artificial Sequence: Synthetic oligonucleotide
uugucgggccaugagagca

SEQ ID NO: 1349300 - RNA, 19 nt, Artificial Sequence
  Description of Artificial Sequence: Synthetic oligonucleotide
ggccaugagagcaugagcc

SEQ ID NO: 1349301 - RNA, 19 nt, Artificial Sequence
  Description of Artificial Sequence: Synthetic oligonucleotide
acaaauuuaggcacuuuau

SEQ ID NO: 1349302 - RNA, 19 nt, Artificial Sequence
  Description of Artificial Sequence: Synthetic oligonucleotide
cugauaugcagguuccuca

SEQ ID NO: 1349303 - RNA, 19 nt, Artificial Sequence
  Description of Artificial Sequence: Synthetic oligonucleotide
cacaguuagcauguuuugc

SEQ ID NO: 1349304 - RNA, 19 nt, Artificial Sequence
  Description of Artificial Sequence: Synthetic oligonucleotide
ugaccggcgggaaguaugc

SEQ ID NO: 1349305 - RNA, 19 nt, Artificial Sequence
  Description of Artificial Sequence: Synthetic oligonucleotide
aaccaaugaucaacaguag

SEQ ID NO: 1349306 - RNA, 19 nt, Artificial Sequence
  Description of Artificial Sequence: Synthetic oligonucleotide
cauccccuuacaaccacag

SEQ ID NO: 1349307 - RNA, 19 nt, Artificial Sequence
  Description of Artificial Sequence: Synthetic oligonucleotide
cucaccagauacaagaggu

SEQ ID NO: 1349308 - RNA, 19 nt, Artificial Sequence
  Description of Artificial Sequence: Synthetic oligonucleotide
agcauccccuuacaaccac

SEQ ID NO: 1349309 - RNA, 19 nt, Artificial Sequence
  Description of Artificial Sequence: Synthetic oligonucleotide
uucuuuuagauaggcucca

SEQ ID NO: 1349310 - RNA, 19 nt, Artificial Sequence
  Description of Artificial Sequence: Synthetic oligonucleotide
guguacauggacuguucug

SEQ ID NO: 1349311 - RNA, 19 nt, Artificial Sequence
  Description of Artificial Sequence: Synthetic oligonucleotide
ggugaugccacaguuagca

SEQ ID NO: 1349312 - RNA, 19 nt, Artificial Sequence
  Description of Artificial Sequence: Synthetic oligonucleotide
gaagguccgaggcacacaa

SEQ ID NO: 1349313 - RNA, 19 nt, Artificial Sequence
  Description of Artificial Sequence: Synthetic oligonucleotide
ccucugaacaucauaguug

SEQ ID NO: 1349314 - RNA, 19 nt, Artificial Sequence
  Description of Artificial Sequence: Synthetic oligonucleotide
agaguaccauacaaaagca

SEQ ID NO: 1349315 - RNA, 19 nt, Artificial Sequence
  Description of Artificial Sequence: Synthetic oligonucleotide
agguuccucacuccacggg

SEQ ID NO: 1349316 - RNA, 19 nt, Artificial Sequence
  Description of Artificial Sequence: Synthetic oligonucleotide
agaacagcauccccuuaca

SEQ ID NO: 1349317 - RNA, 19 nt, Artificial Sequence
  Description of Artificial Sequence: Synthetic oligonucleotide
gaugaaccucugaacauca

SEQ ID NO: 1349318 - RNA, 19 nt, Artificial Sequence
  Description of Artificial Sequence: Synthetic oligonucleotide
auguuagccgcccagcgua

SEQ ID NO: 1349319 - RNA, 19 nt, Artificial Sequence
  Description of Artificial Sequence: Synthetic oligonucleotide
agcugguaaacguacuuua

SEQ ID NO: 1349320 - RNA, 19 nt, Artificial Sequence
  Description of Artificial Sequence: Synthetic oligonucleotide
uagaagacaugagaauguc

SEQ ID NO: 1349321 - RNA, 19 nt, Artificial Sequence
  Description of Artificial Sequence: Synthetic oligonucleotide
cgaaguauuggcagcaggg

SEQ ID NO: 1349322 - RNA, 19 nt, Artificial Sequence
  Description of Artificial Sequence: Synthetic oligonucleotide
uauguguacauggacuguu

SEQ ID NO: 1349323 - RNA, 19 nt, Artificial Sequence
  Description of Artificial Sequence: Synthetic oligonucleotide
acaccauuagaguaccaua

SEQ ID NO: 1349324 - RNA, 19 nt, Artificial Sequence
  Description of Artificial Sequence: Synthetic oligonucleotide
uguccgcuaccaaucacaa

SEQ ID NO: 1349325 - RNA, 19 nt, Artificial Sequence
  Description of Artificial Sequence: Synthetic oligonucleotide
ugcaacaguagcacaccau

SEQ ID NO: 1349326 - RNA, 19 nt, Artificial Sequence
  Description of Artificial Sequence: Synthetic oligonucleotide
acggucugagcccacgaug

SEQ ID NO: 1349327 - RNA, 19 nt, Artificial Sequence
  Description of Artificial Sequence: Synthetic oligonucleotide
agcccgauuguccuccuug

SEQ ID NO: 1349328 - RNA, 19 nt, Artificial Sequence
  Description of Artificial Sequence: Synthetic oligonucleotide
ugucaaggacucaccagau

SEQ ID NO: 1349329 - RNA, 19 nt, Artificial Sequence
  Description of Artificial Sequence: Synthetic oligonucleotide
ugucaggugaugccacagu

SEQ ID NO: 1349330 - RNA, 19 nt, Artificial Sequence
  Description of Artificial Sequence: Synthetic oligonucleotide
cacaaauuuaggcacuuua

SEQ ID NO: 1349331 - RNA, 19 nt, Artificial Sequence
  Description of Artificial Sequence: Synthetic oligonucleotide
uauaguugucgggccauga

SEQ ID NO: 1349332 - RNA, 19 nt, Artificial Sequence
  Description of Artificial Sequence: Synthetic oligonucleotide
ugggucuagcuuugagaag

SEQ ID NO: 1349333 - RNA, 19 nt, Artificial Sequence
  Description of Artificial Sequence: Synthetic oligonucleotide
uaacugugauacugaccag

SEQ ID NO: 1349334 - RNA, 19 nt, Artificial Sequence
  Description of Artificial Sequence: Synthetic oligonucleotide
aggugucaaggacucacca

SEQ ID NO: 1349335 - RNA, 19 nt, Artificial Sequence
  Description of Artificial Sequence: Synthetic oligonucleotide
cuuuauaguugucgggcca

SEQ ID NO: 1349336 - RNA, 19 nt, Artificial Sequence
  Description of Artificial Sequence: Synthetic oligonucleotide
aagccuucauacaguaacu

SEQ ID NO: 1349337 - RNA, 19 nt, Artificial Sequence
  Description of Artificial Sequence: Synthetic oligonucleotide
ggugucaaggacucaccag

SEQ ID NO: 1349338 - RNA, 19 nt, Artificial Sequence
  Description of Artificial Sequence: Synthetic oligonucleotide
cuagccauguauguguaca

SEQ ID NO: 1349339 - RNA, 19 nt, Artificial Sequence
  Description of Artificial Sequence: Synthetic oligonucleotide
cugugauacugaccagagg

SEQ ID NO: 1349340 - RNA, 19 nt, Artificial Sequence
  Description of Artificial Sequence: Synthetic oligonucleotide
ucaccagauacaagaggua

SEQ ID NO: 1349341 - RNA, 19 nt, Artificial Sequence
  Description of Artificial Sequence: Synthetic oligonucleotide
accugcuagaggucuucuc

SEQ ID NO: 1349342 - RNA, 19 nt, Artificial Sequence
  Description of Artificial Sequence: Synthetic oligonucleotide
augaucaacaguagcucca

SEQ ID NO: 1349343 - RNA, 19 nt, Artificial Sequence
  Description of Artificial Sequence: Synthetic oligonucleotide
gcuaccaaucacaaagccc

SEQ ID NO: 1349344 - RNA, 19 nt, Artificial Sequence
  Description of Artificial Sequence: Synthetic oligonucleotide
uuuugccaguguccgcuac

SEQ ID NO: 1349345 - RNA, 19 nt, Artificial Sequence
  Description of Artificial Sequence: Synthetic oligonucleotide
aagcacaaauuuaggcacu

SEQ ID NO: 1349346 - RNA, 19 nt, Artificial Sequence
  Description of Artificial Sequence: Synthetic oligonucleotide
gaagucgcgccaugucggc

SEQ ID NO: 1349347 - RNA, 19 nt, Artificial Sequence
  Description of Artificial Sequence: Synthetic oligonucleotide
gagguacaaaacaucuauc

SEQ ID NO: 1349348 - RNA, 19 nt, Artificial Sequence
  Description of Artificial Sequence: Synthetic oligonucleotide
aacugagguuuuaaagaau

SEQ ID NO: 1349349 - RNA, 19 nt, Artificial Sequence
  Description of Artificial Sequence: Synthetic oligonucleotide
uaccaaucacaaagcccug

SEQ ID NO: 1349350 - RNA, 19 nt, Artificial Sequence
  Description of Artificial Sequence: Synthetic oligonucleotide
ugaagauagcacggucuga

SEQ ID NO: 1349351 - RNA, 19 nt, Artificial Sequence
  Description of Artificial Sequence: Synthetic oligonucleotide
ugacacuuucuagccaugu

SEQ ID NO: 1349352 - RNA, 19 nt, Artificial Sequence
  Description of Artificial Sequence: Synthetic oligonucleotide
uuaaucucccaggcauagc

SEQ ID NO: 1349353 - RNA, 19 nt, Artificial Sequence
  Description of Artificial Sequence: Synthetic oligonucleotide
aguaugccaccugcuagag

SEQ ID NO: 1349354 - RNA, 19 nt, Artificial Sequence
  Description of Artificial Sequence: Synthetic oligonucleotide
uucuagccauguaugugua

SEQ ID NO: 1349355 - RNA, 19 nt, Artificial Sequence
  Description of Artificial Sequence: Synthetic oligonucleotide
ugcaaggggcugugucugg

SEQ ID NO: 1349356 - RNA, 19 nt, Artificial Sequence
  Description of Artificial Sequence: Synthetic oligonucleotide
aagagguacaaaacaucua

SEQ ID NO: 1349357 - RNA, 19 nt, Artificial Sequence
  Description of Artificial Sequence: Synthetic oligonucleotide
auguguacauggacuguuc

SEQ ID NO: 1349358 - RNA, 19 nt, Artificial Sequence
  Description of Artificial Sequence: Synthetic oligonucleotide
cagguuccucacuccacgg

SEQ ID NO: 1349359 - RNA, 19 nt, Artificial Sequence
  Description of Artificial Sequence: Synthetic oligonucleotide
agcaugaagauagcacggu

SEQ ID NO: 1349360 - RNA, 19 nt, Artificial Sequence
  Description of Artificial Sequence: Synthetic oligonucleotide
uuccguggagguggggugg

SEQ ID NO: 1349361 - RNA, 19 nt, Artificial Sequence
  Description of Artificial Sequence: Synthetic oligonucleotide
uagcauguuuugccagugu

SEQ ID NO: 1349362 - RNA, 19 nt, Artificial Sequence
  Description of Artificial Sequence: Synthetic oligonucleotide
accggcgggaaguaugcca

SEQ ID NO: 1349363 - RNA, 19 nt, Artificial Sequence
  Description of Artificial Sequence: Synthetic oligonucleotide
guaaucgcggauguccuuc

SEQ ID NO: 1349364 - RNA, 19 nt, Artificial Sequence
  Description of Artificial Sequence: Synthetic oligonucleotide
uuauaguugucgggccaug

SEQ ID NO: 1349365 - RNA, 19 nt, Artificial Sequence
  Description of Artificial Sequence: Synthetic oligonucleotide
augagcccucaaaggaagc

SEQ ID NO: 1349366 - RNA, 19 nt, Artificial Sequence
  Description of Artificial Sequence: Synthetic oligonucleotide
uugccugggucuagcuuug

SEQ ID NO: 1349367 - RNA, 19 nt, Artificial Sequence
  Description of Artificial Sequence: Synthetic oligonucleotide
gacgaaguauuggcagcag

SEQ ID NO: 1349368 - RNA, 19 nt, Artificial Sequence
  Description of Artificial Sequence: Synthetic oligonucleotide
guacucuggaggugucaag

SEQ ID NO: 1349369 - RNA, 19 nt, Artificial Sequence
  Description of Artificial Sequence: Synthetic oligonucleotide
cagugggguucccugacac

SEQ ID NO: 1349370 - RNA, 19 nt, Artificial Sequence
  Description of Artificial Sequence: Synthetic oligonucleotide
gggacgaaguauuggcagc

SEQ ID NO: 1349371 - RNA, 19 nt, Artificial Sequence
  Description of Artificial Sequence: Synthetic oligonucleotide
auacugaccagaggucaug

SEQ ID NO: 1349372 - RNA, 19 nt, Artificial Sequence
  Description of Artificial Sequence: Synthetic oligonucleotide
ggcaauucuccacacugca

SEQ ID NO: 1349373 - RNA, 19 nt, Artificial Sequence
  Description of Artificial Sequence: Synthetic oligonucleotide
ucgucaucuuucucccacu

SEQ ID NO: 1349374 - RNA, 19 nt, Artificial Sequence
  Description of Artificial Sequence: Synthetic oligonucleotide
caaggacucaccagauaca

SEQ ID NO: 1349375 - RNA, 19 nt, Artificial Sequence
  Description of Artificial Sequence: Synthetic oligonucleotide
guugucgggccaugagagc

SEQ ID NO: 1349376 - RNA, 19 nt, Artificial Sequence
  Description of Artificial Sequence: Synthetic oligonucleotide
gcuagugauuucuucuguc

SEQ ID NO: 1349377 - RNA, 19 nt, Artificial Sequence
  Description of Artificial Sequence: Synthetic oligonucleotide
auagcacggucugagccca

SEQ ID NO: 1349378 - RNA, 19 nt, Artificial Sequence
  Description of Artificial Sequence: Synthetic oligonucleotide
gacacuuucuagccaugua

SEQ ID NO: 1349379 - RNA, 19 nt, Artificial Sequence
  Description of Artificial Sequence: Synthetic oligonucleotide
aaucacaacugagguuuua

SEQ ID NO: 1349380 - RNA, 19 nt, Artificial Sequence
  Description of Artificial Sequence: Synthetic oligonucleotide
gaaguauuggcagcagggu

SEQ ID NO: 1349381 - RNA, 19 nt, Artificial Sequence
  Description of Artificial Sequence: Synthetic oligonucleotide
caugugugaagccuucaua

SEQ ID NO: 1349382 - RNA, 19 nt, Artificial Sequence
  Description of Artificial Sequence: Synthetic oligonucleotide
uguaaucgcggauguccuu

SEQ ID NO: 1349383 - RNA, 19 nt, Artificial Sequence
  Description of Artificial Sequence: Synthetic oligonucleotide
cugggacgaaguauuggca

SEQ ID NO: 1349384 - RNA, 19 nt, Artificial Sequence
  Description of Artificial Sequence: Synthetic oligonucleotide
gcaucauuguaaucgcgga

SEQ ID NO: 1349385 - RNA, 19 nt, Artificial Sequence
  Description of Artificial Sequence: Synthetic oligonucleotide
caggcuagugauuucuucu

SEQ ID NO: 1349386 - RNA, 19 nt, Artificial Sequence
  Description of Artificial Sequence: Synthetic oligonucleotide
agucgcgccaugucggcau

SEQ ID NO: 1349387 - RNA, 19 nt, Artificial Sequence
  Description of Artificial Sequence: Synthetic oligonucleotide
gugauacugaccagagguc

SEQ ID NO: 1349388 - RNA, 19 nt, Artificial Sequence
  Description of Artificial Sequence: Synthetic oligonucleotide
gucaacaggugcagagggc

SEQ ID NO: 1349389 - RNA, 19 nt, Artificial Sequence
  Description of Artificial Sequence: Synthetic oligonucleotide
ccauguuagccgcccagcg

SEQ ID NO: 1349390 - RNA, 19 nt, Artificial Sequence
  Description of Artificial Sequence: Synthetic oligonucleotide
caaagcccugccuucaugu

SEQ ID NO: 1349391 - RNA, 19 nt, Artificial Sequence
  Description of Artificial Sequence: Synthetic oligonucleotide
ugccugaccggcgggaagu

SEQ ID NO: 1349392 - RNA, 19 nt, Artificial Sequence
  Description of Artificial Sequence: Synthetic oligonucleotide
gccaugagagcaugagccc

SEQ ID NO: 1349393 - RNA, 19 nt, Artificial Sequence
  Description of Artificial Sequence: Synthetic oligonucleotide
cuugccugggucuagcuuu

SEQ ID NO: 1349394 - RNA, 19 nt, Artificial Sequence
  Description of Artificial Sequence: Synthetic oligonucleotide
cuuugccaggguacaccug

SEQ ID NO: 1349395 - RNA, 19 nt, Artificial Sequence
  Description of Artificial Sequence: Synthetic oligonucleotide
aggucaugcacagacccuu

SEQ ID NO: 1349396 - RNA, 19 nt, Artificial Sequence
  Description of Artificial Sequence: Synthetic oligonucleotide
cagaugcaacaguagcaca

SEQ ID NO: 1349397 - RNA, 19 nt, Artificial Sequence
  Description of Artificial Sequence: Synthetic oligonucleotide
gauaugcagguuccucacu

SEQ ID NO: 1349398 - RNA, 19 nt, Artificial Sequence
  Description of Artificial Sequence: Synthetic oligonucleotide
agcacggucugagcccacg

SEQ ID NO: 1349399 - RNA, 19 nt, Artificial Sequence
  Description of Artificial Sequence: Synthetic oligonucleotide
gcaugaagauagcacgguc

SEQ ID NO: 1349400 - RNA, 19 nt, Artificial Sequence
  Description of Artificial Sequence: Synthetic oligonucleotide
ggaaguaugccaccugcua

SEQ ID NO: 1349401 - RNA, 19 nt, Artificial Sequence
  Description of Artificial Sequence: Synthetic oligonucleotide
ugggguucccugacacggu

SEQ ID NO: 1349402 - RNA, 19 nt, Artificial Sequence
  Description of Artificial Sequence: Synthetic oligonucleotide
gaaugucaucugauaugca

SEQ ID NO: 1349403 - RNA, 19 nt, Artificial Sequence
  Description of Artificial Sequence: Synthetic oligonucleotide
uccaacccaugaacagcaa

SEQ ID NO: 1349404 - RNA, 19 nt, Artificial Sequence
  Description of Artificial Sequence: Synthetic oligonucleotide
gcuccaacccaugaacagc

SEQ ID NO: 1349405 - RNA, 19 nt, Artificial Sequence
  Description of Artificial Sequence: Synthetic oligonucleotide
agcacaaauuuaggcacuu

SEQ ID NO: 1349406 - RNA, 19 nt, Artificial Sequence
  Description of Artificial Sequence: Synthetic oligonucleotide
aggacucaccagauacaag

SEQ ID NO: 1349407 - RNA, 19 nt, Artificial Sequence
  Description of Artificial Sequence: Synthetic oligonucleotide
gcccgauuguccuccuugg

SEQ ID NO: 1349408 - RNA, 19 nt, Artificial Sequence
  Description of Artificial Sequence: Synthetic oligonucleotide
caugucaggugaugccaca

SEQ ID NO: 1349409 - RNA, 19 nt, Artificial Sequence
  Description of Artificial Sequence: Synthetic oligonucleotide
caggguacaccugucccuc

SEQ ID NO: 1349410 - RNA, 19 nt, Artificial Sequence
  Description of Artificial Sequence: Synthetic oligonucleotide
aaucgcggauguccuucuu

SEQ ID NO: 1349411 - RNA, 19 nt, Artificial Sequence
  Description of Artificial Sequence: Synthetic oligonucleotide
ccauuagaguaccauacaa

SEQ ID NO: 1349412 - RNA, 19 nt, Artificial Sequence
  Description of Artificial Sequence: Synthetic oligonucleotide
gagcccacgaugaaccucu

SEQ ID NO: 1349413 - RNA, 19 nt, Artificial Sequence
  Description of Artificial Sequence: Synthetic oligonucleotide
ugucggcaucauuguaauc

SEQ ID NO: 1349414 - RNA, 19 nt, Artificial Sequence
  Description of Artificial Sequence: Synthetic oligonucleotide
cagaagguccgaggcacac

SEQ ID NO: 1349415 - RNA, 19 nt, Artificial Sequence
  Description of Artificial Sequence: Synthetic oligonucleotide
gggucuagcuuugagaagu

SEQ ID NO: 1349416 - RNA, 19 nt, Artificial Sequence
  Description of Artificial Sequence: Synthetic oligonucleotide
cugcccugccacaggcuag

SEQ ID NO: 1349417 - RNA, 19 nt, Artificial Sequence
  Description of Artificial Sequence: Synthetic oligonucleotide
gaagauucugcuggucccu

SEQ ID NO: 1349418 - RNA, 19 nt, Artificial Sequence
  Description of Artificial Sequence: Synthetic oligonucleotide
gcauugaacaggcugcccu

SEQ ID NO: 1349419 - RNA, 19 nt, Artificial Sequence
  Description of Artificial Sequence: Synthetic oligonucleotide
cccagaugcaacaguagca

SEQ ID NO: 1349420 - RNA, 19 nt, Artificial Sequence
  Description of Artificial Sequence: Synthetic oligonucleotide
ggcauccucacagaaaugu

SEQ ID NO: 1349421 - RNA, 19 nt, Artificial Sequence
  Description of Artificial Sequence: Synthetic oligonucleotide
aggcuccaacccaugaaca

SEQ ID NO: 1349422 - RNA, 19 nt, Artificial Sequence
  Description of Artificial Sequence: Synthetic oligonucleotide
ggguagggcaauucuccac

SEQ ID NO: 1349423 - RNA, 19 nt, Artificial Sequence
  Description of Artificial Sequence: Synthetic oligonucleotide
aagucgcgccaugucggca

SEQ ID NO: 1349424 - RNA, 19 nt, Artificial Sequence
  Description of Artificial Sequence: Synthetic oligonucleotide
agaagguccgaggcacaca

SEQ ID NO: 1349425 - RNA, 19 nt, Artificial Sequence
  Description of Artificial Sequence: Synthetic oligonucleotide
cuccacgggccugcaaggg

SEQ ID NO: 1349426 - RNA, 19 nt, Artificial Sequence
  Description of Artificial Sequence: Synthetic oligonucleotide
ccgcuaccaaucacaaagc

SEQ ID NO: 1349427 - RNA, 19 nt, Artificial Sequence
  Description of Artificial Sequence: Synthetic oligonucleotide
cacucugacagugacacuu

SEQ ID NO: 1349428 - RNA, 19 nt, Artificial Sequence
  Description of Artificial Sequence: Synthetic oligonucleotide
ggacgaaguauuggcagca

SEQ ID NO: 1349429 - RNA, 19 nt, Artificial Sequence
  Description of Artificial Sequence: Synthetic oligonucleotide
ccgugguuuggcaucuccc

SEQ ID NO: 1349430 - RNA, 19 nt, Artificial Sequence
  Description of Artificial Sequence: Synthetic oligonucleotide
gucuagcuuugagaaguca

SEQ ID NO: 1349431 - RNA, 19 nt, Artificial Sequence
  Description of Artificial Sequence: Synthetic oligonucleotide
cugguaaacguacuuuauu

SEQ ID NO: 1349432 - RNA, 19 nt, Artificial Sequence
  Description of Artificial Sequence: Synthetic oligonucleotide
cagugacacuuucuagcca

SEQ ID NO: 1349433 - RNA, 19 nt, Artificial Sequence
  Description of Artificial Sequence: Synthetic oligonucleotide
gucaaggacucaccagaua

SEQ ID NO: 1349434 - RNA, 19 nt, Artificial Sequence
  Description of Artificial Sequence: Synthetic oligonucleotide
cagcauccccuuacaacca

SEQ ID NO: 1349435 - RNA, 19 nt, Artificial Sequence
  Description of Artificial Sequence: Synthetic oligonucleotide
gauacugaccagaggucau

SEQ ID NO: 1349436 - RNA, 19 nt, Artificial Sequence
  Description of Artificial Sequence: Synthetic oligonucleotide
ccaugucaggugaugccac

SEQ ID NO: 1349437 - RNA, 19 nt, Artificial Sequence
  Description of Artificial Sequence: Synthetic oligonucleotide
gcucccaucccggagcaug

SEQ ID NO: 1349438 - RNA, 19 nt, Artificial Sequence
  Description of Artificial Sequence: Synthetic oligonucleotide
ccggcgggaaguaugccac

SEQ ID NO: 1349439 - RNA, 19 nt, Artificial Sequence
  Description of Artificial Sequence: Synthetic oligonucleotide
cccucuagagugacaucag

SEQ ID NO: 1349440 - RNA, 19 nt, Artificial Sequence
  Description of Artificial Sequence: Synthetic oligonucleotide
uccguggaggugggguggc

SEQ ID NO: 1349441 - RNA, 19 nt, Artificial Sequence
  Description of Artificial Sequence: Synthetic oligonucleotide
caucauuguaaucgcggau

SEQ ID NO: 1349442 - RNA, 19 nt, Artificial Sequence
  Description of Artificial Sequence: Synthetic oligonucleotide
cucccaucccggagcauga

SEQ ID NO: 1349443 - RNA, 19 nt, Artificial Sequence
  Description of Artificial Sequence: Synthetic oligonucleotide
caguguccgcuaccaauca

SEQ ID NO: 1349444 - RNA, 19 nt, Artificial Sequence
  Description of Artificial Sequence: Synthetic oligonucleotide
cauguuagccgcccagcgu

SEQ ID NO: 1349445 - RNA, 19 nt, Artificial Sequence
  Description of Artificial Sequence: Synthetic oligonucleotide
gguacucuggaggugucaa

SEQ ID NO: 1349446 - RNA, 19 nt, Artificial Sequence
  Description of Artificial Sequence: Synthetic oligonucleotide
cccuuucuagaagacauga

SEQ ID NO: 1349447 - RNA, 19 nt, Artificial Sequence
  Description of Artificial Sequence: Synthetic oligonucleotide
gccugggucuagcuuugag

SEQ ID NO: 1349448 - RNA, 19 nt, Artificial Sequence
  Description of Artificial Sequence: Synthetic oligonucleotide
uacugcagaugaggcucac

SEQ ID NO: 1349449 - RNA, 19 nt, Artificial Sequence
  Description of Artificial Sequence: Synthetic oligonucleotide
uucgcccggcgugucggcc

SEQ ID NO: 1349450 - RNA, 19 nt, Artificial Sequence
  Description of Artificial Sequence: Synthetic oligonucleotide
ggcgugucggccgcgcagg

SEQ ID NO: 1349451 - RNA, 19 nt, Artificial Sequence
  Description of Artificial Sequence: Synthetic oligonucleotide
gccauguuagccgcccagc

SEQ ID NO: 1349452 - RNA, 19 nt, Artificial Sequence
  Description of Artificial Sequence: Synthetic oligonucleotide
gcuucgcccggcgugucgg

SEQ ID NO: 1349453 - RNA, 19 nt, Artificial Sequence
  Description of Artificial Sequence: Synthetic oligonucleotide
ccgcgcaggccccaggagg

SEQ ID NO: 1349454 - RNA, 19 nt, Artificial Sequence
  Description of Artificial Sequence: Synthetic oligonucleotide
cuucgcccggcgugucggc

SEQ ID NO: 1349455 - RNA, 19 nt, Artificial Sequence
  Description of Artificial Sequence: Synthetic oligonucleotide
ggcauugaacaggcugccc

SEQ ID NO: 1349456 - RNA, 19 nt, Artificial Sequence
  Description of Artificial Sequence: Synthetic oligonucleotide
ugggguggcuucgcccggc

SEQ ID NO: 1349457 - RNA, 19 nt, Artificial Sequence
  Description of Artificial Sequence: Synthetic oligonucleotide
ccagaagucgcgccauguc

SEQ ID NO: 1349458 - RNA, 19 nt, Artificial Sequence
  Description of Artificial Sequence: Synthetic oligonucleotide
gccugcaaggggcuguguc

SEQ ID NO: 1349459 - RNA, 19 nt, Artificial Sequence
  Description of Artificial Sequence: Synthetic oligonucleotide
gucgggccaugagagcaug

SEQ ID NO: 1349460 - RNA, 19 nt, Artificial Sequence
  Description of Artificial Sequence: Synthetic oligonucleotide
ccccuuacaaccacaggaa

SEQ ID NO: 1349461 - RNA, 19 nt, Artificial Sequence
  Description of Artificial Sequence: Synthetic oligonucleotide
aggcauccucacagaaaug

SEQ ID NO: 1349462 - RNA, 19 nt, Artificial Sequence
  Description of Artificial Sequence: Synthetic oligonucleotide
aucccggagcaugaagaua

SEQ ID NO: 1349463 - RNA, 19 nt, Artificial Sequence
  Description of Artificial Sequence: Synthetic oligonucleotide
gcuagaggucuucucuucu

SEQ ID NO: 1349464 - RNA, 19 nt, Artificial Sequence
  Description of Artificial Sequence: Synthetic oligonucleotide
ccgauuguccuccuuggaa

SEQ ID NO: 1349465 - RNA, 19 nt, Artificial Sequence
  Description of Artificial Sequence: Synthetic oligonucleotide
gaccggcgggaaguaugcc

SEQ ID NO: 1349466 - RNA, 19 nt, Artificial Sequence
  Description of Artificial Sequence: Synthetic oligonucleotide
ggcuucgcccggcgugucg

SEQ ID NO: 1349467 - RNA, 19 nt, Artificial Sequence
  Description of Artificial Sequence: Synthetic oligonucleotide
cccugacacggugacaaac

SEQ ID NO: 1349468 - RNA, 19 nt, Artificial Sequence
  Description of Artificial Sequence: Synthetic oligonucleotide
caggcuugccugggucuag

SEQ ID NO: 1349469 - RNA, 19 nt, Artificial Sequence
  Description of Artificial Sequence: Synthetic oligonucleotide
gcagagggccucuugugcu

SEQ ID NO: 1349470 - RNA, 19 nt, Artificial Sequence
  Description of Artificial Sequence: Synthetic oligonucleotide
ccacugggacgaaguauug

SEQ ID NO: 1349471 - RNA, 19 nt, Artificial Sequence
  Description of Artificial Sequence: Synthetic oligonucleotide
aagguccgaggcacacaaa

SEQ ID NO: 1349472 - RNA, 19 nt, Artificial Sequence
  Description of Artificial Sequence: Synthetic oligonucleotide
cacaccugucuuggcugac

SEQ ID NO: 1349473 - RNA, 19 nt, Artificial Sequence
  Description of Artificial Sequence: Synthetic oligonucleotide
gacagacaauggaucuccu

SEQ ID NO: 1349474 - RNA, 19 nt, Artificial Sequence
  Description of Artificial Sequence: Synthetic oligonucleotide
guccgcuaccaaucacaaa

SEQ ID NO: 1349475 - RNA, 19 nt, Artificial Sequence
  Description of Artificial Sequence: Synthetic oligonucleotide
ucgcgccaugucggcauca

SEQ ID NO: 1349476 - RNA, 19 nt, Artificial Sequence
  Description of Artificial Sequence: Synthetic oligonucleotide
cggucugagcccacgauga

SEQ ID NO: 1349477 - RNA, 19 nt, Artificial Sequence
  Description of Artificial Sequence: Synthetic oligonucleotide
uagcacggucugagcccac

SEQ ID NO: 1349478 - RNA, 19 nt, Artificial Sequence
  Description of Artificial Sequence: Synthetic oligonucleotide
guucccugacacggugaca

SEQ ID NO: 1349479 - RNA, 19 nt, Artificial Sequence
  Description of Artificial Sequence: Synthetic oligonucleotide
gcaauucuccacacugcaa

SEQ ID NO: 1349480 - RNA, 19 nt, Artificial Sequence
  Description of Artificial Sequence: Synthetic oligonucleotide
ugccugggucuagcuuuga

SEQ ID NO: 1349481 - RNA, 19 nt, Artificial Sequence
  Description of Artificial Sequence: Synthetic oligonucleotide
gguuuggcaucucccuccu

SEQ ID NO: 1349482 - RNA, 19 nt, Artificial Sequence
  Description of Artificial Sequence: Synthetic oligonucleotide
ggaggugggguggcuucgc

SEQ ID NO: 1349483 - RNA, 19 nt, Artificial Sequence
  Description of Artificial Sequence: Synthetic oligonucleotide
gucgcgccaugucggcauc

SEQ ID NO: 1349484 - RNA, 19 nt, Artificial Sequence
  Description of Artificial Sequence: Synthetic oligonucleotide
gaggcucacucuggaagau

SEQ ID NO: 1349485 - RNA, 19 nt, Artificial Sequence
  Description of Artificial Sequence: Synthetic oligonucleotide
gcggauguccuucuucuuu

SEQ ID NO: 1349486 - RNA, 19 nt, Artificial Sequence
  Description of Artificial Sequence: Synthetic oligonucleotide
acacggugacaaacaucau

SEQ ID NO: 1349487 - RNA, 19 nt, Artificial Sequence
  Description of Artificial Sequence: Synthetic oligonucleotide
gcugguaaacguacuuuau

SEQ ID NO: 1349488 - RNA, 19 nt, Artificial Sequence
  Description of Artificial Sequence: Synthetic oligonucleotide
gcacggucugagcccacga

SEQ ID NO: 1349489 - RNA, 19 nt, Artificial Sequence
  Description of Artificial Sequence: Synthetic oligonucleotide
gcauccccuuacaaccaca

SEQ ID NO: 1349490 - RNA, 19 nt, Artificial Sequence
  Description of Artificial Sequence: Synthetic oligonucleotide
gggaaguaugccaccugcu

SEQ ID NO: 1349491 - RNA, 19 nt, Artificial Sequence
  Description of Artificial Sequence: Synthetic oligonucleotide
cgugguuuggcaucucccu

SEQ ID NO: 1349492 - RNA, 19 nt, Artificial Sequence
  Description of Artificial Sequence: Synthetic oligonucleotide
ccaggguacaccugucccu

SEQ ID NO: 1349493 - RNA, 19 nt, Artificial Sequence
  Description of Artificial Sequence: Synthetic oligonucleotide
ggccgcgcaggccccagga

SEQ ID NO: 1349494 - RNA, 19 nt, Artificial Sequence
  Description of Artificial Sequence: Synthetic oligonucleotide
cacggucugagcccacgau

SEQ ID NO: 1349495 - RNA, 19 nt, Artificial Sequence
  Description of Artificial Sequence: Synthetic oligonucleotide
ggcgggaaguaugccaccu

SEQ ID NO: 1349496 - RNA, 19 nt, Artificial Sequence
  Description of Artificial Sequence: Synthetic oligonucleotide
cccgauuguccuccuugga

SEQ ID NO: 1349497 - RNA, 19 nt, Artificial Sequence
  Description of Artificial Sequence: Synthetic oligonucleotide
cucacuccacgggccugca

SEQ ID NO: 1349498 - RNA, 19 nt, Artificial Sequence
  Description of Artificial Sequence: Synthetic oligonucleotide
uggcuucgcccggcguguc

SEQ ID NO: 1349499 - RNA, 19 nt, Artificial Sequence
  Description of Artificial Sequence: Synthetic oligonucleotide
guagcuccacugggacgaa

SEQ ID NO: 1349500 - RNA, 19 nt, Artificial Sequence
  Description of Artificial Sequence: Synthetic oligonucleotide
ccaugucggcaucauugua

SEQ ID NO: 1349501 - RNA, 19 nt, Artificial Sequence
  Description of Artificial Sequence: Synthetic oligonucleotide
augccacaguuagcauguu

SEQ ID NO: 1349502 - RNA, 19 nt, Artificial Sequence
  Description of Artificial Sequence: Synthetic oligonucleotide
cacgggccugcaaggggcu

SEQ ID NO: 1349503 - RNA, 19 nt, Artificial Sequence
  Description of Artificial Sequence: Synthetic oligonucleotide
ggaggaccgcgcacagcca

SEQ ID NO: 1349504 - RNA, 19 nt, Artificial Sequence
  Description of Artificial Sequence: Synthetic oligonucleotide
cggcgggaaguaugccacc

SEQ ID NO: 1349505 - RNA, 19 nt, Artificial Sequence
  Description of Artificial Sequence: Synthetic oligonucleotide
caccugcuagaggucuucu

SEQ ID NO: 1349506 - RNA, 19 nt, Artificial Sequence
  Description of Artificial Sequence: Synthetic oligonucleotide
ggaccgcgcacagccagcu

SEQ ID NO: 1349507 - RNA, 19 nt, Artificial Sequence
  Description of Artificial Sequence: Synthetic oligonucleotide
ccgcgcacagccagcugga

SEQ ID NO: 1349508 - RNA, 19 nt, Artificial Sequence
  Description of Artificial Sequence: Synthetic oligonucleotide
ggucaugcacagacccuuu

SEQ ID NO: 1349509 - RNA, 19 nt, Artificial Sequence
  Description of Artificial Sequence: Synthetic oligonucleotide
gucggccgcgcaggcccca

SEQ ID NO: 1349510 - RNA, 19 nt, Artificial Sequence
  Description of Artificial Sequence: Synthetic oligonucleotide
cccggcgugucggccgcgc

SEQ ID NO: 1349511 - RNA, 19 nt, Artificial Sequence
  Description of Artificial Sequence: Synthetic oligonucleotide
ccugccugaccggcgggaa

SEQ ID NO: 1349512 - RNA, 19 nt, Artificial Sequence
  Description of Artificial Sequence: Synthetic oligonucleotide
ccgccauguuagccgccca

SEQ ID NO: 1349513 - RNA, 19 nt, Artificial Sequence
  Description of Artificial Sequence: Synthetic oligonucleotide
gccugaccggcgggaagua

SEQ ID NO: 1349514 - RNA, 19 nt, Artificial Sequence
  Description of Artificial Sequence: Synthetic oligonucleotide
cagcccgauuguccuccuu

SEQ ID NO: 1349515 - RNA, 19 nt, Artificial Sequence
  Description of Artificial Sequence: Synthetic oligonucleotide
gcgccaugucggcaucauu

SEQ ID NO: 1349516 - RNA, 19 nt, Artificial Sequence
  Description of Artificial Sequence: Synthetic oligonucleotide
gcccgugguuuggcaucuc

SEQ ID NO: 1349517 - RNA, 19 nt, Artificial Sequence
  Description of Artificial Sequence: Synthetic oligonucleotide
ccugaccggcgggaaguau

SEQ ID NO: 1349518 - RNA, 19 nt, Artificial Sequence
  Description of Artificial Sequence: Synthetic oligonucleotide
cgcgccaugucggcaucau

SEQ ID NO: 1349519 - RNA, 19 nt, Artificial Sequence
  Description of Artificial Sequence: Synthetic oligonucleotide
aacaauaguuaauaagugc

SEQ ID NO: 1349520 - RNA, 19 nt, Artificial Sequence
  Description of Artificial Sequence: Synthetic oligonucleotide
ucuaauaagagucuuccgg

SEQ ID NO: 1349521 - RNA, 19 nt, Artificial Sequence
  Description of Artificial Sequence: Synthetic oligonucleotide
aacaauuucaccaucacag

SEQ ID NO: 1349522 - RNA, 19 nt, Artificial Sequence
  Description of Artificial Sequence: Synthetic oligonucleotide
aacuauuuaauccaucucu

SEQ ID NO: 1349523 - RNA, 19 nt, Artificial Sequence
  Description of Artificial Sequence: Synthetic oligonucleotide
uucuuaagcggacugaugg

SEQ ID NO: 1349524 - RNA, 19 nt, Artificial Sequence
  Description of Artificial Sequence: Synthetic oligonucleotide
aagucuauaaacuauuuaa

SEQ ID NO: 1349525 - RNA, 19 nt, Artificial Sequence
  Description of Artificial Sequence: Synthetic oligonucleotide
uucaaaauggcacaucaag

SEQ ID NO: 1349526 - RNA, 19 nt, Artificial Sequence
  Description of Artificial Sequence: Synthetic oligonucleotide
aaauacaucccacuggcug

SEQ ID NO: 1349527 - RNA, 19 nt, Artificial Sequence
  Description of Artificial Sequence: Synthetic oligonucleotide
aauacaucccacuggcugg

SEQ ID NO: 1349528 - RNA, 19 nt, Artificial Sequence
  Description of Artificial Sequence: Synthetic oligonucleotide
aguuacacaagguagagga

SEQ ID NO: 1349529 - RNA, 19 nt, Artificial Sequence
  Description of Artificial Sequence: Synthetic oligonucleotide
auauuuugaguguaguagg

SEQ ID NO: 1349530 - RNA, 19 nt, Artificial Sequence
  Description of Artificial Sequence: Synthetic oligonucleotide
agguaguaagucuauaaac

SEQ ID NO: 1349531 - RNA, 19 nt, Artificial Sequence
  Description of Artificial Sequence: Synthetic oligonucleotide
agaugugggcuucauaacc

SEQ ID NO: 1349532 - RNA, 19 nt, Artificial Sequence
  Description of Artificial Sequence: Synthetic oligonucleotide
ucagucaaccaguaggugg

SEQ ID NO: 1349533 - RNA, 19 nt, Artificial Sequence
  Description of Artificial Sequence: Synthetic oligonucleotide
aaaauaucuaacaauaguu

SEQ ID NO: 1349534 - RNA, 19 nt, Artificial Sequence
  Description of Artificial Sequence: Synthetic oligonucleotide
auuuaauccguucuccagg

SEQ ID NO: 1349535 - RNA, 19 nt, Artificial Sequence
  Description of Artificial Sequence: Synthetic oligonucleotide
uauuuugaguguaguaggg

SEQ ID NO: 1349536 - RNA, 19 nt, Artificial Sequence
  Description of Artificial Sequence: Synthetic oligonucleotide
gugaggaauauuuugagug

SEQ ID NO: 1349537 - RNA, 19 nt, Artificial Sequence
  Description of Artificial Sequence: Synthetic oligonucleotide
ucccagaguacauaggugg

SEQ ID NO: 1349538 - RNA, 19 nt, Artificial Sequence
  Description of Artificial Sequence: Synthetic oligonucleotide
uuuugaguguaguagggcc

SEQ ID NO: 1349539 - RNA, 19 nt, Artificial Sequence
  Description of Artificial Sequence: Synthetic oligonucleotide
uuuaauccaucucuaauuc

SEQ ID NO: 1349540 - RNA, 19 nt, Artificial Sequence
  Description of Artificial Sequence: Synthetic oligonucleotide
uuugaguguaguagggccg

SEQ ID NO: 1349541 - RNA, 19 nt, Artificial Sequence
  Description of Artificial Sequence: Synthetic oligonucleotide
uuuaauccguucuccaggg

SEQ ID NO: 1349542 - RNA, 19 nt, Artificial Sequence
  Description of Artificial Sequence: Synthetic oligonucleotide
aucucuaauucuuuggaag

SEQ ID NO: 1349543 - RNA, 19 nt, Artificial Sequence
  Description of Artificial Sequence: Synthetic oligonucleotide
aaagguaguaagucuauaa

SEQ ID NO: 1349544 - RNA, 19 nt, Artificial Sequence
  Description of Artificial Sequence: Synthetic oligonucleotide
aauaguuaauaagugcucu

SEQ ID NO: 1349545 - RNA, 19 nt, Artificial Sequence
  Description of Artificial Sequence: Synthetic oligonucleotide
uuagcuggcugaaaauagg

SEQ ID NO: 1349546 - RNA, 19 nt, Artificial Sequence
  Description of Artificial Sequence: Synthetic oligonucleotide
aaucuguuggguuuuccug

SEQ ID NO: 1349547 - RNA, 19 nt, Artificial Sequence
  Description of Artificial Sequence: Synthetic oligonucleotide
cuuuguacaaggaugccac

SEQ ID NO: 1349548 - RNA, 19 nt, Artificial Sequence
  Description of Artificial Sequence: Synthetic oligonucleotide
ucagccaucaacucuucag

SEQ ID NO: 1349549 - RNA, 19 nt, Artificial Sequence
  Description of Artificial Sequence: Synthetic oligonucleotide
auugcgacagcccaguuga

SEQ ID NO: 1349550 - RNA, 19 nt, Artificial Sequence
  Description of Artificial Sequence: Synthetic oligonucleotide
acaauaguuaauaagugcu

SEQ ID NO: 1349551 - RNA, 19 nt, Artificial Sequence
  Description of Artificial Sequence: Synthetic oligonucleotide
uggugaacacaccagauaa

SEQ ID NO: 1349552 - RNA, 19 nt, Artificial Sequence
  Description of Artificial Sequence: Synthetic oligonucleotide
ugucauuaaggcaacaauu

SEQ ID NO: 1349553 - RNA, 19 nt, Artificial Sequence
  Description of Artificial Sequence: Synthetic oligonucleotide
cacacagcgaacauagggg

SEQ ID NO: 1349554 - RNA, 19 nt, Artificial Sequence
  Description of Artificial Sequence: Synthetic oligonucleotide
aacaucucgcaugaggguc

SEQ ID NO: 1349555 - RNA, 19 nt, Artificial Sequence
  Description of Artificial Sequence: Synthetic oligonucleotide
aagguaguaagucuauaaa

SEQ ID NO: 1349556 - RNA, 19 nt, Artificial Sequence
  Description of Artificial Sequence: Synthetic oligonucleotide
aaaauaggcaaagggccuc

SEQ ID NO: 1349557 - RNA, 19 nt, Artificial Sequence
  Description of Artificial Sequence: Synthetic oligonucleotide
uggaaucgagacuugagca

SEQ ID NO: 1349558 - RNA, 19 nt, Artificial Sequence
  Description of Artificial Sequence: Synthetic oligonucleotide
uuugcacaguccaagguac

SEQ ID NO: 1349559 - RNA, 19 nt, Artificial Sequence
  Description of Artificial Sequence: Synthetic oligonucleotide
aucuguuggguuuuccugg

SEQ ID NO: 1349560 - RNA, 19 nt, Artificial Sequence
  Description of Artificial Sequence: Synthetic oligonucleotide
uuagguauaucuaccuagu

SEQ ID NO: 1349561 - RNA, 19 nt, Artificial Sequence
  Description of Artificial Sequence: Synthetic oligonucleotide
ucucuaauucuuuggaagu

SEQ ID NO: 1349562 - RNA, 19 nt, Artificial Sequence
  Description of Artificial Sequence: Synthetic oligonucleotide
aaauaucuaacaauaguua

SEQ ID NO: 1349563 - RNA, 19 nt, Artificial Sequence
  Description of Artificial Sequence: Synthetic oligonucleotide
auuuugaguguaguagggc

SEQ ID NO: 1349564 - RNA, 19 nt, Artificial Sequence
  Description of Artificial Sequence: Synthetic oligonucleotide
ugcauugaauccuuuguac

SEQ ID NO: 1349565 - RNA, 19 nt, Artificial Sequence
  Description of Artificial Sequence: Synthetic oligonucleotide
uuuggccaaagguaguaag

SEQ ID NO: 1349566 - RNA, 19 nt, Artificial Sequence
  Description of Artificial Sequence: Synthetic oligonucleotide
uuacacaagguagaggaug

SEQ ID NO: 1349567 - RNA, 19 nt, Artificial Sequence
  Description of Artificial Sequence: Synthetic oligonucleotide
auccuuuguacaaggaugc

SEQ ID NO: 1349568 - RNA, 19 nt, Artificial Sequence
  Description of Artificial Sequence: Synthetic oligonucleotide
gaugggugcagccaugccc

SEQ ID NO: 1349569 - RNA, 19 nt, Artificial Sequence
  Description of Artificial Sequence: Synthetic oligonucleotide
auaggggugacuccaauga

SEQ ID NO: 1349570 - RNA, 19 nt, Artificial Sequence
  Description of Artificial Sequence: Synthetic oligonucleotide
gguauaucuaccuagucca

SEQ ID NO: 1349571 - RNA, 19 nt, Artificial Sequence
  Description of Artificial Sequence: Synthetic oligonucleotide
aauaagagucuuccggaaa

SEQ ID NO: 1349572 - RNA, 19 nt, Artificial Sequence
  Description of Artificial Sequence: Synthetic oligonucleotide
uccugauagagcuucuuug

SEQ ID NO: 1349573 - RNA, 19 nt, Artificial Sequence
  Description of Artificial Sequence: Synthetic oligonucleotide
ucuuaagcggacugauggg

SEQ ID NO: 1349574 - RNA, 19 nt, Artificial Sequence
  Description of Artificial Sequence: Synthetic oligonucleotide
cauggggauauuuuccagg

SEQ ID NO: 1349575 - RNA, 19 nt, Artificial Sequence
  Description of Artificial Sequence: Synthetic oligonucleotide
ggggauauuuuccaggagg

SEQ ID NO: 1349576 - RNA, 19 nt, Artificial Sequence
  Description of Artificial Sequence: Synthetic oligonucleotide
uggguaguuaaguguaucc

SEQ ID NO: 1349577 - RNA, 19 nt, Artificial Sequence
  Description of Artificial Sequence: Synthetic oligonucleotide
auaguuaauaagugcucug

SEQ ID NO: 1349578 - RNA, 19 nt, Artificial Sequence
  Description of Artificial Sequence: Synthetic oligonucleotide
uaauccguucuccaggggu

SEQ ID NO: 1349579 - RNA, 19 nt, Artificial Sequence
  Description of Artificial Sequence: Synthetic oligonucleotide
aacaccuaguccugcccac

SEQ ID NO: 1349580 - RNA, 19 nt, Artificial Sequence
  Description of Artificial Sequence: Synthetic oligonucleotide
uucauaugucaugaaauac

SEQ ID NO: 1349581 - RNA, 19 nt, Artificial Sequence
  Description of Artificial Sequence: Synthetic oligonucleotide
cauuuaauccguucuccag

SEQ ID NO: 1349582 - RNA, 19 nt, Artificial Sequence
  Description of Artificial Sequence: Synthetic oligonucleotide
uguaguagggccgucaguc

SEQ ID NO: 1349583 - RNA, 19 nt, Artificial Sequence
  Description of Artificial Sequence: Synthetic oligonucleotide
uacacaagguagaggaugu

SEQ ID NO: 1349584 - RNA, 19 nt, Artificial Sequence
  Description of Artificial Sequence: Synthetic oligonucleotide
uaucauuacugcauugaau

SEQ ID NO: 1349585 - RNA, 19 nt, Artificial Sequence
  Description of Artificial Sequence: Synthetic oligonucleotide
cuaauaagagucuuccgga

SEQ ID NO: 1349586 - RNA, 19 nt, Artificial Sequence
  Description of Artificial Sequence: Synthetic oligonucleotide
auucauaugucaugaaaua

SEQ ID NO: 1349587 - RNA, 19 nt, Artificial Sequence
  Description of Artificial Sequence: Synthetic oligonucleotide
ucugaaaccauggggauau

SEQ ID NO: 1349588 - RNA, 19 nt, Artificial Sequence
  Description of Artificial Sequence: Synthetic oligonucleotide
cagucaaccaguagguggc

SEQ ID NO: 1349589 - RNA, 19 nt, Artificial Sequence
  Description of Artificial Sequence: Synthetic oligonucleotide
uggcacaucaaguuacaca

SEQ ID NO: 1349590 - RNA, 19 nt, Artificial Sequence
  Description of Artificial Sequence: Synthetic oligonucleotide
agugaggaauauuuugagu

SEQ ID NO: 1349591 - RNA, 19 nt, Artificial Sequence
  Description of Artificial Sequence: Synthetic oligonucleotide
uucaucccggaucagcucu

SEQ ID NO: 1349592 - RNA, 19 nt, Artificial Sequence
  Description of Artificial Sequence: Synthetic oligonucleotide
auucccguggugaacacac

SEQ ID NO: 1349593 - RNA, 19 nt, Artificial Sequence
  Description of Artificial Sequence: Synthetic oligonucleotide
acagcccaguugaagaucc

SEQ ID NO: 1349594 - RNA, 19 nt, Artificial Sequence
  Description of Artificial Sequence: Synthetic oligonucleotide
ucgagacuugagcacaucu

SEQ ID NO: 1349595 - RNA, 19 nt, Artificial Sequence
  Description of Artificial Sequence: Synthetic oligonucleotide
ucgcaugagggucagcaca

SEQ ID NO: 1349596 - RNA, 19 nt, Artificial Sequence
  Description of Artificial Sequence: Synthetic oligonucleotide
accaaacccaaagaagcac

SEQ ID NO: 1349597 - RNA, 19 nt, Artificial Sequence
  Description of Artificial Sequence: Synthetic oligonucleotide
gauugcgacagcccaguug

SEQ ID NO: 1349598 - RNA, 19 nt, Artificial Sequence
  Description of Artificial Sequence: Synthetic oligonucleotide
uaguuaauaagugcucugu

SEQ ID NO: 1349599 - RNA, 19 nt, Artificial Sequence
  Description of Artificial Sequence: Synthetic oligonucleotide
agggccgucagucaaccag

SEQ ID NO: 1349600 - RNA, 19 nt, Artificial Sequence
  Description of Artificial Sequence: Synthetic oligonucleotide
aauccguucuccagggguc

SEQ ID NO: 1349601 - RNA, 19 nt, Artificial Sequence
  Description of Artificial Sequence: Synthetic oligonucleotide
uaauaagagucuuccggaa

SEQ ID NO: 1349602 - RNA, 19 nt, Artificial Sequence
  Description of Artificial Sequence: Synthetic oligonucleotide
uuaagcggacugaugggcu

SEQ ID NO: 1349603 - RNA, 19 nt, Artificial Sequence
  Description of Artificial Sequence: Synthetic oligonucleotide
guuaaguguauccucugga

SEQ ID NO: 1349604 - RNA, 19 nt, Artificial Sequence
  Description of Artificial Sequence: Synthetic oligonucleotide
augucauuaaggcaacaau

SEQ ID NO: 1349605 - RNA, 19 nt, Artificial Sequence
  Description of Artificial Sequence: Synthetic oligonucleotide
cuuaagcggacugaugggc

SEQ ID NO: 1349606 - RNA, 19 nt, Artificial Sequence
  Description of Artificial Sequence: Synthetic oligonucleotide
ucucgcaugagggucagca

SEQ ID NO: 1349607 - RNA, 19 nt, Artificial Sequence
  Description of Artificial Sequence: Synthetic oligonucleotide
aagaucccggcaaagccuc

SEQ ID NO: 1349608 - RNA, 19 nt, Artificial Sequence
  Description of Artificial Sequence: Synthetic oligonucleotide
uuuaagccauucauauguc

SEQ ID NO: 1349609 - RNA, 19 nt, Artificial Sequence
  Description of Artificial Sequence: Synthetic oligonucleotide
ggcacaucaaguuacacaa

SEQ ID NO: 1349610 - RNA, 19 nt, Artificial Sequence
  Description of Artificial Sequence: Synthetic oligonucleotide
uuaauccguucuccagggg

SEQ ID NO: 1349611 - RNA, 19 nt, Artificial Sequence
  Description of Artificial Sequence: Synthetic oligonucleotide
gggacaauccaauuaagga

SEQ ID NO: 1349612 - RNA, 19 nt, Artificial Sequence
  Description of Artificial Sequence: Synthetic oligonucleotide
gaguaaauggcaccauaga

SEQ ID NO: 1349613 - RNA, 19 nt, Artificial Sequence
  Description of Artificial Sequence: Synthetic oligonucleotide
ugugaugcccucucuaaua

SEQ ID NO: 1349614 - RNA, 19 nt, Artificial Sequence
  Description of Artificial Sequence: Synthetic oligonucleotide
ugguagacagaugugggcu

SEQ ID NO: 1349615 - RNA, 19 nt, Artificial Sequence
  Description of Artificial Sequence: Synthetic oligonucleotide
guuggguuuuccuggcuag

SEQ ID NO: 1349616 - RNA, 19 nt, Artificial Sequence
  Description of Artificial Sequence: Synthetic oligonucleotide
gaugcccucucuaauaaga

SEQ ID NO: 1349617 - RNA, 19 nt, Artificial Sequence
  Description of Artificial Sequence: Synthetic oligonucleotide
cugguagacagaugugggc

SEQ ID NO: 1349618 - RNA, 19 nt, Artificial Sequence
  Description of Artificial Sequence: Synthetic oligonucleotide
cuuaucauuacugcauuga

SEQ ID NO: 1349619 - RNA, 19 nt, Artificial Sequence
  Description of Artificial Sequence: Synthetic oligonucleotide
ucugucagucugccuggcg

SEQ ID NO: 1349620 - RNA, 19 nt, Artificial Sequence
  Description of Artificial Sequence: Synthetic oligonucleotide
uccagcauacagaagucuu

SEQ ID NO: 1349621 - RNA, 19 nt, Artificial Sequence
  Description of Artificial Sequence: Synthetic oligonucleotide
accaguguauuugguuucc

SEQ ID NO: 1349622 - RNA, 19 nt, Artificial Sequence
  Description of Artificial Sequence: Synthetic oligonucleotide
accauggggauauuuucca

SEQ ID NO: 1349623 - RNA, 19 nt, Artificial Sequence
  Description of Artificial Sequence: Synthetic oligonucleotide
agucgauggucccagagua

SEQ ID NO: 1349624 - RNA, 19 nt, Artificial Sequence
  Description of Artificial Sequence: Synthetic oligonucleotide
aauuuggccaaagguagua

SEQ ID NO: 1349625 - RNA, 19 nt, Artificial Sequence
  Description of Artificial Sequence: Synthetic oligonucleotide
uccaauuaaggaucuucau

SEQ ID NO: 1349626 - RNA, 19 nt, Artificial Sequence
  Description of Artificial Sequence: Synthetic oligonucleotide
accaguagguggcaauuug

SEQ ID NO: 1349627 - RNA, 19 nt, Artificial Sequence
  Description of Artificial Sequence: Synthetic oligonucleotide
uggcgguugcgucugcagg

SEQ ID NO: 1349628 - RNA, 19 nt, Artificial Sequence
  Description of Artificial Sequence: Synthetic oligonucleotide
uggggacaauccaauuaag

SEQ ID NO: 1349629 - RNA, 19 nt, Artificial Sequence
  Description of Artificial Sequence: Synthetic oligonucleotide
ucacugacacucuuucccu

SEQ ID NO: 1349630 - RNA, 19 nt, Artificial Sequence
  Description of Artificial Sequence: Synthetic oligonucleotide
ccgucagucaaccaguagg

SEQ ID NO: 1349631 - RNA, 19 nt, Artificial Sequence
  Description of Artificial Sequence: Synthetic oligonucleotide
cauaggggugacuccaaug

SEQ ID NO: 1349632 - RNA, 19 nt, Artificial Sequence
  Description of Artificial Sequence: Synthetic oligonucleotide
aaccaaacccaaagaagca

SEQ ID NO: 1349633 - RNA, 19 nt, Artificial Sequence
  Description of Artificial Sequence: Synthetic oligonucleotide
uagguauaucuaccuaguc

SEQ ID NO: 1349634 - RNA, 19 nt, Artificial Sequence
  Description of Artificial Sequence: Synthetic oligonucleotide
gguaguuaaguguauccuc

SEQ ID NO: 1349635 - RNA, 19 nt, Artificial Sequence
  Description of Artificial Sequence: Synthetic oligonucleotide
gaaucgagacuugagcaca

SEQ ID NO: 1349636 - RNA, 19 nt, Artificial Sequence
  Description of Artificial Sequence: Synthetic oligonucleotide
gaugucauuaaggcaacaa

SEQ ID NO: 1349637 - RNA, 19 nt, Artificial Sequence
  Description of Artificial Sequence: Synthetic oligonucleotide
gaacauaggggugacucca

SEQ ID NO: 1349638 - RNA, 19 nt, Artificial Sequence
  Description of Artificial Sequence: Synthetic oligonucleotide
uucggcucgucugccaugg

SEQ ID NO: 1349639 - RNA, 19 nt, Artificial Sequence
  Description of Artificial Sequence: Synthetic oligonucleotide
ucgauggucccagaguaca

SEQ ID NO: 1349640 - RNA, 19 nt, Artificial Sequence
  Description of Artificial Sequence: Synthetic oligonucleotide
uggggauauuuuccaggag

SEQ ID NO: 1349641 - RNA, 19 nt, Artificial Sequence
  Description of Artificial Sequence: Synthetic oligonucleotide
gguagaggaugucauuaag

SEQ ID NO: 1349642 - RNA, 19 nt, Artificial Sequence
  Description of Artificial Sequence: Synthetic oligonucleotide
auccaauuaaggaucuuca

SEQ ID NO: 1349643 - RNA, 19 nt, Artificial Sequence
  Description of Artificial Sequence: Synthetic oligonucleotide
aguccaagguaccagugua

SEQ ID NO: 1349644 - RNA, 19 nt, Artificial Sequence
  Description of Artificial Sequence: Synthetic oligonucleotide
ggcacaugccgccaaagcc

SEQ ID NO: 1349645 - RNA, 19 nt, Artificial Sequence
  Description of Artificial Sequence: Synthetic oligonucleotide
caucaaguuacacaaggua

SEQ ID NO: 1349646 - RNA, 19 nt, Artificial Sequence
  Description of Artificial Sequence: Synthetic oligonucleotide
cacuccuucaucccggauc

SEQ ID NO: 1349647 - RNA, 19 nt, Artificial Sequence
  Description of Artificial Sequence: Synthetic oligonucleotide
auaugucaugaaauacauc

SEQ ID NO: 1349648 - RNA, 19 nt, Artificial Sequence
  Description of Artificial Sequence: Synthetic oligonucleotide
ucaaccaguagguggcaau

SEQ ID NO: 1349649 - RNA, 19 nt, Artificial Sequence
  Description of Artificial Sequence: Synthetic oligonucleotide
cacuggcuggaacaucucg

SEQ ID NO: 1349650 - RNA, 19 nt, Artificial Sequence
  Description of Artificial Sequence: Synthetic oligonucleotide
gaagaucccagcuucuggu

SEQ ID NO: 1349651 - RNA, 19 nt, Artificial Sequence
  Description of Artificial Sequence: Synthetic oligonucleotide
guacacugaggucacugac

SEQ ID NO: 1349652 - RNA, 19 nt, Artificial Sequence
  Description of Artificial Sequence: Synthetic oligonucleotide
ggggacaauccaauuaagg

SEQ ID NO: 1349653 - RNA, 19 nt, Artificial Sequence
  Description of Artificial Sequence: Synthetic oligonucleotide
gaauccuuuguacaaggau

SEQ ID NO: 1349654 - RNA, 19 nt, Artificial Sequence
  Description of Artificial Sequence: Synthetic oligonucleotide
uaagagucuuccggaaaca

SEQ ID NO: 1349655 - RNA, 19 nt, Artificial Sequence
  Description of Artificial Sequence: Synthetic oligonucleotide
gaacaccuaguccugccca

SEQ ID NO: 1349656 - RNA, 19 nt, Artificial Sequence
  Description of Artificial Sequence: Synthetic oligonucleotide
acggaucccaaacuccuga

SEQ ID NO: 1349657 - RNA, 19 nt, Artificial Sequence
  Description of Artificial Sequence: Synthetic oligonucleotide
acacaccagauaacauucc

SEQ ID NO: 1349658 - RNA, 19 nt, Artificial Sequence
  Description of Artificial Sequence: Synthetic oligonucleotide
augggcuucggcucgucug

SEQ ID NO: 1349659 - RNA, 19 nt, Artificial Sequence
  Description of Artificial Sequence: Synthetic oligonucleotide
guuggggacaauccaauua

SEQ ID NO: 1349660 - RNA, 19 nt, Artificial Sequence
  Description of Artificial Sequence: Synthetic oligonucleotide
augauucccguggugaaca

SEQ ID NO: 1349661 - RNA, 19 nt, Artificial Sequence
  Description of Artificial Sequence: Synthetic oligonucleotide
uaccaguguauuugguuuc

SEQ ID NO: 1349662 - RNA, 19 nt, Artificial Sequence
  Description of Artificial Sequence: Synthetic oligonucleotide
uuuguacaaggaugccacu

SEQ ID NO: 1349663 - RNA, 19 nt, Artificial Sequence
  Description of Artificial Sequence: Synthetic oligonucleotide
cuauuuaauccaucucuaa

SEQ ID NO: 1349664 - RNA, 19 nt, Artificial Sequence
  Description of Artificial Sequence: Synthetic oligonucleotide
ugcccucucuaauaagagu

SEQ ID NO: 1349665 - RNA, 19 nt, Artificial Sequence
  Description of Artificial Sequence: Synthetic oligonucleotide
uaauaagugcucuguucuu

SEQ ID NO: 1349666 - RNA, 19 nt, Artificial Sequence
  Description of Artificial Sequence: Synthetic oligonucleotide
acuauuuaauccaucucua

SEQ ID NO: 1349667 - RNA, 19 nt, Artificial Sequence
  Description of Artificial Sequence: Synthetic oligonucleotide
ggaaucgagacuugagcac

SEQ ID NO: 1349668 - RNA, 19 nt, Artificial Sequence
  Description of Artificial Sequence: Synthetic oligonucleotide
cauaugucaugaaauacau

SEQ ID NO: 1349669 - RNA, 19 nt, Artificial Sequence
  Description of Artificial Sequence: Synthetic oligonucleotide
ugcgacagcccaguugaag

SEQ ID NO: 1349670 - RNA, 19 nt, Artificial Sequence
  Description of Artificial Sequence: Synthetic oligonucleotide
ggaugccacuccuucaucc

SEQ ID NO: 1349671 - RNA, 19 nt, Artificial Sequence
  Description of Artificial Sequence: Synthetic oligonucleotide
aagcggacugaugggcuuc

SEQ ID NO: 1349672 - RNA, 19 nt, Artificial Sequence
  Description of Artificial Sequence: Synthetic oligonucleotide
uuggcgguugcgucugcag

SEQ ID NO: 1349673 - RNA, 19 nt, Artificial Sequence
  Description of Artificial Sequence: Synthetic oligonucleotide
ccaguagguggcaauuugg

SEQ ID NO: 1349674 - RNA, 19 nt, Artificial Sequence
  Description of Artificial Sequence: Synthetic oligonucleotide
uugaguguaguagggccgu

SEQ ID NO: 1349675 - RNA, 19 nt, Artificial Sequence
  Description of Artificial Sequence: Synthetic oligonucleotide
gacacucuuucccucugga

SEQ ID NO: 1349676 - RNA, 19 nt, Artificial Sequence
  Description of Artificial Sequence: Synthetic oligonucleotide
uggcuagcgacugaagauc

SEQ ID NO: 1349677 - RNA, 19 nt, Artificial Sequence
  Description of Artificial Sequence: Synthetic oligonucleotide
gguuuuccuggcuagcgac

SEQ ID NO: 1349678 - RNA, 19 nt, Artificial Sequence
  Description of Artificial Sequence: Synthetic oligonucleotide
agucccuuuguagaagcca

SEQ ID NO: 1349679 - RNA, 19 nt, Artificial Sequence
  Description of Artificial Sequence: Synthetic oligonucleotide
gugccccacaaacaccagg

SEQ ID NO: 1349680 - RNA, 19 nt, Artificial Sequence
  Description of Artificial Sequence: Synthetic oligonucleotide
gcauugaauccuuuguaca

SEQ ID NO: 1349681 - RNA, 19 nt, Artificial Sequence
  Description of Artificial Sequence: Synthetic oligonucleotide
ggcagucuggaaucgagac

SEQ ID NO: 1349682 - RNA, 19 nt, Artificial Sequence
  Description of Artificial Sequence: Synthetic oligonucleotide
caugagggucagcacaguc

SEQ ID NO: 1349683 - RNA, 19 nt, Artificial Sequence
  Description of Artificial Sequence: Synthetic oligonucleotide
ugaugggugcagccaugcc

SEQ ID NO: 1349684 - RNA, 19 nt, Artificial Sequence
  Description of Artificial Sequence: Synthetic oligonucleotide
aggaaacaggcugcauugg

SEQ ID NO: 1349685 - RNA, 19 nt, Artificial Sequence
  Description of Artificial Sequence: Synthetic oligonucleotide
aguagggccgucagucaac

SEQ ID NO: 1349686 - RNA, 19 nt, Artificial Sequence
  Description of Artificial Sequence: Synthetic oligonucleotide
uggcaaacuuggcgguugc

SEQ ID NO: 1349687 - RNA, 19 nt, Artificial Sequence
  Description of Artificial Sequence: Synthetic oligonucleotide
ugugcagcccaggaguaaa

SEQ ID NO: 1349688 - RNA, 19 nt, Artificial Sequence
  Description of Artificial Sequence: Synthetic oligonucleotide
aggggugacuccaaugaug

SEQ ID NO: 1349689 - RNA, 19 nt, Artificial Sequence
  Description of Artificial Sequence: Synthetic oligonucleotide
cacagcgaacauaggggug

SEQ ID NO: 1349690 - RNA, 19 nt, Artificial Sequence
  Description of Artificial Sequence: Synthetic oligonucleotide
auuacugcauugaauccuu

SEQ ID NO: 1349691 - RNA, 19 nt, Artificial Sequence
  Description of Artificial Sequence: Synthetic oligonucleotide
uccuuuguacaaggaugcc

SEQ ID NO: 1349692 - RNA, 19 nt, Artificial Sequence
  Description of Artificial Sequence: Synthetic oligonucleotide
uaggggugacuccaaugau

SEQ ID NO: 1349693 - RNA, 19 nt, Artificial Sequence
  Description of Artificial Sequence: Synthetic oligonucleotide
agccaugccccgauacagc

SEQ ID NO: 1349694 - RNA, 19 nt, Artificial Sequence
  Description of Artificial Sequence: Synthetic oligonucleotide
cacaagguagaggauguca

SEQ ID NO: 1349695 - RNA, 19 nt, Artificial Sequence
  Description of Artificial Sequence: Synthetic oligonucleotide
ggauccgggguacacugag

SEQ ID NO: 1349696 - RNA, 19 nt, Artificial Sequence
  Description of Artificial Sequence: Synthetic oligonucleotide
uacaaggaugccacuccuu

SEQ ID NO: 1349697 - RNA, 19 nt, Artificial Sequence
  Description of Artificial Sequence: Synthetic oligonucleotide
aauaggcaaagggccucca

SEQ ID NO: 1349698 - RNA, 19 nt, Artificial Sequence
  Description of Artificial Sequence: Synthetic oligonucleotide
uccuggcaaacuuggcggu

SEQ ID NO: 1349699 - RNA, 19 nt, Artificial Sequence
  Description of Artificial Sequence: Synthetic oligonucleotide
ggcugcauuggcugggaag

SEQ ID NO: 1349700 - RNA, 19 nt, Artificial Sequence
  Description of Artificial Sequence: Synthetic oligonucleotide
gugaugcccucucuaauaa

SEQ ID NO: 1349701 - RNA, 19 nt, Artificial Sequence
  Description of Artificial Sequence: Synthetic oligonucleotide
agcauacagaagucuugaa

SEQ ID NO: 1349702 - RNA, 19 nt, Artificial Sequence
  Description of Artificial Sequence: Synthetic oligonucleotide
caucuguaugugcagccca

SEQ ID NO: 1349703 - RNA, 19 nt, Artificial Sequence
  Description of Artificial Sequence: Synthetic oligonucleotide
caugauucccguggugaac

SEQ ID NO: 1349704 - RNA, 19 nt, Artificial Sequence
  Description of Artificial Sequence: Synthetic oligonucleotide
gcuggucucugucagucug

SEQ ID NO: 1349705 - RNA, 19 nt, Artificial Sequence
  Description of Artificial Sequence: Synthetic oligonucleotide
cacucuuucccucuggagu

SEQ ID NO: 1349706 - RNA, 19 nt, Artificial Sequence
  Description of Artificial Sequence: Synthetic oligonucleotide
ccccguagaagccugaauc

SEQ ID NO: 1349707 - RNA, 19 nt, Artificial Sequence
  Description of Artificial Sequence: Synthetic oligonucleotide
uaagcggacugaugggcuu

SEQ ID NO: 1349708 - RNA, 19 nt, Artificial Sequence
  Description of Artificial Sequence: Synthetic oligonucleotide
gcauuuaauccguucucca

SEQ ID NO: 1349709 - RNA, 19 nt, Artificial Sequence
  Description of Artificial Sequence: Synthetic oligonucleotide
gcaagcauuuaauccguuc

SEQ ID NO: 1349710 - RNA, 19 nt, Artificial Sequence
  Description of Artificial Sequence: Synthetic oligonucleotide
gaucccagcuucugguuua

SEQ ID NO: 1349711 - RNA, 19 nt, Artificial Sequence
  Description of Artificial Sequence: Synthetic oligonucleotide
uccagccacgaggauccgg

SEQ ID NO: 1349712 - RNA, 19 nt, Artificial Sequence
  Description of Artificial Sequence: Synthetic oligonucleotide
aacagucgauggucccaga

SEQ ID NO: 1349713 - RNA, 19 nt, Artificial Sequence
  Description of Artificial Sequence: Synthetic oligonucleotide
aguuggggacaauccaauu

SEQ ID NO: 1349714 - RNA, 19 nt, Artificial Sequence
  Description of Artificial Sequence: Synthetic oligonucleotide
cauuacugcauugaauccu

SEQ ID NO: 1349715 - RNA, 19 nt, Artificial Sequence
  Description of Artificial Sequence: Synthetic oligonucleotide
agcucugaucccaccaucu

SEQ ID NO: 1349716 - RNA, 19 nt, Artificial Sequence
  Description of Artificial Sequence: Synthetic oligonucleotide
cacagucccuuuguagaag

SEQ ID NO: 1349717 - RNA, 19 nt, Artificial Sequence
  Description of Artificial Sequence: Synthetic oligonucleotide
gagcucugaucccaccauc

SEQ ID NO: 1349718 - RNA, 19 nt, Artificial Sequence
  Description of Artificial Sequence: Synthetic oligonucleotide
cucgcaugagggucagcac

SEQ ID NO: 1349719 - RNA, 19 nt, Artificial Sequence
  Description of Artificial Sequence: Synthetic oligonucleotide
cuggcaaacuuggcgguug

SEQ ID NO: 1349720 - RNA, 19 nt, Artificial Sequence
  Description of Artificial Sequence: Synthetic oligonucleotide
agguucuuaagcggacuga

SEQ ID NO: 1349721 - RNA, 19 nt, Artificial Sequence
  Description of Artificial Sequence: Synthetic oligonucleotide
gacuccaaugaugggugca

SEQ ID NO: 1349722 - RNA, 19 nt, Artificial Sequence
  Description of Artificial Sequence: Synthetic oligonucleotide
gcgaacauaggggugacuc

SEQ ID NO: 1349723 - RNA, 19 nt, Artificial Sequence
  Description of Artificial Sequence: Synthetic oligonucleotide
guaguagggccgucaguca

SEQ ID NO: 1349724 - RNA, 19 nt, Artificial Sequence
  Description of Artificial Sequence: Synthetic oligonucleotide
uucccguggugaacacacc

SEQ ID NO: 1349725 - RNA, 19 nt, Artificial Sequence
  Description of Artificial Sequence: Synthetic oligonucleotide
acauaggggugacuccaau

SEQ ID NO: 1349726 - RNA, 19 nt, Artificial Sequence
  Description of Artificial Sequence: Synthetic oligonucleotide
cagcauacagaagucuuga

SEQ ID NO: 1349727 - RNA, 19 nt, Artificial Sequence
  Description of Artificial Sequence: Synthetic oligonucleotide
ugauucccguggugaacac

SEQ ID NO: 1349728 - RNA, 19 nt, Artificial Sequence
  Description of Artificial Sequence: Synthetic oligonucleotide
guagggccgucagucaacc

SEQ ID NO: 1349729 - RNA, 19 nt, Artificial Sequence
  Description of Artificial Sequence: Synthetic oligonucleotide
auuuggccaaagguaguaa

SEQ ID NO: 1349730 - RNA, 19 nt, Artificial Sequence
  Description of Artificial Sequence: Synthetic oligonucleotide
gacagcccaguugaagauc

SEQ ID NO: 1349731 - RNA, 19 nt, Artificial Sequence
  Description of Artificial Sequence: Synthetic oligonucleotide
ggaggggcagucuggaauc

SEQ ID NO: 1349732 - RNA, 19 nt, Artificial Sequence
  Description of Artificial Sequence: Synthetic oligonucleotide
cccaggaguaaauggcacc

SEQ ID NO: 1349733 - RNA, 19 nt, Artificial Sequence
  Description of Artificial Sequence: Synthetic oligonucleotide
acaucucgcaugaggguca

SEQ ID NO: 1349734 - RNA, 19 nt, Artificial Sequence
  Description of Artificial Sequence: Synthetic oligonucleotide
gaguguaguagggccguca

SEQ ID NO: 1349735 - RNA, 19 nt, Artificial Sequence
  Description of Artificial Sequence: Synthetic oligonucleotide
cagcacgucucugaaacca

SEQ ID NO: 1349736 - RNA, 19 nt, Artificial Sequence
  Description of Artificial Sequence: Synthetic oligonucleotide
cacggaucccaaacuccug

SEQ ID NO: 1349737 - RNA, 19 nt, Artificial Sequence
  Description of Artificial Sequence: Synthetic oligonucleotide
aggggucaugauucccgug

SEQ ID NO: 1349738 - RNA, 19 nt, Artificial Sequence
  Description of Artificial Sequence: Synthetic oligonucleotide
cccuuuguagaagccacgg

SEQ ID NO: 1349739 - RNA, 19 nt, Artificial Sequence
  Description of Artificial Sequence: Synthetic oligonucleotide
guggguaguuaaguguauc

SEQ ID NO: 1349740 - RNA, 19 nt, Artificial Sequence
  Description of Artificial Sequence: Synthetic oligonucleotide
aucccggaucagcucucuc

SEQ ID NO: 1349741 - RNA, 19 nt, Artificial Sequence
  Description of Artificial Sequence: Synthetic oligonucleotide
cccagaguacauagguggc

SEQ ID NO: 1349742 - RNA, 19 nt, Artificial Sequence
  Description of Artificial Sequence: Synthetic oligonucleotide
ccauucauaugucaugaaa

SEQ ID NO: 1349743 - RNA, 19 nt, Artificial Sequence
  Description of Artificial Sequence: Synthetic oligonucleotide
agcggacugaugggcuucg

SEQ ID NO: 1349744 - RNA, 19 nt, Artificial Sequence
  Description of Artificial Sequence: Synthetic oligonucleotide
ggcuagcgacugaagaucc

SEQ ID NO: 1349745 - RNA, 19 nt, Artificial Sequence
  Description of Artificial Sequence: Synthetic oligonucleotide
ugggugcagccaugccccg

SEQ ID NO: 1349746 - RNA, 19 nt, Artificial Sequence
  Description of Artificial Sequence: Synthetic oligonucleotide
ggacugaugggcuucggcu

SEQ ID NO: 1349747 - RNA, 19 nt, Artificial Sequence
  Description of Artificial Sequence: Synthetic oligonucleotide
aguguauccucuggagauu

SEQ ID NO: 1349748 - RNA, 19 nt, Artificial Sequence
  Description of Artificial Sequence: Synthetic oligonucleotide
ggugaacacaccagauaac

SEQ ID NO: 1349749 - RNA, 19 nt, Artificial Sequence
  Description of Artificial Sequence: Synthetic oligonucleotide
cuggcuagcgacugaagau

SEQ ID NO: 1349750 - RNA, 19 nt, Artificial Sequence
  Description of Artificial Sequence: Synthetic oligonucleotide
agaucccggcaaagccucc

SEQ ID NO: 1349751 - RNA, 19 nt, Artificial Sequence
  Description of Artificial Sequence: Synthetic oligonucleotide
guacaaggaugccacuccu

SEQ ID NO: 1349752 - RNA, 19 nt, Artificial Sequence
  Description of Artificial Sequence: Synthetic oligonucleotide
agcacacagcgaacauagg

SEQ ID NO: 1349753 - RNA, 19 nt, Artificial Sequence
  Description of Artificial Sequence: Synthetic oligonucleotide
caugccccgauacagcccu

SEQ ID NO: 1349754 - RNA, 19 nt, Artificial Sequence
  Description of Artificial Sequence: Synthetic oligonucleotide
ccauggggauauuuuccag

SEQ ID NO: 1349755 - RNA, 19 nt, Artificial Sequence
  Description of Artificial Sequence: Synthetic oligonucleotide
cgaacauaggggugacucc

SEQ ID NO: 1349756 - RNA, 19 nt, Artificial Sequence
  Description of Artificial Sequence: Synthetic oligonucleotide
ggagauuucugcuguaguu

SEQ ID NO: 1349757 - RNA, 19 nt, Artificial Sequence
  Description of Artificial Sequence: Synthetic oligonucleotide
ucuuucccucuggagugaa

SEQ ID NO: 1349758 - RNA, 19 nt, Artificial Sequence
  Description of Artificial Sequence: Synthetic oligonucleotide
gaaauacaucccacuggcu

SEQ ID NO: 1349759 - RNA, 19 nt, Artificial Sequence
  Description of Artificial Sequence: Synthetic oligonucleotide
cucuguucuuagguauauc

SEQ ID NO: 1349760 - RNA, 19 nt, Artificial Sequence
  Description of Artificial Sequence: Synthetic oligonucleotide
cagccacgaggauccgggg

SEQ ID NO: 1349761 - RNA, 19 nt, Artificial Sequence
  Description of Artificial Sequence: Synthetic oligonucleotide
cagucugccuggcggcggc

SEQ ID NO: 1349762 - RNA, 19 nt, Artificial Sequence
  Description of Artificial Sequence: Synthetic oligonucleotide
gguaccaguguauuugguu

SEQ ID NO: 1349763 - RNA, 19 nt, Artificial Sequence
  Description of Artificial Sequence: Synthetic oligonucleotide
gaucccggcaaagccucca

SEQ ID NO: 1349764 - RNA, 19 nt, Artificial Sequence
  Description of Artificial Sequence: Synthetic oligonucleotide
cacaguccaagguaccagu

SEQ ID NO: 1349765 - RNA, 19 nt, Artificial Sequence
  Description of Artificial Sequence: Synthetic oligonucleotide
gccacggaucccaaacucc

SEQ ID NO: 1349766 - RNA, 19 nt, Artificial Sequence
  Description of Artificial Sequence: Synthetic oligonucleotide
caauuuggccaaagguagu

SEQ ID NO: 1349767 - RNA, 19 nt, Artificial Sequence
  Description of Artificial Sequence: Synthetic oligonucleotide
cgcaugagggucagcacag

SEQ ID NO: 1349768 - RNA, 19 nt, Artificial Sequence
  Description of Artificial Sequence: Synthetic oligonucleotide
gucgauggucccagaguac

SEQ ID NO: 1349769 - RNA, 19 nt, Artificial Sequence
  Description of Artificial Sequence: Synthetic oligonucleotide
cucucagcacgucucugaa

SEQ ID NO: 1349770 - RNA, 19 nt, Artificial Sequence
  Description of Artificial Sequence: Synthetic oligonucleotide
caaugaugggugcagccau

SEQ ID NO: 1349771 - RNA, 19 nt, Artificial Sequence
  Description of Artificial Sequence: Synthetic oligonucleotide
gggugccccacaaacacca

SEQ ID NO: 1349772 - RNA, 19 nt, Artificial Sequence
  Description of Artificial Sequence: Synthetic oligonucleotide
gcucuuaucauuacugcau

SEQ ID NO: 1349773 - RNA, 19 nt, Artificial Sequence
  Description of Artificial Sequence: Synthetic oligonucleotide
caucucgcaugagggucag

SEQ ID NO: 1349774 - RNA, 19 nt, Artificial Sequence
  Description of Artificial Sequence: Synthetic oligonucleotide
caaagguaguaagucuaua

SEQ ID NO: 1349775 - RNA, 19 nt, Artificial Sequence
  Description of Artificial Sequence: Synthetic oligonucleotide
gcgacugaagaucccagcu

SEQ ID NO: 1349776 - RNA, 19 nt, Artificial Sequence
  Description of Artificial Sequence: Synthetic oligonucleotide
ccucccucacccuucagga

SEQ ID NO: 1349777 - RNA, 19 nt, Artificial Sequence
  Description of Artificial Sequence: Synthetic oligonucleotide
ggcaaacuuggcgguugcg

SEQ ID NO: 1349778 - RNA, 19 nt, Artificial Sequence
  Description of Artificial Sequence: Synthetic oligonucleotide
uagggccgucagucaacca

SEQ ID NO: 1349779 - RNA, 19 nt, Artificial Sequence
  Description of Artificial Sequence: Synthetic oligonucleotide
ugccccgauacagcccugu

SEQ ID NO: 1349780 - RNA, 19 nt, Artificial Sequence
  Description of Artificial Sequence: Synthetic oligonucleotide
gguuuagcuggcugaaaau

SEQ ID NO: 1349781 - RNA, 19 nt, Artificial Sequence
  Description of Artificial Sequence: Synthetic oligonucleotide
gccgucagucaaccaguag

SEQ ID NO: 1349782 - RNA, 19 nt, Artificial Sequence
  Description of Artificial Sequence: Synthetic oligonucleotide
agguaccaguguauuuggu

SEQ ID NO: 1349783 - RNA, 19 nt, Artificial Sequence
  Description of Artificial Sequence: Synthetic oligonucleotide
ggguaguuaaguguauccu

SEQ ID NO: 1349784 - RNA, 19 nt, Artificial Sequence
  Description of Artificial Sequence: Synthetic oligonucleotide
agcacgucucugaaaccau

SEQ ID NO: 1349785 - RNA, 19 nt, Artificial Sequence
  Description of Artificial Sequence: Synthetic oligonucleotide
guccaucugguagacagau

SEQ ID NO: 1349786 - RNA, 19 nt, Artificial Sequence
  Description of Artificial Sequence: Synthetic oligonucleotide
ugaguguaguagggccguc

SEQ ID NO: 1349787 - RNA, 19 nt, Artificial Sequence
  Description of Artificial Sequence: Synthetic oligonucleotide
ccguagaagccugaaucug

SEQ ID NO: 1349788 - RNA, 19 nt, Artificial Sequence
  Description of Artificial Sequence: Synthetic oligonucleotide
gcucugaucccaccaucuc

SEQ ID NO: 1349789 - RNA, 19 nt, Artificial Sequence
  Description of Artificial Sequence: Synthetic oligonucleotide
gccaaagccgccggccagg

SEQ ID NO: 1349790 - RNA, 19 nt, Artificial Sequence
  Description of Artificial Sequence: Synthetic oligonucleotide
ucggcucgucugccauggc

SEQ ID NO: 1349791 - RNA, 19 nt, Artificial Sequence
  Description of Artificial Sequence: Synthetic oligonucleotide
cucugaaaccauggggaua

SEQ ID NO: 1349792 - RNA, 19 nt, Artificial Sequence
  Description of Artificial Sequence: Synthetic oligonucleotide
ucccgguccugcuccgcuc

SEQ ID NO: 1349793 - RNA, 19 nt, Artificial Sequence
  Description of Artificial Sequence: Synthetic oligonucleotide
caaagggccuccagagagu

SEQ ID NO: 1349794 - RNA, 19 nt, Artificial Sequence
  Description of Artificial Sequence: Synthetic oligonucleotide
gcgguugcgucugcaggcg

SEQ ID NO: 1349795 - RNA, 19 nt, Artificial Sequence
  Description of Artificial Sequence: Synthetic oligonucleotide
ggaucccaaacuccugaua

SEQ ID NO: 1349796 - RNA, 19 nt, Artificial Sequence
  Description of Artificial Sequence: Synthetic oligonucleotide
guuuuccuggcuagcgacu

SEQ ID NO: 1349797 - RNA, 19 nt, Artificial Sequence
  Description of Artificial Sequence: Synthetic oligonucleotide
gguucuuaagcggacugau

SEQ ID NO: 1349798 - RNA, 19 nt, Artificial Sequence
  Description of Artificial Sequence: Synthetic oligonucleotide
guuacacaagguagaggau

SEQ ID NO: 1349799 - RNA, 19 nt, Artificial Sequence
  Description of Artificial Sequence: Synthetic oligonucleotide
agcgaacauaggggugacu

SEQ ID NO: 1349800 - RNA, 19 nt, Artificial Sequence
  Description of Artificial Sequence: Synthetic oligonucleotide
agucugccuggcggcggcg

SEQ ID NO: 1349801 - RNA, 19 nt, Artificial Sequence
  Description of Artificial Sequence: Synthetic oligonucleotide
gcuagcgacugaagauccc

SEQ ID NO: 1349802 - RNA, 19 nt, Artificial Sequence
  Description of Artificial Sequence: Synthetic oligonucleotide
ccuuuguagaagccacgga

SEQ ID NO: 1349803 - RNA, 19 nt, Artificial Sequence
  Description of Artificial Sequence: Synthetic oligonucleotide
ggcaccauagaaaucuguu

SEQ ID NO: 1349804 - RNA, 19 nt, Artificial Sequence
  Description of Artificial Sequence: Synthetic oligonucleotide
guguaguagggccgucagu

SEQ ID NO: 1349805 - RNA, 19 nt, Artificial Sequence
  Description of Artificial Sequence: Synthetic oligonucleotide
guauaucuaccuaguccau

SEQ ID NO: 1349806 - RNA, 19 nt, Artificial Sequence
  Description of Artificial Sequence: Synthetic oligonucleotide
ccguggugaacacaccaga

SEQ ID NO: 1349807 - RNA, 19 nt, Artificial Sequence
  Description of Artificial Sequence: Synthetic oligonucleotide
cuuggcgguugcgucugca

SEQ ID NO: 1349808 - RNA, 19 nt, Artificial Sequence
  Description of Artificial Sequence: Synthetic oligonucleotide
cccgauacagcccugugau

SEQ ID NO: 1349809 - RNA, 19 nt, Artificial Sequence
  Description of Artificial Sequence: Synthetic oligonucleotide
ggggugccccacaaacacc

SEQ ID NO: 1349810 - RNA, 19 nt, Artificial Sequence
  Description of Artificial Sequence: Synthetic oligonucleotide
uccguucuccaggggucau

SEQ ID NO: 1349811 - RNA, 19 nt, Artificial Sequence
  Description of Artificial Sequence: Synthetic oligonucleotide
cccguagaagccugaaucu

SEQ ID NO: 1349812 - RNA, 19 nt, Artificial Sequence
  Description of Artificial Sequence: Synthetic oligonucleotide
ugaugggcuucggcucguc

SEQ ID NO: 1349813 - RNA, 19 nt, Artificial Sequence
  Description of Artificial Sequence: Synthetic oligonucleotide
gguagacagaugugggcuu

SEQ ID NO: 1349814 - RNA, 19 nt, Artificial Sequence
  Description of Artificial Sequence: Synthetic oligonucleotide
ggaugucauuaaggcaaca

SEQ ID NO: 1349815 - RNA, 19 nt, Artificial Sequence
  Description of Artificial Sequence: Synthetic oligonucleotide
ccgauacagcccugugaug

SEQ ID NO: 1349816 - RNA, 19 nt, Artificial Sequence
  Description of Artificial Sequence: Synthetic oligonucleotide
aggcggaccuugaccgugu

SEQ ID NO: 1349817 - RNA, 19 nt, Artificial Sequence
  Description of Artificial Sequence: Synthetic oligonucleotide
cugguuuagcuggcugaaa

SEQ ID NO: 1349818 - RNA, 19 nt, Artificial Sequence
  Description of Artificial Sequence: Synthetic oligonucleotide
gggcagucuggaaucgaga

SEQ ID NO: 1349819 - RNA, 19 nt, Artificial Sequence
  Description of Artificial Sequence: Synthetic oligonucleotide
ccacggaucccaaacuccu

SEQ ID NO: 1349820 - RNA, 19 nt, Artificial Sequence
  Description of Artificial Sequence: Synthetic oligonucleotide
cuccuucaucccggaucag

SEQ ID NO: 1349821 - RNA, 19 nt, Artificial Sequence
  Description of Artificial Sequence: Synthetic oligonucleotide
ccaaagguaguaagucuau

SEQ ID NO: 1349822 - RNA, 19 nt, Artificial Sequence
  Description of Artificial Sequence: Synthetic oligonucleotide
ccccgauacagcccuguga

SEQ ID NO: 1349823 - RNA, 19 nt, Artificial Sequence
  Description of Artificial Sequence: Synthetic oligonucleotide
caaccaguagguggcaauu

SEQ ID NO: 1349824 - RNA, 19 nt, Artificial Sequence
  Description of Artificial Sequence: Synthetic oligonucleotide
gccccgauacagcccugug

SEQ ID NO: 1349825 - RNA, 19 nt, Artificial Sequence
  Description of Artificial Sequence: Synthetic oligonucleotide
cccucucuaauaagagucu

SEQ ID NO: 1349826 - RNA, 19 nt, Artificial Sequence
  Description of Artificial Sequence: Synthetic oligonucleotide
gggauugcgacagcccagu

SEQ ID NO: 1349827 - RNA, 19 nt, Artificial Sequence
  Description of Artificial Sequence: Synthetic oligonucleotide
ccggcaaagccuccagcca

SEQ ID NO: 1349828 - RNA, 19 nt, Artificial Sequence
  Description of Artificial Sequence: Synthetic oligonucleotide
ccuaguccugcccacugcu

SEQ ID NO: 1349829 - RNA, 19 nt, Artificial Sequence
  Description of Artificial Sequence: Synthetic oligonucleotide
cuaguccugcccacugcuu

SEQ ID NO: 1349830 - RNA, 19 nt, Artificial Sequence
  Description of Artificial Sequence: Synthetic oligonucleotide
ccacgaggauccgggguac

SEQ ID NO: 1349831 - RNA, 19 nt, Artificial Sequence
  Description of Artificial Sequence: Synthetic oligonucleotide
gcuucggcucgucugccau

SEQ ID NO: 1349832 - RNA, 19 nt, Artificial Sequence
  Description of Artificial Sequence: Synthetic oligonucleotide
gcggacugaugggcuucgg

SEQ ID NO: 1349833 - RNA, 19 nt, Artificial Sequence
  Description of Artificial Sequence: Synthetic oligonucleotide
gggccgucagucaaccagu

SEQ ID NO: 1349834 - RNA, 19 nt, Artificial Sequence
  Description of Artificial Sequence: Synthetic oligonucleotide
cgguugcgucugcaggcgg

SEQ ID NO: 1349835 - RNA, 19 nt, Artificial Sequence
  Description of Artificial Sequence: Synthetic oligonucleotide
ggcggaccuugaccguguc

SEQ ID NO: 1349836 - RNA, 19 nt, Artificial Sequence
  Description of Artificial Sequence: Synthetic oligonucleotide
cguggugaacacaccagau

SEQ ID NO: 1349837 - RNA, 19 nt, Artificial Sequence
  Description of Artificial Sequence: Synthetic oligonucleotide
agguggcaauuuggccaaa

SEQ ID NO: 1349838 - RNA, 19 nt, Artificial Sequence
  Description of Artificial Sequence: Synthetic oligonucleotide
augccccgauacagcccug

SEQ ID NO: 1349839 - RNA, 19 nt, Artificial Sequence
  Description of Artificial Sequence: Synthetic oligonucleotide
ccguucuccaggggucaug

SEQ ID NO: 1349840 - RNA, 19 nt, Artificial Sequence
  Description of Artificial Sequence: Synthetic oligonucleotide
gggugcagccaugccccga

SEQ ID NO: 1349841 - RNA, 19 nt, Artificial Sequence
  Description of Artificial Sequence: Synthetic oligonucleotide
ccgguccugcuccgcucgc

SEQ ID NO: 1349842 - RNA, 19 nt, Artificial Sequence
  Description of Artificial Sequence: Synthetic oligonucleotide
gcaggcggaccuugaccgu

SEQ ID NO: 1349843 - RNA, 19 nt, Artificial Sequence
  Description of Artificial Sequence: Synthetic oligonucleotide
cucacaaguuggggacaau

SEQ ID NO: 1349844 - RNA, 19 nt, Artificial Sequence
  Description of Artificial Sequence: Synthetic oligonucleotide
cggcgggcgcucccggucc

SEQ ID NO: 1349845 - RNA, 19 nt, Artificial Sequence
  Description of Artificial Sequence: Synthetic oligonucleotide
ggauugcgacagcccaguu

SEQ ID NO: 1349846 - RNA, 19 nt, Artificial Sequence
  Description of Artificial Sequence: Synthetic oligonucleotide
cggcucgucugccauggcu

SEQ ID NO: 1349847 - RNA, 19 nt, Artificial Sequence
  Description of Artificial Sequence: Synthetic oligonucleotide
cgggcgcucccgguccugc

SEQ ID NO: 1349848 - RNA, 19 nt, Artificial Sequence
  Description of Artificial Sequence: Synthetic oligonucleotide
gccggccaggagguucuua

SEQ ID NO: 1349849 - RNA, 19 nt, Artificial Sequence
  Description of Artificial Sequence: Synthetic oligonucleotide
ccuggcaaacuuggcgguu

SEQ ID NO: 1349850 - RNA, 19 nt, Artificial Sequence
  Description of Artificial Sequence: Synthetic oligonucleotide
ccacuccuucaucccggau

SEQ ID NO: 1349851 - RNA, 19 nt, Artificial Sequence
  Description of Artificial Sequence: Synthetic oligonucleotide
gcgucugcaggcggaccuu

SEQ ID NO: 1349852 - RNA, 19 nt, Artificial Sequence
  Description of Artificial Sequence: Synthetic oligonucleotide
ugugucauagcccugaggg

SEQ ID NO: 1349853 - RNA, 19 nt, Artificial Sequence
  Description of Artificial Sequence: Synthetic oligonucleotide
uauucaaauauuuucuccg

SEQ ID NO: 1349854 - RNA, 19 nt, Artificial Sequence
  Description of Artificial Sequence: Synthetic oligonucleotide
aacgccaggagacacaggc

SEQ ID NO: 1349855 - RNA, 19 nt, Artificial Sequence
  Description of Artificial Sequence: Synthetic oligonucleotide
uuggauaagcaaaagagac

SEQ ID NO: 1349856 - RNA, 19 nt, Artificial Sequence
  Description of Artificial Sequence: Synthetic oligonucleotide
ugagugaugagcagcacgg

SEQ ID NO: 1349857 - RNA, 19 nt, Artificial Sequence
  Description of Artificial Sequence: Synthetic oligonucleotide
guuuggauaagcaaaagag

SEQ ID NO: 1349858 - RNA, 19 nt, Artificial Sequence
  Description of Artificial Sequence: Synthetic oligonucleotide
uuaagggcgccaaagagcc

SEQ ID NO: 1349859 - RNA, 19 nt, Artificial Sequence
  Description of Artificial Sequence: Synthetic oligonucleotide
agaccuuccauguuuaagg

SEQ ID NO: 1349860 - RNA, 19 nt, Artificial Sequence
  Description of Artificial Sequence: Synthetic oligonucleotide
aaucgugggcuccagacuc

SEQ ID NO: 1349861 - RNA, 19 nt, Artificial Sequence
  Description of Artificial Sequence: Synthetic oligonucleotide
uuuggauaagcaaaagaga

SEQ ID NO: 1349862 - RNA, 19 nt, Artificial Sequence
  Description of Artificial Sequence: Synthetic oligonucleotide
uuuaagggcgccaaagagc

SEQ ID NO: 1349863 - RNA, 19 nt, Artificial Sequence
  Description of Artificial Sequence: Synthetic oligonucleotide
aacaacaugagugaacugu

SEQ ID NO: 1349864 - RNA, 19 nt, Artificial Sequence
  Description of Artificial Sequence: Synthetic oligonucleotide
aaauuguagaugccaucac

SEQ ID NO: 1349865 - RNA, 19 nt, Artificial Sequence
  Description of Artificial Sequence: Synthetic oligonucleotide
cacuaauagacucacacac

SEQ ID NO: 1349866 - RNA, 19 nt, Artificial Sequence
  Description of Artificial Sequence: Synthetic oligonucleotide
acuucgacuacauaggcca

SEQ ID NO: 1349867 - RNA, 19 nt, Artificial Sequence
  Description of Artificial Sequence: Synthetic oligonucleotide
guuguuagcauccagggca

SEQ ID NO: 1349868 - RNA, 19 nt, Artificial Sequence
  Description of Artificial Sequence: Synthetic oligonucleotide
uuucucgaaaacuucuucc

SEQ ID NO: 1349869 - RNA, 19 nt, Artificial Sequence
  Description of Artificial Sequence: Synthetic oligonucleotide
gacuacauaggccaaggcc

SEQ ID NO: 1349870 - RNA, 19 nt, Artificial Sequence
  Description of Artificial Sequence: Synthetic oligonucleotide
gucacuaauagacucacac

SEQ ID NO: 1349871 - RNA, 19 nt, Artificial Sequence
  Description of Artificial Sequence: Synthetic oligonucleotide
uggacaucgggauaguuug

SEQ ID NO: 1349872 - RNA, 19 nt, Artificial Sequence
  Description of Artificial Sequence: Synthetic oligonucleotide
guaggcauggcugacaggg

SEQ ID NO: 1349873 - RNA, 19 nt, Artificial Sequence
  Description of Artificial Sequence: Synthetic oligonucleotide
aauggagccugcuggguuc

SEQ ID NO: 1349874 - RNA, 19 nt, Artificial Sequence
  Description of Artificial Sequence: Synthetic oligonucleotide
uucgaaucaaagcucgggc

SEQ ID NO: 1349875 - RNA, 19 nt, Artificial Sequence
  Description of Artificial Sequence: Synthetic oligonucleotide
ucaacaacaugagugaacu

SEQ ID NO: 1349876 - RNA, 19 nt, Artificial Sequence
  Description of Artificial Sequence: Synthetic oligonucleotide
acaucuuggaacucgacga

SEQ ID NO: 1349877 - RNA, 19 nt, Artificial Sequence
  Description of Artificial Sequence: Synthetic oligonucleotide
acguaauggagccugcugg

SEQ ID NO: 1349878 - RNA, 19 nt, Artificial Sequence
  Description of Artificial Sequence: Synthetic oligonucleotide
acaugagugaacuguaucu

SEQ ID NO: 1349879 - RNA, 19 nt, Artificial Sequence
  Description of Artificial Sequence: Synthetic oligonucleotide
gauaguuuggauaagcaaa

SEQ ID NO: 1349880 - RNA, 19 nt, Artificial Sequence
  Description of Artificial Sequence: Synthetic oligonucleotide
cugguagagaacaaaggag

SEQ ID NO: 1349881 - RNA, 19 nt, Artificial Sequence
  Description of Artificial Sequence: Synthetic oligonucleotide
uguagaugccaucaccagc

SEQ ID NO: 1349882 - RNA, 19 nt, Artificial Sequence
  Description of Artificial Sequence: Synthetic oligonucleotide
uguccagguauucaaauau

SEQ ID NO: 1349883 - RNA, 19 nt, Artificial Sequence
  Description of Artificial Sequence: Synthetic oligonucleotide
ucugccuaaacuucugggc

SEQ ID NO: 1349884 - RNA, 19 nt, Artificial Sequence
  Description of Artificial Sequence: Synthetic oligonucleotide
aaggagacgaggucuccac

SEQ ID NO: 1349885 - RNA, 19 nt, Artificial Sequence
  Description of Artificial Sequence: Synthetic oligonucleotide
aguuuggauaagcaaaaga

SEQ ID NO: 1349886 - RNA, 19 nt, Artificial Sequence
  Description of Artificial Sequence: Synthetic oligonucleotide
agauacuugugguccagac

SEQ ID NO: 1349887 - RNA, 19 nt, Artificial Sequence
  Description of Artificial Sequence: Synthetic oligonucleotide
agacuucgacuacauaggc

SEQ ID NO: 1349888 - RNA, 19 nt, Artificial Sequence
  Description of Artificial Sequence: Synthetic oligonucleotide
guuuaagggcgccaaagag

SEQ ID NO: 1349889 - RNA, 19 nt, Artificial Sequence
  Description of Artificial Sequence: Synthetic oligonucleotide
cagacuucgacuacauagg

SEQ ID NO: 1349890 - RNA, 19 nt, Artificial Sequence
  Description of Artificial Sequence: Synthetic oligonucleotide
gaaaucgugggcuccagac

SEQ ID NO: 1349891 - RNA, 19 nt, Artificial Sequence
  Description of Artificial Sequence: Synthetic oligonucleotide
uggauaagcaaaagagaca

SEQ ID NO: 1349892 - RNA, 19 nt, Artificial Sequence
  Description of Artificial Sequence: Synthetic oligonucleotide
ugaacuguaucugguagag

SEQ ID NO: 1349893 - RNA, 19 nt, Artificial Sequence
  Description of Artificial Sequence: Synthetic oligonucleotide
gacucacacaccuuggaug

SEQ ID NO: 1349894 - RNA, 19 nt, Artificial Sequence
  Description of Artificial Sequence: Synthetic oligonucleotide
aaauagaagcggcucuugu

SEQ ID NO: 1349895 - RNA, 19 nt, Artificial Sequence
  Description of Artificial Sequence: Synthetic oligonucleotide
caaagcuccgcacuguagg

SEQ ID NO: 1349896 - RNA, 19 nt, Artificial Sequence
  Description of Artificial Sequence: Synthetic oligonucleotide
uguuuaagggcgccaaaga

SEQ ID NO: 1349897 - RNA, 19 nt, Artificial Sequence
  Description of Artificial Sequence: Synthetic oligonucleotide
acuaauagacucacacacc

SEQ ID NO: 1349898 - RNA, 19 nt, Artificial Sequence
  Description of Artificial Sequence: Synthetic oligonucleotide
ucgaaucaaagcucgggcc

SEQ ID NO: 1349899 - RNA, 19 nt, Artificial Sequence
  Description of Artificial Sequence: Synthetic oligonucleotide
ugaacgucagccccugaag

SEQ ID NO: 1349900 - RNA, 19 nt, Artificial Sequence
  Description of Artificial Sequence: Synthetic oligonucleotide
aaacggagccuucuuugag

SEQ ID NO: 1349901 - RNA, 19 nt, Artificial Sequence
  Description of Artificial Sequence: Synthetic oligonucleotide
ucacuaauagacucacaca

SEQ ID NO: 1349902 - RNA, 19 nt, Artificial Sequence
  Description of Artificial Sequence: Synthetic oligonucleotide
ccagacuucgacuacauag

SEQ ID NO: 1349903 - RNA, 19 nt, Artificial Sequence
  Description of Artificial Sequence: Synthetic oligonucleotide
uuuucucgaaaacuucuuc

SEQ ID NO: 1349904 - RNA, 19 nt, Artificial Sequence
  Description of Artificial Sequence: Synthetic oligonucleotide
uccaugguuggauuccggg

SEQ ID NO: 1349905 - RNA, 19 nt, Artificial Sequence
  Description of Artificial Sequence: Synthetic oligonucleotide
ucuuggaacucgacgagac

SEQ ID NO: 1349906 - RNA, 19 nt, Artificial Sequence
  Description of Artificial Sequence: Synthetic oligonucleotide
gaccuuccauguuuaaggg

SEQ ID NO: 1349907 - RNA, 19 nt, Artificial Sequence
  Description of Artificial Sequence: Synthetic oligonucleotide
uggacuuugcuagagacuc

SEQ ID NO: 1349908 - RNA, 19 nt, Artificial Sequence
  Description of Artificial Sequence: Synthetic oligonucleotide
aucgggauaguuuggauaa

SEQ ID NO: 1349909 - RNA, 19 nt, Artificial Sequence
  Description of Artificial Sequence: Synthetic oligonucleotide
ugagugaacuguaucuggu

SEQ ID NO: 1349910 - RNA, 19 nt, Artificial Sequence
  Description of Artificial Sequence: Synthetic oligonucleotide
aacaccucuccaugcgcac

SEQ ID NO: 1349911 - RNA, 19 nt, Artificial Sequence
  Description of Artificial Sequence: Synthetic oligonucleotide
gugacugguacacuuuucc

SEQ ID NO: 1349912 - RNA, 19 nt, Artificial Sequence
  Description of Artificial Sequence: Synthetic oligonucleotide
uccucggucacccgagacg

SEQ ID NO: 1349913 - RNA, 19 nt, Artificial Sequence
  Description of Artificial Sequence: Synthetic oligonucleotide
caaagcucgggccaaggcc

SEQ ID NO: 1349914 - RNA, 19 nt, Artificial Sequence
  Description of Artificial Sequence: Synthetic oligonucleotide
uguauccucggucacccga

SEQ ID NO: 1349915 - RNA, 19 nt, Artificial Sequence
  Description of Artificial Sequence: Synthetic oligonucleotide
cugagugaugagcagcacg

SEQ ID NO: 1349916 - RNA, 19 nt, Artificial Sequence
  Description of Artificial Sequence: Synthetic oligonucleotide
ugcauguggcccaugguga

SEQ ID NO: 1349917 - RNA, 19 nt, Artificial Sequence
  Description of Artificial Sequence: Synthetic oligonucleotide
aaaucgugggcuccagacu

SEQ ID NO: 1349918 - RNA, 19 nt, Artificial Sequence
  Description of Artificial Sequence: Synthetic oligonucleotide
uuggaacucgacgagaccu

SEQ ID NO: 1349919 - RNA, 19 nt, Artificial Sequence
  Description of Artificial Sequence: Synthetic oligonucleotide
cugccuaaacuucugggcc

SEQ ID NO: 1349920 - RNA, 19 nt, Artificial Sequence
  Description of Artificial Sequence: Synthetic oligonucleotide
aacggagccuucuuugaga

SEQ ID NO: 1349921 - RNA, 19 nt, Artificial Sequence
  Description of Artificial Sequence: Synthetic oligonucleotide
accucugugucauagcccu

SEQ ID NO: 1349922 - RNA, 19 nt, Artificial Sequence
  Description of Artificial Sequence: Synthetic oligonucleotide
uccagguauucaaauauuu

SEQ ID NO: 1349923 - RNA, 19 nt, Artificial Sequence
  Description of Artificial Sequence: Synthetic oligonucleotide
gaacgucagccccugaagc

SEQ ID NO: 1349924 - RNA, 19 nt, Artificial Sequence
  Description of Artificial Sequence: Synthetic oligonucleotide
ccagagaugaaaucguggg

SEQ ID NO: 1349925 - RNA, 19 nt, Artificial Sequence
  Description of Artificial Sequence: Synthetic oligonucleotide
aacucgacgagaccuucca

SEQ ID NO: 1349926 - RNA, 19 nt, Artificial Sequence
  Description of Artificial Sequence: Synthetic oligonucleotide
gugaaggacagcccgaaac

SEQ ID NO: 1349927 - RNA, 19 nt, Artificial Sequence
  Description of Artificial Sequence: Synthetic oligonucleotide
cuucgaaucaaagcucggg

SEQ ID NO: 1349928 - RNA, 19 nt, Artificial Sequence
  Description of Artificial Sequence: Synthetic oligonucleotide
ucgacuacauaggccaagg

SEQ ID NO: 1349929 - RNA, 19 nt, Artificial Sequence
  Description of Artificial Sequence: Synthetic oligonucleotide
ggagagaagagccucaaca

SEQ ID NO: 1349930 - RNA, 19 nt, Artificial Sequence
  Description of Artificial Sequence: Synthetic oligonucleotide
gauucccaccuucagcagc

SEQ ID NO: 1349931 - RNA, 19 nt, Artificial Sequence
  Description of Artificial Sequence: Synthetic oligonucleotide
auccaagauaagcaggcgu

SEQ ID NO: 1349932 - RNA, 19 nt, Artificial Sequence
  Description of Artificial Sequence: Synthetic oligonucleotide
aaagcucgggccaaggcca

SEQ ID NO: 1349933 - RNA, 19 nt, Artificial Sequence
  Description of Artificial Sequence: Synthetic oligonucleotide
guggccuucgaaucaaagc

SEQ ID NO: 1349934 - RNA, 19 nt, Artificial Sequence
  Description of Artificial Sequence: Synthetic oligonucleotide
auguuuaagggcgccaaag

SEQ ID NO: 1349935 - RNA, 19 nt, Artificial Sequence
  Description of Artificial Sequence: Synthetic oligonucleotide
gagagaagagccucaacaa

SEQ ID NO: 1349936 - RNA, 19 nt, Artificial Sequence
  Description of Artificial Sequence: Synthetic oligonucleotide
ucgacgagaccuuccaugu

SEQ ID NO: 1349937 - RNA, 19 nt, Artificial Sequence
  Description of Artificial Sequence: Synthetic oligonucleotide
ucacccgagacguaaugga

SEQ ID NO: 1349938 - RNA, 19 nt, Artificial Sequence
  Description of Artificial Sequence: Synthetic oligonucleotide
cuuggauguauccucgguc

SEQ ID NO: 1349939 - RNA, 19 nt, Artificial Sequence
  Description of Artificial Sequence: Synthetic oligonucleotide
ucucgaaaacuucuuccaa

SEQ ID NO: 1349940 - RNA, 19 nt, Artificial Sequence
  Description of Artificial Sequence: Synthetic oligonucleotide
guagaugccaucaccagca

SEQ ID NO: 1349941 - RNA, 19 nt, Artificial Sequence
  Description of Artificial Sequence: Synthetic oligonucleotide
gaaguacaggauucccacc

SEQ ID NO: 1349942 - RNA, 19 nt, Artificial Sequence
  Description of Artificial Sequence: Synthetic oligonucleotide
caugguuggauuccggguc

SEQ ID NO: 1349943 - RNA, 19 nt, Artificial Sequence
  Description of Artificial Sequence: Synthetic oligonucleotide
uguugagugucuucauuuc

SEQ ID NO: 1349944 - RNA, 19 nt, Artificial Sequence
  Description of Artificial Sequence: Synthetic oligonucleotide
cucgacgagaccuuccaug

SEQ ID NO: 1349945 - RNA, 19 nt, Artificial Sequence
  Description of Artificial Sequence: Synthetic oligonucleotide
gacguaauggagccugcug

SEQ ID NO: 1349946 - RNA, 19 nt, Artificial Sequence
  Description of Artificial Sequence: Synthetic oligonucleotide
uuggauuccgggucaggcc

SEQ ID NO: 1349947 - RNA, 19 nt, Artificial Sequence
  Description of Artificial Sequence: Synthetic oligonucleotide
uagacucacacaccuugga

SEQ ID NO: 1349948 - RNA, 19 nt, Artificial Sequence
  Description of Artificial Sequence: Synthetic oligonucleotide
ugguacacuuuucccagcu

SEQ ID NO: 1349949 - RNA, 19 nt, Artificial Sequence
  Description of Artificial Sequence: Synthetic oligonucleotide
aaaaccccgucuccuggug

SEQ ID NO: 1349950 - RNA, 19 nt, Artificial Sequence
  Description of Artificial Sequence: Synthetic oligonucleotide
uggcccauggugaaauugu

SEQ ID NO: 1349951 - RNA, 19 nt, Artificial Sequence
  Description of Artificial Sequence: Synthetic oligonucleotide
cuaauagacucacacaccu

SEQ ID NO: 1349952 - RNA, 19 nt, Artificial Sequence
  Description of Artificial Sequence: Synthetic oligonucleotide
ggcaauauuuucucgaaaa

SEQ ID NO: 1349953 - RNA, 19 nt, Artificial Sequence
  Description of Artificial Sequence: Synthetic oligonucleotide
cugacagccccucucgacc

SEQ ID NO: 1349954 - RNA, 19 nt, Artificial Sequence
  Description of Artificial Sequence: Synthetic oligonucleotide
uucuccgaggagcccacag

SEQ ID NO: 1349955 - RNA, 19 nt, Artificial Sequence
  Description of Artificial Sequence: Synthetic oligonucleotide
ggcaucauccaagauaagc

SEQ ID NO: 1349956 - RNA, 19 nt, Artificial Sequence
  Description of Artificial Sequence: Synthetic oligonucleotide
acccgagacguaauggagc

SEQ ID NO: 1349957 - RNA, 19 nt, Artificial Sequence
  Description of Artificial Sequence: Synthetic oligonucleotide
ucgaccaccagcugcccgc

SEQ ID NO: 1349958 - RNA, 19 nt, Artificial Sequence
  Description of Artificial Sequence: Synthetic oligonucleotide
agauaagcaggcguggccu

SEQ ID NO: 1349959 - RNA, 19 nt, Artificial Sequence
  Description of Artificial Sequence: Synthetic oligonucleotide
caccuuggauguauccucg

SEQ ID NO: 1349960 - RNA, 19 nt, Artificial Sequence
  Description of Artificial Sequence: Synthetic oligonucleotide
ccugcguggacuuugcuag

SEQ ID NO: 1349961 - RNA, 19 nt, Artificial Sequence
  Description of Artificial Sequence: Synthetic oligonucleotide
uaguuuggauaagcaaaag

SEQ ID NO: 1349962 - RNA, 19 nt, Artificial Sequence
  Description of Artificial Sequence: Synthetic oligonucleotide
ggagccuucuuugagaaac

SEQ ID NO: 1349963 - RNA, 19 nt, Artificial Sequence
  Description of Artificial Sequence: Synthetic oligonucleotide
cugugcauguggcccaugg

SEQ ID NO: 1349964 - RNA, 19 nt, Artificial Sequence
  Description of Artificial Sequence: Synthetic oligonucleotide
gacuucgacuacauaggcc

SEQ ID NO: 1349965 - RNA, 19 nt, Artificial Sequence
  Description of Artificial Sequence: Synthetic oligonucleotide
guuggauuccgggucaggc

SEQ ID NO: 1349966 - RNA, 19 nt, Artificial Sequence
  Description of Artificial Sequence: Synthetic oligonucleotide
aagcggcucuugucgcacc

SEQ ID NO: 1349967 - RNA, 19 nt, Artificial Sequence
  Description of Artificial Sequence: Synthetic oligonucleotide
caucuuggaacucgacgag

SEQ ID NO: 1349968 - RNA, 19 nt, Artificial Sequence
  Description of Artificial Sequence: Synthetic oligonucleotide
agacuccuuggccacagcu

SEQ ID NO: 1349969 - RNA, 19 nt, Artificial Sequence
  Description of Artificial Sequence: Synthetic oligonucleotide
uucgacuacauaggccaag

SEQ ID NO: 1349970 - RNA, 19 nt, Artificial Sequence
  Description of Artificial Sequence: Synthetic oligonucleotide
agagccucaacaacaugag

SEQ ID NO: 1349971 - RNA, 19 nt, Artificial Sequence
  Description of Artificial Sequence: Synthetic oligonucleotide
cuuccauguuuaagggcgc

SEQ ID NO: 1349972 - RNA, 19 nt, Artificial Sequence
  Description of Artificial Sequence: Synthetic oligonucleotide
uaauggagccugcuggguu

SEQ ID NO: 1349973 - RNA, 19 nt, Artificial Sequence
  Description of Artificial Sequence: Synthetic oligonucleotide
aauggccaccugcguggac

SEQ ID NO: 1349974 - RNA, 19 nt, Artificial Sequence
  Description of Artificial Sequence: Synthetic oligonucleotide
gucacccgagacguaaugg

SEQ ID NO: 1349975 - RNA, 19 nt, Artificial Sequence
  Description of Artificial Sequence: Synthetic oligonucleotide
aaucaaagcucgggccaag

SEQ ID NO: 1349976 - RNA, 19 nt, Artificial Sequence
  Description of Artificial Sequence: Synthetic oligonucleotide
ccuggugaaggacagcccg

SEQ ID NO: 1349977 - RNA, 19 nt, Artificial Sequence
  Description of Artificial Sequence: Synthetic oligonucleotide
cacccgagacguaauggag

SEQ ID NO: 1349978 - RNA, 19 nt, Artificial Sequence
  Description of Artificial Sequence: Synthetic oligonucleotide
gcaaacggagccuucuuug

SEQ ID NO: 1349979 - RNA, 19 nt, Artificial Sequence
  Description of Artificial Sequence: Synthetic oligonucleotide
uaagcaggcguggccuucg

SEQ ID NO: 1349980 - RNA, 19 nt, Artificial Sequence
  Description of Artificial Sequence: Synthetic oligonucleotide
aaaccccgucuccugguga

SEQ ID NO: 1349981 - RNA, 19 nt, Artificial Sequence
  Description of Artificial Sequence: Synthetic oligonucleotide
acugccugucgcugacccc

SEQ ID NO: 1349982 - RNA, 19 nt, Artificial Sequence
  Description of Artificial Sequence: Synthetic oligonucleotide
acgucagccccugaagcac

SEQ ID NO: 1349983 - RNA, 19 nt, Artificial Sequence
  Description of Artificial Sequence: Synthetic oligonucleotide
gugaacuguaucugguaga

SEQ ID NO: 1349984 - RNA, 19 nt, Artificial Sequence
  Description of Artificial Sequence: Synthetic oligonucleotide
uuuucuccgaggagcccac

SEQ ID NO: 1349985 - RNA, 19 nt, Artificial Sequence
  Description of Artificial Sequence: Synthetic oligonucleotide
gaugaaaucgugggcucca

SEQ ID NO: 1349986 - RNA, 19 nt, Artificial Sequence
  Description of Artificial Sequence: Synthetic oligonucleotide
uaauagacucacacaccuu

SEQ ID NO: 1349987 - RNA, 19 nt, Artificial Sequence
  Description of Artificial Sequence: Synthetic oligonucleotide
ugcccgccgaaguacagga

SEQ ID NO: 1349988 - RNA, 19 nt, Artificial Sequence
  Description of Artificial Sequence: Synthetic oligonucleotide
uggauguauccucggucac

SEQ ID NO: 1349989 - RNA, 19 nt, Artificial Sequence
  Description of Artificial Sequence: Synthetic oligonucleotide
cuuugagaaacaggaugug

SEQ ID NO: 1349990 - RNA, 19 nt, Artificial Sequence
  Description of Artificial Sequence: Synthetic oligonucleotide
agcaaggaguccuguccag

SEQ ID NO: 1349991 - RNA, 19 nt, Artificial Sequence
  Description of Artificial Sequence: Synthetic oligonucleotide
ugacagccccucucgacca

SEQ ID NO: 1349992 - RNA, 19 nt, Artificial Sequence
  Description of Artificial Sequence: Synthetic oligonucleotide
caggccucuccccagguac

SEQ ID NO: 1349993 - RNA, 19 nt, Artificial Sequence
  Description of Artificial Sequence: Synthetic oligonucleotide
caccucugugucauagccc

SEQ ID NO: 1349994 - RNA, 19 nt, Artificial Sequence
  Description of Artificial Sequence: Synthetic oligonucleotide
guuagcauccagggcacug

SEQ ID NO: 1349995 - RNA, 19 nt, Artificial Sequence
  Description of Artificial Sequence: Synthetic oligonucleotide
ugcguggacuuugcuagag

SEQ ID NO: 1349996 - RNA, 19 nt, Artificial Sequence
  Description of Artificial Sequence: Synthetic oligonucleotide
agugacugguacacuuuuc

SEQ ID NO: 1349997 - RNA, 19 nt, Artificial Sequence
  Description of Artificial Sequence: Synthetic oligonucleotide
gucagucugaaggagccac

SEQ ID NO: 1349998 - RNA, 19 nt, Artificial Sequence
  Description of Artificial Sequence: Synthetic oligonucleotide
caugaacgccaggagacac

SEQ ID NO: 1349999 - RNA, 19 nt, Artificial Sequence
  Description of Artificial Sequence: Synthetic oligonucleotide
agcggcucuugucgcaccg

SEQ ID NO: 1350000 - RNA, 19 nt, Artificial Sequence
  Description of Artificial Sequence: Synthetic oligonucleotide
agcugguucccagucucac

SEQ ID NO: 1350001 - RNA, 19 nt, Artificial Sequence
  Description of Artificial Sequence: Synthetic oligonucleotide
uaagggcgccaaagagccg

SEQ ID NO: 1350002 - RNA, 19 nt, Artificial Sequence
  Description of Artificial Sequence: Synthetic oligonucleotide
caaauagaagcggcucuug

SEQ ID NO: 1350003 - RNA, 19 nt, Artificial Sequence
  Description of Artificial Sequence: Synthetic oligonucleotide
auagcccugagggagucca

SEQ ID NO: 1350004 - RNA, 19 nt, Artificial Sequence
  Description of Artificial Sequence: Synthetic oligonucleotide
ucucguacaggagccgcug

SEQ ID NO: 1350005 - RNA, 19 nt, Artificial Sequence
  Description of Artificial Sequence: Synthetic oligonucleotide
aaccccgucuccuggugaa

SEQ ID NO: 1350006 - RNA, 19 nt, Artificial Sequence
  Description of Artificial Sequence: Synthetic oligonucleotide
gacaucgggauaguuugga

SEQ ID NO: 1350007 - RNA, 19 nt, Artificial Sequence
  Description of Artificial Sequence: Synthetic oligonucleotide
acggagccuucuuugagaa

SEQ ID NO: 1350008 - RNA, 19 nt, Artificial Sequence
  Description of Artificial Sequence: Synthetic oligonucleotide
ugcccugcucgcaaacgga

SEQ ID NO: 1350009 - RNA, 19 nt, Artificial Sequence
  Description of Artificial Sequence: Synthetic oligonucleotide
uuccauguuuaagggcgcc

SEQ ID NO: 1350010 - RNA, 19 nt, Artificial Sequence
  Description of Artificial Sequence: Synthetic oligonucleotide
guacaggauucccaccuuc

SEQ ID NO: 1350011 - RNA, 19 nt, Artificial Sequence
  Description of Artificial Sequence: Synthetic oligonucleotide
uccauguuuaagggcgcca

SEQ ID NO: 1350012 - RNA, 19 nt, Artificial Sequence
  Description of Artificial Sequence: Synthetic oligonucleotide
ugucgcaccgcagccaccu

SEQ ID NO: 1350013 - RNA, 19 nt, Artificial Sequence
  Description of Artificial Sequence: Synthetic oligonucleotide
auaagcaggcguggccuuc

SEQ ID NO: 1350014 - RNA, 19 nt, Artificial Sequence
  Description of Artificial Sequence: Synthetic oligonucleotide
uggcccgauagcacccucc

SEQ ID NO: 1350015 - RNA, 19 nt, Artificial Sequence
  Description of Artificial Sequence: Synthetic oligonucleotide
caaacggagccuucuuuga

SEQ ID NO: 1350016 - RNA, 19 nt, Artificial Sequence
  Description of Artificial Sequence: Synthetic oligonucleotide
guauccucggucacccgag

SEQ ID NO: 1350017 - RNA, 19 nt, Artificial Sequence
  Description of Artificial Sequence: Synthetic oligonucleotide
caacaacaugagugaacug

SEQ ID NO: 1350018 - RNA, 19 nt, Artificial Sequence
  Description of Artificial Sequence: Synthetic oligonucleotide
caucgggauaguuuggaua

SEQ ID NO: 1350019 - RNA, 19 nt, Artificial Sequence
  Description of Artificial Sequence: Synthetic oligonucleotide
cuccaugguuggauuccgg

SEQ ID NO: 1350020 - RNA, 19 nt, Artificial Sequence
  Description of Artificial Sequence: Synthetic oligonucleotide
ugguccagacuucgacuac

SEQ ID NO: 1350021 - RNA, 19 nt, Artificial Sequence
  Description of Artificial Sequence: Synthetic oligonucleotide
gaacucgacgagaccuucc

SEQ ID NO: 1350022 - RNA, 19 nt, Artificial Sequence
  Description of Artificial Sequence: Synthetic oligonucleotide
acaacaugagugaacugua

SEQ ID NO: 1350023 - RNA, 19 nt, Artificial Sequence
  Description of Artificial Sequence: Synthetic oligonucleotide
cccgagacguaauggagcc

SEQ ID NO: 1350024 - RNA, 19 nt, Artificial Sequence
  Description of Artificial Sequence: Synthetic oligonucleotide
uggaacucgacgagaccuu

SEQ ID NO: 1350025 - RNA, 19 nt, Artificial Sequence
  Description of Artificial Sequence: Synthetic oligonucleotide
agcccgaaacaccucucca

SEQ ID NO: 1350026 - RNA, 19 nt, Artificial Sequence
  Description of Artificial Sequence: Synthetic oligonucleotide
accugcguggacuuugcua

SEQ ID NO: 1350027 - RNA, 19 nt, Artificial Sequence
  Description of Artificial Sequence: Synthetic oligonucleotide
agcuccgcacuguaggcau

SEQ ID NO: 1350028 - RNA, 19 nt, Artificial Sequence
  Description of Artificial Sequence: Synthetic oligonucleotide
uacuugugguccagacuuc

SEQ ID NO: 1350029 - RNA, 19 nt, Artificial Sequence
  Description of Artificial Sequence: Synthetic oligonucleotide
gccucaacaacaugaguga

SEQ ID NO: 1350030 - RNA, 19 nt, Artificial Sequence
  Description of Artificial Sequence: Synthetic oligonucleotide
aagcuccgcacuguaggca

SEQ ID NO: 1350031 - RNA, 19 nt, Artificial Sequence
  Description of Artificial Sequence: Synthetic oligonucleotide
cugcauccagggauagcag

SEQ ID NO: 1350032 - RNA, 19 nt, Artificial Sequence
  Description of Artificial Sequence: Synthetic oligonucleotide
gcucuugucgcaccgcagc

SEQ ID NO: 1350033 - RNA, 19 nt, Artificial Sequence
  Description of Artificial Sequence: Synthetic oligonucleotide
ucggucacccgagacguaa

SEQ ID NO: 1350034 - RNA, 19 nt, Artificial Sequence
  Description of Artificial Sequence: Synthetic oligonucleotide
augcgcacggcugugcaug

SEQ ID NO: 1350035 - RNA, 19 nt, Artificial Sequence
  Description of Artificial Sequence: Synthetic oligonucleotide
ccugcucgcaaacggagcc

SEQ ID NO: 1350036 - RNA, 19 nt, Artificial Sequence
  Description of Artificial Sequence: Synthetic oligonucleotide
gacagcccgaaacaccucu

SEQ ID NO: 1350037 - RNA, 19 nt, Artificial Sequence
  Description of Artificial Sequence: Synthetic oligonucleotide
aucuuggaacucgacgaga

SEQ ID NO: 1350038 - RNA, 19 nt, Artificial Sequence
  Description of Artificial Sequence: Synthetic oligonucleotide
aucgugggcuccagacucc

SEQ ID NO: 1350039 - RNA, 19 nt, Artificial Sequence
  Description of Artificial Sequence: Synthetic oligonucleotide
acaccucuccaugcgcacg

SEQ ID NO: 1350040 - RNA, 19 nt, Artificial Sequence
  Description of Artificial Sequence: Synthetic oligonucleotide
auguauccucggucacccg

SEQ ID NO: 1350041 - RNA, 19 nt, Artificial Sequence
  Description of Artificial Sequence: Synthetic oligonucleotide
agagaacaaaggagacgag

SEQ ID NO: 1350042 - RNA, 19 nt, Artificial Sequence
  Description of Artificial Sequence: Synthetic oligonucleotide
agcuugucacuaauagacu

SEQ ID NO: 1350043 - RNA, 19 nt, Artificial Sequence
  Description of Artificial Sequence: Synthetic oligonucleotide
cucgaccaccagcugcccg

SEQ ID NO: 1350044 - RNA, 19 nt, Artificial Sequence
  Description of Artificial Sequence: Synthetic oligonucleotide
ccgguucucguacaggagc

SEQ ID NO: 1350045 - RNA, 19 nt, Artificial Sequence
  Description of Artificial Sequence: Synthetic oligonucleotide
gugguccagacuucgacua

SEQ ID NO: 1350046 - RNA, 19 nt, Artificial Sequence
  Description of Artificial Sequence: Synthetic oligonucleotide
aggagacgaggucuccacu

SEQ ID NO: 1350047 - RNA, 19 nt, Artificial Sequence
  Description of Artificial Sequence: Synthetic oligonucleotide
cguaauggagccugcuggg

SEQ ID NO: 1350048 - RNA, 19 nt, Artificial Sequence
  Description of Artificial Sequence: Synthetic oligonucleotide
ucuccgugagcugcaggug

SEQ ID NO: 1350049 - RNA, 19 nt, Artificial Sequence
  Description of Artificial Sequence: Synthetic oligonucleotide
ucgggauaguuuggauaag

SEQ ID NO: 1350050 - RNA, 19 nt, Artificial Sequence
  Description of Artificial Sequence: Synthetic oligonucleotide
cacggcugugcauguggcc

SEQ ID NO: 1350051 - RNA, 19 nt, Artificial Sequence
  Description of Artificial Sequence: Synthetic oligonucleotide
acgccaggagacacaggcc

SEQ ID NO: 1350052 - RNA, 19 nt, Artificial Sequence
  Description of Artificial Sequence: Synthetic oligonucleotide
cgaaacaccucuccaugcg

SEQ ID NO: 1350053 - RNA, 19 nt, Artificial Sequence
  Description of Artificial Sequence: Synthetic oligonucleotide
caccauggcccgauagcac

SEQ ID NO: 1350054 - RNA, 19 nt, Artificial Sequence
  Description of Artificial Sequence: Synthetic oligonucleotide
auaggccaaggccccuucu

SEQ ID NO: 1350055 - RNA, 19 nt, Artificial Sequence
  Description of Artificial Sequence: Synthetic oligonucleotide
agccgcugaguggagagca

SEQ ID NO: 1350056 - RNA, 19 nt, Artificial Sequence
  Description of Artificial Sequence: Synthetic oligonucleotide
ggcccgauagcacccuccg

SEQ ID NO: 1350057 - RNA, 19 nt, Artificial Sequence
  Description of Artificial Sequence: Synthetic oligonucleotide
gagacguaauggagccugc

SEQ ID NO: 1350058 - RNA, 19 nt, Artificial Sequence
  Description of Artificial Sequence: Synthetic oligonucleotide
aggcguggccuucgaauca

SEQ ID NO: 1350059 - RNA, 19 nt, Artificial Sequence
  Description of Artificial Sequence: Synthetic oligonucleotide
ccgaaacaccucuccaugc

SEQ ID NO: 1350060 - RNA, 19 nt, Artificial Sequence
  Description of Artificial Sequence: Synthetic oligonucleotide
ccucucgaccaccagcugc

SEQ ID NO: 1350061 - RNA, 19 nt, Artificial Sequence
  Description of Artificial Sequence: Synthetic oligonucleotide
accuucauuuccagugacu

SEQ ID NO: 1350062 - RNA, 19 nt, Artificial Sequence
  Description of Artificial Sequence: Synthetic oligonucleotide
agacguaauggagccugcu

SEQ ID NO: 1350063 - RNA, 19 nt, Artificial Sequence
  Description of Artificial Sequence: Synthetic oligonucleotide
cuugugguccagacuucga

SEQ ID NO: 1350064 - RNA, 19 nt, Artificial Sequence
  Description of Artificial Sequence: Synthetic oligonucleotide
ccuucgaaucaaagcucgg

SEQ ID NO: 1350065 - RNA, 19 nt, Artificial Sequence
  Description of Artificial Sequence: Synthetic oligonucleotide
uccaugcgcacggcugugc

SEQ ID NO: 1350066 - RNA, 19 nt, Artificial Sequence
  Description of Artificial Sequence: Synthetic oligonucleotide
cccgaaacaccucuccaug

SEQ ID NO: 1350067 - RNA, 19 nt, Artificial Sequence
  Description of Artificial Sequence: Synthetic oligonucleotide
ggucacccgagacguaaug

SEQ ID NO: 1350068 - RNA, 19 nt, Artificial Sequence
  Description of Artificial Sequence: Synthetic oligonucleotide
cugcccgccgaaguacagg

SEQ ID NO: 1350069 - RNA, 19 nt, Artificial Sequence
  Description of Artificial Sequence: Synthetic oligonucleotide
gguucucguacaggagccg

SEQ ID NO: 1350070 - RNA, 19 nt, Artificial Sequence
  Description of Artificial Sequence: Synthetic oligonucleotide
agcauccccgagauacuug

SEQ ID NO: 1350071 - RNA, 19 nt, Artificial Sequence
  Description of Artificial Sequence: Synthetic oligonucleotide
acucgacgagaccuuccau

SEQ ID NO: 1350072 - RNA, 19 nt, Artificial Sequence
  Description of Artificial Sequence: Synthetic oligonucleotide
cauguuuaagggcgccaaa

SEQ ID NO: 1350073 - RNA, 19 nt, Artificial Sequence
  Description of Artificial Sequence: Synthetic oligonucleotide
ggugcccugcucgcaaacg

SEQ ID NO: 1350074 - RNA, 19 nt, Artificial Sequence
  Description of Artificial Sequence: Synthetic oligonucleotide
uacauaggccaaggccccu

SEQ ID NO: 1350075 - RNA, 19 nt, Artificial Sequence
  Description of Artificial Sequence: Synthetic oligonucleotide
aagcaggcguggccuucga

SEQ ID NO: 1350076 - RNA, 19 nt, Artificial Sequence
  Description of Artificial Sequence: Synthetic oligonucleotide
gcugacagccccucucgac

SEQ ID NO: 1350077 - RNA, 19 nt, Artificial Sequence
  Description of Artificial Sequence: Synthetic oligonucleotide
ggacaucgggauaguuugg

SEQ ID NO: 1350078 - RNA, 19 nt, Artificial Sequence
  Description of Artificial Sequence: Synthetic oligonucleotide
ugcucgcaaacggagccuu

SEQ ID NO: 1350079 - RNA, 19 nt, Artificial Sequence
  Description of Artificial Sequence: Synthetic oligonucleotide
ugcgcacggcugugcaugu

SEQ ID NO: 1350080 - RNA, 19 nt, Artificial Sequence
  Description of Artificial Sequence: Synthetic oligonucleotide
gcuccucuccgugagcugc

SEQ ID NO: 1350081 - RNA, 19 nt, Artificial Sequence
  Description of Artificial Sequence: Synthetic oligonucleotide
cgagacguaauggagccug

SEQ ID NO: 1350082 - RNA, 19 nt, Artificial Sequence
  Description of Artificial Sequence: Synthetic oligonucleotide
gcaaagcuccgcacuguag

SEQ ID NO: 1350083 - RNA, 19 nt, Artificial Sequence
  Description of Artificial Sequence: Synthetic oligonucleotide
gcagcacgguuggagaagc

SEQ ID NO: 1350084 - RNA, 19 nt, Artificial Sequence
  Description of Artificial Sequence: Synthetic oligonucleotide
cacaccuuggauguauccu

SEQ ID NO: 1350085 - RNA, 19 nt, Artificial Sequence
  Description of Artificial Sequence: Synthetic oligonucleotide
cgaaucaaagcucgggcca

SEQ ID NO: 1350086 - RNA, 19 nt, Artificial Sequence
  Description of Artificial Sequence: Synthetic oligonucleotide
gccgaaguacaggauuccc

SEQ ID NO: 1350087 - RNA, 19 nt, Artificial Sequence
  Description of Artificial Sequence: Synthetic oligonucleotide
ucucgaccaccagcugccc

SEQ ID NO: 1350088 - RNA, 19 nt, Artificial Sequence
  Description of Artificial Sequence: Synthetic oligonucleotide
gagccgcugaguggagagc

SEQ ID NO: 1350089 - RNA, 19 nt, Artificial Sequence
  Description of Artificial Sequence: Synthetic oligonucleotide
cucgggccaaggccacugc

SEQ ID NO: 1350090 - RNA, 19 nt, Artificial Sequence
  Description of Artificial Sequence: Synthetic oligonucleotide
cuucgacuacauaggccaa

SEQ ID NO: 1350091 - RNA, 19 nt, Artificial Sequence
  Description of Artificial Sequence: Synthetic oligonucleotide
gguuggauuccgggucagg

SEQ ID NO: 1350092 - RNA, 19 nt, Artificial Sequence
  Description of Artificial Sequence: Synthetic oligonucleotide
cgggauaguuuggauaagc

SEQ ID NO: 1350093 - RNA, 19 nt, Artificial Sequence
  Description of Artificial Sequence: Synthetic oligonucleotide
gauaagcaggcguggccuu

SEQ ID NO: 1350094 - RNA, 19 nt, Artificial Sequence
  Description of Artificial Sequence: Synthetic oligonucleotide
ggcgccaaagagccgcuga

SEQ ID NO: 1350095 - RNA, 19 nt, Artificial Sequence
  Description of Artificial Sequence: Synthetic oligonucleotide
ccgccgaaguacaggauuc

SEQ ID NO: 1350096 - RNA, 19 nt, Artificial Sequence
  Description of Artificial Sequence: Synthetic oligonucleotide
cagcugcccgccgaaguac

SEQ ID NO: 1350097 - RNA, 19 nt, Artificial Sequence
  Description of Artificial Sequence: Synthetic oligonucleotide
ugggugcccugcucgcaaa

SEQ ID NO: 1350098 - RNA, 19 nt, Artificial Sequence
  Description of Artificial Sequence: Synthetic oligonucleotide
ccucguuggcaaagcuccg

SEQ ID NO: 1350099 - RNA, 19 nt, Artificial Sequence
  Description of Artificial Sequence: Synthetic oligonucleotide
cagucugaaggagccacaa

SEQ ID NO: 1350100 - RNA, 19 nt, Artificial Sequence
  Description of Artificial Sequence: Synthetic oligonucleotide
ccaaggccccuucuuguug

SEQ ID NO: 1350101 - RNA, 19 nt, Artificial Sequence
  Description of Artificial Sequence: Synthetic oligonucleotide
uuucuccgaggagcccaca

SEQ ID NO: 1350102 - RNA, 19 nt, Artificial Sequence
  Description of Artificial Sequence: Synthetic oligonucleotide
acgagaccuuccauguuua

SEQ ID NO: 1350103 - RNA, 19 nt, Artificial Sequence
  Description of Artificial Sequence: Synthetic oligonucleotide
cccugcucgcaaacggagc

SEQ ID NO: 1350104 - RNA, 19 nt, Artificial Sequence
  Description of Artificial Sequence: Synthetic oligonucleotide
agcaggcguggccuucgaa

SEQ ID NO: 1350105 - RNA, 19 nt, Artificial Sequence
  Description of Artificial Sequence: Synthetic oligonucleotide
ggaacucgacgagaccuuc

SEQ ID NO: 1350106 - RNA, 19 nt, Artificial Sequence
  Description of Artificial Sequence: Synthetic oligonucleotide
gcccugcucgcaaacggag

SEQ ID NO: 1350107 - RNA, 19 nt, Artificial Sequence
  Description of Artificial Sequence: Synthetic oligonucleotide
agcugcccgccgaaguaca

SEQ ID NO: 1350108 - RNA, 19 nt, Artificial Sequence
  Description of Artificial Sequence: Synthetic oligonucleotide
ccgauagcacccuccgcuc

SEQ ID NO: 1350109 - RNA, 19 nt, Artificial Sequence
  Description of Artificial Sequence: Synthetic oligonucleotide
cccgauagcacccuccgcu

SEQ ID NO: 1350110 - RNA, 19 nt, Artificial Sequence
  Description of Artificial Sequence: Synthetic oligonucleotide
ccaccugcguggacuuugc

SEQ ID NO: 1350111 - RNA, 19 nt, Artificial Sequence
  Description of Artificial Sequence: Synthetic oligonucleotide
ggcucuugucgcaccgcag

SEQ ID NO: 1350112 - RNA, 19 nt, Artificial Sequence
  Description of Artificial Sequence: Synthetic oligonucleotide
gagggaguccagagaugaa

SEQ ID NO: 1350113 - RNA, 19 nt, Artificial Sequence
  Description of Artificial Sequence: Synthetic oligonucleotide
cugcguggacuuugcuaga

SEQ ID NO: 1350114 - RNA, 19 nt, Artificial Sequence
  Description of Artificial Sequence: Synthetic oligonucleotide
cuccaugcgcacggcugug

SEQ ID NO: 1350115 - RNA, 19 nt, Artificial Sequence
  Description of Artificial Sequence: Synthetic oligonucleotide
ccccgagauacuugugguc

SEQ ID NO: 1350116 - RNA, 19 nt, Artificial Sequence
  Description of Artificial Sequence: Synthetic oligonucleotide
cgacuacauaggccaaggc

SEQ ID NO: 1350117 - RNA, 19 nt, Artificial Sequence
  Description of Artificial Sequence: Synthetic oligonucleotide
ccaccauggcccgauagca

SEQ ID NO: 1350118 - RNA, 19 nt, Artificial Sequence
  Description of Artificial Sequence: Synthetic oligonucleotide
ccagguauucaaauauuuu

SEQ ID NO: 1350119 - RNA, 19 nt, Artificial Sequence
  Description of Artificial Sequence: Synthetic oligonucleotide
ggugaaggacagcccgaaa

SEQ ID NO: 1350120 - RNA, 19 nt, Artificial Sequence
  Description of Artificial Sequence: Synthetic oligonucleotide
guccagguauucaaauauu

SEQ ID NO: 1350121 - RNA, 19 nt, Artificial Sequence
  Description of Artificial Sequence: Synthetic oligonucleotide
gccuaaacuucugggccuc

SEQ ID NO: 1350122 - RNA, 19 nt, Artificial Sequence
  Description of Artificial Sequence: Synthetic oligonucleotide
ccgcugaguggagagcaag

SEQ ID NO: 1350123 - RNA, 19 nt, Artificial Sequence
  Description of Artificial Sequence: Synthetic oligonucleotide
ccgagauacuuguggucca

SEQ ID NO: 1350124 - RNA, 19 nt, Artificial Sequence
  Description of Artificial Sequence: Synthetic oligonucleotide
gcugagugaugagcagcac

SEQ ID NO: 1350125 - RNA, 19 nt, Artificial Sequence
  Description of Artificial Sequence: Synthetic oligonucleotide
gauuccgggucaggccaua

SEQ ID NO: 1350126 - RNA, 19 nt, Artificial Sequence
  Description of Artificial Sequence: Synthetic oligonucleotide
gcccgaaacaccucuccau

SEQ ID NO: 1350127 - RNA, 19 nt, Artificial Sequence
  Description of Artificial Sequence: Synthetic oligonucleotide
gcugcccgccgaaguacag

SEQ ID NO: 1350128 - RNA, 19 nt, Artificial Sequence
  Description of Artificial Sequence: Synthetic oligonucleotide
cgaaaacuucuuccaaaua

SEQ ID NO: 1350129 - RNA, 19 nt, Artificial Sequence
  Description of Artificial Sequence: Synthetic oligonucleotide
agggcgccaaagagccgcu

SEQ ID NO: 1350130 - RNA, 19 nt, Artificial Sequence
  Description of Artificial Sequence: Synthetic oligonucleotide
gcugagcugcugagugaug

SEQ ID NO: 1350131 - RNA, 19 nt, Artificial Sequence
  Description of Artificial Sequence: Synthetic oligonucleotide
ccuuggauguauccucggu

SEQ ID NO: 1350132 - RNA, 19 nt, Artificial Sequence
  Description of Artificial Sequence: Synthetic oligonucleotide
caugcgcacggcugugcau

SEQ ID NO: 1350133 - RNA, 19 nt, Artificial Sequence
  Description of Artificial Sequence: Synthetic oligonucleotide
ccgcagcugguuguuagca

SEQ ID NO: 1350134 - RNA, 19 nt, Artificial Sequence
  Description of Artificial Sequence: Synthetic oligonucleotide
ccucggucacccgagacgu

SEQ ID NO: 1350135 - RNA, 19 nt, Artificial Sequence
  Description of Artificial Sequence: Synthetic oligonucleotide
cucacacaccuuggaugua

SEQ ID NO: 1350136 - RNA, 19 nt, Artificial Sequence
  Description of Artificial Sequence: Synthetic oligonucleotide
gcggcucuugucgcaccgc

SEQ ID NO: 1350137 - RNA, 19 nt, Artificial Sequence
  Description of Artificial Sequence: Synthetic oligonucleotide
cugcucgcaaacggagccu

SEQ ID NO: 1350138 - RNA, 19 nt, Artificial Sequence
  Description of Artificial Sequence: Synthetic oligonucleotide
cucggucacccgagacgua

SEQ ID NO: 1350139 - RNA, 19 nt, Artificial Sequence
  Description of Artificial Sequence: Synthetic oligonucleotide
cagcauccccgagauacuu

SEQ ID NO: 1350140 - RNA, 19 nt, Artificial Sequence
  Description of Artificial Sequence: Synthetic oligonucleotide
cccgccgaaguacaggauu

SEQ ID NO: 1350141 - RNA, 19 nt, Artificial Sequence
  Description of Artificial Sequence: Synthetic oligonucleotide
gggcgccaaagagccgcug

SEQ ID NO: 1350142 - RNA, 19 nt, Artificial Sequence
  Description of Artificial Sequence: Synthetic oligonucleotide
gccucuccccagguaccac

SEQ ID NO: 1350143 - RNA, 19 nt, Artificial Sequence
  Description of Artificial Sequence: Synthetic oligonucleotide
gcagcauccccgagauacu

SEQ ID NO: 1350144 - RNA, 19 nt, Artificial Sequence
  Description of Artificial Sequence: Synthetic oligonucleotide
caccugcguggacuuugcu

SEQ ID NO: 1350145 - RNA, 19 nt, Artificial Sequence
  Description of Artificial Sequence: Synthetic oligonucleotide
cggcucuugucgcaccgca

SEQ ID NO: 1350146 - RNA, 19 nt, Artificial Sequence
  Description of Artificial Sequence: Synthetic oligonucleotide
ccgcacuguaggcauggcu

SEQ ID NO: 1350147 - RNA, 19 nt, Artificial Sequence
  Description of Artificial Sequence: Synthetic oligonucleotide
cgagaccuuccauguuuaa

SEQ ID NO: 1350148 - RNA, 19 nt, Artificial Sequence
  Description of Artificial Sequence: Synthetic oligonucleotide
gcgcacggcugugcaugug

SEQ ID NO: 1350149 - RNA, 19 nt, Artificial Sequence
  Description of Artificial Sequence: Synthetic oligonucleotide
gccgcugaguggagagcaa

SEQ ID NO: 1350150 - RNA, 19 nt, Artificial Sequence
  Description of Artificial Sequence: Synthetic oligonucleotide
ccaccagcugcccgccgaa

SEQ ID NO: 1350151 - RNA, 19 nt, Artificial Sequence
  Description of Artificial Sequence: Synthetic oligonucleotide
cgcaaacggagccuucuuu

SEQ ID NO: 1350152 - RNA, 19 nt, Artificial Sequence
  Description of Artificial Sequence: Synthetic oligonucleotide
ccacaagagccuccaccau

SEQ ID NO: 1350153 - RNA, 19 nt, Artificial Sequence
  Description of Artificial Sequence: Synthetic oligonucleotide
gcguggccuucgaaucaaa

SEQ ID NO: 1350154 - RNA, 19 nt, Artificial Sequence
  Description of Artificial Sequence: Synthetic oligonucleotide
ccgagacguaauggagccu

SEQ ID NO: 1350155 - RNA, 19 nt, Artificial Sequence
  Description of Artificial Sequence: Synthetic oligonucleotide
ccgcagccaccuggcggug

SEQ ID NO: 1350156 - RNA, 19 nt, Artificial Sequence
  Description of Artificial Sequence: Synthetic oligonucleotide
gcccgccgaaguacaggau

SEQ ID NO: 1350157 - RNA, 19 nt, Artificial Sequence
  Description of Artificial Sequence: Synthetic oligonucleotide
cgacgagaccuuccauguu

SEQ ID NO: 1350158 - RNA, 19 nt, Artificial Sequence
  Description of Artificial Sequence: Synthetic oligonucleotide
uuauauauccccuugaagg

SEQ ID NO: 1350159 - RNA, 19 nt, Artificial Sequence
  Description of Artificial Sequence: Synthetic oligonucleotide
auuggaguagaucugaaac

SEQ ID NO: 1350160 - RNA, 19 nt, Artificial Sequence
  Description of Artificial Sequence: Synthetic oligonucleotide
aaaguugaugcccucgggg

SEQ ID NO: 1350161 - RNA, 19 nt, Artificial Sequence
  Description of Artificial Sequence: Synthetic oligonucleotide
uggacaagaaguuauauau

SEQ ID NO: 1350162 - RNA, 19 nt, Artificial Sequence
  Description of Artificial Sequence: Synthetic oligonucleotide
gacaguggaguccauaacg

SEQ ID NO: 1350163 - RNA, 19 nt, Artificial Sequence
  Description of Artificial Sequence: Synthetic oligonucleotide
gaucugaaaccuucgaagg

SEQ ID NO: 1350164 - RNA, 19 nt, Artificial Sequence
  Description of Artificial Sequence: Synthetic oligonucleotide
caagaaguuauauaucccc

SEQ ID NO: 1350165 - RNA, 19 nt, Artificial Sequence
  Description of Artificial Sequence: Synthetic oligonucleotide
cauagaagaaccaguagag

SEQ ID NO: 1350166 - RNA, 19 nt, Artificial Sequence
  Description of Artificial Sequence: Synthetic oligonucleotide
accaauuugcagcaaaguc

SEQ ID NO: 1350167 - RNA, 19 nt, Artificial Sequence
  Description of Artificial Sequence: Synthetic oligonucleotide
agaguugcagcccugugcg

SEQ ID NO: 1350168 - RNA, 19 nt, Artificial Sequence
  Description of Artificial Sequence: Synthetic oligonucleotide
gaguuaaucacuguagggc

SEQ ID NO: 1350169 - RNA, 19 nt, Artificial Sequence
  Description of Artificial Sequence: Synthetic oligonucleotide
gaugaauguggacaagaag

SEQ ID NO: 1350170 - RNA, 19 nt, Artificial Sequence
  Description of Artificial Sequence: Synthetic oligonucleotide
aacaaugcuuccaaaguag

SEQ ID NO: 1350171 - RNA, 19 nt, Artificial Sequence
  Description of Artificial Sequence: Synthetic oligonucleotide
acgaacaaaguugaugccc

SEQ ID NO: 1350172 - RNA, 19 nt, Artificial Sequence
  Description of Artificial Sequence: Synthetic oligonucleotide
gucaucuuagcacugagac

SEQ ID NO: 1350173 - RNA, 19 nt, Artificial Sequence
  Description of Artificial Sequence: Synthetic oligonucleotide
cauaacgacggcaggacgg

SEQ ID NO: 1350174 - RNA, 19 nt, Artificial Sequence
  Description of Artificial Sequence: Synthetic oligonucleotide
ucgacuucaggcagcaagg

SEQ ID NO: 1350175 - RNA, 19 nt, Artificial Sequence
  Description of Artificial Sequence: Synthetic oligonucleotide
agaacaaugcuuccaaagu

SEQ ID NO: 1350176 - RNA, 19 nt, Artificial Sequence
  Description of Artificial Sequence: Synthetic oligonucleotide
gaagugaugaauguggaca

SEQ ID NO: 1350177 - RNA, 19 nt, Artificial Sequence
  Description of Artificial Sequence: Synthetic oligonucleotide
uuggaguagaucugaaacc

SEQ ID NO: 1350178 - RNA, 19 nt, Artificial Sequence
  Description of Artificial Sequence: Synthetic oligonucleotide
aguuaaucacuguagggcu

SEQ ID NO: 1350179 - RNA, 19 nt, Artificial Sequence
  Description of Artificial Sequence: Synthetic oligonucleotide
guuauauauccccuugaag

SEQ ID NO: 1350180 - RNA, 19 nt, Artificial Sequence
  Description of Artificial Sequence: Synthetic oligonucleotide
uucacaucggagauguugu

SEQ ID NO: 1350181 - RNA, 19 nt, Artificial Sequence
  Description of Artificial Sequence: Synthetic oligonucleotide
ucaucuuagcacugagacg

SEQ ID NO: 1350182 - RNA, 19 nt, Artificial Sequence
  Description of Artificial Sequence: Synthetic oligonucleotide
acaaaguugaugcccucgg

SEQ ID NO: 1350183 - RNA, 19 nt, Artificial Sequence
  Description of Artificial Sequence: Synthetic oligonucleotide
aauccgaccagugggaucu

SEQ ID NO: 1350184 - RNA, 19 nt, Artificial Sequence
  Description of Artificial Sequence: Synthetic oligonucleotide
uggaaguggaguuccgagg

SEQ ID NO: 1350185 - RNA, 19 nt, Artificial Sequence
  Description of Artificial Sequence: Synthetic oligonucleotide
ugugugaccuucacaucgg

SEQ ID NO: 1350186 - RNA, 19 nt, Artificial Sequence
  Description of Artificial Sequence: Synthetic oligonucleotide
gauagcucgacuucaggca

SEQ ID NO: 1350187 - RNA, 19 nt, Artificial Sequence
  Description of Artificial Sequence: Synthetic oligonucleotide
gacauuggacacuuuaauc

SEQ ID NO: 1350188 - RNA, 19 nt, Artificial Sequence
  Description of Artificial Sequence: Synthetic oligonucleotide
gauggacacacccucggcc

SEQ ID NO: 1350189 - RNA, 19 nt, Artificial Sequence
  Description of Artificial Sequence: Synthetic oligonucleotide
aagugaugaauguggacaa

SEQ ID NO: 1350190 - RNA, 19 nt, Artificial Sequence
  Description of Artificial Sequence: Synthetic oligonucleotide
aacgcagauugauuggagu

SEQ ID NO: 1350191 - RNA, 19 nt, Artificial Sequence
  Description of Artificial Sequence: Synthetic oligonucleotide
uuggagauaugcagcaaca

SEQ ID NO: 1350192 - RNA, 19 nt, Artificial Sequence
  Description of Artificial Sequence: Synthetic oligonucleotide
ugcaugguuggucaccacc

SEQ ID NO: 1350193 - RNA, 19 nt, Artificial Sequence
  Description of Artificial Sequence: Synthetic oligonucleotide
cucgacuucaggcagcaag

SEQ ID NO: 1350194 - RNA, 19 nt, Artificial Sequence
  Description of Artificial Sequence: Synthetic oligonucleotide
uggaguagaucugaaaccu

SEQ ID NO: 1350195 - RNA, 19 nt, Artificial Sequence
  Description of Artificial Sequence: Synthetic oligonucleotide
caccucacgaacaaaguug

SEQ ID NO: 1350196 - RNA, 19 nt, Artificial Sequence
  Description of Artificial Sequence: Synthetic oligonucleotide
uccaacgcagauugauugg

SEQ ID NO: 1350197 - RNA, 19 nt, Artificial Sequence
  Description of Artificial Sequence: Synthetic oligonucleotide
uccgaggauaucaacugca

SEQ ID NO: 1350198 - RNA, 19 nt, Artificial Sequence
  Description of Artificial Sequence: Synthetic oligonucleotide
ggaguuaaucacuguaggg

SEQ ID NO: 1350199 - RNA, 19 nt, Artificial Sequence
  Description of Artificial Sequence: Synthetic oligonucleotide
auagcucgacuucaggcag

SEQ ID NO: 1350200 - RNA, 19 nt, Artificial Sequence
  Description of Artificial Sequence: Synthetic oligonucleotide
ugggacgaaggacucaggc

SEQ ID NO: 1350201 - RNA, 19 nt, Artificial Sequence
  Description of Artificial Sequence: Synthetic oligonucleotide
aguuauauauccccuugaa

SEQ ID NO: 1350202 - RNA, 19 nt, Artificial Sequence
  Description of Artificial Sequence: Synthetic oligonucleotide
uagucgaugccaacaagcu

SEQ ID NO: 1350203 - RNA, 19 nt, Artificial Sequence
  Description of Artificial Sequence: Synthetic oligonucleotide
uccccggaauuccauaucc

SEQ ID NO: 1350204 - RNA, 19 nt, Artificial Sequence
  Description of Artificial Sequence: Synthetic oligonucleotide
auguuguaguagaagcugc

SEQ ID NO: 1350205 - RNA, 19 nt, Artificial Sequence
  Description of Artificial Sequence: Synthetic oligonucleotide
uauauccccuugaagguuc

SEQ ID NO: 1350206 - RNA, 19 nt, Artificial Sequence
  Description of Artificial Sequence: Synthetic oligonucleotide
cauccuagagacagaggcg

SEQ ID NO: 1350207 - RNA, 19 nt, Artificial Sequence
  Description of Artificial Sequence: Synthetic oligonucleotide
agauugauuggaguagauc

SEQ ID NO: 1350208 - RNA, 19 nt, Artificial Sequence
  Description of Artificial Sequence: Synthetic oligonucleotide
gaccacaggauccuucaag

SEQ ID NO: 1350209 - RNA, 19 nt, Artificial Sequence
  Description of Artificial Sequence: Synthetic oligonucleotide
aaucacuucucgaagcccu

SEQ ID NO: 1350210 - RNA, 19 nt, Artificial Sequence
  Description of Artificial Sequence: Synthetic oligonucleotide
guuccgaggauaucaacug

SEQ ID NO: 1350211 - RNA, 19 nt, Artificial Sequence
  Description of Artificial Sequence: Synthetic oligonucleotide
agaguugagcagcacuguc

SEQ ID NO: 1350212 - RNA, 19 nt, Artificial Sequence
  Description of Artificial Sequence: Synthetic oligonucleotide
cuccaacgcagauugauug

SEQ ID NO: 1350213 - RNA, 19 nt, Artificial Sequence
  Description of Artificial Sequence: Synthetic oligonucleotide
gagucgaagaagaacucag

SEQ ID NO: 1350214 - RNA, 19 nt, Artificial Sequence
  Description of Artificial Sequence: Synthetic oligonucleotide
agaauguuccccggaauuc

SEQ ID NO: 1350215 - RNA, 19 nt, Artificial Sequence
  Description of Artificial Sequence: Synthetic oligonucleotide
ugugaccuucacaucggag

SEQ ID NO: 1350216 - RNA, 19 nt, Artificial Sequence
  Description of Artificial Sequence: Synthetic oligonucleotide
acaucggagauguuguagu

SEQ ID NO: 1350217 - RNA, 19 nt, Artificial Sequence
  Description of Artificial Sequence: Synthetic oligonucleotide
agaaccaguagagaagcug

SEQ ID NO: 1350218 - RNA, 19 nt, Artificial Sequence
  Description of Artificial Sequence: Synthetic oligonucleotide
acugagacgugcuuccaug

SEQ ID NO: 1350219 - RNA, 19 nt, Artificial Sequence
  Description of Artificial Sequence: Synthetic oligonucleotide
ucggccgaagcguugaugu

SEQ ID NO: 1350220 - RNA, 19 nt, Artificial Sequence
  Description of Artificial Sequence: Synthetic oligonucleotide
accacaggauccuucaaga

SEQ ID NO: 1350221 - RNA, 19 nt, Artificial Sequence
  Description of Artificial Sequence: Synthetic oligonucleotide
agucgaugccaacaagcuc

SEQ ID NO: 1350222 - RNA, 19 nt, Artificial Sequence
  Description of Artificial Sequence: Synthetic oligonucleotide
uugauuggaguagaucuga

SEQ ID NO: 1350223 - RNA, 19 nt, Artificial Sequence
  Description of Artificial Sequence: Synthetic oligonucleotide
uuaaucacuguagggcuca

SEQ ID NO: 1350224 - RNA, 19 nt, Artificial Sequence
  Description of Artificial Sequence: Synthetic oligonucleotide
agacauuggacacuuuaau

SEQ ID NO: 1350225 - RNA, 19 nt, Artificial Sequence
  Description of Artificial Sequence: Synthetic oligonucleotide
gaucuugggagaguugcag

SEQ ID NO: 1350226 - RNA, 19 nt, Artificial Sequence
  Description of Artificial Sequence: Synthetic oligonucleotide
augggcaucacaccaauuu

SEQ ID NO: 1350227 - RNA, 19 nt, Artificial Sequence
  Description of Artificial Sequence: Synthetic oligonucleotide
aucaacugcagcuguguga

SEQ ID NO: 1350228 - RNA, 19 nt, Artificial Sequence
  Description of Artificial Sequence: Synthetic oligonucleotide
gaauguuccccggaauucc

SEQ ID NO: 1350229 - RNA, 19 nt, Artificial Sequence
  Description of Artificial Sequence: Synthetic oligonucleotide
ggagauaugcagcaacagc

SEQ ID NO: 1350230 - RNA, 19 nt, Artificial Sequence
  Description of Artificial Sequence: Synthetic oligonucleotide
uccauggcagagucgaaga

SEQ ID NO: 1350231 - RNA, 19 nt, Artificial Sequence
  Description of Artificial Sequence: Synthetic oligonucleotide
agccccaacagugaggaag

SEQ ID NO: 1350232 - RNA, 19 nt, Artificial Sequence
  Description of Artificial Sequence: Synthetic oligonucleotide
aaaccuucgaagguccagu

SEQ ID NO: 1350233 - RNA, 19 nt, Artificial Sequence
  Description of Artificial Sequence: Synthetic oligonucleotide
gaugcauuggagauaugca

SEQ ID NO: 1350234 - RNA, 19 nt, Artificial Sequence
  Description of Artificial Sequence: Synthetic oligonucleotide
uuggacacuuuaauccgac

SEQ ID NO: 1350235 - RNA, 19 nt, Artificial Sequence
  Description of Artificial Sequence: Synthetic oligonucleotide
caggacuacgcacaggcac

SEQ ID NO: 1350236 - RNA, 19 nt, Artificial Sequence
  Description of Artificial Sequence: Synthetic oligonucleotide
uuccgaggauaucaacugc

SEQ ID NO: 1350237 - RNA, 19 nt, Artificial Sequence
  Description of Artificial Sequence: Synthetic oligonucleotide
guagaagcugcccuuucug

SEQ ID NO: 1350238 - RNA, 19 nt, Artificial Sequence
  Description of Artificial Sequence: Synthetic oligonucleotide
ggaucuugcaucccgggag

SEQ ID NO: 1350239 - RNA, 19 nt, Artificial Sequence
  Description of Artificial Sequence: Synthetic oligonucleotide
ggauagcucgacuucaggc

SEQ ID NO: 1350240 - RNA, 19 nt, Artificial Sequence
  Description of Artificial Sequence: Synthetic oligonucleotide
gaauagucgaugccaacaa

SEQ ID NO: 1350241 - RNA, 19 nt, Artificial Sequence
  Description of Artificial Sequence: Synthetic oligonucleotide
cuggaaguggaguuccgag

SEQ ID NO: 1350242 - RNA, 19 nt, Artificial Sequence
  Description of Artificial Sequence: Synthetic oligonucleotide
aucugaaaccuucgaaggu

SEQ ID NO: 1350243 - RNA, 19 nt, Artificial Sequence
  Description of Artificial Sequence: Synthetic oligonucleotide
cuugcaucccgggagcucg

SEQ ID NO: 1350244 - RNA, 19 nt, Artificial Sequence
  Description of Artificial Sequence: Synthetic oligonucleotide
aguuccgaggauaucaacu

SEQ ID NO: 1350245 - RNA, 19 nt, Artificial Sequence
  Description of Artificial Sequence: Synthetic oligonucleotide
agaaguuauauauccccuu

SEQ ID NO: 1350246 - RNA, 19 nt, Artificial Sequence
  Description of Artificial Sequence: Synthetic oligonucleotide
aguagagaagcugccuccg

SEQ ID NO: 1350247 - RNA, 19 nt, Artificial Sequence
  Description of Artificial Sequence: Synthetic oligonucleotide
uguagggcucaggagaaca

SEQ ID NO: 1350248 - RNA, 19 nt, Artificial Sequence
  Description of Artificial Sequence: Synthetic oligonucleotide
uggagauaugcagcaacag

SEQ ID NO: 1350249 - RNA, 19 nt, Artificial Sequence
  Description of Artificial Sequence: Synthetic oligonucleotide
ccggaagugaugaaugugg

SEQ ID NO: 1350250 - RNA, 19 nt, Artificial Sequence
  Description of Artificial Sequence: Synthetic oligonucleotide
cacaggagacauuggacac

SEQ ID NO: 1350251 - RNA, 19 nt, Artificial Sequence
  Description of Artificial Sequence: Synthetic oligonucleotide
ucaagagggaauagucgau

SEQ ID NO: 1350252 - RNA, 19 nt, Artificial Sequence
  Description of Artificial Sequence: Synthetic oligonucleotide
uuggucaccaccucacgaa

SEQ ID NO: 1350253 - RNA, 19 nt, Artificial Sequence
  Description of Artificial Sequence: Synthetic oligonucleotide
aggagaacaaugcuuccaa

SEQ ID NO: 1350254 - RNA, 19 nt, Artificial Sequence
  Description of Artificial Sequence: Synthetic oligonucleotide
caucuuagcacugagacgu

SEQ ID NO: 1350255 - RNA, 19 nt, Artificial Sequence
  Description of Artificial Sequence: Synthetic oligonucleotide
gauaucaacugcagcugug

SEQ ID NO: 1350256 - RNA, 19 nt, Artificial Sequence
  Description of Artificial Sequence: Synthetic oligonucleotide
aacgacggcaggacgguuc

SEQ ID NO: 1350257 - RNA, 19 nt, Artificial Sequence
  Description of Artificial Sequence: Synthetic oligonucleotide
ugcggauggacacacccuc

SEQ ID NO: 1350258 - RNA, 19 nt, Artificial Sequence
  Description of Artificial Sequence: Synthetic oligonucleotide
gaaaccuucgaagguccag

SEQ ID NO: 1350259 - RNA, 19 nt, Artificial Sequence
  Description of Artificial Sequence: Synthetic oligonucleotide
uauucauccuagagacaga

SEQ ID NO: 1350260 - RNA, 19 nt, Artificial Sequence
  Description of Artificial Sequence: Synthetic oligonucleotide
cuuccaaaguagguggccc

SEQ ID NO: 1350261 - RNA, 19 nt, Artificial Sequence
  Description of Artificial Sequence: Synthetic oligonucleotide
acuacgcacaggcacugug

SEQ ID NO: 1350262 - RNA, 19 nt, Artificial Sequence
  Description of Artificial Sequence: Synthetic oligonucleotide
cacuuuaauccgaccagug

SEQ ID NO: 1350263 - RNA, 19 nt, Artificial Sequence
  Description of Artificial Sequence: Synthetic oligonucleotide
uuuuguucgcagcgccuug

SEQ ID NO: 1350264 - RNA, 19 nt, Artificial Sequence
  Description of Artificial Sequence: Synthetic oligonucleotide
ugacccggaucuugcaucc

SEQ ID NO: 1350265 - RNA, 19 nt, Artificial Sequence
  Description of Artificial Sequence: Synthetic oligonucleotide
agcgcuaagaggagggccg

SEQ ID NO: 1350266 - RNA, 19 nt, Artificial Sequence
  Description of Artificial Sequence: Synthetic oligonucleotide
caguuuuguucgcagcgcc

SEQ ID NO: 1350267 - RNA, 19 nt, Artificial Sequence
  Description of Artificial Sequence: Synthetic oligonucleotide
gacgguucuugucaaucac

SEQ ID NO: 1350268 - RNA, 19 nt, Artificial Sequence
  Description of Artificial Sequence: Synthetic oligonucleotide
augccaacaagcucaucca

SEQ ID NO: 1350269 - RNA, 19 nt, Artificial Sequence
  Description of Artificial Sequence: Synthetic oligonucleotide
auccuagagacagaggcgu

SEQ ID NO: 1350270 - RNA, 19 nt, Artificial Sequence
  Description of Artificial Sequence: Synthetic oligonucleotide
gauuggaguagaucugaaa

SEQ ID NO: 1350271 - RNA, 19 nt, Artificial Sequence
  Description of Artificial Sequence: Synthetic oligonucleotide
uuccauauccagguugcca

SEQ ID NO: 1350272 - RNA, 19 nt, Artificial Sequence
  Description of Artificial Sequence: Synthetic oligonucleotide
ugcuuccaaaguagguggc

SEQ ID NO: 1350273 - RNA, 19 nt, Artificial Sequence
  Description of Artificial Sequence: Synthetic oligonucleotide
agacgugcuuccaugauca

SEQ ID NO: 1350274 - RNA, 19 nt, Artificial Sequence
  Description of Artificial Sequence: Synthetic oligonucleotide
cacgaacaaaguugaugcc

SEQ ID NO: 1350275 - RNA, 19 nt, Artificial Sequence
  Description of Artificial Sequence: Synthetic oligonucleotide
uuucugccguacagguccg

SEQ ID NO: 1350276 - RNA, 19 nt, Artificial Sequence
  Description of Artificial Sequence: Synthetic oligonucleotide
gagacgugcuuccaugauc

SEQ ID NO: 1350277 - RNA, 19 nt, Artificial Sequence
  Description of Artificial Sequence: Synthetic oligonucleotide
uguggacaagaaguuauau

SEQ ID NO: 1350278 - RNA, 19 nt, Artificial Sequence
  Description of Artificial Sequence: Synthetic oligonucleotide
uccauaacgacggcaggac

SEQ ID NO: 1350279 - RNA, 19 nt, Artificial Sequence
  Description of Artificial Sequence: Synthetic oligonucleotide
auaucaacugcagcugugu

SEQ ID NO: 1350280 - RNA, 19 nt, Artificial Sequence
  Description of Artificial Sequence: Synthetic oligonucleotide
aucggagauguuguaguag

SEQ ID NO: 1350281 - RNA, 19 nt, Artificial Sequence
  Description of Artificial Sequence: Synthetic oligonucleotide
uccuucaagagggaauagu

SEQ ID NO: 1350282 - RNA, 19 nt, Artificial Sequence
  Description of Artificial Sequence: Synthetic oligonucleotide
guagagaagcugccuccgg

SEQ ID NO: 1350283 - RNA, 19 nt, Artificial Sequence
  Description of Artificial Sequence: Synthetic oligonucleotide
agagucgaagaagaacuca

SEQ ID NO: 1350284 - RNA, 19 nt, Artificial Sequence
  Description of Artificial Sequence: Synthetic oligonucleotide
ugauuggaguagaucugaa

SEQ ID NO: 1350285 - RNA, 19 nt, Artificial Sequence
  Description of Artificial Sequence: Synthetic oligonucleotide
ugaaaccuucgaaggucca

SEQ ID NO: 1350286 - RNA, 19 nt, Artificial Sequence
  Description of Artificial Sequence: Synthetic oligonucleotide
cuaagaggagggccgggag

SEQ ID NO: 1350287 - RNA, 19 nt, Artificial Sequence
  Description of Artificial Sequence: Synthetic oligonucleotide
uggacacuuuaauccgacc

SEQ ID NO: 1350288 - RNA, 19 nt, Artificial Sequence
  Description of Artificial Sequence: Synthetic oligonucleotide
acgcagauugauuggagua

SEQ ID NO: 1350289 - RNA, 19 nt, Artificial Sequence
  Description of Artificial Sequence: Synthetic oligonucleotide
acaccaauuugcagcaaag

SEQ ID NO: 1350290 - RNA, 19 nt, Artificial Sequence
  Description of Artificial Sequence: Synthetic oligonucleotide
uuuguucgcagcgccuugc

SEQ ID NO: 1350291 - RNA, 19 nt, Artificial Sequence
  Description of Artificial Sequence: Synthetic oligonucleotide
caacgcagauugauuggag

SEQ ID NO: 1350292 - RNA, 19 nt, Artificial Sequence
  Description of Artificial Sequence: Synthetic oligonucleotide
ucugccguacagguccggg

SEQ ID NO: 1350293 - RNA, 19 nt, Artificial Sequence
  Description of Artificial Sequence: Synthetic oligonucleotide
cacaucggagauguuguag

SEQ ID NO: 1350294 - RNA, 19 nt, Artificial Sequence
  Description of Artificial Sequence: Synthetic oligonucleotide
caccguggagggcucaugg

SEQ ID NO: 1350295 - RNA, 19 nt, Artificial Sequence
  Description of Artificial Sequence: Synthetic oligonucleotide
aaccgcaucccggaaguga

SEQ ID NO: 1350296 - RNA, 19 nt, Artificial Sequence
  Description of Artificial Sequence: Synthetic oligonucleotide
aggagcgcuaagaggaggg

SEQ ID NO: 1350297 - RNA, 19 nt, Artificial Sequence
  Description of Artificial Sequence: Synthetic oligonucleotide
ggcucuaccgcccuguuga

SEQ ID NO: 1350298 - RNA, 19 nt, Artificial Sequence
  Description of Artificial Sequence: Synthetic oligonucleotide
gagacauuggacacuuuaa

SEQ ID NO: 1350299 - RNA, 19 nt, Artificial Sequence
  Description of Artificial Sequence: Synthetic oligonucleotide
caaucacuucucgaagccc

SEQ ID NO: 1350300 - RNA, 19 nt, Artificial Sequence
  Description of Artificial Sequence: Synthetic oligonucleotide
gggaucuugggagaguugc

SEQ ID NO: 1350301 - RNA, 19 nt, Artificial Sequence
  Description of Artificial Sequence: Synthetic oligonucleotide
guuggucaccaccucacga

SEQ ID NO: 1350302 - RNA, 19 nt, Artificial Sequence
  Description of Artificial Sequence: Synthetic oligonucleotide
ugccguacagguccgggau

SEQ ID NO: 1350303 - RNA, 19 nt, Artificial Sequence
  Description of Artificial Sequence: Synthetic oligonucleotide
cacacccucggccgaagcg

SEQ ID NO: 1350304 - RNA, 19 nt, Artificial Sequence
  Description of Artificial Sequence: Synthetic oligonucleotide
ggaucuguaccccacgcca

SEQ ID NO: 1350305 - RNA, 19 nt, Artificial Sequence
  Description of Artificial Sequence: Synthetic oligonucleotide
ugagacgugcuuccaugau

SEQ ID NO: 1350306 - RNA, 19 nt, Artificial Sequence
  Description of Artificial Sequence: Synthetic oligonucleotide
ugacugagaugguggugcc

SEQ ID NO: 1350307 - RNA, 19 nt, Artificial Sequence
  Description of Artificial Sequence: Synthetic oligonucleotide
ggggaguuaaucacuguag

SEQ ID NO: 1350308 - RNA, 19 nt, Artificial Sequence
  Description of Artificial Sequence: Synthetic oligonucleotide
uuguucgcagcgccuugcc

SEQ ID NO: 1350309 - RNA, 19 nt, Artificial Sequence
  Description of Artificial Sequence: Synthetic oligonucleotide
accucacgaacaaaguuga

SEQ ID NO: 1350310 - RNA, 19 nt, Artificial Sequence
  Description of Artificial Sequence: Synthetic oligonucleotide
caagugucagcugcagggc

SEQ ID NO: 1350311 - RNA, 19 nt, Artificial Sequence
  Description of Artificial Sequence: Synthetic oligonucleotide
gguccucucauugagcaug

SEQ ID NO: 1350312 - RNA, 19 nt, Artificial Sequence
  Description of Artificial Sequence: Synthetic oligonucleotide
acgccagguccucucauug

SEQ ID NO: 1350313 - RNA, 19 nt, Artificial Sequence
  Description of Artificial Sequence: Synthetic oligonucleotide
ggaauagucgaugccaaca

SEQ ID NO: 1350314 - RNA, 19 nt, Artificial Sequence
  Description of Artificial Sequence: Synthetic oligonucleotide
cuucaguggggaguuaauc

SEQ ID NO: 1350315 - RNA, 19 nt, Artificial Sequence
  Description of Artificial Sequence: Synthetic oligonucleotide
caacaagcucauccacagg

SEQ ID NO: 1350316 - RNA, 19 nt, Artificial Sequence
  Description of Artificial Sequence: Synthetic oligonucleotide
aggaggaaccgcaucccgg

SEQ ID NO: 1350317 - RNA, 19 nt, Artificial Sequence
  Description of Artificial Sequence: Synthetic oligonucleotide
gagcgcuaagaggagggcc

SEQ ID NO: 1350318 - RNA, 19 nt, Artificial Sequence
  Description of Artificial Sequence: Synthetic oligonucleotide
ggcgucacaggagacauug

SEQ ID NO: 1350319 - RNA, 19 nt, Artificial Sequence
  Description of Artificial Sequence: Synthetic oligonucleotide
cagagucgaagaagaacuc

SEQ ID NO: 1350320 - RNA, 19 nt, Artificial Sequence
  Description of Artificial Sequence: Synthetic oligonucleotide
uaauccgaccagugggauc

SEQ ID NO: 1350321 - RNA, 19 nt, Artificial Sequence
  Description of Artificial Sequence: Synthetic oligonucleotide
ugggaucuugggagaguug

SEQ ID NO: 1350322 - RNA, 19 nt, Artificial Sequence
  Description of Artificial Sequence: Synthetic oligonucleotide
uugaugcccucggggaggg

SEQ ID NO: 1350323 - RNA, 19 nt, Artificial Sequence
  Description of Artificial Sequence: Synthetic oligonucleotide
ggcuugauggugcaccgug

SEQ ID NO: 1350324 - RNA, 19 nt, Artificial Sequence
  Description of Artificial Sequence: Synthetic oligonucleotide
guuaaucacuguagggcuc

SEQ ID NO: 1350325 - RNA, 19 nt, Artificial Sequence
  Description of Artificial Sequence: Synthetic oligonucleotide
uuaauccgaccagugggau

SEQ ID NO: 1350326 - RNA, 19 nt, Artificial Sequence
  Description of Artificial Sequence: Synthetic oligonucleotide
auaacgacggcaggacggu

SEQ ID NO: 1350327 - RNA, 19 nt, Artificial Sequence
  Description of Artificial Sequence: Synthetic oligonucleotide
cggagugucaucuuagcac

SEQ ID NO: 1350328 - RNA, 19 nt, Artificial Sequence
  Description of Artificial Sequence: Synthetic oligonucleotide
ggugggacgaaggacucag

SEQ ID NO: 1350329 - RNA, 19 nt, Artificial Sequence
  Description of Artificial Sequence: Synthetic oligonucleotide
gaguugcagcccugugcgg

SEQ ID NO: 1350330 - RNA, 19 nt, Artificial Sequence
  Description of Artificial Sequence: Synthetic oligonucleotide
aucaucuuggauagcucga

SEQ ID NO: 1350331 - RNA, 19 nt, Artificial Sequence
  Description of Artificial Sequence: Synthetic oligonucleotide
uguuccccggaauuccaua

SEQ ID NO: 1350332 - RNA, 19 nt, Artificial Sequence
  Description of Artificial Sequence: Synthetic oligonucleotide
cccggaauuccauauccag

SEQ ID NO: 1350333 - RNA, 19 nt, Artificial Sequence
  Description of Artificial Sequence: Synthetic oligonucleotide
ggagugucaucuuagcacu

SEQ ID NO: 1350334 - RNA, 19 nt, Artificial Sequence
  Description of Artificial Sequence: Synthetic oligonucleotide
uggaguccauaacgacggc

SEQ ID NO: 1350335 - RNA, 19 nt, Artificial Sequence
  Description of Artificial Sequence: Synthetic oligonucleotide
uggcucuaccgcccuguug

SEQ ID NO: 1350336 - RNA, 19 nt, Artificial Sequence
  Description of Artificial Sequence: Synthetic oligonucleotide
gucaccaccucacgaacaa

SEQ ID NO: 1350337 - RNA, 19 nt, Artificial Sequence
  Description of Artificial Sequence: Synthetic oligonucleotide
aguuccccucagucagggg

SEQ ID NO: 1350338 - RNA, 19 nt, Artificial Sequence
  Description of Artificial Sequence: Synthetic oligonucleotide
gcagagucgaagaagaacu

SEQ ID NO: 1350339 - RNA, 19 nt, Artificial Sequence
  Description of Artificial Sequence: Synthetic oligonucleotide
gguuggucaccaccucacg

SEQ ID NO: 1350340 - RNA, 19 nt, Artificial Sequence
  Description of Artificial Sequence: Synthetic oligonucleotide
aggacuacgcacaggcacu

SEQ ID NO: 1350341 - RNA, 19 nt, Artificial Sequence
  Description of Artificial Sequence: Synthetic oligonucleotide
cacuuggcaccuugucccc

SEQ ID NO: 1350342 - RNA, 19 nt, Artificial Sequence
  Description of Artificial Sequence: Synthetic oligonucleotide
guccauaacgacggcagga

SEQ ID NO: 1350343 - RNA, 19 nt, Artificial Sequence
  Description of Artificial Sequence: Synthetic oligonucleotide
uugcaucccgggagcucgg

SEQ ID NO: 1350344 - RNA, 19 nt, Artificial Sequence
  Description of Artificial Sequence: Synthetic oligonucleotide
caguuccccucagucaggg

SEQ ID NO: 1350345 - RNA, 19 nt, Artificial Sequence
  Description of Artificial Sequence: Synthetic oligonucleotide
uugccccggagugucaucu

SEQ ID NO: 1350346 - RNA, 19 nt, Artificial Sequence
  Description of Artificial Sequence: Synthetic oligonucleotide
ggggaagaauguuccccgg

SEQ ID NO: 1350347 - RNA, 19 nt, Artificial Sequence
  Description of Artificial Sequence: Synthetic oligonucleotide
uaccgcccuguugaggaag

SEQ ID NO: 1350348 - RNA, 19 nt, Artificial Sequence
  Description of Artificial Sequence: Synthetic oligonucleotide
cacaccaauuugcagcaaa

SEQ ID NO: 1350349 - RNA, 19 nt, Artificial Sequence
  Description of Artificial Sequence: Synthetic oligonucleotide
ugggugggacgaaggacuc

SEQ ID NO: 1350350 - RNA, 19 nt, Artificial Sequence
  Description of Artificial Sequence: Synthetic oligonucleotide
ggccgaagcguugauguag

SEQ ID NO: 1350351 - RNA, 19 nt, Artificial Sequence
  Description of Artificial Sequence: Synthetic oligonucleotide
cuuccaugaucaucuugga

SEQ ID NO: 1350352 - RNA, 19 nt, Artificial Sequence
  Description of Artificial Sequence: Synthetic oligonucleotide
cugagacgugcuuccauga

SEQ ID NO: 1350353 - RNA, 19 nt, Artificial Sequence
  Description of Artificial Sequence: Synthetic oligonucleotide
acgguucuugucaaucacu

SEQ ID NO: 1350354 - RNA, 19 nt, Artificial Sequence
  Description of Artificial Sequence: Synthetic oligonucleotide
accgcccuguugaggaagc

SEQ ID NO: 1350355 - RNA, 19 nt, Artificial Sequence
  Description of Artificial Sequence: Synthetic oligonucleotide
aucccgggagcucggcaag

SEQ ID NO: 1350356 - RNA, 19 nt, Artificial Sequence
  Description of Artificial Sequence: Synthetic oligonucleotide
acacccucggccgaagcgu

SEQ ID NO: 1350357 - RNA, 19 nt, Artificial Sequence
  Description of Artificial Sequence: Synthetic oligonucleotide
gggacaguggaguccauaa

SEQ ID NO: 1350358 - RNA, 19 nt, Artificial Sequence
  Description of Artificial Sequence: Synthetic oligonucleotide
gggaucuguaccccacgcc

SEQ ID NO: 1350359 - RNA, 19 nt, Artificial Sequence
  Description of Artificial Sequence: Synthetic oligonucleotide
ggaggaaccgcaucccgga

SEQ ID NO: 1350360 - RNA, 19 nt, Artificial Sequence
  Description of Artificial Sequence: Synthetic oligonucleotide
caggagaacaaugcuucca

SEQ ID NO: 1350361 - RNA, 19 nt, Artificial Sequence
  Description of Artificial Sequence: Synthetic oligonucleotide
ccgaggauaucaacugcag

SEQ ID NO: 1350362 - RNA, 19 nt, Artificial Sequence
  Description of Artificial Sequence: Synthetic oligonucleotide
agggaauagucgaugccaa

SEQ ID NO: 1350363 - RNA, 19 nt, Artificial Sequence
  Description of Artificial Sequence: Synthetic oligonucleotide
ggacgguucuugucaauca

SEQ ID NO: 1350364 - RNA, 19 nt, Artificial Sequence
  Description of Artificial Sequence: Synthetic oligonucleotide
ggcagugacugagauggug

SEQ ID NO: 1350365 - RNA, 19 nt, Artificial Sequence
  Description of Artificial Sequence: Synthetic oligonucleotide
ggggaucuguaccccacgc

SEQ ID NO: 1350366 - RNA, 19 nt, Artificial Sequence
  Description of Artificial Sequence: Synthetic oligonucleotide
ggauggacacacccucggc

SEQ ID NO: 1350367 - RNA, 19 nt, Artificial Sequence
  Description of Artificial Sequence: Synthetic oligonucleotide
gacuccaacgcagauugau

SEQ ID NO: 1350368 - RNA, 19 nt, Artificial Sequence
  Description of Artificial Sequence: Synthetic oligonucleotide
ccgaccagugggaucuugg

SEQ ID NO: 1350369 - RNA, 19 nt, Artificial Sequence
  Description of Artificial Sequence: Synthetic oligonucleotide
agcaccugccaggagcgcu

SEQ ID NO: 1350370 - RNA, 19 nt, Artificial Sequence
  Description of Artificial Sequence: Synthetic oligonucleotide
agcucgacuucaggcagca

SEQ ID NO: 1350371 - RNA, 19 nt, Artificial Sequence
  Description of Artificial Sequence: Synthetic oligonucleotide
ggucacuuggcaccuuguc

SEQ ID NO: 1350372 - RNA, 19 nt, Artificial Sequence
  Description of Artificial Sequence: Synthetic oligonucleotide
gcuuccaaaguagguggcc

SEQ ID NO: 1350373 - RNA, 19 nt, Artificial Sequence
  Description of Artificial Sequence: Synthetic oligonucleotide
cagaggcgucacaggagac

SEQ ID NO: 1350374 - RNA, 19 nt, Artificial Sequence
  Description of Artificial Sequence: Synthetic oligonucleotide
gggaauagucgaugccaac

SEQ ID NO: 1350375 - RNA, 19 nt, Artificial Sequence
  Description of Artificial Sequence: Synthetic oligonucleotide
cccaaggaugcauuggaga

SEQ ID NO: 1350376 - RNA, 19 nt, Artificial Sequence
  Description of Artificial Sequence: Synthetic oligonucleotide
caucggagauguuguagua

SEQ ID NO: 1350377 - RNA, 19 nt, Artificial Sequence
  Description of Artificial Sequence: Synthetic oligonucleotide
uucugccguacagguccgg

SEQ ID NO: 1350378 - RNA, 19 nt, Artificial Sequence
  Description of Artificial Sequence: Synthetic oligonucleotide
caucccgggagcucggcaa

SEQ ID NO: 1350379 - RNA, 19 nt, Artificial Sequence
  Description of Artificial Sequence: Synthetic oligonucleotide
acuccaacgcagauugauu

SEQ ID NO: 1350380 - RNA, 19 nt, Artificial Sequence
  Description of Artificial Sequence: Synthetic oligonucleotide
ccaguuuuguucgcagcgc

SEQ ID NO: 1350381 - RNA, 19 nt, Artificial Sequence
  Description of Artificial Sequence: Synthetic oligonucleotide
accgcaucccggaagugau

SEQ ID NO: 1350382 - RNA, 19 nt, Artificial Sequence
  Description of Artificial Sequence: Synthetic oligonucleotide
ggauaucaacugcagcugu

SEQ ID NO: 1350383 - RNA, 19 nt, Artificial Sequence
  Description of Artificial Sequence: Synthetic oligonucleotide
gacacacccucggccgaag

SEQ ID NO: 1350384 - RNA, 19 nt, Artificial Sequence
  Description of Artificial Sequence: Synthetic oligonucleotide
cgcagauugauuggaguag

SEQ ID NO: 1350385 - RNA, 19 nt, Artificial Sequence
  Description of Artificial Sequence: Synthetic oligonucleotide
guuccccggaauuccauau

SEQ ID NO: 1350386 - RNA, 19 nt, Artificial Sequence
  Description of Artificial Sequence: Synthetic oligonucleotide
ggagcucggcaagagcacc

SEQ ID NO: 1350387 - RNA, 19 nt, Artificial Sequence
  Description of Artificial Sequence: Synthetic oligonucleotide
gccccaacagugaggaagc

SEQ ID NO: 1350388 - RNA, 19 nt, Artificial Sequence
  Description of Artificial Sequence: Synthetic oligonucleotide
agcucggcaagagcaccug

SEQ ID NO: 1350389 - RNA, 19 nt, Artificial Sequence
  Description of Artificial Sequence: Synthetic oligonucleotide
cuacgcacaggcacugugu

SEQ ID NO: 1350390 - RNA, 19 nt, Artificial Sequence
  Description of Artificial Sequence: Synthetic oligonucleotide
gagaguugagcagcacugu

SEQ ID NO: 1350391 - RNA, 19 nt, Artificial Sequence
  Description of Artificial Sequence: Synthetic oligonucleotide
cugugcggauggacacacc

SEQ ID NO: 1350392 - RNA, 19 nt, Artificial Sequence
  Description of Artificial Sequence: Synthetic oligonucleotide
aaguggaggucagccccaa

SEQ ID NO: 1350393 - RNA, 19 nt, Artificial Sequence
  Description of Artificial Sequence: Synthetic oligonucleotide
ggaaccgcaucccggaagu

SEQ ID NO: 1350394 - RNA, 19 nt, Artificial Sequence
  Description of Artificial Sequence: Synthetic oligonucleotide
gugggacgaaggacucagg

SEQ ID NO: 1350395 - RNA, 19 nt, Artificial Sequence
  Description of Artificial Sequence: Synthetic oligonucleotide
cugccguacagguccggga

SEQ ID NO: 1350396 - RNA, 19 nt, Artificial Sequence
  Description of Artificial Sequence: Synthetic oligonucleotide
cgaccagugggaucuuggg

SEQ ID NO: 1350397 - RNA, 19 nt, Artificial Sequence
  Description of Artificial Sequence: Synthetic oligonucleotide
cucccugggugggacgaag

SEQ ID NO: 1350398 - RNA, 19 nt, Artificial Sequence
  Description of Artificial Sequence: Synthetic oligonucleotide
aucuuagcacugagacgug

SEQ ID NO: 1350399 - RNA, 19 nt, Artificial Sequence
  Description of Artificial Sequence: Synthetic oligonucleotide
cucggccgaagcguugaug

SEQ ID NO: 1350400 - RNA, 19 nt, Artificial Sequence
  Description of Artificial Sequence: Synthetic oligonucleotide
gccgaagcguugauguagc

SEQ ID NO: 1350401 - RNA, 19 nt, Artificial Sequence
  Description of Artificial Sequence: Synthetic oligonucleotide
ccccaaggaugcauuggag

SEQ ID NO: 1350402 - RNA, 19 nt, Artificial Sequence
  Description of Artificial Sequence: Synthetic oligonucleotide
cuugccccggagugucauc

SEQ ID NO: 1350403 - RNA, 19 nt, Artificial Sequence
  Description of Artificial Sequence: Synthetic oligonucleotide
ugcaucccgggagcucggc

SEQ ID NO: 1350404 - RNA, 19 nt, Artificial Sequence
  Description of Artificial Sequence: Synthetic oligonucleotide
gcggauggacacacccucg

SEQ ID NO: 1350405 - RNA, 19 nt, Artificial Sequence
  Description of Artificial Sequence: Synthetic oligonucleotide
cccgaaggccauauucauc

SEQ ID NO: 1350406 - RNA, 19 nt, Artificial Sequence
  Description of Artificial Sequence: Synthetic oligonucleotide
ggagcgcuaagaggagggc

SEQ ID NO: 1350407 - RNA, 19 nt, Artificial Sequence
  Description of Artificial Sequence: Synthetic oligonucleotide
guuuuguucgcagcgccuu

SEQ ID NO: 1350408 - RNA, 19 nt, Artificial Sequence
  Description of Artificial Sequence: Synthetic oligonucleotide
ggugcccgagggcuugaug

SEQ ID NO: 1350409 - RNA, 19 nt, Artificial Sequence
  Description of Artificial Sequence: Synthetic oligonucleotide
cccggaagugaugaaugug

SEQ ID NO: 1350410 - RNA, 19 nt, Artificial Sequence
  Description of Artificial Sequence: Synthetic oligonucleotide
gcuaagaggagggccggga

SEQ ID NO: 1350411 - RNA, 19 nt, Artificial Sequence
  Description of Artificial Sequence: Synthetic oligonucleotide
ccugggugggacgaaggac

SEQ ID NO: 1350412 - RNA, 19 nt, Artificial Sequence
  Description of Artificial Sequence: Synthetic oligonucleotide
gacccggaucuugcauccc

SEQ ID NO: 1350413 - RNA, 19 nt, Artificial Sequence
  Description of Artificial Sequence: Synthetic oligonucleotide
cuguagggcucaggagaac

SEQ ID NO: 1350414 - RNA, 19 nt, Artificial Sequence
  Description of Artificial Sequence: Synthetic oligonucleotide
cagauugauuggaguagau

SEQ ID NO: 1350415 - RNA, 19 nt, Artificial Sequence
  Description of Artificial Sequence: Synthetic oligonucleotide
ggaguuccgaggauaucaa

SEQ ID NO: 1350416 - RNA, 19 nt, Artificial Sequence
  Description of Artificial Sequence: Synthetic oligonucleotide
cugagaugguggugcccga

SEQ ID NO: 1350417 - RNA, 19 nt, Artificial Sequence
  Description of Artificial Sequence: Synthetic oligonucleotide
ccaacgcagauugauugga

SEQ ID NO: 1350418 - RNA, 19 nt, Artificial Sequence
  Description of Artificial Sequence: Synthetic oligonucleotide
gccguacagguccgggaug

SEQ ID NO: 1350419 - RNA, 19 nt, Artificial Sequence
  Description of Artificial Sequence: Synthetic oligonucleotide
gaaugccagcucccugggu

SEQ ID NO: 1350420 - RNA, 19 nt, Artificial Sequence
  Description of Artificial Sequence: Synthetic oligonucleotide
ccuagagacagaggcguca

SEQ ID NO: 1350421 - RNA, 19 nt, Artificial Sequence
  Description of Artificial Sequence: Synthetic oligonucleotide
ggcagcaaggguggggcca

SEQ ID NO: 1350422 - RNA, 19 nt, Artificial Sequence
  Description of Artificial Sequence: Synthetic oligonucleotide
guaguagaagcugcccuuu

SEQ ID NO: 1350423 - RNA, 19 nt, Artificial Sequence
  Description of Artificial Sequence: Synthetic oligonucleotide
caucccggaagugaugaau

SEQ ID NO: 1350424 - RNA, 19 nt, Artificial Sequence
  Description of Artificial Sequence: Synthetic oligonucleotide
ccggagugucaucuuagca

SEQ ID NO: 1350425 - RNA, 19 nt, Artificial Sequence
  Description of Artificial Sequence: Synthetic oligonucleotide
ccgaagcguugauguagcc

SEQ ID NO: 1350426 - RNA, 19 nt, Artificial Sequence
  Description of Artificial Sequence: Synthetic oligonucleotide
cuguggcucuaccgcccug

SEQ ID NO: 1350427 - RNA, 19 nt, Artificial Sequence
  Description of Artificial Sequence: Synthetic oligonucleotide
gcgcuaagaggagggccgg

SEQ ID NO: 1350428 - RNA, 19 nt, Artificial Sequence
  Description of Artificial Sequence: Synthetic oligonucleotide
uaacgacggcaggacgguu

SEQ ID NO: 1350429 - RNA, 19 nt, Artificial Sequence
  Description of Artificial Sequence: Synthetic oligonucleotide
gcgucacaggagacauugg

SEQ ID NO: 1350430 - RNA, 19 nt, Artificial Sequence
  Description of Artificial Sequence: Synthetic oligonucleotide
uaccccacgccagguccuc

SEQ ID NO: 1350431 - RNA, 19 nt, Artificial Sequence
  Description of Artificial Sequence: Synthetic oligonucleotide
cggcaagagcaccugccag

SEQ ID NO: 1350432 - RNA, 19 nt, Artificial Sequence
  Description of Artificial Sequence: Synthetic oligonucleotide
ggugacccggaucuugcau

SEQ ID NO: 1350433 - RNA, 19 nt, Artificial Sequence
  Description of Artificial Sequence: Synthetic oligonucleotide
cuaccgcccuguugaggaa

SEQ ID NO: 1350434 - RNA, 19 nt, Artificial Sequence
  Description of Artificial Sequence: Synthetic oligonucleotide
gccauggcgaccaggcuua

SEQ ID NO: 1350435 - RNA, 19 nt, Artificial Sequence
  Description of Artificial Sequence: Synthetic oligonucleotide
cagguccgggauggugaug

SEQ ID NO: 1350436 - RNA, 19 nt, Artificial Sequence
  Description of Artificial Sequence: Synthetic oligonucleotide
cggcuggaaguggaguucc

SEQ ID NO: 1350437 - RNA, 19 nt, Artificial Sequence
  Description of Artificial Sequence: Synthetic oligonucleotide
ccccggaauuccauaucca

SEQ ID NO: 1350438 - RNA, 19 nt, Artificial Sequence
  Description of Artificial Sequence: Synthetic oligonucleotide
gcaucccgggagcucggca

SEQ ID NO: 1350439 - RNA, 19 nt, Artificial Sequence
  Description of Artificial Sequence: Synthetic oligonucleotide
gacuacgcacaggcacugu

SEQ ID NO: 1350440 - RNA, 19 nt, Artificial Sequence
  Description of Artificial Sequence: Synthetic oligonucleotide
gcugcccuuucugccguac

SEQ ID NO: 1350441 - RNA, 19 nt, Artificial Sequence
  Description of Artificial Sequence: Synthetic oligonucleotide
ccgggauggugauggucuc

SEQ ID NO: 1350442 - RNA, 19 nt, Artificial Sequence
  Description of Artificial Sequence: Synthetic oligonucleotide
cgcaucccggaagugauga

SEQ ID NO: 1350443 - RNA, 19 nt, Artificial Sequence
  Description of Artificial Sequence: Synthetic oligonucleotide
caugggcaucacaccaauu

SEQ ID NO: 1350444 - RNA, 19 nt, Artificial Sequence
  Description of Artificial Sequence: Synthetic oligonucleotide
uggugcccgagggcuugau

SEQ ID NO: 1350445 - RNA, 19 nt, Artificial Sequence
  Description of Artificial Sequence: Synthetic oligonucleotide
guaccccacgccagguccu

SEQ ID NO: 1350446 - RNA, 19 nt, Artificial Sequence
  Description of Artificial Sequence: Synthetic oligonucleotide
cccgggagcucggcaagag

SEQ ID NO: 1350447 - RNA, 19 nt, Artificial Sequence
  Description of Artificial Sequence: Synthetic oligonucleotide
ccaccucacgaacaaaguu

SEQ ID NO: 1350448 - RNA, 19 nt, Artificial Sequence
  Description of Artificial Sequence: Synthetic oligonucleotide
cacgccagguccucucauu

SEQ ID NO: 1350449 - RNA, 19 nt, Artificial Sequence
  Description of Artificial Sequence: Synthetic oligonucleotide
gcaucccggaagugaugaa

SEQ ID NO: 1350450 - RNA, 19 nt, Artificial Sequence
  Description of Artificial Sequence: Synthetic oligonucleotide
cggaucuugcaucccggga

SEQ ID NO: 1350451 - RNA, 19 nt, Artificial Sequence
  Description of Artificial Sequence: Synthetic oligonucleotide
gccccggagugucaucuua

SEQ ID NO: 1350452 - RNA, 19 nt, Artificial Sequence
  Description of Artificial Sequence: Synthetic oligonucleotide
aggagacauuggacacuuu

SEQ ID NO: 1350453 - RNA, 19 nt, Artificial Sequence
  Description of Artificial Sequence: Synthetic oligonucleotide
gggugggacgaaggacuca

SEQ ID NO: 1350454 - RNA, 19 nt, Artificial Sequence
  Description of Artificial Sequence: Synthetic oligonucleotide
gcacugagacgugcuucca

SEQ ID NO: 1350455 - RNA, 19 nt, Artificial Sequence
  Description of Artificial Sequence: Synthetic oligonucleotide
ggacacacccucggccgaa

SEQ ID NO: 1350456 - RNA, 19 nt, Artificial Sequence
  Description of Artificial Sequence: Synthetic oligonucleotide
cgcuaagaggagggccggg

SEQ ID NO: 1350457 - RNA, 19 nt, Artificial Sequence
  Description of Artificial Sequence: Synthetic oligonucleotide
ggguggggccaaggugaug

SEQ ID NO: 1350458 - RNA, 19 nt, Artificial Sequence
  Description of Artificial Sequence: Synthetic oligonucleotide
gugcaccguggagggcuca

SEQ ID NO: 1350459 - RNA, 19 nt, Artificial Sequence
  Description of Artificial Sequence: Synthetic oligonucleotide
cccacgccagguccucuca

SEQ ID NO: 1350460 - RNA, 19 nt, Artificial Sequence
  Description of Artificial Sequence: Synthetic oligonucleotide
guggcucuaccgcccuguu

SEQ ID NO: 1350461 - RNA, 19 nt, Artificial Sequence
  Description of Artificial Sequence: Synthetic oligonucleotide
cgccagguccucucauuga

SEQ ID NO: 1350462 - RNA, 19 nt, Artificial Sequence
  Description of Artificial Sequence: Synthetic oligonucleotide
ccagcgccgcggaggugac

SEQ ID NO: 1350463 - RNA, 19 nt, Artificial Sequence
  Description of Artificial Sequence: Synthetic oligonucleotide
cccucggccgaagcguuga

SEQ ID NO: 1350464 - RNA, 19 nt, Artificial Sequence
  Description of Artificial Sequence: Synthetic oligonucleotide
auccgaccagugggaucuu

SEQ ID NO: 1350465 - RNA, 19 nt, Artificial Sequence
  Description of Artificial Sequence: Synthetic oligonucleotide
ccucacgaacaaaguugau

SEQ ID NO: 1350466 - RNA, 19 nt, Artificial Sequence
  Description of Artificial Sequence: Synthetic oligonucleotide
gggcuugauggugcaccgu

SEQ ID NO: 1350467 - RNA, 19 nt, Artificial Sequence
  Description of Artificial Sequence: Synthetic oligonucleotide
cgaaggccauauucauccu

SEQ ID NO: 1350468 - RNA, 19 nt, Artificial Sequence
  Description of Artificial Sequence: Synthetic oligonucleotide
gcucgacuucaggcagcaa

SEQ ID NO: 1350469 - RNA, 19 nt, Artificial Sequence
  Description of Artificial Sequence: Synthetic oligonucleotide
ccuugccccggagugucau

SEQ ID NO: 1350470 - RNA, 19 nt, Artificial Sequence
  Description of Artificial Sequence: Synthetic oligonucleotide
cggccgaagcguugaugua

SEQ ID NO: 1350471 - RNA, 19 nt, Artificial Sequence
  Description of Artificial Sequence: Synthetic oligonucleotide
ccuucacaucggagauguu

SEQ ID NO: 1350472 - RNA, 19 nt, Artificial Sequence
  Description of Artificial Sequence: Synthetic oligonucleotide
ccucggccgaagcguugau

SEQ ID NO: 1350473 - RNA, 19 nt, Artificial Sequence
  Description of Artificial Sequence: Synthetic oligonucleotide
ccgcccuguugaggaagcu

SEQ ID NO: 1350474 - RNA, 19 nt, Artificial Sequence
  Description of Artificial Sequence: Synthetic oligonucleotide
ccgcggaggugacccggau

SEQ ID NO: 1350475 - RNA, 19 nt, Artificial Sequence
  Description of Artificial Sequence: Synthetic oligonucleotide
aguauuucaacucagacac

SEQ ID NO: 1350476 - RNA, 19 nt, Artificial Sequence
  Description of Artificial Sequence: Synthetic oligonucleotide
aguaaauaaagucuuggcc

SEQ ID NO: 1350477 - RNA, 19 nt, Artificial Sequence
  Description of Artificial Sequence: Synthetic oligonucleotide
ucacuaaugacaaaggaag

SEQ ID NO: 1350478 - RNA, 19 nt, Artificial Sequence
  Description of Artificial Sequence: Synthetic oligonucleotide
ucuuccuagacuuaaaucc

SEQ ID NO: 1350479 - RNA, 19 nt, Artificial Sequence
  Description of Artificial Sequence: Synthetic oligonucleotide
uguccuagaagaaggaugg

SEQ ID NO: 1350480 - RNA, 19 nt, Artificial Sequence
  Description of Artificial Sequence: Synthetic oligonucleotide
accaauuagagaguaaugc

SEQ ID NO: 1350481 - RNA, 19 nt, Artificial Sequence
  Description of Artificial Sequence: Synthetic oligonucleotide
uuuuauccggugaaaaucc

SEQ ID NO: 1350482 - RNA, 19 nt, Artificial Sequence
  Description of Artificial Sequence: Synthetic oligonucleotide
uauagcuagaggaaaaggu

SEQ ID NO: 1350483 - RNA, 19 nt, Artificial Sequence
  Description of Artificial Sequence: Synthetic oligonucleotide
aauuucaaccaauggaacu

SEQ ID NO: 1350484 - RNA, 19 nt, Artificial Sequence
  Description of Artificial Sequence: Synthetic oligonucleotide
gauugggauagucacauug

SEQ ID NO: 1350485 - RNA, 19 nt, Artificial Sequence
  Description of Artificial Sequence: Synthetic oligonucleotide
aacccagagaaaucguuac

SEQ ID NO: 1350486 - RNA, 19 nt, Artificial Sequence
  Description of Artificial Sequence: Synthetic oligonucleotide
aagaucaucccuaugaaca

SEQ ID NO: 1350487 - RNA, 19 nt, Artificial Sequence
  Description of Artificial Sequence: Synthetic oligonucleotide
agguacgucucuuaaacac

SEQ ID NO: 1350488 - RNA, 19 nt, Artificial Sequence
  Description of Artificial Sequence: Synthetic oligonucleotide
uggaggauagaucugguug

SEQ ID NO: 1350489 - RNA, 19 nt, Artificial Sequence
  Description of Artificial Sequence: Synthetic oligonucleotide
ucagagauaagcacagcag

SEQ ID NO: 1350490 - RNA, 19 nt, Artificial Sequence
  Description of Artificial Sequence: Synthetic oligonucleotide
caauuagagaguaaugcag

SEQ ID NO: 1350491 - RNA, 19 nt, Artificial Sequence
  Description of Artificial Sequence: Synthetic oligonucleotide
uagacuuaaauccacggaa

SEQ ID NO: 1350492 - RNA, 19 nt, Artificial Sequence
  Description of Artificial Sequence: Synthetic oligonucleotide
acgaguaucgcuccugacc

SEQ ID NO: 1350493 - RNA, 19 nt, Artificial Sequence
  Description of Artificial Sequence: Synthetic oligonucleotide
agcagcauaagaucauccc

SEQ ID NO: 1350494 - RNA, 19 nt, Artificial Sequence
  Description of Artificial Sequence: Synthetic oligonucleotide
ucugguuguaguuuuauaa

SEQ ID NO: 1350495 - RNA, 19 nt, Artificial Sequence
  Description of Artificial Sequence: Synthetic oligonucleotide
ucugccgccacuauuuuag

SEQ ID NO: 1350496 - RNA, 19 nt, Artificial Sequence
  Description of Artificial Sequence: Synthetic oligonucleotide
auucauaccauagagaaaa

SEQ ID NO: 1350497 - RNA, 19 nt, Artificial Sequence
  Description of Artificial Sequence: Synthetic oligonucleotide
aaauguugggcagagucuc

SEQ ID NO: 1350498 - RNA, 19 nt, Artificial Sequence
  Description of Artificial Sequence: Synthetic oligonucleotide
auuacguugcaugacaauc

SEQ ID NO: 1350499 - RNA, 19 nt, Artificial Sequence
  Description of Artificial Sequence: Synthetic oligonucleotide
ugaugcaguaaauaaaguc

SEQ ID NO: 1350500 - RNA, 19 nt, Artificial Sequence
  Description of Artificial Sequence: Synthetic oligonucleotide
uaguauuucaacucagaca

SEQ ID NO: 1350501 - RNA, 19 nt, Artificial Sequence
  Description of Artificial Sequence: Synthetic oligonucleotide
agaguaaugcagugaagac

SEQ ID NO: 1350502 - RNA, 19 nt, Artificial Sequence
  Description of Artificial Sequence: Synthetic oligonucleotide
agugguucggcuuagggca

SEQ ID NO: 1350503 - RNA, 19 nt, Artificial Sequence
  Description of Artificial Sequence: Synthetic oligonucleotide
uaaauaaagucuuggccca

SEQ ID NO: 1350504 - RNA, 19 nt, Artificial Sequence
  Description of Artificial Sequence: Synthetic oligonucleotide
aaaucuggcguuaaagaag

SEQ ID NO: 1350505 - RNA, 19 nt, Artificial Sequence
  Description of Artificial Sequence: Synthetic oligonucleotide
ucuucagacgagcugcagg

SEQ ID NO: 1350506 - RNA, 19 nt, Artificial Sequence
  Description of Artificial Sequence: Synthetic oligonucleotide
cauaagaucaucccuauga

SEQ ID NO: 1350507 - RNA, 19 nt, Artificial Sequence
  Description of Artificial Sequence: Synthetic oligonucleotide
ucaacucagacacacagua

SEQ ID NO: 1350508 - RNA, 19 nt, Artificial Sequence
  Description of Artificial Sequence: Synthetic oligonucleotide
uccagugagaccaauuaga

SEQ ID NO: 1350509 - RNA, 19 nt, Artificial Sequence
  Description of Artificial Sequence: Synthetic oligonucleotide
ugaggcauuacguugcaug

SEQ ID NO: 1350510 - RNA, 19 nt, Artificial Sequence
  Description of Artificial Sequence: Synthetic oligonucleotide
ucuggcguuaaagaagucg

SEQ ID NO: 1350511 - RNA, 19 nt, Artificial Sequence
  Description of Artificial Sequence: Synthetic oligonucleotide
uuagcaaucuggcugcgca

SEQ ID NO: 1350512 - RNA, 19 nt, Artificial Sequence
  Description of Artificial Sequence: Synthetic oligonucleotide
gaaaucguuacuguccuag

SEQ ID NO: 1350513 - RNA, 19 nt, Artificial Sequence
  Description of Artificial Sequence: Synthetic oligonucleotide
agaaaucuggcguuaaaga

SEQ ID NO: 1350514 - RNA, 19 nt, Artificial Sequence
  Description of Artificial Sequence: Synthetic oligonucleotide
gacugcuauagcuagagga

SEQ ID NO: 1350515 - RNA, 19 nt, Artificial Sequence
  Description of Artificial Sequence: Synthetic oligonucleotide
ccuaugaacaugaacagcc

SEQ ID NO: 1350516 - RNA, 19 nt, Artificial Sequence
  Description of Artificial Sequence: Synthetic oligonucleotide
ugcaugaugcaguaaauaa

SEQ ID NO: 1350517 - RNA, 19 nt, Artificial Sequence
  Description of Artificial Sequence: Synthetic oligonucleotide
cagagauaagcacagcagg

SEQ ID NO: 1350518 - RNA, 19 nt, Artificial Sequence
  Description of Artificial Sequence: Synthetic oligonucleotide
aauuagagaguaaugcagu

SEQ ID NO: 1350519 - RNA, 19 nt, Artificial Sequence
  Description of Artificial Sequence: Synthetic oligonucleotide
uuacguugcaugacaauca

SEQ ID NO: 1350520 - RNA, 19 nt, Artificial Sequence
  Description of Artificial Sequence: Synthetic oligonucleotide
agguuuaggauggagcagc

SEQ ID NO: 1350521 - RNA, 19 nt, Artificial Sequence
  Description of Artificial Sequence: Synthetic oligonucleotide
ucauaccauagagaaaagg

SEQ ID NO: 1350522 - RNA, 19 nt, Artificial Sequence
  Description of Artificial Sequence: Synthetic oligonucleotide
uucagggguagauuggucc

SEQ ID NO: 1350523 - RNA, 19 nt, Artificial Sequence
  Description of Artificial Sequence: Synthetic oligonucleotide
caaccaauggaacugguug

SEQ ID NO: 1350524 - RNA, 19 nt, Artificial Sequence
  Description of Artificial Sequence: Synthetic oligonucleotide
uggagauaagaaaucuggc

SEQ ID NO: 1350525 - RNA, 19 nt, Artificial Sequence
  Description of Artificial Sequence: Synthetic oligonucleotide
caguaaauaaagucuuggc

SEQ ID NO: 1350526 - RNA, 19 nt, Artificial Sequence
  Description of Artificial Sequence: Synthetic oligonucleotide
aauaaagucuuggcccaac

SEQ ID NO: 1350527 - RNA, 19 nt, Artificial Sequence
  Description of Artificial Sequence: Synthetic oligonucleotide
ucguuacuguccuagaaga

SEQ ID NO: 1350528 - RNA, 19 nt, Artificial Sequence
  Description of Artificial Sequence: Synthetic oligonucleotide
auuucaaccaauggaacug

SEQ ID NO: 1350529 - RNA, 19 nt, Artificial Sequence
  Description of Artificial Sequence: Synthetic oligonucleotide
auuagagaguaaugcagug

SEQ ID NO: 1350530 - RNA, 19 nt, Artificial Sequence
  Description of Artificial Sequence: Synthetic oligonucleotide
uuccauucccgauaguuca

SEQ ID NO: 1350531 - RNA, 19 nt, Artificial Sequence
  Description of Artificial Sequence: Synthetic oligonucleotide
aaccaauggaacugguuga

SEQ ID NO: 1350532 - RNA, 19 nt, Artificial Sequence
  Description of Artificial Sequence: Synthetic oligonucleotide
uuggcucuguuuuauccgg

SEQ ID NO: 1350533 - RNA, 19 nt, Artificial Sequence
  Description of Artificial Sequence: Synthetic oligonucleotide
uucggcuuagggcaggcag

SEQ ID NO: 1350534 - RNA, 19 nt, Artificial Sequence
  Description of Artificial Sequence: Synthetic oligonucleotide
cuuggcucuguuuuauccg

SEQ ID NO: 1350535 - RNA, 19 nt, Artificial Sequence
  Description of Artificial Sequence: Synthetic oligonucleotide
uccuucaguaaacuccugc

SEQ ID NO: 1350536 - RNA, 19 nt, Artificial Sequence
  Description of Artificial Sequence: Synthetic oligonucleotide
agggcuagcagaacaaagc

SEQ ID NO: 1350537 - RNA, 19 nt, Artificial Sequence
  Description of Artificial Sequence: Synthetic oligonucleotide
gagacauuugaacuuccug

SEQ ID NO: 1350538 - RNA, 19 nt, Artificial Sequence
  Description of Artificial Sequence: Synthetic oligonucleotide
aguaaugcagugaagacau

SEQ ID NO: 1350539 - RNA, 19 nt, Artificial Sequence
  Description of Artificial Sequence: Synthetic oligonucleotide
agcaagguaaaggagaaga

SEQ ID NO: 1350540 - RNA, 19 nt, Artificial Sequence
  Description of Artificial Sequence: Synthetic oligonucleotide
gagaguaaugcagugaaga

SEQ ID NO: 1350541 - RNA, 19 nt, Artificial Sequence
  Description of Artificial Sequence: Synthetic oligonucleotide
uguguucugguuugcaaca

SEQ ID NO: 1350542 - RNA, 19 nt, Artificial Sequence
  Description of Artificial Sequence: Synthetic oligonucleotide
aaucuggcguuaaagaagu

SEQ ID NO: 1350543 - RNA, 19 nt, Artificial Sequence
  Description of Artificial Sequence: Synthetic oligonucleotide
uauccggugaaaauccuuc

SEQ ID NO: 1350544 - RNA, 19 nt, Artificial Sequence
  Description of Artificial Sequence: Synthetic oligonucleotide
agagauaagcacagcaggg

SEQ ID NO: 1350545 - RNA, 19 nt, Artificial Sequence
  Description of Artificial Sequence: Synthetic oligonucleotide
ugguuguaguuuuauaaaa

SEQ ID NO: 1350546 - RNA, 19 nt, Artificial Sequence
  Description of Artificial Sequence: Synthetic oligonucleotide
aaucguuacuguccuagaa

SEQ ID NO: 1350547 - RNA, 19 nt, Artificial Sequence
  Description of Artificial Sequence: Synthetic oligonucleotide
gacauuugaacuuccugga

SEQ ID NO: 1350548 - RNA, 19 nt, Artificial Sequence
  Description of Artificial Sequence: Synthetic oligonucleotide
ugcaguaaauaaagucuug

SEQ ID NO: 1350549 - RNA, 19 nt, Artificial Sequence
  Description of Artificial Sequence: Synthetic oligonucleotide
auagcuagaggaaaaggug

SEQ ID NO: 1350550 - RNA, 19 nt, Artificial Sequence
  Description of Artificial Sequence: Synthetic oligonucleotide
agaaaagggccccgagggc

SEQ ID NO: 1350551 - RNA, 19 nt, Artificial Sequence
  Description of Artificial Sequence: Synthetic oligonucleotide
uuuugccagauugggauag

SEQ ID NO: 1350552 - RNA, 19 nt, Artificial Sequence
  Description of Artificial Sequence: Synthetic oligonucleotide
caugcaaugucagccaggg

SEQ ID NO: 1350553 - RNA, 19 nt, Artificial Sequence
  Description of Artificial Sequence: Synthetic oligonucleotide
auuguuggaagcucaggga

SEQ ID NO: 1350554 - RNA, 19 nt, Artificial Sequence
  Description of Artificial Sequence: Synthetic oligonucleotide
uguuuuauccggugaaaau

SEQ ID NO: 1350555 - RNA, 19 nt, Artificial Sequence
  Description of Artificial Sequence: Synthetic oligonucleotide
cuauugaaggaguucagga

SEQ ID NO: 1350556 - RNA, 19 nt, Artificial Sequence
  Description of Artificial Sequence: Synthetic oligonucleotide
uuguguucugguuugcaac

SEQ ID NO: 1350557 - RNA, 19 nt, Artificial Sequence
  Description of Artificial Sequence: Synthetic oligonucleotide
acgucucuuaaacacaggu

SEQ ID NO: 1350558 - RNA, 19 nt, Artificial Sequence
  Description of Artificial Sequence: Synthetic oligonucleotide
cuagaggaaaaggugacug

SEQ ID NO: 1350559 - RNA, 19 nt, Artificial Sequence
  Description of Artificial Sequence: Synthetic oligonucleotide
aagagacauuugaacuucc

SEQ ID NO: 1350560 - RNA, 19 nt, Artificial Sequence
  Description of Artificial Sequence: Synthetic oligonucleotide
guuuuauccggugaaaauc

SEQ ID NO: 1350561 - RNA, 19 nt, Artificial Sequence
  Description of Artificial Sequence: Synthetic oligonucleotide
caaguggcuuaguucaucc

SEQ ID NO: 1350562 - RNA, 19 nt, Artificial Sequence
  Description of Artificial Sequence: Synthetic oligonucleotide
ucucccuacuucuuccuag

SEQ ID NO: 1350563 - RNA, 19 nt, Artificial Sequence
  Description of Artificial Sequence: Synthetic oligonucleotide
cuauagcuagaggaaaagg

SEQ ID NO: 1350564 - RNA, 19 nt, Artificial Sequence
  Description of Artificial Sequence: Synthetic oligonucleotide
uccggugaaaauccuucag

SEQ ID NO: 1350565 - RNA, 19 nt, Artificial Sequence
  Description of Artificial Sequence: Synthetic oligonucleotide
ugucagguaguauuucaac

SEQ ID NO: 1350566 - RNA, 19 nt, Artificial Sequence
  Description of Artificial Sequence: Synthetic oligonucleotide
agaagucgaagcugcaucu

SEQ ID NO: 1350567 - RNA, 19 nt, Artificial Sequence
  Description of Artificial Sequence: Synthetic oligonucleotide
guguaaugaggauccaaag

SEQ ID NO: 1350568 - RNA, 19 nt, Artificial Sequence
  Description of Artificial Sequence: Synthetic oligonucleotide
uuugcaacauucagggcua

SEQ ID NO: 1350569 - RNA, 19 nt, Artificial Sequence
  Description of Artificial Sequence: Synthetic oligonucleotide
uuagagaguaaugcaguga

SEQ ID NO: 1350570 - RNA, 19 nt, Artificial Sequence
  Description of Artificial Sequence: Synthetic oligonucleotide
ucggcuuagggcaggcagg

SEQ ID NO: 1350571 - RNA, 19 nt, Artificial Sequence
  Description of Artificial Sequence: Synthetic oligonucleotide
aaaucguuacuguccuaga

SEQ ID NO: 1350572 - RNA, 19 nt, Artificial Sequence
  Description of Artificial Sequence: Synthetic oligonucleotide
uagaagaaggaugguaugu

SEQ ID NO: 1350573 - RNA, 19 nt, Artificial Sequence
  Description of Artificial Sequence: Synthetic oligonucleotide
guauguucuuuucucuccc

SEQ ID NO: 1350574 - RNA, 19 nt, Artificial Sequence
  Description of Artificial Sequence: Synthetic oligonucleotide
ugcuauagcuagaggaaaa

SEQ ID NO: 1350575 - RNA, 19 nt, Artificial Sequence
  Description of Artificial Sequence: Synthetic oligonucleotide
cuagaagaaggaugguaug

SEQ ID NO: 1350576 - RNA, 19 nt, Artificial Sequence
  Description of Artificial Sequence: Synthetic oligonucleotide
ugaggauccaaagcaaggu

SEQ ID NO: 1350577 - RNA, 19 nt, Artificial Sequence
  Description of Artificial Sequence: Synthetic oligonucleotide
agauaagaaaucuggcguu

SEQ ID NO: 1350578 - RNA, 19 nt, Artificial Sequence
  Description of Artificial Sequence: Synthetic oligonucleotide
gacuuaaauccacggaaga

SEQ ID NO: 1350579 - RNA, 19 nt, Artificial Sequence
  Description of Artificial Sequence: Synthetic oligonucleotide
uucauaccauagagaaaag

SEQ ID NO: 1350580 - RNA, 19 nt, Artificial Sequence
  Description of Artificial Sequence: Synthetic oligonucleotide
ugccagauugggauaguca

SEQ ID NO: 1350581 - RNA, 19 nt, Artificial Sequence
  Description of Artificial Sequence: Synthetic oligonucleotide
aaggaguucaggagcauga

SEQ ID NO: 1350582 - RNA, 19 nt, Artificial Sequence
  Description of Artificial Sequence: Synthetic oligonucleotide
accccuuagccuguggugc

SEQ ID NO: 1350583 - RNA, 19 nt, Artificial Sequence
  Description of Artificial Sequence: Synthetic oligonucleotide
uuaggggacgaguaucgcu

SEQ ID NO: 1350584 - RNA, 19 nt, Artificial Sequence
  Description of Artificial Sequence: Synthetic oligonucleotide
gcguuaaagaagucgaagc

SEQ ID NO: 1350585 - RNA, 19 nt, Artificial Sequence
  Description of Artificial Sequence: Synthetic oligonucleotide
gguauguucuuuucucucc

SEQ ID NO: 1350586 - RNA, 19 nt, Artificial Sequence
  Description of Artificial Sequence: Synthetic oligonucleotide
gauagucacauuggcuucc

SEQ ID NO: 1350587 - RNA, 19 nt, Artificial Sequence
  Description of Artificial Sequence: Synthetic oligonucleotide
uccgagcagccccaugugg

SEQ ID NO: 1350588 - RNA, 19 nt, Artificial Sequence
  Description of Artificial Sequence: Synthetic oligonucleotide
agacuuaaauccacggaag

SEQ ID NO: 1350589 - RNA, 19 nt, Artificial Sequence
  Description of Artificial Sequence: Synthetic oligonucleotide
uuuauccggugaaaauccu

SEQ ID NO: 1350590 - RNA, 19 nt, Artificial Sequence
  Description of Artificial Sequence: Synthetic oligonucleotide
agccacaccccuuagccug

SEQ ID NO: 1350591 - RNA, 19 nt, Artificial Sequence
  Description of Artificial Sequence: Synthetic oligonucleotide
cuaaggaccucagagauaa

SEQ ID NO: 1350592 - RNA, 19 nt, Artificial Sequence
  Description of Artificial Sequence: Synthetic oligonucleotide
cauuugaacuuccuggaga

SEQ ID NO: 1350593 - RNA, 19 nt, Artificial Sequence
  Description of Artificial Sequence: Synthetic oligonucleotide
gaggcauuacguugcauga

SEQ ID NO: 1350594 - RNA, 19 nt, Artificial Sequence
  Description of Artificial Sequence: Synthetic oligonucleotide
uuccuagacuuaaauccac

SEQ ID NO: 1350595 - RNA, 19 nt, Artificial Sequence
  Description of Artificial Sequence: Synthetic oligonucleotide
gguagauuggucccaauuc

SEQ ID NO: 1350596 - RNA, 19 nt, Artificial Sequence
  Description of Artificial Sequence: Synthetic oligonucleotide
ugacugcuauagcuagagg

SEQ ID NO: 1350597 - RNA, 19 nt, Artificial Sequence
  Description of Artificial Sequence: Synthetic oligonucleotide
agauuggucccaauucuuc

SEQ ID NO: 1350598 - RNA, 19 nt, Artificial Sequence
  Description of Artificial Sequence: Synthetic oligonucleotide
cuuccuagacuuaaaucca

SEQ ID NO: 1350599 - RNA, 19 nt, Artificial Sequence
  Description of Artificial Sequence: Synthetic oligonucleotide
uacgucucuuaaacacagg

SEQ ID NO: 1350600 - RNA, 19 nt, Artificial Sequence
  Description of Artificial Sequence: Synthetic oligonucleotide
cuggcguuaaagaagucga

SEQ ID NO: 1350601 - RNA, 19 nt, Artificial Sequence
  Description of Artificial Sequence: Synthetic oligonucleotide
cgauaguucagccagcucc

SEQ ID NO: 1350602 - RNA, 19 nt, Artificial Sequence
  Description of Artificial Sequence: Synthetic oligonucleotide
ugcgcaaguggcuuaguuc

SEQ ID NO: 1350603 - RNA, 19 nt, Artificial Sequence
  Description of Artificial Sequence: Synthetic oligonucleotide
cugacugcuauagcuagag

SEQ ID NO: 1350604 - RNA, 19 nt, Artificial Sequence
  Description of Artificial Sequence: Synthetic oligonucleotide
aguguaaugaggauccaaa

SEQ ID NO: 1350605 - RNA, 19 nt, Artificial Sequence
  Description of Artificial Sequence: Synthetic oligonucleotide
ugguauguucuuuucucuc

SEQ ID NO: 1350606 - RNA, 19 nt, Artificial Sequence
  Description of Artificial Sequence: Synthetic oligonucleotide
cuagacuuaaauccacgga

SEQ ID NO: 1350607 - RNA, 19 nt, Artificial Sequence
  Description of Artificial Sequence: Synthetic oligonucleotide
ccuagacuuaaauccacgg

SEQ ID NO: 1350608 - RNA, 19 nt, Artificial Sequence
  Description of Artificial Sequence: Synthetic oligonucleotide
uccugacccgagcauaugu

SEQ ID NO: 1350609 - RNA, 19 nt, Artificial Sequence
  Description of Artificial Sequence: Synthetic oligonucleotide
aggagccucuccucagacc

SEQ ID NO: 1350610 - RNA, 19 nt, Artificial Sequence
  Description of Artificial Sequence: Synthetic oligonucleotide
caucccuaugaacaugaac

SEQ ID NO: 1350611 - RNA, 19 nt, Artificial Sequence
  Description of Artificial Sequence: Synthetic oligonucleotide
aguggccugacugcuauag

SEQ ID NO: 1350612 - RNA, 19 nt, Artificial Sequence
  Description of Artificial Sequence: Synthetic oligonucleotide
ugacaaucaaagggcuggg

SEQ ID NO: 1350613 - RNA, 19 nt, Artificial Sequence
  Description of Artificial Sequence: Synthetic oligonucleotide
guccagugagaccaauuag

SEQ ID NO: 1350614 - RNA, 19 nt, Artificial Sequence
  Description of Artificial Sequence: Synthetic oligonucleotide
gacccgagcauaugucucc

SEQ ID NO: 1350615 - RNA, 19 nt, Artificial Sequence
  Description of Artificial Sequence: Synthetic oligonucleotide
cauugguguagguuuagga

SEQ ID NO: 1350616 - RNA, 19 nt, Artificial Sequence
  Description of Artificial Sequence: Synthetic oligonucleotide
ugugucuuaggggacgagu

SEQ ID NO: 1350617 - RNA, 19 nt, Artificial Sequence
  Description of Artificial Sequence: Synthetic oligonucleotide
agaucaucccuaugaacau

SEQ ID NO: 1350618 - RNA, 19 nt, Artificial Sequence
  Description of Artificial Sequence: Synthetic oligonucleotide
cagggcuagcagaacaaag

SEQ ID NO: 1350619 - RNA, 19 nt, Artificial Sequence
  Description of Artificial Sequence: Synthetic oligonucleotide
ggugcugcaaggaagcugc

SEQ ID NO: 1350620 - RNA, 19 nt, Artificial Sequence
  Description of Artificial Sequence: Synthetic oligonucleotide
ucaaccaauggaacugguu

SEQ ID NO: 1350621 - RNA, 19 nt, Artificial Sequence
  Description of Artificial Sequence: Synthetic oligonucleotide
augaacaugaacagccaca

SEQ ID NO: 1350622 - RNA, 19 nt, Artificial Sequence
  Description of Artificial Sequence: Synthetic oligonucleotide
acuuaaauccacggaagaa

SEQ ID NO: 1350623 - RNA, 19 nt, Artificial Sequence
  Description of Artificial Sequence: Synthetic oligonucleotide
uagguuuaggauggagcag

SEQ ID NO: 1350624 - RNA, 19 nt, Artificial Sequence
  Description of Artificial Sequence: Synthetic oligonucleotide
aaguggcuuaguucauccu

SEQ ID NO: 1350625 - RNA, 19 nt, Artificial Sequence
  Description of Artificial Sequence: Synthetic oligonucleotide
gagaaaucguuacuguccu

SEQ ID NO: 1350626 - RNA, 19 nt, Artificial Sequence
  Description of Artificial Sequence: Synthetic oligonucleotide
ugucuuaggggacgaguau

SEQ ID NO: 1350627 - RNA, 19 nt, Artificial Sequence
  Description of Artificial Sequence: Synthetic oligonucleotide
acccacgcagauugggcac

SEQ ID NO: 1350628 - RNA, 19 nt, Artificial Sequence
  Description of Artificial Sequence: Synthetic oligonucleotide
gccagauugggauagucac

SEQ ID NO: 1350629 - RNA, 19 nt, Artificial Sequence
  Description of Artificial Sequence: Synthetic oligonucleotide
aaauagcccaggccucccu

SEQ ID NO: 1350630 - RNA, 19 nt, Artificial Sequence
  Description of Artificial Sequence: Synthetic oligonucleotide
acugcuauagcuagaggaa

SEQ ID NO: 1350631 - RNA, 19 nt, Artificial Sequence
  Description of Artificial Sequence: Synthetic oligonucleotide
acgcagauugggcacugag

SEQ ID NO: 1350632 - RNA, 19 nt, Artificial Sequence
  Description of Artificial Sequence: Synthetic oligonucleotide
guaaacuccugcucagguc

SEQ ID NO: 1350633 - RNA, 19 nt, Artificial Sequence
  Description of Artificial Sequence: Synthetic oligonucleotide
gagcagcauaagaucaucc

SEQ ID NO: 1350634 - RNA, 19 nt, Artificial Sequence
  Description of Artificial Sequence: Synthetic oligonucleotide
gaacaugaacagccacacc

SEQ ID NO: 1350635 - RNA, 19 nt, Artificial Sequence
  Description of Artificial Sequence: Synthetic oligonucleotide
guagauuggucccaauucu

SEQ ID NO: 1350636 - RNA, 19 nt, Artificial Sequence
  Description of Artificial Sequence: Synthetic oligonucleotide
ugagaccaauuagagagua

SEQ ID NO: 1350637 - RNA, 19 nt, Artificial Sequence
  Description of Artificial Sequence: Synthetic oligonucleotide
gcuauugaaggaguucagg

SEQ ID NO: 1350638 - RNA, 19 nt, Artificial Sequence
  Description of Artificial Sequence: Synthetic oligonucleotide
agacccacgcagauugggc

SEQ ID NO: 1350639 - RNA, 19 nt, Artificial Sequence
  Description of Artificial Sequence: Synthetic oligonucleotide
aucaucccuaugaacauga

SEQ ID NO: 1350640 - RNA, 19 nt, Artificial Sequence
  Description of Artificial Sequence: Synthetic oligonucleotide
gcagccaaguauuggcugg

SEQ ID NO: 1350641 - RNA, 19 nt, Artificial Sequence
  Description of Artificial Sequence: Synthetic oligonucleotide
uucaaccaauggaacuggu

SEQ ID NO: 1350642 - RNA, 19 nt, Artificial Sequence
  Description of Artificial Sequence: Synthetic oligonucleotide
ucagacccacgcagauugg

SEQ ID NO: 1350643 - RNA, 19 nt, Artificial Sequence
  Description of Artificial Sequence: Synthetic oligonucleotide
caaguauuggcugguccag

SEQ ID NO: 1350644 - RNA, 19 nt, Artificial Sequence
  Description of Artificial Sequence: Synthetic oligonucleotide
acgagcugcagguagcuuu

SEQ ID NO: 1350645 - RNA, 19 nt, Artificial Sequence
  Description of Artificial Sequence: Synthetic oligonucleotide
ggucagaaauguugggcag

SEQ ID NO: 1350646 - RNA, 19 nt, Artificial Sequence
  Description of Artificial Sequence: Synthetic oligonucleotide
gucagguaguauuucaacu

SEQ ID NO: 1350647 - RNA, 19 nt, Artificial Sequence
  Description of Artificial Sequence: Synthetic oligonucleotide
aagcaagguaaaggagaag

SEQ ID NO: 1350648 - RNA, 19 nt, Artificial Sequence
  Description of Artificial Sequence: Synthetic oligonucleotide
ggagcaugagacugagucc

SEQ ID NO: 1350649 - RNA, 19 nt, Artificial Sequence
  Description of Artificial Sequence: Synthetic oligonucleotide
uggagcagcauaagaucau

SEQ ID NO: 1350650 - RNA, 19 nt, Artificial Sequence
  Description of Artificial Sequence: Synthetic oligonucleotide
uuuagcaaucuggcugcgc

SEQ ID NO: 1350651 - RNA, 19 nt, Artificial Sequence
  Description of Artificial Sequence: Synthetic oligonucleotide
augagacugaguccacaga

SEQ ID NO: 1350652 - RNA, 19 nt, Artificial Sequence
  Description of Artificial Sequence: Synthetic oligonucleotide
gaguaucgcuccugacccg

SEQ ID NO: 1350653 - RNA, 19 nt, Artificial Sequence
  Description of Artificial Sequence: Synthetic oligonucleotide
ggcguuaaagaagucgaag

SEQ ID NO: 1350654 - RNA, 19 nt, Artificial Sequence
  Description of Artificial Sequence: Synthetic oligonucleotide
aggcauuacguugcaugac

SEQ ID NO: 1350655 - RNA, 19 nt, Artificial Sequence
  Description of Artificial Sequence: Synthetic oligonucleotide
gauaagaaaucuggcguua

SEQ ID NO: 1350656 - RNA, 19 nt, Artificial Sequence
  Description of Artificial Sequence: Synthetic oligonucleotide
aggauccaaagcaagguaa

SEQ ID NO: 1350657 - RNA, 19 nt, Artificial Sequence
  Description of Artificial Sequence: Synthetic oligonucleotide
uucuuaccacacuccgagc

SEQ ID NO: 1350658 - RNA, 19 nt, Artificial Sequence
  Description of Artificial Sequence: Synthetic oligonucleotide
gacccacgcagauugggca

SEQ ID NO: 1350659 - RNA, 19 nt, Artificial Sequence
  Description of Artificial Sequence: Synthetic oligonucleotide
uaucgcuccugacccgagc

SEQ ID NO: 1350660 - RNA, 19 nt, Artificial Sequence
  Description of Artificial Sequence: Synthetic oligonucleotide
gagguacgucucuuaaaca

SEQ ID NO: 1350661 - RNA, 19 nt, Artificial Sequence
  Description of Artificial Sequence: Synthetic oligonucleotide
ccaauuagagaguaaugca

SEQ ID NO: 1350662 - RNA, 19 nt, Artificial Sequence
  Description of Artificial Sequence: Synthetic oligonucleotide
agaagaaggaugguauguu

SEQ ID NO: 1350663 - RNA, 19 nt, Artificial Sequence
  Description of Artificial Sequence: Synthetic oligonucleotide
aggugugucuuaggggacg

SEQ ID NO: 1350664 - RNA, 19 nt, Artificial Sequence
  Description of Artificial Sequence: Synthetic oligonucleotide
ugccgccacuauuuuagca

SEQ ID NO: 1350665 - RNA, 19 nt, Artificial Sequence
  Description of Artificial Sequence: Synthetic oligonucleotide
uguucugguuugcaacauu

SEQ ID NO: 1350666 - RNA, 19 nt, Artificial Sequence
  Description of Artificial Sequence: Synthetic oligonucleotide
acaccccuuagccuguggu

SEQ ID NO: 1350667 - RNA, 19 nt, Artificial Sequence
  Description of Artificial Sequence: Synthetic oligonucleotide
gaacuuccuggagauaaga

SEQ ID NO: 1350668 - RNA, 19 nt, Artificial Sequence
  Description of Artificial Sequence: Synthetic oligonucleotide
ggcauuacguugcaugaca

SEQ ID NO: 1350669 - RNA, 19 nt, Artificial Sequence
  Description of Artificial Sequence: Synthetic oligonucleotide
aaauaaagucuuggcccaa

SEQ ID NO: 1350670 - RNA, 19 nt, Artificial Sequence
  Description of Artificial Sequence: Synthetic oligonucleotide
cuccuaaggaccucagaga

SEQ ID NO: 1350671 - RNA, 19 nt, Artificial Sequence
  Description of Artificial Sequence: Synthetic oligonucleotide
augcaguaaauaaagucuu

SEQ ID NO: 1350672 - RNA, 19 nt, Artificial Sequence
  Description of Artificial Sequence: Synthetic oligonucleotide
uggcguuaaagaagucgaa

SEQ ID NO: 1350673 - RNA, 19 nt, Artificial Sequence
  Description of Artificial Sequence: Synthetic oligonucleotide
gaggauccaaagcaaggua

SEQ ID NO: 1350674 - RNA, 19 nt, Artificial Sequence
  Description of Artificial Sequence: Synthetic oligonucleotide
cuuccuucaguaaacuccu

SEQ ID NO: 1350675 - RNA, 19 nt, Artificial Sequence
  Description of Artificial Sequence: Synthetic oligonucleotide
gcuauagcuagaggaaaag

SEQ ID NO: 1350676 - RNA, 19 nt, Artificial Sequence
  Description of Artificial Sequence: Synthetic oligonucleotide
gcgcaaguggcuuaguuca

SEQ ID NO: 1350677 - RNA, 19 nt, Artificial Sequence
  Description of Artificial Sequence: Synthetic oligonucleotide
gaaauguugggcagagucu

SEQ ID NO: 1350678 - RNA, 19 nt, Artificial Sequence
  Description of Artificial Sequence: Synthetic oligonucleotide
aggaugcccaucaugucug

SEQ ID NO: 1350679 - RNA, 19 nt, Artificial Sequence
  Description of Artificial Sequence: Synthetic oligonucleotide
uuccuccuaaggaccucag

SEQ ID NO: 1350680 - RNA, 19 nt, Artificial Sequence
  Description of Artificial Sequence: Synthetic oligonucleotide
agguaaaggagaagagaca

SEQ ID NO: 1350681 - RNA, 19 nt, Artificial Sequence
  Description of Artificial Sequence: Synthetic oligonucleotide
agagaguaaugcagugaag

SEQ ID NO: 1350682 - RNA, 19 nt, Artificial Sequence
  Description of Artificial Sequence: Synthetic oligonucleotide
gucagugcuguuaguuucc

SEQ ID NO: 1350683 - RNA, 19 nt, Artificial Sequence
  Description of Artificial Sequence: Synthetic oligonucleotide
cuucagacgagcugcaggu

SEQ ID NO: 1350684 - RNA, 19 nt, Artificial Sequence
  Description of Artificial Sequence: Synthetic oligonucleotide
caguaaacuccugcucagg

SEQ ID NO: 1350685 - RNA, 19 nt, Artificial Sequence
  Description of Artificial Sequence: Synthetic oligonucleotide
gcaagguaaaggagaagag

SEQ ID NO: 1350686 - RNA, 19 nt, Artificial Sequence
  Description of Artificial Sequence: Synthetic oligonucleotide
ucccuacuucuuccuagac

SEQ ID NO: 1350687 - RNA, 19 nt, Artificial Sequence
  Description of Artificial Sequence: Synthetic oligonucleotide
agagagaugcagucaucuu

SEQ ID NO: 1350688 - RNA, 19 nt, Artificial Sequence
  Description of Artificial Sequence: Synthetic oligonucleotide
aguaucgcuccugacccga

SEQ ID NO: 1350689 - RNA, 19 nt, Artificial Sequence
  Description of Artificial Sequence: Synthetic oligonucleotide
ccaggugugucuuagggga

SEQ ID NO: 1350690 - RNA, 19 nt, Artificial Sequence
  Description of Artificial Sequence: Synthetic oligonucleotide
gcccaacccagagaaaucg

SEQ ID NO: 1350691 - RNA, 19 nt, Artificial Sequence
  Description of Artificial Sequence: Synthetic oligonucleotide
ugcaaggaagcugcucaga

SEQ ID NO: 1350692 - RNA, 19 nt, Artificial Sequence
  Description of Artificial Sequence: Synthetic oligonucleotide
uucuucagacgagcugcag

SEQ ID NO: 1350693 - RNA, 19 nt, Artificial Sequence
  Description of Artificial Sequence: Synthetic oligonucleotide
gauaguucagccagcuccu

SEQ ID NO: 1350694 - RNA, 19 nt, Artificial Sequence
  Description of Artificial Sequence: Synthetic oligonucleotide
agagacauuugaacuuccu

SEQ ID NO: 1350695 - RNA, 19 nt, Artificial Sequence
  Description of Artificial Sequence: Synthetic oligonucleotide
gacgaguaucgcuccugac

SEQ ID NO: 1350696 - RNA, 19 nt, Artificial Sequence
  Description of Artificial Sequence: Synthetic oligonucleotide
cuuaggggacgaguaucgc

SEQ ID NO: 1350697 - RNA, 19 nt, Artificial Sequence
  Description of Artificial Sequence: Synthetic oligonucleotide
caccccuuagccuguggug

SEQ ID NO: 1350698 - RNA, 19 nt, Artificial Sequence
  Description of Artificial Sequence: Synthetic oligonucleotide
gguccaguggccugacugc

SEQ ID NO: 1350699 - RNA, 19 nt, Artificial Sequence
  Description of Artificial Sequence: Synthetic oligonucleotide
ggucccaauucuucuuacc

SEQ ID NO: 1350700 - RNA, 19 nt, Artificial Sequence
  Description of Artificial Sequence: Synthetic oligonucleotide
gaacagccacaccccuuag

SEQ ID NO: 1350701 - RNA, 19 nt, Artificial Sequence
  Description of Artificial Sequence: Synthetic oligonucleotide
ucccgauaguucagccagc

SEQ ID NO: 1350702 - RNA, 19 nt, Artificial Sequence
  Description of Artificial Sequence: Synthetic oligonucleotide
caaucuggcugcgcaagug

SEQ ID NO: 1350703 - RNA, 19 nt, Artificial Sequence
  Description of Artificial Sequence: Synthetic oligonucleotide
gucuuaggggacgaguauc

SEQ ID NO: 1350704 - RNA, 19 nt, Artificial Sequence
  Description of Artificial Sequence: Synthetic oligonucleotide
uaaggaccucagagauaag

SEQ ID NO: 1350705 - RNA, 19 nt, Artificial Sequence
  Description of Artificial Sequence: Synthetic oligonucleotide
agccucuccucagacccac

SEQ ID NO: 1350706 - RNA, 19 nt, Artificial Sequence
  Description of Artificial Sequence: Synthetic oligonucleotide
ggauagucacauuggcuuc

SEQ ID NO: 1350707 - RNA, 19 nt, Artificial Sequence
  Description of Artificial Sequence: Synthetic oligonucleotide
gguaaaggagaagagacau

SEQ ID NO: 1350708 - RNA, 19 nt, Artificial Sequence
  Description of Artificial Sequence: Synthetic oligonucleotide
acuguccuagaagaaggau

SEQ ID NO: 1350709 - RNA, 19 nt, Artificial Sequence
  Description of Artificial Sequence: Synthetic oligonucleotide
uggcucuguuuuauccggu

SEQ ID NO: 1350710 - RNA, 19 nt, Artificial Sequence
  Description of Artificial Sequence: Synthetic oligonucleotide
ugcaacauucagggcuagc

SEQ ID NO: 1350711 - RNA, 19 nt, Artificial Sequence
  Description of Artificial Sequence: Synthetic oligonucleotide
cucuuaaacacaggucaga

SEQ ID NO: 1350712 - RNA, 19 nt, Artificial Sequence
  Description of Artificial Sequence: Synthetic oligonucleotide
accaauggaacugguugau

SEQ ID NO: 1350713 - RNA, 19 nt, Artificial Sequence
  Description of Artificial Sequence: Synthetic oligonucleotide
ccaaguauuggcuggucca

SEQ ID NO: 1350714 - RNA, 19 nt, Artificial Sequence
  Description of Artificial Sequence: Synthetic oligonucleotide
uugccagauugggauaguc

SEQ ID NO: 1350715 - RNA, 19 nt, Artificial Sequence
  Description of Artificial Sequence: Synthetic oligonucleotide
ggcaccugagucaugcaug

SEQ ID NO: 1350716 - RNA, 19 nt, Artificial Sequence
  Description of Artificial Sequence: Synthetic oligonucleotide
cucaaaggaugcccgggga

SEQ ID NO: 1350717 - RNA, 19 nt, Artificial Sequence
  Description of Artificial Sequence: Synthetic oligonucleotide
ccggggacaagguuucagg

SEQ ID NO: 1350718 - RNA, 19 nt, Artificial Sequence
  Description of Artificial Sequence: Synthetic oligonucleotide
gguacgucucuuaaacaca

SEQ ID NO: 1350719 - RNA, 19 nt, Artificial Sequence
  Description of Artificial Sequence: Synthetic oligonucleotide
ggaccucuacuucagucuc

SEQ ID NO: 1350720 - RNA, 19 nt, Artificial Sequence
  Description of Artificial Sequence: Synthetic oligonucleotide
ggcucuguuuuauccggug

SEQ ID NO: 1350721 - RNA, 19 nt, Artificial Sequence
  Description of Artificial Sequence: Synthetic oligonucleotide
gguuugcaacauucagggc

SEQ ID NO: 1350722 - RNA, 19 nt, Artificial Sequence
  Description of Artificial Sequence: Synthetic oligonucleotide
agcaugagacugaguccac

SEQ ID NO: 1350723 - RNA, 19 nt, Artificial Sequence
  Description of Artificial Sequence: Synthetic oligonucleotide
auagucacauuggcuucca

SEQ ID NO: 1350724 - RNA, 19 nt, Artificial Sequence
  Description of Artificial Sequence: Synthetic oligonucleotide
guagcuuuguguucugguu

SEQ ID NO: 1350725 - RNA, 19 nt, Artificial Sequence
  Description of Artificial Sequence: Synthetic oligonucleotide
ugguucggcuuagggcagg

SEQ ID NO: 1350726 - RNA, 19 nt, Artificial Sequence
  Description of Artificial Sequence: Synthetic oligonucleotide
cucccuacuucuuccuaga

SEQ ID NO: 1350727 - RNA, 19 nt, Artificial Sequence
  Description of Artificial Sequence: Synthetic oligonucleotide
gccgccacuauuuuagcaa

SEQ ID NO: 1350728 - RNA, 19 nt, Artificial Sequence
  Description of Artificial Sequence: Synthetic oligonucleotide
cagauugggcacugaggca

SEQ ID NO: 1350729 - RNA, 19 nt, Artificial Sequence
  Description of Artificial Sequence: Synthetic oligonucleotide
agccccauguggcuuguuu

SEQ ID NO: 1350730 - RNA, 19 nt, Artificial Sequence
  Description of Artificial Sequence: Synthetic oligonucleotide
gcauaagaucaucccuaug

SEQ ID NO: 1350731 - RNA, 19 nt, Artificial Sequence
  Description of Artificial Sequence: Synthetic oligonucleotide
cugccgccacuauuuuagc

SEQ ID NO: 1350732 - RNA, 19 nt, Artificial Sequence
  Description of Artificial Sequence: Synthetic oligonucleotide
cuggagguacgucucuuaa

SEQ ID NO: 1350733 - RNA, 19 nt, Artificial Sequence
  Description of Artificial Sequence: Synthetic oligonucleotide
gugucuuaggggacgagua

SEQ ID NO: 1350734 - RNA, 19 nt, Artificial Sequence
  Description of Artificial Sequence: Synthetic oligonucleotide
cauucagggcuagcagaac

SEQ ID NO: 1350735 - RNA, 19 nt, Artificial Sequence
  Description of Artificial Sequence: Synthetic oligonucleotide
cauuggcuuccauucccga

SEQ ID NO: 1350736 - RNA, 19 nt, Artificial Sequence
  Description of Artificial Sequence: Synthetic oligonucleotide
gguagcuuuguguucuggu

SEQ ID NO: 1350737 - RNA, 19 nt, Artificial Sequence
  Description of Artificial Sequence: Synthetic oligonucleotide
cagagagaugcagucaucu

SEQ ID NO: 1350738 - RNA, 19 nt, Artificial Sequence
  Description of Artificial Sequence: Synthetic oligonucleotide
cagauugggauagucacau

SEQ ID NO: 1350739 - RNA, 19 nt, Artificial Sequence
  Description of Artificial Sequence: Synthetic oligonucleotide
cccuaugaacaugaacagc

SEQ ID NO: 1350740 - RNA, 19 nt, Artificial Sequence
  Description of Artificial Sequence: Synthetic oligonucleotide
gagaccaauuagagaguaa

SEQ ID NO: 1350741 - RNA, 19 nt, Artificial Sequence
  Description of Artificial Sequence: Synthetic oligonucleotide
cugacccgagcauaugucu

SEQ ID NO: 1350742 - RNA, 19 nt, Artificial Sequence
  Description of Artificial Sequence: Synthetic oligonucleotide
augaggcccuggaggauag

SEQ ID NO: 1350743 - RNA, 19 nt, Artificial Sequence
  Description of Artificial Sequence: Synthetic oligonucleotide
cuuccuccuaaggaccuca

SEQ ID NO: 1350744 - RNA, 19 nt, Artificial Sequence
  Description of Artificial Sequence: Synthetic oligonucleotide
aucugccgccacuauuuua

SEQ ID NO: 1350745 - RNA, 19 nt, Artificial Sequence
  Description of Artificial Sequence: Synthetic oligonucleotide
cugcuauagcuagaggaaa

SEQ ID NO: 1350746 - RNA, 19 nt, Artificial Sequence
  Description of Artificial Sequence: Synthetic oligonucleotide
gcagcuauugaaggaguuc

SEQ ID NO: 1350747 - RNA, 19 nt, Artificial Sequence
  Description of Artificial Sequence: Synthetic oligonucleotide
cacaccccuuagccugugg

SEQ ID NO: 1350748 - RNA, 19 nt, Artificial Sequence
  Description of Artificial Sequence: Synthetic oligonucleotide
uuggcccaacccagagaaa

SEQ ID NO: 1350749 - RNA, 19 nt, Artificial Sequence
  Description of Artificial Sequence: Synthetic oligonucleotide
ucgcuccugacccgagcau

SEQ ID NO: 1350750 - RNA, 19 nt, Artificial Sequence
  Description of Artificial Sequence: Synthetic oligonucleotide
guauuucaacucagacaca

SEQ ID NO: 1350751 - RNA, 19 nt, Artificial Sequence
  Description of Artificial Sequence: Synthetic oligonucleotide
agauugggauagucacauu

SEQ ID NO: 1350752 - RNA, 19 nt, Artificial Sequence
  Description of Artificial Sequence: Synthetic oligonucleotide
ggauccaaagcaagguaaa

SEQ ID NO: 1350753 - RNA, 19 nt, Artificial Sequence
  Description of Artificial Sequence: Synthetic oligonucleotide
ccugacccgagcauauguc

SEQ ID NO: 1350754 - RNA, 19 nt, Artificial Sequence
  Description of Artificial Sequence: Synthetic oligonucleotide
ggacgaguaucgcuccuga

SEQ ID NO: 1350755 - RNA, 19 nt, Artificial Sequence
  Description of Artificial Sequence: Synthetic oligonucleotide
augcccggggacaagguuu

SEQ ID NO: 1350756 - RNA, 19 nt, Artificial Sequence
  Description of Artificial Sequence: Synthetic oligonucleotide
uucagacgagcugcaggua

SEQ ID NO: 1350757 - RNA, 19 nt, Artificial Sequence
  Description of Artificial Sequence: Synthetic oligonucleotide
cauuacguugcaugacaau

SEQ ID NO: 1350758 - RNA, 19 nt, Artificial Sequence
  Description of Artificial Sequence: Synthetic oligonucleotide
aucuggcguuaaagaaguc

SEQ ID NO: 1350759 - RNA, 19 nt, Artificial Sequence
  Description of Artificial Sequence: Synthetic oligonucleotide
guaucgcuccugacccgag

SEQ ID NO: 1350760 - RNA, 19 nt, Artificial Sequence
  Description of Artificial Sequence: Synthetic oligonucleotide
aguguccagugagaccaau

SEQ ID NO: 1350761 - RNA, 19 nt, Artificial Sequence
  Description of Artificial Sequence: Synthetic oligonucleotide
gagugacagcugugcacaa

SEQ ID NO: 1350762 - RNA, 19 nt, Artificial Sequence
  Description of Artificial Sequence: Synthetic oligonucleotide
cuuagccuguggugcugca

SEQ ID NO: 1350763 - RNA, 19 nt, Artificial Sequence
  Description of Artificial Sequence: Synthetic oligonucleotide
cguuaaagaagucgaagcu

SEQ ID NO: 1350764 - RNA, 19 nt, Artificial Sequence
  Description of Artificial Sequence: Synthetic oligonucleotide
augaacagccacaccccuu

SEQ ID NO: 1350765 - RNA, 19 nt, Artificial Sequence
  Description of Artificial Sequence: Synthetic oligonucleotide
gugugucuuaggggacgag

SEQ ID NO: 1350766 - RNA, 19 nt, Artificial Sequence
  Description of Artificial Sequence: Synthetic oligonucleotide
gggacgaguaucgcuccug

SEQ ID NO: 1350767 - RNA, 19 nt, Artificial Sequence
  Description of Artificial Sequence: Synthetic oligonucleotide
agggguagauuggucccaa

SEQ ID NO: 1350768 - RNA, 19 nt, Artificial Sequence
  Description of Artificial Sequence: Synthetic oligonucleotide
gaugcccggggacaagguu

SEQ ID NO: 1350769 - RNA, 19 nt, Artificial Sequence
  Description of Artificial Sequence: Synthetic oligonucleotide
guaaugcagugaagacauc

SEQ ID NO: 1350770 - RNA, 19 nt, Artificial Sequence
  Description of Artificial Sequence: Synthetic oligonucleotide
aaguguccagugagaccaa

SEQ ID NO: 1350771 - RNA, 19 nt, Artificial Sequence
  Description of Artificial Sequence: Synthetic oligonucleotide
gugagaccaauuagagagu

SEQ ID NO: 1350772 - RNA, 19 nt, Artificial Sequence
  Description of Artificial Sequence: Synthetic oligonucleotide
agcaaggaaggcagcuauu

SEQ ID NO: 1350773 - RNA, 19 nt, Artificial Sequence
  Description of Artificial Sequence: Synthetic oligonucleotide
guagggacuggagguacgu

SEQ ID NO: 1350774 - RNA, 19 nt, Artificial Sequence
  Description of Artificial Sequence: Synthetic oligonucleotide
ggcugcgcaaguggcuuag

SEQ ID NO: 1350775 - RNA, 19 nt, Artificial Sequence
  Description of Artificial Sequence: Synthetic oligonucleotide
uggcugcgcaaguggcuua

SEQ ID NO: 1350776 - RNA, 19 nt, Artificial Sequence
  Description of Artificial Sequence: Synthetic oligonucleotide
gcauuacguugcaugacaa

SEQ ID NO: 1350777 - RNA, 19 nt, Artificial Sequence
  Description of Artificial Sequence: Synthetic oligonucleotide
guaaaggagaagagacauu

SEQ ID NO: 1350778 - RNA, 19 nt, Artificial Sequence
  Description of Artificial Sequence: Synthetic oligonucleotide
cugcucaggucuuggcucu

SEQ ID NO: 1350779 - RNA, 19 nt, Artificial Sequence
  Description of Artificial Sequence: Synthetic oligonucleotide
cuccugacccgagcauaug

SEQ ID NO: 1350780 - RNA, 19 nt, Artificial Sequence
  Description of Artificial Sequence: Synthetic oligonucleotide
ggugugucuuaggggacga

SEQ ID NO: 1350781 - RNA, 19 nt, Artificial Sequence
  Description of Artificial Sequence: Synthetic oligonucleotide
gucaugcaugaugcaguaa

SEQ ID NO: 1350782 - RNA, 19 nt, Artificial Sequence
  Description of Artificial Sequence: Synthetic oligonucleotide
ccuuagccuguggugcugc

SEQ ID NO: 1350783 - RNA, 19 nt, Artificial Sequence
  Description of Artificial Sequence: Synthetic oligonucleotide
gguucggcuuagggcaggc

SEQ ID NO: 1350784 - RNA, 19 nt, Artificial Sequence
  Description of Artificial Sequence: Synthetic oligonucleotide
cucucccuacuucuuccua

SEQ ID NO: 1350785 - RNA, 19 nt, Artificial Sequence
  Description of Artificial Sequence: Synthetic oligonucleotide
cuggaggauagaucugguu

SEQ ID NO: 1350786 - RNA, 19 nt, Artificial Sequence
  Description of Artificial Sequence: Synthetic oligonucleotide
gcaugagacugaguccaca

SEQ ID NO: 1350787 - RNA, 19 nt, Artificial Sequence
  Description of Artificial Sequence: Synthetic oligonucleotide
gcuagaggaaaaggugacu

SEQ ID NO: 1350788 - RNA, 19 nt, Artificial Sequence
  Description of Artificial Sequence: Synthetic oligonucleotide
ggcccaacccagagaaauc

SEQ ID NO: 1350789 - RNA, 19 nt, Artificial Sequence
  Description of Artificial Sequence: Synthetic oligonucleotide
cuacuucagucuccucagu

SEQ ID NO: 1350790 - RNA, 19 nt, Artificial Sequence
  Description of Artificial Sequence: Synthetic oligonucleotide
gcugcaucugccgccacua

SEQ ID NO: 1350791 - RNA, 19 nt, Artificial Sequence
  Description of Artificial Sequence: Synthetic oligonucleotide
guuuaggauggagcagcau

SEQ ID NO: 1350792 - RNA, 19 nt, Artificial Sequence
  Description of Artificial Sequence: Synthetic oligonucleotide
guucggcuuagggcaggca

SEQ ID NO: 1350793 - RNA, 19 nt, Artificial Sequence
  Description of Artificial Sequence: Synthetic oligonucleotide
gcucagugguucggcuuag

SEQ ID NO: 1350794 - RNA, 19 nt, Artificial Sequence
  Description of Artificial Sequence: Synthetic oligonucleotide
cccggggacaagguuucag

SEQ ID NO: 1350795 - RNA, 19 nt, Artificial Sequence
  Description of Artificial Sequence: Synthetic oligonucleotide
cagccacaccccuuagccu

SEQ ID NO: 1350796 - RNA, 19 nt, Artificial Sequence
  Description of Artificial Sequence: Synthetic oligonucleotide
cccuacuucuuccuagacu

SEQ ID NO: 1350797 - RNA, 19 nt, Artificial Sequence
  Description of Artificial Sequence: Synthetic oligonucleotide
ccuaaggaccucagagaua

SEQ ID NO: 1350798 - RNA, 19 nt, Artificial Sequence
  Description of Artificial Sequence: Synthetic oligonucleotide
ccgauaguucagccagcuc

SEQ ID NO: 1350799 - RNA, 19 nt, Artificial Sequence
  Description of Artificial Sequence: Synthetic oligonucleotide
gggcaccugagucaugcau

SEQ ID NO: 1350800 - RNA, 19 nt, Artificial Sequence
  Description of Artificial Sequence: Synthetic oligonucleotide
cugggcauugguguagguu

SEQ ID NO: 1350801 - RNA, 19 nt, Artificial Sequence
  Description of Artificial Sequence: Synthetic oligonucleotide
gacuggagguacgucucuu

SEQ ID NO: 1350802 - RNA, 19 nt, Artificial Sequence
  Description of Artificial Sequence: Synthetic oligonucleotide
cgccacuauuuuagcaauc

SEQ ID NO: 1350803 - RNA, 19 nt, Artificial Sequence
  Description of Artificial Sequence: Synthetic oligonucleotide
cugcgcaaguggcuuaguu

SEQ ID NO: 1350804 - RNA, 19 nt, Artificial Sequence
  Description of Artificial Sequence: Synthetic oligonucleotide
gauugggcacugaggcauu

SEQ ID NO: 1350805 - RNA, 19 nt, Artificial Sequence
  Description of Artificial Sequence: Synthetic oligonucleotide
guccuagaagaaggauggu

SEQ ID NO: 1350806 - RNA, 19 nt, Artificial Sequence
  Description of Artificial Sequence: Synthetic oligonucleotide
cacgcagauugggcacuga

SEQ ID NO: 1350807 - RNA, 19 nt, Artificial Sequence
  Description of Artificial Sequence: Synthetic oligonucleotide
gccccauguggcuuguuuu

SEQ ID NO: 1350808 - RNA, 19 nt, Artificial Sequence
  Description of Artificial Sequence: Synthetic oligonucleotide
cccgagcauaugucuccuc

SEQ ID NO: 1350809 - RNA, 19 nt, Artificial Sequence
  Description of Artificial Sequence: Synthetic oligonucleotide
caucugccgccacuauuuu

SEQ ID NO: 1350810 - RNA, 19 nt, Artificial Sequence
  Description of Artificial Sequence: Synthetic oligonucleotide
ccuggaggauagaucuggu

SEQ ID NO: 1350811 - RNA, 19 nt, Artificial Sequence
  Description of Artificial Sequence: Synthetic oligonucleotide
cagggaccucuacuucagu

SEQ ID NO: 1350812 - RNA, 19 nt, Artificial Sequence
  Description of Artificial Sequence: Synthetic oligonucleotide
ggggacgaguaucgcuccu

SEQ ID NO: 1350813 - RNA, 19 nt, Artificial Sequence
  Description of Artificial Sequence: Synthetic oligonucleotide
ccgccacuauuuuagcaau

SEQ ID NO: 1350814 - RNA, 19 nt, Artificial Sequence
  Description of Artificial Sequence: Synthetic oligonucleotide
cccgauaguucagccagcu

SEQ ID NO: 1350815 - RNA, 19 nt, Artificial Sequence
  Description of Artificial Sequence: Synthetic oligonucleotide
gcuccugacccgagcauau

SEQ ID NO: 1350816 - RNA, 19 nt, Artificial Sequence
  Description of Artificial Sequence: Synthetic oligonucleotide
cugaggcauuacguugcau

SEQ ID NO: 1350817 - RNA, 19 nt, Artificial Sequence
  Description of Artificial Sequence: Synthetic oligonucleotide
ggaugcccggggacaaggu

SEQ ID NO: 1350818 - RNA, 19 nt, Artificial Sequence
  Description of Artificial Sequence: Synthetic oligonucleotide
gggguagauuggucccaau

SEQ ID NO: 1350819 - RNA, 19 nt, Artificial Sequence
  Description of Artificial Sequence: Synthetic oligonucleotide
ccccuuagccuguggugcu

SEQ ID NO: 1350820 - RNA, 19 nt, Artificial Sequence
  Description of Artificial Sequence: Synthetic oligonucleotide
cgagcauaugucuccucuu

SEQ ID NO: 1350821 - RNA, 19 nt, Artificial Sequence
  Description of Artificial Sequence: Synthetic oligonucleotide
ccacaccccuuagccugug

SEQ ID NO: 1350822 - RNA, 19 nt, Artificial Sequence
  Description of Artificial Sequence: Synthetic oligonucleotide
cgcuccugacccgagcaua

SEQ ID NO: 1350823 - RNA, 19 nt, Artificial Sequence
  Description of Artificial Sequence: Synthetic oligonucleotide
cccacgcagauugggcacu

SEQ ID NO: 1350824 - RNA, 19 nt, Artificial Sequence
  Description of Artificial Sequence: Synthetic oligonucleotide
gcugcgcaaguggcuuagu

SEQ ID NO: 1350825 - RNA, 19 nt, Artificial Sequence
  Description of Artificial Sequence: Synthetic oligonucleotide
gcccggggacaagguuuca

SEQ ID NO: 1350826 - RNA, 19 nt, Artificial Sequence
  Description of Artificial Sequence: Synthetic oligonucleotide
cagccccauguggcuuguu

SEQ ID NO: 1350827 - RNA, 19 nt, Artificial Sequence
  Description of Artificial Sequence: Synthetic oligonucleotide
acucacaccacauauaccc

SEQ ID NO: 1350828 - RNA, 19 nt, Artificial Sequence
  Description of Artificial Sequence: Synthetic oligonucleotide
aguaacaugcucuacaagg

SEQ ID NO: 1350829 - RNA, 19 nt, Artificial Sequence
  Description of Artificial Sequence: Synthetic oligonucleotide
aacuacuuaauacacucac

SEQ ID NO: 1350830 - RNA, 19 nt, Artificial Sequence
  Description of Artificial Sequence: Synthetic oligonucleotide
uucuaaacaccucagaaag

SEQ ID NO: 1350831 - RNA, 19 nt, Artificial Sequence
  Description of Artificial Sequence: Synthetic oligonucleotide
acuaggauaccuuuguccc

SEQ ID NO: 1350832 - RNA, 19 nt, Artificial Sequence
  Description of Artificial Sequence: Synthetic oligonucleotide
ugaaguauuccccauaaug

SEQ ID NO: 1350833 - RNA, 19 nt, Artificial Sequence
  Description of Artificial Sequence: Synthetic oligonucleotide
ugaauuaaacucuauauaa

SEQ ID NO: 1350834 - RNA, 19 nt, Artificial Sequence
  Description of Artificial Sequence: Synthetic oligonucleotide
auacucacauuccauaucc

SEQ ID NO: 1350835 - RNA, 19 nt, Artificial Sequence
  Description of Artificial Sequence: Synthetic oligonucleotide
agaauaauuuuccccaccc

SEQ ID NO: 1350836 - RNA, 19 nt, Artificial Sequence
  Description of Artificial Sequence: Synthetic oligonucleotide
ugaagaauaauuuucccca

SEQ ID NO: 1350837 - RNA, 19 nt, Artificial Sequence
  Description of Artificial Sequence: Synthetic oligonucleotide
aauaaguuaccccaucucu

SEQ ID NO: 1350838 - RNA, 19 nt, Artificial Sequence
  Description of Artificial Sequence: Synthetic oligonucleotide
uauauaaggaaguuuuccc

SEQ ID NO: 1350839 - RNA, 19 nt, Artificial Sequence
  Description of Artificial Sequence: Synthetic oligonucleotide
acaauacggaggcagaggc

SEQ ID NO: 1350840 - RNA, 19 nt, Artificial Sequence
  Description of Artificial Sequence: Synthetic oligonucleotide
uuaaguggagaccacguag

SEQ ID NO: 1350841 - RNA, 19 nt, Artificial Sequence
  Description of Artificial Sequence: Synthetic oligonucleotide
aauccuacuguccucacug

SEQ ID NO: 1350842 - RNA, 19 nt, Artificial Sequence
  Description of Artificial Sequence: Synthetic oligonucleotide
uuugugggaaauaaagagc

SEQ ID NO: 1350843 - RNA, 19 nt, Artificial Sequence
  Description of Artificial Sequence: Synthetic oligonucleotide
aaaauaaguuaccccaucu

SEQ ID NO: 1350844 - RNA, 19 nt, Artificial Sequence
  Description of Artificial Sequence: Synthetic oligonucleotide
aauccauucuacucugagg

SEQ ID NO: 1350845 - RNA, 19 nt, Artificial Sequence
  Description of Artificial Sequence: Synthetic oligonucleotide
ucuagggauacucacauuc

SEQ ID NO: 1350846 - RNA, 19 nt, Artificial Sequence
  Description of Artificial Sequence: Synthetic oligonucleotide
uauacccauuuauauaagg

SEQ ID NO: 1350847 - RNA, 19 nt, Artificial Sequence
  Description of Artificial Sequence: Synthetic oligonucleotide
aaauccauucuacucugag

SEQ ID NO: 1350848 - RNA, 19 nt, Artificial Sequence
  Description of Artificial Sequence: Synthetic oligonucleotide
gacaauaagugucucauuc

SEQ ID NO: 1350849 - RNA, 19 nt, Artificial Sequence
  Description of Artificial Sequence: Synthetic oligonucleotide
uaucccagacaacauaucc

SEQ ID NO: 1350850 - RNA, 19 nt, Artificial Sequence
  Description of Artificial Sequence: Synthetic oligonucleotide
gacacuaugggcugcagcc

SEQ ID NO: 1350851 - RNA, 19 nt, Artificial Sequence
  Description of Artificial Sequence: Synthetic oligonucleotide
gagaauaccagccuaguga

SEQ ID NO: 1350852 - RNA, 19 nt, Artificial Sequence
  Description of Artificial Sequence: Synthetic oligonucleotide
cucgauaugaauucaauga

SEQ ID NO: 1350853 - RNA, 19 nt, Artificial Sequence
  Description of Artificial Sequence: Synthetic oligonucleotide
ucgacuucuaaacaccuca

SEQ ID NO: 1350854 - RNA, 19 nt, Artificial Sequence
  Description of Artificial Sequence: Synthetic oligonucleotide
ucgauaugaauucaaugac

SEQ ID NO: 1350855 - RNA, 19 nt, Artificial Sequence
  Description of Artificial Sequence: Synthetic oligonucleotide
aaucuagggauacucacau

SEQ ID NO: 1350856 - RNA, 19 nt, Artificial Sequence
  Description of Artificial Sequence: Synthetic oligonucleotide
cuugaaauccauucuacuc

SEQ ID NO: 1350857 - RNA, 19 nt, Artificial Sequence
  Description of Artificial Sequence: Synthetic oligonucleotide
uccugaaugagcucgauau

SEQ ID NO: 1350858 - RNA, 19 nt, Artificial Sequence
  Description of Artificial Sequence: Synthetic oligonucleotide
ucaucaugcucauacuugc

SEQ ID NO: 1350859 - RNA, 19 nt, Artificial Sequence
  Description of Artificial Sequence: Synthetic oligonucleotide
uccggcuucggucuggacg

SEQ ID NO: 1350860 - RNA, 19 nt, Artificial Sequence
  Description of Artificial Sequence: Synthetic oligonucleotide
ugugcucucacaauacgga

SEQ ID NO: 1350861 - RNA, 19 nt, Artificial Sequence
  Description of Artificial Sequence: Synthetic oligonucleotide
agccuagugacacacuggg

SEQ ID NO: 1350862 - RNA, 19 nt, Artificial Sequence
  Description of Artificial Sequence: Synthetic oligonucleotide
augaauuaaacucuauaua

SEQ ID NO: 1350863 - RNA, 19 nt, Artificial Sequence
  Description of Artificial Sequence: Synthetic oligonucleotide
uuccauaucccagacaaca

SEQ ID NO: 1350864 - RNA, 19 nt, Artificial Sequence
  Description of Artificial Sequence: Synthetic oligonucleotide
uuaauacacucacaccaca

SEQ ID NO: 1350865 - RNA, 19 nt, Artificial Sequence
  Description of Artificial Sequence: Synthetic oligonucleotide
ucugccuguuuauugcacg

SEQ ID NO: 1350866 - RNA, 19 nt, Artificial Sequence
  Description of Artificial Sequence: Synthetic oligonucleotide
ucuacaaggcuccuuccug

SEQ ID NO: 1350867 - RNA, 19 nt, Artificial Sequence
  Description of Artificial Sequence: Synthetic oligonucleotide
auugcacgggacuagggag

SEQ ID NO: 1350868 - RNA, 19 nt, Artificial Sequence
  Description of Artificial Sequence: Synthetic oligonucleotide
ugaaauccauucuacucug

SEQ ID NO: 1350869 - RNA, 19 nt, Artificial Sequence
  Description of Artificial Sequence: Synthetic oligonucleotide
uacccauuuauauaaggaa

SEQ ID NO: 1350870 - RNA, 19 nt, Artificial Sequence
  Description of Artificial Sequence: Synthetic oligonucleotide
aacuugcugacaauaagug

SEQ ID NO: 1350871 - RNA, 19 nt, Artificial Sequence
  Description of Artificial Sequence: Synthetic oligonucleotide
cuuaauacacucacaccac

SEQ ID NO: 1350872 - RNA, 19 nt, Artificial Sequence
  Description of Artificial Sequence: Synthetic oligonucleotide
uauugcacgggacuaggga

SEQ ID NO: 1350873 - RNA, 19 nt, Artificial Sequence
  Description of Artificial Sequence: Synthetic oligonucleotide
uacucugaggcauucucag

SEQ ID NO: 1350874 - RNA, 19 nt, Artificial Sequence
  Description of Artificial Sequence: Synthetic oligonucleotide
gcagcgaccacucagacug

SEQ ID NO: 1350875 - RNA, 19 nt, Artificial Sequence
  Description of Artificial Sequence: Synthetic oligonucleotide
aaaauccuacuguccucac

SEQ ID NO: 1350876 - RNA, 19 nt, Artificial Sequence
  Description of Artificial Sequence: Synthetic oligonucleotide
uaaguuaccccaucucuga

SEQ ID NO: 1350877 - RNA, 19 nt, Artificial Sequence
  Description of Artificial Sequence: Synthetic oligonucleotide
acuagggaguaacaugcuc

SEQ ID NO: 1350878 - RNA, 19 nt, Artificial Sequence
  Description of Artificial Sequence: Synthetic oligonucleotide
aagacaucacucugcugag

SEQ ID NO: 1350879 - RNA, 19 nt, Artificial Sequence
  Description of Artificial Sequence: Synthetic oligonucleotide
uuuauggacugaaguauuc

SEQ ID NO: 1350880 - RNA, 19 nt, Artificial Sequence
  Description of Artificial Sequence: Synthetic oligonucleotide
cuucucaagguauacugug

SEQ ID NO: 1350881 - RNA, 19 nt, Artificial Sequence
  Description of Artificial Sequence: Synthetic oligonucleotide
cauuccauaucccagacaa

SEQ ID NO: 1350882 - RNA, 19 nt, Artificial Sequence
  Description of Artificial Sequence: Synthetic oligonucleotide
ucuccacgauuccaaaucc

SEQ ID NO: 1350883 - RNA, 19 nt, Artificial Sequence
  Description of Artificial Sequence: Synthetic oligonucleotide
ucuacucugaggcauucuc

SEQ ID NO: 1350884 - RNA, 19 nt, Artificial Sequence
  Description of Artificial Sequence: Synthetic oligonucleotide
agacacuaugggcugcagc

SEQ ID NO: 1350885 - RNA, 19 nt, Artificial Sequence
  Description of Artificial Sequence: Synthetic oligonucleotide
agugguuaaguggagacca

SEQ ID NO: 1350886 - RNA, 19 nt, Artificial Sequence
  Description of Artificial Sequence: Synthetic oligonucleotide
uuauugcacgggacuaggg

SEQ ID NO: 1350887 - RNA, 19 nt, Artificial Sequence
  Description of Artificial Sequence: Synthetic oligonucleotide
acaauaagugucucauucu

SEQ ID NO: 1350888 - RNA, 19 nt, Artificial Sequence
  Description of Artificial Sequence: Synthetic oligonucleotide
ugacuugauggucccagcc

SEQ ID NO: 1350889 - RNA, 19 nt, Artificial Sequence
  Description of Artificial Sequence: Synthetic oligonucleotide
auggacugaaguauucccc

SEQ ID NO: 1350890 - RNA, 19 nt, Artificial Sequence
  Description of Artificial Sequence: Synthetic oligonucleotide
auacuugcagaacuugcug

SEQ ID NO: 1350891 - RNA, 19 nt, Artificial Sequence
  Description of Artificial Sequence: Synthetic oligonucleotide
uggacugaaguauucccca

SEQ ID NO: 1350892 - RNA, 19 nt, Artificial Sequence
  Description of Artificial Sequence: Synthetic oligonucleotide
uaacaugcucuacaaggcu

SEQ ID NO: 1350893 - RNA, 19 nt, Artificial Sequence
  Description of Artificial Sequence: Synthetic oligonucleotide
cugugcucucacaauacgg

SEQ ID NO: 1350894 - RNA, 19 nt, Artificial Sequence
  Description of Artificial Sequence: Synthetic oligonucleotide
gagucugccuguuuauugc

SEQ ID NO: 1350895 - RNA, 19 nt, Artificial Sequence
  Description of Artificial Sequence: Synthetic oligonucleotide
acgcccgcagagcagaagc

SEQ ID NO: 1350896 - RNA, 19 nt, Artificial Sequence
  Description of Artificial Sequence: Synthetic oligonucleotide
uuauggacugaaguauucc

SEQ ID NO: 1350897 - RNA, 19 nt, Artificial Sequence
  Description of Artificial Sequence: Synthetic oligonucleotide
cuagggauacucacauucc

SEQ ID NO: 1350898 - RNA, 19 nt, Artificial Sequence
  Description of Artificial Sequence: Synthetic oligonucleotide
aaaucuagggauacucaca

SEQ ID NO: 1350899 - RNA, 19 nt, Artificial Sequence
  Description of Artificial Sequence: Synthetic oligonucleotide
uagggauacucacauucca

SEQ ID NO: 1350900 - RNA, 19 nt, Artificial Sequence
  Description of Artificial Sequence: Synthetic oligonucleotide
agcuacuccggcuucgguc

SEQ ID NO: 1350901 - RNA, 19 nt, Artificial Sequence
  Description of Artificial Sequence: Synthetic oligonucleotide
agguauacugugcuggacu

SEQ ID NO: 1350902 - RNA, 19 nt, Artificial Sequence
  Description of Artificial Sequence: Synthetic oligonucleotide
ucccagagcaaaauccuac

SEQ ID NO: 1350903 - RNA, 19 nt, Artificial Sequence
  Description of Artificial Sequence: Synthetic oligonucleotide
aaccaucagaccgguaccg

SEQ ID NO: 1350904 - RNA, 19 nt, Artificial Sequence
  Description of Artificial Sequence: Synthetic oligonucleotide
ggaaccaucagaccgguac

SEQ ID NO: 1350905 - RNA, 19 nt, Artificial Sequence
  Description of Artificial Sequence: Synthetic oligonucleotide
ugagugguggaaccacucc

SEQ ID NO: 1350906 - RNA, 19 nt, Artificial Sequence
  Description of Artificial Sequence: Synthetic oligonucleotide
guaacaugcucuacaaggc

SEQ ID NO: 1350907 - RNA, 19 nt, Artificial Sequence
  Description of Artificial Sequence: Synthetic oligonucleotide
gauacucacauuccauauc

SEQ ID NO: 1350908 - RNA, 19 nt, Artificial Sequence
  Description of Artificial Sequence: Synthetic oligonucleotide
aaauccuacuguccucacu

SEQ ID NO: 1350909 - RNA, 19 nt, Artificial Sequence
  Description of Artificial Sequence: Synthetic oligonucleotide
aaguuaccccaucucugag

SEQ ID NO: 1350910 - RNA, 19 nt, Artificial Sequence
  Description of Artificial Sequence: Synthetic oligonucleotide
uccacgauuccaaauccaa

SEQ ID NO: 1350911 - RNA, 19 nt, Artificial Sequence
  Description of Artificial Sequence: Synthetic oligonucleotide
accacguagcaucucucac

SEQ ID NO: 1350912 - RNA, 19 nt, Artificial Sequence
  Description of Artificial Sequence: Synthetic oligonucleotide
cagacaacauauccaauuc

SEQ ID NO: 1350913 - RNA, 19 nt, Artificial Sequence
  Description of Artificial Sequence: Synthetic oligonucleotide
ucagaaaggcuugaaucca

SEQ ID NO: 1350914 - RNA, 19 nt, Artificial Sequence
  Description of Artificial Sequence: Synthetic oligonucleotide
augacuugauggucccagc

SEQ ID NO: 1350915 - RNA, 19 nt, Artificial Sequence
  Description of Artificial Sequence: Synthetic oligonucleotide
ccuagugacacacugggag

SEQ ID NO: 1350916 - RNA, 19 nt, Artificial Sequence
  Description of Artificial Sequence: Synthetic oligonucleotide
ugguuaaguggagaccacg

SEQ ID NO: 1350917 - RNA, 19 nt, Artificial Sequence
  Description of Artificial Sequence: Synthetic oligonucleotide
gaaccaucagaccgguacc

SEQ ID NO: 1350918 - RNA, 19 nt, Artificial Sequence
  Description of Artificial Sequence: Synthetic oligonucleotide
agaccgguaccgugcagcc

SEQ ID NO: 1350919 - RNA, 19 nt, Artificial Sequence
  Description of Artificial Sequence: Synthetic oligonucleotide
caucagaccgguaccgugc

SEQ ID NO: 1350920 - RNA, 19 nt, Artificial Sequence
  Description of Artificial Sequence: Synthetic oligonucleotide
gacuugggaagcauaaaac

SEQ ID NO: 1350921 - RNA, 19 nt, Artificial Sequence
  Description of Artificial Sequence: Synthetic oligonucleotide
ucucaucuagcucccacaa

SEQ ID NO: 1350922 - RNA, 19 nt, Artificial Sequence
  Description of Artificial Sequence: Synthetic oligonucleotide
auaaguuaccccaucucug

SEQ ID NO: 1350923 - RNA, 19 nt, Artificial Sequence
  Description of Artificial Sequence: Synthetic oligonucleotide
cacucccacaaaucuaggg

SEQ ID NO: 1350924 - RNA, 19 nt, Artificial Sequence
  Description of Artificial Sequence: Synthetic oligonucleotide
auacccauuuauauaagga

SEQ ID NO: 1350925 - RNA, 19 nt, Artificial Sequence
  Description of Artificial Sequence: Synthetic oligonucleotide
ucuggacgcccgcagagca

SEQ ID NO: 1350926 - RNA, 19 nt, Artificial Sequence
  Description of Artificial Sequence: Synthetic oligonucleotide
ucuugguguccacaagaga

SEQ ID NO: 1350927 - RNA, 19 nt, Artificial Sequence
  Description of Artificial Sequence: Synthetic oligonucleotide
cacaaaucuagggauacuc

SEQ ID NO: 1350928 - RNA, 19 nt, Artificial Sequence
  Description of Artificial Sequence: Synthetic oligonucleotide
aaguggagaccacguagca

SEQ ID NO: 1350929 - RNA, 19 nt, Artificial Sequence
  Description of Artificial Sequence: Synthetic oligonucleotide
gaaaggcuugaauccagca

SEQ ID NO: 1350930 - RNA, 19 nt, Artificial Sequence
  Description of Artificial Sequence: Synthetic oligonucleotide
ucacaauacggaggcagag

SEQ ID NO: 1350931 - RNA, 19 nt, Artificial Sequence
  Description of Artificial Sequence: Synthetic oligonucleotide
accacucccacaaaucuag

SEQ ID NO: 1350932 - RNA, 19 nt, Artificial Sequence
  Description of Artificial Sequence: Synthetic oligonucleotide
aaacuacuuaauacacuca

SEQ ID NO: 1350933 - RNA, 19 nt, Artificial Sequence
  Description of Artificial Sequence: Synthetic oligonucleotide
cauaaugaauuaaacucua

SEQ ID NO: 1350934 - RNA, 19 nt, Artificial Sequence
  Description of Artificial Sequence: Synthetic oligonucleotide
cuaggauaccuuugucccc

SEQ ID NO: 1350935 - RNA, 19 nt, Artificial Sequence
  Description of Artificial Sequence: Synthetic oligonucleotide
ucucucacgaagucucugu

SEQ ID NO: 1350936 - RNA, 19 nt, Artificial Sequence
  Description of Artificial Sequence: Synthetic oligonucleotide
auccuacuguccucacugc

SEQ ID NO: 1350937 - RNA, 19 nt, Artificial Sequence
  Description of Artificial Sequence: Synthetic oligonucleotide
cugccuguuuauugcacgg

SEQ ID NO: 1350938 - RNA, 19 nt, Artificial Sequence
  Description of Artificial Sequence: Synthetic oligonucleotide
acaacauauccaauucuug

SEQ ID NO: 1350939 - RNA, 19 nt, Artificial Sequence
  Description of Artificial Sequence: Synthetic oligonucleotide
gugggcucgacuucuaaac

SEQ ID NO: 1350940 - RNA, 19 nt, Artificial Sequence
  Description of Artificial Sequence: Synthetic oligonucleotide
gagggagugguuaagugga

SEQ ID NO: 1350941 - RNA, 19 nt, Artificial Sequence
  Description of Artificial Sequence: Synthetic oligonucleotide
acugcaugaaagaaacaca

SEQ ID NO: 1350942 - RNA, 19 nt, Artificial Sequence
  Description of Artificial Sequence: Synthetic oligonucleotide
uuccugugcucucacaaua

SEQ ID NO: 1350943 - RNA, 19 nt, Artificial Sequence
  Description of Artificial Sequence: Synthetic oligonucleotide
cacuguguggagagaauac

SEQ ID NO: 1350944 - RNA, 19 nt, Artificial Sequence
  Description of Artificial Sequence: Synthetic oligonucleotide
uguuuauugcacgggacua

SEQ ID NO: 1350945 - RNA, 19 nt, Artificial Sequence
  Description of Artificial Sequence: Synthetic oligonucleotide
ucagacuggaggccccgag

SEQ ID NO: 1350946 - RNA, 19 nt, Artificial Sequence
  Description of Artificial Sequence: Synthetic oligonucleotide
uccuacuguccucacugca

SEQ ID NO: 1350947 - RNA, 19 nt, Artificial Sequence
  Description of Artificial Sequence: Synthetic oligonucleotide
agcaauugagcagucuuca

SEQ ID NO: 1350948 - RNA, 19 nt, Artificial Sequence
  Description of Artificial Sequence: Synthetic oligonucleotide
guuuauugcacgggacuag

SEQ ID NO: 1350949 - RNA, 19 nt, Artificial Sequence
  Description of Artificial Sequence: Synthetic oligonucleotide
accacucagacuggaggcc

SEQ ID NO: 1350950 - RNA, 19 nt, Artificial Sequence
  Description of Artificial Sequence: Synthetic oligonucleotide
ugggcucgacuucuaaaca

SEQ ID NO: 1350951 - RNA, 19 nt, Artificial Sequence
  Description of Artificial Sequence: Synthetic oligonucleotide
aggugaccuguccugaaug

SEQ ID NO: 1350952 - RNA, 19 nt, Artificial Sequence
  Description of Artificial Sequence: Synthetic oligonucleotide
agcaacacaggugaccugu

SEQ ID NO: 1350953 - RNA, 19 nt, Artificial Sequence
  Description of Artificial Sequence: Synthetic oligonucleotide
gcucucacaauacggaggc

SEQ ID NO: 1350954 - RNA, 19 nt, Artificial Sequence
  Description of Artificial Sequence: Synthetic oligonucleotide
agacuggaggccccgagca

SEQ ID NO: 1350955 - RNA, 19 nt, Artificial Sequence
  Description of Artificial Sequence: Synthetic oligonucleotide
cuugaauccagcacagcaa

SEQ ID NO: 1350956 - RNA, 19 nt, Artificial Sequence
  Description of Artificial Sequence: Synthetic oligonucleotide
aguuaccccaucucugagu

SEQ ID NO: 1350957 - RNA, 19 nt, Artificial Sequence
  Description of Artificial Sequence: Synthetic oligonucleotide
cacaauacggaggcagagg

SEQ ID NO: 1350958 - RNA, 19 nt, Artificial Sequence
  Description of Artificial Sequence: Synthetic oligonucleotide
uauacugugcuggacuuuu

SEQ ID NO: 1350959 - RNA, 19 nt, Artificial Sequence
  Description of Artificial Sequence: Synthetic oligonucleotide
uaccgugcagccuccaacu

SEQ ID NO: 1350960 - RNA, 19 nt, Artificial Sequence
  Description of Artificial Sequence: Synthetic oligonucleotide
gucagaagccacuaggaua

SEQ ID NO: 1350961 - RNA, 19 nt, Artificial Sequence
  Description of Artificial Sequence: Synthetic oligonucleotide
gacagcggguaucccagag

SEQ ID NO: 1350962 - RNA, 19 nt, Artificial Sequence
  Description of Artificial Sequence: Synthetic oligonucleotide
gacuucuaaacaccucaga

SEQ ID NO: 1350963 - RNA, 19 nt, Artificial Sequence
  Description of Artificial Sequence: Synthetic oligonucleotide
gcucgauaugaauucaaug

SEQ ID NO: 1350964 - RNA, 19 nt, Artificial Sequence
  Description of Artificial Sequence: Synthetic oligonucleotide
aagccacuaggauaccuuu

SEQ ID NO: 1350965 - RNA, 19 nt, Artificial Sequence
  Description of Artificial Sequence: Synthetic oligonucleotide
gaaccacucccacaaaucu

SEQ ID NO: 1350966 - RNA, 19 nt, Artificial Sequence
  Description of Artificial Sequence: Synthetic oligonucleotide
gggacuagggaguaacaug

SEQ ID NO: 1350967 - RNA, 19 nt, Artificial Sequence
  Description of Artificial Sequence: Synthetic oligonucleotide
ugccuguuuauugcacggg

SEQ ID NO: 1350968 - RNA, 19 nt, Artificial Sequence
  Description of Artificial Sequence: Synthetic oligonucleotide
uguucucacuuugugggaa

SEQ ID NO: 1350969 - RNA, 19 nt, Artificial Sequence
  Description of Artificial Sequence: Synthetic oligonucleotide
gagugguuaaguggagacc

SEQ ID NO: 1350970 - RNA, 19 nt, Artificial Sequence
  Description of Artificial Sequence: Synthetic oligonucleotide
caucuagcucccacaauuc

SEQ ID NO: 1350971 - RNA, 19 nt, Artificial Sequence
  Description of Artificial Sequence: Synthetic oligonucleotide
uaaggagggagugguuaag

SEQ ID NO: 1350972 - RNA, 19 nt, Artificial Sequence
  Description of Artificial Sequence: Synthetic oligonucleotide
acuacuuaauacacucaca

SEQ ID NO: 1350973 - RNA, 19 nt, Artificial Sequence
  Description of Artificial Sequence: Synthetic oligonucleotide
ugagcucgauaugaauuca

SEQ ID NO: 1350974 - RNA, 19 nt, Artificial Sequence
  Description of Artificial Sequence: Synthetic oligonucleotide
ugugggcucgacuucuaaa

SEQ ID NO: 1350975 - RNA, 19 nt, Artificial Sequence
  Description of Artificial Sequence: Synthetic oligonucleotide
cccaaacuacuuaauacac

SEQ ID NO: 1350976 - RNA, 19 nt, Artificial Sequence
  Description of Artificial Sequence: Synthetic oligonucleotide
cagcaauugagcagucuuc

SEQ ID NO: 1350977 - RNA, 19 nt, Artificial Sequence
  Description of Artificial Sequence: Synthetic oligonucleotide
ugcaggcgggugcauuggg

SEQ ID NO: 1350978 - RNA, 19 nt, Artificial Sequence
  Description of Artificial Sequence: Synthetic oligonucleotide
cacauuccauaucccagac

SEQ ID NO: 1350979 - RNA, 19 nt, Artificial Sequence
  Description of Artificial Sequence: Synthetic oligonucleotide
ggacagugacaguagacac

SEQ ID NO: 1350980 - RNA, 19 nt, Artificial Sequence
  Description of Artificial Sequence: Synthetic oligonucleotide
gauccauucucaucaccaa

SEQ ID NO: 1350981 - RNA, 19 nt, Artificial Sequence
  Description of Artificial Sequence: Synthetic oligonucleotide
aguauuccccauaaugaau

SEQ ID NO: 1350982 - RNA, 19 nt, Artificial Sequence
  Description of Artificial Sequence: Synthetic oligonucleotide
aggaagguagccagaagca

SEQ ID NO: 1350983 - RNA, 19 nt, Artificial Sequence
  Description of Artificial Sequence: Synthetic oligonucleotide
ucagcuacuccggcuucgg

SEQ ID NO: 1350984 - RNA, 19 nt, Artificial Sequence
  Description of Artificial Sequence: Synthetic oligonucleotide
gaggaugccaagccaggga

SEQ ID NO: 1350985 - RNA, 19 nt, Artificial Sequence
  Description of Artificial Sequence: Synthetic oligonucleotide
auucuacucugaggcauuc

SEQ ID NO: 1350986 - RNA, 19 nt, Artificial Sequence
  Description of Artificial Sequence: Synthetic oligonucleotide
cagauccauucucaucacc

SEQ ID NO: 1350987 - RNA, 19 nt, Artificial Sequence
  Description of Artificial Sequence: Synthetic oligonucleotide
auaucccagacaacauauc

SEQ ID NO: 1350988 - RNA, 19 nt, Artificial Sequence
  Description of Artificial Sequence: Synthetic oligonucleotide
uggagaccacguagcaucu

SEQ ID NO: 1350989 - RNA, 19 nt, Artificial Sequence
  Description of Artificial Sequence: Synthetic oligonucleotide
gaccacguagcaucucuca

SEQ ID NO: 1350990 - RNA, 19 nt, Artificial Sequence
  Description of Artificial Sequence: Synthetic oligonucleotide
gagcagaagggaaccauca

SEQ ID NO: 1350991 - RNA, 19 nt, Artificial Sequence
  Description of Artificial Sequence: Synthetic oligonucleotide
cacguagcaucucucacga

SEQ ID NO: 1350992 - RNA, 19 nt, Artificial Sequence
  Description of Artificial Sequence: Synthetic oligonucleotide
ccacguagcaucucucacg

SEQ ID NO: 1350993 - RNA, 19 nt, Artificial Sequence
  Description of Artificial Sequence: Synthetic oligonucleotide
cagaccgguaccgugcagc

SEQ ID NO: 1350994 - RNA, 19 nt, Artificial Sequence
  Description of Artificial Sequence: Synthetic oligonucleotide
cucucacgaagucucugug

SEQ ID NO: 1350995 - RNA, 19 nt, Artificial Sequence
  Description of Artificial Sequence: Synthetic oligonucleotide
acaacaugguggaugacuu

SEQ ID NO: 1350996 - RNA, 19 nt, Artificial Sequence
  Description of Artificial Sequence: Synthetic oligonucleotide
aggacagcggguaucccag

SEQ ID NO: 1350997 - RNA, 19 nt, Artificial Sequence
  Description of Artificial Sequence: Synthetic oligonucleotide
cuugcauucuuggugucca

SEQ ID NO: 1350998 - RNA, 19 nt, Artificial Sequence
  Description of Artificial Sequence: Synthetic oligonucleotide
uccacucgcgggccgcggg

SEQ ID NO: 1350999 - RNA, 19 nt, Artificial Sequence
  Description of Artificial Sequence: Synthetic oligonucleotide
ugguggaaccacucccaca

SEQ ID NO: 1351000 - RNA, 19 nt, Artificial Sequence
  Description of Artificial Sequence: Synthetic oligonucleotide
cucacaauacggaggcaga

SEQ ID NO: 1351001 - RNA, 19 nt, Artificial Sequence
  Description of Artificial Sequence: Synthetic oligonucleotide
cugacagcuugugugccag

SEQ ID NO: 1351002 - RNA, 19 nt, Artificial Sequence
  Description of Artificial Sequence: Synthetic oligonucleotide
cagcggguaucccagagca

SEQ ID NO: 1351003 - RNA, 19 nt, Artificial Sequence
  Description of Artificial Sequence: Synthetic oligonucleotide
gagaccacguagcaucucu

SEQ ID NO: 1351004 - RNA, 19 nt, Artificial Sequence
  Description of Artificial Sequence: Synthetic oligonucleotide
cucccacaauucaacagca

SEQ ID NO: 1351005 - RNA, 19 nt, Artificial Sequence
  Description of Artificial Sequence: Synthetic oligonucleotide
guuaaguggagaccacgua

SEQ ID NO: 1351006 - RNA, 19 nt, Artificial Sequence
  Description of Artificial Sequence: Synthetic oligonucleotide
aucagaccgguaccgugca

SEQ ID NO: 1351007 - RNA, 19 nt, Artificial Sequence
  Description of Artificial Sequence: Synthetic oligonucleotide
acugugguaaggagggagu

SEQ ID NO: 1351008 - RNA, 19 nt, Artificial Sequence
  Description of Artificial Sequence: Synthetic oligonucleotide
agugguggaaccacuccca

SEQ ID NO: 1351009 - RNA, 19 nt, Artificial Sequence
  Description of Artificial Sequence: Synthetic oligonucleotide
ucucugugggcucgacuuc

SEQ ID NO: 1351010 - RNA, 19 nt, Artificial Sequence
  Description of Artificial Sequence: Synthetic oligonucleotide
gugacaguagacacaaugu

SEQ ID NO: 1351011 - RNA, 19 nt, Artificial Sequence
  Description of Artificial Sequence: Synthetic oligonucleotide
cacacugggagugcacagc

SEQ ID NO: 1351012 - RNA, 19 nt, Artificial Sequence
  Description of Artificial Sequence: Synthetic oligonucleotide
cacgggacuagggaguaac

SEQ ID NO: 1351013 - RNA, 19 nt, Artificial Sequence
  Description of Artificial Sequence: Synthetic oligonucleotide
uuucccuccuagacacuau

SEQ ID NO: 1351014 - RNA, 19 nt, Artificial Sequence
  Description of Artificial Sequence: Synthetic oligonucleotide
agcagcgaccacucagacu

SEQ ID NO: 1351015 - RNA, 19 nt, Artificial Sequence
  Description of Artificial Sequence: Synthetic oligonucleotide
cccaagugaggucagcuac

SEQ ID NO: 1351016 - RNA, 19 nt, Artificial Sequence
  Description of Artificial Sequence: Synthetic oligonucleotide
ucccagccaacugugguaa

SEQ ID NO: 1351017 - RNA, 19 nt, Artificial Sequence
  Description of Artificial Sequence: Synthetic oligonucleotide
gcauucggauccuugaaaa

SEQ ID NO: 1351018 - RNA, 19 nt, Artificial Sequence
  Description of Artificial Sequence: Synthetic oligonucleotide
cagaagucuuugcuaccac

SEQ ID NO: 1351019 - RNA, 19 nt, Artificial Sequence
  Description of Artificial Sequence: Synthetic oligonucleotide
ucagaccgguaccgugcag

SEQ ID NO: 1351020 - RNA, 19 nt, Artificial Sequence
  Description of Artificial Sequence: Synthetic oligonucleotide
agucucugugggcucgacu

SEQ ID NO: 1351021 - RNA, 19 nt, Artificial Sequence
  Description of Artificial Sequence: Synthetic oligonucleotide
caacugccguuccaugcag

SEQ ID NO: 1351022 - RNA, 19 nt, Artificial Sequence
  Description of Artificial Sequence: Synthetic oligonucleotide
caccugagucagaagccac

SEQ ID NO: 1351023 - RNA, 19 nt, Artificial Sequence
  Description of Artificial Sequence: Synthetic oligonucleotide
cuugugugccagagcucag

SEQ ID NO: 1351024 - RNA, 19 nt, Artificial Sequence
  Description of Artificial Sequence: Synthetic oligonucleotide
gggcucgacuucuaaacac

SEQ ID NO: 1351025 - RNA, 19 nt, Artificial Sequence
  Description of Artificial Sequence: Synthetic oligonucleotide
cugugguaaggagggagug

SEQ ID NO: 1351026 - RNA, 19 nt, Artificial Sequence
  Description of Artificial Sequence: Synthetic oligonucleotide
ccuguuuauugcacgggac

SEQ ID NO: 1351027 - RNA, 19 nt, Artificial Sequence
  Description of Artificial Sequence: Synthetic oligonucleotide
ccggcuucggucuggacgc

SEQ ID NO: 1351028 - RNA, 19 nt, Artificial Sequence
  Description of Artificial Sequence: Synthetic oligonucleotide
uggacgcccgcagagcaga

SEQ ID NO: 1351029 - RNA, 19 nt, Artificial Sequence
  Description of Artificial Sequence: Synthetic oligonucleotide
cacucagacuggaggcccc

SEQ ID NO: 1351030 - RNA, 19 nt, Artificial Sequence
  Description of Artificial Sequence: Synthetic oligonucleotide
gcugacaauaagugucuca

SEQ ID NO: 1351031 - RNA, 19 nt, Artificial Sequence
  Description of Artificial Sequence: Synthetic oligonucleotide
aggcuugaauccagcacag

SEQ ID NO: 1351032 - RNA, 19 nt, Artificial Sequence
  Description of Artificial Sequence: Synthetic oligonucleotide
aucucucacgaagucucug

SEQ ID NO: 1351033 - RNA, 19 nt, Artificial Sequence
  Description of Artificial Sequence: Synthetic oligonucleotide
aaccacucccacaaaucua

SEQ ID NO: 1351034 - RNA, 19 nt, Artificial Sequence
  Description of Artificial Sequence: Synthetic oligonucleotide
agaccacguagcaucucuc

SEQ ID NO: 1351035 - RNA, 19 nt, Artificial Sequence
  Description of Artificial Sequence: Synthetic oligonucleotide
agcucgauaugaauucaau

SEQ ID NO: 1351036 - RNA, 19 nt, Artificial Sequence
  Description of Artificial Sequence: Synthetic oligonucleotide
agggauacucacauuccau

SEQ ID NO: 1351037 - RNA, 19 nt, Artificial Sequence
  Description of Artificial Sequence: Synthetic oligonucleotide
ucucacuuugugggaaaua

SEQ ID NO: 1351038 - RNA, 19 nt, Artificial Sequence
  Description of Artificial Sequence: Synthetic oligonucleotide
uuaggacagcggguauccc

SEQ ID NO: 1351039 - RNA, 19 nt, Artificial Sequence
  Description of Artificial Sequence: Synthetic oligonucleotide
gggcacaacaugguggaug

SEQ ID NO: 1351040 - RNA, 19 nt, Artificial Sequence
  Description of Artificial Sequence: Synthetic oligonucleotide
ggugaccuguccugaauga

SEQ ID NO: 1351041 - RNA, 19 nt, Artificial Sequence
  Description of Artificial Sequence: Synthetic oligonucleotide
cugcuugcauucuuggugu

SEQ ID NO: 1351042 - RNA, 19 nt, Artificial Sequence
  Description of Artificial Sequence: Synthetic oligonucleotide
cuaccacugacagcuugug

SEQ ID NO: 1351043 - RNA, 19 nt, Artificial Sequence
  Description of Artificial Sequence: Synthetic oligonucleotide
cgauaugaauucaaugaca

SEQ ID NO: 1351044 - RNA, 19 nt, Artificial Sequence
  Description of Artificial Sequence: Synthetic oligonucleotide
gggauacucacauuccaua

SEQ ID NO: 1351045 - RNA, 19 nt, Artificial Sequence
  Description of Artificial Sequence: Synthetic oligonucleotide
ggaaccacucccacaaauc

SEQ ID NO: 1351046 - RNA, 19 nt, Artificial Sequence
  Description of Artificial Sequence: Synthetic oligonucleotide
gagaggcucaaugggcaca

SEQ ID NO: 1351047 - RNA, 19 nt, Artificial Sequence
  Description of Artificial Sequence: Synthetic oligonucleotide
cacaacaugguggaugacu

SEQ ID NO: 1351048 - RNA, 19 nt, Artificial Sequence
  Description of Artificial Sequence: Synthetic oligonucleotide
uugcauucuugguguccac

SEQ ID NO: 1351049 - RNA, 19 nt, Artificial Sequence
  Description of Artificial Sequence: Synthetic oligonucleotide
guggagagaauaccagccu

SEQ ID NO: 1351050 - RNA, 19 nt, Artificial Sequence
  Description of Artificial Sequence: Synthetic oligonucleotide
agaggcucaaugggcacaa

SEQ ID NO: 1351051 - RNA, 19 nt, Artificial Sequence
  Description of Artificial Sequence: Synthetic oligonucleotide
cuguucucacuuuguggga

SEQ ID NO: 1351052 - RNA, 19 nt, Artificial Sequence
  Description of Artificial Sequence: Synthetic oligonucleotide
accugagucagaagccacu

SEQ ID NO: 1351053 - RNA, 19 nt, Artificial Sequence
  Description of Artificial Sequence: Synthetic oligonucleotide
gagccggcccagcagcgac

SEQ ID NO: 1351054 - RNA, 19 nt, Artificial Sequence
  Description of Artificial Sequence: Synthetic oligonucleotide
cuacaaggcuccuuccugu

SEQ ID NO: 1351055 - RNA, 19 nt, Artificial Sequence
  Description of Artificial Sequence: Synthetic oligonucleotide
cccauuuauauaaggaagu

SEQ ID NO: 1351056 - RNA, 19 nt, Artificial Sequence
  Description of Artificial Sequence: Synthetic oligonucleotide
gcaauugagcagucuucac

SEQ ID NO: 1351057 - RNA, 19 nt, Artificial Sequence
  Description of Artificial Sequence: Synthetic oligonucleotide
agcuugugugccagagcuc

SEQ ID NO: 1351058 - RNA, 19 nt, Artificial Sequence
  Description of Artificial Sequence: Synthetic oligonucleotide
ugcugacaauaagugucuc

SEQ ID NO: 1351059 - RNA, 19 nt, Artificial Sequence
  Description of Artificial Sequence: Synthetic oligonucleotide
caccccaaacuacuuaaua

SEQ ID NO: 1351060 - RNA, 19 nt, Artificial Sequence
  Description of Artificial Sequence: Synthetic oligonucleotide
uaugggcugcagccucccu

SEQ ID NO: 1351061 - RNA, 19 nt, Artificial Sequence
  Description of Artificial Sequence: Synthetic oligonucleotide
gagcucgauaugaauucaa

SEQ ID NO: 1351062 - RNA, 19 nt, Artificial Sequence
  Description of Artificial Sequence: Synthetic oligonucleotide
ggauacucacauuccauau

SEQ ID NO: 1351063 - RNA, 19 nt, Artificial Sequence
  Description of Artificial Sequence: Synthetic oligonucleotide
cuaugggcugcagccuccc

SEQ ID NO: 1351064 - RNA, 19 nt, Artificial Sequence
  Description of Artificial Sequence: Synthetic oligonucleotide
ugcuugcauucuugguguc

SEQ ID NO: 1351065 - RNA, 19 nt, Artificial Sequence
  Description of Artificial Sequence: Synthetic oligonucleotide
ccugaaugagcucgauaug

SEQ ID NO: 1351066 - RNA, 19 nt, Artificial Sequence
  Description of Artificial Sequence: Synthetic oligonucleotide
uucggucuggacgcccgca

SEQ ID NO: 1351067 - RNA, 19 nt, Artificial Sequence
  Description of Artificial Sequence: Synthetic oligonucleotide
cacgaagucucugugggcu

SEQ ID NO: 1351068 - RNA, 19 nt, Artificial Sequence
  Description of Artificial Sequence: Synthetic oligonucleotide
cuucggucuggacgcccgc

SEQ ID NO: 1351069 - RNA, 19 nt, Artificial Sequence
  Description of Artificial Sequence: Synthetic oligonucleotide
cagccaacugugguaagga

SEQ ID NO: 1351070 - RNA, 19 nt, Artificial Sequence
  Description of Artificial Sequence: Synthetic oligonucleotide
ccaucagaccgguaccgug

SEQ ID NO: 1351071 - RNA, 19 nt, Artificial Sequence
  Description of Artificial Sequence: Synthetic oligonucleotide
accaucagaccgguaccgu

SEQ ID NO: 1351072 - RNA, 19 nt, Artificial Sequence
  Description of Artificial Sequence: Synthetic oligonucleotide
ggagaggcucaaugggcac

SEQ ID NO: 1351073 - RNA, 19 nt, Artificial Sequence
  Description of Artificial Sequence: Synthetic oligonucleotide
gcuugcauucuuggugucc

SEQ ID NO: 1351074 - RNA, 19 nt, Artificial Sequence
  Description of Artificial Sequence: Synthetic oligonucleotide
gaagccacuaggauaccuu

SEQ ID NO: 1351075 - RNA, 19 nt, Artificial Sequence
  Description of Artificial Sequence: Synthetic oligonucleotide
ugcacgggacuagggagua

SEQ ID NO: 1351076 - RNA, 19 nt, Artificial Sequence
  Description of Artificial Sequence: Synthetic oligonucleotide
gcuacuccggcuucggucu

SEQ ID NO: 1351077 - RNA, 19 nt, Artificial Sequence
  Description of Artificial Sequence: Synthetic oligonucleotide
agggaaccaucagaccggu

SEQ ID NO: 1351078 - RNA, 19 nt, Artificial Sequence
  Description of Artificial Sequence: Synthetic oligonucleotide
gacgcccgcagagcagaag

SEQ ID NO: 1351079 - RNA, 19 nt, Artificial Sequence
  Description of Artificial Sequence: Synthetic oligonucleotide
gugguuaaguggagaccac

SEQ ID NO: 1351080 - RNA, 19 nt, Artificial Sequence
  Description of Artificial Sequence: Synthetic oligonucleotide
cgacuucuaaacaccucag

SEQ ID NO: 1351081 - RNA, 19 nt, Artificial Sequence
  Description of Artificial Sequence: Synthetic oligonucleotide
gucuggacgcccgcagagc

SEQ ID NO: 1351082 - RNA, 19 nt, Artificial Sequence
  Description of Artificial Sequence: Synthetic oligonucleotide
gguuaaguggagaccacgu

SEQ ID NO: 1351083 - RNA, 19 nt, Artificial Sequence
  Description of Artificial Sequence: Synthetic oligonucleotide
cagcgaccacucagacugg

SEQ ID NO: 1351084 - RNA, 19 nt, Artificial Sequence
  Description of Artificial Sequence: Synthetic oligonucleotide
guuccacucgcgggccgcg

SEQ ID NO: 1351085 - RNA, 19 nt, Artificial Sequence
  Description of Artificial Sequence: Synthetic oligonucleotide
guccugaaugagcucgaua

SEQ ID NO: 1351086 - RNA, 19 nt, Artificial Sequence
  Description of Artificial Sequence: Synthetic oligonucleotide
gcuucggucuggacgcccg

SEQ ID NO: 1351087 - RNA, 19 nt, Artificial Sequence
  Description of Artificial Sequence: Synthetic oligonucleotide
cuggcuuaggacagcgggu

SEQ ID NO: 1351088 - RNA, 19 nt, Artificial Sequence
  Description of Artificial Sequence: Synthetic oligonucleotide
cccaaauuuugaugcagaa

SEQ ID NO: 1351089 - RNA, 19 nt, Artificial Sequence
  Description of Artificial Sequence: Synthetic oligonucleotide
gcaggcgggugcauugggg

SEQ ID NO: 1351090 - RNA, 19 nt, Artificial Sequence
  Description of Artificial Sequence: Synthetic oligonucleotide
gguauacugugcuggacuu

SEQ ID NO: 1351091 - RNA, 19 nt, Artificial Sequence
  Description of Artificial Sequence: Synthetic oligonucleotide
ggcggcaccaguggggcug

SEQ ID NO: 1351092 - RNA, 19 nt, Artificial Sequence
  Description of Artificial Sequence: Synthetic oligonucleotide
gcggguaucccagagcaaa

SEQ ID NO: 1351093 - RNA, 19 nt, Artificial Sequence
  Description of Artificial Sequence: Synthetic oligonucleotide
ccccaucucugaguggugg

SEQ ID NO: 1351094 - RNA, 19 nt, Artificial Sequence
  Description of Artificial Sequence: Synthetic oligonucleotide
ccacucccacaaaucuagg

SEQ ID NO: 1351095 - RNA, 19 nt, Artificial Sequence
  Description of Artificial Sequence: Synthetic oligonucleotide
cagccuccaacugccguuc

SEQ ID NO: 1351096 - RNA, 19 nt, Artificial Sequence
  Description of Artificial Sequence: Synthetic oligonucleotide
gacuagggaguaacaugcu

SEQ ID NO: 1351097 - RNA, 19 nt, Artificial Sequence
  Description of Artificial Sequence: Synthetic oligonucleotide
acgggacuagggaguaaca

SEQ ID NO: 1351098 - RNA, 19 nt, Artificial Sequence
  Description of Artificial Sequence: Synthetic oligonucleotide
cagaagccacuaggauacc

SEQ ID NO: 1351099 - RNA, 19 nt, Artificial Sequence
  Description of Artificial Sequence: Synthetic oligonucleotide
gggagugguuaaguggaga

SEQ ID NO: 1351100 - RNA, 19 nt, Artificial Sequence
  Description of Artificial Sequence: Synthetic oligonucleotide
caucuccacgauuccaaau

SEQ ID NO: 1351101 - RNA, 19 nt, Artificial Sequence
  Description of Artificial Sequence: Synthetic oligonucleotide
cuacuccggcuucggucug

SEQ ID NO: 1351102 - RNA, 19 nt, Artificial Sequence
  Description of Artificial Sequence: Synthetic oligonucleotide
ccuagacacuaugggcugc

SEQ ID NO: 1351103 - RNA, 19 nt, Artificial Sequence
  Description of Artificial Sequence: Synthetic oligonucleotide
acguagcaucucucacgaa

SEQ ID NO: 1351104 - RNA, 19 nt, Artificial Sequence
  Description of Artificial Sequence: Synthetic oligonucleotide
gguuccacucgcgggccgc

SEQ ID NO: 1351105 - RNA, 19 nt, Artificial Sequence
  Description of Artificial Sequence: Synthetic oligonucleotide
ggcuugaauccagcacagc

SEQ ID NO: 1351106 - RNA, 19 nt, Artificial Sequence
  Description of Artificial Sequence: Synthetic oligonucleotide
gcacuguguggagagaaua

SEQ ID NO: 1351107 - RNA, 19 nt, Artificial Sequence
  Description of Artificial Sequence: Synthetic oligonucleotide
cccgcaucuccacgauucc

SEQ ID NO: 1351108 - RNA, 19 nt, Artificial Sequence
  Description of Artificial Sequence: Synthetic oligonucleotide
cugugggcucgacuucuaa

SEQ ID NO: 1351109 - RNA, 19 nt, Artificial Sequence
  Description of Artificial Sequence: Synthetic oligonucleotide
cacccaagugaggucagcu

SEQ ID NO: 1351110 - RNA, 19 nt, Artificial Sequence
  Description of Artificial Sequence: Synthetic oligonucleotide
ugggcacaacaugguggau

SEQ ID NO: 1351111 - RNA, 19 nt, Artificial Sequence
  Description of Artificial Sequence: Synthetic oligonucleotide
ccccgagcagaagggaacc

SEQ ID NO: 1351112 - RNA, 19 nt, Artificial Sequence
  Description of Artificial Sequence: Synthetic oligonucleotide
cauucucaucuagcuccca

SEQ ID NO: 1351113 - RNA, 19 nt, Artificial Sequence
  Description of Artificial Sequence: Synthetic oligonucleotide
gaggcucaaugggcacaac

SEQ ID NO: 1351114 - RNA, 19 nt, Artificial Sequence
  Description of Artificial Sequence: Synthetic oligonucleotide
ggccgcauucggauccuug

SEQ ID NO: 1351115 - RNA, 19 nt, Artificial Sequence
  Description of Artificial Sequence: Synthetic oligonucleotide
ccgcagagcagaagccuuc

SEQ ID NO: 1351116 - RNA, 19 nt, Artificial Sequence
  Description of Artificial Sequence: Synthetic oligonucleotide
gccguuccaugcaggcggg

SEQ ID NO: 1351117 - RNA, 19 nt, Artificial Sequence
  Description of Artificial Sequence: Synthetic oligonucleotide
cucaucuagcucccacaau

SEQ ID NO: 1351118 - RNA, 19 nt, Artificial Sequence
  Description of Artificial Sequence: Synthetic oligonucleotide
gcuaccacugacagcuugu

SEQ ID NO: 1351119 - RNA, 19 nt, Artificial Sequence
  Description of Artificial Sequence: Synthetic oligonucleotide
accccaucucugaguggug

SEQ ID NO: 1351120 - RNA, 19 nt, Artificial Sequence
  Description of Artificial Sequence: Synthetic oligonucleotide
cccacccaagugaggucag

SEQ ID NO: 1351121 - RNA, 19 nt, Artificial Sequence
  Description of Artificial Sequence: Synthetic oligonucleotide
ggacugaaguauuccccau

SEQ ID NO: 1351122 - RNA, 19 nt, Artificial Sequence
  Description of Artificial Sequence: Synthetic oligonucleotide
cacagcaauugagcagucu

SEQ ID NO: 1351123 - RNA, 19 nt, Artificial Sequence
  Description of Artificial Sequence: Synthetic oligonucleotide
cuccggcuucggucuggac

SEQ ID NO: 1351124 - RNA, 19 nt, Artificial Sequence
  Description of Artificial Sequence: Synthetic oligonucleotide
ccaagugaggucagcuacu

SEQ ID NO: 1351125 - RNA, 19 nt, Artificial Sequence
  Description of Artificial Sequence: Synthetic oligonucleotide
cguuccaugcaggcgggug

SEQ ID NO: 1351126 - RNA, 19 nt, Artificial Sequence
  Description of Artificial Sequence: Synthetic oligonucleotide
agcggguaucccagagcaa

SEQ ID NO: 1351127 - RNA, 19 nt, Artificial Sequence
  Description of Artificial Sequence: Synthetic oligonucleotide
gcaacacaggugaccuguc

SEQ ID NO: 1351128 - RNA, 19 nt, Artificial Sequence
  Description of Artificial Sequence: Synthetic oligonucleotide
cgcauucggauccuugaaa

SEQ ID NO: 1351129 - RNA, 19 nt, Artificial Sequence
  Description of Artificial Sequence: Synthetic oligonucleotide
ggacagcggguaucccaga

SEQ ID NO: 1351130 - RNA, 19 nt, Artificial Sequence
  Description of Artificial Sequence: Synthetic oligonucleotide
ggagaccacguagcaucuc

SEQ ID NO: 1351131 - RNA, 19 nt, Artificial Sequence
  Description of Artificial Sequence: Synthetic oligonucleotide
ccgguaccgugcagccucc

SEQ ID NO: 1351132 - RNA, 19 nt, Artificial Sequence
  Description of Artificial Sequence: Synthetic oligonucleotide
ccacccaagugaggucagc

SEQ ID NO: 1351133 - RNA, 19 nt, Artificial Sequence
  Description of Artificial Sequence: Synthetic oligonucleotide
caugcucuacaaggcuccu

SEQ ID NO: 1351134 - RNA, 19 nt, Artificial Sequence
  Description of Artificial Sequence: Synthetic oligonucleotide
gaccgguaccgugcagccu

SEQ ID NO: 1351135 - RNA, 19 nt, Artificial Sequence
  Description of Artificial Sequence: Synthetic oligonucleotide
ccgcauucggauccuugaa

SEQ ID NO: 1351136 - RNA, 19 nt, Artificial Sequence
  Description of Artificial Sequence: Synthetic oligonucleotide
cccgagcagaagggaacca

SEQ ID NO: 1351137 - RNA, 19 nt, Artificial Sequence
  Description of Artificial Sequence: Synthetic oligonucleotide
ccgagcagaagggaaccau

SEQ ID NO: 1351138 - RNA, 19 nt, Artificial Sequence
  Description of Artificial Sequence: Synthetic oligonucleotide
cgggacuagggaguaacau

SEQ ID NO: 1351139 - RNA, 19 nt, Artificial Sequence
  Description of Artificial Sequence: Synthetic oligonucleotide
gggaaccaucagaccggua

SEQ ID NO: 1351140 - RNA, 19 nt, Artificial Sequence
  Description of Artificial Sequence: Synthetic oligonucleotide
gcacgggacuagggaguaa

SEQ ID NO: 1351141 - RNA, 19 nt, Artificial Sequence
  Description of Artificial Sequence: Synthetic oligonucleotide
ggacgcccgcagagcagaa

SEQ ID NO: 1351142 - RNA, 19 nt, Artificial Sequence
  Description of Artificial Sequence: Synthetic oligonucleotide
ggggccgcauucggauccu

SEQ ID NO: 1351143 - RNA, 19 nt, Artificial Sequence
  Description of Artificial Sequence: Synthetic oligonucleotide
ccggcccagcagcgaccac

SEQ ID NO: 1351144 - RNA, 19 nt, Artificial Sequence
  Description of Artificial Sequence: Synthetic oligonucleotide
cgguaccgugcagccucca

SEQ ID NO: 1351145 - RNA, 19 nt, Artificial Sequence
  Description of Artificial Sequence: Synthetic oligonucleotide
ccguuccaugcaggcgggu

SEQ ID NO: 1351146 - RNA, 19 nt, Artificial Sequence
  Description of Artificial Sequence: Synthetic oligonucleotide
gggccgcauucggauccuu

SEQ ID NO: 1351147 - RNA, 19 nt, Artificial Sequence
  Description of Artificial Sequence: Synthetic oligonucleotide
uguacgauaaucaagaacc

SEQ ID NO: 1351148 - RNA, 19 nt, Artificial Sequence
  Description of Artificial Sequence: Synthetic oligonucleotide
uuuugcgucacccacaugc

SEQ ID NO: 1351149 - RNA, 19 nt, Artificial Sequence
  Description of Artificial Sequence: Synthetic oligonucleotide
auucuuaagauucaaaugu

SEQ ID NO: 1351150 - RNA, 19 nt, Artificial Sequence
  Description of Artificial Sequence: Synthetic oligonucleotide
aagauaguuaacgagcccc

SEQ ID NO: 1351151 - RNA, 19 nt, Artificial Sequence
  Description of Artificial Sequence: Synthetic oligonucleotide
acaguaagcuccuagcucc

SEQ ID NO: 1351152 - RNA, 19 nt, Artificial Sequence
  Description of Artificial Sequence: Synthetic oligonucleotide
aaugguuucggacugugag

SEQ ID NO: 1351153 - RNA, 19 nt, Artificial Sequence
  Description of Artificial Sequence: Synthetic oligonucleotide
ucuuaagauucaaaugugg

SEQ ID NO: 1351154 - RNA, 19 nt, Artificial Sequence
  Description of Artificial Sequence: Synthetic oligonucleotide
ucuagaaaguuuaugacuc

SEQ ID NO: 1351155 - RNA, 19 nt, Artificial Sequence
  Description of Artificial Sequence: Synthetic oligonucleotide
auaaucaagaaccaaggca

SEQ ID NO: 1351156 - RNA, 19 nt, Artificial Sequence
  Description of Artificial Sequence: Synthetic oligonucleotide
caugauuuggccuuuugcg

SEQ ID NO: 1351157 - RNA, 19 nt, Artificial Sequence
  Description of Artificial Sequence: Synthetic oligonucleotide
ucuugcagaaggaagcugg

SEQ ID NO: 1351158 - RNA, 19 nt, Artificial Sequence
  Description of Artificial Sequence: Synthetic oligonucleotide
uuuauuguaaugguuucgg

SEQ ID NO: 1351159 - RNA, 19 nt, Artificial Sequence
  Description of Artificial Sequence: Synthetic oligonucleotide
uguggucaagauuucaugg

SEQ ID NO: 1351160 - RNA, 19 nt, Artificial Sequence
  Description of Artificial Sequence: Synthetic oligonucleotide
ugcgucaucuugcagaagg

SEQ ID NO: 1351161 - RNA, 19 nt, Artificial Sequence
  Description of Artificial Sequence: Synthetic oligonucleotide
aaguuuaugacucauucuu

SEQ ID NO: 1351162 - RNA, 19 nt, Artificial Sequence
  Description of Artificial Sequence: Synthetic oligonucleotide
uuaugacucauucuuaaga

SEQ ID NO: 1351163 - RNA, 19 nt, Artificial Sequence
  Description of Artificial Sequence: Synthetic oligonucleotide
aaccagaagauaguuaacg

SEQ ID NO: 1351164 - RNA, 19 nt, Artificial Sequence
  Description of Artificial Sequence: Synthetic oligonucleotide
uuugugucacccaugagca

SEQ ID NO: 1351165 - RNA, 19 nt, Artificial Sequence
  Description of Artificial Sequence: Synthetic oligonucleotide
gaaaguuuaugacucauuc

SEQ ID NO: 1351166 - RNA, 19 nt, Artificial Sequence
  Description of Artificial Sequence: Synthetic oligonucleotide
ucaucuugcagaaggaagc

SEQ ID NO: 1351167 - RNA, 19 nt, Artificial Sequence
  Description of Artificial Sequence: Synthetic oligonucleotide
acgaacucaaaccagaaga

SEQ ID NO: 1351168 - RNA, 19 nt, Artificial Sequence
  Description of Artificial Sequence: Synthetic oligonucleotide
ugacucauucuuaagauuc

SEQ ID NO: 1351169 - RNA, 19 nt, Artificial Sequence
  Description of Artificial Sequence: Synthetic oligonucleotide
uauuguaaugguuucggac

SEQ ID NO: 1351170 - RNA, 19 nt, Artificial Sequence
  Description of Artificial Sequence: Synthetic oligonucleotide
uaguuaacgagccccagcc

SEQ ID NO: 1351171 - RNA, 19 nt, Artificial Sequence
  Description of Artificial Sequence: Synthetic oligonucleotide
uauuucaggaagucagggg

SEQ ID NO: 1351172 - RNA, 19 nt, Artificial Sequence
  Description of Artificial Sequence: Synthetic oligonucleotide
uggucaagauuucaugggg

SEQ ID NO: 1351173 - RNA, 19 nt, Artificial Sequence
  Description of Artificial Sequence: Synthetic oligonucleotide
uaagauucaaaugugguau

SEQ ID NO: 1351174 - RNA, 19 nt, Artificial Sequence
  Description of Artificial Sequence: Synthetic oligonucleotide
agggaucuggcacugaaac

SEQ ID NO: 1351175 - RNA, 19 nt, Artificial Sequence
  Description of Artificial Sequence: Synthetic oligonucleotide
uuaacucagccuuuucagg

SEQ ID NO: 1351176 - RNA, 19 nt, Artificial Sequence
  Description of Artificial Sequence: Synthetic oligonucleotide
cauucuuaagauucaaaug

SEQ ID NO: 1351177 - RNA, 19 nt, Artificial Sequence
  Description of Artificial Sequence: Synthetic oligonucleotide
auaguuaacgagccccagc

SEQ ID NO: 1351178 - RNA, 19 nt, Artificial Sequence
  Description of Artificial Sequence: Synthetic oligonucleotide
gauuucauggggcugcuug

SEQ ID NO: 1351179 - RNA, 19 nt, Artificial Sequence
  Description of Artificial Sequence: Synthetic oligonucleotide
uguagauugccuucucuag

SEQ ID NO: 1351180 - RNA, 19 nt, Artificial Sequence
  Description of Artificial Sequence: Synthetic oligonucleotide
aaccaaggcacuugaggac

SEQ ID NO: 1351181 - RNA, 19 nt, Artificial Sequence
  Description of Artificial Sequence: Synthetic oligonucleotide
uucaaaugugguaugaguu

SEQ ID NO: 1351182 - RNA, 19 nt, Artificial Sequence
  Description of Artificial Sequence: Synthetic oligonucleotide
aagacgugugcacugcauc

SEQ ID NO: 1351183 - RNA, 19 nt, Artificial Sequence
  Description of Artificial Sequence: Synthetic oligonucleotide
aagaccaugucuaaugugu

SEQ ID NO: 1351184 - RNA, 19 nt, Artificial Sequence
  Description of Artificial Sequence: Synthetic oligonucleotide
uuuaugacucauucuuaag

SEQ ID NO: 1351185 - RNA, 19 nt, Artificial Sequence
  Description of Artificial Sequence: Synthetic oligonucleotide
uuaagauucaaauguggua

SEQ ID NO: 1351186 - RNA, 19 nt, Artificial Sequence
  Description of Artificial Sequence: Synthetic oligonucleotide
auuaaagacgugugcacug

SEQ ID NO: 1351187 - RNA, 19 nt, Artificial Sequence
  Description of Artificial Sequence: Synthetic oligonucleotide
acuguauccaugauuuggc

SEQ ID NO: 1351188 - RNA, 19 nt, Artificial Sequence
  Description of Artificial Sequence: Synthetic oligonucleotide
agcagugcuaggcaggcac

SEQ ID NO: 1351189 - RNA, 19 nt, Artificial Sequence
  Description of Artificial Sequence: Synthetic oligonucleotide
ugcgcaacaggccacauuc

SEQ ID NO: 1351190 - RNA, 19 nt, Artificial Sequence
  Description of Artificial Sequence: Synthetic oligonucleotide
ugugucacccaugagcagg

SEQ ID NO: 1351191 - RNA, 19 nt, Artificial Sequence
  Description of Artificial Sequence: Synthetic oligonucleotide
auucaaaugugguaugagu

SEQ ID NO: 1351192 - RNA, 19 nt, Artificial Sequence
  Description of Artificial Sequence: Synthetic oligonucleotide
ugaguugcugggaacagga

SEQ ID NO: 1351193 - RNA, 19 nt, Artificial Sequence
  Description of Artificial Sequence: Synthetic oligonucleotide
cuccaguacgcucugaggg

SEQ ID NO: 1351194 - RNA, 19 nt, Artificial Sequence
  Description of Artificial Sequence: Synthetic oligonucleotide
uuucaggugcuuuucaggu

SEQ ID NO: 1351195 - RNA, 19 nt, Artificial Sequence
  Description of Artificial Sequence: Synthetic oligonucleotide
ugcugcacgaacucaaacc

SEQ ID NO: 1351196 - RNA, 19 nt, Artificial Sequence
  Description of Artificial Sequence: Synthetic oligonucleotide
augaauguuagugugccag

SEQ ID NO: 1351197 - RNA, 19 nt, Artificial Sequence
  Description of Artificial Sequence: Synthetic oligonucleotide
augguuucggacugugagc

SEQ ID NO: 1351198 - RNA, 19 nt, Artificial Sequence
  Description of Artificial Sequence: Synthetic oligonucleotide
ugaguagccacaguaagcu

SEQ ID NO: 1351199 - RNA, 19 nt, Artificial Sequence
  Description of Artificial Sequence: Synthetic oligonucleotide
aauucccugacuucucacu

SEQ ID NO: 1351200 - RNA, 19 nt, Artificial Sequence
  Description of Artificial Sequence: Synthetic oligonucleotide
uagauugccuucucuaggc

SEQ ID NO: 1351201 - RNA, 19 nt, Artificial Sequence
  Description of Artificial Sequence: Synthetic oligonucleotide
acgauaaucaagaaccaag

SEQ ID NO: 1351202 - RNA, 19 nt, Artificial Sequence
  Description of Artificial Sequence: Synthetic oligonucleotide
guagauugccuucucuagg

SEQ ID NO: 1351203 - RNA, 19 nt, Artificial Sequence
  Description of Artificial Sequence: Synthetic oligonucleotide
guuagugugccaguguacg

SEQ ID NO: 1351204 - RNA, 19 nt, Artificial Sequence
  Description of Artificial Sequence: Synthetic oligonucleotide
uaucgcaggagcaggaaga

SEQ ID NO: 1351205 - RNA, 19 nt, Artificial Sequence
  Description of Artificial Sequence: Synthetic oligonucleotide
uguauuccaggugugagcu

SEQ ID NO: 1351206 - RNA, 19 nt, Artificial Sequence
  Description of Artificial Sequence: Synthetic oligonucleotide
ugagugugcgucaucuugc

SEQ ID NO: 1351207 - RNA, 19 nt, Artificial Sequence
  Description of Artificial Sequence: Synthetic oligonucleotide
aagagggccagcaacagca

SEQ ID NO: 1351208 - RNA, 19 nt, Artificial Sequence
  Description of Artificial Sequence: Synthetic oligonucleotide
uaacucagccuuuucaggu

SEQ ID NO: 1351209 - RNA, 19 nt, Artificial Sequence
  Description of Artificial Sequence: Synthetic oligonucleotide
ugcuuuucagguuuauugu

SEQ ID NO: 1351210 - RNA, 19 nt, Artificial Sequence
  Description of Artificial Sequence: Synthetic oligonucleotide
guggucaagauuucauggg

SEQ ID NO: 1351211 - RNA, 19 nt, Artificial Sequence
  Description of Artificial Sequence: Synthetic oligonucleotide
ucacgaaucacuguaucca

SEQ ID NO: 1351212 - RNA, 19 nt, Artificial Sequence
  Description of Artificial Sequence: Synthetic oligonucleotide
ugcacgaacucaaaccaga

SEQ ID NO: 1351213 - RNA, 19 nt, Artificial Sequence
  Description of Artificial Sequence: Synthetic oligonucleotide
ugaggaguaggugucaaug

SEQ ID NO: 1351214 - RNA, 19 nt, Artificial Sequence
  Description of Artificial Sequence: Synthetic oligonucleotide
auaaauauucugcuuccau

SEQ ID NO: 1351215 - RNA, 19 nt, Artificial Sequence
  Description of Artificial Sequence: Synthetic oligonucleotide
caguguacgauaaucaaga

SEQ ID NO: 1351216 - RNA, 19 nt, Artificial Sequence
  Description of Artificial Sequence: Synthetic oligonucleotide
gacccaaugagauggcagc

SEQ ID NO: 1351217 - RNA, 19 nt, Artificial Sequence
  Description of Artificial Sequence: Synthetic oligonucleotide
cucacgaaucacuguaucc

SEQ ID NO: 1351218 - RNA, 19 nt, Artificial Sequence
  Description of Artificial Sequence: Synthetic oligonucleotide
cuuggacccuuguagauug

SEQ ID NO: 1351219 - RNA, 19 nt, Artificial Sequence
  Description of Artificial Sequence: Synthetic oligonucleotide
ugccaguguacgauaauca

SEQ ID NO: 1351220 - RNA, 19 nt, Artificial Sequence
  Description of Artificial Sequence: Synthetic oligonucleotide
uaagcuccuagcuccagca

SEQ ID NO: 1351221 - RNA, 19 nt, Artificial Sequence
  Description of Artificial Sequence: Synthetic oligonucleotide
ucuaauguguccacaucau

SEQ ID NO: 1351222 - RNA, 19 nt, Artificial Sequence
  Description of Artificial Sequence: Synthetic oligonucleotide
aguuaacgagccccagccc

SEQ ID NO: 1351223 - RNA, 19 nt, Artificial Sequence
  Description of Artificial Sequence: Synthetic oligonucleotide
augauuuggccuuuugcgu

SEQ ID NO: 1351224 - RNA, 19 nt, Artificial Sequence
  Description of Artificial Sequence: Synthetic oligonucleotide
gaagauaguuaacgagccc

SEQ ID NO: 1351225 - RNA, 19 nt, Artificial Sequence
  Description of Artificial Sequence: Synthetic oligonucleotide
acucacgaaucacuguauc

SEQ ID NO: 1351226 - RNA, 19 nt, Artificial Sequence
  Description of Artificial Sequence: Synthetic oligonucleotide
caguggucaagaaagacca

SEQ ID NO: 1351227 - RNA, 19 nt, Artificial Sequence
  Description of Artificial Sequence: Synthetic oligonucleotide
aaugugguaugaguugcug

SEQ ID NO: 1351228 - RNA, 19 nt, Artificial Sequence
  Description of Artificial Sequence: Synthetic oligonucleotide
caagauuucauggggcugc

SEQ ID NO: 1351229 - RNA, 19 nt, Artificial Sequence
  Description of Artificial Sequence: Synthetic oligonucleotide
uuauuguaaugguuucgga

SEQ ID NO: 1351230 - RNA, 19 nt, Artificial Sequence
  Description of Artificial Sequence: Synthetic oligonucleotide
ugcgucacccacaugcaug

SEQ ID NO: 1351231 - RNA, 19 nt, Artificial Sequence
  Description of Artificial Sequence: Synthetic oligonucleotide
auacucacgaaucacugua

SEQ ID NO: 1351232 - RNA, 19 nt, Artificial Sequence
  Description of Artificial Sequence: Synthetic oligonucleotide
ucagcauuugcugagugau

SEQ ID NO: 1351233 - RNA, 19 nt, Artificial Sequence
  Description of Artificial Sequence: Synthetic oligonucleotide
ugcaucuagaaaguuuaug

SEQ ID NO: 1351234 - RNA, 19 nt, Artificial Sequence
  Description of Artificial Sequence: Synthetic oligonucleotide
uuaacgagccccagcccag

SEQ ID NO: 1351235 - RNA, 19 nt, Artificial Sequence
  Description of Artificial Sequence: Synthetic oligonucleotide
uuacugggaauugaacuug

SEQ ID NO: 1351236 - RNA, 19 nt, Artificial Sequence
  Description of Artificial Sequence: Synthetic oligonucleotide
acgugugucuggcagguag

SEQ ID NO: 1351237 - RNA, 19 nt, Artificial Sequence
  Description of Artificial Sequence: Synthetic oligonucleotide
cagguuguagacuggcugc

SEQ ID NO: 1351238 - RNA, 19 nt, Artificial Sequence
  Description of Artificial Sequence: Synthetic oligonucleotide
ucaggugcuuuucagguuu

SEQ ID NO: 1351239 - RNA, 19 nt, Artificial Sequence
  Description of Artificial Sequence: Synthetic oligonucleotide
guguacgauaaucaagaac

SEQ ID NO: 1351240 - RNA, 19 nt, Artificial Sequence
  Description of Artificial Sequence: Synthetic oligonucleotide
uccauguauauaucugcac

SEQ ID NO: 1351241 - RNA, 19 nt, Artificial Sequence
  Description of Artificial Sequence: Synthetic oligonucleotide
uuguagauugccuucucua

SEQ ID NO: 1351242 - RNA, 19 nt, Artificial Sequence
  Description of Artificial Sequence: Synthetic oligonucleotide
uuaaagacgugugcacugc

SEQ ID NO: 1351243 - RNA, 19 nt, Artificial Sequence
  Description of Artificial Sequence: Synthetic oligonucleotide
gaccaugucuaaugugucc

SEQ ID NO: 1351244 - RNA, 19 nt, Artificial Sequence
  Description of Artificial Sequence: Synthetic oligonucleotide
cugagugauggcagcauag

SEQ ID NO: 1351245 - RNA, 19 nt, Artificial Sequence
  Description of Artificial Sequence: Synthetic oligonucleotide
guagcggucuuuccagugg

SEQ ID NO: 1351246 - RNA, 19 nt, Artificial Sequence
  Description of Artificial Sequence: Synthetic oligonucleotide
gaugacagugccuagggau

SEQ ID NO: 1351247 - RNA, 19 nt, Artificial Sequence
  Description of Artificial Sequence: Synthetic oligonucleotide
guuaacgagccccagccca

SEQ ID NO: 1351248 - RNA, 19 nt, Artificial Sequence
  Description of Artificial Sequence: Synthetic oligonucleotide
uguuagugugccaguguac

SEQ ID NO: 1351249 - RNA, 19 nt, Artificial Sequence
  Description of Artificial Sequence: Synthetic oligonucleotide
ugugagcccaugaauguua

SEQ ID NO: 1351250 - RNA, 19 nt, Artificial Sequence
  Description of Artificial Sequence: Synthetic oligonucleotide
gagacgugugucuggcagg

SEQ ID NO: 1351251 - RNA, 19 nt, Artificial Sequence
  Description of Artificial Sequence: Synthetic oligonucleotide
aagcuccuagcuccagcac

SEQ ID NO: 1351252 - RNA, 19 nt, Artificial Sequence
  Description of Artificial Sequence: Synthetic oligonucleotide
cauuuggugacagccaaac

SEQ ID NO: 1351253 - RNA, 19 nt, Artificial Sequence
  Description of Artificial Sequence: Synthetic oligonucleotide
cugccauuuggugacagcc

SEQ ID NO: 1351254 - RNA, 19 nt, Artificial Sequence
  Description of Artificial Sequence: Synthetic oligonucleotide
cuuaagauucaaauguggu

SEQ ID NO: 1351255 - RNA, 19 nt, Artificial Sequence
  Description of Artificial Sequence: Synthetic oligonucleotide
uuugcgucacccacaugca

SEQ ID NO: 1351256 - RNA, 19 nt, Artificial Sequence
  Description of Artificial Sequence: Synthetic oligonucleotide
cauguauuccaggugugag

SEQ ID NO: 1351257 - RNA, 19 nt, Artificial Sequence
  Description of Artificial Sequence: Synthetic oligonucleotide
ugugcgucaucuugcagaa

SEQ ID NO: 1351258 - RNA, 19 nt, Artificial Sequence
  Description of Artificial Sequence: Synthetic oligonucleotide
cgauaaucaagaaccaagg

SEQ ID NO: 1351259 - RNA, 19 nt, Artificial Sequence
  Description of Artificial Sequence: Synthetic oligonucleotide
ugucuaauguguccacauc

SEQ ID NO: 1351260 - RNA, 19 nt, Artificial Sequence
  Description of Artificial Sequence: Synthetic oligonucleotide
ucaagauuucauggggcug

SEQ ID NO: 1351261 - RNA, 19 nt, Artificial Sequence
  Description of Artificial Sequence: Synthetic oligonucleotide
uaugaguugcugggaacag

SEQ ID NO: 1351262 - RNA, 19 nt, Artificial Sequence
  Description of Artificial Sequence: Synthetic oligonucleotide
ugguaugaguugcugggaa

SEQ ID NO: 1351263 - RNA, 19 nt, Artificial Sequence
  Description of Artificial Sequence: Synthetic oligonucleotide
uaaagacgugugcacugca

SEQ ID NO: 1351264 - RNA, 19 nt, Artificial Sequence
  Description of Artificial Sequence: Synthetic oligonucleotide
agacgugugcacugcaucu

SEQ ID NO: 1351265 - RNA, 19 nt, Artificial Sequence
  Description of Artificial Sequence: Synthetic oligonucleotide
uccauguauuccaggugug

SEQ ID NO: 1351266 - RNA, 19 nt, Artificial Sequence
  Description of Artificial Sequence: Synthetic oligonucleotide
ugagcuguagugugugcac

SEQ ID NO: 1351267 - RNA, 19 nt, Artificial Sequence
  Description of Artificial Sequence: Synthetic oligonucleotide
ccucacauauuucaggaag

SEQ ID NO: 1351268 - RNA, 19 nt, Artificial Sequence
  Description of Artificial Sequence: Synthetic oligonucleotide
agcccaugaauguuagugu

SEQ ID NO: 1351269 - RNA, 19 nt, Artificial Sequence
  Description of Artificial Sequence: Synthetic oligonucleotide
uguccccuugcgcaacagg

SEQ ID NO: 1351270 - RNA, 19 nt, Artificial Sequence
  Description of Artificial Sequence: Synthetic oligonucleotide
gugugcgucaucuugcaga

SEQ ID NO: 1351271 - RNA, 19 nt, Artificial Sequence
  Description of Artificial Sequence: Synthetic oligonucleotide
ccaguggucaagaaagacc

SEQ ID NO: 1351272 - RNA, 19 nt, Artificial Sequence
  Description of Artificial Sequence: Synthetic oligonucleotide
aguaggugucaauggccuc

SEQ ID NO: 1351273 - RNA, 19 nt, Artificial Sequence
  Description of Artificial Sequence: Synthetic oligonucleotide
guaggugucaauggccucc

SEQ ID NO: 1351274 - RNA, 19 nt, Artificial Sequence
  Description of Artificial Sequence: Synthetic oligonucleotide
cauugcugccauuugguga

SEQ ID NO: 1351275 - RNA, 19 nt, Artificial Sequence
  Description of Artificial Sequence: Synthetic oligonucleotide
gucagcaugagugugcguc

SEQ ID NO: 1351276 - RNA, 19 nt, Artificial Sequence
  Description of Artificial Sequence: Synthetic oligonucleotide
gauaguuaacgagccccag

SEQ ID NO: 1351277 - RNA, 19 nt, Artificial Sequence
  Description of Artificial Sequence: Synthetic oligonucleotide
uuagugugccaguguacga

SEQ ID NO: 1351278 - RNA, 19 nt, Artificial Sequence
  Description of Artificial Sequence: Synthetic oligonucleotide
cagguagcggucuuuccag

SEQ ID NO: 1351279 - RNA, 19 nt, Artificial Sequence
  Description of Artificial Sequence: Synthetic oligonucleotide
gacuuuguccuguaggccu

SEQ ID NO: 1351280 - RNA, 19 nt, Artificial Sequence
  Description of Artificial Sequence: Synthetic oligonucleotide
uaaugguuucggacuguga

SEQ ID NO: 1351281 - RNA, 19 nt, Artificial Sequence
  Description of Artificial Sequence: Synthetic oligonucleotide
gauuuggccuuuugcguca

SEQ ID NO: 1351282 - RNA, 19 nt, Artificial Sequence
  Description of Artificial Sequence: Synthetic oligonucleotide
uacgauaaucaagaaccaa

SEQ ID NO: 1351283 - RNA, 19 nt, Artificial Sequence
  Description of Artificial Sequence: Synthetic oligonucleotide
gagugauggcagcauaguc

SEQ ID NO: 1351284 - RNA, 19 nt, Artificial Sequence
  Description of Artificial Sequence: Synthetic oligonucleotide
agcgaggggcgauacucac

SEQ ID NO: 1351285 - RNA, 19 nt, Artificial Sequence
  Description of Artificial Sequence: Synthetic oligonucleotide
cacgaacucaaaccagaag

SEQ ID NO: 1351286 - RNA, 19 nt, Artificial Sequence
  Description of Artificial Sequence: Synthetic oligonucleotide
ugacuuuguccuguaggcc

SEQ ID NO: 1351287 - RNA, 19 nt, Artificial Sequence
  Description of Artificial Sequence: Synthetic oligonucleotide
agauucaaaugugguauga

SEQ ID NO: 1351288 - RNA, 19 nt, Artificial Sequence
  Description of Artificial Sequence: Synthetic oligonucleotide
auggcagcggccaacagca

SEQ ID NO: 1351289 - RNA, 19 nt, Artificial Sequence
  Description of Artificial Sequence: Synthetic oligonucleotide
uccaguacgcucugagggu

SEQ ID NO: 1351290 - RNA, 19 nt, Artificial Sequence
  Description of Artificial Sequence: Synthetic oligonucleotide
ugagguccugggaugcccc

SEQ ID NO: 1351291 - RNA, 19 nt, Artificial Sequence
  Description of Artificial Sequence: Synthetic oligonucleotide
cauagaggggucagcauga

SEQ ID NO: 1351292 - RNA, 19 nt, Artificial Sequence
  Description of Artificial Sequence: Synthetic oligonucleotide
ucucuaggccaucuaccac

SEQ ID NO: 1351293 - RNA, 19 nt, Artificial Sequence
  Description of Artificial Sequence: Synthetic oligonucleotide
ugugcacucaaagcugcug

SEQ ID NO: 1351294 - RNA, 19 nt, Artificial Sequence
  Description of Artificial Sequence: Synthetic oligonucleotide
caaugagauggcagcggcc

SEQ ID NO: 1351295 - RNA, 19 nt, Artificial Sequence
  Description of Artificial Sequence: Synthetic oligonucleotide
gucagcuagaagcacuguc

SEQ ID NO: 1351296 - RNA, 19 nt, Artificial Sequence
  Description of Artificial Sequence: Synthetic oligonucleotide
guaagcuccuagcuccagc

SEQ ID NO: 1351297 - RNA, 19 nt, Artificial Sequence
  Description of Artificial Sequence: Synthetic oligonucleotide
gguuuauuguaaugguuuc

SEQ ID NO: 1351298 - RNA, 19 nt, Artificial Sequence
  Description of Artificial Sequence: Synthetic oligonucleotide
ccaguguacgauaaucaag

SEQ ID NO: 1351299 - RNA, 19 nt, Artificial Sequence
  Description of Artificial Sequence: Synthetic oligonucleotide
ucccgggacgaugacauug

SEQ ID NO: 1351300 - RNA, 19 nt, Artificial Sequence
  Description of Artificial Sequence: Synthetic oligonucleotide
acgugugcacugcaucuag

SEQ ID NO: 1351301 - RNA, 19 nt, Artificial Sequence
  Description of Artificial Sequence: Synthetic oligonucleotide
agacccaaugagauggcag

SEQ ID NO: 1351302 - RNA, 19 nt, Artificial Sequence
  Description of Artificial Sequence: Synthetic oligonucleotide
guaugaguugcugggaaca

SEQ ID NO: 1351303 - RNA, 19 nt, Artificial Sequence
  Description of Artificial Sequence: Synthetic oligonucleotide
augaguugcugggaacagg

SEQ ID NO: 1351304 - RNA, 19 nt, Artificial Sequence
  Description of Artificial Sequence: Synthetic oligonucleotide
aaaugugguaugaguugcu

SEQ ID NO: 1351305 - RNA, 19 nt, Artificial Sequence
  Description of Artificial Sequence: Synthetic oligonucleotide
cuaggcaggcacugugagc

SEQ ID NO: 1351306 - RNA, 19 nt, Artificial Sequence
  Description of Artificial Sequence: Synthetic oligonucleotide
gcagguuguagacuggcug

SEQ ID NO: 1351307 - RNA, 19 nt, Artificial Sequence
  Description of Artificial Sequence: Synthetic oligonucleotide
uccaggugugagcuguagu

SEQ ID NO: 1351308 - RNA, 19 nt, Artificial Sequence
  Description of Artificial Sequence: Synthetic oligonucleotide
uacucacgaaucacuguau

SEQ ID NO: 1351309 - RNA, 19 nt, Artificial Sequence
  Description of Artificial Sequence: Synthetic oligonucleotide
agaccaugucuaauguguc

SEQ ID NO: 1351310 - RNA, 19 nt, Artificial Sequence
  Description of Artificial Sequence: Synthetic oligonucleotide
cugcacgaacucaaaccag

SEQ ID NO: 1351311 - RNA, 19 nt, Artificial Sequence
  Description of Artificial Sequence: Synthetic oligonucleotide
aggggcgauacucacgaau

SEQ ID NO: 1351312 - RNA, 19 nt, Artificial Sequence
  Description of Artificial Sequence: Synthetic oligonucleotide
gauacucacgaaucacugu

SEQ ID NO: 1351313 - RNA, 19 nt, Artificial Sequence
  Description of Artificial Sequence: Synthetic oligonucleotide
ucggacugugagcccauga

SEQ ID NO: 1351314 - RNA, 19 nt, Artificial Sequence
  Description of Artificial Sequence: Synthetic oligonucleotide
accaaggcacuugaggaca

SEQ ID NO: 1351315 - RNA, 19 nt, Artificial Sequence
  Description of Artificial Sequence: Synthetic oligonucleotide
gcugcacgaacucaaacca

SEQ ID NO: 1351316 - RNA, 19 nt, Artificial Sequence
  Description of Artificial Sequence: Synthetic oligonucleotide
aguguacgauaaucaagaa

SEQ ID NO: 1351317 - RNA, 19 nt, Artificial Sequence
  Description of Artificial Sequence: Synthetic oligonucleotide
guaaugguuucggacugug

SEQ ID NO: 1351318 - RNA, 19 nt, Artificial Sequence
  Description of Artificial Sequence: Synthetic oligonucleotide
uccaggagacgugugucug

SEQ ID NO: 1351319 - RNA, 19 nt, Artificial Sequence
  Description of Artificial Sequence: Synthetic oligonucleotide
ugccuagggaucuggcacu

SEQ ID NO: 1351320 - RNA, 19 nt, Artificial Sequence
  Description of Artificial Sequence: Synthetic oligonucleotide
cagguaucgcaggagcagg

SEQ ID NO: 1351321 - RNA, 19 nt, Artificial Sequence
  Description of Artificial Sequence: Synthetic oligonucleotide
agauaguuaacgagcccca

SEQ ID NO: 1351322 - RNA, 19 nt, Artificial Sequence
  Description of Artificial Sequence: Synthetic oligonucleotide
gccacaguaagcuccuagc

SEQ ID NO: 1351323 - RNA, 19 nt, Artificial Sequence
  Description of Artificial Sequence: Synthetic oligonucleotide
aaagacgugugcacugcau

SEQ ID NO: 1351324 - RNA, 19 nt, Artificial Sequence
  Description of Artificial Sequence: Synthetic oligonucleotide
uagugugccaguguacgau

SEQ ID NO: 1351325 - RNA, 19 nt, Artificial Sequence
  Description of Artificial Sequence: Synthetic oligonucleotide
cauuugcugagugauggca

SEQ ID NO: 1351326 - RNA, 19 nt, Artificial Sequence
  Description of Artificial Sequence: Synthetic oligonucleotide
cucauucuuaagauucaaa

SEQ ID NO: 1351327 - RNA, 19 nt, Artificial Sequence
  Description of Artificial Sequence: Synthetic oligonucleotide
ggaguaggugucaauggcc

SEQ ID NO: 1351328 - RNA, 19 nt, Artificial Sequence
  Description of Artificial Sequence: Synthetic oligonucleotide
ccaugaauguuagugugcc

SEQ ID NO: 1351329 - RNA, 19 nt, Artificial Sequence
  Description of Artificial Sequence: Synthetic oligonucleotide
agcaugagugugcgucauc

SEQ ID NO: 1351330 - RNA, 19 nt, Artificial Sequence
  Description of Artificial Sequence: Synthetic oligonucleotide
gucaagauuucauggggcu

SEQ ID NO: 1351331 - RNA, 19 nt, Artificial Sequence
  Description of Artificial Sequence: Synthetic oligonucleotide
acauuccuccaggagacgu

SEQ ID NO: 1351332 - RNA, 19 nt, Artificial Sequence
  Description of Artificial Sequence: Synthetic oligonucleotide
ucuaggccaucuaccacuu

SEQ ID NO: 1351333 - RNA, 19 nt, Artificial Sequence
  Description of Artificial Sequence: Synthetic oligonucleotide
ucuccauggugagaagccu

SEQ ID NO: 1351334 - RNA, 19 nt, Artificial Sequence
  Description of Artificial Sequence: Synthetic oligonucleotide
uguaaugguuucggacugu

SEQ ID NO: 1351335 - RNA, 19 nt, Artificial Sequence
  Description of Artificial Sequence: Synthetic oligonucleotide
ggucaagauuucauggggc

SEQ ID NO: 1351336 - RNA, 19 nt, Artificial Sequence
  Description of Artificial Sequence: Synthetic oligonucleotide
guccgcaccgcugaguagc

SEQ ID NO: 1351337 - RNA, 19 nt, Artificial Sequence
  Description of Artificial Sequence: Synthetic oligonucleotide
gcccaugaauguuagugug

SEQ ID NO: 1351338 - RNA, 19 nt, Artificial Sequence
  Description of Artificial Sequence: Synthetic oligonucleotide
ugugccaguguacgauaau

SEQ ID NO: 1351339 - RNA, 19 nt, Artificial Sequence
  Description of Artificial Sequence: Synthetic oligonucleotide
uggcagcauagucaggguu

SEQ ID NO: 1351340 - RNA, 19 nt, Artificial Sequence
  Description of Artificial Sequence: Synthetic oligonucleotide
aucgcaggagcaggaagag

SEQ ID NO: 1351341 - RNA, 19 nt, Artificial Sequence
  Description of Artificial Sequence: Synthetic oligonucleotide
gguaugaguugcugggaac

SEQ ID NO: 1351342 - RNA, 19 nt, Artificial Sequence
  Description of Artificial Sequence: Synthetic oligonucleotide
gucaggggcucccgggacg

SEQ ID NO: 1351343 - RNA, 19 nt, Artificial Sequence
  Description of Artificial Sequence: Synthetic oligonucleotide
aggcacugugagccacugc

SEQ ID NO: 1351344 - RNA, 19 nt, Artificial Sequence
  Description of Artificial Sequence: Synthetic oligonucleotide
ugccccaaggaggauggug

SEQ ID NO: 1351345 - RNA, 19 nt, Artificial Sequence
  Description of Artificial Sequence: Synthetic oligonucleotide
ccaaugagauggcagcggc

SEQ ID NO: 1351346 - RNA, 19 nt, Artificial Sequence
  Description of Artificial Sequence: Synthetic oligonucleotide
ccaucuaccacuuccaugu

SEQ ID NO: 1351347 - RNA, 19 nt, Artificial Sequence
  Description of Artificial Sequence: Synthetic oligonucleotide
aggagcauagaggggucag

SEQ ID NO: 1351348 - RNA, 19 nt, Artificial Sequence
  Description of Artificial Sequence: Synthetic oligonucleotide
cucacauauuucaggaagu

SEQ ID NO: 1351349 - RNA, 19 nt, Artificial Sequence
  Description of Artificial Sequence: Synthetic oligonucleotide
gagugugcgucaucuugca

SEQ ID NO: 1351350 - RNA, 19 nt, Artificial Sequence
  Description of Artificial Sequence: Synthetic oligonucleotide
ugugaggaguaggugucaa

SEQ ID NO: 1351351 - RNA, 19 nt, Artificial Sequence
  Description of Artificial Sequence: Synthetic oligonucleotide
uacgcucugagggucucca

SEQ ID NO: 1351352 - RNA, 19 nt, Artificial Sequence
  Description of Artificial Sequence: Synthetic oligonucleotide
guuucggacugugagccca

SEQ ID NO: 1351353 - RNA, 19 nt, Artificial Sequence
  Description of Artificial Sequence: Synthetic oligonucleotide
cccaugaauguuagugugc

SEQ ID NO: 1351354 - RNA, 19 nt, Artificial Sequence
  Description of Artificial Sequence: Synthetic oligonucleotide
augcgcuguuccuuugugu

SEQ ID NO: 1351355 - RNA, 19 nt, Artificial Sequence
  Description of Artificial Sequence: Synthetic oligonucleotide
gugccaguguacgauaauc

SEQ ID NO: 1351356 - RNA, 19 nt, Artificial Sequence
  Description of Artificial Sequence: Synthetic oligonucleotide
ugggaacaggacugucaca

SEQ ID NO: 1351357 - RNA, 19 nt, Artificial Sequence
  Description of Artificial Sequence: Synthetic oligonucleotide
guacgauaaucaagaacca

SEQ ID NO: 1351358 - RNA, 19 nt, Artificial Sequence
  Description of Artificial Sequence: Synthetic oligonucleotide
gcuaggcaggcacugugag

SEQ ID NO: 1351359 - RNA, 19 nt, Artificial Sequence
  Description of Artificial Sequence: Synthetic oligonucleotide
agugugccaguguacgaua

SEQ ID NO: 1351360 - RNA, 19 nt, Artificial Sequence
  Description of Artificial Sequence: Synthetic oligonucleotide
agcauagaggggucagcau

SEQ ID NO: 1351361 - RNA, 19 nt, Artificial Sequence
  Description of Artificial Sequence: Synthetic oligonucleotide
aacgagccccagcccaggu

SEQ ID NO: 1351362 - RNA, 19 nt, Artificial Sequence
  Description of Artificial Sequence: Synthetic oligonucleotide
gaguaggugucaauggccu

SEQ ID NO: 1351363 - RNA, 19 nt, Artificial Sequence
  Description of Artificial Sequence: Synthetic oligonucleotide
auugccuucucuaggccau

SEQ ID NO: 1351364 - RNA, 19 nt, Artificial Sequence
  Description of Artificial Sequence: Synthetic oligonucleotide
uaacgagccccagcccagg

SEQ ID NO: 1351365 - RNA, 19 nt, Artificial Sequence
  Description of Artificial Sequence: Synthetic oligonucleotide
gaguagccacaguaagcuc

SEQ ID NO: 1351366 - RNA, 19 nt, Artificial Sequence
  Description of Artificial Sequence: Synthetic oligonucleotide
cagcauuugcugagugaug

SEQ ID NO: 1351367 - RNA, 19 nt, Artificial Sequence
  Description of Artificial Sequence: Synthetic oligonucleotide
acgaaucacuguauccaug

SEQ ID NO: 1351368 - RNA, 19 nt, Artificial Sequence
  Description of Artificial Sequence: Synthetic oligonucleotide
gugugagcuguagugugug

SEQ ID NO: 1351369 - RNA, 19 nt, Artificial Sequence
  Description of Artificial Sequence: Synthetic oligonucleotide
uugcgucacccacaugcau

SEQ ID NO: 1351370 - RNA, 19 nt, Artificial Sequence
  Description of Artificial Sequence: Synthetic oligonucleotide
gauggugacuuuguccugu

SEQ ID NO: 1351371 - RNA, 19 nt, Artificial Sequence
  Description of Artificial Sequence: Synthetic oligonucleotide
uuggacccuuguagauugc

SEQ ID NO: 1351372 - RNA, 19 nt, Artificial Sequence
  Description of Artificial Sequence: Synthetic oligonucleotide
agacgugugucuggcaggu

SEQ ID NO: 1351373 - RNA, 19 nt, Artificial Sequence
  Description of Artificial Sequence: Synthetic oligonucleotide
aguaagcuccuagcuccag

SEQ ID NO: 1351374 - RNA, 19 nt, Artificial Sequence
  Description of Artificial Sequence: Synthetic oligonucleotide
aggcgggccguccgcaccg

SEQ ID NO: 1351375 - RNA, 19 nt, Artificial Sequence
  Description of Artificial Sequence: Synthetic oligonucleotide
uccgcaccgcugaguagcc

SEQ ID NO: 1351376 - RNA, 19 nt, Artificial Sequence
  Description of Artificial Sequence: Synthetic oligonucleotide
aguacgcucugagggucuc

SEQ ID NO: 1351377 - RNA, 19 nt, Artificial Sequence
  Description of Artificial Sequence: Synthetic oligonucleotide
aucaagaaccaaggcacuu

SEQ ID NO: 1351378 - RNA, 19 nt, Artificial Sequence
  Description of Artificial Sequence: Synthetic oligonucleotide
uaggugucaauggccucca

SEQ ID NO: 1351379 - RNA, 19 nt, Artificial Sequence
  Description of Artificial Sequence: Synthetic oligonucleotide
gcagguagcggucuuucca

SEQ ID NO: 1351380 - RNA, 19 nt, Artificial Sequence
  Description of Artificial Sequence: Synthetic oligonucleotide
cuuggcgugcugcugcaca

SEQ ID NO: 1351381 - RNA, 19 nt, Artificial Sequence
  Description of Artificial Sequence: Synthetic oligonucleotide
uuggcgugcugcugcacau

SEQ ID NO: 1351382 - RNA, 19 nt, Artificial Sequence
  Description of Artificial Sequence: Synthetic oligonucleotide
cagugccuagggaucuggc

SEQ ID NO: 1351383 - RNA, 19 nt, Artificial Sequence
  Description of Artificial Sequence: Synthetic oligonucleotide
auagaggggucagcaugag

SEQ ID NO: 1351384 - RNA, 19 nt, Artificial Sequence
  Description of Artificial Sequence: Synthetic oligonucleotide
caggcauugcugccauuug

SEQ ID NO: 1351385 - RNA, 19 nt, Artificial Sequence
  Description of Artificial Sequence: Synthetic oligonucleotide
guauuccaggugugagcug

SEQ ID NO: 1351386 - RNA, 19 nt, Artificial Sequence
  Description of Artificial Sequence: Synthetic oligonucleotide
ugagcccaugaauguuagu

SEQ ID NO: 1351387 - RNA, 19 nt, Artificial Sequence
  Description of Artificial Sequence: Synthetic oligonucleotide
gcauugcugccauuuggug

SEQ ID NO: 1351388 - RNA, 19 nt, Artificial Sequence
  Description of Artificial Sequence: Synthetic oligonucleotide
uuucggacugugagcccau

SEQ ID NO: 1351389 - RNA, 19 nt, Artificial Sequence
  Description of Artificial Sequence: Synthetic oligonucleotide
cacaugcauggcccacucc

SEQ ID NO: 1351390 - RNA, 19 nt, Artificial Sequence
  Description of Artificial Sequence: Synthetic oligonucleotide
agguagcggucuuuccagu

SEQ ID NO: 1351391 - RNA, 19 nt, Artificial Sequence
  Description of Artificial Sequence: Synthetic oligonucleotide
ccuccaguacgcucugagg

SEQ ID NO: 1351392 - RNA, 19 nt, Artificial Sequence
  Description of Artificial Sequence: Synthetic oligonucleotide
cagcugcgggaugaggucc

SEQ ID NO: 1351393 - RNA, 19 nt, Artificial Sequence
  Description of Artificial Sequence: Synthetic oligonucleotide
cgaaucacuguauccauga

SEQ ID NO: 1351394 - RNA, 19 nt, Artificial Sequence
  Description of Artificial Sequence: Synthetic oligonucleotide
uugcgcaacaggccacauu

SEQ ID NO: 1351395 - RNA, 19 nt, Artificial Sequence
  Description of Artificial Sequence: Synthetic oligonucleotide
ggcgauacucacgaaucac

SEQ ID NO: 1351396 - RNA, 19 nt, Artificial Sequence
  Description of Artificial Sequence: Synthetic oligonucleotide
cuuuguccuguaggccugc

SEQ ID NO: 1351397 - RNA, 19 nt, Artificial Sequence
  Description of Artificial Sequence: Synthetic oligonucleotide
acuguccccuugcgcaaca

SEQ ID NO: 1351398 - RNA, 19 nt, Artificial Sequence
  Description of Artificial Sequence: Synthetic oligonucleotide
gccaguguacgauaaucaa

SEQ ID NO: 1351399 - RNA, 19 nt, Artificial Sequence
  Description of Artificial Sequence: Synthetic oligonucleotide
gguccugggaugccccaag

SEQ ID NO: 1351400 - RNA, 19 nt, Artificial Sequence
  Description of Artificial Sequence: Synthetic oligonucleotide
gaguugcugggaacaggac

SEQ ID NO: 1351401 - RNA, 19 nt, Artificial Sequence
  Description of Artificial Sequence: Synthetic oligonucleotide
cagugcuaggcaggcacug

SEQ ID NO: 1351402 - RNA, 19 nt, Artificial Sequence
  Description of Artificial Sequence: Synthetic oligonucleotide
cccaaugagauggcagcgg

SEQ ID NO: 1351403 - RNA, 19 nt, Artificial Sequence
  Description of Artificial Sequence: Synthetic oligonucleotide
agcagguuguagacuggcu

SEQ ID NO: 1351404 - RNA, 19 nt, Artificial Sequence
  Description of Artificial Sequence: Synthetic oligonucleotide
cugcaaaguucagcauuug

SEQ ID NO: 1351405 - RNA, 19 nt, Artificial Sequence
  Description of Artificial Sequence: Synthetic oligonucleotide
gacagugccuagggaucug

SEQ ID NO: 1351406 - RNA, 19 nt, Artificial Sequence
  Description of Artificial Sequence: Synthetic oligonucleotide
uugcugggaacaggacugu

SEQ ID NO: 1351407 - RNA, 19 nt, Artificial Sequence
  Description of Artificial Sequence: Synthetic oligonucleotide
accgcugaguagccacagu

SEQ ID NO: 1351408 - RNA, 19 nt, Artificial Sequence
  Description of Artificial Sequence: Synthetic oligonucleotide
gugguaugaguugcuggga

SEQ ID NO: 1351409 - RNA, 19 nt, Artificial Sequence
  Description of Artificial Sequence: Synthetic oligonucleotide
ggagcauagaggggucagc

SEQ ID NO: 1351410 - RNA, 19 nt, Artificial Sequence
  Description of Artificial Sequence: Synthetic oligonucleotide
gguuucggacugugagccc

SEQ ID NO: 1351411 - RNA, 19 nt, Artificial Sequence
  Description of Artificial Sequence: Synthetic oligonucleotide
aggugucaauggccuccag

SEQ ID NO: 1351412 - RNA, 19 nt, Artificial Sequence
  Description of Artificial Sequence: Synthetic oligonucleotide
caguaagcuccuagcucca

SEQ ID NO: 1351413 - RNA, 19 nt, Artificial Sequence
  Description of Artificial Sequence: Synthetic oligonucleotide
ccaugucuaauguguccac

SEQ ID NO: 1351414 - RNA, 19 nt, Artificial Sequence
  Description of Artificial Sequence: Synthetic oligonucleotide
ccagcgaggggcgauacuc

SEQ ID NO: 1351415 - RNA, 19 nt, Artificial Sequence
  Description of Artificial Sequence: Synthetic oligonucleotide
cuguguggucaagauuuca

SEQ ID NO: 1351416 - RNA, 19 nt, Artificial Sequence
  Description of Artificial Sequence: Synthetic oligonucleotide
caccgcugaguagccacag

SEQ ID NO: 1351417 - RNA, 19 nt, Artificial Sequence
  Description of Artificial Sequence: Synthetic oligonucleotide
gcugggaacaggacuguca

SEQ ID NO: 1351418 - RNA, 19 nt, Artificial Sequence
  Description of Artificial Sequence: Synthetic oligonucleotide
guaggccugcaaaguucag

SEQ ID NO: 1351419 - RNA, 19 nt, Artificial Sequence
  Description of Artificial Sequence: Synthetic oligonucleotide
gggcgauacucacgaauca

SEQ ID NO: 1351420 - RNA, 19 nt, Artificial Sequence
  Description of Artificial Sequence: Synthetic oligonucleotide
cuuuugcgucacccacaug

SEQ ID NO: 1351421 - RNA, 19 nt, Artificial Sequence
  Description of Artificial Sequence: Synthetic oligonucleotide
gacgugugcacugcaucua

SEQ ID NO: 1351422 - RNA, 19 nt, Artificial Sequence
  Description of Artificial Sequence: Synthetic oligonucleotide
ugcugggaacaggacuguc

SEQ ID NO: 1351423 - RNA, 19 nt, Artificial Sequence
  Description of Artificial Sequence: Synthetic oligonucleotide
gcgcaggaugcgcuguucc

SEQ ID NO: 1351424 - RNA, 19 nt, Artificial Sequence
  Description of Artificial Sequence: Synthetic oligonucleotide
uucggacugugagcccaug

SEQ ID NO: 1351425 - RNA, 19 nt, Artificial Sequence
  Description of Artificial Sequence: Synthetic oligonucleotide
cagcgaggggcgauacuca

SEQ ID NO: 1351426 - RNA, 19 nt, Artificial Sequence
  Description of Artificial Sequence: Synthetic oligonucleotide
caucuugcagaaggaagcu

SEQ ID NO: 1351427 - RNA, 19 nt, Artificial Sequence
  Description of Artificial Sequence: Synthetic oligonucleotide
cgugugucuggcagguagc

SEQ ID NO: 1351428 - RNA, 19 nt, Artificial Sequence
  Description of Artificial Sequence: Synthetic oligonucleotide
cuaggccaucuaccacuuc

SEQ ID NO: 1351429 - RNA, 19 nt, Artificial Sequence
  Description of Artificial Sequence: Synthetic oligonucleotide
guacgcucugagggucucc

SEQ ID NO: 1351430 - RNA, 19 nt, Artificial Sequence
  Description of Artificial Sequence: Synthetic oligonucleotide
cagggcaggcugugugguc

SEQ ID NO: 1351431 - RNA, 19 nt, Artificial Sequence
  Description of Artificial Sequence: Synthetic oligonucleotide
gcggucuuuccagugguca

SEQ ID NO: 1351432 - RNA, 19 nt, Artificial Sequence
  Description of Artificial Sequence: Synthetic oligonucleotide
cuccaggagacgugugucu

SEQ ID NO: 1351433 - RNA, 19 nt, Artificial Sequence
  Description of Artificial Sequence: Synthetic oligonucleotide
gugugccaguguacgauaa

SEQ ID NO: 1351434 - RNA, 19 nt, Artificial Sequence
  Description of Artificial Sequence: Synthetic oligonucleotide
gcugagugauggcagcaua

SEQ ID NO: 1351435 - RNA, 19 nt, Artificial Sequence
  Description of Artificial Sequence: Synthetic oligonucleotide
gcgaggggcgauacucacg

SEQ ID NO: 1351436 - RNA, 19 nt, Artificial Sequence
  Description of Artificial Sequence: Synthetic oligonucleotide
caugagcagguuguagacu

SEQ ID NO: 1351437 - RNA, 19 nt, Artificial Sequence
  Description of Artificial Sequence: Synthetic oligonucleotide
ggcauugcugccauuuggu

SEQ ID NO: 1351438 - RNA, 19 nt, Artificial Sequence
  Description of Artificial Sequence: Synthetic oligonucleotide
cgaggggcgauacucacga

SEQ ID NO: 1351439 - RNA, 19 nt, Artificial Sequence
  Description of Artificial Sequence: Synthetic oligonucleotide
caggcuguguggucaagau

SEQ ID NO: 1351440 - RNA, 19 nt, Artificial Sequence
  Description of Artificial Sequence: Synthetic oligonucleotide
cgcaccgcugaguagccac

SEQ ID NO: 1351441 - RNA, 19 nt, Artificial Sequence
  Description of Artificial Sequence: Synthetic oligonucleotide
cacuguccccuugcgcaac

SEQ ID NO: 1351442 - RNA, 19 nt, Artificial Sequence
  Description of Artificial Sequence: Synthetic oligonucleotide
ccuuguagauugccuucuc

SEQ ID NO: 1351443 - RNA, 19 nt, Artificial Sequence
  Description of Artificial Sequence: Synthetic oligonucleotide
gccugcaaaguucagcauu

SEQ ID NO: 1351444 - RNA, 19 nt, Artificial Sequence
  Description of Artificial Sequence: Synthetic oligonucleotide
cuguccccuugcgcaacag

SEQ ID NO: 1351445 - RNA, 19 nt, Artificial Sequence
  Description of Artificial Sequence: Synthetic oligonucleotide
gcgauacucacgaaucacu

SEQ ID NO: 1351446 - RNA, 19 nt, Artificial Sequence
  Description of Artificial Sequence: Synthetic oligonucleotide
ccaguacgcucugaggguc

SEQ ID NO: 1351447 - RNA, 19 nt, Artificial Sequence
  Description of Artificial Sequence: Synthetic oligonucleotide
gggucuccaggcuuggcgu

SEQ ID NO: 1351448 - RNA, 19 nt, Artificial Sequence
  Description of Artificial Sequence: Synthetic oligonucleotide
cacccacaugcauggccca

SEQ ID NO: 1351449 - RNA, 19 nt, Artificial Sequence
  Description of Artificial Sequence: Synthetic oligonucleotide
caggagcauagagggguca

SEQ ID NO: 1351450 - RNA, 19 nt, Artificial Sequence
  Description of Artificial Sequence: Synthetic oligonucleotide
caggguucaucuccauggu

SEQ ID NO: 1351451 - RNA, 19 nt, Artificial Sequence
  Description of Artificial Sequence: Synthetic oligonucleotide
gugaggaguaggugucaau

SEQ ID NO: 1351452 - RNA, 19 nt, Artificial Sequence
  Description of Artificial Sequence: Synthetic oligonucleotide
gugcgucaucuugcagaag

SEQ ID NO: 1351453 - RNA, 19 nt, Artificial Sequence
  Description of Artificial Sequence: Synthetic oligonucleotide
agauuucauggggcugcuu

SEQ ID NO: 1351454 - RNA, 19 nt, Artificial Sequence
  Description of Artificial Sequence: Synthetic oligonucleotide
ccauguauuccagguguga

SEQ ID NO: 1351455 - RNA, 19 nt, Artificial Sequence
  Description of Artificial Sequence: Synthetic oligonucleotide
gcacgaacucaaaccagaa

SEQ ID NO: 1351456 - RNA, 19 nt, Artificial Sequence
  Description of Artificial Sequence: Synthetic oligonucleotide
ccugcaaaguucagcauuu

SEQ ID NO: 1351457 - RNA, 19 nt, Artificial Sequence
  Description of Artificial Sequence: Synthetic oligonucleotide
cugcaucuagaaaguuuau

SEQ ID NO: 1351458 - RNA, 19 nt, Artificial Sequence
  Description of Artificial Sequence: Synthetic oligonucleotide
gugucacccaugagcaggu

SEQ ID NO: 1351459 - RNA, 19 nt, Artificial Sequence
  Description of Artificial Sequence: Synthetic oligonucleotide
ccacaguaagcuccuagcu

SEQ ID NO: 1351460 - RNA, 19 nt, Artificial Sequence
  Description of Artificial Sequence: Synthetic oligonucleotide
ccauggugagaagccugcc

SEQ ID NO: 1351461 - RNA, 19 nt, Artificial Sequence
  Description of Artificial Sequence: Synthetic oligonucleotide
gccuuuugcgucacccaca

SEQ ID NO: 1351462 - RNA, 19 nt, Artificial Sequence
  Description of Artificial Sequence: Synthetic oligonucleotide
ccgcugaguagccacagua

SEQ ID NO: 1351463 - RNA, 19 nt, Artificial Sequence
  Description of Artificial Sequence: Synthetic oligonucleotide
cgggacgaugacauuguca

SEQ ID NO: 1351464 - RNA, 19 nt, Artificial Sequence
  Description of Artificial Sequence: Synthetic oligonucleotide
gaggggcgauacucacgaa

SEQ ID NO: 1351465 - RNA, 19 nt, Artificial Sequence
  Description of Artificial Sequence: Synthetic oligonucleotide
agguccugggaugccccaa

SEQ ID NO: 1351466 - RNA, 19 nt, Artificial Sequence
  Description of Artificial Sequence: Synthetic oligonucleotide
caggugcuuuucagguuua

SEQ ID NO: 1351467 - RNA, 19 nt, Artificial Sequence
  Description of Artificial Sequence: Synthetic oligonucleotide
gggccguccgcaccgcuga

SEQ ID NO: 1351468 - RNA, 19 nt, Artificial Sequence
  Description of Artificial Sequence: Synthetic oligonucleotide
ggcugcuuggacccuugua

SEQ ID NO: 1351469 - RNA, 19 nt, Artificial Sequence
  Description of Artificial Sequence: Synthetic oligonucleotide
caugcauggcccacuccuu

SEQ ID NO: 1351470 - RNA, 19 nt, Artificial Sequence
  Description of Artificial Sequence: Synthetic oligonucleotide
caucuaccacuuccaugua

SEQ ID NO: 1351471 - RNA, 19 nt, Artificial Sequence
  Description of Artificial Sequence: Synthetic oligonucleotide
ggaugcgcuguuccuuugu

SEQ ID NO: 1351472 - RNA, 19 nt, Artificial Sequence
  Description of Artificial Sequence: Synthetic oligonucleotide
cuagaagcacuguccccuu

SEQ ID NO: 1351473 - RNA, 19 nt, Artificial Sequence
  Description of Artificial Sequence: Synthetic oligonucleotide
caguacgcucugagggucu

SEQ ID NO: 1351474 - RNA, 19 nt, Artificial Sequence
  Description of Artificial Sequence: Synthetic oligonucleotide
gcgcaacaggccacauucc

SEQ ID NO: 1351475 - RNA, 19 nt, Artificial Sequence
  Description of Artificial Sequence: Synthetic oligonucleotide
auuccaggugugagcugua

SEQ ID NO: 1351476 - RNA, 19 nt, Artificial Sequence
  Description of Artificial Sequence: Synthetic oligonucleotide
gcucccgggacgaugacau

SEQ ID NO: 1351477 - RNA, 19 nt, Artificial Sequence
  Description of Artificial Sequence: Synthetic oligonucleotide
ggcuuggcgugcugcugca

SEQ ID NO: 1351478 - RNA, 19 nt, Artificial Sequence
  Description of Artificial Sequence: Synthetic oligonucleotide
cccucacauauuucaggaa

SEQ ID NO: 1351479 - RNA, 19 nt, Artificial Sequence
  Description of Artificial Sequence: Synthetic oligonucleotide
ccauuuggugacagccaaa

SEQ ID NO: 1351480 - RNA, 19 nt, Artificial Sequence
  Description of Artificial Sequence: Synthetic oligonucleotide
ggugacagccaaacagcau

SEQ ID NO: 1351481 - RNA, 19 nt, Artificial Sequence
  Description of Artificial Sequence: Synthetic oligonucleotide
ccuuuugcgucacccacau

SEQ ID NO: 1351482 - RNA, 19 nt, Artificial Sequence
  Description of Artificial Sequence: Synthetic oligonucleotide
cugugagcccaugaauguu

SEQ ID NO: 1351483 - RNA, 19 nt, Artificial Sequence
  Description of Artificial Sequence: Synthetic oligonucleotide
gacgugugucuggcaggua

SEQ ID NO: 1351484 - RNA, 19 nt, Artificial Sequence
  Description of Artificial Sequence: Synthetic oligonucleotide
gcaggcgggccguccgcac

SEQ ID NO: 1351485 - RNA, 19 nt, Artificial Sequence
  Description of Artificial Sequence: Synthetic oligonucleotide
gcuuggacccuuguagauu

SEQ ID NO: 1351486 - RNA, 19 nt, Artificial Sequence
  Description of Artificial Sequence: Synthetic oligonucleotide
ggccaucuaccacuuccau

SEQ ID NO: 1351487 - RNA, 19 nt, Artificial Sequence
  Description of Artificial Sequence: Synthetic oligonucleotide
gcaccgcugaguagccaca

SEQ ID NO: 1351488 - RNA, 19 nt, Artificial Sequence
  Description of Artificial Sequence: Synthetic oligonucleotide
cgugugcacugcaucuaga

SEQ ID NO: 1351489 - RNA, 19 nt, Artificial Sequence
  Description of Artificial Sequence: Synthetic oligonucleotide
ggccguccgcaccgcugag

SEQ ID NO: 1351490 - RNA, 19 nt, Artificial Sequence
  Description of Artificial Sequence: Synthetic oligonucleotide
ccguccgcaccgcugagua

SEQ ID NO: 1351491 - RNA, 19 nt, Artificial Sequence
  Description of Artificial Sequence: Synthetic oligonucleotide
cgcaacaggccacauuccu

SEQ ID NO: 1351492 - RNA, 19 nt, Artificial Sequence
  Description of Artificial Sequence: Synthetic oligonucleotide
ggccugcaaaguucagcau

SEQ ID NO: 1351493 - RNA, 19 nt, Artificial Sequence
  Description of Artificial Sequence: Synthetic oligonucleotide
gcugcgggaugagguccug

SEQ ID NO: 1351494 - RNA, 19 nt, Artificial Sequence
  Description of Artificial Sequence: Synthetic oligonucleotide
cagcaugagugugcgucau

SEQ ID NO: 1351495 - RNA, 19 nt, Artificial Sequence
  Description of Artificial Sequence: Synthetic oligonucleotide
cuugcgcaacaggccacau

SEQ ID NO: 1351496 - RNA, 19 nt, Artificial Sequence
  Description of Artificial Sequence: Synthetic oligonucleotide
gcaggcacugugagccacu

SEQ ID NO: 1351497 - RNA, 19 nt, Artificial Sequence
  Description of Artificial Sequence: Synthetic oligonucleotide
ccuagggaucuggcacuga

SEQ ID NO: 1351498 - RNA, 19 nt, Artificial Sequence
  Description of Artificial Sequence: Synthetic oligonucleotide
gcaccagcgaggggcgaua

SEQ ID NO: 1351499 - RNA, 19 nt, Artificial Sequence
  Description of Artificial Sequence: Synthetic oligonucleotide
cacaggcauugcugccauu

SEQ ID NO: 1351500 - RNA, 19 nt, Artificial Sequence
  Description of Artificial Sequence: Synthetic oligonucleotide
cucccgggacgaugacauu

SEQ ID NO: 1351501 - RNA, 19 nt, Artificial Sequence
  Description of Artificial Sequence: Synthetic oligonucleotide
gccguccgcaccgcugagu

SEQ ID NO: 1351502 - RNA, 19 nt, Artificial Sequence
  Description of Artificial Sequence: Synthetic oligonucleotide
ccgcaccgcugaguagcca

SEQ ID NO: 1351503 - RNA, 19 nt, Artificial Sequence
  Description of Artificial Sequence: Synthetic oligonucleotide
aacaucuagggcuagcacc

SEQ ID NO: 1351504 - RNA, 19 nt, Artificial Sequence
  Description of Artificial Sequence: Synthetic oligonucleotide
aaaucugugaaacagacuu

SEQ ID NO: 1351505 - RNA, 19 nt, Artificial Sequence
  Description of Artificial Sequence: Synthetic oligonucleotide
uuagcuuugguuaauuuug

SEQ ID NO: 1351506 - RNA, 19 nt, Artificial Sequence
  Description of Artificial Sequence: Synthetic oligonucleotide
uuuaacuccagcccgaaug

SEQ ID NO: 1351507 - RNA, 19 nt, Artificial Sequence
  Description of Artificial Sequence: Synthetic oligonucleotide
ucuucuaucagcucuaaga

SEQ ID NO: 1351508 - RNA, 19 nt, Artificial Sequence
  Description of Artificial Sequence: Synthetic oligonucleotide
agagcaacuucacuuaagc

SEQ ID NO: 1351509 - RNA, 19 nt, Artificial Sequence
  Description of Artificial Sequence: Synthetic oligonucleotide
uucuugcugacucugacgg

SEQ ID NO: 1351510 - RNA, 19 nt, Artificial Sequence
  Description of Artificial Sequence: Synthetic oligonucleotide
uucaccaucgcucucacgc

SEQ ID NO: 1351511 - RNA, 19 nt, Artificial Sequence
  Description of Artificial Sequence: Synthetic oligonucleotide
uucucuacgaacuucccgg

SEQ ID NO: 1351512 - RNA, 19 nt, Artificial Sequence
  Description of Artificial Sequence: Synthetic oligonucleotide
uuauacuuaguccucaggu

SEQ ID NO: 1351513 - RNA, 19 nt, Artificial Sequence
  Description of Artificial Sequence: Synthetic oligonucleotide
aauuuuggcucuucugaac

SEQ ID NO: 1351514 - RNA, 19 nt, Artificial Sequence
  Description of Artificial Sequence: Synthetic oligonucleotide
caagcuaggauccacagag

SEQ ID NO: 1351515 - RNA, 19 nt, Artificial Sequence
  Description of Artificial Sequence: Synthetic oligonucleotide
uuagcaaucugguagguga

SEQ ID NO: 1351516 - RNA, 19 nt, Artificial Sequence
  Description of Artificial Sequence: Synthetic oligonucleotide
uuuuacggagacuuuagcc

SEQ ID NO: 1351517 - RNA, 19 nt, Artificial Sequence
  Description of Artificial Sequence: Synthetic oligonucleotide
uuuacggagacuuuagcca

SEQ ID NO: 1351518 - RNA, 19 nt, Artificial Sequence
  Description of Artificial Sequence: Synthetic oligonucleotide
aauuaccugugccuccucc

SEQ ID NO: 1351519 - RNA, 19 nt, Artificial Sequence
  Description of Artificial Sequence: Synthetic oligonucleotide
agagguuauacuuaguccu

SEQ ID NO: 1351520 - RNA, 19 nt, Artificial Sequence
  Description of Artificial Sequence: Synthetic oligonucleotide
uuuagccaaauccuucacg

SEQ ID NO: 1351521 - RNA, 19 nt, Artificial Sequence
  Description of Artificial Sequence: Synthetic oligonucleotide
acaacugacagcuuguuga

SEQ ID NO: 1351522 - RNA, 19 nt, Artificial Sequence
  Description of Artificial Sequence: Synthetic oligonucleotide
uuaauuuugcuuuuggauu

SEQ ID NO: 1351523 - RNA, 19 nt, Artificial Sequence
  Description of Artificial Sequence: Synthetic oligonucleotide
aaguagagguuauacuuag

SEQ ID NO: 1351524 - RNA, 19 nt, Artificial Sequence
  Description of Artificial Sequence: Synthetic oligonucleotide
aauuuccgaggacaguuuc

SEQ ID NO: 1351525 - RNA, 19 nt, Artificial Sequence
  Description of Artificial Sequence: Synthetic oligonucleotide
aaguaggccaaagagcaac

SEQ ID NO: 1351526 - RNA, 19 nt, Artificial Sequence
  Description of Artificial Sequence: Synthetic oligonucleotide
uguaacaagggcuccaacu

SEQ ID NO: 1351527 - RNA, 19 nt, Artificial Sequence
  Description of Artificial Sequence: Synthetic oligonucleotide
ugugcagggacucuccuag

SEQ ID NO: 1351528 - RNA, 19 nt, Artificial Sequence
  Description of Artificial Sequence: Synthetic oligonucleotide
uuuggcuuagcuuugguua

SEQ ID NO: 1351529 - RNA, 19 nt, Artificial Sequence
  Description of Artificial Sequence: Synthetic oligonucleotide
uaggugacgaauuuccgag

SEQ ID NO: 1351530 - RNA, 19 nt, Artificial Sequence
  Description of Artificial Sequence: Synthetic oligonucleotide
ucuuuuacggagacuuuag

SEQ ID NO: 1351531 - RNA, 19 nt, Artificial Sequence
  Description of Artificial Sequence: Synthetic oligonucleotide
uagagguuauacuuagucc

SEQ ID NO: 1351532 - RNA, 19 nt, Artificial Sequence
  Description of Artificial Sequence: Synthetic oligonucleotide
uaugacaggauguccaugu

SEQ ID NO: 1351533 - RNA, 19 nt, Artificial Sequence
  Description of Artificial Sequence: Synthetic oligonucleotide
uuaacuccagcccgaaugc

SEQ ID NO: 1351534 - RNA, 19 nt, Artificial Sequence
  Description of Artificial Sequence: Synthetic oligonucleotide
ucuacgaacuucccggacc

SEQ ID NO: 1351535 - RNA, 19 nt, Artificial Sequence
  Description of Artificial Sequence: Synthetic oligonucleotide
uccguaucauaauaaagcu

SEQ ID NO: 1351536 - RNA, 19 nt, Artificial Sequence
  Description of Artificial Sequence: Synthetic oligonucleotide
uuucugauccacaacugac

SEQ ID NO: 1351537 - RNA, 19 nt, Artificial Sequence
  Description of Artificial Sequence: Synthetic oligonucleotide
agcaacuucacuuaagcuu

SEQ ID NO: 1351538 - RNA, 19 nt, Artificial Sequence
  Description of Artificial Sequence: Synthetic oligonucleotide
guccguaucauaauaaagc

SEQ ID NO: 1351539 - RNA, 19 nt, Artificial Sequence
  Description of Artificial Sequence: Synthetic oligonucleotide
aaggccuccacccaagcga

SEQ ID NO: 1351540 - RNA, 19 nt, Artificial Sequence
  Description of Artificial Sequence: Synthetic oligonucleotide
uucgagagccucuuccucg

SEQ ID NO: 1351541 - RNA, 19 nt, Artificial Sequence
  Description of Artificial Sequence: Synthetic oligonucleotide
ucuccuugguguaaguccc

SEQ ID NO: 1351542 - RNA, 19 nt, Artificial Sequence
  Description of Artificial Sequence: Synthetic oligonucleotide
uucguuccagcccuuagcc

SEQ ID NO: 1351543 - RNA, 19 nt, Artificial Sequence
  Description of Artificial Sequence: Synthetic oligonucleotide
uucuucgagagccucuucc

SEQ ID NO: 1351544 - RNA, 19 nt, Artificial Sequence
  Description of Artificial Sequence: Synthetic oligonucleotide
uucaaguagagguuauacu

SEQ ID NO: 1351545 - RNA, 19 nt, Artificial Sequence
  Description of Artificial Sequence: Synthetic oligonucleotide
caguucaccacuauaccgc

SEQ ID NO: 1351546 - RNA, 19 nt, Artificial Sequence
  Description of Artificial Sequence: Synthetic oligonucleotide
uauaccgcuguucuucucu

SEQ ID NO: 1351547 - RNA, 19 nt, Artificial Sequence
  Description of Artificial Sequence: Synthetic oligonucleotide
accugaucgugguaguagc

SEQ ID NO: 1351548 - RNA, 19 nt, Artificial Sequence
  Description of Artificial Sequence: Synthetic oligonucleotide
guuauacuuaguccucagg

SEQ ID NO: 1351549 - RNA, 19 nt, Artificial Sequence
  Description of Artificial Sequence: Synthetic oligonucleotide
accacuauaccgcuguucu

SEQ ID NO: 1351550 - RNA, 19 nt, Artificial Sequence
  Description of Artificial Sequence: Synthetic oligonucleotide
ucgggauuuggaaccauag

SEQ ID NO: 1351551 - RNA, 19 nt, Artificial Sequence
  Description of Artificial Sequence: Synthetic oligonucleotide
cugugaaacagacuuuggc

SEQ ID NO: 1351552 - RNA, 19 nt, Artificial Sequence
  Description of Artificial Sequence: Synthetic oligonucleotide
auggaacucaucuaccuga

SEQ ID NO: 1351553 - RNA, 19 nt, Artificial Sequence
  Description of Artificial Sequence: Synthetic oligonucleotide
ugacaggauguccaugugc

SEQ ID NO: 1351554 - RNA, 19 nt, Artificial Sequence
  Description of Artificial Sequence: Synthetic oligonucleotide
ucuccuagcuuuuaagauc

SEQ ID NO: 1351555 - RNA, 19 nt, Artificial Sequence
  Description of Artificial Sequence: Synthetic oligonucleotide
uuccuaucaaucuucuuuc

SEQ ID NO: 1351556 - RNA, 19 nt, Artificial Sequence
  Description of Artificial Sequence: Synthetic oligonucleotide
ucgacuucguuccagcccu

SEQ ID NO: 1351557 - RNA, 19 nt, Artificial Sequence
  Description of Artificial Sequence: Synthetic oligonucleotide
agggcggcgacccuaaauc

SEQ ID NO: 1351558 - RNA, 19 nt, Artificial Sequence
  Description of Artificial Sequence: Synthetic oligonucleotide
aaauccuucacgacccgag

SEQ ID NO: 1351559 - RNA, 19 nt, Artificial Sequence
  Description of Artificial Sequence: Synthetic oligonucleotide
uaucaaucuucuuucuccu

SEQ ID NO: 1351560 - RNA, 19 nt, Artificial Sequence
  Description of Artificial Sequence: Synthetic oligonucleotide
uauacuuaguccucaggua

SEQ ID NO: 1351561 - RNA, 19 nt, Artificial Sequence
  Description of Artificial Sequence: Synthetic oligonucleotide
ucgaauuuuggcucuucug

SEQ ID NO: 1351562 - RNA, 19 nt, Artificial Sequence
  Description of Artificial Sequence: Synthetic oligonucleotide
auaguauuuuagugcagcu

SEQ ID NO: 1351563 - RNA, 19 nt, Artificial Sequence
  Description of Artificial Sequence: Synthetic oligonucleotide
gacaagcuaggauccacag

SEQ ID NO: 1351564 - RNA, 19 nt, Artificial Sequence
  Description of Artificial Sequence: Synthetic oligonucleotide
ugacgaauuuccgaggaca

SEQ ID NO: 1351565 - RNA, 19 nt, Artificial Sequence
  Description of Artificial Sequence: Synthetic oligonucleotide
cucgccuucgaauuuuggc

SEQ ID NO: 1351566 - RNA, 19 nt, Artificial Sequence
  Description of Artificial Sequence: Synthetic oligonucleotide
uauguuuuacucugggguu

SEQ ID NO: 1351567 - RNA, 19 nt, Artificial Sequence
  Description of Artificial Sequence: Synthetic oligonucleotide
cuucucuacgaacuucccg

SEQ ID NO: 1351568 - RNA, 19 nt, Artificial Sequence
  Description of Artificial Sequence: Synthetic oligonucleotide
gauucccgcaacuucuggc

SEQ ID NO: 1351569 - RNA, 19 nt, Artificial Sequence
  Description of Artificial Sequence: Synthetic oligonucleotide
cuucuugcugacucugacg

SEQ ID NO: 1351570 - RNA, 19 nt, Artificial Sequence
  Description of Artificial Sequence: Synthetic oligonucleotide
aaagagcaacuucacuuaa

SEQ ID NO: 1351571 - RNA, 19 nt, Artificial Sequence
  Description of Artificial Sequence: Synthetic oligonucleotide
gggauuuggaaccauaguc

SEQ ID NO: 1351572 - RNA, 19 nt, Artificial Sequence
  Description of Artificial Sequence: Synthetic oligonucleotide
ucugaacuuuucccuaugu

SEQ ID NO: 1351573 - RNA, 19 nt, Artificial Sequence
  Description of Artificial Sequence: Synthetic oligonucleotide
ucauuuaccuggggcaccg

SEQ ID NO: 1351574 - RNA, 19 nt, Artificial Sequence
  Description of Artificial Sequence: Synthetic oligonucleotide
aucuaaaauaauugccaaa

SEQ ID NO: 1351575 - RNA, 19 nt, Artificial Sequence
  Description of Artificial Sequence: Synthetic oligonucleotide
uuuacucugggguuccuau

SEQ ID NO: 1351576 - RNA, 19 nt, Artificial Sequence
  Description of Artificial Sequence: Synthetic oligonucleotide
uucgaauuuuggcucuucu

SEQ ID NO: 1351577 - RNA, 19 nt, Artificial Sequence
  Description of Artificial Sequence: Synthetic oligonucleotide
ucaacaucuagggcuagca

SEQ ID NO: 1351578 - RNA, 19 nt, Artificial Sequence
  Description of Artificial Sequence: Synthetic oligonucleotide
ucagguacugacuuccuuu

SEQ ID NO: 1351579 - RNA, 19 nt, Artificial Sequence
  Description of Artificial Sequence: Synthetic oligonucleotide
gguacugacuuccuuuucc

SEQ ID NO: 1351580 - RNA, 19 nt, Artificial Sequence
  Description of Artificial Sequence: Synthetic oligonucleotide
uuacggagacuuuagccaa

SEQ ID NO: 1351581 - RNA, 19 nt, Artificial Sequence
  Description of Artificial Sequence: Synthetic oligonucleotide
uuagccaaggcugcccggg

SEQ ID NO: 1351582 - RNA, 19 nt, Artificial Sequence
  Description of Artificial Sequence: Synthetic oligonucleotide
ugaucagauuucuguaggu

SEQ ID NO: 1351583 - RNA, 19 nt, Artificial Sequence
  Description of Artificial Sequence: Synthetic oligonucleotide
cuaagaacucgggugauuc

SEQ ID NO: 1351584 - RNA, 19 nt, Artificial Sequence
  Description of Artificial Sequence: Synthetic oligonucleotide
aguccguaucauaauaaag

SEQ ID NO: 1351585 - RNA, 19 nt, Artificial Sequence
  Description of Artificial Sequence: Synthetic oligonucleotide
ggcgcaguaguucaaguag

SEQ ID NO: 1351586 - RNA, 19 nt, Artificial Sequence
  Description of Artificial Sequence: Synthetic oligonucleotide
aauccuucacgacccgagu

SEQ ID NO: 1351587 - RNA, 19 nt, Artificial Sequence
  Description of Artificial Sequence: Synthetic oligonucleotide
gacgaauuuccgaggacag

SEQ ID NO: 1351588 - RNA, 19 nt, Artificial Sequence
  Description of Artificial Sequence: Synthetic oligonucleotide
aacuucccggaccuggccu

SEQ ID NO: 1351589 - RNA, 19 nt, Artificial Sequence
  Description of Artificial Sequence: Synthetic oligonucleotide
aucagcucuaagaacucgg

SEQ ID NO: 1351590 - RNA, 19 nt, Artificial Sequence
  Description of Artificial Sequence: Synthetic oligonucleotide
uuuagcaaucugguaggug

SEQ ID NO: 1351591 - RNA, 19 nt, Artificial Sequence
  Description of Artificial Sequence: Synthetic oligonucleotide
auguuuuacucugggguuc

SEQ ID NO: 1351592 - RNA, 19 nt, Artificial Sequence
  Description of Artificial Sequence: Synthetic oligonucleotide
uaguccguaucauaauaaa

SEQ ID NO: 1351593 - RNA, 19 nt, Artificial Sequence
  Description of Artificial Sequence: Synthetic oligonucleotide
aucgcucucacgccguauc

SEQ ID NO: 1351594 - RNA, 19 nt, Artificial Sequence
  Description of Artificial Sequence: Synthetic oligonucleotide
ggaaccauaguccguauca

SEQ ID NO: 1351595 - RNA, 19 nt, Artificial Sequence
  Description of Artificial Sequence: Synthetic oligonucleotide
aacuucuggccuccgcuca

SEQ ID NO: 1351596 - RNA, 19 nt, Artificial Sequence
  Description of Artificial Sequence: Synthetic oligonucleotide
uaccugaucgugguaguag

SEQ ID NO: 1351597 - RNA, 19 nt, Artificial Sequence
  Description of Artificial Sequence: Synthetic oligonucleotide
ucgagagccucuuccucgg

SEQ ID NO: 1351598 - RNA, 19 nt, Artificial Sequence
  Description of Artificial Sequence: Synthetic oligonucleotide
ucgggugauucuuuucuca

SEQ ID NO: 1351599 - RNA, 19 nt, Artificial Sequence
  Description of Artificial Sequence: Synthetic oligonucleotide
cuucguuccagcccuuagc

SEQ ID NO: 1351600 - RNA, 19 nt, Artificial Sequence
  Description of Artificial Sequence: Synthetic oligonucleotide
agcgggagaaaucugugaa

SEQ ID NO: 1351601 - RNA, 19 nt, Artificial Sequence
  Description of Artificial Sequence: Synthetic oligonucleotide
cacccaagcgacuccaaag

SEQ ID NO: 1351602 - RNA, 19 nt, Artificial Sequence
  Description of Artificial Sequence: Synthetic oligonucleotide
aucaacaucuagggcuagc

SEQ ID NO: 1351603 - RNA, 19 nt, Artificial Sequence
  Description of Artificial Sequence: Synthetic oligonucleotide
uaucgugcucccuagcgau

SEQ ID NO: 1351604 - RNA, 19 nt, Artificial Sequence
  Description of Artificial Sequence: Synthetic oligonucleotide
caucaucaacaucuagggc

SEQ ID NO: 1351605 - RNA, 19 nt, Artificial Sequence
  Description of Artificial Sequence: Synthetic oligonucleotide
cauggaacucaucuaccug

SEQ ID NO: 1351606 - RNA, 19 nt, Artificial Sequence
  Description of Artificial Sequence: Synthetic oligonucleotide
guaggugacgaauuuccga

SEQ ID NO: 1351607 - RNA, 19 nt, Artificial Sequence
  Description of Artificial Sequence: Synthetic oligonucleotide
gauguccaugugcagggac

SEQ ID NO: 1351608 - RNA, 19 nt, Artificial Sequence
  Description of Artificial Sequence: Synthetic oligonucleotide
ucacucucgcucugcacag

SEQ ID NO: 1351609 - RNA, 19 nt, Artificial Sequence
  Description of Artificial Sequence: Synthetic oligonucleotide
aggugauggcucucuuggc

SEQ ID NO: 1351610 - RNA, 19 nt, Artificial Sequence
  Description of Artificial Sequence: Synthetic oligonucleotide
auuaccugugccuccuccu

SEQ ID NO: 1351611 - RNA, 19 nt, Artificial Sequence
  Description of Artificial Sequence: Synthetic oligonucleotide
ugaauuaccugugccuccu

SEQ ID NO: 1351612 - RNA, 19 nt, Artificial Sequence
  Description of Artificial Sequence: Synthetic oligonucleotide
ucgcucucacgccguaucg

SEQ ID NO: 1351613 - RNA, 19 nt, Artificial Sequence
  Description of Artificial Sequence: Synthetic oligonucleotide
uguuuuacucugggguucc

SEQ ID NO: 1351614 - RNA, 19 nt, Artificial Sequence
  Description of Artificial Sequence: Synthetic oligonucleotide
acccaagcgacuccaaagu

SEQ ID NO: 1351615 - RNA, 19 nt, Artificial Sequence
  Description of Artificial Sequence: Synthetic oligonucleotide
cacuauaccgcuguucuuc

SEQ ID NO: 1351616 - RNA, 19 nt, Artificial Sequence
  Description of Artificial Sequence: Synthetic oligonucleotide
uuuucguccguggcggugc

SEQ ID NO: 1351617 - RNA, 19 nt, Artificial Sequence
  Description of Artificial Sequence: Synthetic oligonucleotide
accgguuuugcaaaggccu

SEQ ID NO: 1351618 - RNA, 19 nt, Artificial Sequence
  Description of Artificial Sequence: Synthetic oligonucleotide
aggugacgaauuuccgagg

SEQ ID NO: 1351619 - RNA, 19 nt, Artificial Sequence
  Description of Artificial Sequence: Synthetic oligonucleotide
aguucaccacuauaccgcu

SEQ ID NO: 1351620 - RNA, 19 nt, Artificial Sequence
  Description of Artificial Sequence: Synthetic oligonucleotide
aguaggugacgaauuuccg

SEQ ID NO: 1351621 - RNA, 19 nt, Artificial Sequence
  Description of Artificial Sequence: Synthetic oligonucleotide
auguuggcgcaguaguuca

SEQ ID NO: 1351622 - RNA, 19 nt, Artificial Sequence
  Description of Artificial Sequence: Synthetic oligonucleotide
gucgacuucguuccagccc

SEQ ID NO: 1351623 - RNA, 19 nt, Artificial Sequence
  Description of Artificial Sequence: Synthetic oligonucleotide
acgaacuucccggaccugg

SEQ ID NO: 1351624 - RNA, 19 nt, Artificial Sequence
  Description of Artificial Sequence: Synthetic oligonucleotide
acucucgcucugcacagag

SEQ ID NO: 1351625 - RNA, 19 nt, Artificial Sequence
  Description of Artificial Sequence: Synthetic oligonucleotide
gagucucagcuucauuuac

SEQ ID NO: 1351626 - RNA, 19 nt, Artificial Sequence
  Description of Artificial Sequence: Synthetic oligonucleotide
acaucuagggcuagcaccu

SEQ ID NO: 1351627 - RNA, 19 nt, Artificial Sequence
  Description of Artificial Sequence: Synthetic oligonucleotide
acuauaccgcuguucuucu

SEQ ID NO: 1351628 - RNA, 19 nt, Artificial Sequence
  Description of Artificial Sequence: Synthetic oligonucleotide
uaagaacucgggugauucu

SEQ ID NO: 1351629 - RNA, 19 nt, Artificial Sequence
  Description of Artificial Sequence: Synthetic oligonucleotide
uucacgacccgagucucag

SEQ ID NO: 1351630 - RNA, 19 nt, Artificial Sequence
  Description of Artificial Sequence: Synthetic oligonucleotide
ugucgacuucguuccagcc

SEQ ID NO: 1351631 - RNA, 19 nt, Artificial Sequence
  Description of Artificial Sequence: Synthetic oligonucleotide
gacucugacggccucggga

SEQ ID NO: 1351632 - RNA, 19 nt, Artificial Sequence
  Description of Artificial Sequence: Synthetic oligonucleotide
ucucacgccguaucgugcu

SEQ ID NO: 1351633 - RNA, 19 nt, Artificial Sequence
  Description of Artificial Sequence: Synthetic oligonucleotide
gcuuuuaagaucaaauaaa

SEQ ID NO: 1351634 - RNA, 19 nt, Artificial Sequence
  Description of Artificial Sequence: Synthetic oligonucleotide
auuuaccuggggcaccggu

SEQ ID NO: 1351635 - RNA, 19 nt, Artificial Sequence
  Description of Artificial Sequence: Synthetic oligonucleotide
caccgguuuugcaaaggcc

SEQ ID NO: 1351636 - RNA, 19 nt, Artificial Sequence
  Description of Artificial Sequence: Synthetic oligonucleotide
uggggcaccgguuuugcaa

SEQ ID NO: 1351637 - RNA, 19 nt, Artificial Sequence
  Description of Artificial Sequence: Synthetic oligonucleotide
ugcucccuagcgaugccgc

SEQ ID NO: 1351638 - RNA, 19 nt, Artificial Sequence
  Description of Artificial Sequence: Synthetic oligonucleotide
ucuaccugaucgugguagu

SEQ ID NO: 1351639 - RNA, 19 nt, Artificial Sequence
  Description of Artificial Sequence: Synthetic oligonucleotide
cuagcgaugccgcgauucc

SEQ ID NO: 1351640 - RNA, 19 nt, Artificial Sequence
  Description of Artificial Sequence: Synthetic oligonucleotide
cuaucagcucuaagaacuc

SEQ ID NO: 1351641 - RNA, 19 nt, Artificial Sequence
  Description of Artificial Sequence: Synthetic oligonucleotide
cugauccacaacugacagc

SEQ ID NO: 1351642 - RNA, 19 nt, Artificial Sequence
  Description of Artificial Sequence: Synthetic oligonucleotide
ucucuacgaacuucccgga

SEQ ID NO: 1351643 - RNA, 19 nt, Artificial Sequence
  Description of Artificial Sequence: Synthetic oligonucleotide
gguuauacuuaguccucag

SEQ ID NO: 1351644 - RNA, 19 nt, Artificial Sequence
  Description of Artificial Sequence: Synthetic oligonucleotide
caaguagagguuauacuua

SEQ ID NO: 1351645 - RNA, 19 nt, Artificial Sequence
  Description of Artificial Sequence: Synthetic oligonucleotide
ucgugguaguagcuggagu

SEQ ID NO: 1351646 - RNA, 19 nt, Artificial Sequence
  Description of Artificial Sequence: Synthetic oligonucleotide
cugucgacuucguuccagc

SEQ ID NO: 1351647 - RNA, 19 nt, Artificial Sequence
  Description of Artificial Sequence: Synthetic oligonucleotide
aagcuaggauccacagagg

SEQ ID NO: 1351648 - RNA, 19 nt, Artificial Sequence
  Description of Artificial Sequence: Synthetic oligonucleotide
ugauguuggcgcaguaguu

SEQ ID NO: 1351649 - RNA, 19 nt, Artificial Sequence
  Description of Artificial Sequence: Synthetic oligonucleotide
ccaccaacuguaacaaggg

SEQ ID NO: 1351650 - RNA, 19 nt, Artificial Sequence
  Description of Artificial Sequence: Synthetic oligonucleotide
cacaacugacagcuuguug

SEQ ID NO: 1351651 - RNA, 19 nt, Artificial Sequence
  Description of Artificial Sequence: Synthetic oligonucleotide
agcgaugccgcgauucccg

SEQ ID NO: 1351652 - RNA, 19 nt, Artificial Sequence
  Description of Artificial Sequence: Synthetic oligonucleotide
auaguccguaucauaauaa

SEQ ID NO: 1351653 - RNA, 19 nt, Artificial Sequence
  Description of Artificial Sequence: Synthetic oligonucleotide
caguuucugauccacaacu

SEQ ID NO: 1351654 - RNA, 19 nt, Artificial Sequence
  Description of Artificial Sequence: Synthetic oligonucleotide
uuuuagcaaucugguaggu

SEQ ID NO: 1351655 - RNA, 19 nt, Artificial Sequence
  Description of Artificial Sequence: Synthetic oligonucleotide
ucuugcugacucugacggc

SEQ ID NO: 1351656 - RNA, 19 nt, Artificial Sequence
  Description of Artificial Sequence: Synthetic oligonucleotide
gaacuucccggaccuggcc

SEQ ID NO: 1351657 - RNA, 19 nt, Artificial Sequence
  Description of Artificial Sequence: Synthetic oligonucleotide
ccacugucgacuucguucc

SEQ ID NO: 1351658 - RNA, 19 nt, Artificial Sequence
  Description of Artificial Sequence: Synthetic oligonucleotide
caacaucuagggcuagcac

SEQ ID NO: 1351659 - RNA, 19 nt, Artificial Sequence
  Description of Artificial Sequence: Synthetic oligonucleotide
gagguuauacuuaguccuc

SEQ ID NO: 1351660 - RNA, 19 nt, Artificial Sequence
  Description of Artificial Sequence: Synthetic oligonucleotide
augacaggauguccaugug

SEQ ID NO: 1351661 - RNA, 19 nt, Artificial Sequence
  Description of Artificial Sequence: Synthetic oligonucleotide
cuuccucggcacuauuuuc

SEQ ID NO: 1351662 - RNA, 19 nt, Artificial Sequence
  Description of Artificial Sequence: Synthetic oligonucleotide
gaugccgcgauucccgcaa

SEQ ID NO: 1351663 - RNA, 19 nt, Artificial Sequence
  Description of Artificial Sequence: Synthetic oligonucleotide
cucucacgccguaucgugc

SEQ ID NO: 1351664 - RNA, 19 nt, Artificial Sequence
  Description of Artificial Sequence: Synthetic oligonucleotide
caccaucgcucucacgccg

SEQ ID NO: 1351665 - RNA, 19 nt, Artificial Sequence
  Description of Artificial Sequence: Synthetic oligonucleotide
cuaggauccacagaggccu

SEQ ID NO: 1351666 - RNA, 19 nt, Artificial Sequence
  Description of Artificial Sequence: Synthetic oligonucleotide
ggugacgaauuuccgagga

SEQ ID NO: 1351667 - RNA, 19 nt, Artificial Sequence
  Description of Artificial Sequence: Synthetic oligonucleotide
cccacugucgacuucguuc

SEQ ID NO: 1351668 - RNA, 19 nt, Artificial Sequence
  Description of Artificial Sequence: Synthetic oligonucleotide
guaucgugcucccuagcga

SEQ ID NO: 1351669 - RNA, 19 nt, Artificial Sequence
  Description of Artificial Sequence: Synthetic oligonucleotide
guuggcgcaguaguucaag

SEQ ID NO: 1351670 - RNA, 19 nt, Artificial Sequence
  Description of Artificial Sequence: Synthetic oligonucleotide
agguuauacuuaguccuca

SEQ ID NO: 1351671 - RNA, 19 nt, Artificial Sequence
  Description of Artificial Sequence: Synthetic oligonucleotide
uggcgcaguaguucaagua

SEQ ID NO: 1351672 - RNA, 19 nt, Artificial Sequence
  Description of Artificial Sequence: Synthetic oligonucleotide
guaguucaaguagagguua

SEQ ID NO: 1351673 - RNA, 19 nt, Artificial Sequence
  Description of Artificial Sequence: Synthetic oligonucleotide
ccgaaugccagacaguuca

SEQ ID NO: 1351674 - RNA, 19 nt, Artificial Sequence
  Description of Artificial Sequence: Synthetic oligonucleotide
cucggcacuauuuucuucu

SEQ ID NO: 1351675 - RNA, 19 nt, Artificial Sequence
  Description of Artificial Sequence: Synthetic oligonucleotide
aucgugguaguagcuggag

SEQ ID NO: 1351676 - RNA, 19 nt, Artificial Sequence
  Description of Artificial Sequence: Synthetic oligonucleotide
agcagcgggagaaaucugu

SEQ ID NO: 1351677 - RNA, 19 nt, Artificial Sequence
  Description of Artificial Sequence: Synthetic oligonucleotide
ugacucugacggccucggg

SEQ ID NO: 1351678 - RNA, 19 nt, Artificial Sequence
  Description of Artificial Sequence: Synthetic oligonucleotide
uguucuucgagagccucuu

SEQ ID NO: 1351679 - RNA, 19 nt, Artificial Sequence
  Description of Artificial Sequence: Synthetic oligonucleotide
auuuccgaggacaguuucu

SEQ ID NO: 1351680 - RNA, 19 nt, Artificial Sequence
  Description of Artificial Sequence: Synthetic oligonucleotide
uggcggugcgaccugcccu

SEQ ID NO: 1351681 - RNA, 19 nt, Artificial Sequence
  Description of Artificial Sequence: Synthetic oligonucleotide
gugacgaauuuccgaggac

SEQ ID NO: 1351682 - RNA, 19 nt, Artificial Sequence
  Description of Artificial Sequence: Synthetic oligonucleotide
cucgggugauucuuuucuc

SEQ ID NO: 1351683 - RNA, 19 nt, Artificial Sequence
  Description of Artificial Sequence: Synthetic oligonucleotide
cccuauguuuuacucuggg

SEQ ID NO: 1351684 - RNA, 19 nt, Artificial Sequence
  Description of Artificial Sequence: Synthetic oligonucleotide
auccgcgcuucauggaacu

SEQ ID NO: 1351685 - RNA, 19 nt, Artificial Sequence
  Description of Artificial Sequence: Synthetic oligonucleotide
uuuuacucugggguuccua

SEQ ID NO: 1351686 - RNA, 19 nt, Artificial Sequence
  Description of Artificial Sequence: Synthetic oligonucleotide
cucuacgaacuucccggac

SEQ ID NO: 1351687 - RNA, 19 nt, Artificial Sequence
  Description of Artificial Sequence: Synthetic oligonucleotide
caacuguaacaagggcucc

SEQ ID NO: 1351688 - RNA, 19 nt, Artificial Sequence
  Description of Artificial Sequence: Synthetic oligonucleotide
cguaucgugcucccuagcg

SEQ ID NO: 1351689 - RNA, 19 nt, Artificial Sequence
  Description of Artificial Sequence: Synthetic oligonucleotide
auuuggaaccauaguccgu

SEQ ID NO: 1351690 - RNA, 19 nt, Artificial Sequence
  Description of Artificial Sequence: Synthetic oligonucleotide
aguaggccaaagagcaacu

SEQ ID NO: 1351691 - RNA, 19 nt, Artificial Sequence
  Description of Artificial Sequence: Synthetic oligonucleotide
gcugaauuaccugugccuc

SEQ ID NO: 1351692 - RNA, 19 nt, Artificial Sequence
  Description of Artificial Sequence: Synthetic oligonucleotide
uguuggcgcaguaguucaa

SEQ ID NO: 1351693 - RNA, 19 nt, Artificial Sequence
  Description of Artificial Sequence: Synthetic oligonucleotide
ucuaagaacucgggugauu

SEQ ID NO: 1351694 - RNA, 19 nt, Artificial Sequence
  Description of Artificial Sequence: Synthetic oligonucleotide
aacuucacuuaagcuuaau

SEQ ID NO: 1351695 - RNA, 19 nt, Artificial Sequence
  Description of Artificial Sequence: Synthetic oligonucleotide
acuuaagcuuaaugcucuu

SEQ ID NO: 1351696 - RNA, 19 nt, Artificial Sequence
  Description of Artificial Sequence: Synthetic oligonucleotide
gcaccgguuuugcaaaggc

SEQ ID NO: 1351697 - RNA, 19 nt, Artificial Sequence
  Description of Artificial Sequence: Synthetic oligonucleotide
ucccuagcgaugccgcgau

SEQ ID NO: 1351698 - RNA, 19 nt, Artificial Sequence
  Description of Artificial Sequence: Synthetic oligonucleotide
uuccagcccuuagccaagg

SEQ ID NO: 1351699 - RNA, 19 nt, Artificial Sequence
  Description of Artificial Sequence: Synthetic oligonucleotide
cguaucauaauaaagcuuu

SEQ ID NO: 1351700 - RNA, 19 nt, Artificial Sequence
  Description of Artificial Sequence: Synthetic oligonucleotide
gcuaggauccacagaggcc

SEQ ID NO: 1351701 - RNA, 19 nt, Artificial Sequence
  Description of Artificial Sequence: Synthetic oligonucleotide
cuugguguaaguccccuau

SEQ ID NO: 1351702 - RNA, 19 nt, Artificial Sequence
  Description of Artificial Sequence: Synthetic oligonucleotide
gggcggcgacccuaaaucg

SEQ ID NO: 1351703 - RNA, 19 nt, Artificial Sequence
  Description of Artificial Sequence: Synthetic oligonucleotide
cucuuuuacggagacuuua

SEQ ID NO: 1351704 - RNA, 19 nt, Artificial Sequence
  Description of Artificial Sequence: Synthetic oligonucleotide
gcucucacgccguaucgug

SEQ ID NO: 1351705 - RNA, 19 nt, Artificial Sequence
  Description of Artificial Sequence: Synthetic oligonucleotide
caagcgacuccaaagucau

SEQ ID NO: 1351706 - RNA, 19 nt, Artificial Sequence
  Description of Artificial Sequence: Synthetic oligonucleotide
uaccgcuguucuucucuac

SEQ ID NO: 1351707 - RNA, 19 nt, Artificial Sequence
  Description of Artificial Sequence: Synthetic oligonucleotide
ucacgacccgagucucagc

SEQ ID NO: 1351708 - RNA, 19 nt, Artificial Sequence
  Description of Artificial Sequence: Synthetic oligonucleotide
gugcucccuagcgaugccg

SEQ ID NO: 1351709 - RNA, 19 nt, Artificial Sequence
  Description of Artificial Sequence: Synthetic oligonucleotide
cacgccguaucgugcuccc

SEQ ID NO: 1351710 - RNA, 19 nt, Artificial Sequence
  Description of Artificial Sequence: Synthetic oligonucleotide
cacugggccgcuccacgcc

SEQ ID NO: 1351711 - RNA, 19 nt, Artificial Sequence
  Description of Artificial Sequence: Synthetic oligonucleotide
auaccgcuguucuucucua

SEQ ID NO: 1351712 - RNA, 19 nt, Artificial Sequence
  Description of Artificial Sequence: Synthetic oligonucleotide
gaauuaccugugccuccuc

SEQ ID NO: 1351713 - RNA, 19 nt, Artificial Sequence
  Description of Artificial Sequence: Synthetic oligonucleotide
aagcgacuccaaagucauc

SEQ ID NO: 1351714 - RNA, 19 nt, Artificial Sequence
  Description of Artificial Sequence: Synthetic oligonucleotide
cuauaccgcuguucuucuc

SEQ ID NO: 1351715 - RNA, 19 nt, Artificial Sequence
  Description of Artificial Sequence: Synthetic oligonucleotide
ugccgcgauucccgcaacu

SEQ ID NO: 1351716 - RNA, 19 nt, Artificial Sequence
  Description of Artificial Sequence: Synthetic oligonucleotide
cugggguuccuaucaaucu

SEQ ID NO: 1351717 - RNA, 19 nt, Artificial Sequence
  Description of Artificial Sequence: Synthetic oligonucleotide
cuucgaauuuuggcucuuc

SEQ ID NO: 1351718 - RNA, 19 nt, Artificial Sequence
  Description of Artificial Sequence: Synthetic oligonucleotide
caccacuauaccgcuguuc

SEQ ID NO: 1351719 - RNA, 19 nt, Artificial Sequence
  Description of Artificial Sequence: Synthetic oligonucleotide
gaggccucacucucgcucu

SEQ ID NO: 1351720 - RNA, 19 nt, Artificial Sequence
  Description of Artificial Sequence: Synthetic oligonucleotide
cuacgaacuucccggaccu

SEQ ID NO: 1351721 - RNA, 19 nt, Artificial Sequence
  Description of Artificial Sequence: Synthetic oligonucleotide
cagcgggagaaaucuguga

SEQ ID NO: 1351722 - RNA, 19 nt, Artificial Sequence
  Description of Artificial Sequence: Synthetic oligonucleotide
cgcaguaguucaaguagag

SEQ ID NO: 1351723 - RNA, 19 nt, Artificial Sequence
  Description of Artificial Sequence: Synthetic oligonucleotide
augccgcgauucccgcaac

SEQ ID NO: 1351724 - RNA, 19 nt, Artificial Sequence
  Description of Artificial Sequence: Synthetic oligonucleotide
uccgccaacuuggcuuuga

SEQ ID NO: 1351725 - RNA, 19 nt, Artificial Sequence
  Description of Artificial Sequence: Synthetic oligonucleotide
ccaacuuggcuuugagguc

SEQ ID NO: 1351726 - RNA, 19 nt, Artificial Sequence
  Description of Artificial Sequence: Synthetic oligonucleotide
uccuagcuuuuaagaucaa

SEQ ID NO: 1351727 - RNA, 19 nt, Artificial Sequence
  Description of Artificial Sequence: Synthetic oligonucleotide
gccgcugaauuaccugugc

SEQ ID NO: 1351728 - RNA, 19 nt, Artificial Sequence
  Description of Artificial Sequence: Synthetic oligonucleotide
guggcggugcgaccugccc

SEQ ID NO: 1351729 - RNA, 19 nt, Artificial Sequence
  Description of Artificial Sequence: Synthetic oligonucleotide
gccguaucgugcucccuag

SEQ ID NO: 1351730 - RNA, 19 nt, Artificial Sequence
  Description of Artificial Sequence: Synthetic oligonucleotide
uccguggcggugcgaccug

SEQ ID NO: 1351731 - RNA, 19 nt, Artificial Sequence
  Description of Artificial Sequence: Synthetic oligonucleotide
ggauccgcgcuucauggaa

SEQ ID NO: 1351732 - RNA, 19 nt, Artificial Sequence
  Description of Artificial Sequence: Synthetic oligonucleotide
acagagcucccaccaucau

SEQ ID NO: 1351733 - RNA, 19 nt, Artificial Sequence
  Description of Artificial Sequence: Synthetic oligonucleotide
caucaacaucuagggcuag

SEQ ID NO: 1351734 - RNA, 19 nt, Artificial Sequence
  Description of Artificial Sequence: Synthetic oligonucleotide
gggguuccuaucaaucuuc

SEQ ID NO: 1351735 - RNA, 19 nt, Artificial Sequence
  Description of Artificial Sequence: Synthetic oligonucleotide
ggcggugcgaccugcccug

SEQ ID NO: 1351736 - RNA, 19 nt, Artificial Sequence
  Description of Artificial Sequence: Synthetic oligonucleotide
ggcaccgguuuugcaaagg

SEQ ID NO: 1351737 - RNA, 19 nt, Artificial Sequence
  Description of Artificial Sequence: Synthetic oligonucleotide
ccgcugaauuaccugugcc

SEQ ID NO: 1351738 - RNA, 19 nt, Artificial Sequence
  Description of Artificial Sequence: Synthetic oligonucleotide
ugacggccucgggauuugg

SEQ ID NO: 1351739 - RNA, 19 nt, Artificial Sequence
  Description of Artificial Sequence: Synthetic oligonucleotide
cacgacccgagucucagcu

SEQ ID NO: 1351740 - RNA, 19 nt, Artificial Sequence
  Description of Artificial Sequence: Synthetic oligonucleotide
gcugacucugacggccucg

SEQ ID NO: 1351741 - RNA, 19 nt, Artificial Sequence
  Description of Artificial Sequence: Synthetic oligonucleotide
ccgaacucucuucaucuuc

SEQ ID NO: 1351742 - RNA, 19 nt, Artificial Sequence
  Description of Artificial Sequence: Synthetic oligonucleotide
ccgaggacaguuucugauc

SEQ ID NO: 1351743 - RNA, 19 nt, Artificial Sequence
  Description of Artificial Sequence: Synthetic oligonucleotide
caaauccuucacgacccga

SEQ ID NO: 1351744 - RNA, 19 nt, Artificial Sequence
  Description of Artificial Sequence: Synthetic oligonucleotide
cucgggauuuggaaccaua

SEQ ID NO: 1351745 - RNA, 19 nt, Artificial Sequence
  Description of Artificial Sequence: Synthetic oligonucleotide
cauuuaccuggggcaccgg

SEQ ID NO: 1351746 - RNA, 19 nt, Artificial Sequence
  Description of Artificial Sequence: Synthetic oligonucleotide
cuucacgacccgagucuca

SEQ ID NO: 1351747 - RNA, 19 nt, Artificial Sequence
  Description of Artificial Sequence: Synthetic oligonucleotide
uacgaacuucccggaccug

SEQ ID NO: 1351748 - RNA, 19 nt, Artificial Sequence
  Description of Artificial Sequence: Synthetic oligonucleotide
ccaaauccuucacgacccg

SEQ ID NO: 1351749 - RNA, 19 nt, Artificial Sequence
  Description of Artificial Sequence: Synthetic oligonucleotide
cagcagcgggagaaaucug

SEQ ID NO: 1351750 - RNA, 19 nt, Artificial Sequence
  Description of Artificial Sequence: Synthetic oligonucleotide
cccuaaaucguccucauuu

SEQ ID NO: 1351751 - RNA, 19 nt, Artificial Sequence
  Description of Artificial Sequence: Synthetic oligonucleotide
acccuaaaucguccucauu

SEQ ID NO: 1351752 - RNA, 19 nt, Artificial Sequence
  Description of Artificial Sequence: Synthetic oligonucleotide
ccuuucuaugacaggaugu

SEQ ID NO: 1351753 - RNA, 19 nt, Artificial Sequence
  Description of Artificial Sequence: Synthetic oligonucleotide
ggacaagcuaggauccaca

SEQ ID NO: 1351754 - RNA, 19 nt, Artificial Sequence
  Description of Artificial Sequence: Synthetic oligonucleotide
gcucccuagcgaugccgcg

SEQ ID NO: 1351755 - RNA, 19 nt, Artificial Sequence
  Description of Artificial Sequence: Synthetic oligonucleotide
uggcuuagcuuugguuaau

SEQ ID NO: 1351756 - RNA, 19 nt, Artificial Sequence
  Description of Artificial Sequence: Synthetic oligonucleotide
uggccucgccuucgaauuu

SEQ ID NO: 1351757 - RNA, 19 nt, Artificial Sequence
  Description of Artificial Sequence: Synthetic oligonucleotide
gacccuaaaucguccucau

SEQ ID NO: 1351758 - RNA, 19 nt, Artificial Sequence
  Description of Artificial Sequence: Synthetic oligonucleotide
gcagcgggagaaaucugug

SEQ ID NO: 1351759 - RNA, 19 nt, Artificial Sequence
  Description of Artificial Sequence: Synthetic oligonucleotide
caacugacagcuuguugau

SEQ ID NO: 1351760 - RNA, 19 nt, Artificial Sequence
  Description of Artificial Sequence: Synthetic oligonucleotide
ccucgccuucgaauuuugg

SEQ ID NO: 1351761 - RNA, 19 nt, Artificial Sequence
  Description of Artificial Sequence: Synthetic oligonucleotide
gaauuuccgaggacaguuu

SEQ ID NO: 1351762 - RNA, 19 nt, Artificial Sequence
  Description of Artificial Sequence: Synthetic oligonucleotide
caacuucacuuaagcuuaa

SEQ ID NO: 1351763 - RNA, 19 nt, Artificial Sequence
  Description of Artificial Sequence: Synthetic oligonucleotide
uaccuggggcaccgguuuu

SEQ ID NO: 1351764 - RNA, 19 nt, Artificial Sequence
  Description of Artificial Sequence: Synthetic oligonucleotide
aucgugcucccuagcgaug

SEQ ID NO: 1351765 - RNA, 19 nt, Artificial Sequence
  Description of Artificial Sequence: Synthetic oligonucleotide
ccaggcgccgcugaauuac

SEQ ID NO: 1351766 - RNA, 19 nt, Artificial Sequence
  Description of Artificial Sequence: Synthetic oligonucleotide
ccgguuuugcaaaggccuc

SEQ ID NO: 1351767 - RNA, 19 nt, Artificial Sequence
  Description of Artificial Sequence: Synthetic oligonucleotide
gacggccucgggauuugga

SEQ ID NO: 1351768 - RNA, 19 nt, Artificial Sequence
  Description of Artificial Sequence: Synthetic oligonucleotide
gguguaaguccccuauuuu

SEQ ID NO: 1351769 - RNA, 19 nt, Artificial Sequence
  Description of Artificial Sequence: Synthetic oligonucleotide
ggggcaccgguuuugcaaa

SEQ ID NO: 1351770 - RNA, 19 nt, Artificial Sequence
  Description of Artificial Sequence: Synthetic oligonucleotide
ucccaccaucaucccuccu

SEQ ID NO: 1351771 - RNA, 19 nt, Artificial Sequence
  Description of Artificial Sequence: Synthetic oligonucleotide
cucacgccguaucgugcuc

SEQ ID NO: 1351772 - RNA, 19 nt, Artificial Sequence
  Description of Artificial Sequence: Synthetic oligonucleotide
cugugaguaggugacgaau

SEQ ID NO: 1351773 - RNA, 19 nt, Artificial Sequence
  Description of Artificial Sequence: Synthetic oligonucleotide
cgccuucgaauuuuggcuc

SEQ ID NO: 1351774 - RNA, 19 nt, Artificial Sequence
  Description of Artificial Sequence: Synthetic oligonucleotide
cucccuagcgaugccgcga

SEQ ID NO: 1351775 - RNA, 19 nt, Artificial Sequence
  Description of Artificial Sequence: Synthetic oligonucleotide
cuggccucgccuucgaauu

SEQ ID NO: 1351776 - RNA, 19 nt, Artificial Sequence
  Description of Artificial Sequence: Synthetic oligonucleotide
acgacccgagucucagcuu

SEQ ID NO: 1351777 - RNA, 19 nt, Artificial Sequence
  Description of Artificial Sequence: Synthetic oligonucleotide
agcccgaaugccagacagu

SEQ ID NO: 1351778 - RNA, 19 nt, Artificial Sequence
  Description of Artificial Sequence: Synthetic oligonucleotide
gcgcaguaguucaaguaga

SEQ ID NO: 1351779 - RNA, 19 nt, Artificial Sequence
  Description of Artificial Sequence: Synthetic oligonucleotide
cuccacccaagcgacucca

SEQ ID NO: 1351780 - RNA, 19 nt, Artificial Sequence
  Description of Artificial Sequence: Synthetic oligonucleotide
gacccgagucucagcuuca

SEQ ID NO: 1351781 - RNA, 19 nt, Artificial Sequence
  Description of Artificial Sequence: Synthetic oligonucleotide
gggcaccgguuuugcaaag

SEQ ID NO: 1351782 - RNA, 19 nt, Artificial Sequence
  Description of Artificial Sequence: Synthetic oligonucleotide
cgauucccgcaacuucugg

SEQ ID NO: 1351783 - RNA, 19 nt, Artificial Sequence
  Description of Artificial Sequence: Synthetic oligonucleotide
uccgcgcuucauggaacuc

SEQ ID NO: 1351784 - RNA, 19 nt, Artificial Sequence
  Description of Artificial Sequence: Synthetic oligonucleotide
cgacccgagucucagcuuc

SEQ ID NO: 1351785 - RNA, 19 nt, Artificial Sequence
  Description of Artificial Sequence: Synthetic oligonucleotide
cugacggccucgggauuug

SEQ ID NO: 1351786 - RNA, 19 nt, Artificial Sequence
  Description of Artificial Sequence: Synthetic oligonucleotide
gccgccgggaucucuucac

SEQ ID NO: 1351787 - RNA, 19 nt, Artificial Sequence
  Description of Artificial Sequence: Synthetic oligonucleotide
gcgacccuaaaucguccuc

SEQ ID NO: 1351788 - RNA, 19 nt, Artificial Sequence
  Description of Artificial Sequence: Synthetic oligonucleotide
ccgggauccgcgcuucaug

SEQ ID NO: 1351789 - RNA, 19 nt, Artificial Sequence
  Description of Artificial Sequence: Synthetic oligonucleotide
ccgggaucucuucaccauc

SEQ ID NO: 1351790 - RNA, 19 nt, Artificial Sequence
  Description of Artificial Sequence: Synthetic oligonucleotide
gcggcgacccuaaaucguc

SEQ ID NO: 1351791 - RNA, 19 nt, Artificial Sequence
  Description of Artificial Sequence: Synthetic oligonucleotide
cuaccugaucgugguagua

SEQ ID NO: 1351792 - RNA, 19 nt, Artificial Sequence
  Description of Artificial Sequence: Synthetic oligonucleotide
gcgaugccgcgauucccgc

SEQ ID NO: 1351793 - RNA, 19 nt, Artificial Sequence
  Description of Artificial Sequence: Synthetic oligonucleotide
cccgaaugccagacaguuc

SEQ ID NO: 1351794 - RNA, 19 nt, Artificial Sequence
  Description of Artificial Sequence: Synthetic oligonucleotide
ccgcgauucccgcaacuuc

SEQ ID NO: 1351795 - RNA, 19 nt, Artificial Sequence
  Description of Artificial Sequence: Synthetic oligonucleotide
cuggggcaccgguuuugca

SEQ ID NO: 1351796 - RNA, 19 nt, Artificial Sequence
  Description of Artificial Sequence: Synthetic oligonucleotide
ugcccgggauccgcgcuuc

SEQ ID NO: 1351797 - RNA, 19 nt, Artificial Sequence
  Description of Artificial Sequence: Synthetic oligonucleotide
gcgccgcugaauuaccugu

SEQ ID NO: 1351798 - RNA, 19 nt, Artificial Sequence
  Description of Artificial Sequence: Synthetic oligonucleotide
uucguccguggcggugcga

SEQ ID NO: 1351799 - RNA, 19 nt, Artificial Sequence
  Description of Artificial Sequence: Synthetic oligonucleotide
accuggccucgccuucgaa

SEQ ID NO: 1351800 - RNA, 19 nt, Artificial Sequence
  Description of Artificial Sequence: Synthetic oligonucleotide
ccuucacgacccgagucuc

SEQ ID NO: 1351801 - RNA, 19 nt, Artificial Sequence
  Description of Artificial Sequence: Synthetic oligonucleotide
guccguggcggugcgaccu

SEQ ID NO: 1351802 - RNA, 19 nt, Artificial Sequence
  Description of Artificial Sequence: Synthetic oligonucleotide
gccuucgaauuuuggcucu

SEQ ID NO: 1351803 - RNA, 19 nt, Artificial Sequence
  Description of Artificial Sequence: Synthetic oligonucleotide
ccuggggcaccgguuuugc

SEQ ID NO: 1351804 - RNA, 19 nt, Artificial Sequence
  Description of Artificial Sequence: Synthetic oligonucleotide
ccguaucgugcucccuagc

SEQ ID NO: 1351805 - RNA, 19 nt, Artificial Sequence
  Description of Artificial Sequence: Synthetic oligonucleotide
cauuuucguccguggcggu

SEQ ID NO: 1351806 - RNA, 19 nt, Artificial Sequence
  Description of Artificial Sequence: Synthetic oligonucleotide
cgcaacuucuggccuccgc

SEQ ID NO: 1351807 - RNA, 19 nt, Artificial Sequence
  Description of Artificial Sequence: Synthetic oligonucleotide
ggcgacccuaaaucguccu

SEQ ID NO: 1351808 - RNA, 19 nt, Artificial Sequence
  Description of Artificial Sequence: Synthetic oligonucleotide
ccgccgggaucucuucacc

SEQ ID NO: 1351809 - RNA, 19 nt, Artificial Sequence
  Description of Artificial Sequence: Synthetic oligonucleotide
ccguaucauaauaaagcuu

SEQ ID NO: 1351810 - RNA, 19 nt, Artificial Sequence
  Description of Artificial Sequence: Synthetic oligonucleotide
guaggccaaagagcaacuu

SEQ ID NO: 1351811 - RNA, 19 nt, Artificial Sequence
  Description of Artificial Sequence: Synthetic oligonucleotide
cgacccuaaaucguccuca

SEQ ID NO: 1351812 - RNA, 19 nt, Artificial Sequence
  Description of Artificial Sequence: Synthetic oligonucleotide
cgcugaauuaccugugccu

SEQ ID NO: 1351813 - RNA, 19 nt, Artificial Sequence
  Description of Artificial Sequence: Synthetic oligonucleotide
cggcgacccuaaaucgucc

SEQ ID NO: 1351814 - RNA, 19 nt, Artificial Sequence
  Description of Artificial Sequence: Synthetic oligonucleotide
ccagcccuuagccaaggcu

SEQ ID NO: 1351815 - RNA, 19 nt, Artificial Sequence
  Description of Artificial Sequence: Synthetic oligonucleotide
gcgacuccaaagucauccu

SEQ ID NO: 1351816 - RNA, 19 nt, Artificial Sequence
  Description of Artificial Sequence: Synthetic oligonucleotide
gguuccuaucaaucuucuu

SEQ ID NO: 1351817 - RNA, 19 nt, Artificial Sequence
  Description of Artificial Sequence: Synthetic oligonucleotide
cgcgauucccgcaacuucu

SEQ ID NO: 1351818 - RNA, 19 nt, Artificial Sequence
  Description of Artificial Sequence: Synthetic oligonucleotide
ccugaucgugguaguagcu

SEQ ID NO: 1351819 - RNA, 19 nt, Artificial Sequence
  Description of Artificial Sequence: Synthetic oligonucleotide
ccgcgcuucauggaacuca

SEQ ID NO: 1351820 - RNA, 19 nt, Artificial Sequence
  Description of Artificial Sequence: Synthetic oligonucleotide
guuuuacucugggguuccu

SEQ ID NO: 1351821 - RNA, 19 nt, Artificial Sequence
  Description of Artificial Sequence: Synthetic oligonucleotide
cgaauuuccgaggacaguu

SEQ ID NO: 1351822 - RNA, 19 nt, Artificial Sequence
  Description of Artificial Sequence: Synthetic oligonucleotide
acgccguaucgugcucccu

SEQ ID NO: 1351823 - RNA, 19 nt, Artificial Sequence
  Description of Artificial Sequence: Synthetic oligonucleotide
gcccgaaugccagacaguu

SEQ ID NO: 1351824 - RNA, 19 nt, Artificial Sequence
  Description of Artificial Sequence: Synthetic oligonucleotide
cacucucgcucugcacaga

SEQ ID NO: 1351825 - RNA, 19 nt, Artificial Sequence
  Description of Artificial Sequence: Synthetic oligonucleotide
ccacccaagcgacuccaaa

SEQ ID NO: 1351826 - RNA, 19 nt, Artificial Sequence
  Description of Artificial Sequence: Synthetic oligonucleotide
ggcggcgacccuaaaucgu

SEQ ID NO: 1351827 - RNA, 19 nt, Artificial Sequence
  Description of Artificial Sequence: Synthetic oligonucleotide
cguggcggugcgaccugcc

SEQ ID NO: 1351828 - RNA, 19 nt, Artificial Sequence
  Description of Artificial Sequence: Synthetic oligonucleotide
cucggccuccgaacucucu

SEQ ID NO: 1351829 - RNA, 19 nt, Artificial Sequence
  Description of Artificial Sequence: Synthetic oligonucleotide
cccggagagggcggcgacc

SEQ ID NO: 1351830 - RNA, 19 nt, Artificial Sequence
  Description of Artificial Sequence: Synthetic oligonucleotide
ccuggccucgccuucgaau

SEQ ID NO: 1351831 - RNA, 19 nt, Artificial Sequence
  Description of Artificial Sequence: Synthetic oligonucleotide
cgccgggaucucuucacca

SEQ ID NO: 1351832 - RNA, 19 nt, Artificial Sequence
  Description of Artificial Sequence: Synthetic oligonucleotide
ccagcccgaaugccagaca

SEQ ID NO: 1351833 - RNA, 19 nt, Artificial Sequence
  Description of Artificial Sequence: Synthetic oligonucleotide
cguccguggcggugcgacc

SEQ ID NO: 1351834 - RNA, 19 nt, Artificial Sequence
  Description of Artificial Sequence: Synthetic oligonucleotide
gccaggcgccgcugaauua

SEQ ID NO: 1351835 - RNA, 19 nt, Artificial Sequence
  Description of Artificial Sequence: Synthetic oligonucleotide
caucgcucucacgccguau

SEQ ID NO: 1351836 - RNA, 19 nt, Artificial Sequence
  Description of Artificial Sequence: Synthetic oligonucleotide
ccccggagagggcggcgac

SEQ ID NO: 1351837 - RNA, 19 nt, Artificial Sequence
  Description of Artificial Sequence: Synthetic oligonucleotide
cgccguaucgugcucccua

SEQ ID NO: 1351838 - RNA, 19 nt, Artificial Sequence
  Description of Artificial Sequence: Synthetic oligonucleotide
ccguggcggugcgaccugc

SEQ ID NO: 1351839 - RNA, 19 nt, Artificial Sequence
  Description of Artificial Sequence: Synthetic oligonucleotide
cucugacggccucgggauu

SEQ ID NO: 1351840 - RNA, 19 nt, Artificial Sequence
  Description of Artificial Sequence: Synthetic oligonucleotide
gcgcuucauggaacucauc

SEQ ID NO: 1351841 - RNA, 19 nt, Artificial Sequence
  Description of Artificial Sequence: Synthetic oligonucleotide
cgaugccgcgauucccgca

SEQ ID NO: 1351842 - RNA, 19 nt, Artificial Sequence
  Description of Artificial Sequence: Synthetic oligonucleotide
gccgcgauucccgcaacuu

SEQ ID NO: 1351843 - RNA, 19 nt, Artificial Sequence
  Description of Artificial Sequence: Synthetic oligonucleotide
ccgcaacuucuggccuccg

SEQ ID NO: 1351844 - RNA, 19 nt, Artificial Sequence
  Description of Artificial Sequence: Synthetic oligonucleotide
ggccucgccuucgaauuuu

SEQ ID NO: 1351845 - RNA, 19 nt, Artificial Sequence
  Description of Artificial Sequence: Synthetic oligonucleotide
ccaucgcucucacgccgua

SEQ ID NO: 1351846 - RNA, 19 nt, Artificial Sequence
  Description of Artificial Sequence: Synthetic oligonucleotide
gcccgggauccgcgcuuca

SEQ ID NO: 1351847 - RNA, 19 nt, Artificial Sequence
  Description of Artificial Sequence: Synthetic oligonucleotide
cccggaccuggccucgccu

SEQ ID NO: 1351848 - RNA, 19 nt, Artificial Sequence
  Description of Artificial Sequence: Synthetic oligonucleotide
ccggaccuggccucgccuu

SEQ ID NO: 1351849 - RNA, 19 nt, Artificial Sequence
  Description of Artificial Sequence: Synthetic oligonucleotide
ccuucgaauuuuggcucuu

SEQ ID NO: 1351850 - RNA, 19 nt, Artificial Sequence
  Description of Artificial Sequence: Synthetic oligonucleotide
cgcucucacgccguaucgu

SEQ ID NO: 1351851 - RNA, 19 nt, Artificial Sequence
  Description of Artificial Sequence: Synthetic oligonucleotide
ccucgggauuuggaaccau

SEQ ID NO: 1351852 - RNA, 19 nt, Artificial Sequence
  Description of Artificial Sequence: Synthetic oligonucleotide
ccccacugucgacuucguu

SEQ ID NO: 1351853 - RNA, 19 nt, Artificial Sequence
  Description of Artificial Sequence: Synthetic oligonucleotide
cccgggauccgcgcuucau

SEQ ID NO: 1351854 - RNA, 19 nt, Artificial Sequence
  Description of Artificial Sequence: Synthetic oligonucleotide
cgacuucguuccagcccuu

SEQ ID NO: 1351855 - RNA, 19 nt, Artificial Sequence
  Description of Artificial Sequence: Synthetic oligonucleotide
cccuagcgaugccgcgauu

SEQ ID NO: 1351856 - RNA, 19 nt, Artificial Sequence
  Description of Artificial Sequence: Synthetic oligonucleotide
auugucacaguuuagugcc

SEQ ID NO: 1351857 - RNA, 19 nt, Artificial Sequence
  Description of Artificial Sequence: Synthetic oligonucleotide
aacagauacacuggaaagc

SEQ ID NO: 1351858 - RNA, 19 nt, Artificial Sequence
  Description of Artificial Sequence: Synthetic oligonucleotide
uguggucuaggucacagcg

SEQ ID NO: 1351859 - RNA, 19 nt, Artificial Sequence
  Description of Artificial Sequence: Synthetic oligonucleotide
aacuaagcccacuacgaac

SEQ ID NO: 1351860 - RNA, 19 nt, Artificial Sequence
  Description of Artificial Sequence: Synthetic oligonucleotide
agauuuacccuucucuggc

SEQ ID NO: 1351861 - RNA, 19 nt, Artificial Sequence
  Description of Artificial Sequence: Synthetic oligonucleotide
cucuaaguagccuucaggg

SEQ ID NO: 1351862 - RNA, 19 nt, Artificial Sequence
  Description of Artificial Sequence: Synthetic oligonucleotide
uuaacuggugagcaaggcg

SEQ ID NO: 1351863 - RNA, 19 nt, Artificial Sequence
  Description of Artificial Sequence: Synthetic oligonucleotide
acagauacacuggaaagcc

SEQ ID NO: 1351864 - RNA, 19 nt, Artificial Sequence
  Description of Artificial Sequence: Synthetic oligonucleotide
agcaccaacgaguaggcac

SEQ ID NO: 1351865 - RNA, 19 nt, Artificial Sequence
  Description of Artificial Sequence: Synthetic oligonucleotide
aguacuggcaggauggacc

SEQ ID NO: 1351866 - RNA, 19 nt, Artificial Sequence
  Description of Artificial Sequence: Synthetic oligonucleotide
agugccagagcccuguugg

SEQ ID NO: 1351867 - RNA, 19 nt, Artificial Sequence
  Description of Artificial Sequence: Synthetic oligonucleotide
uuccgcuuggacauggugg

SEQ ID NO: 1351868 - RNA, 19 nt, Artificial Sequence
  Description of Artificial Sequence: Synthetic oligonucleotide
aaauaacagagguccaacu

SEQ ID NO: 1351869 - RNA, 19 nt, Artificial Sequence
  Description of Artificial Sequence: Synthetic oligonucleotide
aaccugauacggcccaccc

SEQ ID NO: 1351870 - RNA, 19 nt, Artificial Sequence
  Description of Artificial Sequence: Synthetic oligonucleotide
acauugugcugacacacgg

SEQ ID NO: 1351871 - RNA, 19 nt, Artificial Sequence
  Description of Artificial Sequence: Synthetic oligonucleotide
cucggagaaguguugaggg

SEQ ID NO: 1351872 - RNA, 19 nt, Artificial Sequence
  Description of Artificial Sequence: Synthetic oligonucleotide
ugcauagugagccccagcu

SEQ ID NO: 1351873 - RNA, 19 nt, Artificial Sequence
  Description of Artificial Sequence: Synthetic oligonucleotide
uguguagggcuccaguuug

SEQ ID NO: 1351874 - RNA, 19 nt, Artificial Sequence
  Description of Artificial Sequence: Synthetic oligonucleotide
agacauugugcugacacac

SEQ ID NO: 1351875 - RNA, 19 nt, Artificial Sequence
  Description of Artificial Sequence: Synthetic oligonucleotide
aagcacacuugcgacaugg

SEQ ID NO: 1351876 - RNA, 19 nt, Artificial Sequence
  Description of Artificial Sequence: Synthetic oligonucleotide
uucaggguacugcauagug

SEQ ID NO: 1351877 - RNA, 19 nt, Artificial Sequence
  Description of Artificial Sequence: Synthetic oligonucleotide
auugugcugacacacggug

SEQ ID NO: 1351878 - RNA, 19 nt, Artificial Sequence
  Description of Artificial Sequence: Synthetic oligonucleotide
caggguacugcauagugag

SEQ ID NO: 1351879 - RNA, 19 nt, Artificial Sequence
  Description of Artificial Sequence: Synthetic oligonucleotide
ugcacugggaguguguagg

SEQ ID NO: 1351880 - RNA, 19 nt, Artificial Sequence
  Description of Artificial Sequence: Synthetic oligonucleotide
auagcgguugcccucugcg

SEQ ID NO: 1351881 - RNA, 19 nt, Artificial Sequence
  Description of Artificial Sequence: Synthetic oligonucleotide
cucacgaccaccacacacg

SEQ ID NO: 1351882 - RNA, 19 nt, Artificial Sequence
  Description of Artificial Sequence: Synthetic oligonucleotide
augcacaccagacucacug

SEQ ID NO: 1351883 - RNA, 19 nt, Artificial Sequence
  Description of Artificial Sequence: Synthetic oligonucleotide
cugaagcgaacucagcacg

SEQ ID NO: 1351884 - RNA, 19 nt, Artificial Sequence
  Description of Artificial Sequence: Synthetic oligonucleotide
cagauuuacccuucucugg

SEQ ID NO: 1351885 - RNA, 19 nt, Artificial Sequence
  Description of Artificial Sequence: Synthetic oligonucleotide
acaaggaagccagauuuac

SEQ ID NO: 1351886 - RNA, 19 nt, Artificial Sequence
  Description of Artificial Sequence: Synthetic oligonucleotide
caggcaauacagauggaag

SEQ ID NO: 1351887 - RNA, 19 nt, Artificial Sequence
  Description of Artificial Sequence: Synthetic oligonucleotide
agcuaaacaccucggcacg

SEQ ID NO: 1351888 - RNA, 19 nt, Artificial Sequence
  Description of Artificial Sequence: Synthetic oligonucleotide
agauacacuggaaagccuc

SEQ ID NO: 1351889 - RNA, 19 nt, Artificial Sequence
  Description of Artificial Sequence: Synthetic oligonucleotide
aaaccugauacggcccacc

SEQ ID NO: 1351890 - RNA, 19 nt, Artificial Sequence
  Description of Artificial Sequence: Synthetic oligonucleotide
acuacgaacucggagaagu

SEQ ID NO: 1351891 - RNA, 19 nt, Artificial Sequence
  Description of Artificial Sequence: Synthetic oligonucleotide
ugguuaacuggugagcaag

SEQ ID NO: 1351892 - RNA, 19 nt, Artificial Sequence
  Description of Artificial Sequence: Synthetic oligonucleotide
acugguagccagaacacgg

SEQ ID NO: 1351893 - RNA, 19 nt, Artificial Sequence
  Description of Artificial Sequence: Synthetic oligonucleotide
ucuaaguagccuucagggu

SEQ ID NO: 1351894 - RNA, 19 nt, Artificial Sequence
  Description of Artificial Sequence: Synthetic oligonucleotide
acugccauagccagggaac

SEQ ID NO: 1351895 - RNA, 19 nt, Artificial Sequence
  Description of Artificial Sequence: Synthetic oligonucleotide
ucaggguacugcauaguga

SEQ ID NO: 1351896 - RNA, 19 nt, Artificial Sequence
  Description of Artificial Sequence: Synthetic oligonucleotide
cuaggucacagcgacaggc

SEQ ID NO: 1351897 - RNA, 19 nt, Artificial Sequence
  Description of Artificial Sequence: Synthetic oligonucleotide
gaugccgucauagcgguug

SEQ ID NO: 1351898 - RNA, 19 nt, Artificial Sequence
  Description of Artificial Sequence: Synthetic oligonucleotide
aacucggagaaguguugag

SEQ ID NO: 1351899 - RNA, 19 nt, Artificial Sequence
  Description of Artificial Sequence: Synthetic oligonucleotide
aacugguagccagaacacg

SEQ ID NO: 1351900 - RNA, 19 nt, Artificial Sequence
  Description of Artificial Sequence: Synthetic oligonucleotide
ucaucguccuugcaguacu

SEQ ID NO: 1351901 - RNA, 19 nt, Artificial Sequence
  Description of Artificial Sequence: Synthetic oligonucleotide
ugccacauguggccgaugc

SEQ ID NO: 1351902 - RNA, 19 nt, Artificial Sequence
  Description of Artificial Sequence: Synthetic oligonucleotide
uccaaacuaagcccacuac

SEQ ID NO: 1351903 - RNA, 19 nt, Artificial Sequence
  Description of Artificial Sequence: Synthetic oligonucleotide
cagaacacgggguuccugc

SEQ ID NO: 1351904 - RNA, 19 nt, Artificial Sequence
  Description of Artificial Sequence: Synthetic oligonucleotide
gucuaggucacagcgacag

SEQ ID NO: 1351905 - RNA, 19 nt, Artificial Sequence
  Description of Artificial Sequence: Synthetic oligonucleotide
aggauggaccacucuuccc

SEQ ID NO: 1351906 - RNA, 19 nt, Artificial Sequence
  Description of Artificial Sequence: Synthetic oligonucleotide
agcgguugcccucugcggg

SEQ ID NO: 1351907 - RNA, 19 nt, Artificial Sequence
  Description of Artificial Sequence: Synthetic oligonucleotide
acauguggccgaugcacac

SEQ ID NO: 1351908 - RNA, 19 nt, Artificial Sequence
  Description of Artificial Sequence: Synthetic oligonucleotide
uucguggcaucaccgacca

SEQ ID NO: 1351909 - RNA, 19 nt, Artificial Sequence
  Description of Artificial Sequence: Synthetic oligonucleotide
aagcgaacucagcacguca

SEQ ID NO: 1351910 - RNA, 19 nt, Artificial Sequence
  Description of Artificial Sequence: Synthetic oligonucleotide
cacgaaaggaccuguccag

SEQ ID NO: 1351911 - RNA, 19 nt, Artificial Sequence
  Description of Artificial Sequence: Synthetic oligonucleotide
ccaaacuaagcccacuacg

SEQ ID NO: 1351912 - RNA, 19 nt, Artificial Sequence
  Description of Artificial Sequence: Synthetic oligonucleotide
acuaagcccacuacgaacu

SEQ ID NO: 1351913 - RNA, 19 nt, Artificial Sequence
  Description of Artificial Sequence: Synthetic oligonucleotide
uucauguugcggaccacac

SEQ ID NO: 1351914 - RNA, 19 nt, Artificial Sequence
  Description of Artificial Sequence: Synthetic oligonucleotide
acucggagaaguguugagg

SEQ ID NO: 1351915 - RNA, 19 nt, Artificial Sequence
  Description of Artificial Sequence: Synthetic oligonucleotide
acguggcaagcacacuugc

SEQ ID NO: 1351916 - RNA, 19 nt, Artificial Sequence
  Description of Artificial Sequence: Synthetic oligonucleotide
gauacggcccacccugaag

SEQ ID NO: 1351917 - RNA, 19 nt, Artificial Sequence
  Description of Artificial Sequence: Synthetic oligonucleotide
cuugcgacaugguuuguuc

SEQ ID NO: 1351918 - RNA, 19 nt, Artificial Sequence
  Description of Artificial Sequence: Synthetic oligonucleotide
cuaaguagccuucagggua

SEQ ID NO: 1351919 - RNA, 19 nt, Artificial Sequence
  Description of Artificial Sequence: Synthetic oligonucleotide
cugguucguggcaucaccg

SEQ ID NO: 1351920 - RNA, 19 nt, Artificial Sequence
  Description of Artificial Sequence: Synthetic oligonucleotide
ugaagcgaacucagcacgu

SEQ ID NO: 1351921 - RNA, 19 nt, Artificial Sequence
  Description of Artificial Sequence: Synthetic oligonucleotide
ucugcgggugcguacuugc

SEQ ID NO: 1351922 - RNA, 19 nt, Artificial Sequence
  Description of Artificial Sequence: Synthetic oligonucleotide
ugccugagaggucucggcc

SEQ ID NO: 1351923 - RNA, 19 nt, Artificial Sequence
  Description of Artificial Sequence: Synthetic oligonucleotide
ucuaggucacagcgacagg

SEQ ID NO: 1351924 - RNA, 19 nt, Artificial Sequence
  Description of Artificial Sequence: Synthetic oligonucleotide
uccgcuuggacaugguggu

SEQ ID NO: 1351925 - RNA, 19 nt, Artificial Sequence
  Description of Artificial Sequence: Synthetic oligonucleotide
ucguccuugcaguacuggc

SEQ ID NO: 1351926 - RNA, 19 nt, Artificial Sequence
  Description of Artificial Sequence: Synthetic oligonucleotide
caacugguagccagaacac

SEQ ID NO: 1351927 - RNA, 19 nt, Artificial Sequence
  Description of Artificial Sequence: Synthetic oligonucleotide
caguuuagugccagagccc

SEQ ID NO: 1351928 - RNA, 19 nt, Artificial Sequence
  Description of Artificial Sequence: Synthetic oligonucleotide
accucggcacgaaaggacc

SEQ ID NO: 1351929 - RNA, 19 nt, Artificial Sequence
  Description of Artificial Sequence: Synthetic oligonucleotide
gagcaaggcggacgggucg

SEQ ID NO: 1351930 - RNA, 19 nt, Artificial Sequence
  Description of Artificial Sequence: Synthetic oligonucleotide
auugcuccggccauggaug

SEQ ID NO: 1351931 - RNA, 19 nt, Artificial Sequence
  Description of Artificial Sequence: Synthetic oligonucleotide
ggcaucaccgaccacugcc

SEQ ID NO: 1351932 - RNA, 19 nt, Artificial Sequence
  Description of Artificial Sequence: Synthetic oligonucleotide
aauacagauggaaggccau

SEQ ID NO: 1351933 - RNA, 19 nt, Artificial Sequence
  Description of Artificial Sequence: Synthetic oligonucleotide
ucggagaaguguugagggc

SEQ ID NO: 1351934 - RNA, 19 nt, Artificial Sequence
  Description of Artificial Sequence: Synthetic oligonucleotide
aaggcggacgggucgccag

SEQ ID NO: 1351935 - RNA, 19 nt, Artificial Sequence
  Description of Artificial Sequence: Synthetic oligonucleotide
ucacgaccaccacacacgu

SEQ ID NO: 1351936 - RNA, 19 nt, Artificial Sequence
  Description of Artificial Sequence: Synthetic oligonucleotide
aguaggcaccaucauugcu

SEQ ID NO: 1351937 - RNA, 19 nt, Artificial Sequence
  Description of Artificial Sequence: Synthetic oligonucleotide
ugcgacaugguuuguucuc

SEQ ID NO: 1351938 - RNA, 19 nt, Artificial Sequence
  Description of Artificial Sequence: Synthetic oligonucleotide
cucuucuuggacacuugug

SEQ ID NO: 1351939 - RNA, 19 nt, Artificial Sequence
  Description of Artificial Sequence: Synthetic oligonucleotide
aguguguagggcuccaguu

SEQ ID NO: 1351940 - RNA, 19 nt, Artificial Sequence
  Description of Artificial Sequence: Synthetic oligonucleotide
ggguacugcauagugagcc

SEQ ID NO: 1351941 - RNA, 19 nt, Artificial Sequence
  Description of Artificial Sequence: Synthetic oligonucleotide
caggauggaccacucuucc

SEQ ID NO: 1351942 - RNA, 19 nt, Artificial Sequence
  Description of Artificial Sequence: Synthetic oligonucleotide
cuucaccuugcucagaaaa

SEQ ID NO: 1351943 - RNA, 19 nt, Artificial Sequence
  Description of Artificial Sequence: Synthetic oligonucleotide
acacguggcaagcacacuu

SEQ ID NO: 1351944 - RNA, 19 nt, Artificial Sequence
  Description of Artificial Sequence: Synthetic oligonucleotide
uggccgaugcacaccagac

SEQ ID NO: 1351945 - RNA, 19 nt, Artificial Sequence
  Description of Artificial Sequence: Synthetic oligonucleotide
accuggacucugaagcgcc

SEQ ID NO: 1351946 - RNA, 19 nt, Artificial Sequence
  Description of Artificial Sequence: Synthetic oligonucleotide
ugcgggugcguacuugcug

SEQ ID NO: 1351947 - RNA, 19 nt, Artificial Sequence
  Description of Artificial Sequence: Synthetic oligonucleotide
aaaggcugguucacccggg

SEQ ID NO: 1351948 - RNA, 19 nt, Artificial Sequence
  Description of Artificial Sequence: Synthetic oligonucleotide
acacacgguggugacgggc

SEQ ID NO: 1351949 - RNA, 19 nt, Artificial Sequence
  Description of Artificial Sequence: Synthetic oligonucleotide
ccucauaaccaccagccag

SEQ ID NO: 1351950 - RNA, 19 nt, Artificial Sequence
  Description of Artificial Sequence: Synthetic oligonucleotide
uguugcacugggagugugu

SEQ ID NO: 1351951 - RNA, 19 nt, Artificial Sequence
  Description of Artificial Sequence: Synthetic oligonucleotide
aggagguagcgccacacaa

SEQ ID NO: 1351952 - RNA, 19 nt, Artificial Sequence
  Description of Artificial Sequence: Synthetic oligonucleotide
uagcgguugcccucugcgg

SEQ ID NO: 1351953 - RNA, 19 nt, Artificial Sequence
  Description of Artificial Sequence: Synthetic oligonucleotide
cuuguguguuguuggccag

SEQ ID NO: 1351954 - RNA, 19 nt, Artificial Sequence
  Description of Artificial Sequence: Synthetic oligonucleotide
ccagauuuacccuucucug

SEQ ID NO: 1351955 - RNA, 19 nt, Artificial Sequence
  Description of Artificial Sequence: Synthetic oligonucleotide
uguugagggccuucugccu

SEQ ID NO: 1351956 - RNA, 19 nt, Artificial Sequence
  Description of Artificial Sequence: Synthetic oligonucleotide
cauggugcccacaggggac

SEQ ID NO: 1351957 - RNA, 19 nt, Artificial Sequence
  Description of Artificial Sequence: Synthetic oligonucleotide
auguggccgaugcacacca

SEQ ID NO: 1351958 - RNA, 19 nt, Artificial Sequence
  Description of Artificial Sequence: Synthetic oligonucleotide
uaaacaccucggcacgaaa

SEQ ID NO: 1351959 - RNA, 19 nt, Artificial Sequence
  Description of Artificial Sequence: Synthetic oligonucleotide
uugcgacaugguuuguucu

SEQ ID NO: 1351960 - RNA, 19 nt, Artificial Sequence
  Description of Artificial Sequence: Synthetic oligonucleotide
augccgucauagcgguugc

SEQ ID NO: 1351961 - RNA, 19 nt, Artificial Sequence
  Description of Artificial Sequence: Synthetic oligonucleotide
cagacguagaaggacaaca

SEQ ID NO: 1351962 - RNA, 19 nt, Artificial Sequence
  Description of Artificial Sequence: Synthetic oligonucleotide
ugguugagaauggucugca

SEQ ID NO: 1351963 - RNA, 19 nt, Artificial Sequence
  Description of Artificial Sequence: Synthetic oligonucleotide
uggacucugaagcgccaca

SEQ ID NO: 1351964 - RNA, 19 nt, Artificial Sequence
  Description of Artificial Sequence: Synthetic oligonucleotide
guagcgccacacaaggaag

SEQ ID NO: 1351965 - RNA, 19 nt, Artificial Sequence
  Description of Artificial Sequence: Synthetic oligonucleotide
ggggcaguaccacucaggc

SEQ ID NO: 1351966 - RNA, 19 nt, Artificial Sequence
  Description of Artificial Sequence: Synthetic oligonucleotide
acacgcaccggcuuccccu

SEQ ID NO: 1351967 - RNA, 19 nt, Artificial Sequence
  Description of Artificial Sequence: Synthetic oligonucleotide
gaaggagguagcgccacac

SEQ ID NO: 1351968 - RNA, 19 nt, Artificial Sequence
  Description of Artificial Sequence: Synthetic oligonucleotide
ugagaggucucggccgccg

SEQ ID NO: 1351969 - RNA, 19 nt, Artificial Sequence
  Description of Artificial Sequence: Synthetic oligonucleotide
ccucuaaguagccuucagg

SEQ ID NO: 1351970 - RNA, 19 nt, Artificial Sequence
  Description of Artificial Sequence: Synthetic oligonucleotide
aagccagauuuacccuucu

SEQ ID NO: 1351971 - RNA, 19 nt, Artificial Sequence
  Description of Artificial Sequence: Synthetic oligonucleotide
ugguucguggcaucaccga

SEQ ID NO: 1351972 - RNA, 19 nt, Artificial Sequence
  Description of Artificial Sequence: Synthetic oligonucleotide
cgugucaucccgucgaagg

SEQ ID NO: 1351973 - RNA, 19 nt, Artificial Sequence
  Description of Artificial Sequence: Synthetic oligonucleotide
ugguucacccggguugggg

SEQ ID NO: 1351974 - RNA, 19 nt, Artificial Sequence
  Description of Artificial Sequence: Synthetic oligonucleotide
uugcacugggaguguguag

SEQ ID NO: 1351975 - RNA, 19 nt, Artificial Sequence
  Description of Artificial Sequence: Synthetic oligonucleotide
gucacagcgacaggcuggg

SEQ ID NO: 1351976 - RNA, 19 nt, Artificial Sequence
  Description of Artificial Sequence: Synthetic oligonucleotide
cuagccaaggccucuaagu

SEQ ID NO: 1351977 - RNA, 19 nt, Artificial Sequence
  Description of Artificial Sequence: Synthetic oligonucleotide
gguagcgccacacaaggaa

SEQ ID NO: 1351978 - RNA, 19 nt, Artificial Sequence
  Description of Artificial Sequence: Synthetic oligonucleotide
guucguggcaucaccgacc

SEQ ID NO: 1351979 - RNA, 19 nt, Artificial Sequence
  Description of Artificial Sequence: Synthetic oligonucleotide
ugccguaugcgguccuugc

SEQ ID NO: 1351980 - RNA, 19 nt, Artificial Sequence
  Description of Artificial Sequence: Synthetic oligonucleotide
cacguggcaagcacacuug

SEQ ID NO: 1351981 - RNA, 19 nt, Artificial Sequence
  Description of Artificial Sequence: Synthetic oligonucleotide
cuacgaacucggagaagug

SEQ ID NO: 1351982 - RNA, 19 nt, Artificial Sequence
  Description of Artificial Sequence: Synthetic oligonucleotide
ggcacgaaaggaccugucc

SEQ ID NO: 1351983 - RNA, 19 nt, Artificial Sequence
  Description of Artificial Sequence: Synthetic oligonucleotide
guacugcauagugagcccc

SEQ ID NO: 1351984 - RNA, 19 nt, Artificial Sequence
  Description of Artificial Sequence: Synthetic oligonucleotide
agaacacgggguuccugca

SEQ ID NO: 1351985 - RNA, 19 nt, Artificial Sequence
  Description of Artificial Sequence: Synthetic oligonucleotide
auacagauggaaggccaug

SEQ ID NO: 1351986 - RNA, 19 nt, Artificial Sequence
  Description of Artificial Sequence: Synthetic oligonucleotide
uccugcggugcgcuuguug

SEQ ID NO: 1351987 - RNA, 19 nt, Artificial Sequence
  Description of Artificial Sequence: Synthetic oligonucleotide
gguacugcauagugagccc

SEQ ID NO: 1351988 - RNA, 19 nt, Artificial Sequence
  Description of Artificial Sequence: Synthetic oligonucleotide
caccuccaaacuaagccca

SEQ ID NO: 1351989 - RNA, 19 nt, Artificial Sequence
  Description of Artificial Sequence: Synthetic oligonucleotide
cuuccgcuuggacauggug

SEQ ID NO: 1351990 - RNA, 19 nt, Artificial Sequence
  Description of Artificial Sequence: Synthetic oligonucleotide
gaacucggagaaguguuga

SEQ ID NO: 1351991 - RNA, 19 nt, Artificial Sequence
  Description of Artificial Sequence: Synthetic oligonucleotide
ucuggagccucacgaccac

SEQ ID NO: 1351992 - RNA, 19 nt, Artificial Sequence
  Description of Artificial Sequence: Synthetic oligonucleotide
gaccuggacucugaagcgc

SEQ ID NO: 1351993 - RNA, 19 nt, Artificial Sequence
  Description of Artificial Sequence: Synthetic oligonucleotide
ugcuguguuucccucccuu

SEQ ID NO: 1351994 - RNA, 19 nt, Artificial Sequence
  Description of Artificial Sequence: Synthetic oligonucleotide
gcaauacagauggaaggcc

SEQ ID NO: 1351995 - RNA, 19 nt, Artificial Sequence
  Description of Artificial Sequence: Synthetic oligonucleotide
cuggcugggcgcuuccuac

SEQ ID NO: 1351996 - RNA, 19 nt, Artificial Sequence
  Description of Artificial Sequence: Synthetic oligonucleotide
uguagggcuccaguuugcu

SEQ ID NO: 1351997 - RNA, 19 nt, Artificial Sequence
  Description of Artificial Sequence: Synthetic oligonucleotide
gggccuucugccugguucg

SEQ ID NO: 1351998 - RNA, 19 nt, Artificial Sequence
  Description of Artificial Sequence: Synthetic oligonucleotide
ccugcggugcgcuuguugc

SEQ ID NO: 1351999 - RNA, 19 nt, Artificial Sequence
  Description of Artificial Sequence: Synthetic oligonucleotide
uagccagggaacagcuggu

SEQ ID NO: 1352000 - RNA, 19 nt, Artificial Sequence
  Description of Artificial Sequence: Synthetic oligonucleotide
ggcagcuaaacaccucggc

SEQ ID NO: 1352001 - RNA, 19 nt, Artificial Sequence
  Description of Artificial Sequence: Synthetic oligonucleotide
cuguccaggcaauccuuac

SEQ ID NO: 1352002 - RNA, 19 nt, Artificial Sequence
  Description of Artificial Sequence: Synthetic oligonucleotide
cccacuacgaacucggaga

SEQ ID NO: 1352003 - RNA, 19 nt, Artificial Sequence
  Description of Artificial Sequence: Synthetic oligonucleotide
cgucgaaggagguagcgcc

SEQ ID NO: 1352004 - RNA, 19 nt, Artificial Sequence
  Description of Artificial Sequence: Synthetic oligonucleotide
uccuugcccucccgggucc

SEQ ID NO: 1352005 - RNA, 19 nt, Artificial Sequence
  Description of Artificial Sequence: Synthetic oligonucleotide
uguccugcggugcgcuugu

SEQ ID NO: 1352006 - RNA, 19 nt, Artificial Sequence
  Description of Artificial Sequence: Synthetic oligonucleotide
ugccagagcccuguuggug

SEQ ID NO: 1352007 - RNA, 19 nt, Artificial Sequence
  Description of Artificial Sequence: Synthetic oligonucleotide
cucccuucauguugcggac

SEQ ID NO: 1352008 - RNA, 19 nt, Artificial Sequence
  Description of Artificial Sequence: Synthetic oligonucleotide
cauguggccgaugcacacc

SEQ ID NO: 1352009 - RNA, 19 nt, Artificial Sequence
  Description of Artificial Sequence: Synthetic oligonucleotide
ugauacggcccacccugaa

SEQ ID NO: 1352010 - RNA, 19 nt, Artificial Sequence
  Description of Artificial Sequence: Synthetic oligonucleotide
ucaucccgucgaaggaggu

SEQ ID NO: 1352011 - RNA, 19 nt, Artificial Sequence
  Description of Artificial Sequence: Synthetic oligonucleotide
cagacauugugcugacaca

SEQ ID NO: 1352012 - RNA, 19 nt, Artificial Sequence
  Description of Artificial Sequence: Synthetic oligonucleotide
ccuucaggguacugcauag

SEQ ID NO: 1352013 - RNA, 19 nt, Artificial Sequence
  Description of Artificial Sequence: Synthetic oligonucleotide
cuguguuucccucccuuca

SEQ ID NO: 1352014 - RNA, 19 nt, Artificial Sequence
  Description of Artificial Sequence: Synthetic oligonucleotide
gcacgaaaggaccugucca

SEQ ID NO: 1352015 - RNA, 19 nt, Artificial Sequence
  Description of Artificial Sequence: Synthetic oligonucleotide
accugauacggcccacccu

SEQ ID NO: 1352016 - RNA, 19 nt, Artificial Sequence
  Description of Artificial Sequence: Synthetic oligonucleotide
gaagcgaacucagcacguc

SEQ ID NO: 1352017 - RNA, 19 nt, Artificial Sequence
  Description of Artificial Sequence: Synthetic oligonucleotide
uccccguguaagugaagaa

SEQ ID NO: 1352018 - RNA, 19 nt, Artificial Sequence
  Description of Artificial Sequence: Synthetic oligonucleotide
caguccgacagcuggggca

SEQ ID NO: 1352019 - RNA, 19 nt, Artificial Sequence
  Description of Artificial Sequence: Synthetic oligonucleotide
cacauguggccgaugcaca

SEQ ID NO: 1352020 - RNA, 19 nt, Artificial Sequence
  Description of Artificial Sequence: Synthetic oligonucleotide
ucgaaggagguagcgccac

SEQ ID NO: 1352021 - RNA, 19 nt, Artificial Sequence
  Description of Artificial Sequence: Synthetic oligonucleotide
gguucguggcaucaccgac

SEQ ID NO: 1352022 - RNA, 19 nt, Artificial Sequence
  Description of Artificial Sequence: Synthetic oligonucleotide
gacacacgguggugacggg

SEQ ID NO: 1352023 - RNA, 19 nt, Artificial Sequence
  Description of Artificial Sequence: Synthetic oligonucleotide
cugcauagugagccccagc

SEQ ID NO: 1352024 - RNA, 19 nt, Artificial Sequence
  Description of Artificial Sequence: Synthetic oligonucleotide
gaccacacgcaccggcuuc

SEQ ID NO: 1352025 - RNA, 19 nt, Artificial Sequence
  Description of Artificial Sequence: Synthetic oligonucleotide
gcaccaacgaguaggcacc

SEQ ID NO: 1352026 - RNA, 19 nt, Artificial Sequence
  Description of Artificial Sequence: Synthetic oligonucleotide
ugcggugcgcuuguugccu

SEQ ID NO: 1352027 - RNA, 19 nt, Artificial Sequence
  Description of Artificial Sequence: Synthetic oligonucleotide
agugagccccagcugccgu

SEQ ID NO: 1352028 - RNA, 19 nt, Artificial Sequence
  Description of Artificial Sequence: Synthetic oligonucleotide
cugacacacgguggugacg

SEQ ID NO: 1352029 - RNA, 19 nt, Artificial Sequence
  Description of Artificial Sequence: Synthetic oligonucleotide
cucagcacgucaucccaca

SEQ ID NO: 1352030 - RNA, 19 nt, Artificial Sequence
  Description of Artificial Sequence: Synthetic oligonucleotide
acccugaagcgaacucagc

SEQ ID NO: 1352031 - RNA, 19 nt, Artificial Sequence
  Description of Artificial Sequence: Synthetic oligonucleotide
cuaagcccacuacgaacuc

SEQ ID NO: 1352032 - RNA, 19 nt, Artificial Sequence
  Description of Artificial Sequence: Synthetic oligonucleotide
ccguaugcgguccuugccc

SEQ ID NO: 1352033 - RNA, 19 nt, Artificial Sequence
  Description of Artificial Sequence: Synthetic oligonucleotide
agaggucucggccgccgcu

SEQ ID NO: 1352034 - RNA, 19 nt, Artificial Sequence
  Description of Artificial Sequence: Synthetic oligonucleotide
gcugcaggcaauacagaug

SEQ ID NO: 1352035 - RNA, 19 nt, Artificial Sequence
  Description of Artificial Sequence: Synthetic oligonucleotide
cugcggugcgcuuguugcc

SEQ ID NO: 1352036 - RNA, 19 nt, Artificial Sequence
  Description of Artificial Sequence: Synthetic oligonucleotide
ucacuggagucaguccgac

SEQ ID NO: 1352037 - RNA, 19 nt, Artificial Sequence
  Description of Artificial Sequence: Synthetic oligonucleotide
ucccuucauguugcggacc

SEQ ID NO: 1352038 - RNA, 19 nt, Artificial Sequence
  Description of Artificial Sequence: Synthetic oligonucleotide
aggcggacgggucgccagg

SEQ ID NO: 1352039 - RNA, 19 nt, Artificial Sequence
  Description of Artificial Sequence: Synthetic oligonucleotide
gaccuguccaggcaauccu

SEQ ID NO: 1352040 - RNA, 19 nt, Artificial Sequence
  Description of Artificial Sequence: Synthetic oligonucleotide
ucccgucgaaggagguagc

SEQ ID NO: 1352041 - RNA, 19 nt, Artificial Sequence
  Description of Artificial Sequence: Synthetic oligonucleotide
gcccacuacgaacucggag

SEQ ID NO: 1352042 - RNA, 19 nt, Artificial Sequence
  Description of Artificial Sequence: Synthetic oligonucleotide
guggccgaugcacaccaga

SEQ ID NO: 1352043 - RNA, 19 nt, Artificial Sequence
  Description of Artificial Sequence: Synthetic oligonucleotide
gcuagccaaggccucuaag

SEQ ID NO: 1352044 - RNA, 19 nt, Artificial Sequence
  Description of Artificial Sequence: Synthetic oligonucleotide
uccgugucaucccgucgaa

SEQ ID NO: 1352045 - RNA, 19 nt, Artificial Sequence
  Description of Artificial Sequence: Synthetic oligonucleotide
cuccaaacuaagcccacua

SEQ ID NO: 1352046 - RNA, 19 nt, Artificial Sequence
  Description of Artificial Sequence: Synthetic oligonucleotide
acaccucggcacgaaagga

SEQ ID NO: 1352047 - RNA, 19 nt, Artificial Sequence
  Description of Artificial Sequence: Synthetic oligonucleotide
ucggcacgaaaggaccugu

SEQ ID NO: 1352048 - RNA, 19 nt, Artificial Sequence
  Description of Artificial Sequence: Synthetic oligonucleotide
guagggcuccaguuugcuc

SEQ ID NO: 1352049 - RNA, 19 nt, Artificial Sequence
  Description of Artificial Sequence: Synthetic oligonucleotide
ccugguucguggcaucacc

SEQ ID NO: 1352050 - RNA, 19 nt, Artificial Sequence
  Description of Artificial Sequence: Synthetic oligonucleotide
gagaggucucggccgccgc

SEQ ID NO: 1352051 - RNA, 19 nt, Artificial Sequence
  Description of Artificial Sequence: Synthetic oligonucleotide
gcacugggaguguguaggg

SEQ ID NO: 1352052 - RNA, 19 nt, Artificial Sequence
  Description of Artificial Sequence: Synthetic oligonucleotide
uggcgccaguccuuggccu

SEQ ID NO: 1352053 - RNA, 19 nt, Artificial Sequence
  Description of Artificial Sequence: Synthetic oligonucleotide
guagccagaacacgggguu

SEQ ID NO: 1352054 - RNA, 19 nt, Artificial Sequence
  Description of Artificial Sequence: Synthetic oligonucleotide
acuugcgacaugguuuguu

SEQ ID NO: 1352055 - RNA, 19 nt, Artificial Sequence
  Description of Artificial Sequence: Synthetic oligonucleotide
acaggggacgccggggaug

SEQ ID NO: 1352056 - RNA, 19 nt, Artificial Sequence
  Description of Artificial Sequence: Synthetic oligonucleotide
agcgaacucagcacgucau

SEQ ID NO: 1352057 - RNA, 19 nt, Artificial Sequence
  Description of Artificial Sequence: Synthetic oligonucleotide
ggaccuguccaggcaaucc

SEQ ID NO: 1352058 - RNA, 19 nt, Artificial Sequence
  Description of Artificial Sequence: Synthetic oligonucleotide
ucauagcgguugcccucug

SEQ ID NO: 1352059 - RNA, 19 nt, Artificial Sequence
  Description of Artificial Sequence: Synthetic oligonucleotide
cacaaggaagccagauuua

SEQ ID NO: 1352060 - RNA, 19 nt, Artificial Sequence
  Description of Artificial Sequence: Synthetic oligonucleotide
cucggcacgaaaggaccug

SEQ ID NO: 1352061 - RNA, 19 nt, Artificial Sequence
  Description of Artificial Sequence: Synthetic oligonucleotide
gcccuguugguguugguga

SEQ ID NO: 1352062 - RNA, 19 nt, Artificial Sequence
  Description of Artificial Sequence: Synthetic oligonucleotide
cugguuaacuggugagcaa

SEQ ID NO: 1352063 - RNA, 19 nt, Artificial Sequence
  Description of Artificial Sequence: Synthetic oligonucleotide
gccucuaaguagccuucag

SEQ ID NO: 1352064 - RNA, 19 nt, Artificial Sequence
  Description of Artificial Sequence: Synthetic oligonucleotide
cccugaagcgaacucagca

SEQ ID NO: 1352065 - RNA, 19 nt, Artificial Sequence
  Description of Artificial Sequence: Synthetic oligonucleotide
gccgucauagcgguugccc

SEQ ID NO: 1352066 - RNA, 19 nt, Artificial Sequence
  Description of Artificial Sequence: Synthetic oligonucleotide
aucaccgaccacugccaua

SEQ ID NO: 1352067 - RNA, 19 nt, Artificial Sequence
  Description of Artificial Sequence: Synthetic oligonucleotide
gugacgggccggaacacca

SEQ ID NO: 1352068 - RNA, 19 nt, Artificial Sequence
  Description of Artificial Sequence: Synthetic oligonucleotide
cuggacucugaagcgccac

SEQ ID NO: 1352069 - RNA, 19 nt, Artificial Sequence
  Description of Artificial Sequence: Synthetic oligonucleotide
guugcacugggagugugua

SEQ ID NO: 1352070 - RNA, 19 nt, Artificial Sequence
  Description of Artificial Sequence: Synthetic oligonucleotide
agcagacguagaaggacaa

SEQ ID NO: 1352071 - RNA, 19 nt, Artificial Sequence
  Description of Artificial Sequence: Synthetic oligonucleotide
cauugcuccggccauggau

SEQ ID NO: 1352072 - RNA, 19 nt, Artificial Sequence
  Description of Artificial Sequence: Synthetic oligonucleotide
uuagugccagagcccuguu

SEQ ID NO: 1352073 - RNA, 19 nt, Artificial Sequence
  Description of Artificial Sequence: Synthetic oligonucleotide
cacgcaccggcuuccccug

SEQ ID NO: 1352074 - RNA, 19 nt, Artificial Sequence
  Description of Artificial Sequence: Synthetic oligonucleotide
cuguccugcggugcgcuug

SEQ ID NO: 1352075 - RNA, 19 nt, Artificial Sequence
  Description of Artificial Sequence: Synthetic oligonucleotide
cacuacgaacucggagaag

SEQ ID NO: 1352076 - RNA, 19 nt, Artificial Sequence
  Description of Artificial Sequence: Synthetic oligonucleotide
ggacaacaccuccaaacua

SEQ ID NO: 1352077 - RNA, 19 nt, Artificial Sequence
  Description of Artificial Sequence: Synthetic oligonucleotide
caccggcuuccccuggcgc

SEQ ID NO: 1352078 - RNA, 19 nt, Artificial Sequence
  Description of Artificial Sequence: Synthetic oligonucleotide
guuuagugccagagcccug

SEQ ID NO: 1352079 - RNA, 19 nt, Artificial Sequence
  Description of Artificial Sequence: Synthetic oligonucleotide
ugggcgcuuccuacucuuc

SEQ ID NO: 1352080 - RNA, 19 nt, Artificial Sequence
  Description of Artificial Sequence: Synthetic oligonucleotide
cacacgcaccggcuucccc

SEQ ID NO: 1352081 - RNA, 19 nt, Artificial Sequence
  Description of Artificial Sequence: Synthetic oligonucleotide
cauugugcugacacacggu

SEQ ID NO: 1352082 - RNA, 19 nt, Artificial Sequence
  Description of Artificial Sequence: Synthetic oligonucleotide
gccugguuaacuggugagc

SEQ ID NO: 1352083 - RNA, 19 nt, Artificial Sequence
  Description of Artificial Sequence: Synthetic oligonucleotide
ccugguuaacuggugagca

SEQ ID NO: 1352084 - RNA, 19 nt, Artificial Sequence
  Description of Artificial Sequence: Synthetic oligonucleotide
cuuggacaugguggucuug

SEQ ID NO: 1352085 - RNA, 19 nt, Artificial Sequence
  Description of Artificial Sequence: Synthetic oligonucleotide
cucugaagcgccacauggu

SEQ ID NO: 1352086 - RNA, 19 nt, Artificial Sequence
  Description of Artificial Sequence: Synthetic oligonucleotide
gccguaugcgguccuugcc

SEQ ID NO: 1352087 - RNA, 19 nt, Artificial Sequence
  Description of Artificial Sequence: Synthetic oligonucleotide
gacgggucgccaggagcag

SEQ ID NO: 1352088 - RNA, 19 nt, Artificial Sequence
  Description of Artificial Sequence: Synthetic oligonucleotide
uccgccccuuucucacuga

SEQ ID NO: 1352089 - RNA, 19 nt, Artificial Sequence
  Description of Artificial Sequence: Synthetic oligonucleotide
cuaaacaccucggcacgaa

SEQ ID NO: 1352090 - RNA, 19 nt, Artificial Sequence
  Description of Artificial Sequence: Synthetic oligonucleotide
acucacugaccuggacucu

SEQ ID NO: 1352091 - RNA, 19 nt, Artificial Sequence
  Description of Artificial Sequence: Synthetic oligonucleotide
ccuggcgccaguccuuggc

SEQ ID NO: 1352092 - RNA, 19 nt, Artificial Sequence
  Description of Artificial Sequence: Synthetic oligonucleotide
caagcacacuugcgacaug

SEQ ID NO: 1352093 - RNA, 19 nt, Artificial Sequence
  Description of Artificial Sequence: Synthetic oligonucleotide
ggacgggucgccaggagca

SEQ ID NO: 1352094 - RNA, 19 nt, Artificial Sequence
  Description of Artificial Sequence: Synthetic oligonucleotide
gucgaaggagguagcgcca

SEQ ID NO: 1352095 - RNA, 19 nt, Artificial Sequence
  Description of Artificial Sequence: Synthetic oligonucleotide
guguguagggcuccaguuu

SEQ ID NO: 1352096 - RNA, 19 nt, Artificial Sequence
  Description of Artificial Sequence: Synthetic oligonucleotide
gggcagcuaaacaccucgg

SEQ ID NO: 1352097 - RNA, 19 nt, Artificial Sequence
  Description of Artificial Sequence: Synthetic oligonucleotide
ugccgucauagcgguugcc

SEQ ID NO: 1352098 - RNA, 19 nt, Artificial Sequence
  Description of Artificial Sequence: Synthetic oligonucleotide
ccaaggccucuaaguagcc

SEQ ID NO: 1352099 - RNA, 19 nt, Artificial Sequence
  Description of Artificial Sequence: Synthetic oligonucleotide
guaugcgguccuugcccuc

SEQ ID NO: 1352100 - RNA, 19 nt, Artificial Sequence
  Description of Artificial Sequence: Synthetic oligonucleotide
caucacauaacagcugcuu

SEQ ID NO: 1352101 - RNA, 19 nt, Artificial Sequence
  Description of Artificial Sequence: Synthetic oligonucleotide
agcacacuugcgacauggu

SEQ ID NO: 1352102 - RNA, 19 nt, Artificial Sequence
  Description of Artificial Sequence: Synthetic oligonucleotide
cucugcgggugcguacuug

SEQ ID NO: 1352103 - RNA, 19 nt, Artificial Sequence
  Description of Artificial Sequence: Synthetic oligonucleotide
acgcaccggcuuccccugg

SEQ ID NO: 1352104 - RNA, 19 nt, Artificial Sequence
  Description of Artificial Sequence: Synthetic oligonucleotide
acccggguuggggagcugu

SEQ ID NO: 1352105 - RNA, 19 nt, Artificial Sequence
  Description of Artificial Sequence: Synthetic oligonucleotide
gguugagaauggucugcaa

SEQ ID NO: 1352106 - RNA, 19 nt, Artificial Sequence
  Description of Artificial Sequence: Synthetic oligonucleotide
gccuccgccccuuucucac

SEQ ID NO: 1352107 - RNA, 19 nt, Artificial Sequence
  Description of Artificial Sequence: Synthetic oligonucleotide
gcgacaugguuuguucuca

SEQ ID NO: 1352108 - RNA, 19 nt, Artificial Sequence
  Description of Artificial Sequence: Synthetic oligonucleotide
ggagccucacgaccaccac

SEQ ID NO: 1352109 - RNA, 19 nt, Artificial Sequence
  Description of Artificial Sequence: Synthetic oligonucleotide
gcgaacucagcacgucauc

SEQ ID NO: 1352110 - RNA, 19 nt, Artificial Sequence
  Description of Artificial Sequence: Synthetic oligonucleotide
ggaguguguagggcuccag

SEQ ID NO: 1352111 - RNA, 19 nt, Artificial Sequence
  Description of Artificial Sequence: Synthetic oligonucleotide
gccuguggucuuccgcuug

SEQ ID NO: 1352112 - RNA, 19 nt, Artificial Sequence
  Description of Artificial Sequence: Synthetic oligonucleotide
acggcccacccugaagcga

SEQ ID NO: 1352113 - RNA, 19 nt, Artificial Sequence
  Description of Artificial Sequence: Synthetic oligonucleotide
cugguucacccggguuggg

SEQ ID NO: 1352114 - RNA, 19 nt, Artificial Sequence
  Description of Artificial Sequence: Synthetic oligonucleotide
agguagcgccacacaagga

SEQ ID NO: 1352115 - RNA, 19 nt, Artificial Sequence
  Description of Artificial Sequence: Synthetic oligonucleotide
accuguccaggcaauccuu

SEQ ID NO: 1352116 - RNA, 19 nt, Artificial Sequence
  Description of Artificial Sequence: Synthetic oligonucleotide
cccguguaagugaagaaau

SEQ ID NO: 1352117 - RNA, 19 nt, Artificial Sequence
  Description of Artificial Sequence: Synthetic oligonucleotide
ggagucaguccgacagcug

SEQ ID NO: 1352118 - RNA, 19 nt, Artificial Sequence
  Description of Artificial Sequence: Synthetic oligonucleotide
cccgucgaaggagguagcg

SEQ ID NO: 1352119 - RNA, 19 nt, Artificial Sequence
  Description of Artificial Sequence: Synthetic oligonucleotide
ggugcgcuuguugccugag

SEQ ID NO: 1352120 - RNA, 19 nt, Artificial Sequence
  Description of Artificial Sequence: Synthetic oligonucleotide
ccgucgaaggagguagcgc

SEQ ID NO: 1352121 - RNA, 19 nt, Artificial Sequence
  Description of Artificial Sequence: Synthetic oligonucleotide
gcuaaacaccucggcacga

SEQ ID NO: 1352122 - RNA, 19 nt, Artificial Sequence
  Description of Artificial Sequence: Synthetic oligonucleotide
ggggacgccggggaugggc

SEQ ID NO: 1352123 - RNA, 19 nt, Artificial Sequence
  Description of Artificial Sequence: Synthetic oligonucleotide
gggacgccggggaugggcc

SEQ ID NO: 1352124 - RNA, 19 nt, Artificial Sequence
  Description of Artificial Sequence: Synthetic oligonucleotide
cagagcccuguugguguug

SEQ ID NO: 1352125 - RNA, 19 nt, Artificial Sequence
  Description of Artificial Sequence: Synthetic oligonucleotide
ucguggcaucaccgaccac

SEQ ID NO: 1352126 - RNA, 19 nt, Artificial Sequence
  Description of Artificial Sequence: Synthetic oligonucleotide
gcgggugcguacuugcugu

SEQ ID NO: 1352127 - RNA, 19 nt, Artificial Sequence
  Description of Artificial Sequence: Synthetic oligonucleotide
gccgcuccccguguaagug

SEQ ID NO: 1352128 - RNA, 19 nt, Artificial Sequence
  Description of Artificial Sequence: Synthetic oligonucleotide
agccagggaacagcugguu

SEQ ID NO: 1352129 - RNA, 19 nt, Artificial Sequence
  Description of Artificial Sequence: Synthetic oligonucleotide
ccacuacgaacucggagaa

SEQ ID NO: 1352130 - RNA, 19 nt, Artificial Sequence
  Description of Artificial Sequence: Synthetic oligonucleotide
ggcgccaguccuuggccuc

SEQ ID NO: 1352131 - RNA, 19 nt, Artificial Sequence
  Description of Artificial Sequence: Synthetic oligonucleotide
cgaugcacaccagacucac

SEQ ID NO: 1352132 - RNA, 19 nt, Artificial Sequence
  Description of Artificial Sequence: Synthetic oligonucleotide
cccacccugaagcgaacuc

SEQ ID NO: 1352133 - RNA, 19 nt, Artificial Sequence
  Description of Artificial Sequence: Synthetic oligonucleotide
acgggucgccaggagcaga

SEQ ID NO: 1352134 - RNA, 19 nt, Artificial Sequence
  Description of Artificial Sequence: Synthetic oligonucleotide
ccacccugaagcgaacuca

SEQ ID NO: 1352135 - RNA, 19 nt, Artificial Sequence
  Description of Artificial Sequence: Synthetic oligonucleotide
ggugcguacuugcuguguu

SEQ ID NO: 1352136 - RNA, 19 nt, Artificial Sequence
  Description of Artificial Sequence: Synthetic oligonucleotide
cggacgggucgccaggagc

SEQ ID NO: 1352137 - RNA, 19 nt, Artificial Sequence
  Description of Artificial Sequence: Synthetic oligonucleotide
accaacgaguaggcaccau

SEQ ID NO: 1352138 - RNA, 19 nt, Artificial Sequence
  Description of Artificial Sequence: Synthetic oligonucleotide
ggacgccggggaugggccc

SEQ ID NO: 1352139 - RNA, 19 nt, Artificial Sequence
  Description of Artificial Sequence: Synthetic oligonucleotide
ccgaugcacaccagacuca

SEQ ID NO: 1352140 - RNA, 19 nt, Artificial Sequence
  Description of Artificial Sequence: Synthetic oligonucleotide
uccagggccccggcuccgu

SEQ ID NO: 1352141 - RNA, 19 nt, Artificial Sequence
  Description of Artificial Sequence: Synthetic oligonucleotide
gcacacuugcgacaugguu

SEQ ID NO: 1352142 - RNA, 19 nt, Artificial Sequence
  Description of Artificial Sequence: Synthetic oligonucleotide
ggacuguccugcggugcgc

SEQ ID NO: 1352143 - RNA, 19 nt, Artificial Sequence
  Description of Artificial Sequence: Synthetic oligonucleotide
caaggccucuaaguagccu

SEQ ID NO: 1352144 - RNA, 19 nt, Artificial Sequence
  Description of Artificial Sequence: Synthetic oligonucleotide
caccaacgaguaggcacca

SEQ ID NO: 1352145 - RNA, 19 nt, Artificial Sequence
  Description of Artificial Sequence: Synthetic oligonucleotide
caucccgucgaaggaggua

SEQ ID NO: 1352146 - RNA, 19 nt, Artificial Sequence
  Description of Artificial Sequence: Synthetic oligonucleotide
gggucgccaggagcagacg

SEQ ID NO: 1352147 - RNA, 19 nt, Artificial Sequence
  Description of Artificial Sequence: Synthetic oligonucleotide
gcggugcgcuuguugccug

SEQ ID NO: 1352148 - RNA, 19 nt, Artificial Sequence
  Description of Artificial Sequence: Synthetic oligonucleotide
ggccucuaaguagccuuca

SEQ ID NO: 1352149 - RNA, 19 nt, Artificial Sequence
  Description of Artificial Sequence: Synthetic oligonucleotide
cuugcaguacuggcaggau

SEQ ID NO: 1352150 - RNA, 19 nt, Artificial Sequence
  Description of Artificial Sequence: Synthetic oligonucleotide
gcggacgggucgccaggag

SEQ ID NO: 1352151 - RNA, 19 nt, Artificial Sequence
  Description of Artificial Sequence: Synthetic oligonucleotide
cugggcgcuuccuacucuu

SEQ ID NO: 1352152 - RNA, 19 nt, Artificial Sequence
  Description of Artificial Sequence: Synthetic oligonucleotide
caucaccgaccacugccau

SEQ ID NO: 1352153 - RNA, 19 nt, Artificial Sequence
  Description of Artificial Sequence: Synthetic oligonucleotide
gccugccacauguggccga

SEQ ID NO: 1352154 - RNA, 19 nt, Artificial Sequence
  Description of Artificial Sequence: Synthetic oligonucleotide
gcccucugcgggugcguac

SEQ ID NO: 1352155 - RNA, 19 nt, Artificial Sequence
  Description of Artificial Sequence: Synthetic oligonucleotide
gcgccaguccuuggccucc

SEQ ID NO: 1352156 - RNA, 19 nt, Artificial Sequence
  Description of Artificial Sequence: Synthetic oligonucleotide
gcuccggccauggaugccu

SEQ ID NO: 1352157 - RNA, 19 nt, Artificial Sequence
  Description of Artificial Sequence: Synthetic oligonucleotide
cugcgggugcguacuugcu

SEQ ID NO: 1352158 - RNA, 19 nt, Artificial Sequence
  Description of Artificial Sequence: Synthetic oligonucleotide
ccgugucaucccgucgaag

SEQ ID NO: 1352159 - RNA, 19 nt, Artificial Sequence
  Description of Artificial Sequence: Synthetic oligonucleotide
ccgucauagcgguugcccu

SEQ ID NO: 1352160 - RNA, 19 nt, Artificial Sequence
  Description of Artificial Sequence: Synthetic oligonucleotide
ccgcuccccguguaaguga

SEQ ID NO: 1352161 - RNA, 19 nt, Artificial Sequence
  Description of Artificial Sequence: Synthetic oligonucleotide
agaugccgucauagcgguu

SEQ ID NO: 1352162 - RNA, 19 nt, Artificial Sequence
  Description of Artificial Sequence: Synthetic oligonucleotide
ccguguaagugaagaaauu

SEQ ID NO: 1352163 - RNA, 19 nt, Artificial Sequence
  Description of Artificial Sequence: Synthetic oligonucleotide
gcgguugcccucugcgggu

SEQ ID NO: 1352164 - RNA, 19 nt, Artificial Sequence
  Description of Artificial Sequence: Synthetic oligonucleotide
cacacguggcaagcacacu

SEQ ID NO: 1352165 - RNA, 19 nt, Artificial Sequence
  Description of Artificial Sequence: Synthetic oligonucleotide
ggcggacgggucgccagga

SEQ ID NO: 1352166 - RNA, 19 nt, Artificial Sequence
  Description of Artificial Sequence: Synthetic oligonucleotide
ggaccacacgcaccggcuu

SEQ ID NO: 1352167 - RNA, 19 nt, Artificial Sequence
  Description of Artificial Sequence: Synthetic oligonucleotide
cggcacgaaaggaccuguc

SEQ ID NO: 1352168 - RNA, 19 nt, Artificial Sequence
  Description of Artificial Sequence: Synthetic oligonucleotide
gccucacgaccaccacaca

SEQ ID NO: 1352169 - RNA, 19 nt, Artificial Sequence
  Description of Artificial Sequence: Synthetic oligonucleotide
ccgccgcuccccguguaag

SEQ ID NO: 1352170 - RNA, 19 nt, Artificial Sequence
  Description of Artificial Sequence: Synthetic oligonucleotide
cacaggggacgccggggau

SEQ ID NO: 1352171 - RNA, 19 nt, Artificial Sequence
  Description of Artificial Sequence: Synthetic oligonucleotide
ccucggcacgaaaggaccu

SEQ ID NO: 1352172 - RNA, 19 nt, Artificial Sequence
  Description of Artificial Sequence: Synthetic oligonucleotide
cgggugcguacuugcugug

SEQ ID NO: 1352173 - RNA, 19 nt, Artificial Sequence
  Description of Artificial Sequence: Synthetic oligonucleotide
gggugcguacuugcugugu

SEQ ID NO: 1352174 - RNA, 19 nt, Artificial Sequence
  Description of Artificial Sequence: Synthetic oligonucleotide
ggggaugggcccggaacgu

SEQ ID NO: 1352175 - RNA, 19 nt, Artificial Sequence
  Description of Artificial Sequence: Synthetic oligonucleotide
cgcuccccguguaagugaa

SEQ ID NO: 1352176 - RNA, 19 nt, Artificial Sequence
  Description of Artificial Sequence: Synthetic oligonucleotide
gggcccggaacgugguuuu

SEQ ID NO: 1352177 - RNA, 19 nt, Artificial Sequence
  Description of Artificial Sequence: Synthetic oligonucleotide
cacccggguuggggagcug

SEQ ID NO: 1352178 - RNA, 19 nt, Artificial Sequence
  Description of Artificial Sequence: Synthetic oligonucleotide
ccgcuuggacauggugguc

SEQ ID NO: 1352179 - RNA, 19 nt, Artificial Sequence
  Description of Artificial Sequence: Synthetic oligonucleotide
ggccuguggucuuccgcuu

SEQ ID NO: 1352180 - RNA, 19 nt, Artificial Sequence
  Description of Artificial Sequence: Synthetic oligonucleotide
cccucugcgggugcguacu

SEQ ID NO: 1352181 - RNA, 19 nt, Artificial Sequence
  Description of Artificial Sequence: Synthetic oligonucleotide
gcccacccugaagcgaacu

SEQ ID NO: 1352182 - RNA, 19 nt, Artificial Sequence
  Description of Artificial Sequence: Synthetic oligonucleotide
ccacugccauagccaggga

SEQ ID NO: 1352183 - RNA, 19 nt, Artificial Sequence
  Description of Artificial Sequence: Synthetic oligonucleotide
cgacaugguuuguucucau

SEQ ID NO: 1352184 - RNA, 19 nt, Artificial Sequence
  Description of Artificial Sequence: Synthetic oligonucleotide
cucggccgccgcuccccgu

SEQ ID NO: 1352185 - RNA, 19 nt, Artificial Sequence
  Description of Artificial Sequence: Synthetic oligonucleotide
cggugcgcuuguugccuga

SEQ ID NO: 1352186 - RNA, 19 nt, Artificial Sequence
  Description of Artificial Sequence: Synthetic oligonucleotide
ggccccggcuccgugucau

SEQ ID NO: 1352187 - RNA, 19 nt, Artificial Sequence
  Description of Artificial Sequence: Synthetic oligonucleotide
gcgacaggcugggcagcua

SEQ ID NO: 1352188 - RNA, 19 nt, Artificial Sequence
  Description of Artificial Sequence: Synthetic oligonucleotide
ccuccgccccuuucucacu

SEQ ID NO: 1352189 - RNA, 19 nt, Artificial Sequence
  Description of Artificial Sequence: Synthetic oligonucleotide
guccgacagcuggggcagu

SEQ ID NO: 1352190 - RNA, 19 nt, Artificial Sequence
  Description of Artificial Sequence: Synthetic oligonucleotide
ccgccccuuucucacugau

SEQ ID NO: 1352191 - RNA, 19 nt, Artificial Sequence
  Description of Artificial Sequence: Synthetic oligonucleotide
cgccgcuccccguguaagu

SEQ ID NO: 1352192 - RNA, 19 nt, Artificial Sequence
  Description of Artificial Sequence: Synthetic oligonucleotide
guccugcggugcgcuuguu

SEQ ID NO: 1352193 - RNA, 19 nt, Artificial Sequence
  Description of Artificial Sequence: Synthetic oligonucleotide
ccucugcgggugcguacuu

SEQ ID NO: 1352194 - RNA, 19 nt, Artificial Sequence
  Description of Artificial Sequence: Synthetic oligonucleotide
uuuaaucuaaucaauaagc

SEQ ID NO: 1352195 - RNA, 19 nt, Artificial Sequence
  Description of Artificial Sequence: Synthetic oligonucleotide
auugcaauuuaacuuagcc

SEQ ID NO: 1352196 - RNA, 19 nt, Artificial Sequence
  Description of Artificial Sequence: Synthetic oligonucleotide
uuuuaaucuaaucaauaag

SEQ ID NO: 1352197 - RNA, 19 nt, Artificial Sequence
  Description of Artificial Sequence: Synthetic oligonucleotide
uaaucaauaagccuggaga

SEQ ID NO: 1352198 - RNA, 19 nt, Artificial Sequence
  Description of Artificial Sequence: Synthetic oligonucleotide
auauuuacuucauaauccc

SEQ ID NO: 1352199 - RNA, 19 nt, Artificial Sequence
  Description of Artificial Sequence: Synthetic oligonucleotide
aacucaacgugucagcagc

SEQ ID NO: 1352200 - RNA, 19 nt, Artificial Sequence
  Description of Artificial Sequence: Synthetic oligonucleotide
auuaggauggcguuggugg

SEQ ID NO: 1352201 - RNA, 19 nt, Artificial Sequence
  Description of Artificial Sequence: Synthetic oligonucleotide
aaucuaaucaauaagccug

SEQ ID NO: 1352202 - RNA, 19 nt, Artificial Sequence
  Description of Artificial Sequence: Synthetic oligonucleotide
auauucacaguuuaugagg

SEQ ID NO: 1352203 - RNA, 19 nt, Artificial Sequence
  Description of Artificial Sequence: Synthetic oligonucleotide
ugcaauuuaacuuagccuc

SEQ ID NO: 1352204 - RNA, 19 nt, Artificial Sequence
  Description of Artificial Sequence: Synthetic oligonucleotide
uuaacuguagcauauuuac

SEQ ID NO: 1352205 - RNA, 19 nt, Artificial Sequence
  Description of Artificial Sequence: Synthetic oligonucleotide
aaucaauacauucacuagu

SEQ ID NO: 1352206 - RNA, 19 nt, Artificial Sequence
  Description of Artificial Sequence: Synthetic oligonucleotide
aauacauucacuaguuagg

SEQ ID NO: 1352207 - RNA, 19 nt, Artificial Sequence
  Description of Artificial Sequence: Synthetic oligonucleotide
uuuauacagacuucaaaag

SEQ ID NO: 1352208 - RNA, 19 nt, Artificial Sequence
  Description of Artificial Sequence: Synthetic oligonucleotide
aacuaugcagauaggaugc

SEQ ID NO: 1352209 - RNA, 19 nt, Artificial Sequence
  Description of Artificial Sequence: Synthetic oligonucleotide
ugauaugguaccaaaauuc

SEQ ID NO: 1352210 - RNA, 19 nt, Artificial Sequence
  Description of Artificial Sequence: Synthetic oligonucleotide
ucuguccuaacacaggagg

SEQ ID NO: 1352211 - RNA, 19 nt, Artificial Sequence
  Description of Artificial Sequence: Synthetic oligonucleotide
acuacuuagaaaugagugg

SEQ ID NO: 1352212 - RNA, 19 nt, Artificial Sequence
  Description of Artificial Sequence: Synthetic oligonucleotide
uuuaagagcacaauuuuaa

SEQ ID NO: 1352213 - RNA, 19 nt, Artificial Sequence
  Description of Artificial Sequence: Synthetic oligonucleotide
agaccaacuaugcagauag

SEQ ID NO: 1352214 - RNA, 19 nt, Artificial Sequence
  Description of Artificial Sequence: Synthetic oligonucleotide
ucuauaacaggaagaagcc

SEQ ID NO: 1352215 - RNA, 19 nt, Artificial Sequence
  Description of Artificial Sequence: Synthetic oligonucleotide
aaaagcuucaguuccccag

SEQ ID NO: 1352216 - RNA, 19 nt, Artificial Sequence
  Description of Artificial Sequence: Synthetic oligonucleotide
uauuuacuaacaauuauau

SEQ ID NO: 1352217 - RNA, 19 nt, Artificial Sequence
  Description of Artificial Sequence: Synthetic oligonucleotide
aaagaagaaaccguaagcu

SEQ ID NO: 1352218 - RNA, 19 nt, Artificial Sequence
  Description of Artificial Sequence: Synthetic oligonucleotide
agauagaugcauuuaauca

SEQ ID NO: 1352219 - RNA, 19 nt, Artificial Sequence
  Description of Artificial Sequence: Synthetic oligonucleotide
agcaaauuucagcucaacc

SEQ ID NO: 1352220 - RNA, 19 nt, Artificial Sequence
  Description of Artificial Sequence: Synthetic oligonucleotide
aaugccacuuggcauacuc

SEQ ID NO: 1352221 - RNA, 19 nt, Artificial Sequence
  Description of Artificial Sequence: Synthetic oligonucleotide
uuauuguaaagcaauugac

SEQ ID NO: 1352222 - RNA, 19 nt, Artificial Sequence
  Description of Artificial Sequence: Synthetic oligonucleotide
auauuacuaaaauuacauc

SEQ ID NO: 1352223 - RNA, 19 nt, Artificial Sequence
  Description of Artificial Sequence: Synthetic oligonucleotide
aaaccguaagcuucguaac

SEQ ID NO: 1352224 - RNA, 19 nt, Artificial Sequence
  Description of Artificial Sequence: Synthetic oligonucleotide
aacuguagcauauuuacuu

SEQ ID NO: 1352225 - RNA, 19 nt, Artificial Sequence
  Description of Artificial Sequence: Synthetic oligonucleotide
ucccuuaacaaacauguca

SEQ ID NO: 1352226 - RNA, 19 nt, Artificial Sequence
  Description of Artificial Sequence: Synthetic oligonucleotide
ucuaaagauggaaugugug

SEQ ID NO: 1352227 - RNA, 19 nt, Artificial Sequence
  Description of Artificial Sequence: Synthetic oligonucleotide
ugggagaucacagagacug

SEQ ID NO: 1352228 - RNA, 19 nt, Artificial Sequence
  Description of Artificial Sequence: Synthetic oligonucleotide
aagaacgggaagcacuuuc

SEQ ID NO: 1352229 - RNA, 19 nt, Artificial Sequence
  Description of Artificial Sequence: Synthetic oligonucleotide
ucauauucacaguuuauga

SEQ ID NO: 1352230 - RNA, 19 nt, Artificial Sequence
  Description of Artificial Sequence: Synthetic oligonucleotide
caaaagguauaguaggccc

SEQ ID NO: 1352231 - RNA, 19 nt, Artificial Sequence
  Description of Artificial Sequence: Synthetic oligonucleotide
uucaaaagguauaguaggc

SEQ ID NO: 1352232 - RNA, 19 nt, Artificial Sequence
  Description of Artificial Sequence: Synthetic oligonucleotide
uuauuauauucauaugaac

SEQ ID NO: 1352233 - RNA, 19 nt, Artificial Sequence
  Description of Artificial Sequence: Synthetic oligonucleotide
uuugugguggagcugagcu

SEQ ID NO: 1352234 - RNA, 19 nt, Artificial Sequence
  Description of Artificial Sequence: Synthetic oligonucleotide
ucagguuucuagcugagac

SEQ ID NO: 1352235 - RNA, 19 nt, Artificial Sequence
  Description of Artificial Sequence: Synthetic oligonucleotide
aaguuguucuaucgaaguc

SEQ ID NO: 1352236 - RNA, 19 nt, Artificial Sequence
  Description of Artificial Sequence: Synthetic oligonucleotide
aacaaacucaacgugucag

SEQ ID NO: 1352237 - RNA, 19 nt, Artificial Sequence
  Description of Artificial Sequence: Synthetic oligonucleotide
auuguaaagcaauugacua

SEQ ID NO: 1352238 - RNA, 19 nt, Artificial Sequence
  Description of Artificial Sequence: Synthetic oligonucleotide
caaagaagaaaccguaagc

SEQ ID NO: 1352239 - RNA, 19 nt, Artificial Sequence
  Description of Artificial Sequence: Synthetic oligonucleotide
aaaucaaagaagaaaccgu

SEQ ID NO: 1352240 - RNA, 19 nt, Artificial Sequence
  Description of Artificial Sequence: Synthetic oligonucleotide
uuagccucauaauuaacug

SEQ ID NO: 1352241 - RNA, 19 nt, Artificial Sequence
  Description of Artificial Sequence: Synthetic oligonucleotide
auuugcuccauuaggaugg

SEQ ID NO: 1352242 - RNA, 19 nt, Artificial Sequence
  Description of Artificial Sequence: Synthetic oligonucleotide
ugugcaugggagaucacag

SEQ ID NO: 1352243 - RNA, 19 nt, Artificial Sequence
  Description of Artificial Sequence: Synthetic oligonucleotide
aaugucagggucacauugc

SEQ ID NO: 1352244 - RNA, 19 nt, Artificial Sequence
  Description of Artificial Sequence: Synthetic oligonucleotide
cuacuuagaaaugaguggc

SEQ ID NO: 1352245 - RNA, 19 nt, Artificial Sequence
  Description of Artificial Sequence: Synthetic oligonucleotide
acagacuagauuucaaaca

SEQ ID NO: 1352246 - RNA, 19 nt, Artificial Sequence
  Description of Artificial Sequence: Synthetic oligonucleotide
acugagagaaaauagcuuu

SEQ ID NO: 1352247 - RNA, 19 nt, Artificial Sequence
  Description of Artificial Sequence: Synthetic oligonucleotide
caacuaugcagauaggaug

SEQ ID NO: 1352248 - RNA, 19 nt, Artificial Sequence
  Description of Artificial Sequence: Synthetic oligonucleotide
gguaccaaaauucaguuca

SEQ ID NO: 1352249 - RNA, 19 nt, Artificial Sequence
  Description of Artificial Sequence: Synthetic oligonucleotide
gauuugcuccauuaggaug

SEQ ID NO: 1352250 - RNA, 19 nt, Artificial Sequence
  Description of Artificial Sequence: Synthetic oligonucleotide
aauugacuaaauugcaauu

SEQ ID NO: 1352251 - RNA, 19 nt, Artificial Sequence
  Description of Artificial Sequence: Synthetic oligonucleotide
uugcaauuuaacuuagccu

SEQ ID NO: 1352252 - RNA, 19 nt, Artificial Sequence
  Description of Artificial Sequence: Synthetic oligonucleotide
gaaaccguaagcuucguaa

SEQ ID NO: 1352253 - RNA, 19 nt, Artificial Sequence
  Description of Artificial Sequence: Synthetic oligonucleotide
agaacuaagcagcuguucu

SEQ ID NO: 1352254 - RNA, 19 nt, Artificial Sequence
  Description of Artificial Sequence: Synthetic oligonucleotide
uugugucuauaacaggaag

SEQ ID NO: 1352255 - RNA, 19 nt, Artificial Sequence
  Description of Artificial Sequence: Synthetic oligonucleotide
gagauagaugcauuuaauc

SEQ ID NO: 1352256 - RNA, 19 nt, Artificial Sequence
  Description of Artificial Sequence: Synthetic oligonucleotide
gaagaaaccguaagcuucg

SEQ ID NO: 1352257 - RNA, 19 nt, Artificial Sequence
  Description of Artificial Sequence: Synthetic oligonucleotide
uaacuuagccucauaauua

SEQ ID NO: 1352258 - RNA, 19 nt, Artificial Sequence
  Description of Artificial Sequence: Synthetic oligonucleotide
acuucaaaagguauaguag

SEQ ID NO: 1352259 - RNA, 19 nt, Artificial Sequence
  Description of Artificial Sequence: Synthetic oligonucleotide
agagaacaaacucaacgug

SEQ ID NO: 1352260 - RNA, 19 nt, Artificial Sequence
  Description of Artificial Sequence: Synthetic oligonucleotide
gacugaaaaucaaagaaga

SEQ ID NO: 1352261 - RNA, 19 nt, Artificial Sequence
  Description of Artificial Sequence: Synthetic oligonucleotide
aguuagagggcugugaaug

SEQ ID NO: 1352262 - RNA, 19 nt, Artificial Sequence
  Description of Artificial Sequence: Synthetic oligonucleotide
ucaaaagguauaguaggcc

SEQ ID NO: 1352263 - RNA, 19 nt, Artificial Sequence
  Description of Artificial Sequence: Synthetic oligonucleotide
auucauaugaacagacuag

SEQ ID NO: 1352264 - RNA, 19 nt, Artificial Sequence
  Description of Artificial Sequence: Synthetic oligonucleotide
cauggaaacacaucagcug

SEQ ID NO: 1352265 - RNA, 19 nt, Artificial Sequence
  Description of Artificial Sequence: Synthetic oligonucleotide
aaaauagcuuuuagagaac

SEQ ID NO: 1352266 - RNA, 19 nt, Artificial Sequence
  Description of Artificial Sequence: Synthetic oligonucleotide
uucguaacuccagagagca

SEQ ID NO: 1352267 - RNA, 19 nt, Artificial Sequence
  Description of Artificial Sequence: Synthetic oligonucleotide
uguucuaaagauggaaugu

SEQ ID NO: 1352268 - RNA, 19 nt, Artificial Sequence
  Description of Artificial Sequence: Synthetic oligonucleotide
aacuuagccucauaauuaa

SEQ ID NO: 1352269 - RNA, 19 nt, Artificial Sequence
  Description of Artificial Sequence: Synthetic oligonucleotide
uucuaaagauggaaugugu

SEQ ID NO: 1352270 - RNA, 19 nt, Artificial Sequence
  Description of Artificial Sequence: Synthetic oligonucleotide
uaggucuguccuaacacag

SEQ ID NO: 1352271 - RNA, 19 nt, Artificial Sequence
  Description of Artificial Sequence: Synthetic oligonucleotide
agguuggaaagcaauauuc

SEQ ID NO: 1352272 - RNA, 19 nt, Artificial Sequence
  Description of Artificial Sequence: Synthetic oligonucleotide
aaagcaauauucacaguga

SEQ ID NO: 1352273 - RNA, 19 nt, Artificial Sequence
  Description of Artificial Sequence: Synthetic oligonucleotide
uguucuaucgaaguccaga

SEQ ID NO: 1352274 - RNA, 19 nt, Artificial Sequence
  Description of Artificial Sequence: Synthetic oligonucleotide
ucuacucaaugucaggguc

SEQ ID NO: 1352275 - RNA, 19 nt, Artificial Sequence
  Description of Artificial Sequence: Synthetic oligonucleotide
gaggagcgaacacugagag

SEQ ID NO: 1352276 - RNA, 19 nt, Artificial Sequence
  Description of Artificial Sequence: Synthetic oligonucleotide
ucaccuugagccaccgugg

SEQ ID NO: 1352277 - RNA, 19 nt, Artificial Sequence
  Description of Artificial Sequence: Synthetic oligonucleotide
aagaagaaaccguaagcuu

SEQ ID NO: 1352278 - RNA, 19 nt, Artificial Sequence
  Description of Artificial Sequence: Synthetic oligonucleotide
gacuucaaaagguauagua

SEQ ID NO: 1352279 - RNA, 19 nt, Artificial Sequence
  Description of Artificial Sequence: Synthetic oligonucleotide
ucacuuuugagaagcuuga

SEQ ID NO: 1352280 - RNA, 19 nt, Artificial Sequence
  Description of Artificial Sequence: Synthetic oligonucleotide
caucuacucaaugucaggg

SEQ ID NO: 1352281 - RNA, 19 nt, Artificial Sequence
  Description of Artificial Sequence: Synthetic oligonucleotide
uccauuuaggugaucugca

SEQ ID NO: 1352282 - RNA, 19 nt, Artificial Sequence
  Description of Artificial Sequence: Synthetic oligonucleotide
agcuacagacuucucucgc

SEQ ID NO: 1352283 - RNA, 19 nt, Artificial Sequence
  Description of Artificial Sequence: Synthetic oligonucleotide
ugcuccauuaggauggcgu

SEQ ID NO: 1352284 - RNA, 19 nt, Artificial Sequence
  Description of Artificial Sequence: Synthetic oligonucleotide
cuaaucaauaagccuggag

SEQ ID NO: 1352285 - RNA, 19 nt, Artificial Sequence
  Description of Artificial Sequence: Synthetic oligonucleotide
caugccauaaagaggguuc

SEQ ID NO: 1352286 - RNA, 19 nt, Artificial Sequence
  Description of Artificial Sequence: Synthetic oligonucleotide
ugacuaaauugcaauuuaa

SEQ ID NO: 1352287 - RNA, 19 nt, Artificial Sequence
  Description of Artificial Sequence: Synthetic oligonucleotide
aggaugcccauccagaaga

SEQ ID NO: 1352288 - RNA, 19 nt, Artificial Sequence
  Description of Artificial Sequence: Synthetic oligonucleotide
uuaggucuguccuaacaca

SEQ ID NO: 1352289 - RNA, 19 nt, Artificial Sequence
  Description of Artificial Sequence: Synthetic oligonucleotide
ugaguuagagggcugugaa

SEQ ID NO: 1352290 - RNA, 19 nt, Artificial Sequence
  Description of Artificial Sequence: Synthetic oligonucleotide
aaauugcaauuuaacuuag

SEQ ID NO: 1352291 - RNA, 19 nt, Artificial Sequence
  Description of Artificial Sequence: Synthetic oligonucleotide
ugacugaguacagagucag

SEQ ID NO: 1352292 - RNA, 19 nt, Artificial Sequence
  Description of Artificial Sequence: Synthetic oligonucleotide
agauaggaugcccauccag

SEQ ID NO: 1352293 - RNA, 19 nt, Artificial Sequence
  Description of Artificial Sequence: Synthetic oligonucleotide
guuaggucuguccuaacac

SEQ ID NO: 1352294 - RNA, 19 nt, Artificial Sequence
  Description of Artificial Sequence: Synthetic oligonucleotide
auuacuaaaauuacaucaa

SEQ ID NO: 1352295 - RNA, 19 nt, Artificial Sequence
  Description of Artificial Sequence: Synthetic oligonucleotide
agaagcuugauuugcucca

SEQ ID NO: 1352296 - RNA, 19 nt, Artificial Sequence
  Description of Artificial Sequence: Synthetic oligonucleotide
aguacuacuuagaaaugag

SEQ ID NO: 1352297 - RNA, 19 nt, Artificial Sequence
  Description of Artificial Sequence: Synthetic oligonucleotide
aaugaaccgcagcaagaca

SEQ ID NO: 1352298 - RNA, 19 nt, Artificial Sequence
  Description of Artificial Sequence: Synthetic oligonucleotide
cucgcugucaguugucucc

SEQ ID NO: 1352299 - RNA, 19 nt, Artificial Sequence
  Description of Artificial Sequence: Synthetic oligonucleotide
aaccguaagcuucguaacu

SEQ ID NO: 1352300 - RNA, 19 nt, Artificial Sequence
  Description of Artificial Sequence: Synthetic oligonucleotide
auauaauacccaaauuuga

SEQ ID NO: 1352301 - RNA, 19 nt, Artificial Sequence
  Description of Artificial Sequence: Synthetic oligonucleotide
ugucaguugucuccauucc

SEQ ID NO: 1352302 - RNA, 19 nt, Artificial Sequence
  Description of Artificial Sequence: Synthetic oligonucleotide
aauacccaaauuugauuua

SEQ ID NO: 1352303 - RNA, 19 nt, Artificial Sequence
  Description of Artificial Sequence: Synthetic oligonucleotide
uuuacuucauaaucccuua

SEQ ID NO: 1352304 - RNA, 19 nt, Artificial Sequence
  Description of Artificial Sequence: Synthetic oligonucleotide
uacucauauucacaguuua

SEQ ID NO: 1352305 - RNA, 19 nt, Artificial Sequence
  Description of Artificial Sequence: Synthetic oligonucleotide
uguccuaacacaggaggag

SEQ ID NO: 1352306 - RNA, 19 nt, Artificial Sequence
  Description of Artificial Sequence: Synthetic oligonucleotide
agcucaaccagguuggaaa

SEQ ID NO: 1352307 - RNA, 19 nt, Artificial Sequence
  Description of Artificial Sequence: Synthetic oligonucleotide
cucaccuugagccaccgug

SEQ ID NO: 1352308 - RNA, 19 nt, Artificial Sequence
  Description of Artificial Sequence: Synthetic oligonucleotide
uguagcauauuuacuucau

SEQ ID NO: 1352309 - RNA, 19 nt, Artificial Sequence
  Description of Artificial Sequence: Synthetic oligonucleotide
aagaggguucugcaagaug

SEQ ID NO: 1352310 - RNA, 19 nt, Artificial Sequence
  Description of Artificial Sequence: Synthetic oligonucleotide
guucuaucgaaguccagac

SEQ ID NO: 1352311 - RNA, 19 nt, Artificial Sequence
  Description of Artificial Sequence: Synthetic oligonucleotide
acugaguacagagucaggu

SEQ ID NO: 1352312 - RNA, 19 nt, Artificial Sequence
  Description of Artificial Sequence: Synthetic oligonucleotide
agguuucuagcugagacug

SEQ ID NO: 1352313 - RNA, 19 nt, Artificial Sequence
  Description of Artificial Sequence: Synthetic oligonucleotide
uagcuacagacuucucucg

SEQ ID NO: 1352314 - RNA, 19 nt, Artificial Sequence
  Description of Artificial Sequence: Synthetic oligonucleotide
cuucauaaucccuuaacaa

SEQ ID NO: 1352315 - RNA, 19 nt, Artificial Sequence
  Description of Artificial Sequence: Synthetic oligonucleotide
cugaaaaucaaagaagaaa

SEQ ID NO: 1352316 - RNA, 19 nt, Artificial Sequence
  Description of Artificial Sequence: Synthetic oligonucleotide
aguuaggucuguccuaaca

SEQ ID NO: 1352317 - RNA, 19 nt, Artificial Sequence
  Description of Artificial Sequence: Synthetic oligonucleotide
gcuucguaacuccagagag

SEQ ID NO: 1352318 - RNA, 19 nt, Artificial Sequence
  Description of Artificial Sequence: Synthetic oligonucleotide
uucuaucgaaguccagacc

SEQ ID NO: 1352319 - RNA, 19 nt, Artificial Sequence
  Description of Artificial Sequence: Synthetic oligonucleotide
agagacugaggccacggug

SEQ ID NO: 1352320 - RNA, 19 nt, Artificial Sequence
  Description of Artificial Sequence: Synthetic oligonucleotide
aucuaaucaauaagccugg

SEQ ID NO: 1352321 - RNA, 19 nt, Artificial Sequence
  Description of Artificial Sequence: Synthetic oligonucleotide
uaacuguagcauauuuacu

SEQ ID NO: 1352322 - RNA, 19 nt, Artificial Sequence
  Description of Artificial Sequence: Synthetic oligonucleotide
guucuaaagauggaaugug

SEQ ID NO: 1352323 - RNA, 19 nt, Artificial Sequence
  Description of Artificial Sequence: Synthetic oligonucleotide
cuucguaacuccagagagc

SEQ ID NO: 1352324 - RNA, 19 nt, Artificial Sequence
  Description of Artificial Sequence: Synthetic oligonucleotide
accaggguaaguuuugaaa

SEQ ID NO: 1352325 - RNA, 19 nt, Artificial Sequence
  Description of Artificial Sequence: Synthetic oligonucleotide
auugacuaaauugcaauuu

SEQ ID NO: 1352326 - RNA, 19 nt, Artificial Sequence
  Description of Artificial Sequence: Synthetic oligonucleotide
uagccucauaauuaacugu

SEQ ID NO: 1352327 - RNA, 19 nt, Artificial Sequence
  Description of Artificial Sequence: Synthetic oligonucleotide
uccuuaaucuugaaacauu

SEQ ID NO: 1352328 - RNA, 19 nt, Artificial Sequence
  Description of Artificial Sequence: Synthetic oligonucleotide
caaguuuauacagacuuca

SEQ ID NO: 1352329 - RNA, 19 nt, Artificial Sequence
  Description of Artificial Sequence: Synthetic oligonucleotide
gcagauaggaugcccaucc

SEQ ID NO: 1352330 - RNA, 19 nt, Artificial Sequence
  Description of Artificial Sequence: Synthetic oligonucleotide
gauaggaugcccauccaga

SEQ ID NO: 1352331 - RNA, 19 nt, Artificial Sequence
  Description of Artificial Sequence: Synthetic oligonucleotide
auaguaggcccaaagaaaa

SEQ ID NO: 1352332 - RNA, 19 nt, Artificial Sequence
  Description of Artificial Sequence: Synthetic oligonucleotide
augguaccaaaauucaguu

SEQ ID NO: 1352333 - RNA, 19 nt, Artificial Sequence
  Description of Artificial Sequence: Synthetic oligonucleotide
accguaagcuucguaacuc

SEQ ID NO: 1352334 - RNA, 19 nt, Artificial Sequence
  Description of Artificial Sequence: Synthetic oligonucleotide
accaacuaugcagauagga

SEQ ID NO: 1352335 - RNA, 19 nt, Artificial Sequence
  Description of Artificial Sequence: Synthetic oligonucleotide
guccauuuaggugaucugc

SEQ ID NO: 1352336 - RNA, 19 nt, Artificial Sequence
  Description of Artificial Sequence: Synthetic oligonucleotide
cucaacuuguaaagucagc

SEQ ID NO: 1352337 - RNA, 19 nt, Artificial Sequence
  Description of Artificial Sequence: Synthetic oligonucleotide
guugauaugguaccaaaau

SEQ ID NO: 1352338 - RNA, 19 nt, Artificial Sequence
  Description of Artificial Sequence: Synthetic oligonucleotide
uuccuuaaucuugaaacau

SEQ ID NO: 1352339 - RNA, 19 nt, Artificial Sequence
  Description of Artificial Sequence: Synthetic oligonucleotide
aaacaaguuuauacagacu

SEQ ID NO: 1352340 - RNA, 19 nt, Artificial Sequence
  Description of Artificial Sequence: Synthetic oligonucleotide
agcuucguaacuccagaga

SEQ ID NO: 1352341 - RNA, 19 nt, Artificial Sequence
  Description of Artificial Sequence: Synthetic oligonucleotide
aucuacucaaugucagggu

SEQ ID NO: 1352342 - RNA, 19 nt, Artificial Sequence
  Description of Artificial Sequence: Synthetic oligonucleotide
gguuauuguaaagcaauug

SEQ ID NO: 1352343 - RNA, 19 nt, Artificial Sequence
  Description of Artificial Sequence: Synthetic oligonucleotide
uuacuucauaaucccuuaa

SEQ ID NO: 1352344 - RNA, 19 nt, Artificial Sequence
  Description of Artificial Sequence: Synthetic oligonucleotide
cauucacuaguuaggucug

SEQ ID NO: 1352345 - RNA, 19 nt, Artificial Sequence
  Description of Artificial Sequence: Synthetic oligonucleotide
acuaugcagauaggaugcc

SEQ ID NO: 1352346 - RNA, 19 nt, Artificial Sequence
  Description of Artificial Sequence: Synthetic oligonucleotide
ucaacgugucagcagcaaa

SEQ ID NO: 1352347 - RNA, 19 nt, Artificial Sequence
  Description of Artificial Sequence: Synthetic oligonucleotide
cacggugcugaguuagagg

SEQ ID NO: 1352348 - RNA, 19 nt, Artificial Sequence
  Description of Artificial Sequence: Synthetic oligonucleotide
auaggaugcccauccagaa

SEQ ID NO: 1352349 - RNA, 19 nt, Artificial Sequence
  Description of Artificial Sequence: Synthetic oligonucleotide
gguauaguaggcccaaaga

SEQ ID NO: 1352350 - RNA, 19 nt, Artificial Sequence
  Description of Artificial Sequence: Synthetic oligonucleotide
ugugagauagaugcauuua

SEQ ID NO: 1352351 - RNA, 19 nt, Artificial Sequence
  Description of Artificial Sequence: Synthetic oligonucleotide
uagaaaugaguggcucccg

SEQ ID NO: 1352352 - RNA, 19 nt, Artificial Sequence
  Description of Artificial Sequence: Synthetic oligonucleotide
ggaaugaacuaauuuucuc

SEQ ID NO: 1352353 - RNA, 19 nt, Artificial Sequence
  Description of Artificial Sequence: Synthetic oligonucleotide
auagaugcauuuaaucaau

SEQ ID NO: 1352354 - RNA, 19 nt, Artificial Sequence
  Description of Artificial Sequence: Synthetic oligonucleotide
augucaaccuuacccagaa

SEQ ID NO: 1352355 - RNA, 19 nt, Artificial Sequence
  Description of Artificial Sequence: Synthetic oligonucleotide
agcaauugacuaaauugca

SEQ ID NO: 1352356 - RNA, 19 nt, Artificial Sequence
  Description of Artificial Sequence: Synthetic oligonucleotide
aucaauacauucacuaguu

SEQ ID NO: 1352357 - RNA, 19 nt, Artificial Sequence
  Description of Artificial Sequence: Synthetic oligonucleotide
auauucauaugaacagacu

SEQ ID NO: 1352358 - RNA, 19 nt, Artificial Sequence
  Description of Artificial Sequence: Synthetic oligonucleotide
gaacaaacucaacguguca

SEQ ID NO: 1352359 - RNA, 19 nt, Artificial Sequence
  Description of Artificial Sequence: Synthetic oligonucleotide
uccagaagcgggaggucug

SEQ ID NO: 1352360 - RNA, 19 nt, Artificial Sequence
  Description of Artificial Sequence: Synthetic oligonucleotide
aggaaugaacuaauuuucu

SEQ ID NO: 1352361 - RNA, 19 nt, Artificial Sequence
  Description of Artificial Sequence: Synthetic oligonucleotide
guaaagucagcugugagau

SEQ ID NO: 1352362 - RNA, 19 nt, Artificial Sequence
  Description of Artificial Sequence: Synthetic oligonucleotide
caccauggaaacacaucag

SEQ ID NO: 1352363 - RNA, 19 nt, Artificial Sequence
  Description of Artificial Sequence: Synthetic oligonucleotide
augaaccgcagcaagacau

SEQ ID NO: 1352364 - RNA, 19 nt, Artificial Sequence
  Description of Artificial Sequence: Synthetic oligonucleotide
ugguaccaaaauucaguuc

SEQ ID NO: 1352365 - RNA, 19 nt, Artificial Sequence
  Description of Artificial Sequence: Synthetic oligonucleotide
agccaauucuucuuuggua

SEQ ID NO: 1352366 - RNA, 19 nt, Artificial Sequence
  Description of Artificial Sequence: Synthetic oligonucleotide
ggugucaggagaacuaagc

SEQ ID NO: 1352367 - RNA, 19 nt, Artificial Sequence
  Description of Artificial Sequence: Synthetic oligonucleotide
cugugaaugacugguacca

SEQ ID NO: 1352368 - RNA, 19 nt, Artificial Sequence
  Description of Artificial Sequence: Synthetic oligonucleotide
ccucauaauuaacuguagc

SEQ ID NO: 1352369 - RNA, 19 nt, Artificial Sequence
  Description of Artificial Sequence: Synthetic oligonucleotide
uacuccagguuagcuacag

SEQ ID NO: 1352370 - RNA, 19 nt, Artificial Sequence
  Description of Artificial Sequence: Synthetic oligonucleotide
uuagagggcugugaaugac

SEQ ID NO: 1352371 - RNA, 19 nt, Artificial Sequence
  Description of Artificial Sequence: Synthetic oligonucleotide
cagagugcaggaaugaacu

SEQ ID NO: 1352372 - RNA, 19 nt, Artificial Sequence
  Description of Artificial Sequence: Synthetic oligonucleotide
gugugugccagccgaagac

SEQ ID NO: 1352373 - RNA, 19 nt, Artificial Sequence
  Description of Artificial Sequence: Synthetic oligonucleotide
gaagcacuuucuuccucac

SEQ ID NO: 1352374 - RNA, 19 nt, Artificial Sequence
  Description of Artificial Sequence: Synthetic oligonucleotide
caaccuuacccagaaagca

SEQ ID NO: 1352375 - RNA, 19 nt, Artificial Sequence
  Description of Artificial Sequence: Synthetic oligonucleotide
auacccaaauuugauuuaa

SEQ ID NO: 1352376 - RNA, 19 nt, Artificial Sequence
  Description of Artificial Sequence: Synthetic oligonucleotide
agcuguucuaaagauggaa

SEQ ID NO: 1352377 - RNA, 19 nt, Artificial Sequence
  Description of Artificial Sequence: Synthetic oligonucleotide
uuguucuaucgaaguccag

SEQ ID NO: 1352378 - RNA, 19 nt, Artificial Sequence
  Description of Artificial Sequence: Synthetic oligonucleotide
aguaccaggguaaguuuug

SEQ ID NO: 1352379 - RNA, 19 nt, Artificial Sequence
  Description of Artificial Sequence: Synthetic oligonucleotide
uuaggugaucugcacucuu

SEQ ID NO: 1352380 - RNA, 19 nt, Artificial Sequence
  Description of Artificial Sequence: Synthetic oligonucleotide
agauggaaugugugugcca

SEQ ID NO: 1352381 - RNA, 19 nt, Artificial Sequence
  Description of Artificial Sequence: Synthetic oligonucleotide
acucgcugucaguugucuc

SEQ ID NO: 1352382 - RNA, 19 nt, Artificial Sequence
  Description of Artificial Sequence: Synthetic oligonucleotide
aaagaggguucugcaagau

SEQ ID NO: 1352383 - RNA, 19 nt, Artificial Sequence
  Description of Artificial Sequence: Synthetic oligonucleotide
guuagagggcugugaauga

SEQ ID NO: 1352384 - RNA, 19 nt, Artificial Sequence
  Description of Artificial Sequence: Synthetic oligonucleotide
agccucauaauuaacugua

SEQ ID NO: 1352385 - RNA, 19 nt, Artificial Sequence
  Description of Artificial Sequence: Synthetic oligonucleotide
ucuaaucaauaagccugga

SEQ ID NO: 1352386 - RNA, 19 nt, Artificial Sequence
  Description of Artificial Sequence: Synthetic oligonucleotide
ggagaucacagagacugag

SEQ ID NO: 1352387 - RNA, 19 nt, Artificial Sequence
  Description of Artificial Sequence: Synthetic oligonucleotide
accgcagcaagacauucuu

SEQ ID NO: 1352388 - RNA, 19 nt, Artificial Sequence
  Description of Artificial Sequence: Synthetic oligonucleotide
guuccagagugcaggaaug

SEQ ID NO: 1352389 - RNA, 19 nt, Artificial Sequence
  Description of Artificial Sequence: Synthetic oligonucleotide
acuagauuucaaacaaguu

SEQ ID NO: 1352390 - RNA, 19 nt, Artificial Sequence
  Description of Artificial Sequence: Synthetic oligonucleotide
cuaugugguuauuuacuaa

SEQ ID NO: 1352391 - RNA, 19 nt, Artificial Sequence
  Description of Artificial Sequence: Synthetic oligonucleotide
gguuggaaagcaauauuca

SEQ ID NO: 1352392 - RNA, 19 nt, Artificial Sequence
  Description of Artificial Sequence: Synthetic oligonucleotide
acaguacuacuuagaaaug

SEQ ID NO: 1352393 - RNA, 19 nt, Artificial Sequence
  Description of Artificial Sequence: Synthetic oligonucleotide
ucccgaagcaguccauuua

SEQ ID NO: 1352394 - RNA, 19 nt, Artificial Sequence
  Description of Artificial Sequence: Synthetic oligonucleotide
cagaagaacgggaagcacu

SEQ ID NO: 1352395 - RNA, 19 nt, Artificial Sequence
  Description of Artificial Sequence: Synthetic oligonucleotide
ggucuguccuaacacagga

SEQ ID NO: 1352396 - RNA, 19 nt, Artificial Sequence
  Description of Artificial Sequence: Synthetic oligonucleotide
caaacucaacgugucagca

SEQ ID NO: 1352397 - RNA, 19 nt, Artificial Sequence
  Description of Artificial Sequence: Synthetic oligonucleotide
ccagagugcaggaaugaac

SEQ ID NO: 1352398 - RNA, 19 nt, Artificial Sequence
  Description of Artificial Sequence: Synthetic oligonucleotide
gagcacaauuuuaaucuaa

SEQ ID NO: 1352399 - RNA, 19 nt, Artificial Sequence
  Description of Artificial Sequence: Synthetic oligonucleotide
ggcugugaaugacugguac

SEQ ID NO: 1352400 - RNA, 19 nt, Artificial Sequence
  Description of Artificial Sequence: Synthetic oligonucleotide
auacagacuucaaaaggua

SEQ ID NO: 1352401 - RNA, 19 nt, Artificial Sequence
  Description of Artificial Sequence: Synthetic oligonucleotide
augccauaaagaggguucu

SEQ ID NO: 1352402 - RNA, 19 nt, Artificial Sequence
  Description of Artificial Sequence: Synthetic oligonucleotide
aaccgcagcaagacauucu

SEQ ID NO: 1352403 - RNA, 19 nt, Artificial Sequence
  Description of Artificial Sequence: Synthetic oligonucleotide
ucucgcuccugauuucuuu

SEQ ID NO: 1352404 - RNA, 19 nt, Artificial Sequence
  Description of Artificial Sequence: Synthetic oligonucleotide
aagcuucaguuccccaguu

SEQ ID NO: 1352405 - RNA, 19 nt, Artificial Sequence
  Description of Artificial Sequence: Synthetic oligonucleotide
uugccaguaccaggguaag

SEQ ID NO: 1352406 - RNA, 19 nt, Artificial Sequence
  Description of Artificial Sequence: Synthetic oligonucleotide
aucccuuaacaaacauguc

SEQ ID NO: 1352407 - RNA, 19 nt, Artificial Sequence
  Description of Artificial Sequence: Synthetic oligonucleotide
caguugauaugguaccaaa

SEQ ID NO: 1352408 - RNA, 19 nt, Artificial Sequence
  Description of Artificial Sequence: Synthetic oligonucleotide
ccaucuacucaaugucagg

SEQ ID NO: 1352409 - RNA, 19 nt, Artificial Sequence
  Description of Artificial Sequence: Synthetic oligonucleotide
cauuuaggugaucugcacu

SEQ ID NO: 1352410 - RNA, 19 nt, Artificial Sequence
  Description of Artificial Sequence: Synthetic oligonucleotide
augcagauaggaugcccau

SEQ ID NO: 1352411 - RNA, 19 nt, Artificial Sequence
  Description of Artificial Sequence: Synthetic oligonucleotide
cccgaagcaguccauuuag

SEQ ID NO: 1352412 - RNA, 19 nt, Artificial Sequence
  Description of Artificial Sequence: Synthetic oligonucleotide
agaaaccguaagcuucgua

SEQ ID NO: 1352413 - RNA, 19 nt, Artificial Sequence
  Description of Artificial Sequence: Synthetic oligonucleotide
gaccaacuaugcagauagg

SEQ ID NO: 1352414 - RNA, 19 nt, Artificial Sequence
  Description of Artificial Sequence: Synthetic oligonucleotide
aaugugugugccagccgaa

SEQ ID NO: 1352415 - RNA, 19 nt, Artificial Sequence
  Description of Artificial Sequence: Synthetic oligonucleotide
agagugcaggaaugaacua

SEQ ID NO: 1352416 - RNA, 19 nt, Artificial Sequence
  Description of Artificial Sequence: Synthetic oligonucleotide
ccuuaaucuugaaacauua

SEQ ID NO: 1352417 - RNA, 19 nt, Artificial Sequence
  Description of Artificial Sequence: Synthetic oligonucleotide
ugcagauaggaugcccauc

SEQ ID NO: 1352418 - RNA, 19 nt, Artificial Sequence
  Description of Artificial Sequence: Synthetic oligonucleotide
gucuguccuaacacaggag

SEQ ID NO: 1352419 - RNA, 19 nt, Artificial Sequence
  Description of Artificial Sequence: Synthetic oligonucleotide
uaaagucagcugugagaua

SEQ ID NO: 1352420 - RNA, 19 nt, Artificial Sequence
  Description of Artificial Sequence: Synthetic oligonucleotide
uuucacuaccgggcuucag

SEQ ID NO: 1352421 - RNA, 19 nt, Artificial Sequence
  Description of Artificial Sequence: Synthetic oligonucleotide
aagaaaccguaagcuucgu

SEQ ID NO: 1352422 - RNA, 19 nt, Artificial Sequence
  Description of Artificial Sequence: Synthetic oligonucleotide
aggagcgaacacugagaga

SEQ ID NO: 1352423 - RNA, 19 nt, Artificial Sequence
  Description of Artificial Sequence: Synthetic oligonucleotide
acgugucagcagcaaauuu

SEQ ID NO: 1352424 - RNA, 19 nt, Artificial Sequence
  Description of Artificial Sequence: Synthetic oligonucleotide
aagcgggaggucuguguuu

SEQ ID NO: 1352425 - RNA, 19 nt, Artificial Sequence
  Description of Artificial Sequence: Synthetic oligonucleotide
ucgcugucaguugucucca

SEQ ID NO: 1352426 - RNA, 19 nt, Artificial Sequence
  Description of Artificial Sequence: Synthetic oligonucleotide
ugucaaccuuacccagaaa

SEQ ID NO: 1352427 - RNA, 19 nt, Artificial Sequence
  Description of Artificial Sequence: Synthetic oligonucleotide
gccucucucuuucacuacc

SEQ ID NO: 1352428 - RNA, 19 nt, Artificial Sequence
  Description of Artificial Sequence: Synthetic oligonucleotide
ucguaacuccagagagcac

SEQ ID NO: 1352429 - RNA, 19 nt, Artificial Sequence
  Description of Artificial Sequence: Synthetic oligonucleotide
ccauuuaggugaucugcac

SEQ ID NO: 1352430 - RNA, 19 nt, Artificial Sequence
  Description of Artificial Sequence: Synthetic oligonucleotide
ccguaagcuucguaacucc

SEQ ID NO: 1352431 - RNA, 19 nt, Artificial Sequence
  Description of Artificial Sequence: Synthetic oligonucleotide
caacgugucagcagcaaau

SEQ ID NO: 1352432 - RNA, 19 nt, Artificial Sequence
  Description of Artificial Sequence: Synthetic oligonucleotide
accuuacccagaaagcauu

SEQ ID NO: 1352433 - RNA, 19 nt, Artificial Sequence
  Description of Artificial Sequence: Synthetic oligonucleotide
ccauaaagaggguucugca

SEQ ID NO: 1352434 - RNA, 19 nt, Artificial Sequence
  Description of Artificial Sequence: Synthetic oligonucleotide
gcaauuuaacuuagccuca

SEQ ID NO: 1352435 - RNA, 19 nt, Artificial Sequence
  Description of Artificial Sequence: Synthetic oligonucleotide
gaagcgggaggucuguguu

SEQ ID NO: 1352436 - RNA, 19 nt, Artificial Sequence
  Description of Artificial Sequence: Synthetic oligonucleotide
gccucauaauuaacuguag

SEQ ID NO: 1352437 - RNA, 19 nt, Artificial Sequence
  Description of Artificial Sequence: Synthetic oligonucleotide
uugagccaccguggcaagc

SEQ ID NO: 1352438 - RNA, 19 nt, Artificial Sequence
  Description of Artificial Sequence: Synthetic oligonucleotide
caguccauuuaggugaucu

SEQ ID NO: 1352439 - RNA, 19 nt, Artificial Sequence
  Description of Artificial Sequence: Synthetic oligonucleotide
ggguaaguuuugaaauaac

SEQ ID NO: 1352440 - RNA, 19 nt, Artificial Sequence
  Description of Artificial Sequence: Synthetic oligonucleotide
ccgaagcaguccauuuagg

SEQ ID NO: 1352441 - RNA, 19 nt, Artificial Sequence
  Description of Artificial Sequence: Synthetic oligonucleotide
cuauaacaggaagaagccu

SEQ ID NO: 1352442 - RNA, 19 nt, Artificial Sequence
  Description of Artificial Sequence: Synthetic oligonucleotide
gggguuauuguaaagcaau

SEQ ID NO: 1352443 - RNA, 19 nt, Artificial Sequence
  Description of Artificial Sequence: Synthetic oligonucleotide
gguuccagagugcaggaau

SEQ ID NO: 1352444 - RNA, 19 nt, Artificial Sequence
  Description of Artificial Sequence: Synthetic oligonucleotide
guaccaaaauucaguucaa

SEQ ID NO: 1352445 - RNA, 19 nt, Artificial Sequence
  Description of Artificial Sequence: Synthetic oligonucleotide
guaccaggguaaguuuuga

SEQ ID NO: 1352446 - RNA, 19 nt, Artificial Sequence
  Description of Artificial Sequence: Synthetic oligonucleotide
gaguuagagggcugugaau

SEQ ID NO: 1352447 - RNA, 19 nt, Artificial Sequence
  Description of Artificial Sequence: Synthetic oligonucleotide
ggaggagcgaacacugaga

SEQ ID NO: 1352448 - RNA, 19 nt, Artificial Sequence
  Description of Artificial Sequence: Synthetic oligonucleotide
cugagagaaaauagcuuuu

SEQ ID NO: 1352449 - RNA, 19 nt, Artificial Sequence
  Description of Artificial Sequence: Synthetic oligonucleotide
cacagugacugaguacaga

SEQ ID NO: 1352450 - RNA, 19 nt, Artificial Sequence
  Description of Artificial Sequence: Synthetic oligonucleotide
ggugcugaguuagagggcu

SEQ ID NO: 1352451 - RNA, 19 nt, Artificial Sequence
  Description of Artificial Sequence: Synthetic oligonucleotide
acucaacgugucagcagca

SEQ ID NO: 1352452 - RNA, 19 nt, Artificial Sequence
  Description of Artificial Sequence: Synthetic oligonucleotide
accgggcuucaggaaaaug

SEQ ID NO: 1352453 - RNA, 19 nt, Artificial Sequence
  Description of Artificial Sequence: Synthetic oligonucleotide
ugccaguaccaggguaagu

SEQ ID NO: 1352454 - RNA, 19 nt, Artificial Sequence
  Description of Artificial Sequence: Synthetic oligonucleotide
cagauaggaugcccaucca

SEQ ID NO: 1352455 - RNA, 19 nt, Artificial Sequence
  Description of Artificial Sequence: Synthetic oligonucleotide
gaacgggaagcacuuucuu

SEQ ID NO: 1352456 - RNA, 19 nt, Artificial Sequence
  Description of Artificial Sequence: Synthetic oligonucleotide
cgggguuccagagugcagg

SEQ ID NO: 1352457 - RNA, 19 nt, Artificial Sequence
  Description of Artificial Sequence: Synthetic oligonucleotide
cagcuguucuaaagaugga

SEQ ID NO: 1352458 - RNA, 19 nt, Artificial Sequence
  Description of Artificial Sequence: Synthetic oligonucleotide
cagccaauucuucuuuggu

SEQ ID NO: 1352459 - RNA, 19 nt, Artificial Sequence
  Description of Artificial Sequence: Synthetic oligonucleotide
cacggugugcauguccaga

SEQ ID NO: 1352460 - RNA, 19 nt, Artificial Sequence
  Description of Artificial Sequence: Synthetic oligonucleotide
ggcucccgggguuccagag

SEQ ID NO: 1352461 - RNA, 19 nt, Artificial Sequence
  Description of Artificial Sequence: Synthetic oligonucleotide
ccaacuaugcagauaggau

SEQ ID NO: 1352462 - RNA, 19 nt, Artificial Sequence
  Description of Artificial Sequence: Synthetic oligonucleotide
gcccauccagaagaacggg

SEQ ID NO: 1352463 - RNA, 19 nt, Artificial Sequence
  Description of Artificial Sequence: Synthetic oligonucleotide
gcaagacauucuucaagua

SEQ ID NO: 1352464 - RNA, 19 nt, Artificial Sequence
  Description of Artificial Sequence: Synthetic oligonucleotide
augggagaucacagagacu

SEQ ID NO: 1352465 - RNA, 19 nt, Artificial Sequence
  Description of Artificial Sequence: Synthetic oligonucleotide
caaguacuccagguuagcu

SEQ ID NO: 1352466 - RNA, 19 nt, Artificial Sequence
  Description of Artificial Sequence: Synthetic oligonucleotide
cucaacgugucagcagcaa

SEQ ID NO: 1352467 - RNA, 19 nt, Artificial Sequence
  Description of Artificial Sequence: Synthetic oligonucleotide
gcccaucuacucaauguca

SEQ ID NO: 1352468 - RNA, 19 nt, Artificial Sequence
  Description of Artificial Sequence: Synthetic oligonucleotide
cagaccaacuaugcagaua

SEQ ID NO: 1352469 - RNA, 19 nt, Artificial Sequence
  Description of Artificial Sequence: Synthetic oligonucleotide
gccuggagacaccauggaa

SEQ ID NO: 1352470 - RNA, 19 nt, Artificial Sequence
  Description of Artificial Sequence: Synthetic oligonucleotide
cugcacucuuuguggugga

SEQ ID NO: 1352471 - RNA, 19 nt, Artificial Sequence
  Description of Artificial Sequence: Synthetic oligonucleotide
agcaugccauaaagagggu

SEQ ID NO: 1352472 - RNA, 19 nt, Artificial Sequence
  Description of Artificial Sequence: Synthetic oligonucleotide
cacuaccgggcuucaggaa

SEQ ID NO: 1352473 - RNA, 19 nt, Artificial Sequence
  Description of Artificial Sequence: Synthetic oligonucleotide
acucaaugucagggucaca

SEQ ID NO: 1352474 - RNA, 19 nt, Artificial Sequence
  Description of Artificial Sequence: Synthetic oligonucleotide
gccaguaccaggguaaguu

SEQ ID NO: 1352475 - RNA, 19 nt, Artificial Sequence
  Description of Artificial Sequence: Synthetic oligonucleotide
agagcacuaugugguuauu

SEQ ID NO: 1352476 - RNA, 19 nt, Artificial Sequence
  Description of Artificial Sequence: Synthetic oligonucleotide
cguaacuccagagagcacu

SEQ ID NO: 1352477 - RNA, 19 nt, Artificial Sequence
  Description of Artificial Sequence: Synthetic oligonucleotide
uaccgggcuucaggaaaau

SEQ ID NO: 1352478 - RNA, 19 nt, Artificial Sequence
  Description of Artificial Sequence: Synthetic oligonucleotide
cgaagcaguccauuuaggu

SEQ ID NO: 1352479 - RNA, 19 nt, Artificial Sequence
  Description of Artificial Sequence: Synthetic oligonucleotide
gguuucuagcugagacuga

SEQ ID NO: 1352480 - RNA, 19 nt, Artificial Sequence
  Description of Artificial Sequence: Synthetic oligonucleotide
cguugguggccucugucuc

SEQ ID NO: 1352481 - RNA, 19 nt, Artificial Sequence
  Description of Artificial Sequence: Synthetic oligonucleotide
ccuaacacaggaggagcga

SEQ ID NO: 1352482 - RNA, 19 nt, Artificial Sequence
  Description of Artificial Sequence: Synthetic oligonucleotide
gcguugguggccucugucu

SEQ ID NO: 1352483 - RNA, 19 nt, Artificial Sequence
  Description of Artificial Sequence: Synthetic oligonucleotide
gccaccguggcaagcuuuc

SEQ ID NO: 1352484 - RNA, 19 nt, Artificial Sequence
  Description of Artificial Sequence: Synthetic oligonucleotide
ccgcagcaagacauucuuc

SEQ ID NO: 1352485 - RNA, 19 nt, Artificial Sequence
  Description of Artificial Sequence: Synthetic oligonucleotide
cggugcugaguuagagggc

SEQ ID NO: 1352486 - RNA, 19 nt, Artificial Sequence
  Description of Artificial Sequence: Synthetic oligonucleotide
cucccgaagcaguccauuu

SEQ ID NO: 1352487 - RNA, 19 nt, Artificial Sequence
  Description of Artificial Sequence: Synthetic oligonucleotide
gcuccauuaggauggcguu

SEQ ID NO: 1352488 - RNA, 19 nt, Artificial Sequence
  Description of Artificial Sequence: Synthetic oligonucleotide
ccaguugauaugguaccaa

SEQ ID NO: 1352489 - RNA, 19 nt, Artificial Sequence
  Description of Artificial Sequence: Synthetic oligonucleotide
gggagaucacagagacuga

SEQ ID NO: 1352490 - RNA, 19 nt, Artificial Sequence
  Description of Artificial Sequence: Synthetic oligonucleotide
ggguuauuguaaagcaauu

SEQ ID NO: 1352491 - RNA, 19 nt, Artificial Sequence
  Description of Artificial Sequence: Synthetic oligonucleotide
cagagagcacuaugugguu

SEQ ID NO: 1352492 - RNA, 19 nt, Artificial Sequence
  Description of Artificial Sequence: Synthetic oligonucleotide
cacuuggcauacucauauu

SEQ ID NO: 1352493 - RNA, 19 nt, Artificial Sequence
  Description of Artificial Sequence: Synthetic oligonucleotide
gcugucaguugucuccauu

SEQ ID NO: 1352494 - RNA, 19 nt, Artificial Sequence
  Description of Artificial Sequence: Synthetic oligonucleotide
ccagccgaagacacagacu

SEQ ID NO: 1352495 - RNA, 19 nt, Artificial Sequence
  Description of Artificial Sequence: Synthetic oligonucleotide
gcgaacacugagagaaaau

SEQ ID NO: 1352496 - RNA, 19 nt, Artificial Sequence
  Description of Artificial Sequence: Synthetic oligonucleotide
gcaugccauaaagaggguu

SEQ ID NO: 1352497 - RNA, 19 nt, Artificial Sequence
  Description of Artificial Sequence: Synthetic oligonucleotide
ccaguaccaggguaaguuu

SEQ ID NO: 1352498 - RNA, 19 nt, Artificial Sequence
  Description of Artificial Sequence: Synthetic oligonucleotide
cccgggguuccagagugca

SEQ ID NO: 1352499 - RNA, 19 nt, Artificial Sequence
  Description of Artificial Sequence: Synthetic oligonucleotide
ccuuacccagaaagcauuu

SEQ ID NO: 1352500 - RNA, 19 nt, Artificial Sequence
  Description of Artificial Sequence: Synthetic oligonucleotide
gccacggugcugaguuaga

SEQ ID NO: 1352501 - RNA, 19 nt, Artificial Sequence
  Description of Artificial Sequence: Synthetic oligonucleotide
ccagaccaacuaugcagau

SEQ ID NO: 1352502 - RNA, 19 nt, Artificial Sequence
  Description of Artificial Sequence: Synthetic oligonucleotide
gcaguccauuuaggugauc

SEQ ID NO: 1352503 - RNA, 19 nt, Artificial Sequence
  Description of Artificial Sequence: Synthetic oligonucleotide
cugcagcauugugucuaua

SEQ ID NO: 1352504 - RNA, 19 nt, Artificial Sequence
  Description of Artificial Sequence: Synthetic oligonucleotide
cgggccacggugugcaugu

SEQ ID NO: 1352505 - RNA, 19 nt, Artificial Sequence
  Description of Artificial Sequence: Synthetic oligonucleotide
gcgggaggucuguguuucu

SEQ ID NO: 1352506 - RNA, 19 nt, Artificial Sequence
  Description of Artificial Sequence: Synthetic oligonucleotide
cucgggccacggugugcau

SEQ ID NO: 1352507 - RNA, 19 nt, Artificial Sequence
  Description of Artificial Sequence: Synthetic oligonucleotide
ccuccucucgggccacggu

SEQ ID NO: 1352508 - RNA, 19 nt, Artificial Sequence
  Description of Artificial Sequence: Synthetic oligonucleotide
ccucaccuugagccaccgu

SEQ ID NO: 1352509 - RNA, 19 nt, Artificial Sequence
  Description of Artificial Sequence: Synthetic oligonucleotide
acauuuaaaacccagaacc

SEQ ID NO: 1352510 - RNA, 19 nt, Artificial Sequence
  Description of Artificial Sequence: Synthetic oligonucleotide
aauuguauaaauaagguga

SEQ ID NO: 1352511 - RNA, 19 nt, Artificial Sequence
  Description of Artificial Sequence: Synthetic oligonucleotide
gaaaauuguauaaauaagg

SEQ ID NO: 1352512 - RNA, 19 nt, Artificial Sequence
  Description of Artificial Sequence: Synthetic oligonucleotide
uucauaaacaauuguaucc

SEQ ID NO: 1352513 - RNA, 19 nt, Artificial Sequence
  Description of Artificial Sequence: Synthetic oligonucleotide
aauacggucauaguaacgg

SEQ ID NO: 1352514 - RNA, 19 nt, Artificial Sequence
  Description of Artificial Sequence: Synthetic oligonucleotide
aaauuguauaaauaaggug

SEQ ID NO: 1352515 - RNA, 19 nt, Artificial Sequence
  Description of Artificial Sequence: Synthetic oligonucleotide
uucaauauccgacagggcc

SEQ ID NO: 1352516 - RNA, 19 nt, Artificial Sequence
  Description of Artificial Sequence: Synthetic oligonucleotide
aauacaaaguucacgcucc

SEQ ID NO: 1352517 - RNA, 19 nt, Artificial Sequence
  Description of Artificial Sequence: Synthetic oligonucleotide
aguacaaaucucuaguggg

SEQ ID NO: 1352518 - RNA, 19 nt, Artificial Sequence
  Description of Artificial Sequence: Synthetic oligonucleotide
cauuaaugcacacagcucg

SEQ ID NO: 1352519 - RNA, 19 nt, Artificial Sequence
  Description of Artificial Sequence: Synthetic oligonucleotide
uaauauucuagcuagucca

SEQ ID NO: 1352520 - RNA, 19 nt, Artificial Sequence
  Description of Artificial Sequence: Synthetic oligonucleotide
aauuguauccaauuaaguu

SEQ ID NO: 1352521 - RNA, 19 nt, Artificial Sequence
  Description of Artificial Sequence: Synthetic oligonucleotide
uuucucaaguccaagaaca

SEQ ID NO: 1352522 - RNA, 19 nt, Artificial Sequence
  Description of Artificial Sequence: Synthetic oligonucleotide
uaaacggaggcauuaaugc

SEQ ID NO: 1352523 - RNA, 19 nt, Artificial Sequence
  Description of Artificial Sequence: Synthetic oligonucleotide
aaacuuucagcucuggcca

SEQ ID NO: 1352524 - RNA, 19 nt, Artificial Sequence
  Description of Artificial Sequence: Synthetic oligonucleotide
ucaacuugagcucacucag

SEQ ID NO: 1352525 - RNA, 19 nt, Artificial Sequence
  Description of Artificial Sequence: Synthetic oligonucleotide
aacaauuguauccaauuaa

SEQ ID NO: 1352526 - RNA, 19 nt, Artificial Sequence
  Description of Artificial Sequence: Synthetic oligonucleotide
aacuacagcagucgaguac

SEQ ID NO: 1352527 - RNA, 19 nt, Artificial Sequence
  Description of Artificial Sequence: Synthetic oligonucleotide
uuuaaaacccagaaccaga

SEQ ID NO: 1352528 - RNA, 19 nt, Artificial Sequence
  Description of Artificial Sequence: Synthetic oligonucleotide
acaaaguucacgcuccuuc

SEQ ID NO: 1352529 - RNA, 19 nt, Artificial Sequence
  Description of Artificial Sequence: Synthetic oligonucleotide
acggacaauguuuggaugc

SEQ ID NO: 1352530 - RNA, 19 nt, Artificial Sequence
  Description of Artificial Sequence: Synthetic oligonucleotide
gguuuaauauucuagcuag

SEQ ID NO: 1352531 - RNA, 19 nt, Artificial Sequence
  Description of Artificial Sequence: Synthetic oligonucleotide
auuguauccaauuaaguuu

SEQ ID NO: 1352532 - RNA, 19 nt, Artificial Sequence
  Description of Artificial Sequence: Synthetic oligonucleotide
uauugucuauccuuggucc

SEQ ID NO: 1352533 - RNA, 19 nt, Artificial Sequence
  Description of Artificial Sequence: Synthetic oligonucleotide
ugguuauucauaaacaauu

SEQ ID NO: 1352534 - RNA, 19 nt, Artificial Sequence
  Description of Artificial Sequence: Synthetic oligonucleotide
auaauacggucauaguaac

SEQ ID NO: 1352535 - RNA, 19 nt, Artificial Sequence
  Description of Artificial Sequence: Synthetic oligonucleotide
ucgaaguacaaacucuucc

SEQ ID NO: 1352536 - RNA, 19 nt, Artificial Sequence
  Description of Artificial Sequence: Synthetic oligonucleotide
ucucauuguaggacaagcg

SEQ ID NO: 1352537 - RNA, 19 nt, Artificial Sequence
  Description of Artificial Sequence: Synthetic oligonucleotide
aagucagcuaucaaaggac

SEQ ID NO: 1352538 - RNA, 19 nt, Artificial Sequence
  Description of Artificial Sequence: Synthetic oligonucleotide
auagucaagcucuuuccac

SEQ ID NO: 1352539 - RNA, 19 nt, Artificial Sequence
  Description of Artificial Sequence: Synthetic oligonucleotide
ugguugaaagcuguaaacg

SEQ ID NO: 1352540 - RNA, 19 nt, Artificial Sequence
  Description of Artificial Sequence: Synthetic oligonucleotide
cuuugcaaaacucgagucg

SEQ ID NO: 1352541 - RNA, 19 nt, Artificial Sequence
  Description of Artificial Sequence: Synthetic oligonucleotide
aacgucuuugcaaaacucg

SEQ ID NO: 1352542 - RNA, 19 nt, Artificial Sequence
  Description of Artificial Sequence: Synthetic oligonucleotide
ucgaguacaaaucucuagu

SEQ ID NO: 1352543 - RNA, 19 nt, Artificial Sequence
  Description of Artificial Sequence: Synthetic oligonucleotide
aaauucagcauccgaguga

SEQ ID NO: 1352544 - RNA, 19 nt, Artificial Sequence
  Description of Artificial Sequence: Synthetic oligonucleotide
ucauuacuaaggauggaug

SEQ ID NO: 1352545 - RNA, 19 nt, Artificial Sequence
  Description of Artificial Sequence: Synthetic oligonucleotide
uccgacuucucauuguagg

SEQ ID NO: 1352546 - RNA, 19 nt, Artificial Sequence
  Description of Artificial Sequence: Synthetic oligonucleotide
ucaccaaacuuucagcucu

SEQ ID NO: 1352547 - RNA, 19 nt, Artificial Sequence
  Description of Artificial Sequence: Synthetic oligonucleotide
aauucucacuccuuguggu

SEQ ID NO: 1352548 - RNA, 19 nt, Artificial Sequence
  Description of Artificial Sequence: Synthetic oligonucleotide
uugacauuguguuugcugu

SEQ ID NO: 1352549 - RNA, 19 nt, Artificial Sequence
  Description of Artificial Sequence: Synthetic oligonucleotide
aacggaggcauuaaugcac

SEQ ID NO: 1352550 - RNA, 19 nt, Artificial Sequence
  Description of Artificial Sequence: Synthetic oligonucleotide
ucgugguuuaauauucuag

SEQ ID NO: 1352551 - RNA, 19 nt, Artificial Sequence
  Description of Artificial Sequence: Synthetic oligonucleotide
uaaacaauuguauccaauu

SEQ ID NO: 1352552 - RNA, 19 nt, Artificial Sequence
  Description of Artificial Sequence: Synthetic oligonucleotide
cuagcuaguccaaaguccc

SEQ ID NO: 1352553 - RNA, 19 nt, Artificial Sequence
  Description of Artificial Sequence: Synthetic oligonucleotide
gguucugucgauaauacgg

SEQ ID NO: 1352554 - RNA, 19 nt, Artificial Sequence
  Description of Artificial Sequence: Synthetic oligonucleotide
auuguauaaauaaggugac

SEQ ID NO: 1352555 - RNA, 19 nt, Artificial Sequence
  Description of Artificial Sequence: Synthetic oligonucleotide
uauaaauaaggugacuggu

SEQ ID NO: 1352556 - RNA, 19 nt, Artificial Sequence
  Description of Artificial Sequence: Synthetic oligonucleotide
uccaauuaaguuucucaag

SEQ ID NO: 1352557 - RNA, 19 nt, Artificial Sequence
  Description of Artificial Sequence: Synthetic oligonucleotide
auugucuauccuugguccc

SEQ ID NO: 1352558 - RNA, 19 nt, Artificial Sequence
  Description of Artificial Sequence: Synthetic oligonucleotide
ugagucaucacucgaagua

SEQ ID NO: 1352559 - RNA, 19 nt, Artificial Sequence
  Description of Artificial Sequence: Synthetic oligonucleotide
gauaauacggucauaguaa

SEQ ID NO: 1352560 - RNA, 19 nt, Artificial Sequence
  Description of Artificial Sequence: Synthetic oligonucleotide
uucaacuugagcucacuca

SEQ ID NO: 1352561 - RNA, 19 nt, Artificial Sequence
  Description of Artificial Sequence: Synthetic oligonucleotide
uguucuuccgcaaccaagu

SEQ ID NO: 1352562 - RNA, 19 nt, Artificial Sequence
  Description of Artificial Sequence: Synthetic oligonucleotide
ucaagcucuuuccacacca

SEQ ID NO: 1352563 - RNA, 19 nt, Artificial Sequence
  Description of Artificial Sequence: Synthetic oligonucleotide
ugguaauccuuuaaauuca

SEQ ID NO: 1352564 - RNA, 19 nt, Artificial Sequence
  Description of Artificial Sequence: Synthetic oligonucleotide
aaguauugucuauccuugg

SEQ ID NO: 1352565 - RNA, 19 nt, Artificial Sequence
  Description of Artificial Sequence: Synthetic oligonucleotide
uggaaggcuccccuaagcg

SEQ ID NO: 1352566 - RNA, 19 nt, Artificial Sequence
  Description of Artificial Sequence: Synthetic oligonucleotide
uacuaaggauggaugauca

SEQ ID NO: 1352567 - RNA, 19 nt, Artificial Sequence
  Description of Artificial Sequence: Synthetic oligonucleotide
gguugaaagcuguaaacgg

SEQ ID NO: 1352568 - RNA, 19 nt, Artificial Sequence
  Description of Artificial Sequence: Synthetic oligonucleotide
uaauacggucauaguaacg

SEQ ID NO: 1352569 - RNA, 19 nt, Artificial Sequence
  Description of Artificial Sequence: Synthetic oligonucleotide
ucacuagccaggcacagga

SEQ ID NO: 1352570 - RNA, 19 nt, Artificial Sequence
  Description of Artificial Sequence: Synthetic oligonucleotide
uaguaacggacaauguuug

SEQ ID NO: 1352571 - RNA, 19 nt, Artificial Sequence
  Description of Artificial Sequence: Synthetic oligonucleotide
uguaguucuucaccaaacu

SEQ ID NO: 1352572 - RNA, 19 nt, Artificial Sequence
  Description of Artificial Sequence: Synthetic oligonucleotide
ugguuuaauauucuagcua

SEQ ID NO: 1352573 - RNA, 19 nt, Artificial Sequence
  Description of Artificial Sequence: Synthetic oligonucleotide
ucucucucgaauacaaagu

SEQ ID NO: 1352574 - RNA, 19 nt, Artificial Sequence
  Description of Artificial Sequence: Synthetic oligonucleotide
agcaugaagccucuucuuc

SEQ ID NO: 1352575 - RNA, 19 nt, Artificial Sequence
  Description of Artificial Sequence: Synthetic oligonucleotide
aaacggaggcauuaaugca

SEQ ID NO: 1352576 - RNA, 19 nt, Artificial Sequence
  Description of Artificial Sequence: Synthetic oligonucleotide
agcaaguucaccucagaca

SEQ ID NO: 1352577 - RNA, 19 nt, Artificial Sequence
  Description of Artificial Sequence: Synthetic oligonucleotide
uguaauaaggugugccaac

SEQ ID NO: 1352578 - RNA, 19 nt, Artificial Sequence
  Description of Artificial Sequence: Synthetic oligonucleotide
aaggugugccaacaaacgu

SEQ ID NO: 1352579 - RNA, 19 nt, Artificial Sequence
  Description of Artificial Sequence: Synthetic oligonucleotide
cucucgaauacaaaguuca

SEQ ID NO: 1352580 - RNA, 19 nt, Artificial Sequence
  Description of Artificial Sequence: Synthetic oligonucleotide
aaagcuguaaacggaggca

SEQ ID NO: 1352581 - RNA, 19 nt, Artificial Sequence
  Description of Artificial Sequence: Synthetic oligonucleotide
caaaacuacagcagucgag

SEQ ID NO: 1352582 - RNA, 19 nt, Artificial Sequence
  Description of Artificial Sequence: Synthetic oligonucleotide
aaacgucuuugcaaaacuc

SEQ ID NO: 1352583 - RNA, 19 nt, Artificial Sequence
  Description of Artificial Sequence: Synthetic oligonucleotide
ucuuuccacaccaguaucu

SEQ ID NO: 1352584 - RNA, 19 nt, Artificial Sequence
  Description of Artificial Sequence: Synthetic oligonucleotide
ucuuugcaaaacucgaguc

SEQ ID NO: 1352585 - RNA, 19 nt, Artificial Sequence
  Description of Artificial Sequence: Synthetic oligonucleotide
aaguucaccucagacacca

SEQ ID NO: 1352586 - RNA, 19 nt, Artificial Sequence
  Description of Artificial Sequence: Synthetic oligonucleotide
cauggagccauagucaagc

SEQ ID NO: 1352587 - RNA, 19 nt, Artificial Sequence
  Description of Artificial Sequence: Synthetic oligonucleotide
aaaguucacgcuccuucug

SEQ ID NO: 1352588 - RNA, 19 nt, Artificial Sequence
  Description of Artificial Sequence: Synthetic oligonucleotide
ugaaggucggugguaaucc

SEQ ID NO: 1352589 - RNA, 19 nt, Artificial Sequence
  Description of Artificial Sequence: Synthetic oligonucleotide
accaagucagcuaucaaag

SEQ ID NO: 1352590 - RNA, 19 nt, Artificial Sequence
  Description of Artificial Sequence: Synthetic oligonucleotide
uugguucugucgauaauac

SEQ ID NO: 1352591 - RNA, 19 nt, Artificial Sequence
  Description of Artificial Sequence: Synthetic oligonucleotide
uugcacuuggauuuggcaa

SEQ ID NO: 1352592 - RNA, 19 nt, Artificial Sequence
  Description of Artificial Sequence: Synthetic oligonucleotide
gcaaguucaccucagacac

SEQ ID NO: 1352593 - RNA, 19 nt, Artificial Sequence
  Description of Artificial Sequence: Synthetic oligonucleotide
aguaacggacaauguuugg

SEQ ID NO: 1352594 - RNA, 19 nt, Artificial Sequence
  Description of Artificial Sequence: Synthetic oligonucleotide
cauuacuaaggauggauga

SEQ ID NO: 1352595 - RNA, 19 nt, Artificial Sequence
  Description of Artificial Sequence: Synthetic oligonucleotide
uuacuguauugaaaauugu

SEQ ID NO: 1352596 - RNA, 19 nt, Artificial Sequence
  Description of Artificial Sequence: Synthetic oligonucleotide
cugugacacucuuucaggg

SEQ ID NO: 1352597 - RNA, 19 nt, Artificial Sequence
  Description of Artificial Sequence: Synthetic oligonucleotide
guaaacggaggcauuaaug

SEQ ID NO: 1352598 - RNA, 19 nt, Artificial Sequence
  Description of Artificial Sequence: Synthetic oligonucleotide
aucccgaugaagcacggug

SEQ ID NO: 1352599 - RNA, 19 nt, Artificial Sequence
  Description of Artificial Sequence: Synthetic oligonucleotide
gucgaguacaaaucucuag

SEQ ID NO: 1352600 - RNA, 19 nt, Artificial Sequence
  Description of Artificial Sequence: Synthetic oligonucleotide
agcagucgaguacaaaucu

SEQ ID NO: 1352601 - RNA, 19 nt, Artificial Sequence
  Description of Artificial Sequence: Synthetic oligonucleotide
caauuaaguuucucaaguc

SEQ ID NO: 1352602 - RNA, 19 nt, Artificial Sequence
  Description of Artificial Sequence: Synthetic oligonucleotide
guuguguugguucugucga

SEQ ID NO: 1352603 - RNA, 19 nt, Artificial Sequence
  Description of Artificial Sequence: Synthetic oligonucleotide
cagaucccgaugaagcacg

SEQ ID NO: 1352604 - RNA, 19 nt, Artificial Sequence
  Description of Artificial Sequence: Synthetic oligonucleotide
uguuugcuguccaggaaga

SEQ ID NO: 1352605 - RNA, 19 nt, Artificial Sequence
  Description of Artificial Sequence: Synthetic oligonucleotide
aacccgucagaguagcggu

SEQ ID NO: 1352606 - RNA, 19 nt, Artificial Sequence
  Description of Artificial Sequence: Synthetic oligonucleotide
aaaucucuagugggcuggc

SEQ ID NO: 1352607 - RNA, 19 nt, Artificial Sequence
  Description of Artificial Sequence: Synthetic oligonucleotide
gguuguguugguucugucg

SEQ ID NO: 1352608 - RNA, 19 nt, Artificial Sequence
  Description of Artificial Sequence: Synthetic oligonucleotide
auaaggugacugguuauuc

SEQ ID NO: 1352609 - RNA, 19 nt, Artificial Sequence
  Description of Artificial Sequence: Synthetic oligonucleotide
uaacggacaauguuuggau

SEQ ID NO: 1352610 - RNA, 19 nt, Artificial Sequence
  Description of Artificial Sequence: Synthetic oligonucleotide
ugguucugucgauaauacg

SEQ ID NO: 1352611 - RNA, 19 nt, Artificial Sequence
  Description of Artificial Sequence: Synthetic oligonucleotide
cauucaacccgucagagua

SEQ ID NO: 1352612 - RNA, 19 nt, Artificial Sequence
  Description of Artificial Sequence: Synthetic oligonucleotide
guauugucuauccuugguc

SEQ ID NO: 1352613 - RNA, 19 nt, Artificial Sequence
  Description of Artificial Sequence: Synthetic oligonucleotide
caagucagcuaucaaagga

SEQ ID NO: 1352614 - RNA, 19 nt, Artificial Sequence
  Description of Artificial Sequence: Synthetic oligonucleotide
uguaaacggaggcauuaau

SEQ ID NO: 1352615 - RNA, 19 nt, Artificial Sequence
  Description of Artificial Sequence: Synthetic oligonucleotide
uuacuaaggauggaugauc

SEQ ID NO: 1352616 - RNA, 19 nt, Artificial Sequence
  Description of Artificial Sequence: Synthetic oligonucleotide
aauaaggugacugguuauu

SEQ ID NO: 1352617 - RNA, 19 nt, Artificial Sequence
  Description of Artificial Sequence: Synthetic oligonucleotide
ugaaucucccuucucugau

SEQ ID NO: 1352618 - RNA, 19 nt, Artificial Sequence
  Description of Artificial Sequence: Synthetic oligonucleotide
ucggugguaauccuuuaaa

SEQ ID NO: 1352619 - RNA, 19 nt, Artificial Sequence
  Description of Artificial Sequence: Synthetic oligonucleotide
uacaaaucucuagugggcu

SEQ ID NO: 1352620 - RNA, 19 nt, Artificial Sequence
  Description of Artificial Sequence: Synthetic oligonucleotide
aaaauagauuuuacuguau

SEQ ID NO: 1352621 - RNA, 19 nt, Artificial Sequence
  Description of Artificial Sequence: Synthetic oligonucleotide
uagcgcaugcccaggaucu

SEQ ID NO: 1352622 - RNA, 19 nt, Artificial Sequence
  Description of Artificial Sequence: Synthetic oligonucleotide
caugaagccucuucuucag

SEQ ID NO: 1352623 - RNA, 19 nt, Artificial Sequence
  Description of Artificial Sequence: Synthetic oligonucleotide
aaaacucgagucgugguuu

SEQ ID NO: 1352624 - RNA, 19 nt, Artificial Sequence
  Description of Artificial Sequence: Synthetic oligonucleotide
acaaaucucuagugggcug

SEQ ID NO: 1352625 - RNA, 19 nt, Artificial Sequence
  Description of Artificial Sequence: Synthetic oligonucleotide
uguccucucgagcucugag

SEQ ID NO: 1352626 - RNA, 19 nt, Artificial Sequence
  Description of Artificial Sequence: Synthetic oligonucleotide
uaauaaggugugccaacaa

SEQ ID NO: 1352627 - RNA, 19 nt, Artificial Sequence
  Description of Artificial Sequence: Synthetic oligonucleotide
uuucccagcuaacucuuuc

SEQ ID NO: 1352628 - RNA, 19 nt, Artificial Sequence
  Description of Artificial Sequence: Synthetic oligonucleotide
guuauucauaaacaauugu

SEQ ID NO: 1352629 - RNA, 19 nt, Artificial Sequence
  Description of Artificial Sequence: Synthetic oligonucleotide
cuguauugaaaauuguaua

SEQ ID NO: 1352630 - RNA, 19 nt, Artificial Sequence
  Description of Artificial Sequence: Synthetic oligonucleotide
ucucgaauacaaaguucac

SEQ ID NO: 1352631 - RNA, 19 nt, Artificial Sequence
  Description of Artificial Sequence: Synthetic oligonucleotide
ucccagcuaacucuuucug

SEQ ID NO: 1352632 - RNA, 19 nt, Artificial Sequence
  Description of Artificial Sequence: Synthetic oligonucleotide
cuuccuccggaucuuugcg

SEQ ID NO: 1352633 - RNA, 19 nt, Artificial Sequence
  Description of Artificial Sequence: Synthetic oligonucleotide
gguuauucauaaacaauug

SEQ ID NO: 1352634 - RNA, 19 nt, Artificial Sequence
  Description of Artificial Sequence: Synthetic oligonucleotide
gagucgugguuuaauauuc

SEQ ID NO: 1352635 - RNA, 19 nt, Artificial Sequence
  Description of Artificial Sequence: Synthetic oligonucleotide
guugaaagcuguaaacgga

SEQ ID NO: 1352636 - RNA, 19 nt, Artificial Sequence
  Description of Artificial Sequence: Synthetic oligonucleotide
ucaaaggacucuccaggau

SEQ ID NO: 1352637 - RNA, 19 nt, Artificial Sequence
  Description of Artificial Sequence: Synthetic oligonucleotide
gaugaagcacgguguggcc

SEQ ID NO: 1352638 - RNA, 19 nt, Artificial Sequence
  Description of Artificial Sequence: Synthetic oligonucleotide
caacaaacgucuuugcaaa

SEQ ID NO: 1352639 - RNA, 19 nt, Artificial Sequence
  Description of Artificial Sequence: Synthetic oligonucleotide
ucgauaauacggucauagu

SEQ ID NO: 1352640 - RNA, 19 nt, Artificial Sequence
  Description of Artificial Sequence: Synthetic oligonucleotide
uccuccggaucuuugcggc

SEQ ID NO: 1352641 - RNA, 19 nt, Artificial Sequence
  Description of Artificial Sequence: Synthetic oligonucleotide
aagcuguaaacggaggcau

SEQ ID NO: 1352642 - RNA, 19 nt, Artificial Sequence
  Description of Artificial Sequence: Synthetic oligonucleotide
acaccaguaucuugccguc

SEQ ID NO: 1352643 - RNA, 19 nt, Artificial Sequence
  Description of Artificial Sequence: Synthetic oligonucleotide
ucagaucccgaugaagcac

SEQ ID NO: 1352644 - RNA, 19 nt, Artificial Sequence
  Description of Artificial Sequence: Synthetic oligonucleotide
uccuuuguucuuccgcaac

SEQ ID NO: 1352645 - RNA, 19 nt, Artificial Sequence
  Description of Artificial Sequence: Synthetic oligonucleotide
ucccgaugaagcacggugu

SEQ ID NO: 1352646 - RNA, 19 nt, Artificial Sequence
  Description of Artificial Sequence: Synthetic oligonucleotide
agcucguacagcaggcagc

SEQ ID NO: 1352647 - RNA, 19 nt, Artificial Sequence
  Description of Artificial Sequence: Synthetic oligonucleotide
ucauucaacccgucagagu

SEQ ID NO: 1352648 - RNA, 19 nt, Artificial Sequence
  Description of Artificial Sequence: Synthetic oligonucleotide
auuacuaaggauggaugau

SEQ ID NO: 1352649 - RNA, 19 nt, Artificial Sequence
  Description of Artificial Sequence: Synthetic oligonucleotide
aucacgauguacaggguug

SEQ ID NO: 1352650 - RNA, 19 nt, Artificial Sequence
  Description of Artificial Sequence: Synthetic oligonucleotide
uuccucuaaguauugucua

SEQ ID NO: 1352651 - RNA, 19 nt, Artificial Sequence
  Description of Artificial Sequence: Synthetic oligonucleotide
ggacaagcggcucauuugc

SEQ ID NO: 1352652 - RNA, 19 nt, Artificial Sequence
  Description of Artificial Sequence: Synthetic oligonucleotide
ucgagucgugguuuaauau

SEQ ID NO: 1352653 - RNA, 19 nt, Artificial Sequence
  Description of Artificial Sequence: Synthetic oligonucleotide
aaugaaccuucuuccucau

SEQ ID NO: 1352654 - RNA, 19 nt, Artificial Sequence
  Description of Artificial Sequence: Synthetic oligonucleotide
caacccgucagaguagcgg

SEQ ID NO: 1352655 - RNA, 19 nt, Artificial Sequence
  Description of Artificial Sequence: Synthetic oligonucleotide
uucucaaguccaagaacau

SEQ ID NO: 1352656 - RNA, 19 nt, Artificial Sequence
  Description of Artificial Sequence: Synthetic oligonucleotide
ggaucuuugcggcagcggc

SEQ ID NO: 1352657 - RNA, 19 nt, Artificial Sequence
  Description of Artificial Sequence: Synthetic oligonucleotide
ggcauuaaugcacacagcu

SEQ ID NO: 1352658 - RNA, 19 nt, Artificial Sequence
  Description of Artificial Sequence: Synthetic oligonucleotide
aagcggcucauuugcucag

SEQ ID NO: 1352659 - RNA, 19 nt, Artificial Sequence
  Description of Artificial Sequence: Synthetic oligonucleotide
guaacggacaauguuugga

SEQ ID NO: 1352660 - RNA, 19 nt, Artificial Sequence
  Description of Artificial Sequence: Synthetic oligonucleotide
ucuagaugucuccuuuguu

SEQ ID NO: 1352661 - RNA, 19 nt, Artificial Sequence
  Description of Artificial Sequence: Synthetic oligonucleotide
ucugagcgcacgcucucug

SEQ ID NO: 1352662 - RNA, 19 nt, Artificial Sequence
  Description of Artificial Sequence: Synthetic oligonucleotide
agcuaucaaaggacucucc

SEQ ID NO: 1352663 - RNA, 19 nt, Artificial Sequence
  Description of Artificial Sequence: Synthetic oligonucleotide
uccucuaaguauugucuau

SEQ ID NO: 1352664 - RNA, 19 nt, Artificial Sequence
  Description of Artificial Sequence: Synthetic oligonucleotide
uugucuauccuuggucccc

SEQ ID NO: 1352665 - RNA, 19 nt, Artificial Sequence
  Description of Artificial Sequence: Synthetic oligonucleotide
ucaacccgucagaguagcg

SEQ ID NO: 1352666 - RNA, 19 nt, Artificial Sequence
  Description of Artificial Sequence: Synthetic oligonucleotide
gauuuggcaagcuggcucu

SEQ ID NO: 1352667 - RNA, 19 nt, Artificial Sequence
  Description of Artificial Sequence: Synthetic oligonucleotide
cuagugggcuggcaguacc

SEQ ID NO: 1352668 - RNA, 19 nt, Artificial Sequence
  Description of Artificial Sequence: Synthetic oligonucleotide
ggcucauuugcucaggaga

SEQ ID NO: 1352669 - RNA, 19 nt, Artificial Sequence
  Description of Artificial Sequence: Synthetic oligonucleotide
cggaaaugaaccuucuucc

SEQ ID NO: 1352670 - RNA, 19 nt, Artificial Sequence
  Description of Artificial Sequence: Synthetic oligonucleotide
uucaacccgucagaguagc

SEQ ID NO: 1352671 - RNA, 19 nt, Artificial Sequence
  Description of Artificial Sequence: Synthetic oligonucleotide
uugcaaaacucgagucgug

SEQ ID NO: 1352672 - RNA, 19 nt, Artificial Sequence
  Description of Artificial Sequence: Synthetic oligonucleotide
aaaggacucuccaggauuu

SEQ ID NO: 1352673 - RNA, 19 nt, Artificial Sequence
  Description of Artificial Sequence: Synthetic oligonucleotide
guccccuuuguaaugacac

SEQ ID NO: 1352674 - RNA, 19 nt, Artificial Sequence
  Description of Artificial Sequence: Synthetic oligonucleotide
ucugcuagucucucucgaa

SEQ ID NO: 1352675 - RNA, 19 nt, Artificial Sequence
  Description of Artificial Sequence: Synthetic oligonucleotide
uugccgucgcucuuccucc

SEQ ID NO: 1352676 - RNA, 19 nt, Artificial Sequence
  Description of Artificial Sequence: Synthetic oligonucleotide
gcucucagaauucucacuc

SEQ ID NO: 1352677 - RNA, 19 nt, Artificial Sequence
  Description of Artificial Sequence: Synthetic oligonucleotide
cucaaguccaagaacauuu

SEQ ID NO: 1352678 - RNA, 19 nt, Artificial Sequence
  Description of Artificial Sequence: Synthetic oligonucleotide
cuugcacuuggauuuggca

SEQ ID NO: 1352679 - RNA, 19 nt, Artificial Sequence
  Description of Artificial Sequence: Synthetic oligonucleotide
ugcuagucucucucgaaua

SEQ ID NO: 1352680 - RNA, 19 nt, Artificial Sequence
  Description of Artificial Sequence: Synthetic oligonucleotide
auguaauaaggugugccaa

SEQ ID NO: 1352681 - RNA, 19 nt, Artificial Sequence
  Description of Artificial Sequence: Synthetic oligonucleotide
gacauguaauaaggugugc

SEQ ID NO: 1352682 - RNA, 19 nt, Artificial Sequence
  Description of Artificial Sequence: Synthetic oligonucleotide
uccagacuguccucucgag

SEQ ID NO: 1352683 - RNA, 19 nt, Artificial Sequence
  Description of Artificial Sequence: Synthetic oligonucleotide
uccgcaaccaagucagcua

SEQ ID NO: 1352684 - RNA, 19 nt, Artificial Sequence
  Description of Artificial Sequence: Synthetic oligonucleotide
uucugucgauaauacgguc

SEQ ID NO: 1352685 - RNA, 19 nt, Artificial Sequence
  Description of Artificial Sequence: Synthetic oligonucleotide
ugccaacaaacgucuuugc

SEQ ID NO: 1352686 - RNA, 19 nt, Artificial Sequence
  Description of Artificial Sequence: Synthetic oligonucleotide
ggauuuggcaagcuggcuc

SEQ ID NO: 1352687 - RNA, 19 nt, Artificial Sequence
  Description of Artificial Sequence: Synthetic oligonucleotide
cucgaaguacaaacucuuc

SEQ ID NO: 1352688 - RNA, 19 nt, Artificial Sequence
  Description of Artificial Sequence: Synthetic oligonucleotide
agacuguccucucgagcuc

SEQ ID NO: 1352689 - RNA, 19 nt, Artificial Sequence
  Description of Artificial Sequence: Synthetic oligonucleotide
gaugcugugcagucaccuc

SEQ ID NO: 1352690 - RNA, 19 nt, Artificial Sequence
  Description of Artificial Sequence: Synthetic oligonucleotide
uuccgcaaccaagucagcu

SEQ ID NO: 1352691 - RNA, 19 nt, Artificial Sequence
  Description of Artificial Sequence: Synthetic oligonucleotide
ugaucaaggucugggucac

SEQ ID NO: 1352692 - RNA, 19 nt, Artificial Sequence
  Description of Artificial Sequence: Synthetic oligonucleotide
aggcauuaaugcacacagc

SEQ ID NO: 1352693 - RNA, 19 nt, Artificial Sequence
  Description of Artificial Sequence: Synthetic oligonucleotide
gucugggucacuagccagg

SEQ ID NO: 1352694 - RNA, 19 nt, Artificial Sequence
  Description of Artificial Sequence: Synthetic oligonucleotide
uguugguucugucgauaau

SEQ ID NO: 1352695 - RNA, 19 nt, Artificial Sequence
  Description of Artificial Sequence: Synthetic oligonucleotide
uuggaugcuucagcucccg

SEQ ID NO: 1352696 - RNA, 19 nt, Artificial Sequence
  Description of Artificial Sequence: Synthetic oligonucleotide
agucagcuaucaaaggacu

SEQ ID NO: 1352697 - RNA, 19 nt, Artificial Sequence
  Description of Artificial Sequence: Synthetic oligonucleotide
ggugacugguuauucauaa

SEQ ID NO: 1352698 - RNA, 19 nt, Artificial Sequence
  Description of Artificial Sequence: Synthetic oligonucleotide
aggauuucuuccacugaag

SEQ ID NO: 1352699 - RNA, 19 nt, Artificial Sequence
  Description of Artificial Sequence: Synthetic oligonucleotide
acgauguacaggguugugu

SEQ ID NO: 1352700 - RNA, 19 nt, Artificial Sequence
  Description of Artificial Sequence: Synthetic oligonucleotide
ugcggcagcggccguagga

SEQ ID NO: 1352701 - RNA, 19 nt, Artificial Sequence
  Description of Artificial Sequence: Synthetic oligonucleotide
ugagcgcacgcucucuguc

SEQ ID NO: 1352702 - RNA, 19 nt, Artificial Sequence
  Description of Artificial Sequence: Synthetic oligonucleotide
acguuggcuggcuucagau

SEQ ID NO: 1352703 - RNA, 19 nt, Artificial Sequence
  Description of Artificial Sequence: Synthetic oligonucleotide
cugguaguucuuuucaaua

SEQ ID NO: 1352704 - RNA, 19 nt, Artificial Sequence
  Description of Artificial Sequence: Synthetic oligonucleotide
caaguucaccucagacacc

SEQ ID NO: 1352705 - RNA, 19 nt, Artificial Sequence
  Description of Artificial Sequence: Synthetic oligonucleotide
aaacucgagucgugguuua

SEQ ID NO: 1352706 - RNA, 19 nt, Artificial Sequence
  Description of Artificial Sequence: Synthetic oligonucleotide
caauuguauccaauuaagu

SEQ ID NO: 1352707 - RNA, 19 nt, Artificial Sequence
  Description of Artificial Sequence: Synthetic oligonucleotide
auuaaugcacacagcucgu

SEQ ID NO: 1352708 - RNA, 19 nt, Artificial Sequence
  Description of Artificial Sequence: Synthetic oligonucleotide
ggaaggcuccccuaagcgc

SEQ ID NO: 1352709 - RNA, 19 nt, Artificial Sequence
  Description of Artificial Sequence: Synthetic oligonucleotide
uguacaggguuguguuggu

SEQ ID NO: 1352710 - RNA, 19 nt, Artificial Sequence
  Description of Artificial Sequence: Synthetic oligonucleotide
gagcgcacgcucucugucc

SEQ ID NO: 1352711 - RNA, 19 nt, Artificial Sequence
  Description of Artificial Sequence: Synthetic oligonucleotide
uuugcggcagcggccguag

SEQ ID NO: 1352712 - RNA, 19 nt, Artificial Sequence
  Description of Artificial Sequence: Synthetic oligonucleotide
acggucauaguaacggaca

SEQ ID NO: 1352713 - RNA, 19 nt, Artificial Sequence
  Description of Artificial Sequence: Synthetic oligonucleotide
accgucacuccuucuguga

SEQ ID NO: 1352714 - RNA, 19 nt, Artificial Sequence
  Description of Artificial Sequence: Synthetic oligonucleotide
acgucuuugcaaaacucga

SEQ ID NO: 1352715 - RNA, 19 nt, Artificial Sequence
  Description of Artificial Sequence: Synthetic oligonucleotide
uccccuuuguaaugacacu

SEQ ID NO: 1352716 - RNA, 19 nt, Artificial Sequence
  Description of Artificial Sequence: Synthetic oligonucleotide
uagcgguaggggauccgcc

SEQ ID NO: 1352717 - RNA, 19 nt, Artificial Sequence
  Description of Artificial Sequence: Synthetic oligonucleotide
cauaguaacggacaauguu

SEQ ID NO: 1352718 - RNA, 19 nt, Artificial Sequence
  Description of Artificial Sequence: Synthetic oligonucleotide
agcgguaggggauccgccu

SEQ ID NO: 1352719 - RNA, 19 nt, Artificial Sequence
  Description of Artificial Sequence: Synthetic oligonucleotide
cagacuguccucucgagcu

SEQ ID NO: 1352720 - RNA, 19 nt, Artificial Sequence
  Description of Artificial Sequence: Synthetic oligonucleotide
cauuguaggacaagcggcu

SEQ ID NO: 1352721 - RNA, 19 nt, Artificial Sequence
  Description of Artificial Sequence: Synthetic oligonucleotide
cagcucguacagcaggcag

SEQ ID NO: 1352722 - RNA, 19 nt, Artificial Sequence
  Description of Artificial Sequence: Synthetic oligonucleotide
cacaccaguaucuugccgu

SEQ ID NO: 1352723 - RNA, 19 nt, Artificial Sequence
  Description of Artificial Sequence: Synthetic oligonucleotide
gucaagcucuuuccacacc

SEQ ID NO: 1352724 - RNA, 19 nt, Artificial Sequence
  Description of Artificial Sequence: Synthetic oligonucleotide
cugaaggucggugguaauc

SEQ ID NO: 1352725 - RNA, 19 nt, Artificial Sequence
  Description of Artificial Sequence: Synthetic oligonucleotide
agcugguaguucuuuucaa

SEQ ID NO: 1352726 - RNA, 19 nt, Artificial Sequence
  Description of Artificial Sequence: Synthetic oligonucleotide
cucacucagcacagggcug

SEQ ID NO: 1352727 - RNA, 19 nt, Artificial Sequence
  Description of Artificial Sequence: Synthetic oligonucleotide
cccagcuaacucuuucugg

SEQ ID NO: 1352728 - RNA, 19 nt, Artificial Sequence
  Description of Artificial Sequence: Synthetic oligonucleotide
acucgaaguacaaacucuu

SEQ ID NO: 1352729 - RNA, 19 nt, Artificial Sequence
  Description of Artificial Sequence: Synthetic oligonucleotide
agcauccgagugaugaugu

SEQ ID NO: 1352730 - RNA, 19 nt, Artificial Sequence
  Description of Artificial Sequence: Synthetic oligonucleotide
uccccacggaaaugaaccu

SEQ ID NO: 1352731 - RNA, 19 nt, Artificial Sequence
  Description of Artificial Sequence: Synthetic oligonucleotide
guagcgguaggggauccgc

SEQ ID NO: 1352732 - RNA, 19 nt, Artificial Sequence
  Description of Artificial Sequence: Synthetic oligonucleotide
auucaacccgucagaguag

SEQ ID NO: 1352733 - RNA, 19 nt, Artificial Sequence
  Description of Artificial Sequence: Synthetic oligonucleotide
uuaaugcacacagcucgua

SEQ ID NO: 1352734 - RNA, 19 nt, Artificial Sequence
  Description of Artificial Sequence: Synthetic oligonucleotide
cacgguguggccaccguca

SEQ ID NO: 1352735 - RNA, 19 nt, Artificial Sequence
  Description of Artificial Sequence: Synthetic oligonucleotide
ccaauuaaguuucucaagu

SEQ ID NO: 1352736 - RNA, 19 nt, Artificial Sequence
  Description of Artificial Sequence: Synthetic oligonucleotide
ggugguaauccuuuaaauu

SEQ ID NO: 1352737 - RNA, 19 nt, Artificial Sequence
  Description of Artificial Sequence: Synthetic oligonucleotide
uccggaucuuugcggcagc

SEQ ID NO: 1352738 - RNA, 19 nt, Artificial Sequence
  Description of Artificial Sequence: Synthetic oligonucleotide
aaucucuagugggcuggca

SEQ ID NO: 1352739 - RNA, 19 nt, Artificial Sequence
  Description of Artificial Sequence: Synthetic oligonucleotide
cacucgaaguacaaacucu

SEQ ID NO: 1352740 - RNA, 19 nt, Artificial Sequence
  Description of Artificial Sequence: Synthetic oligonucleotide
guguugguucugucgauaa

SEQ ID NO: 1352741 - RNA, 19 nt, Artificial Sequence
  Description of Artificial Sequence: Synthetic oligonucleotide
uuguguugguucugucgau

SEQ ID NO: 1352742 - RNA, 19 nt, Artificial Sequence
  Description of Artificial Sequence: Synthetic oligonucleotide
agcgcacgcucucuguccu

SEQ ID NO: 1352743 - RNA, 19 nt, Artificial Sequence
  Description of Artificial Sequence: Synthetic oligonucleotide
gagcucugagcgcacgcuc

SEQ ID NO: 1352744 - RNA, 19 nt, Artificial Sequence
  Description of Artificial Sequence: Synthetic oligonucleotide
guaguucuucaccaaacuu

SEQ ID NO: 1352745 - RNA, 19 nt, Artificial Sequence
  Description of Artificial Sequence: Synthetic oligonucleotide
uccccuaagcgcuggccuc

SEQ ID NO: 1352746 - RNA, 19 nt, Artificial Sequence
  Description of Artificial Sequence: Synthetic oligonucleotide
cgaguacaaaucucuagug

SEQ ID NO: 1352747 - RNA, 19 nt, Artificial Sequence
  Description of Artificial Sequence: Synthetic oligonucleotide
aguagcgguaggggauccg

SEQ ID NO: 1352748 - RNA, 19 nt, Artificial Sequence
  Description of Artificial Sequence: Synthetic oligonucleotide
cucauuacuaaggauggau

SEQ ID NO: 1352749 - RNA, 19 nt, Artificial Sequence
  Description of Artificial Sequence: Synthetic oligonucleotide
gacguuggcuggcuucaga

SEQ ID NO: 1352750 - RNA, 19 nt, Artificial Sequence
  Description of Artificial Sequence: Synthetic oligonucleotide
agucgugguuuaauauucu

SEQ ID NO: 1352751 - RNA, 19 nt, Artificial Sequence
  Description of Artificial Sequence: Synthetic oligonucleotide
gccaacaaacgucuuugca

SEQ ID NO: 1352752 - RNA, 19 nt, Artificial Sequence
  Description of Artificial Sequence: Synthetic oligonucleotide
caaaguucacgcuccuucu

SEQ ID NO: 1352753 - RNA, 19 nt, Artificial Sequence
  Description of Artificial Sequence: Synthetic oligonucleotide
gucgugguuuaauauucua

SEQ ID NO: 1352754 - RNA, 19 nt, Artificial Sequence
  Description of Artificial Sequence: Synthetic oligonucleotide
gccaccgucacuccuucug

SEQ ID NO: 1352755 - RNA, 19 nt, Artificial Sequence
  Description of Artificial Sequence: Synthetic oligonucleotide
cucgagucgugguuuaaua

SEQ ID NO: 1352756 - RNA, 19 nt, Artificial Sequence
  Description of Artificial Sequence: Synthetic oligonucleotide
cccacggaaaugaaccuuc

SEQ ID NO: 1352757 - RNA, 19 nt, Artificial Sequence
  Description of Artificial Sequence: Synthetic oligonucleotide
guucugucgauaauacggu

SEQ ID NO: 1352758 - RNA, 19 nt, Artificial Sequence
  Description of Artificial Sequence: Synthetic oligonucleotide
gcaaccaagucagcuauca

SEQ ID NO: 1352759 - RNA, 19 nt, Artificial Sequence
  Description of Artificial Sequence: Synthetic oligonucleotide
caggaagacguuggcuggc

SEQ ID NO: 1352760 - RNA, 19 nt, Artificial Sequence
  Description of Artificial Sequence: Synthetic oligonucleotide
acggaggcauuaaugcaca

SEQ ID NO: 1352761 - RNA, 19 nt, Artificial Sequence
  Description of Artificial Sequence: Synthetic oligonucleotide
caccgucacuccuucugug

SEQ ID NO: 1352762 - RNA, 19 nt, Artificial Sequence
  Description of Artificial Sequence: Synthetic oligonucleotide
agaugucuccuuuguucuu

SEQ ID NO: 1352763 - RNA, 19 nt, Artificial Sequence
  Description of Artificial Sequence: Synthetic oligonucleotide
aaggucggugguaauccuu

SEQ ID NO: 1352764 - RNA, 19 nt, Artificial Sequence
  Description of Artificial Sequence: Synthetic oligonucleotide
gucggugguaauccuuuaa

SEQ ID NO: 1352765 - RNA, 19 nt, Artificial Sequence
  Description of Artificial Sequence: Synthetic oligonucleotide
cugauuuucccagcuaacu

SEQ ID NO: 1352766 - RNA, 19 nt, Artificial Sequence
  Description of Artificial Sequence: Synthetic oligonucleotide
guccgacuucucauuguag

SEQ ID NO: 1352767 - RNA, 19 nt, Artificial Sequence
  Description of Artificial Sequence: Synthetic oligonucleotide
cucugcuagucucucucga

SEQ ID NO: 1352768 - RNA, 19 nt, Artificial Sequence
  Description of Artificial Sequence: Synthetic oligonucleotide
agaucccgaugaagcacgg

SEQ ID NO: 1352769 - RNA, 19 nt, Artificial Sequence
  Description of Artificial Sequence: Synthetic oligonucleotide
caaaggacucuccaggauu

SEQ ID NO: 1352770 - RNA, 19 nt, Artificial Sequence
  Description of Artificial Sequence: Synthetic oligonucleotide
cgauaauacggucauagua

SEQ ID NO: 1352771 - RNA, 19 nt, Artificial Sequence
  Description of Artificial Sequence: Synthetic oligonucleotide
agcggcucauuugcucagg

SEQ ID NO: 1352772 - RNA, 19 nt, Artificial Sequence
  Description of Artificial Sequence: Synthetic oligonucleotide
ccuugcacuuggauuuggc

SEQ ID NO: 1352773 - RNA, 19 nt, Artificial Sequence
  Description of Artificial Sequence: Synthetic oligonucleotide
cuuccgcaaccaagucagc

SEQ ID NO: 1352774 - RNA, 19 nt, Artificial Sequence
  Description of Artificial Sequence: Synthetic oligonucleotide
cgaugaagcacgguguggc

SEQ ID NO: 1352775 - RNA, 19 nt, Artificial Sequence
  Description of Artificial Sequence: Synthetic oligonucleotide
gugccgaugcugugcaguc

SEQ ID NO: 1352776 - RNA, 19 nt, Artificial Sequence
  Description of Artificial Sequence: Synthetic oligonucleotide
gcuggccuagcgcaugccc

SEQ ID NO: 1352777 - RNA, 19 nt, Artificial Sequence
  Description of Artificial Sequence: Synthetic oligonucleotide
ccagacuguccucucgagc

SEQ ID NO: 1352778 - RNA, 19 nt, Artificial Sequence
  Description of Artificial Sequence: Synthetic oligonucleotide
guuuaauauucuagcuagu

SEQ ID NO: 1352779 - RNA, 19 nt, Artificial Sequence
  Description of Artificial Sequence: Synthetic oligonucleotide
acucgagucgugguuuaau

SEQ ID NO: 1352780 - RNA, 19 nt, Artificial Sequence
  Description of Artificial Sequence: Synthetic oligonucleotide
aggaagacguuggcuggcu

SEQ ID NO: 1352781 - RNA, 19 nt, Artificial Sequence
  Description of Artificial Sequence: Synthetic oligonucleotide
cucgagcucugagcgcacg

SEQ ID NO: 1352782 - RNA, 19 nt, Artificial Sequence
  Description of Artificial Sequence: Synthetic oligonucleotide
agucgaguacaaaucucua

SEQ ID NO: 1352783 - RNA, 19 nt, Artificial Sequence
  Description of Artificial Sequence: Synthetic oligonucleotide
gaaggucggugguaauccu

SEQ ID NO: 1352784 - RNA, 19 nt, Artificial Sequence
  Description of Artificial Sequence: Synthetic oligonucleotide
aacucgagucgugguuuaa

SEQ ID NO: 1352785 - RNA, 19 nt, Artificial Sequence
  Description of Artificial Sequence: Synthetic oligonucleotide
guaaugacacuggccaggu

SEQ ID NO: 1352786 - RNA, 19 nt, Artificial Sequence
  Description of Artificial Sequence: Synthetic oligonucleotide
caaaacucgagucgugguu

SEQ ID NO: 1352787 - RNA, 19 nt, Artificial Sequence
  Description of Artificial Sequence: Synthetic oligonucleotide
aggucggugguaauccuuu

SEQ ID NO: 1352788 - RNA, 19 nt, Artificial Sequence
  Description of Artificial Sequence: Synthetic oligonucleotide
agcuuggaaggcuccccua

SEQ ID NO: 1352789 - RNA, 19 nt, Artificial Sequence
  Description of Artificial Sequence: Synthetic oligonucleotide
ggugugccaacaaacgucu

SEQ ID NO: 1352790 - RNA, 19 nt, Artificial Sequence
  Description of Artificial Sequence: Synthetic oligonucleotide
cuccgucauggagccauag

SEQ ID NO: 1352791 - RNA, 19 nt, Artificial Sequence
  Description of Artificial Sequence: Synthetic oligonucleotide
ccagcuaacucuuucuggu

SEQ ID NO: 1352792 - RNA, 19 nt, Artificial Sequence
  Description of Artificial Sequence: Synthetic oligonucleotide
ccacaccaguaucuugccg

SEQ ID NO: 1352793 - RNA, 19 nt, Artificial Sequence
  Description of Artificial Sequence: Synthetic oligonucleotide
uugcggcagcggccguagg

SEQ ID NO: 1352794 - RNA, 19 nt, Artificial Sequence
  Description of Artificial Sequence: Synthetic oligonucleotide
cccgaagcaaguucaccuc

SEQ ID NO: 1352795 - RNA, 19 nt, Artificial Sequence
  Description of Artificial Sequence: Synthetic oligonucleotide
gaaucucccuucucugauu

SEQ ID NO: 1352796 - RNA, 19 nt, Artificial Sequence
  Description of Artificial Sequence: Synthetic oligonucleotide
gcuguaaacggaggcauua

SEQ ID NO: 1352797 - RNA, 19 nt, Artificial Sequence
  Description of Artificial Sequence: Synthetic oligonucleotide
ggagccggugccgaugcug

SEQ ID NO: 1352798 - RNA, 19 nt, Artificial Sequence
  Description of Artificial Sequence: Synthetic oligonucleotide
ucuugccgucgcucuuccu

SEQ ID NO: 1352799 - RNA, 19 nt, Artificial Sequence
  Description of Artificial Sequence: Synthetic oligonucleotide
cccgaugaagcacggugug

SEQ ID NO: 1352800 - RNA, 19 nt, Artificial Sequence
  Description of Artificial Sequence: Synthetic oligonucleotide
ccgacuucucauuguagga

SEQ ID NO: 1352801 - RNA, 19 nt, Artificial Sequence
  Description of Artificial Sequence: Synthetic oligonucleotide
cucucuagaugucuccuuu

SEQ ID NO: 1352802 - RNA, 19 nt, Artificial Sequence
  Description of Artificial Sequence: Synthetic oligonucleotide
gcucuuuccacaccaguau

SEQ ID NO: 1352803 - RNA, 19 nt, Artificial Sequence
  Description of Artificial Sequence: Synthetic oligonucleotide
gcaaaacucgagucguggu

SEQ ID NO: 1352804 - RNA, 19 nt, Artificial Sequence
  Description of Artificial Sequence: Synthetic oligonucleotide
ccgucacuccuucugugac

SEQ ID NO: 1352805 - RNA, 19 nt, Artificial Sequence
  Description of Artificial Sequence: Synthetic oligonucleotide
ccgaugaagcacggugugg

SEQ ID NO: 1352806 - RNA, 19 nt, Artificial Sequence
  Description of Artificial Sequence: Synthetic oligonucleotide
cugcuagucucucucgaau

SEQ ID NO: 1352807 - RNA, 19 nt, Artificial Sequence
  Description of Artificial Sequence: Synthetic oligonucleotide
uccaugccuugcuggccua

SEQ ID NO: 1352808 - RNA, 19 nt, Artificial Sequence
  Description of Artificial Sequence: Synthetic oligonucleotide
gcgguaggggauccgccug

SEQ ID NO: 1352809 - RNA, 19 nt, Artificial Sequence
  Description of Artificial Sequence: Synthetic oligonucleotide
gcggcagcggccguaggag

SEQ ID NO: 1352810 - RNA, 19 nt, Artificial Sequence
  Description of Artificial Sequence: Synthetic oligonucleotide
agcgcaugcccaggaucug

SEQ ID NO: 1352811 - RNA, 19 nt, Artificial Sequence
  Description of Artificial Sequence: Synthetic oligonucleotide
ccagcgaccagauguccga

SEQ ID NO: 1352812 - RNA, 19 nt, Artificial Sequence
  Description of Artificial Sequence: Synthetic oligonucleotide
cccgucagaguagcgguag

SEQ ID NO: 1352813 - RNA, 19 nt, Artificial Sequence
  Description of Artificial Sequence: Synthetic oligonucleotide
cuccccuaagcgcuggccu

SEQ ID NO: 1352814 - RNA, 19 nt, Artificial Sequence
  Description of Artificial Sequence: Synthetic oligonucleotide
gacaagcggcucauuugcu

SEQ ID NO: 1352815 - RNA, 19 nt, Artificial Sequence
  Description of Artificial Sequence: Synthetic oligonucleotide
ccgaagcaaguucaccuca

SEQ ID NO: 1352816 - RNA, 19 nt, Artificial Sequence
  Description of Artificial Sequence: Synthetic oligonucleotide
cucuagugggcuggcagua

SEQ ID NO: 1352817 - RNA, 19 nt, Artificial Sequence
  Description of Artificial Sequence: Synthetic oligonucleotide
ccucucgagcucugagcgc

SEQ ID NO: 1352818 - RNA, 19 nt, Artificial Sequence
  Description of Artificial Sequence: Synthetic oligonucleotide
cacuagccaggcacaggaa

SEQ ID NO: 1352819 - RNA, 19 nt, Artificial Sequence
  Description of Artificial Sequence: Synthetic oligonucleotide
gcauccgagugaugauguc

SEQ ID NO: 1352820 - RNA, 19 nt, Artificial Sequence
  Description of Artificial Sequence: Synthetic oligonucleotide
gcuccccuaagcgcuggcc

SEQ ID NO: 1352821 - RNA, 19 nt, Artificial Sequence
  Description of Artificial Sequence: Synthetic oligonucleotide
gcgcaugcccaggaucugc

SEQ ID NO: 1352822 - RNA, 19 nt, Artificial Sequence
  Description of Artificial Sequence: Synthetic oligonucleotide
gcggcucauuugcucagga

SEQ ID NO: 1352823 - RNA, 19 nt, Artificial Sequence
  Description of Artificial Sequence: Synthetic oligonucleotide
cagcuuggaaggcuccccu

SEQ ID NO: 1352824 - RNA, 19 nt, Artificial Sequence
  Description of Artificial Sequence: Synthetic oligonucleotide
gggucacuagccaggcaca

SEQ ID NO: 1352825 - RNA, 19 nt, Artificial Sequence
  Description of Artificial Sequence: Synthetic oligonucleotide
cagcggccguaggagccgg

SEQ ID NO: 1352826 - RNA, 19 nt, Artificial Sequence
  Description of Artificial Sequence: Synthetic oligonucleotide
gcacgguguggccaccguc

SEQ ID NO: 1352827 - RNA, 19 nt, Artificial Sequence
  Description of Artificial Sequence: Synthetic oligonucleotide
ccggaucuuugcggcagcg

SEQ ID NO: 1352828 - RNA, 19 nt, Artificial Sequence
  Description of Artificial Sequence: Synthetic oligonucleotide
gaucccgaugaagcacggu

SEQ ID NO: 1352829 - RNA, 19 nt, Artificial Sequence
  Description of Artificial Sequence: Synthetic oligonucleotide
ccgaugcugugcagucacc

SEQ ID NO: 1352830 - RNA, 19 nt, Artificial Sequence
  Description of Artificial Sequence: Synthetic oligonucleotide
cugagcgcacgcucucugu

SEQ ID NO: 1352831 - RNA, 19 nt, Artificial Sequence
  Description of Artificial Sequence: Synthetic oligonucleotide
ggggauccgccugaaucuc

SEQ ID NO: 1352832 - RNA, 19 nt, Artificial Sequence
  Description of Artificial Sequence: Synthetic oligonucleotide
ccuaagcgcuggccucucc

SEQ ID NO: 1352833 - RNA, 19 nt, Artificial Sequence
  Description of Artificial Sequence: Synthetic oligonucleotide
cagcuaacucuuucugguu

SEQ ID NO: 1352834 - RNA, 19 nt, Artificial Sequence
  Description of Artificial Sequence: Synthetic oligonucleotide
ggucggugguaauccuuua

SEQ ID NO: 1352835 - RNA, 19 nt, Artificial Sequence
  Description of Artificial Sequence: Synthetic oligonucleotide
cggaucuuugcggcagcgg

SEQ ID NO: 1352836 - RNA, 19 nt, Artificial Sequence
  Description of Artificial Sequence: Synthetic oligonucleotide
ggcuccccuaagcgcuggc

SEQ ID NO: 1352837 - RNA, 19 nt, Artificial Sequence
  Description of Artificial Sequence: Synthetic oligonucleotide
acccgucagaguagcggua

SEQ ID NO: 1352838 - RNA, 19 nt, Artificial Sequence
  Description of Artificial Sequence: Synthetic oligonucleotide
cgagucgugguuuaauauu

SEQ ID NO: 1352839 - RNA, 19 nt, Artificial Sequence
  Description of Artificial Sequence: Synthetic oligonucleotide
ccucauuacuaaggaugga

SEQ ID NO: 1352840 - RNA, 19 nt, Artificial Sequence
  Description of Artificial Sequence: Synthetic oligonucleotide
gcggccguaggagccggug

SEQ ID NO: 1352841 - RNA, 19 nt, Artificial Sequence
  Description of Artificial Sequence: Synthetic oligonucleotide
ccaugccuugcuggccuag

SEQ ID NO: 1352842 - RNA, 19 nt, Artificial Sequence
  Description of Artificial Sequence: Synthetic oligonucleotide
cuuucagcucuggccaguu

SEQ ID NO: 1352843 - RNA, 19 nt, Artificial Sequence
  Description of Artificial Sequence: Synthetic oligonucleotide
ccggugccgaugcugugca

SEQ ID NO: 1352844 - RNA, 19 nt, Artificial Sequence
  Description of Artificial Sequence: Synthetic oligonucleotide
cggaggcauuaaugcacac

SEQ ID NO: 1352845 - RNA, 19 nt, Artificial Sequence
  Description of Artificial Sequence: Synthetic oligonucleotide
cgcaaccaagucagcuauc

SEQ ID NO: 1352846 - RNA, 19 nt, Artificial Sequence
  Description of Artificial Sequence: Synthetic oligonucleotide
guacaggguuguguugguu

SEQ ID NO: 1352847 - RNA, 19 nt, Artificial Sequence
  Description of Artificial Sequence: Synthetic oligonucleotide
cggugguaauccuuuaaau

SEQ ID NO: 1352848 - RNA, 19 nt, Artificial Sequence
  Description of Artificial Sequence: Synthetic oligonucleotide
ccgcaaccaagucagcuau

SEQ ID NO: 1352849 - RNA, 19 nt, Artificial Sequence
  Description of Artificial Sequence: Synthetic oligonucleotide
gcuugacauuguguuugcu

SEQ ID NO: 1352850 - RNA, 19 nt, Artificial Sequence
  Description of Artificial Sequence: Synthetic oligonucleotide
ccaccgucacuccuucugu

SEQ ID NO: 1352851 - RNA, 19 nt, Artificial Sequence
  Description of Artificial Sequence: Synthetic oligonucleotide
ccgucgcucuuccuccgga

SEQ ID NO: 1352852 - RNA, 19 nt, Artificial Sequence
  Description of Artificial Sequence: Synthetic oligonucleotide
agcggccguaggagccggu

SEQ ID NO: 1352853 - RNA, 19 nt, Artificial Sequence
  Description of Artificial Sequence: Synthetic oligonucleotide
guaggacaagcggcucauu

SEQ ID NO: 1352854 - RNA, 19 nt, Artificial Sequence
  Description of Artificial Sequence: Synthetic oligonucleotide
cgaugcugugcagucaccu

SEQ ID NO: 1352855 - RNA, 19 nt, Artificial Sequence
  Description of Artificial Sequence: Synthetic oligonucleotide
gcgcuggccucuccucucu

SEQ ID NO: 1352856 - RNA, 19 nt, Artificial Sequence
  Description of Artificial Sequence: Synthetic oligonucleotide
ccuagcgcaugcccaggau

SEQ ID NO: 1352857 - RNA, 19 nt, Artificial Sequence
  Description of Artificial Sequence: Synthetic oligonucleotide
ccuccgucauggagccaua

SEQ ID NO: 1352858 - RNA, 19 nt, Artificial Sequence
  Description of Artificial Sequence: Synthetic oligonucleotide
cgagcucugagcgcacgcu

SEQ ID NO: 1352859 - RNA, 19 nt, Artificial Sequence
  Description of Artificial Sequence: Synthetic oligonucleotide
ccccuaagcgcuggccucu

SEQ ID NO: 1352860 - RNA, 19 nt, Artificial Sequence
  Description of Artificial Sequence: Synthetic oligonucleotide
ccccacggaaaugaaccuu

SEQ ID NO: 1352861 - RNA, 19 nt, Artificial Sequence
  Description of Artificial Sequence: Synthetic oligonucleotide
cgucgcucuuccuccggau

SEQ ID NO: 1352862 - RNA, 19 nt, Artificial Sequence
  Description of Artificial Sequence: Synthetic oligonucleotide
aauauuugaagucauaagc

SEQ ID NO: 1352863 - RNA, 19 nt, Artificial Sequence
  Description of Artificial Sequence: Synthetic oligonucleotide
uuuucgauaauuaauagug

SEQ ID NO: 1352864 - RNA, 19 nt, Artificial Sequence
  Description of Artificial Sequence: Synthetic oligonucleotide
acaucaaucacucugacgg

SEQ ID NO: 1352865 - RNA, 19 nt, Artificial Sequence
  Description of Artificial Sequence: Synthetic oligonucleotide
aacugcacaacugagaugg

SEQ ID NO: 1352866 - RNA, 19 nt, Artificial Sequence
  Description of Artificial Sequence: Synthetic oligonucleotide
aagucuaagaagucugucc

SEQ ID NO: 1352867 - RNA, 19 nt, Artificial Sequence
  Description of Artificial Sequence: Synthetic oligonucleotide
uguauuaaugccuggauag

SEQ ID NO: 1352868 - RNA, 19 nt, Artificial Sequence
  Description of Artificial Sequence: Synthetic oligonucleotide
uuugauguauucuugaaca

SEQ ID NO: 1352869 - RNA, 19 nt, Artificial Sequence
  Description of Artificial Sequence: Synthetic oligonucleotide
guaaucaucaacaaauucg

SEQ ID NO: 1352870 - RNA, 19 nt, Artificial Sequence
  Description of Artificial Sequence: Synthetic oligonucleotide
aaacacaucaaucacucug

SEQ ID NO: 1352871 - RNA, 19 nt, Artificial Sequence
  Description of Artificial Sequence: Synthetic oligonucleotide
aacuauaacucguauuagg

SEQ ID NO: 1352872 - RNA, 19 nt, Artificial Sequence
  Description of Artificial Sequence: Synthetic oligonucleotide
uuagcauugaucaaucuga

SEQ ID NO: 1352873 - RNA, 19 nt, Artificial Sequence
  Description of Artificial Sequence: Synthetic oligonucleotide
aagcauuagacccauaacu

SEQ ID NO: 1352874 - RNA, 19 nt, Artificial Sequence
  Description of Artificial Sequence: Synthetic oligonucleotide
aauacacugagagugucgc

SEQ ID NO: 1352875 - RNA, 19 nt, Artificial Sequence
  Description of Artificial Sequence: Synthetic oligonucleotide
uguucaguaacuauaacuc

SEQ ID NO: 1352876 - RNA, 19 nt, Artificial Sequence
  Description of Artificial Sequence: Synthetic oligonucleotide
aauccuuccauccaacucu

SEQ ID NO: 1352877 - RNA, 19 nt, Artificial Sequence
  Description of Artificial Sequence: Synthetic oligonucleotide
auaauuaauagugauggag

SEQ ID NO: 1352878 - RNA, 19 nt, Artificial Sequence
  Description of Artificial Sequence: Synthetic oligonucleotide
aagagauauagacuugcuc

SEQ ID NO: 1352879 - RNA, 19 nt, Artificial Sequence
  Description of Artificial Sequence: Synthetic oligonucleotide
accaacaaccaucucaggc

SEQ ID NO: 1352880 - RNA, 19 nt, Artificial Sequence
  Description of Artificial Sequence: Synthetic oligonucleotide
gcauugaucaaucugaagg

SEQ ID NO: 1352881 - RNA, 19 nt, Artificial Sequence
  Description of Artificial Sequence: Synthetic oligonucleotide
uguccuaagaccaucauau

SEQ ID NO: 1352882 - RNA, 19 nt, Artificial Sequence
  Description of Artificial Sequence: Synthetic oligonucleotide
aucaaaauauauuugugcu

SEQ ID NO: 1352883 - RNA, 19 nt, Artificial Sequence
  Description of Artificial Sequence: Synthetic oligonucleotide
aauauauuugugcuacuga

SEQ ID NO: 1352884 - RNA, 19 nt, Artificial Sequence
  Description of Artificial Sequence: Synthetic oligonucleotide
uuuaauccauguauuaaug

SEQ ID NO: 1352885 - RNA, 19 nt, Artificial Sequence
  Description of Artificial Sequence: Synthetic oligonucleotide
aagaccaucauauuagcau

SEQ ID NO: 1352886 - RNA, 19 nt, Artificial Sequence
  Description of Artificial Sequence: Synthetic oligonucleotide
ucuugaacaacuuuggaau

SEQ ID NO: 1352887 - RNA, 19 nt, Artificial Sequence
  Description of Artificial Sequence: Synthetic oligonucleotide
agacccauaacuuccauag

SEQ ID NO: 1352888 - RNA, 19 nt, Artificial Sequence
  Description of Artificial Sequence: Synthetic oligonucleotide
acuauaacucguauuaggc

SEQ ID NO: 1352889 - RNA, 19 nt, Artificial Sequence
  Description of Artificial Sequence: Synthetic oligonucleotide
uucgccaagcauuagaccc

SEQ ID NO: 1352890 - RNA, 19 nt, Artificial Sequence
  Description of Artificial Sequence: Synthetic oligonucleotide
uagugauggaguaauaaug

SEQ ID NO: 1352891 - RNA, 19 nt, Artificial Sequence
  Description of Artificial Sequence: Synthetic oligonucleotide
aauucuggaagguauaauu

SEQ ID NO: 1352892 - RNA, 19 nt, Artificial Sequence
  Description of Artificial Sequence: Synthetic oligonucleotide
aucaauaacaaccuuuccu

SEQ ID NO: 1352893 - RNA, 19 nt, Artificial Sequence
  Description of Artificial Sequence: Synthetic oligonucleotide
ugcaaauuuaacagcaucu

SEQ ID NO: 1352894 - RNA, 19 nt, Artificial Sequence
  Description of Artificial Sequence: Synthetic oligonucleotide
cucacacucaacaaggacc

SEQ ID NO: 1352895 - RNA, 19 nt, Artificial Sequence
  Description of Artificial Sequence: Synthetic oligonucleotide
auuagcauugaucaaucug

SEQ ID NO: 1352896 - RNA, 19 nt, Artificial Sequence
  Description of Artificial Sequence: Synthetic oligonucleotide
ugauggaguaauaaugucu

SEQ ID NO: 1352897 - RNA, 19 nt, Artificial Sequence
  Description of Artificial Sequence: Synthetic oligonucleotide
uuaauccauguauuaaugc

SEQ ID NO: 1352898 - RNA, 19 nt, Artificial Sequence
  Description of Artificial Sequence: Synthetic oligonucleotide
aauucgccaagcauuagac

SEQ ID NO: 1352899 - RNA, 19 nt, Artificial Sequence
  Description of Artificial Sequence: Synthetic oligonucleotide
ucgauaauuaauagugaug

SEQ ID NO: 1352900 - RNA, 19 nt, Artificial Sequence
  Description of Artificial Sequence: Synthetic oligonucleotide
cuuaugcaaauuuaacagc

SEQ ID NO: 1352901 - RNA, 19 nt, Artificial Sequence
  Description of Artificial Sequence: Synthetic oligonucleotide
aucaucaacaaauucgcca

SEQ ID NO: 1352902 - RNA, 19 nt, Artificial Sequence
  Description of Artificial Sequence: Synthetic oligonucleotide
uucuugcuaauucuggaag

SEQ ID NO: 1352903 - RNA, 19 nt, Artificial Sequence
  Description of Artificial Sequence: Synthetic oligonucleotide
uccuccaagucuaagaagu

SEQ ID NO: 1352904 - RNA, 19 nt, Artificial Sequence
  Description of Artificial Sequence: Synthetic oligonucleotide
uucagcauauccaacauuu

SEQ ID NO: 1352905 - RNA, 19 nt, Artificial Sequence
  Description of Artificial Sequence: Synthetic oligonucleotide
ucaaauaguaaaugggauc

SEQ ID NO: 1352906 - RNA, 19 nt, Artificial Sequence
  Description of Artificial Sequence: Synthetic oligonucleotide
aauuaauagugauggagua

SEQ ID NO: 1352907 - RNA, 19 nt, Artificial Sequence
  Description of Artificial Sequence: Synthetic oligonucleotide
caucauauuagcauugauc

SEQ ID NO: 1352908 - RNA, 19 nt, Artificial Sequence
  Description of Artificial Sequence: Synthetic oligonucleotide
gauggaguaauaaugucug

SEQ ID NO: 1352909 - RNA, 19 nt, Artificial Sequence
  Description of Artificial Sequence: Synthetic oligonucleotide
guaacuauaacucguauua

SEQ ID NO: 1352910 - RNA, 19 nt, Artificial Sequence
  Description of Artificial Sequence: Synthetic oligonucleotide
uuuaacagcaucuucuguu

SEQ ID NO: 1352911 - RNA, 19 nt, Artificial Sequence
  Description of Artificial Sequence: Synthetic oligonucleotide
uguaaucaucaacaaauuc

SEQ ID NO: 1352912 - RNA, 19 nt, Artificial Sequence
  Description of Artificial Sequence: Synthetic oligonucleotide
aaauucgccaagcauuaga

SEQ ID NO: 1352913 - RNA, 19 nt, Artificial Sequence
  Description of Artificial Sequence: Synthetic oligonucleotide
aaucagcccgauuccauuc

SEQ ID NO: 1352914 - RNA, 19 nt, Artificial Sequence
  Description of Artificial Sequence: Synthetic oligonucleotide
ugaguguugauauccacac

SEQ ID NO: 1352915 - RNA, 19 nt, Artificial Sequence
  Description of Artificial Sequence: Synthetic oligonucleotide
acccugacuaaauaaacag

SEQ ID NO: 1352916 - RNA, 19 nt, Artificial Sequence
  Description of Artificial Sequence: Synthetic oligonucleotide
ucuucuacagccuuauuau

SEQ ID NO: 1352917 - RNA, 19 nt, Artificial Sequence
  Description of Artificial Sequence: Synthetic oligonucleotide
cuuauuauaauucuuggcu

SEQ ID NO: 1352918 - RNA, 19 nt, Artificial Sequence
  Description of Artificial Sequence: Synthetic oligonucleotide
uucaaauaguaaaugggau

SEQ ID NO: 1352919 - RNA, 19 nt, Artificial Sequence
  Description of Artificial Sequence: Synthetic oligonucleotide
uauaacucguauuaggcuu

SEQ ID NO: 1352920 - RNA, 19 nt, Artificial Sequence
  Description of Artificial Sequence: Synthetic oligonucleotide
auaaugucuguuuaaucca

SEQ ID NO: 1352921 - RNA, 19 nt, Artificial Sequence
  Description of Artificial Sequence: Synthetic oligonucleotide
guucaguaacuauaacucg

SEQ ID NO: 1352922 - RNA, 19 nt, Artificial Sequence
  Description of Artificial Sequence: Synthetic oligonucleotide
uuuggcuuggaacacugga

SEQ ID NO: 1352923 - RNA, 19 nt, Artificial Sequence
  Description of Artificial Sequence: Synthetic oligonucleotide
gcaauaggaacaaugaagg

SEQ ID NO: 1352924 - RNA, 19 nt, Artificial Sequence
  Description of Artificial Sequence: Synthetic oligonucleotide
uauuaacuccaauucuugc

SEQ ID NO: 1352925 - RNA, 19 nt, Artificial Sequence
  Description of Artificial Sequence: Synthetic oligonucleotide
uucgauaauuaauagugau

SEQ ID NO: 1352926 - RNA, 19 nt, Artificial Sequence
  Description of Artificial Sequence: Synthetic oligonucleotide
caaccaacaaccaucucag

SEQ ID NO: 1352927 - RNA, 19 nt, Artificial Sequence
  Description of Artificial Sequence: Synthetic oligonucleotide
uuucgauaauuaauaguga

SEQ ID NO: 1352928 - RNA, 19 nt, Artificial Sequence
  Description of Artificial Sequence: Synthetic oligonucleotide
aauagugauggaguaauaa

SEQ ID NO: 1352929 - RNA, 19 nt, Artificial Sequence
  Description of Artificial Sequence: Synthetic oligonucleotide
ucugacgguguaaucauca

SEQ ID NO: 1352930 - RNA, 19 nt, Artificial Sequence
  Description of Artificial Sequence: Synthetic oligonucleotide
aacaaauucgccaagcauu

SEQ ID NO: 1352931 - RNA, 19 nt, Artificial Sequence
  Description of Artificial Sequence: Synthetic oligonucleotide
guuuaagugacccagauuu

SEQ ID NO: 1352932 - RNA, 19 nt, Artificial Sequence
  Description of Artificial Sequence: Synthetic oligonucleotide
caaauuccuuauuaacucc

SEQ ID NO: 1352933 - RNA, 19 nt, Artificial Sequence
  Description of Artificial Sequence: Synthetic oligonucleotide
aacaaugaaggaaaauaca

SEQ ID NO: 1352934 - RNA, 19 nt, Artificial Sequence
  Description of Artificial Sequence: Synthetic oligonucleotide
uguguuuacaauguucacu

SEQ ID NO: 1352935 - RNA, 19 nt, Artificial Sequence
  Description of Artificial Sequence: Synthetic oligonucleotide
gaucuuaacaaaauuuguc

SEQ ID NO: 1352936 - RNA, 19 nt, Artificial Sequence
  Description of Artificial Sequence: Synthetic oligonucleotide
cauccaacucuucuuaugc

SEQ ID NO: 1352937 - RNA, 19 nt, Artificial Sequence
  Description of Artificial Sequence: Synthetic oligonucleotide
gagauauagacuugcucug

SEQ ID NO: 1352938 - RNA, 19 nt, Artificial Sequence
  Description of Artificial Sequence: Synthetic oligonucleotide
gaugaaucagcccgauucc

SEQ ID NO: 1352939 - RNA, 19 nt, Artificial Sequence
  Description of Artificial Sequence: Synthetic oligonucleotide
gaauuugacaaauuccuua

SEQ ID NO: 1352940 - RNA, 19 nt, Artificial Sequence
  Description of Artificial Sequence: Synthetic oligonucleotide
aaauacacugagagugucg

SEQ ID NO: 1352941 - RNA, 19 nt, Artificial Sequence
  Description of Artificial Sequence: Synthetic oligonucleotide
uuuacacucugaaugggau

SEQ ID NO: 1352942 - RNA, 19 nt, Artificial Sequence
  Description of Artificial Sequence: Synthetic oligonucleotide
ucuguuuaauccauguauu

SEQ ID NO: 1352943 - RNA, 19 nt, Artificial Sequence
  Description of Artificial Sequence: Synthetic oligonucleotide
aguaauaaugucuguuuaa

SEQ ID NO: 1352944 - RNA, 19 nt, Artificial Sequence
  Description of Artificial Sequence: Synthetic oligonucleotide
auucgccaagcauuagacc

SEQ ID NO: 1352945 - RNA, 19 nt, Artificial Sequence
  Description of Artificial Sequence: Synthetic oligonucleotide
ugcuaauucuggaagguau

SEQ ID NO: 1352946 - RNA, 19 nt, Artificial Sequence
  Description of Artificial Sequence: Synthetic oligonucleotide
uccuaagaccaucauauua

SEQ ID NO: 1352947 - RNA, 19 nt, Artificial Sequence
  Description of Artificial Sequence: Synthetic oligonucleotide
uuaacaucuuuagcaaugc

SEQ ID NO: 1352948 - RNA, 19 nt, Artificial Sequence
  Description of Artificial Sequence: Synthetic oligonucleotide
acccauaacuuccauagga

SEQ ID NO: 1352949 - RNA, 19 nt, Artificial Sequence
  Description of Artificial Sequence: Synthetic oligonucleotide
gacgguguaaucaucaaca

SEQ ID NO: 1352950 - RNA, 19 nt, Artificial Sequence
  Description of Artificial Sequence: Synthetic oligonucleotide
cuuacaugccaccacauca

SEQ ID NO: 1352951 - RNA, 19 nt, Artificial Sequence
  Description of Artificial Sequence: Synthetic oligonucleotide
cgauaauuaauagugaugg

SEQ ID NO: 1352952 - RNA, 19 nt, Artificial Sequence
  Description of Artificial Sequence: Synthetic oligonucleotide
ccuaagaccaucauauuag

SEQ ID NO: 1352953 - RNA, 19 nt, Artificial Sequence
  Description of Artificial Sequence: Synthetic oligonucleotide
agauauagacuugcucugc

SEQ ID NO: 1352954 - RNA, 19 nt, Artificial Sequence
  Description of Artificial Sequence: Synthetic oligonucleotide
acuggacaauauuugaagu

SEQ ID NO: 1352955 - RNA, 19 nt, Artificial Sequence
  Description of Artificial Sequence: Synthetic oligonucleotide
caaaugacguuugggaucc

SEQ ID NO: 1352956 - RNA, 19 nt, Artificial Sequence
  Description of Artificial Sequence: Synthetic oligonucleotide
uuacaugccaccacaucac

SEQ ID NO: 1352957 - RNA, 19 nt, Artificial Sequence
  Description of Artificial Sequence: Synthetic oligonucleotide
aaauuccuuauuaacucca

SEQ ID NO: 1352958 - RNA, 19 nt, Artificial Sequence
  Description of Artificial Sequence: Synthetic oligonucleotide
uucaggugucaucuuaucu

SEQ ID NO: 1352959 - RNA, 19 nt, Artificial Sequence
  Description of Artificial Sequence: Synthetic oligonucleotide
uuaagugacccagauuuga

SEQ ID NO: 1352960 - RNA, 19 nt, Artificial Sequence
  Description of Artificial Sequence: Synthetic oligonucleotide
uguuuaauccauguauuaa

SEQ ID NO: 1352961 - RNA, 19 nt, Artificial Sequence
  Description of Artificial Sequence: Synthetic oligonucleotide
cuaagaccaucauauuagc

SEQ ID NO: 1352962 - RNA, 19 nt, Artificial Sequence
  Description of Artificial Sequence: Synthetic oligonucleotide
uacaacaguauccaacauu

SEQ ID NO: 1352963 - RNA, 19 nt, Artificial Sequence
  Description of Artificial Sequence: Synthetic oligonucleotide
ucaggugucaucuuaucuu

SEQ ID NO: 1352964 - RNA, 19 nt, Artificial Sequence
  Description of Artificial Sequence: Synthetic oligonucleotide
auauuagcauugaucaauc

SEQ ID NO: 1352965 - RNA, 19 nt, Artificial Sequence
  Description of Artificial Sequence: Synthetic oligonucleotide
agugauggaguaauaaugu

SEQ ID NO: 1352966 - RNA, 19 nt, Artificial Sequence
  Description of Artificial Sequence: Synthetic oligonucleotide
aauaguaaaugggaucuua

SEQ ID NO: 1352967 - RNA, 19 nt, Artificial Sequence
  Description of Artificial Sequence: Synthetic oligonucleotide
acuuacaugccaccacauc

SEQ ID NO: 1352968 - RNA, 19 nt, Artificial Sequence
  Description of Artificial Sequence: Synthetic oligonucleotide
uacacugagagugucgcug

SEQ ID NO: 1352969 - RNA, 19 nt, Artificial Sequence
  Description of Artificial Sequence: Synthetic oligonucleotide
ucaaucugaaggcaucaau

SEQ ID NO: 1352970 - RNA, 19 nt, Artificial Sequence
  Description of Artificial Sequence: Synthetic oligonucleotide
ucguauuaggcuucaauuu

SEQ ID NO: 1352971 - RNA, 19 nt, Artificial Sequence
  Description of Artificial Sequence: Synthetic oligonucleotide
aguauccaacauugcugcc

SEQ ID NO: 1352972 - RNA, 19 nt, Artificial Sequence
  Description of Artificial Sequence: Synthetic oligonucleotide
uuuggguuguaaauguauu

SEQ ID NO: 1352973 - RNA, 19 nt, Artificial Sequence
  Description of Artificial Sequence: Synthetic oligonucleotide
ugaucaaucugaaggcauc

SEQ ID NO: 1352974 - RNA, 19 nt, Artificial Sequence
  Description of Artificial Sequence: Synthetic oligonucleotide
gauaauuaauagugaugga

SEQ ID NO: 1352975 - RNA, 19 nt, Artificial Sequence
  Description of Artificial Sequence: Synthetic oligonucleotide
uugguucauguccuaagac

SEQ ID NO: 1352976 - RNA, 19 nt, Artificial Sequence
  Description of Artificial Sequence: Synthetic oligonucleotide
uccaaaugacguuugggau

SEQ ID NO: 1352977 - RNA, 19 nt, Artificial Sequence
  Description of Artificial Sequence: Synthetic oligonucleotide
cacauguucuuccaaauga

SEQ ID NO: 1352978 - RNA, 19 nt, Artificial Sequence
  Description of Artificial Sequence: Synthetic oligonucleotide
aaugggaucuuaacaaaau

SEQ ID NO: 1352979 - RNA, 19 nt, Artificial Sequence
  Description of Artificial Sequence: Synthetic oligonucleotide
cacaucaaucacucugacg

SEQ ID NO: 1352980 - RNA, 19 nt, Artificial Sequence
  Description of Artificial Sequence: Synthetic oligonucleotide
agccuuauuauaauucuug

SEQ ID NO: 1352981 - RNA, 19 nt, Artificial Sequence
  Description of Artificial Sequence: Synthetic oligonucleotide
cuuccaaaugacguuuggg

SEQ ID NO: 1352982 - RNA, 19 nt, Artificial Sequence
  Description of Artificial Sequence: Synthetic oligonucleotide
aaucugcaaaacccugacu

SEQ ID NO: 1352983 - RNA, 19 nt, Artificial Sequence
  Description of Artificial Sequence: Synthetic oligonucleotide
ugacgguguaaucaucaac

SEQ ID NO: 1352984 - RNA, 19 nt, Artificial Sequence
  Description of Artificial Sequence: Synthetic oligonucleotide
ugcaaaacccugacuaaau

SEQ ID NO: 1352985 - RNA, 19 nt, Artificial Sequence
  Description of Artificial Sequence: Synthetic oligonucleotide
uccaacauugcugccaaac

SEQ ID NO: 1352986 - RNA, 19 nt, Artificial Sequence
  Description of Artificial Sequence: Synthetic oligonucleotide
cauaggaacuccagcccgg

SEQ ID NO: 1352987 - RNA, 19 nt, Artificial Sequence
  Description of Artificial Sequence: Synthetic oligonucleotide
ugaacaacuuuggaaucug

SEQ ID NO: 1352988 - RNA, 19 nt, Artificial Sequence
  Description of Artificial Sequence: Synthetic oligonucleotide
gaagucauaagcacaucca

SEQ ID NO: 1352989 - RNA, 19 nt, Artificial Sequence
  Description of Artificial Sequence: Synthetic oligonucleotide
aacccugacuaaauaaaca

SEQ ID NO: 1352990 - RNA, 19 nt, Artificial Sequence
  Description of Artificial Sequence: Synthetic oligonucleotide
uauuaaugccuggauagau

SEQ ID NO: 1352991 - RNA, 19 nt, Artificial Sequence
  Description of Artificial Sequence: Synthetic oligonucleotide
acacaucaaucacucugac

SEQ ID NO: 1352992 - RNA, 19 nt, Artificial Sequence
  Description of Artificial Sequence: Synthetic oligonucleotide
acaggugacuuacaugcca

SEQ ID NO: 1352993 - RNA, 19 nt, Artificial Sequence
  Description of Artificial Sequence: Synthetic oligonucleotide
ucuuggcuaauuccaacau

SEQ ID NO: 1352994 - RNA, 19 nt, Artificial Sequence
  Description of Artificial Sequence: Synthetic oligonucleotide
gggaucuuaacaaaauuug

SEQ ID NO: 1352995 - RNA, 19 nt, Artificial Sequence
  Description of Artificial Sequence: Synthetic oligonucleotide
auuugaaguuguuugucuu

SEQ ID NO: 1352996 - RNA, 19 nt, Artificial Sequence
  Description of Artificial Sequence: Synthetic oligonucleotide
acauucuuuauugccagcu

SEQ ID NO: 1352997 - RNA, 19 nt, Artificial Sequence
  Description of Artificial Sequence: Synthetic oligonucleotide
ugccgagaaguacuuccgg

SEQ ID NO: 1352998 - RNA, 19 nt, Artificial Sequence
  Description of Artificial Sequence: Synthetic oligonucleotide
uaagugacccagauuugaa

SEQ ID NO: 1352999 - RNA, 19 nt, Artificial Sequence
  Description of Artificial Sequence: Synthetic oligonucleotide
auaacaaccuuuccuuuua

SEQ ID NO: 1353000 - RNA, 19 nt, Artificial Sequence
  Description of Artificial Sequence: Synthetic oligonucleotide
uuauugccagcuguucagg

SEQ ID NO: 1353001 - RNA, 19 nt, Artificial Sequence
  Description of Artificial Sequence: Synthetic oligonucleotide
cuuuuacacucugaauggg

SEQ ID NO: 1353002 - RNA, 19 nt, Artificial Sequence
  Description of Artificial Sequence: Synthetic oligonucleotide
auaacucguauuaggcuuc

SEQ ID NO: 1353003 - RNA, 19 nt, Artificial Sequence
  Description of Artificial Sequence: Synthetic oligonucleotide
ucuguucaguaacuauaac

SEQ ID NO: 1353004 - RNA, 19 nt, Artificial Sequence
  Description of Artificial Sequence: Synthetic oligonucleotide
uauuagcauugaucaaucu

SEQ ID NO: 1353005 - RNA, 19 nt, Artificial Sequence
  Description of Artificial Sequence: Synthetic oligonucleotide
cuugccugugagcaauagg

SEQ ID NO: 1353006 - RNA, 19 nt, Artificial Sequence
  Description of Artificial Sequence: Synthetic oligonucleotide
acaucuuuagcaaugccaa

SEQ ID NO: 1353007 - RNA, 19 nt, Artificial Sequence
  Description of Artificial Sequence: Synthetic oligonucleotide
caagcauuagacccauaac

SEQ ID NO: 1353008 - RNA, 19 nt, Artificial Sequence
  Description of Artificial Sequence: Synthetic oligonucleotide
ugauaccaaccaacaacca

SEQ ID NO: 1353009 - RNA, 19 nt, Artificial Sequence
  Description of Artificial Sequence: Synthetic oligonucleotide
agaccaucauauuagcauu

SEQ ID NO: 1353010 - RNA, 19 nt, Artificial Sequence
  Description of Artificial Sequence: Synthetic oligonucleotide
gaguaauaaugucuguuua

SEQ ID NO: 1353011 - RNA, 19 nt, Artificial Sequence
  Description of Artificial Sequence: Synthetic oligonucleotide
cacucaacaaggaccuggc

SEQ ID NO: 1353012 - RNA, 19 nt, Artificial Sequence
  Description of Artificial Sequence: Synthetic oligonucleotide
aggcauaccuccuccaagu

SEQ ID NO: 1353013 - RNA, 19 nt, Artificial Sequence
  Description of Artificial Sequence: Synthetic oligonucleotide
cuguucaguaacuauaacu

SEQ ID NO: 1353014 - RNA, 19 nt, Artificial Sequence
  Description of Artificial Sequence: Synthetic oligonucleotide
ugacccagauuugaaguug

SEQ ID NO: 1353015 - RNA, 19 nt, Artificial Sequence
  Description of Artificial Sequence: Synthetic oligonucleotide
acucguauuaggcuucaau

SEQ ID NO: 1353016 - RNA, 19 nt, Artificial Sequence
  Description of Artificial Sequence: Synthetic oligonucleotide
cauaagcacauccacaugu

SEQ ID NO: 1353017 - RNA, 19 nt, Artificial Sequence
  Description of Artificial Sequence: Synthetic oligonucleotide
uugaagugucaauccuucc

SEQ ID NO: 1353018 - RNA, 19 nt, Artificial Sequence
  Description of Artificial Sequence: Synthetic oligonucleotide
ucuccgacaaggcuucaaa

SEQ ID NO: 1353019 - RNA, 19 nt, Artificial Sequence
  Description of Artificial Sequence: Synthetic oligonucleotide
gucuguuuaauccauguau

SEQ ID NO: 1353020 - RNA, 19 nt, Artificial Sequence
  Description of Artificial Sequence: Synthetic oligonucleotide
ucuaagaagucuguccaua

SEQ ID NO: 1353021 - RNA, 19 nt, Artificial Sequence
  Description of Artificial Sequence: Synthetic oligonucleotide
cauucaaaagagucgccca

SEQ ID NO: 1353022 - RNA, 19 nt, Artificial Sequence
  Description of Artificial Sequence: Synthetic oligonucleotide
uguuuaagugacccagauu

SEQ ID NO: 1353023 - RNA, 19 nt, Artificial Sequence
  Description of Artificial Sequence: Synthetic oligonucleotide
agcccggccauguuuuaac

SEQ ID NO: 1353024 - RNA, 19 nt, Artificial Sequence
  Description of Artificial Sequence: Synthetic oligonucleotide
gacccauaacuuccauagg

SEQ ID NO: 1353025 - RNA, 19 nt, Artificial Sequence
  Description of Artificial Sequence: Synthetic oligonucleotide
uggaguaauaaugucuguu

SEQ ID NO: 1353026 - RNA, 19 nt, Artificial Sequence
  Description of Artificial Sequence: Synthetic oligonucleotide
agaaccggcgaugaaucag

SEQ ID NO: 1353027 - RNA, 19 nt, Artificial Sequence
  Description of Artificial Sequence: Synthetic oligonucleotide
acugugauaccaaccaaca

SEQ ID NO: 1353028 - RNA, 19 nt, Artificial Sequence
  Description of Artificial Sequence: Synthetic oligonucleotide
caggugucaucuuaucuuc

SEQ ID NO: 1353029 - RNA, 19 nt, Artificial Sequence
  Description of Artificial Sequence: Synthetic oligonucleotide
uagcauugaucaaucugaa

SEQ ID NO: 1353030 - RNA, 19 nt, Artificial Sequence
  Description of Artificial Sequence: Synthetic oligonucleotide
uaagaagucuguccauauu

SEQ ID NO: 1353031 - RNA, 19 nt, Artificial Sequence
  Description of Artificial Sequence: Synthetic oligonucleotide
uguagucuugaagugucaa

SEQ ID NO: 1353032 - RNA, 19 nt, Artificial Sequence
  Description of Artificial Sequence: Synthetic oligonucleotide
cugccgagaaguacuuccg

SEQ ID NO: 1353033 - RNA, 19 nt, Artificial Sequence
  Description of Artificial Sequence: Synthetic oligonucleotide
aacuccaauucuugcuaau

SEQ ID NO: 1353034 - RNA, 19 nt, Artificial Sequence
  Description of Artificial Sequence: Synthetic oligonucleotide
cauugcugccaaacacugg

SEQ ID NO: 1353035 - RNA, 19 nt, Artificial Sequence
  Description of Artificial Sequence: Synthetic oligonucleotide
gaaugggauccacaaccac

SEQ ID NO: 1353036 - RNA, 19 nt, Artificial Sequence
  Description of Artificial Sequence: Synthetic oligonucleotide
ucgccaagcauuagaccca

SEQ ID NO: 1353037 - RNA, 19 nt, Artificial Sequence
  Description of Artificial Sequence: Synthetic oligonucleotide
caggugacuuacaugccac

SEQ ID NO: 1353038 - RNA, 19 nt, Artificial Sequence
  Description of Artificial Sequence: Synthetic oligonucleotide
caucuuuagcaaugccaag

SEQ ID NO: 1353039 - RNA, 19 nt, Artificial Sequence
  Description of Artificial Sequence: Synthetic oligonucleotide
gauaccaaccaacaaccau

SEQ ID NO: 1353040 - RNA, 19 nt, Artificial Sequence
  Description of Artificial Sequence: Synthetic oligonucleotide
cuccgacaaggcuucaaag

SEQ ID NO: 1353041 - RNA, 19 nt, Artificial Sequence
  Description of Artificial Sequence: Synthetic oligonucleotide
agcccgauuccauucaaaa

SEQ ID NO: 1353042 - RNA, 19 nt, Artificial Sequence
  Description of Artificial Sequence: Synthetic oligonucleotide
gucgcugacagcucucuac

SEQ ID NO: 1353043 - RNA, 19 nt, Artificial Sequence
  Description of Artificial Sequence: Synthetic oligonucleotide
uaacuccaauucuugcuaa

SEQ ID NO: 1353044 - RNA, 19 nt, Artificial Sequence
  Description of Artificial Sequence: Synthetic oligonucleotide
ccugacuaaauaaacagaa

SEQ ID NO: 1353045 - RNA, 19 nt, Artificial Sequence
  Description of Artificial Sequence: Synthetic oligonucleotide
accacugauucauuguguu

SEQ ID NO: 1353046 - RNA, 19 nt, Artificial Sequence
  Description of Artificial Sequence: Synthetic oligonucleotide
aaccggcgaugaaucagcc

SEQ ID NO: 1353047 - RNA, 19 nt, Artificial Sequence
  Description of Artificial Sequence: Synthetic oligonucleotide
gugauggaguaauaauguc

SEQ ID NO: 1353048 - RNA, 19 nt, Artificial Sequence
  Description of Artificial Sequence: Synthetic oligonucleotide
acucugacgguguaaucau

SEQ ID NO: 1353049 - RNA, 19 nt, Artificial Sequence
  Description of Artificial Sequence: Synthetic oligonucleotide
agcucccuugccugugagc

SEQ ID NO: 1353050 - RNA, 19 nt, Artificial Sequence
  Description of Artificial Sequence: Synthetic oligonucleotide
aauuccuuauuaacuccaa

SEQ ID NO: 1353051 - RNA, 19 nt, Artificial Sequence
  Description of Artificial Sequence: Synthetic oligonucleotide
gugacuuacaugccaccac

SEQ ID NO: 1353052 - RNA, 19 nt, Artificial Sequence
  Description of Artificial Sequence: Synthetic oligonucleotide
uaauagugauggaguaaua

SEQ ID NO: 1353053 - RNA, 19 nt, Artificial Sequence
  Description of Artificial Sequence: Synthetic oligonucleotide
cgaugaaucagcccgauuc

SEQ ID NO: 1353054 - RNA, 19 nt, Artificial Sequence
  Description of Artificial Sequence: Synthetic oligonucleotide
ccaaccaacaaccaucuca

SEQ ID NO: 1353055 - RNA, 19 nt, Artificial Sequence
  Description of Artificial Sequence: Synthetic oligonucleotide
auaguaaaugggaucuuaa

SEQ ID NO: 1353056 - RNA, 19 nt, Artificial Sequence
  Description of Artificial Sequence: Synthetic oligonucleotide
guauccaacauugcugcca

SEQ ID NO: 1353057 - RNA, 19 nt, Artificial Sequence
  Description of Artificial Sequence: Synthetic oligonucleotide
auguccuaagaccaucaua

SEQ ID NO: 1353058 - RNA, 19 nt, Artificial Sequence
  Description of Artificial Sequence: Synthetic oligonucleotide
cuuggaacacuggaucaac

SEQ ID NO: 1353059 - RNA, 19 nt, Artificial Sequence
  Description of Artificial Sequence: Synthetic oligonucleotide
cuggcuccgagaaccggcg

SEQ ID NO: 1353060 - RNA, 19 nt, Artificial Sequence
  Description of Artificial Sequence: Synthetic oligonucleotide
cccgauuccauucaaaaga

SEQ ID NO: 1353061 - RNA, 19 nt, Artificial Sequence
  Description of Artificial Sequence: Synthetic oligonucleotide
uuguugaauuugacaaauu

SEQ ID NO: 1353062 - RNA, 19 nt, Artificial Sequence
  Description of Artificial Sequence: Synthetic oligonucleotide
cuuguuuaagugacccaga

SEQ ID NO: 1353063 - RNA, 19 nt, Artificial Sequence
  Description of Artificial Sequence: Synthetic oligonucleotide
uucauguccuaagaccauc

SEQ ID NO: 1353064 - RNA, 19 nt, Artificial Sequence
  Description of Artificial Sequence: Synthetic oligonucleotide
cuauaacucguauuaggcu

SEQ ID NO: 1353065 - RNA, 19 nt, Artificial Sequence
  Description of Artificial Sequence: Synthetic oligonucleotide
uggcacaggugacuuacau

SEQ ID NO: 1353066 - RNA, 19 nt, Artificial Sequence
  Description of Artificial Sequence: Synthetic oligonucleotide
auggaguaauaaugucugu

SEQ ID NO: 1353067 - RNA, 19 nt, Artificial Sequence
  Description of Artificial Sequence: Synthetic oligonucleotide
caggcauaccuccuccaag

SEQ ID NO: 1353068 - RNA, 19 nt, Artificial Sequence
  Description of Artificial Sequence: Synthetic oligonucleotide
acaaauucgccaagcauua

SEQ ID NO: 1353069 - RNA, 19 nt, Artificial Sequence
  Description of Artificial Sequence: Synthetic oligonucleotide
uagacuugcucugcugugu

SEQ ID NO: 1353070 - RNA, 19 nt, Artificial Sequence
  Description of Artificial Sequence: Synthetic oligonucleotide
ccaaaugacguuugggauc

SEQ ID NO: 1353071 - RNA, 19 nt, Artificial Sequence
  Description of Artificial Sequence: Synthetic oligonucleotide
uagacccauaacuuccaua

SEQ ID NO: 1353072 - RNA, 19 nt, Artificial Sequence
  Description of Artificial Sequence: Synthetic oligonucleotide
gccgagaaguacuuccggg

SEQ ID NO: 1353073 - RNA, 19 nt, Artificial Sequence
  Description of Artificial Sequence: Synthetic oligonucleotide
ccgauuccauucaaaagag

SEQ ID NO: 1353074 - RNA, 19 nt, Artificial Sequence
  Description of Artificial Sequence: Synthetic oligonucleotide
cguauuaggcuucaauuug

SEQ ID NO: 1353075 - RNA, 19 nt, Artificial Sequence
  Description of Artificial Sequence: Synthetic oligonucleotide
gcaucaauaacaaccuuuc

SEQ ID NO: 1353076 - RNA, 19 nt, Artificial Sequence
  Description of Artificial Sequence: Synthetic oligonucleotide
ccauaggaacuccagcccg

SEQ ID NO: 1353077 - RNA, 19 nt, Artificial Sequence
  Description of Artificial Sequence: Synthetic oligonucleotide
ccauaacuuccauaggaac

SEQ ID NO: 1353078 - RNA, 19 nt, Artificial Sequence
  Description of Artificial Sequence: Synthetic oligonucleotide
cacaggugacuuacaugcc

SEQ ID NO: 1353079 - RNA, 19 nt, Artificial Sequence
  Description of Artificial Sequence: Synthetic oligonucleotide
auacaacaguauccaacau

SEQ ID NO: 1353080 - RNA, 19 nt, Artificial Sequence
  Description of Artificial Sequence: Synthetic oligonucleotide
caagucuaagaagucuguc

SEQ ID NO: 1353081 - RNA, 19 nt, Artificial Sequence
  Description of Artificial Sequence: Synthetic oligonucleotide
gaacacuggaucaacugcu

SEQ ID NO: 1353082 - RNA, 19 nt, Artificial Sequence
  Description of Artificial Sequence: Synthetic oligonucleotide
ggauagauggcuuguuuaa

SEQ ID NO: 1353083 - RNA, 19 nt, Artificial Sequence
  Description of Artificial Sequence: Synthetic oligonucleotide
aucagcccgauuccauuca

SEQ ID NO: 1353084 - RNA, 19 nt, Artificial Sequence
  Description of Artificial Sequence: Synthetic oligonucleotide
cucuuuuaccacugauuca

SEQ ID NO: 1353085 - RNA, 19 nt, Artificial Sequence
  Description of Artificial Sequence: Synthetic oligonucleotide
agcaacugcacaacugaga

SEQ ID NO: 1353086 - RNA, 19 nt, Artificial Sequence
  Description of Artificial Sequence: Synthetic oligonucleotide
ugagagugucgcugacagc

SEQ ID NO: 1353087 - RNA, 19 nt, Artificial Sequence
  Description of Artificial Sequence: Synthetic oligonucleotide
aggcuucaaagcucugcug

SEQ ID NO: 1353088 - RNA, 19 nt, Artificial Sequence
  Description of Artificial Sequence: Synthetic oligonucleotide
cucguauuaggcuucaauu

SEQ ID NO: 1353089 - RNA, 19 nt, Artificial Sequence
  Description of Artificial Sequence: Synthetic oligonucleotide
ggugacugugauaccaacc

SEQ ID NO: 1353090 - RNA, 19 nt, Artificial Sequence
  Description of Artificial Sequence: Synthetic oligonucleotide
guauuaaugccuggauaga

SEQ ID NO: 1353091 - RNA, 19 nt, Artificial Sequence
  Description of Artificial Sequence: Synthetic oligonucleotide
uccauccaacucuucuuau

SEQ ID NO: 1353092 - RNA, 19 nt, Artificial Sequence
  Description of Artificial Sequence: Synthetic oligonucleotide
accaucauauuagcauuga

SEQ ID NO: 1353093 - RNA, 19 nt, Artificial Sequence
  Description of Artificial Sequence: Synthetic oligonucleotide
augaaucagcccgauucca

SEQ ID NO: 1353094 - RNA, 19 nt, Artificial Sequence
  Description of Artificial Sequence: Synthetic oligonucleotide
aggaacaaugaaggaaaau

SEQ ID NO: 1353095 - RNA, 19 nt, Artificial Sequence
  Description of Artificial Sequence: Synthetic oligonucleotide
auacacugagagugucgcu

SEQ ID NO: 1353096 - RNA, 19 nt, Artificial Sequence
  Description of Artificial Sequence: Synthetic oligonucleotide
ucagcccgauuccauucaa

SEQ ID NO: 1353097 - RNA, 19 nt, Artificial Sequence
  Description of Artificial Sequence: Synthetic oligonucleotide
agcgccucacacucaacaa

SEQ ID NO: 1353098 - RNA, 19 nt, Artificial Sequence
  Description of Artificial Sequence: Synthetic oligonucleotide
gcccgauuccauucaaaag

SEQ ID NO: 1353099 - RNA, 19 nt, Artificial Sequence
  Description of Artificial Sequence: Synthetic oligonucleotide
uugcuaauucuggaaggua

SEQ ID NO: 1353100 - RNA, 19 nt, Artificial Sequence
  Description of Artificial Sequence: Synthetic oligonucleotide
uccaacauuuuggcuugga

SEQ ID NO: 1353101 - RNA, 19 nt, Artificial Sequence
  Description of Artificial Sequence: Synthetic oligonucleotide
gagaaccggcgaugaauca

SEQ ID NO: 1353102 - RNA, 19 nt, Artificial Sequence
  Description of Artificial Sequence: Synthetic oligonucleotide
guacuuccggguucccggc

SEQ ID NO: 1353103 - RNA, 19 nt, Artificial Sequence
  Description of Artificial Sequence: Synthetic oligonucleotide
acuccaauucuugcuaauu

SEQ ID NO: 1353104 - RNA, 19 nt, Artificial Sequence
  Description of Artificial Sequence: Synthetic oligonucleotide
uguggcaaccuggcggcga

SEQ ID NO: 1353105 - RNA, 19 nt, Artificial Sequence
  Description of Artificial Sequence: Synthetic oligonucleotide
acugagagugucgcugaca

SEQ ID NO: 1353106 - RNA, 19 nt, Artificial Sequence
  Description of Artificial Sequence: Synthetic oligonucleotide
gaagagauauagacuugcu

SEQ ID NO: 1353107 - RNA, 19 nt, Artificial Sequence
  Description of Artificial Sequence: Synthetic oligonucleotide
ggaguaauaaugucuguuu

SEQ ID NO: 1353108 - RNA, 19 nt, Artificial Sequence
  Description of Artificial Sequence: Synthetic oligonucleotide
ggguuguaaauguauuuua

SEQ ID NO: 1353109 - RNA, 19 nt, Artificial Sequence
  Description of Artificial Sequence: Synthetic oligonucleotide
cugcuucuacacugacacc

SEQ ID NO: 1353110 - RNA, 19 nt, Artificial Sequence
  Description of Artificial Sequence: Synthetic oligonucleotide
caaauucgccaagcauuag

SEQ ID NO: 1353111 - RNA, 19 nt, Artificial Sequence
  Description of Artificial Sequence: Synthetic oligonucleotide
cauguauuaaugccuggau

SEQ ID NO: 1353112 - RNA, 19 nt, Artificial Sequence
  Description of Artificial Sequence: Synthetic oligonucleotide
guagguggacccuggccca

SEQ ID NO: 1353113 - RNA, 19 nt, Artificial Sequence
  Description of Artificial Sequence: Synthetic oligonucleotide
caucuguagguggacccug

SEQ ID NO: 1353114 - RNA, 19 nt, Artificial Sequence
  Description of Artificial Sequence: Synthetic oligonucleotide
ucccuugccugugagcaau

SEQ ID NO: 1353115 - RNA, 19 nt, Artificial Sequence
  Description of Artificial Sequence: Synthetic oligonucleotide
agugucgcugacagcucuc

SEQ ID NO: 1353116 - RNA, 19 nt, Artificial Sequence
  Description of Artificial Sequence: Synthetic oligonucleotide
cucugacgguguaaucauc

SEQ ID NO: 1353117 - RNA, 19 nt, Artificial Sequence
  Description of Artificial Sequence: Synthetic oligonucleotide
gagagcagcgccucacacu

SEQ ID NO: 1353118 - RNA, 19 nt, Artificial Sequence
  Description of Artificial Sequence: Synthetic oligonucleotide
caacaaauucgccaagcau

SEQ ID NO: 1353119 - RNA, 19 nt, Artificial Sequence
  Description of Artificial Sequence: Synthetic oligonucleotide
agagugucgcugacagcuc

SEQ ID NO: 1353120 - RNA, 19 nt, Artificial Sequence
  Description of Artificial Sequence: Synthetic oligonucleotide
ggugacuuacaugccacca

SEQ ID NO: 1353121 - RNA, 19 nt, Artificial Sequence
  Description of Artificial Sequence: Synthetic oligonucleotide
ccggccauguuuuaacauc

SEQ ID NO: 1353122 - RNA, 19 nt, Artificial Sequence
  Description of Artificial Sequence: Synthetic oligonucleotide
cugugauaccaaccaacaa

SEQ ID NO: 1353123 - RNA, 19 nt, Artificial Sequence
  Description of Artificial Sequence: Synthetic oligonucleotide
gaaucagcccgauuccauu

SEQ ID NO: 1353124 - RNA, 19 nt, Artificial Sequence
  Description of Artificial Sequence: Synthetic oligonucleotide
gaccuggcuccgagaaccg

SEQ ID NO: 1353125 - RNA, 19 nt, Artificial Sequence
  Description of Artificial Sequence: Synthetic oligonucleotide
ugucuugguucauguccua

SEQ ID NO: 1353126 - RNA, 19 nt, Artificial Sequence
  Description of Artificial Sequence: Synthetic oligonucleotide
uccgagaaccggcgaugaa

SEQ ID NO: 1353127 - RNA, 19 nt, Artificial Sequence
  Description of Artificial Sequence: Synthetic oligonucleotide
gcucccuugccugugagca

SEQ ID NO: 1353128 - RNA, 19 nt, Artificial Sequence
  Description of Artificial Sequence: Synthetic oligonucleotide
ugugagcaauaggaacaau

SEQ ID NO: 1353129 - RNA, 19 nt, Artificial Sequence
  Description of Artificial Sequence: Synthetic oligonucleotide
aaccuggcggcgagagcag

SEQ ID NO: 1353130 - RNA, 19 nt, Artificial Sequence
  Description of Artificial Sequence: Synthetic oligonucleotide
ugucgcugacagcucucua

SEQ ID NO: 1353131 - RNA, 19 nt, Artificial Sequence
  Description of Artificial Sequence: Synthetic oligonucleotide
ccuuauuaacuccaauucu

SEQ ID NO: 1353132 - RNA, 19 nt, Artificial Sequence
  Description of Artificial Sequence: Synthetic oligonucleotide
cccugacuaaauaaacaga

SEQ ID NO: 1353133 - RNA, 19 nt, Artificial Sequence
  Description of Artificial Sequence: Synthetic oligonucleotide
agcucugcugaguguugau

SEQ ID NO: 1353134 - RNA, 19 nt, Artificial Sequence
  Description of Artificial Sequence: Synthetic oligonucleotide
cgagaaccggcgaugaauc

SEQ ID NO: 1353135 - RNA, 19 nt, Artificial Sequence
  Description of Artificial Sequence: Synthetic oligonucleotide
ccaacauugcugccaaaca

SEQ ID NO: 1353136 - RNA, 19 nt, Artificial Sequence
  Description of Artificial Sequence: Synthetic oligonucleotide
cugacgguguaaucaucaa

SEQ ID NO: 1353137 - RNA, 19 nt, Artificial Sequence
  Description of Artificial Sequence: Synthetic oligonucleotide
cacugagagugucgcugac

SEQ ID NO: 1353138 - RNA, 19 nt, Artificial Sequence
  Description of Artificial Sequence: Synthetic oligonucleotide
guucuuccaaaugacguuu

SEQ ID NO: 1353139 - RNA, 19 nt, Artificial Sequence
  Description of Artificial Sequence: Synthetic oligonucleotide
accuggcuccgagaaccgg

SEQ ID NO: 1353140 - RNA, 19 nt, Artificial Sequence
  Description of Artificial Sequence: Synthetic oligonucleotide
gggugacugugauaccaac

SEQ ID NO: 1353141 - RNA, 19 nt, Artificial Sequence
  Description of Artificial Sequence: Synthetic oligonucleotide
ggcuuguuuaagugaccca

SEQ ID NO: 1353142 - RNA, 19 nt, Artificial Sequence
  Description of Artificial Sequence: Synthetic oligonucleotide
cugugagcaauaggaacaa

SEQ ID NO: 1353143 - RNA, 19 nt, Artificial Sequence
  Description of Artificial Sequence: Synthetic oligonucleotide
uggcuccgagaaccggcga

SEQ ID NO: 1353144 - RNA, 19 nt, Artificial Sequence
  Description of Artificial Sequence: Synthetic oligonucleotide
gacguuugggauccugcuu

SEQ ID NO: 1353145 - RNA, 19 nt, Artificial Sequence
  Description of Artificial Sequence: Synthetic oligonucleotide
aacucguauuaggcuucaa

SEQ ID NO: 1353146 - RNA, 19 nt, Artificial Sequence
  Description of Artificial Sequence: Synthetic oligonucleotide
gugacccagauuugaaguu

SEQ ID NO: 1353147 - RNA, 19 nt, Artificial Sequence
  Description of Artificial Sequence: Synthetic oligonucleotide
ccuccaagucuaagaaguc

SEQ ID NO: 1353148 - RNA, 19 nt, Artificial Sequence
  Description of Artificial Sequence: Synthetic oligonucleotide
guggcauagcaaacacauc

SEQ ID NO: 1353149 - RNA, 19 nt, Artificial Sequence
  Description of Artificial Sequence: Synthetic oligonucleotide
cugcacaacugagauggaa

SEQ ID NO: 1353150 - RNA, 19 nt, Artificial Sequence
  Description of Artificial Sequence: Synthetic oligonucleotide
caucaaucacucugacggu

SEQ ID NO: 1353151 - RNA, 19 nt, Artificial Sequence
  Description of Artificial Sequence: Synthetic oligonucleotide
gucuugguucauguccuaa

SEQ ID NO: 1353152 - RNA, 19 nt, Artificial Sequence
  Description of Artificial Sequence: Synthetic oligonucleotide
ggcauaccuccuccaaguc

SEQ ID NO: 1353153 - RNA, 19 nt, Artificial Sequence
  Description of Artificial Sequence: Synthetic oligonucleotide
aaaugacguuugggauccu

SEQ ID NO: 1353154 - RNA, 19 nt, Artificial Sequence
  Description of Artificial Sequence: Synthetic oligonucleotide
caguaacuauaacucguau

SEQ ID NO: 1353155 - RNA, 19 nt, Artificial Sequence
  Description of Artificial Sequence: Synthetic oligonucleotide
gcauaccuccuccaagucu

SEQ ID NO: 1353156 - RNA, 19 nt, Artificial Sequence
  Description of Artificial Sequence: Synthetic oligonucleotide
gcauagcaaacacaucaau

SEQ ID NO: 1353157 - RNA, 19 nt, Artificial Sequence
  Description of Artificial Sequence: Synthetic oligonucleotide
gacuuacaugccaccacau

SEQ ID NO: 1353158 - RNA, 19 nt, Artificial Sequence
  Description of Artificial Sequence: Synthetic oligonucleotide
caaucacucugacggugua

SEQ ID NO: 1353159 - RNA, 19 nt, Artificial Sequence
  Description of Artificial Sequence: Synthetic oligonucleotide
ggugucaucuuaucuucuu

SEQ ID NO: 1353160 - RNA, 19 nt, Artificial Sequence
  Description of Artificial Sequence: Synthetic oligonucleotide
cacacucaacaaggaccug

SEQ ID NO: 1353161 - RNA, 19 nt, Artificial Sequence
  Description of Artificial Sequence: Synthetic oligonucleotide
gcuccgagaaccggcgaug

SEQ ID NO: 1353162 - RNA, 19 nt, Artificial Sequence
  Description of Artificial Sequence: Synthetic oligonucleotide
cuccgagaaccggcgauga

SEQ ID NO: 1353163 - RNA, 19 nt, Artificial Sequence
  Description of Artificial Sequence: Synthetic oligonucleotide
gcuuggaacacuggaucaa

SEQ ID NO: 1353164 - RNA, 19 nt, Artificial Sequence
  Description of Artificial Sequence: Synthetic oligonucleotide
cagcccgauuccauucaaa

SEQ ID NO: 1353165 - RNA, 19 nt, Artificial Sequence
  Description of Artificial Sequence: Synthetic oligonucleotide
gcaaccuggcggcgagagc

SEQ ID NO: 1353166 - RNA, 19 nt, Artificial Sequence
  Description of Artificial Sequence: Synthetic oligonucleotide
acugcacaacugagaugga

SEQ ID NO: 1353167 - RNA, 19 nt, Artificial Sequence
  Description of Artificial Sequence: Synthetic oligonucleotide
ccuugccugugagcaauag

SEQ ID NO: 1353168 - RNA, 19 nt, Artificial Sequence
  Description of Artificial Sequence: Synthetic oligonucleotide
gcugacagcucucuacauu

SEQ ID NO: 1353169 - RNA, 19 nt, Artificial Sequence
  Description of Artificial Sequence: Synthetic oligonucleotide
ccgagaaguacuuccgggu

SEQ ID NO: 1353170 - RNA, 19 nt, Artificial Sequence
  Description of Artificial Sequence: Synthetic oligonucleotide
gcccggccauguuuuaaca

SEQ ID NO: 1353171 - RNA, 19 nt, Artificial Sequence
  Description of Artificial Sequence: Synthetic oligonucleotide
cucuccgacaaggcuucaa

SEQ ID NO: 1353172 - RNA, 19 nt, Artificial Sequence
  Description of Artificial Sequence: Synthetic oligonucleotide
gugucgcugacagcucucu

SEQ ID NO: 1353173 - RNA, 19 nt, Artificial Sequence
  Description of Artificial Sequence: Synthetic oligonucleotide
ggcuccgagaaccggcgau

SEQ ID NO: 1353174 - RNA, 19 nt, Artificial Sequence
  Description of Artificial Sequence: Synthetic oligonucleotide
ccaucauauuagcauugau

SEQ ID NO: 1353175 - RNA, 19 nt, Artificial Sequence
  Description of Artificial Sequence: Synthetic oligonucleotide
cagcccggccauguuuuaa

SEQ ID NO: 1353176 - RNA, 19 nt, Artificial Sequence
  Description of Artificial Sequence: Synthetic oligonucleotide
gcggcgagagcagcgccuc

SEQ ID NO: 1353177 - RNA, 19 nt, Artificial Sequence
  Description of Artificial Sequence: Synthetic oligonucleotide
ccacugauucauuguguuu

SEQ ID NO: 1353178 - RNA, 19 nt, Artificial Sequence
  Description of Artificial Sequence: Synthetic oligonucleotide
cccggccauguuuuaacau

SEQ ID NO: 1353179 - RNA, 19 nt, Artificial Sequence
  Description of Artificial Sequence: Synthetic oligonucleotide
ggcgaugaaucagcccgau

SEQ ID NO: 1353180 - RNA, 19 nt, Artificial Sequence
  Description of Artificial Sequence: Synthetic oligonucleotide
ggcggcgagagcagcgccu

SEQ ID NO: 1353181 - RNA, 19 nt, Artificial Sequence
  Description of Artificial Sequence: Synthetic oligonucleotide
gcgaugaaucagcccgauu

SEQ ID NO: 1353182 - RNA, 19 nt, Artificial Sequence
  Description of Artificial Sequence: Synthetic oligonucleotide
ccuggauagauggcuuguu

SEQ ID NO: 1353183 - RNA, 19 nt, Artificial Sequence
  Description of Artificial Sequence: Synthetic oligonucleotide
ccacggcaggagcaucugu

SEQ ID NO: 1353184 - RNA, 19 nt, Artificial Sequence
  Description of Artificial Sequence: Synthetic oligonucleotide
cgccaagcauuagacccau

SEQ ID NO: 1353185 - RNA, 19 nt, Artificial Sequence
  Description of Artificial Sequence: Synthetic oligonucleotide
aaaaucaacacgcuuguac

SEQ ID NO: 1353186 - RNA, 19 nt, Artificial Sequence
  Description of Artificial Sequence: Synthetic oligonucleotide
aauugguaaaccugcaccc

SEQ ID NO: 1353187 - RNA, 19 nt, Artificial Sequence
  Description of Artificial Sequence: Synthetic oligonucleotide
aguggcuuaacguugagcc

SEQ ID NO: 1353188 - RNA, 19 nt, Artificial Sequence
  Description of Artificial Sequence: Synthetic oligonucleotide
aacuacuucauucaaagug

SEQ ID NO: 1353189 - RNA, 19 nt, Artificial Sequence
  Description of Artificial Sequence: Synthetic oligonucleotide
cuugaauugcaauagaucc

SEQ ID NO: 1353190 - RNA, 19 nt, Artificial Sequence
  Description of Artificial Sequence: Synthetic oligonucleotide
aguacaaccacacugaaug

SEQ ID NO: 1353191 - RNA, 19 nt, Artificial Sequence
  Description of Artificial Sequence: Synthetic oligonucleotide
aauagauccaagcuuagug

SEQ ID NO: 1353192 - RNA, 19 nt, Artificial Sequence
  Description of Artificial Sequence: Synthetic oligonucleotide
guugauguugaauauaacg

SEQ ID NO: 1353193 - RNA, 19 nt, Artificial Sequence
  Description of Artificial Sequence: Synthetic oligonucleotide
uugauguugaauauaacgc

SEQ ID NO: 1353194 - RNA, 19 nt, Artificial Sequence
  Description of Artificial Sequence: Synthetic oligonucleotide
aaaucaauagggucuacag

SEQ ID NO: 1353195 - RNA, 19 nt, Artificial Sequence
  Description of Artificial Sequence: Synthetic oligonucleotide
uuaacguugagccucuggg

SEQ ID NO: 1353196 - RNA, 19 nt, Artificial Sequence
  Description of Artificial Sequence: Synthetic oligonucleotide
uuaccuuuuacugacacgg

SEQ ID NO: 1353197 - RNA, 19 nt, Artificial Sequence
  Description of Artificial Sequence: Synthetic oligonucleotide
ugguacuuuacuaaaauca

SEQ ID NO: 1353198 - RNA, 19 nt, Artificial Sequence
  Description of Artificial Sequence: Synthetic oligonucleotide
ugauguugaauauaacgcg

SEQ ID NO: 1353199 - RNA, 19 nt, Artificial Sequence
  Description of Artificial Sequence: Synthetic oligonucleotide
uacuuuacuaaaaucaaca

SEQ ID NO: 1353200 - RNA, 19 nt, Artificial Sequence
  Description of Artificial Sequence: Synthetic oligonucleotide
uuuacugacacggugacag

SEQ ID NO: 1353201 - RNA, 19 nt, Artificial Sequence
  Description of Artificial Sequence: Synthetic oligonucleotide
aauauaacgcggcccaagg

SEQ ID NO: 1353202 - RNA, 19 nt, Artificial Sequence
  Description of Artificial Sequence: Synthetic oligonucleotide
uauuguagacaucagucag

SEQ ID NO: 1353203 - RNA, 19 nt, Artificial Sequence
  Description of Artificial Sequence: Synthetic oligonucleotide
aucucuagcauuuuaaugu

SEQ ID NO: 1353204 - RNA, 19 nt, Artificial Sequence
  Description of Artificial Sequence: Synthetic oligonucleotide
uuuaccgugguacacggag

SEQ ID NO: 1353205 - RNA, 19 nt, Artificial Sequence
  Description of Artificial Sequence: Synthetic oligonucleotide
aaaucaacacgcuuguacu

SEQ ID NO: 1353206 - RNA, 19 nt, Artificial Sequence
  Description of Artificial Sequence: Synthetic oligonucleotide
caagugaacaacaauccgg

SEQ ID NO: 1353207 - RNA, 19 nt, Artificial Sequence
  Description of Artificial Sequence: Synthetic oligonucleotide
auagauccaagcuuagugg

SEQ ID NO: 1353208 - RNA, 19 nt, Artificial Sequence
  Description of Artificial Sequence: Synthetic oligonucleotide
uuugacaugcucuccaucc

SEQ ID NO: 1353209 - RNA, 19 nt, Artificial Sequence
  Description of Artificial Sequence: Synthetic oligonucleotide
acuuuacuaaaaucaacac

SEQ ID NO: 1353210 - RNA, 19 nt, Artificial Sequence
  Description of Artificial Sequence: Synthetic oligonucleotide
aaugggaguucuuacacca

SEQ ID NO: 1353211 - RNA, 19 nt, Artificial Sequence
  Description of Artificial Sequence: Synthetic oligonucleotide
auaacuucgauccaggcau

SEQ ID NO: 1353212 - RNA, 19 nt, Artificial Sequence
  Description of Artificial Sequence: Synthetic oligonucleotide
aaguaguugauguugaaua

SEQ ID NO: 1353213 - RNA, 19 nt, Artificial Sequence
  Description of Artificial Sequence: Synthetic oligonucleotide
agcacaguuacccauauga

SEQ ID NO: 1353214 - RNA, 19 nt, Artificial Sequence
  Description of Artificial Sequence: Synthetic oligonucleotide
aauuguccucgcuucaagg

SEQ ID NO: 1353215 - RNA, 19 nt, Artificial Sequence
  Description of Artificial Sequence: Synthetic oligonucleotide
ggaugcauaacuucgaucc

SEQ ID NO: 1353216 - RNA, 19 nt, Artificial Sequence
  Description of Artificial Sequence: Synthetic oligonucleotide
aacaauccgggcuccagac

SEQ ID NO: 1353217 - RNA, 19 nt, Artificial Sequence
  Description of Artificial Sequence: Synthetic oligonucleotide
uugaauauaacgcggccca

SEQ ID NO: 1353218 - RNA, 19 nt, Artificial Sequence
  Description of Artificial Sequence: Synthetic oligonucleotide
uccuccauugcaaauacug

SEQ ID NO: 1353219 - RNA, 19 nt, Artificial Sequence
  Description of Artificial Sequence: Synthetic oligonucleotide
auuguccucgcuucaaggc

SEQ ID NO: 1353220 - RNA, 19 nt, Artificial Sequence
  Description of Artificial Sequence: Synthetic oligonucleotide
acuuuguuuaccgugguac

SEQ ID NO: 1353221 - RNA, 19 nt, Artificial Sequence
  Description of Artificial Sequence: Synthetic oligonucleotide
uuuacuucccacauggcaa

SEQ ID NO: 1353222 - RNA, 19 nt, Artificial Sequence
  Description of Artificial Sequence: Synthetic oligonucleotide
gauguugaauauaacgcgg

SEQ ID NO: 1353223 - RNA, 19 nt, Artificial Sequence
  Description of Artificial Sequence: Synthetic oligonucleotide
acacaugagauuuugagaa

SEQ ID NO: 1353224 - RNA, 19 nt, Artificial Sequence
  Description of Artificial Sequence: Synthetic oligonucleotide
caaacuuuguuuaccgugg

SEQ ID NO: 1353225 - RNA, 19 nt, Artificial Sequence
  Description of Artificial Sequence: Synthetic oligonucleotide
aagugaacaacaauccggg

SEQ ID NO: 1353226 - RNA, 19 nt, Artificial Sequence
  Description of Artificial Sequence: Synthetic oligonucleotide
auagguuuuggauaugaug

SEQ ID NO: 1353227 - RNA, 19 nt, Artificial Sequence
  Description of Artificial Sequence: Synthetic oligonucleotide
aaucaacacgcuuguacuc

SEQ ID NO: 1353228 - RNA, 19 nt, Artificial Sequence
  Description of Artificial Sequence: Synthetic oligonucleotide
aguuuuaucccaccauacg

SEQ ID NO: 1353229 - RNA, 19 nt, Artificial Sequence
  Description of Artificial Sequence: Synthetic oligonucleotide
auuuugagaagccaucaug

SEQ ID NO: 1353230 - RNA, 19 nt, Artificial Sequence
  Description of Artificial Sequence: Synthetic oligonucleotide
uuauuguagacaucaguca

SEQ ID NO: 1353231 - RNA, 19 nt, Artificial Sequence
  Description of Artificial Sequence: Synthetic oligonucleotide
ucuuacaccacuuacuaua

SEQ ID NO: 1353232 - RNA, 19 nt, Artificial Sequence
  Description of Artificial Sequence: Synthetic oligonucleotide
ugcaauucgugcuaguggc

SEQ ID NO: 1353233 - RNA, 19 nt, Artificial Sequence
  Description of Artificial Sequence: Synthetic oligonucleotide
aaaugcugcaauucgugcu

SEQ ID NO: 1353234 - RNA, 19 nt, Artificial Sequence
  Description of Artificial Sequence: Synthetic oligonucleotide
guagacaucagucagccca

SEQ ID NO: 1353235 - RNA, 19 nt, Artificial Sequence
  Description of Artificial Sequence: Synthetic oligonucleotide
uccauugcaaauacuggcc

SEQ ID NO: 1353236 - RNA, 19 nt, Artificial Sequence
  Description of Artificial Sequence: Synthetic oligonucleotide
ugaacaacaauccgggcuc

SEQ ID NO: 1353237 - RNA, 19 nt, Artificial Sequence
  Description of Artificial Sequence: Synthetic oligonucleotide
uuuuaucccaccauacggu

SEQ ID NO: 1353238 - RNA, 19 nt, Artificial Sequence
  Description of Artificial Sequence: Synthetic oligonucleotide
ugcaauagauccaagcuua

SEQ ID NO: 1353239 - RNA, 19 nt, Artificial Sequence
  Description of Artificial Sequence: Synthetic oligonucleotide
ugaagcacaaacuuuguuu

SEQ ID NO: 1353240 - RNA, 19 nt, Artificial Sequence
  Description of Artificial Sequence: Synthetic oligonucleotide
ucuuacuuccugcagcagc

SEQ ID NO: 1353241 - RNA, 19 nt, Artificial Sequence
  Description of Artificial Sequence: Synthetic oligonucleotide
auuuacuucccacauggca

SEQ ID NO: 1353242 - RNA, 19 nt, Artificial Sequence
  Description of Artificial Sequence: Synthetic oligonucleotide
uggguuuggaugcauaacu

SEQ ID NO: 1353243 - RNA, 19 nt, Artificial Sequence
  Description of Artificial Sequence: Synthetic oligonucleotide
aaguuuuaucccaccauac

SEQ ID NO: 1353244 - RNA, 19 nt, Artificial Sequence
  Description of Artificial Sequence: Synthetic oligonucleotide
ugagauuuugagaagccau

SEQ ID NO: 1353245 - RNA, 19 nt, Artificial Sequence
  Description of Artificial Sequence: Synthetic oligonucleotide
uauaacgcggcccaaggaa

SEQ ID NO: 1353246 - RNA, 19 nt, Artificial Sequence
  Description of Artificial Sequence: Synthetic oligonucleotide
aacguugagccucugggcu

SEQ ID NO: 1353247 - RNA, 19 nt, Artificial Sequence
  Description of Artificial Sequence: Synthetic oligonucleotide
aauacucagcuucuuugca

SEQ ID NO: 1353248 - RNA, 19 nt, Artificial Sequence
  Description of Artificial Sequence: Synthetic oligonucleotide
ugcauaacuucgauccagg

SEQ ID NO: 1353249 - RNA, 19 nt, Artificial Sequence
  Description of Artificial Sequence: Synthetic oligonucleotide
aaauuguccucgcuucaag

SEQ ID NO: 1353250 - RNA, 19 nt, Artificial Sequence
  Description of Artificial Sequence: Synthetic oligonucleotide
ugcaucugcagucaugaga

SEQ ID NO: 1353251 - RNA, 19 nt, Artificial Sequence
  Description of Artificial Sequence: Synthetic oligonucleotide
uguugaauauaacgcggcc

SEQ ID NO: 1353252 - RNA, 19 nt, Artificial Sequence
  Description of Artificial Sequence: Synthetic oligonucleotide
uguuuaccgugguacacgg

SEQ ID NO: 1353253 - RNA, 19 nt, Artificial Sequence
  Description of Artificial Sequence: Synthetic oligonucleotide
agcacaaacuuuguuuacc

SEQ ID NO: 1353254 - RNA, 19 nt, Artificial Sequence
  Description of Artificial Sequence: Synthetic oligonucleotide
agccaagugaacaacaauc

SEQ ID NO: 1353255 - RNA, 19 nt, Artificial Sequence
  Description of Artificial Sequence: Synthetic oligonucleotide
acuucaacaguguuuguga

SEQ ID NO: 1353256 - RNA, 19 nt, Artificial Sequence
  Description of Artificial Sequence: Synthetic oligonucleotide
caacuggaaaaucaauagg

SEQ ID NO: 1353257 - RNA, 19 nt, Artificial Sequence
  Description of Artificial Sequence: Synthetic oligonucleotide
uagauccaagcuuaguggc

SEQ ID NO: 1353258 - RNA, 19 nt, Artificial Sequence
  Description of Artificial Sequence: Synthetic oligonucleotide
uagcauuuuaauguuggcc

SEQ ID NO: 1353259 - RNA, 19 nt, Artificial Sequence
  Description of Artificial Sequence: Synthetic oligonucleotide
uccucugcucauuacauac

SEQ ID NO: 1353260 - RNA, 19 nt, Artificial Sequence
  Description of Artificial Sequence: Synthetic oligonucleotide
ucgggcaauacucagcuuc

SEQ ID NO: 1353261 - RNA, 19 nt, Artificial Sequence
  Description of Artificial Sequence: Synthetic oligonucleotide
uuuggaugcauaacuucga

SEQ ID NO: 1353262 - RNA, 19 nt, Artificial Sequence
  Description of Artificial Sequence: Synthetic oligonucleotide
uggggaucaaucucuagca

SEQ ID NO: 1353263 - RNA, 19 nt, Artificial Sequence
  Description of Artificial Sequence: Synthetic oligonucleotide
cuuaguggcuggcugagag

SEQ ID NO: 1353264 - RNA, 19 nt, Artificial Sequence
  Description of Artificial Sequence: Synthetic oligonucleotide
uuuaucccaccauacggug

SEQ ID NO: 1353265 - RNA, 19 nt, Artificial Sequence
  Description of Artificial Sequence: Synthetic oligonucleotide
ucaauagggucuacagcag

SEQ ID NO: 1353266 - RNA, 19 nt, Artificial Sequence
  Description of Artificial Sequence: Synthetic oligonucleotide
ucaauccugcauauuucag

SEQ ID NO: 1353267 - RNA, 19 nt, Artificial Sequence
  Description of Artificial Sequence: Synthetic oligonucleotide
gaaauugguaaaccugcac

SEQ ID NO: 1353268 - RNA, 19 nt, Artificial Sequence
  Description of Artificial Sequence: Synthetic oligonucleotide
augaugauuauuucuuuaa

SEQ ID NO: 1353269 - RNA, 19 nt, Artificial Sequence
  Description of Artificial Sequence: Synthetic oligonucleotide
auguugaauauaacgcggc

SEQ ID NO: 1353270 - RNA, 19 nt, Artificial Sequence
  Description of Artificial Sequence: Synthetic oligonucleotide
caccauacgguguugcucc

SEQ ID NO: 1353271 - RNA, 19 nt, Artificial Sequence
  Description of Artificial Sequence: Synthetic oligonucleotide
uuguuuaccgugguacacg

SEQ ID NO: 1353272 - RNA, 19 nt, Artificial Sequence
  Description of Artificial Sequence: Synthetic oligonucleotide
aucccugccuuuucaaugg

SEQ ID NO: 1353273 - RNA, 19 nt, Artificial Sequence
  Description of Artificial Sequence: Synthetic oligonucleotide
agugaacaacaauccgggc

SEQ ID NO: 1353274 - RNA, 19 nt, Artificial Sequence
  Description of Artificial Sequence: Synthetic oligonucleotide
aaugcugcaauucgugcua

SEQ ID NO: 1353275 - RNA, 19 nt, Artificial Sequence
  Description of Artificial Sequence: Synthetic oligonucleotide
cuacuucauucaaaguggg

SEQ ID NO: 1353276 - RNA, 19 nt, Artificial Sequence
  Description of Artificial Sequence: Synthetic oligonucleotide
uuacuaaaaucaacacgcu

SEQ ID NO: 1353277 - RNA, 19 nt, Artificial Sequence
  Description of Artificial Sequence: Synthetic oligonucleotide
uuacauacgggacguuuga

SEQ ID NO: 1353278 - RNA, 19 nt, Artificial Sequence
  Description of Artificial Sequence: Synthetic oligonucleotide
uccuugaauugcaauagau

SEQ ID NO: 1353279 - RNA, 19 nt, Artificial Sequence
  Description of Artificial Sequence: Synthetic oligonucleotide
cucgcuucaaggcaugagc

SEQ ID NO: 1353280 - RNA, 19 nt, Artificial Sequence
  Description of Artificial Sequence: Synthetic oligonucleotide
ugcuaguggcuuaacguug

SEQ ID NO: 1353281 - RNA, 19 nt, Artificial Sequence
  Description of Artificial Sequence: Synthetic oligonucleotide
ugagaggcaaggcugccca

SEQ ID NO: 1353282 - RNA, 19 nt, Artificial Sequence
  Description of Artificial Sequence: Synthetic oligonucleotide
ucgugcuaguggcuuaacg

SEQ ID NO: 1353283 - RNA, 19 nt, Artificial Sequence
  Description of Artificial Sequence: Synthetic oligonucleotide
caaaugcugcaauucgugc

SEQ ID NO: 1353284 - RNA, 19 nt, Artificial Sequence
  Description of Artificial Sequence: Synthetic oligonucleotide
uuacccauaugaauuuuau

SEQ ID NO: 1353285 - RNA, 19 nt, Artificial Sequence
  Description of Artificial Sequence: Synthetic oligonucleotide
ugcucauuacauacgggac

SEQ ID NO: 1353286 - RNA, 19 nt, Artificial Sequence
  Description of Artificial Sequence: Synthetic oligonucleotide
uggaugacauuccccaugu

SEQ ID NO: 1353287 - RNA, 19 nt, Artificial Sequence
  Description of Artificial Sequence: Synthetic oligonucleotide
guugaauauaacgcggccc

SEQ ID NO: 1353288 - RNA, 19 nt, Artificial Sequence
  Description of Artificial Sequence: Synthetic oligonucleotide
uacgggacguuugacaugc

SEQ ID NO: 1353289 - RNA, 19 nt, Artificial Sequence
  Description of Artificial Sequence: Synthetic oligonucleotide
cugcaauucgugcuagugg

SEQ ID NO: 1353290 - RNA, 19 nt, Artificial Sequence
  Description of Artificial Sequence: Synthetic oligonucleotide
cuuucauuccugaagcaca

SEQ ID NO: 1353291 - RNA, 19 nt, Artificial Sequence
  Description of Artificial Sequence: Synthetic oligonucleotide
uugguacuuuacuaaaauc

SEQ ID NO: 1353292 - RNA, 19 nt, Artificial Sequence
  Description of Artificial Sequence: Synthetic oligonucleotide
acgcuuguacucuucaucu

SEQ ID NO: 1353293 - RNA, 19 nt, Artificial Sequence
  Description of Artificial Sequence: Synthetic oligonucleotide
cuccagacaucccaauugg

SEQ ID NO: 1353294 - RNA, 19 nt, Artificial Sequence
  Description of Artificial Sequence: Synthetic oligonucleotide
cuuaacguugagccucugg

SEQ ID NO: 1353295 - RNA, 19 nt, Artificial Sequence
  Description of Artificial Sequence: Synthetic oligonucleotide
ugacauuccccauguagac

SEQ ID NO: 1353296 - RNA, 19 nt, Artificial Sequence
  Description of Artificial Sequence: Synthetic oligonucleotide
ggcccaaagaaacagcucc

SEQ ID NO: 1353297 - RNA, 19 nt, Artificial Sequence
  Description of Artificial Sequence: Synthetic oligonucleotide
aacacgcuuguacucuuca

SEQ ID NO: 1353298 - RNA, 19 nt, Artificial Sequence
  Description of Artificial Sequence: Synthetic oligonucleotide
uacagcauaugcaggcgca

SEQ ID NO: 1353299 - RNA, 19 nt, Artificial Sequence
  Description of Artificial Sequence: Synthetic oligonucleotide
uuguccucgcuucaaggca

SEQ ID NO: 1353300 - RNA, 19 nt, Artificial Sequence
  Description of Artificial Sequence: Synthetic oligonucleotide
aaacuuuguuuaccguggu

SEQ ID NO: 1353301 - RNA, 19 nt, Artificial Sequence
  Description of Artificial Sequence: Synthetic oligonucleotide
uucagaaccuuagguacag

SEQ ID NO: 1353302 - RNA, 19 nt, Artificial Sequence
  Description of Artificial Sequence: Synthetic oligonucleotide
uaacguugagccucugggc

SEQ ID NO: 1353303 - RNA, 19 nt, Artificial Sequence
  Description of Artificial Sequence: Synthetic oligonucleotide
gaauauaacgcggcccaag

SEQ ID NO: 1353304 - RNA, 19 nt, Artificial Sequence
  Description of Artificial Sequence: Synthetic oligonucleotide
gcucauuacauacgggacg

SEQ ID NO: 1353305 - RNA, 19 nt, Artificial Sequence
  Description of Artificial Sequence: Synthetic oligonucleotide
acauacgggacguuugaca

SEQ ID NO: 1353306 - RNA, 19 nt, Artificial Sequence
  Description of Artificial Sequence: Synthetic oligonucleotide
acaguuacccauaugaauu

SEQ ID NO: 1353307 - RNA, 19 nt, Artificial Sequence
  Description of Artificial Sequence: Synthetic oligonucleotide
uugacaugcucuccauccc

SEQ ID NO: 1353308 - RNA, 19 nt, Artificial Sequence
  Description of Artificial Sequence: Synthetic oligonucleotide
cauugcaaauacuggccag

SEQ ID NO: 1353309 - RNA, 19 nt, Artificial Sequence
  Description of Artificial Sequence: Synthetic oligonucleotide
caggaaugacuucaucugc

SEQ ID NO: 1353310 - RNA, 19 nt, Artificial Sequence
  Description of Artificial Sequence: Synthetic oligonucleotide
uuuguuuaccgugguacac

SEQ ID NO: 1353311 - RNA, 19 nt, Artificial Sequence
  Description of Artificial Sequence: Synthetic oligonucleotide
ugacaugcucuccauccca

SEQ ID NO: 1353312 - RNA, 19 nt, Artificial Sequence
  Description of Artificial Sequence: Synthetic oligonucleotide
acgcgaaaggcugucaagg

SEQ ID NO: 1353313 - RNA, 19 nt, Artificial Sequence
  Description of Artificial Sequence: Synthetic oligonucleotide
uggauaugaugauuauuuc

SEQ ID NO: 1353314 - RNA, 19 nt, Artificial Sequence
  Description of Artificial Sequence: Synthetic oligonucleotide
uucgauccaggcaucuuac

SEQ ID NO: 1353315 - RNA, 19 nt, Artificial Sequence
  Description of Artificial Sequence: Synthetic oligonucleotide
gauaugaugauuauuucuu

SEQ ID NO: 1353316 - RNA, 19 nt, Artificial Sequence
  Description of Artificial Sequence: Synthetic oligonucleotide
uuuuggauaugaugauuau

SEQ ID NO: 1353317 - RNA, 19 nt, Artificial Sequence
  Description of Artificial Sequence: Synthetic oligonucleotide
auuacauacgggacguuug

SEQ ID NO: 1353318 - RNA, 19 nt, Artificial Sequence
  Description of Artificial Sequence: Synthetic oligonucleotide
gaaccuuagguacagcaua

SEQ ID NO: 1353319 - RNA, 19 nt, Artificial Sequence
  Description of Artificial Sequence: Synthetic oligonucleotide
caaugggaguucuuacacc

SEQ ID NO: 1353320 - RNA, 19 nt, Artificial Sequence
  Description of Artificial Sequence: Synthetic oligonucleotide
ucauucaaaguggguuugg

SEQ ID NO: 1353321 - RNA, 19 nt, Artificial Sequence
  Description of Artificial Sequence: Synthetic oligonucleotide
ccaucauucagugugcugg

SEQ ID NO: 1353322 - RNA, 19 nt, Artificial Sequence
  Description of Artificial Sequence: Synthetic oligonucleotide
agggucuacagcagcaucg

SEQ ID NO: 1353323 - RNA, 19 nt, Artificial Sequence
  Description of Artificial Sequence: Synthetic oligonucleotide
aguucuuacaccacuuacu

SEQ ID NO: 1353324 - RNA, 19 nt, Artificial Sequence
  Description of Artificial Sequence: Synthetic oligonucleotide
gauccaagcuuaguggcug

SEQ ID NO: 1353325 - RNA, 19 nt, Artificial Sequence
  Description of Artificial Sequence: Synthetic oligonucleotide
cauaacuucgauccaggca

SEQ ID NO: 1353326 - RNA, 19 nt, Artificial Sequence
  Description of Artificial Sequence: Synthetic oligonucleotide
caucccaauuggauggccc

SEQ ID NO: 1353327 - RNA, 19 nt, Artificial Sequence
  Description of Artificial Sequence: Synthetic oligonucleotide
caccacuuacuauaacuac

SEQ ID NO: 1353328 - RNA, 19 nt, Artificial Sequence
  Description of Artificial Sequence: Synthetic oligonucleotide
ugaaugcuucauuuacuuc

SEQ ID NO: 1353329 - RNA, 19 nt, Artificial Sequence
  Description of Artificial Sequence: Synthetic oligonucleotide
uuguacugucaauagguuu

SEQ ID NO: 1353330 - RNA, 19 nt, Artificial Sequence
  Description of Artificial Sequence: Synthetic oligonucleotide
uucaacaguguuugugauc

SEQ ID NO: 1353331 - RNA, 19 nt, Artificial Sequence
  Description of Artificial Sequence: Synthetic oligonucleotide
agcauaugcaggcgcaacu

SEQ ID NO: 1353332 - RNA, 19 nt, Artificial Sequence
  Description of Artificial Sequence: Synthetic oligonucleotide
gaguggaaauugguaaacc

SEQ ID NO: 1353333 - RNA, 19 nt, Artificial Sequence
  Description of Artificial Sequence: Synthetic oligonucleotide
uaugcaggcgcaacuggaa

SEQ ID NO: 1353334 - RNA, 19 nt, Artificial Sequence
  Description of Artificial Sequence: Synthetic oligonucleotide
ugucuacagcuucucaauc

SEQ ID NO: 1353335 - RNA, 19 nt, Artificial Sequence
  Description of Artificial Sequence: Synthetic oligonucleotide
caagcuuaguggcuggcug

SEQ ID NO: 1353336 - RNA, 19 nt, Artificial Sequence
  Description of Artificial Sequence: Synthetic oligonucleotide
guucuuacaccacuuacua

SEQ ID NO: 1353337 - RNA, 19 nt, Artificial Sequence
  Description of Artificial Sequence: Synthetic oligonucleotide
aauggcuccuugaauugca

SEQ ID NO: 1353338 - RNA, 19 nt, Artificial Sequence
  Description of Artificial Sequence: Synthetic oligonucleotide
cacaugagauuuugagaag

SEQ ID NO: 1353339 - RNA, 19 nt, Artificial Sequence
  Description of Artificial Sequence: Synthetic oligonucleotide
gacgcgaaaggcugucaag

SEQ ID NO: 1353340 - RNA, 19 nt, Artificial Sequence
  Description of Artificial Sequence: Synthetic oligonucleotide
uuggaugcauaacuucgau

SEQ ID NO: 1353341 - RNA, 19 nt, Artificial Sequence
  Description of Artificial Sequence: Synthetic oligonucleotide
caauccugcauauuucaga

SEQ ID NO: 1353342 - RNA, 19 nt, Artificial Sequence
  Description of Artificial Sequence: Synthetic oligonucleotide
gagauuuugagaagccauc

SEQ ID NO: 1353343 - RNA, 19 nt, Artificial Sequence
  Description of Artificial Sequence: Synthetic oligonucleotide
ucucuagcauuuuaauguu

SEQ ID NO: 1353344 - RNA, 19 nt, Artificial Sequence
  Description of Artificial Sequence: Synthetic oligonucleotide
acguuugacaugcucucca

SEQ ID NO: 1353345 - RNA, 19 nt, Artificial Sequence
  Description of Artificial Sequence: Synthetic oligonucleotide
cagaaccuuagguacagca

SEQ ID NO: 1353346 - RNA, 19 nt, Artificial Sequence
  Description of Artificial Sequence: Synthetic oligonucleotide
accacuuacuauaacuacu

SEQ ID NO: 1353347 - RNA, 19 nt, Artificial Sequence
  Description of Artificial Sequence: Synthetic oligonucleotide
caucauucagugugcuggc

SEQ ID NO: 1353348 - RNA, 19 nt, Artificial Sequence
  Description of Artificial Sequence: Synthetic oligonucleotide
uuacugacacggugacagg

SEQ ID NO: 1353349 - RNA, 19 nt, Artificial Sequence
  Description of Artificial Sequence: Synthetic oligonucleotide
uggcuuaacguugagccuc

SEQ ID NO: 1353350 - RNA, 19 nt, Artificial Sequence
  Description of Artificial Sequence: Synthetic oligonucleotide
uguaagagcugauggcaua

SEQ ID NO: 1353351 - RNA, 19 nt, Artificial Sequence
  Description of Artificial Sequence: Synthetic oligonucleotide
cacuucaacaguguuugug

SEQ ID NO: 1353352 - RNA, 19 nt, Artificial Sequence
  Description of Artificial Sequence: Synthetic oligonucleotide
auauaacgcggcccaagga

SEQ ID NO: 1353353 - RNA, 19 nt, Artificial Sequence
  Description of Artificial Sequence: Synthetic oligonucleotide
uggaugcauaacuucgauc

SEQ ID NO: 1353354 - RNA, 19 nt, Artificial Sequence
  Description of Artificial Sequence: Synthetic oligonucleotide
cacccaaugcugcuugccg

SEQ ID NO: 1353355 - RNA, 19 nt, Artificial Sequence
  Description of Artificial Sequence: Synthetic oligonucleotide
cugguuuaccuuuuacuga

SEQ ID NO: 1353356 - RNA, 19 nt, Artificial Sequence
  Description of Artificial Sequence: Synthetic oligonucleotide
cugccuuuucaauggcucc

SEQ ID NO: 1353357 - RNA, 19 nt, Artificial Sequence
  Description of Artificial Sequence: Synthetic oligonucleotide
aauagguuuuggauaugau

SEQ ID NO: 1353358 - RNA, 19 nt, Artificial Sequence
  Description of Artificial Sequence: Synthetic oligonucleotide
cacauccugauguccacac

SEQ ID NO: 1353359 - RNA, 19 nt, Artificial Sequence
  Description of Artificial Sequence: Synthetic oligonucleotide
auccgggcuccagacaucc

SEQ ID NO: 1353360 - RNA, 19 nt, Artificial Sequence
  Description of Artificial Sequence: Synthetic oligonucleotide
cucuagcauuuuaauguug

SEQ ID NO: 1353361 - RNA, 19 nt, Artificial Sequence
  Description of Artificial Sequence: Synthetic oligonucleotide
caugggacugucuacagcu

SEQ ID NO: 1353362 - RNA, 19 nt, Artificial Sequence
  Description of Artificial Sequence: Synthetic oligonucleotide
aucaacacgcuuguacucu

SEQ ID NO: 1353363 - RNA, 19 nt, Artificial Sequence
  Description of Artificial Sequence: Synthetic oligonucleotide
uccagacaucccaauugga

SEQ ID NO: 1353364 - RNA, 19 nt, Artificial Sequence
  Description of Artificial Sequence: Synthetic oligonucleotide
aauucgugcuaguggcuua

SEQ ID NO: 1353365 - RNA, 19 nt, Artificial Sequence
  Description of Artificial Sequence: Synthetic oligonucleotide
aacuuuguuuaccguggua

SEQ ID NO: 1353366 - RNA, 19 nt, Artificial Sequence
  Description of Artificial Sequence: Synthetic oligonucleotide
uuaccgugguacacggagu

SEQ ID NO: 1353367 - RNA, 19 nt, Artificial Sequence
  Description of Artificial Sequence: Synthetic oligonucleotide
ucggcaaaugcugcaauuc

SEQ ID NO: 1353368 - RNA, 19 nt, Artificial Sequence
  Description of Artificial Sequence: Synthetic oligonucleotide
ugacgcgaaaggcugucaa

SEQ ID NO: 1353369 - RNA, 19 nt, Artificial Sequence
  Description of Artificial Sequence: Synthetic oligonucleotide
cuuuguuuaccgugguaca

SEQ ID NO: 1353370 - RNA, 19 nt, Artificial Sequence
  Description of Artificial Sequence: Synthetic oligonucleotide
uguccucgcuucaaggcau

SEQ ID NO: 1353371 - RNA, 19 nt, Artificial Sequence
  Description of Artificial Sequence: Synthetic oligonucleotide
auaacgcggcccaaggaag

SEQ ID NO: 1353372 - RNA, 19 nt, Artificial Sequence
  Description of Artificial Sequence: Synthetic oligonucleotide
uuacaccacuuacuauaac

SEQ ID NO: 1353373 - RNA, 19 nt, Artificial Sequence
  Description of Artificial Sequence: Synthetic oligonucleotide
ggauaugaugauuauuucu

SEQ ID NO: 1353374 - RNA, 19 nt, Artificial Sequence
  Description of Artificial Sequence: Synthetic oligonucleotide
acaucccaauuggauggcc

SEQ ID NO: 1353375 - RNA, 19 nt, Artificial Sequence
  Description of Artificial Sequence: Synthetic oligonucleotide
aaacuucccugcaucccag

SEQ ID NO: 1353376 - RNA, 19 nt, Artificial Sequence
  Description of Artificial Sequence: Synthetic oligonucleotide
gcuccagacaucccaauug

SEQ ID NO: 1353377 - RNA, 19 nt, Artificial Sequence
  Description of Artificial Sequence: Synthetic oligonucleotide
caaacuucccugcauccca

SEQ ID NO: 1353378 - RNA, 19 nt, Artificial Sequence
  Description of Artificial Sequence: Synthetic oligonucleotide
ggcauaaguguccugcuca

SEQ ID NO: 1353379 - RNA, 19 nt, Artificial Sequence
  Description of Artificial Sequence: Synthetic oligonucleotide
ugcaggcgcaacuggaaaa

SEQ ID NO: 1353380 - RNA, 19 nt, Artificial Sequence
  Description of Artificial Sequence: Synthetic oligonucleotide
aaccuuagguacagcauau

SEQ ID NO: 1353381 - RNA, 19 nt, Artificial Sequence
  Description of Artificial Sequence: Synthetic oligonucleotide
cuuugguacuuuacuaaaa

SEQ ID NO: 1353382 - RNA, 19 nt, Artificial Sequence
  Description of Artificial Sequence: Synthetic oligonucleotide
auugguaaaccugcaccca

SEQ ID NO: 1353383 - RNA, 19 nt, Artificial Sequence
  Description of Artificial Sequence: Synthetic oligonucleotide
uguagacaucagucagccc

SEQ ID NO: 1353384 - RNA, 19 nt, Artificial Sequence
  Description of Artificial Sequence: Synthetic oligonucleotide
uaacgcggcccaaggaagu

SEQ ID NO: 1353385 - RNA, 19 nt, Artificial Sequence
  Description of Artificial Sequence: Synthetic oligonucleotide
auacuggccagaccaaauu

SEQ ID NO: 1353386 - RNA, 19 nt, Artificial Sequence
  Description of Artificial Sequence: Synthetic oligonucleotide
cagucagcccaucuuuuac

SEQ ID NO: 1353387 - RNA, 19 nt, Artificial Sequence
  Description of Artificial Sequence: Synthetic oligonucleotide
aacgcggcccaaggaaguc

SEQ ID NO: 1353388 - RNA, 19 nt, Artificial Sequence
  Description of Artificial Sequence: Synthetic oligonucleotide
ugguaaaccugcacccaau

SEQ ID NO: 1353389 - RNA, 19 nt, Artificial Sequence
  Description of Artificial Sequence: Synthetic oligonucleotide
gguaaaccugcacccaaug

SEQ ID NO: 1353390 - RNA, 19 nt, Artificial Sequence
  Description of Artificial Sequence: Synthetic oligonucleotide
gguacuuuacuaaaaucaa

SEQ ID NO: 1353391 - RNA, 19 nt, Artificial Sequence
  Description of Artificial Sequence: Synthetic oligonucleotide
agaccaaauuguccucgcu

SEQ ID NO: 1353392 - RNA, 19 nt, Artificial Sequence
  Description of Artificial Sequence: Synthetic oligonucleotide
accucgggcaauacucagc

SEQ ID NO: 1353393 - RNA, 19 nt, Artificial Sequence
  Description of Artificial Sequence: Synthetic oligonucleotide
agccaugcugacgcgaaag

SEQ ID NO: 1353394 - RNA, 19 nt, Artificial Sequence
  Description of Artificial Sequence: Synthetic oligonucleotide
ugaucacaugggacugucu

SEQ ID NO: 1353395 - RNA, 19 nt, Artificial Sequence
  Description of Artificial Sequence: Synthetic oligonucleotide
ccaaugggaguucuuacac

SEQ ID NO: 1353396 - RNA, 19 nt, Artificial Sequence
  Description of Artificial Sequence: Synthetic oligonucleotide
aacuucgauccaggcaucu

SEQ ID NO: 1353397 - RNA, 19 nt, Artificial Sequence
  Description of Artificial Sequence: Synthetic oligonucleotide
auacgggacguuugacaug

SEQ ID NO: 1353398 - RNA, 19 nt, Artificial Sequence
  Description of Artificial Sequence: Synthetic oligonucleotide
gguacagcauaugcaggcg

SEQ ID NO: 1353399 - RNA, 19 nt, Artificial Sequence
  Description of Artificial Sequence: Synthetic oligonucleotide
guuugacaugcucuccauc

SEQ ID NO: 1353400 - RNA, 19 nt, Artificial Sequence
  Description of Artificial Sequence: Synthetic oligonucleotide
ucaauagguuuuggauaug

SEQ ID NO: 1353401 - RNA, 19 nt, Artificial Sequence
  Description of Artificial Sequence: Synthetic oligonucleotide
caucccaccugccaccauc

SEQ ID NO: 1353402 - RNA, 19 nt, Artificial Sequence
  Description of Artificial Sequence: Synthetic oligonucleotide
auaugcaggcgcaacugga

SEQ ID NO: 1353403 - RNA, 19 nt, Artificial Sequence
  Description of Artificial Sequence: Synthetic oligonucleotide
gauuuugagaagccaucau

SEQ ID NO: 1353404 - RNA, 19 nt, Artificial Sequence
  Description of Artificial Sequence: Synthetic oligonucleotide
aucggcaaaugcugcaauu

SEQ ID NO: 1353405 - RNA, 19 nt, Artificial Sequence
  Description of Artificial Sequence: Synthetic oligonucleotide
gaaggauccaaugggaguu

SEQ ID NO: 1353406 - RNA, 19 nt, Artificial Sequence
  Description of Artificial Sequence: Synthetic oligonucleotide
ccuuuuacugacacgguga

SEQ ID NO: 1353407 - RNA, 19 nt, Artificial Sequence
  Description of Artificial Sequence: Synthetic oligonucleotide
gaacaacaauccgggcucc

SEQ ID NO: 1353408 - RNA, 19 nt, Artificial Sequence
  Description of Artificial Sequence: Synthetic oligonucleotide
uacauacgggacguuugac

SEQ ID NO: 1353409 - RNA, 19 nt, Artificial Sequence
  Description of Artificial Sequence: Synthetic oligonucleotide
ugcaucccaggcuucuuua

SEQ ID NO: 1353410 - RNA, 19 nt, Artificial Sequence
  Description of Artificial Sequence: Synthetic oligonucleotide
cauacgggacguuugacau

SEQ ID NO: 1353411 - RNA, 19 nt, Artificial Sequence
  Description of Artificial Sequence: Synthetic oligonucleotide
gaaguaguugauguugaau

SEQ ID NO: 1353412 - RNA, 19 nt, Artificial Sequence
  Description of Artificial Sequence: Synthetic oligonucleotide
gcgaaaggcugucaagggc

SEQ ID NO: 1353413 - RNA, 19 nt, Artificial Sequence
  Description of Artificial Sequence: Synthetic oligonucleotide
agcuuaguggcuggcugag

SEQ ID NO: 1353414 - RNA, 19 nt, Artificial Sequence
  Description of Artificial Sequence: Synthetic oligonucleotide
gaaaaucaauagggucuac

SEQ ID NO: 1353415 - RNA, 19 nt, Artificial Sequence
  Description of Artificial Sequence: Synthetic oligonucleotide
ucaacacgcuuguacucuu

SEQ ID NO: 1353416 - RNA, 19 nt, Artificial Sequence
  Description of Artificial Sequence: Synthetic oligonucleotide
aauccgggcuccagacauc

SEQ ID NO: 1353417 - RNA, 19 nt, Artificial Sequence
  Description of Artificial Sequence: Synthetic oligonucleotide
ucccaggcuucuuuacuuc

SEQ ID NO: 1353418 - RNA, 19 nt, Artificial Sequence
  Description of Artificial Sequence: Synthetic oligonucleotide
uaacuucgauccaggcauc

SEQ ID NO: 1353419 - RNA, 19 nt, Artificial Sequence
  Description of Artificial Sequence: Synthetic oligonucleotide
ucgauccaggcaucuuacu

SEQ ID NO: 1353420 - RNA, 19 nt, Artificial Sequence
  Description of Artificial Sequence: Synthetic oligonucleotide
guaguugauguugaauaua

SEQ ID NO: 1353421 - RNA, 19 nt, Artificial Sequence
  Description of Artificial Sequence: Synthetic oligonucleotide
gucagcccaucuuuuacaa

SEQ ID NO: 1353422 - RNA, 19 nt, Artificial Sequence
  Description of Artificial Sequence: Synthetic oligonucleotide
aacaacaauccgggcucca

SEQ ID NO: 1353423 - RNA, 19 nt, Artificial Sequence
  Description of Artificial Sequence: Synthetic oligonucleotide
gcuuucauuccugaagcac

SEQ ID NO: 1353424 - RNA, 19 nt, Artificial Sequence
  Description of Artificial Sequence: Synthetic oligonucleotide
cuucgauccaggcaucuua

SEQ ID NO: 1353425 - RNA, 19 nt, Artificial Sequence
  Description of Artificial Sequence: Synthetic oligonucleotide
acauccugauguccacaca

SEQ ID NO: 1353426 - RNA, 19 nt, Artificial Sequence
  Description of Artificial Sequence: Synthetic oligonucleotide
ugaauauaacgcggcccaa

SEQ ID NO: 1353427 - RNA, 19 nt, Artificial Sequence
  Description of Artificial Sequence: Synthetic oligonucleotide
agauccaagcuuaguggcu

SEQ ID NO: 1353428 - RNA, 19 nt, Artificial Sequence
  Description of Artificial Sequence: Synthetic oligonucleotide
aggcgcaacuggaaaauca

SEQ ID NO: 1353429 - RNA, 19 nt, Artificial Sequence
  Description of Artificial Sequence: Synthetic oligonucleotide
ggacguuugacaugcucuc

SEQ ID NO: 1353430 - RNA, 19 nt, Artificial Sequence
  Description of Artificial Sequence: Synthetic oligonucleotide
ugcuugccguguaggggcc

SEQ ID NO: 1353431 - RNA, 19 nt, Artificial Sequence
  Description of Artificial Sequence: Synthetic oligonucleotide
gcauaacuucgauccaggc

SEQ ID NO: 1353432 - RNA, 19 nt, Artificial Sequence
  Description of Artificial Sequence: Synthetic oligonucleotide
gccaugcugacgcgaaagg

SEQ ID NO: 1353433 - RNA, 19 nt, Artificial Sequence
  Description of Artificial Sequence: Synthetic oligonucleotide
uuacuuccugcagcagccc

SEQ ID NO: 1353434 - RNA, 19 nt, Artificial Sequence
  Description of Artificial Sequence: Synthetic oligonucleotide
acgcggcccaaggaagucc

SEQ ID NO: 1353435 - RNA, 19 nt, Artificial Sequence
  Description of Artificial Sequence: Synthetic oligonucleotide
cagagcagccaugcugacg

SEQ ID NO: 1353436 - RNA, 19 nt, Artificial Sequence
  Description of Artificial Sequence: Synthetic oligonucleotide
guguccugcucaccucggg

SEQ ID NO: 1353437 - RNA, 19 nt, Artificial Sequence
  Description of Artificial Sequence: Synthetic oligonucleotide
uccaagcuuaguggcuggc

SEQ ID NO: 1353438 - RNA, 19 nt, Artificial Sequence
  Description of Artificial Sequence: Synthetic oligonucleotide
augcaggcgcaacuggaaa

SEQ ID NO: 1353439 - RNA, 19 nt, Artificial Sequence
  Description of Artificial Sequence: Synthetic oligonucleotide
ugcugacgcgaaaggcugu

SEQ ID NO: 1353440 - RNA, 19 nt, Artificial Sequence
  Description of Artificial Sequence: Synthetic oligonucleotide
cacggaguggaaauuggua

SEQ ID NO: 1353441 - RNA, 19 nt, Artificial Sequence
  Description of Artificial Sequence: Synthetic oligonucleotide
cucgaagcagaggccggcg

SEQ ID NO: 1353442 - RNA, 19 nt, Artificial Sequence
  Description of Artificial Sequence: Synthetic oligonucleotide
cagcuuugguacuuuacua

SEQ ID NO: 1353443 - RNA, 19 nt, Artificial Sequence
  Description of Artificial Sequence: Synthetic oligonucleotide
aggcaugagccaagugaac

SEQ ID NO: 1353444 - RNA, 19 nt, Artificial Sequence
  Description of Artificial Sequence: Synthetic oligonucleotide
aaaggcugucaagggcaga

SEQ ID NO: 1353445 - RNA, 19 nt, Artificial Sequence
  Description of Artificial Sequence: Synthetic oligonucleotide
cauguagacuuccuuuacu

SEQ ID NO: 1353446 - RNA, 19 nt, Artificial Sequence
  Description of Artificial Sequence: Synthetic oligonucleotide
cucaaucagcacagcagaa

SEQ ID NO: 1353447 - RNA, 19 nt, Artificial Sequence
  Description of Artificial Sequence: Synthetic oligonucleotide
cucauuacauacgggacgu

SEQ ID NO: 1353448 - RNA, 19 nt, Artificial Sequence
  Description of Artificial Sequence: Synthetic oligonucleotide
ucacuucaacaguguuugu

SEQ ID NO: 1353449 - RNA, 19 nt, Artificial Sequence
  Description of Artificial Sequence: Synthetic oligonucleotide
caccacaucugguuuaccu

SEQ ID NO: 1353450 - RNA, 19 nt, Artificial Sequence
  Description of Artificial Sequence: Synthetic oligonucleotide
auccugauguccacacaug

SEQ ID NO: 1353451 - RNA, 19 nt, Artificial Sequence
  Description of Artificial Sequence: Synthetic oligonucleotide
accuuagguacagcauaug

SEQ ID NO: 1353452 - RNA, 19 nt, Artificial Sequence
  Description of Artificial Sequence: Synthetic oligonucleotide
gccaguacaaccacacuga

SEQ ID NO: 1353453 - RNA, 19 nt, Artificial Sequence
  Description of Artificial Sequence: Synthetic oligonucleotide
auacgguguugcuccucug

SEQ ID NO: 1353454 - RNA, 19 nt, Artificial Sequence
  Description of Artificial Sequence: Synthetic oligonucleotide
acacggaguggaaauuggu

SEQ ID NO: 1353455 - RNA, 19 nt, Artificial Sequence
  Description of Artificial Sequence: Synthetic oligonucleotide
aguuacccauaugaauuuu

SEQ ID NO: 1353456 - RNA, 19 nt, Artificial Sequence
  Description of Artificial Sequence: Synthetic oligonucleotide
ugcugcaauucgugcuagu

SEQ ID NO: 1353457 - RNA, 19 nt, Artificial Sequence
  Description of Artificial Sequence: Synthetic oligonucleotide
cuccuugaauugcaauaga

SEQ ID NO: 1353458 - RNA, 19 nt, Artificial Sequence
  Description of Artificial Sequence: Synthetic oligonucleotide
ggaaaaucaauagggucua

SEQ ID NO: 1353459 - RNA, 19 nt, Artificial Sequence
  Description of Artificial Sequence: Synthetic oligonucleotide
ccaauuggauggcccaaag

SEQ ID NO: 1353460 - RNA, 19 nt, Artificial Sequence
  Description of Artificial Sequence: Synthetic oligonucleotide
agagccgccagagcagcca

SEQ ID NO: 1353461 - RNA, 19 nt, Artificial Sequence
  Description of Artificial Sequence: Synthetic oligonucleotide
ccauaugaauuuuauugua

SEQ ID NO: 1353462 - RNA, 19 nt, Artificial Sequence
  Description of Artificial Sequence: Synthetic oligonucleotide
cagcauaugcaggcgcaac

SEQ ID NO: 1353463 - RNA, 19 nt, Artificial Sequence
  Description of Artificial Sequence: Synthetic oligonucleotide
gcaauagauccaagcuuag

SEQ ID NO: 1353464 - RNA, 19 nt, Artificial Sequence
  Description of Artificial Sequence: Synthetic oligonucleotide
auucgugcuaguggcuuaa

SEQ ID NO: 1353465 - RNA, 19 nt, Artificial Sequence
  Description of Artificial Sequence: Synthetic oligonucleotide
gcccucgaagcagaggccg

SEQ ID NO: 1353466 - RNA, 19 nt, Artificial Sequence
  Description of Artificial Sequence: Synthetic oligonucleotide
ucccaauuggauggcccaa

SEQ ID NO: 1353467 - RNA, 19 nt, Artificial Sequence
  Description of Artificial Sequence: Synthetic oligonucleotide
cugucuacagcuucucaau

SEQ ID NO: 1353468 - RNA, 19 nt, Artificial Sequence
  Description of Artificial Sequence: Synthetic oligonucleotide
cauacgguguugcuccucu

SEQ ID NO: 1353469 - RNA, 19 nt, Artificial Sequence
  Description of Artificial Sequence: Synthetic oligonucleotide
gugcuaguggcuuaacguu

SEQ ID NO: 1353470 - RNA, 19 nt, Artificial Sequence
  Description of Artificial Sequence: Synthetic oligonucleotide
caauccgggcuccagacau

SEQ ID NO: 1353471 - RNA, 19 nt, Artificial Sequence
  Description of Artificial Sequence: Synthetic oligonucleotide
caacaguguuugugaucac

SEQ ID NO: 1353472 - RNA, 19 nt, Artificial Sequence
  Description of Artificial Sequence: Synthetic oligonucleotide
gacauuccccauguagacu

SEQ ID NO: 1353473 - RNA, 19 nt, Artificial Sequence
  Description of Artificial Sequence: Synthetic oligonucleotide
accauacgguguugcuccu

SEQ ID NO: 1353474 - RNA, 19 nt, Artificial Sequence
  Description of Artificial Sequence: Synthetic oligonucleotide
cuucaacaguguuugugau

SEQ ID NO: 1353475 - RNA, 19 nt, Artificial Sequence
  Description of Artificial Sequence: Synthetic oligonucleotide
ggaguucuuacaccacuua

SEQ ID NO: 1353476 - RNA, 19 nt, Artificial Sequence
  Description of Artificial Sequence: Synthetic oligonucleotide
cagaggccggcggacgccg

SEQ ID NO: 1353477 - RNA, 19 nt, Artificial Sequence
  Description of Artificial Sequence: Synthetic oligonucleotide
cugcccaugaaggauccaa

SEQ ID NO: 1353478 - RNA, 19 nt, Artificial Sequence
  Description of Artificial Sequence: Synthetic oligonucleotide
cagcacaguuacccauaug

SEQ ID NO: 1353479 - RNA, 19 nt, Artificial Sequence
  Description of Artificial Sequence: Synthetic oligonucleotide
guggcuuaacguugagccu

SEQ ID NO: 1353480 - RNA, 19 nt, Artificial Sequence
  Description of Artificial Sequence: Synthetic oligonucleotide
uccucgcuucaaggcauga

SEQ ID NO: 1353481 - RNA, 19 nt, Artificial Sequence
  Description of Artificial Sequence: Synthetic oligonucleotide
cccaaugcugcuugccgug

SEQ ID NO: 1353482 - RNA, 19 nt, Artificial Sequence
  Description of Artificial Sequence: Synthetic oligonucleotide
gggacguuugacaugcucu

SEQ ID NO: 1353483 - RNA, 19 nt, Artificial Sequence
  Description of Artificial Sequence: Synthetic oligonucleotide
gcuaguggcuuaacguuga

SEQ ID NO: 1353484 - RNA, 19 nt, Artificial Sequence
  Description of Artificial Sequence: Synthetic oligonucleotide
caguauucucagcacaguu

SEQ ID NO: 1353485 - RNA, 19 nt, Artificial Sequence
  Description of Artificial Sequence: Synthetic oligonucleotide
cauuacauacgggacguuu

SEQ ID NO: 1353486 - RNA, 19 nt, Artificial Sequence
  Description of Artificial Sequence: Synthetic oligonucleotide
cgcaacuggaaaaucaaua

SEQ ID NO: 1353487 - RNA, 19 nt, Artificial Sequence
  Description of Artificial Sequence: Synthetic oligonucleotide
cuucccugcaucccaggcu

SEQ ID NO: 1353488 - RNA, 19 nt, Artificial Sequence
  Description of Artificial Sequence: Synthetic oligonucleotide
uucgugcuaguggcuuaac

SEQ ID NO: 1353489 - RNA, 19 nt, Artificial Sequence
  Description of Artificial Sequence: Synthetic oligonucleotide
ggcgcaacuggaaaaucaa

SEQ ID NO: 1353490 - RNA, 19 nt, Artificial Sequence
  Description of Artificial Sequence: Synthetic oligonucleotide
caucccaggcuucuuuacu

SEQ ID NO: 1353491 - RNA, 19 nt, Artificial Sequence
  Description of Artificial Sequence: Synthetic oligonucleotide
ucauuacauacgggacguu

SEQ ID NO: 1353492 - RNA, 19 nt, Artificial Sequence
  Description of Artificial Sequence: Synthetic oligonucleotide
gccgccagagcagccaugc

SEQ ID NO: 1353493 - RNA, 19 nt, Artificial Sequence
  Description of Artificial Sequence: Synthetic oligonucleotide
acuucgauccaggcaucuu

SEQ ID NO: 1353494 - RNA, 19 nt, Artificial Sequence
  Description of Artificial Sequence: Synthetic oligonucleotide
caggcgcaacuggaaaauc

SEQ ID NO: 1353495 - RNA, 19 nt, Artificial Sequence
  Description of Artificial Sequence: Synthetic oligonucleotide
cccauguagacuuccuuua

SEQ ID NO: 1353496 - RNA, 19 nt, Artificial Sequence
  Description of Artificial Sequence: Synthetic oligonucleotide
cgugcuaguggcuuaacgu

SEQ ID NO: 1353497 - RNA, 19 nt, Artificial Sequence
  Description of Artificial Sequence: Synthetic oligonucleotide
ugcucaccucgggcaauac

SEQ ID NO: 1353498 - RNA, 19 nt, Artificial Sequence
  Description of Artificial Sequence: Synthetic oligonucleotide
cccaaagaaacagcuccuc

SEQ ID NO: 1353499 - RNA, 19 nt, Artificial Sequence
  Description of Artificial Sequence: Synthetic oligonucleotide
gccguguaggggccugucc

SEQ ID NO: 1353500 - RNA, 19 nt, Artificial Sequence
  Description of Artificial Sequence: Synthetic oligonucleotide
gcacccaaugcugcuugcc

SEQ ID NO: 1353501 - RNA, 19 nt, Artificial Sequence
  Description of Artificial Sequence: Synthetic oligonucleotide
guuuaccgugguacacgga

SEQ ID NO: 1353502 - RNA, 19 nt, Artificial Sequence
  Description of Artificial Sequence: Synthetic oligonucleotide
ccaccauacgguguugcuc

SEQ ID NO: 1353503 - RNA, 19 nt, Artificial Sequence
  Description of Artificial Sequence: Synthetic oligonucleotide
ccacuuacuauaacuacuu

SEQ ID NO: 1353504 - RNA, 19 nt, Artificial Sequence
  Description of Artificial Sequence: Synthetic oligonucleotide
guccucgcuucaaggcaug

SEQ ID NO: 1353505 - RNA, 19 nt, Artificial Sequence
  Description of Artificial Sequence: Synthetic oligonucleotide
cugacacggugacaggaau

SEQ ID NO: 1353506 - RNA, 19 nt, Artificial Sequence
  Description of Artificial Sequence: Synthetic oligonucleotide
gggaucccugccuuuucaa

SEQ ID NO: 1353507 - RNA, 19 nt, Artificial Sequence
  Description of Artificial Sequence: Synthetic oligonucleotide
caauucgugcuaguggcuu

SEQ ID NO: 1353508 - RNA, 19 nt, Artificial Sequence
  Description of Artificial Sequence: Synthetic oligonucleotide
ccucgcuucaaggcaugag

SEQ ID NO: 1353509 - RNA, 19 nt, Artificial Sequence
  Description of Artificial Sequence: Synthetic oligonucleotide
uugccguguaggggccugu

SEQ ID NO: 1353510 - RNA, 19 nt, Artificial Sequence
  Description of Artificial Sequence: Synthetic oligonucleotide
caaugcugcuugccgugua

SEQ ID NO: 1353511 - RNA, 19 nt, Artificial Sequence
  Description of Artificial Sequence: Synthetic oligonucleotide
cgcggcccaaggaaguccc

SEQ ID NO: 1353512 - RNA, 19 nt, Artificial Sequence
  Description of Artificial Sequence: Synthetic oligonucleotide
ccucgggcaauacucagcu

SEQ ID NO: 1353513 - RNA, 19 nt, Artificial Sequence
  Description of Artificial Sequence: Synthetic oligonucleotide
cugacgcgaaaggcuguca

SEQ ID NO: 1353514 - RNA, 19 nt, Artificial Sequence
  Description of Artificial Sequence: Synthetic oligonucleotide
gcugacgcgaaaggcuguc

SEQ ID NO: 1353515 - RNA, 19 nt, Artificial Sequence
  Description of Artificial Sequence: Synthetic oligonucleotide
cacaucugguuuaccuuuu

SEQ ID NO: 1353516 - RNA, 19 nt, Artificial Sequence
  Description of Artificial Sequence: Synthetic oligonucleotide
cauuggcagcuguuacagu

SEQ ID NO: 1353517 - RNA, 19 nt, Artificial Sequence
  Description of Artificial Sequence: Synthetic oligonucleotide
ccacaucugguuuaccuuu

SEQ ID NO: 1353518 - RNA, 19 nt, Artificial Sequence
  Description of Artificial Sequence: Synthetic oligonucleotide
gcagaggccggcggacgcc

SEQ ID NO: 1353519 - RNA, 19 nt, Artificial Sequence
  Description of Artificial Sequence: Synthetic oligonucleotide
gcaguauucucagcacagu

SEQ ID NO: 1353520 - RNA, 19 nt, Artificial Sequence
  Description of Artificial Sequence: Synthetic oligonucleotide
ggcuccagacaucccaauu

SEQ ID NO: 1353521 - RNA, 19 nt, Artificial Sequence
  Description of Artificial Sequence: Synthetic oligonucleotide
ccguguaggggccuguccu

SEQ ID NO: 1353522 - RNA, 19 nt, Artificial Sequence
  Description of Artificial Sequence: Synthetic oligonucleotide
ccccauguagacuuccuuu

SEQ ID NO: 1353523 - RNA, 19 nt, Artificial Sequence
  Description of Artificial Sequence: Synthetic oligonucleotide
gcaggcgcaacuggaaaau

SEQ ID NO: 1353524 - RNA, 19 nt, Artificial Sequence
  Description of Artificial Sequence: Synthetic oligonucleotide
cugcucaccucgggcaaua

SEQ ID NO: 1353525 - RNA, 19 nt, Artificial Sequence
  Description of Artificial Sequence: Synthetic oligonucleotide
ggcuuaacguugagccucu

SEQ ID NO: 1353526 - RNA, 19 nt, Artificial Sequence
  Description of Artificial Sequence: Synthetic oligonucleotide
gcuuaacguugagccucug

SEQ ID NO: 1353527 - RNA, 19 nt, Artificial Sequence
  Description of Artificial Sequence: Synthetic oligonucleotide
ccauacgguguugcuccuc

SEQ ID NO: 1353528 - RNA, 19 nt, Artificial Sequence
  Description of Artificial Sequence: Synthetic oligonucleotide
ccaccacaucugguuuacc

SEQ ID NO: 1353529 - RNA, 19 nt, Artificial Sequence
  Description of Artificial Sequence: Synthetic oligonucleotide
ggcccaaggaagucccauu

SEQ ID NO: 1353530 - RNA, 19 nt, Artificial Sequence
  Description of Artificial Sequence: Synthetic oligonucleotide
ggcggacgccgccgcgcag

SEQ ID NO: 1353531 - RNA, 19 nt, Artificial Sequence
  Description of Artificial Sequence: Synthetic oligonucleotide
cgauccaggcaucuuacuu

SEQ ID NO: 1353532 - RNA, 19 nt, Artificial Sequence
  Description of Artificial Sequence: Synthetic oligonucleotide
acgggacguuugacaugcu

SEQ ID NO: 1353533 - RNA, 19 nt, Artificial Sequence
  Description of Artificial Sequence: Synthetic oligonucleotide
ccaagcuuaguggcuggcu

SEQ ID NO: 1353534 - RNA, 19 nt, Artificial Sequence
  Description of Artificial Sequence: Synthetic oligonucleotide
cucgggcaauacucagcuu

SEQ ID NO: 1353535 - RNA, 19 nt, Artificial Sequence
  Description of Artificial Sequence: Synthetic oligonucleotide
cgggcuccagacaucccaa

SEQ ID NO: 1353536 - RNA, 19 nt, Artificial Sequence
  Description of Artificial Sequence: Synthetic oligonucleotide
gcggcccaaggaaguccca

SEQ ID NO: 1353537 - RNA, 19 nt, Artificial Sequence
  Description of Artificial Sequence: Synthetic oligonucleotide
cguguaggggccuguccuu

SEQ ID NO: 1353538 - RNA, 19 nt, Artificial Sequence
  Description of Artificial Sequence: Synthetic oligonucleotide
gcuugccguguaggggccu

SEQ ID NO: 1353539 - RNA, 19 nt, Artificial Sequence
  Description of Artificial Sequence: Synthetic oligonucleotide
cggcggacgccgccgcgca

SEQ ID NO: 1353540 - RNA, 19 nt, Artificial Sequence
  Description of Artificial Sequence: Synthetic oligonucleotide
ccgccagagcagccaugcu

SEQ ID NO: 1353541 - RNA, 19 nt, Artificial Sequence
  Description of Artificial Sequence: Synthetic oligonucleotide
cggcccaaggaagucccau

SEQ ID NO: 1353542 - RNA, 19 nt, Artificial Sequence
  Description of Artificial Sequence: Synthetic oligonucleotide
uauacauaaaccuuaagag

SEQ ID NO: 1353543 - RNA, 19 nt, Artificial Sequence
  Description of Artificial Sequence: Synthetic oligonucleotide
aauauauauauaucuuuac

SEQ ID NO: 1353544 - RNA, 19 nt, Artificial Sequence
  Description of Artificial Sequence: Synthetic oligonucleotide
gaugauaucuccuaacugg

SEQ ID NO: 1353545 - RNA, 19 nt, Artificial Sequence
  Description of Artificial Sequence: Synthetic oligonucleotide
uuauacauaaaccuuaaga

SEQ ID NO: 1353546 - RNA, 19 nt, Artificial Sequence
  Description of Artificial Sequence: Synthetic oligonucleotide
uauacaaacucacagacga

SEQ ID NO: 1353547 - RNA, 19 nt, Artificial Sequence
  Description of Artificial Sequence: Synthetic oligonucleotide
aauaaaacgagagacagcu

SEQ ID NO: 1353548 - RNA, 19 nt, Artificial Sequence
  Description of Artificial Sequence: Synthetic oligonucleotide
agaaauaagguucugauau

SEQ ID NO: 1353549 - RNA, 19 nt, Artificial Sequence
  Description of Artificial Sequence: Synthetic oligonucleotide
auauuauuuauuugugcgc

SEQ ID NO: 1353550 - RNA, 19 nt, Artificial Sequence
  Description of Artificial Sequence: Synthetic oligonucleotide
aguaaauaugguuuucuac

SEQ ID NO: 1353551 - RNA, 19 nt, Artificial Sequence
  Description of Artificial Sequence: Synthetic oligonucleotide
aaaauauauauauaucuuu

SEQ ID NO: 1353552 - RNA, 19 nt, Artificial Sequence
  Description of Artificial Sequence: Synthetic oligonucleotide
ugacauaguaauuaaaggu

SEQ ID NO: 1353553 - RNA, 19 nt, Artificial Sequence
  Description of Artificial Sequence: Synthetic oligonucleotide
uuuauuugugcgcaggcag

SEQ ID NO: 1353554 - RNA, 19 nt, Artificial Sequence
  Description of Artificial Sequence: Synthetic oligonucleotide
uuacuaaccguucacaugu

SEQ ID NO: 1353555 - RNA, 19 nt, Artificial Sequence
  Description of Artificial Sequence: Synthetic oligonucleotide
acaaaugaguaacucauuc

SEQ ID NO: 1353556 - RNA, 19 nt, Artificial Sequence
  Description of Artificial Sequence: Synthetic oligonucleotide
agaguggacgacuucagcc

SEQ ID NO: 1353557 - RNA, 19 nt, Artificial Sequence
  Description of Artificial Sequence: Synthetic oligonucleotide
cuuauaaacgaaaugccug

SEQ ID NO: 1353558 - RNA, 19 nt, Artificial Sequence
  Description of Artificial Sequence: Synthetic oligonucleotide
acauguucgcauuaaaguc

SEQ ID NO: 1353559 - RNA, 19 nt, Artificial Sequence
  Description of Artificial Sequence: Synthetic oligonucleotide
ucuuauaaacgaaaugccu

SEQ ID NO: 1353560 - RNA, 19 nt, Artificial Sequence
  Description of Artificial Sequence: Synthetic oligonucleotide
auauauauauaucuuuaca

SEQ ID NO: 1353561 - RNA, 19 nt, Artificial Sequence
  Description of Artificial Sequence: Synthetic oligonucleotide
auuaaagucccugagaacu

SEQ ID NO: 1353562 - RNA, 19 nt, Artificial Sequence
  Description of Artificial Sequence: Synthetic oligonucleotide
aaaugaguaacucauucuu

SEQ ID NO: 1353563 - RNA, 19 nt, Artificial Sequence
  Description of Artificial Sequence: Synthetic oligonucleotide
ccuguuacaagcaugaugc

SEQ ID NO: 1353564 - RNA, 19 nt, Artificial Sequence
  Description of Artificial Sequence: Synthetic oligonucleotide
agacgguccacucauaguc

SEQ ID NO: 1353565 - RNA, 19 nt, Artificial Sequence
  Description of Artificial Sequence: Synthetic oligonucleotide
aguaccacgaugcaggcug

SEQ ID NO: 1353566 - RNA, 19 nt, Artificial Sequence
  Description of Artificial Sequence: Synthetic oligonucleotide
aacuuaagggcuucuaagu

SEQ ID NO: 1353567 - RNA, 19 nt, Artificial Sequence
  Description of Artificial Sequence: Synthetic oligonucleotide
acucauauggagucacugc

SEQ ID NO: 1353568 - RNA, 19 nt, Artificial Sequence
  Description of Artificial Sequence: Synthetic oligonucleotide
ucaauuauacauaaaccuu

SEQ ID NO: 1353569 - RNA, 19 nt, Artificial Sequence
  Description of Artificial Sequence: Synthetic oligonucleotide
augguaaacaauuuaaaua

SEQ ID NO: 1353570 - RNA, 19 nt, Artificial Sequence
  Description of Artificial Sequence: Synthetic oligonucleotide
auuaagcuggacucagagc

SEQ ID NO: 1353571 - RNA, 19 nt, Artificial Sequence
  Description of Artificial Sequence: Synthetic oligonucleotide
cuaaccguucacauguucg

SEQ ID NO: 1353572 - RNA, 19 nt, Artificial Sequence
  Description of Artificial Sequence: Synthetic oligonucleotide
uuaccuacugcaaauggcu

SEQ ID NO: 1353573 - RNA, 19 nt, Artificial Sequence
  Description of Artificial Sequence: Synthetic oligonucleotide
ugauauguugacauaguaa

SEQ ID NO: 1353574 - RNA, 19 nt, Artificial Sequence
  Description of Artificial Sequence: Synthetic oligonucleotide
cucauauggagucacugcg

SEQ ID NO: 1353575 - RNA, 19 nt, Artificial Sequence
  Description of Artificial Sequence: Synthetic oligonucleotide
uuuacuaaccguucacaug

SEQ ID NO: 1353576 - RNA, 19 nt, Artificial Sequence
  Description of Artificial Sequence: Synthetic oligonucleotide
uguacaugguacaugguaa

SEQ ID NO: 1353577 - RNA, 19 nt, Artificial Sequence
  Description of Artificial Sequence: Synthetic oligonucleotide
agauacagcaaugacaugu

SEQ ID NO: 1353578 - RNA, 19 nt, Artificial Sequence
  Description of Artificial Sequence: Synthetic oligonucleotide
gauauguugacauaguaau

SEQ ID NO: 1353579 - RNA, 19 nt, Artificial Sequence
  Description of Artificial Sequence: Synthetic oligonucleotide
aaauauauauauaucuuua

SEQ ID NO: 1353580 - RNA, 19 nt, Artificial Sequence
  Description of Artificial Sequence: Synthetic oligonucleotide
auuaugccaauuuaggaau

SEQ ID NO: 1353581 - RNA, 19 nt, Artificial Sequence
  Description of Artificial Sequence: Synthetic oligonucleotide
guagauucaaaauaaggaa

SEQ ID NO: 1353582 - RNA, 19 nt, Artificial Sequence
  Description of Artificial Sequence: Synthetic oligonucleotide
guaaguuugugcucgcagg

SEQ ID NO: 1353583 - RNA, 19 nt, Artificial Sequence
  Description of Artificial Sequence: Synthetic oligonucleotide
gucaauuauacauaaaccu

SEQ ID NO: 1353584 - RNA, 19 nt, Artificial Sequence
  Description of Artificial Sequence: Synthetic oligonucleotide
uugagguaaccucaaacac

SEQ ID NO: 1353585 - RNA, 19 nt, Artificial Sequence
  Description of Artificial Sequence: Synthetic oligonucleotide
aaauuacugaacagcuuac

SEQ ID NO: 1353586 - RNA, 19 nt, Artificial Sequence
  Description of Artificial Sequence: Synthetic oligonucleotide
ugcucuaagggugugaggc

SEQ ID NO: 1353587 - RNA, 19 nt, Artificial Sequence
  Description of Artificial Sequence: Synthetic oligonucleotide
ucucuaucucuccuguggg

SEQ ID NO: 1353588 - RNA, 19 nt, Artificial Sequence
  Description of Artificial Sequence: Synthetic oligonucleotide
ugguacaugguaaacaauu

SEQ ID NO: 1353589 - RNA, 19 nt, Artificial Sequence
  Description of Artificial Sequence: Synthetic oligonucleotide
aguaaguuugugcucgcag

SEQ ID NO: 1353590 - RNA, 19 nt, Artificial Sequence
  Description of Artificial Sequence: Synthetic oligonucleotide
cacgcugucaccuugagga

SEQ ID NO: 1353591 - RNA, 19 nt, Artificial Sequence
  Description of Artificial Sequence: Synthetic oligonucleotide
uauaucuuuacagcaguca

SEQ ID NO: 1353592 - RNA, 19 nt, Artificial Sequence
  Description of Artificial Sequence: Synthetic oligonucleotide
  modified_base (2)..(2): a, c, u, g, unknown or other
gnggugagaaucccaacag

SEQ ID NO: 1353593 - RNA, 19 nt, Artificial Sequence
  Description of Artificial Sequence: Synthetic oligonucleotide
cagcuuaagucauaggaag

SEQ ID NO: 1353594 - RNA, 19 nt, Artificial Sequence
  Description of Artificial Sequence: Synthetic oligonucleotide
guugagguaaccucaaaca

SEQ ID NO: 1353595 - RNA, 19 nt, Artificial Sequence
  Description of Artificial Sequence: Synthetic oligonucleotide
uaaaccuuaagaguaaguu

SEQ ID NO: 1353596 - RNA, 19 nt, Artificial Sequence
  Description of Artificial Sequence: Synthetic oligonucleotide
aaacgagagacagcuacuc

SEQ ID NO: 1353597 - RNA, 19 nt, Artificial Sequence
  Description of Artificial Sequence: Synthetic oligonucleotide
aacgaaaugccuguuacaa

SEQ ID NO: 1353598 - RNA, 19 nt, Artificial Sequence
  Description of Artificial Sequence: Synthetic oligonucleotide
agguagauucaaaauaagg

SEQ ID NO: 1353599 - RNA, 19 nt, Artificial Sequence
  Description of Artificial Sequence: Synthetic oligonucleotide
uggacaucgaaagacgugc

SEQ ID NO: 1353600 - RNA, 19 nt, Artificial Sequence
  Description of Artificial Sequence: Synthetic oligonucleotide
aacauuaagcuggacucag

SEQ ID NO: 1353601 - RNA, 19 nt, Artificial Sequence
  Description of Artificial Sequence: Synthetic oligonucleotide
aagucauaggaagaaauaa

SEQ ID NO: 1353602 - RNA, 19 nt, Artificial Sequence
  Description of Artificial Sequence: Synthetic oligonucleotide
acauuaugccaauuuagga

SEQ ID NO: 1353603 - RNA, 19 nt, Artificial Sequence
  Description of Artificial Sequence: Synthetic oligonucleotide
cauuaagcuggacucagag

SEQ ID NO: 1353604 - RNA, 19 nt, Artificial Sequence
  Description of Artificial Sequence: Synthetic oligonucleotide
acugcaaauggcuauugga

SEQ ID NO: 1353605 - RNA, 19 nt, Artificial Sequence
  Description of Artificial Sequence: Synthetic oligonucleotide
acauaguaauuaaagguag

SEQ ID NO: 1353606 - RNA, 19 nt, Artificial Sequence
  Description of Artificial Sequence: Synthetic oligonucleotide
guucacgagaucuucacac

SEQ ID NO: 1353607 - RNA, 19 nt, Artificial Sequence
  Description of Artificial Sequence: Synthetic oligonucleotide
ugugcucgcagguaauggg

SEQ ID NO: 1353608 - RNA, 19 nt, Artificial Sequence
  Description of Artificial Sequence: Synthetic oligonucleotide
  modified_base (15)..(15): a, c, u, g, unknown or other
uucacaguagcucgnggug

SEQ ID NO: 1353609 - RNA, 19 nt, Artificial Sequence
  Description of Artificial Sequence: Synthetic oligonucleotide
uuauuugugcgcaggcagc

SEQ ID NO: 1353610 - RNA, 19 nt, Artificial Sequence
  Description of Artificial Sequence: Synthetic oligonucleotide
uuaagggcuucuaaguaaa

SEQ ID NO: 1353611 - RNA, 19 nt, Artificial Sequence
  Description of Artificial Sequence: Synthetic oligonucleotide
aagaaauaagguucugaua

SEQ ID NO: 1353612 - RNA, 19 nt, Artificial Sequence
  Description of Artificial Sequence: Synthetic oligonucleotide
uuaaagucccugagaacug

SEQ ID NO: 1353613 - RNA, 19 nt, Artificial Sequence
  Description of Artificial Sequence: Synthetic oligonucleotide
ugcaaauggcuauuggaac

SEQ ID NO: 1353614 - RNA, 19 nt, Artificial Sequence
  Description of Artificial Sequence: Synthetic oligonucleotide
gacagcuacucaaauauac

SEQ ID NO: 1353615 - RNA, 19 nt, Artificial Sequence
  Description of Artificial Sequence: Synthetic oligonucleotide
uaacuggacaucgaaagac

SEQ ID NO: 1353616 - RNA, 19 nt, Artificial Sequence
  Description of Artificial Sequence: Synthetic oligonucleotide
aacuggacaucgaaagacg

SEQ ID NO: 1353617 - RNA, 19 nt, Artificial Sequence
  Description of Artificial Sequence: Synthetic oligonucleotide
ucguccuucuuuacuaacc

SEQ ID NO: 1353618 - RNA, 19 nt, Artificial Sequence
  Description of Artificial Sequence: Synthetic oligonucleotide
aggaugauaucuccuaacu

SEQ ID NO: 1353619 - RNA, 19 nt, Artificial Sequence
  Description of Artificial Sequence: Synthetic oligonucleotide
aaacgaaaugccuguuaca

SEQ ID NO: 1353620 - RNA, 19 nt, Artificial Sequence
  Description of Artificial Sequence: Synthetic oligonucleotide
uucgcauuaaagucccuga

SEQ ID NO: 1353621 - RNA, 19 nt, Artificial Sequence
  Description of Artificial Sequence: Synthetic oligonucleotide
aauggaguguugaaguagu

SEQ ID NO: 1353622 - RNA, 19 nt, Artificial Sequence
  Description of Artificial Sequence: Synthetic oligonucleotide
uuacagcagucaauuauac

SEQ ID NO: 1353623 - RNA, 19 nt, Artificial Sequence
  Description of Artificial Sequence: Synthetic oligonucleotide
cagguaauggggaagucug

SEQ ID NO: 1353624 - RNA, 19 nt, Artificial Sequence
  Description of Artificial Sequence: Synthetic oligonucleotide
uuugcauugccuuucuguu

SEQ ID NO: 1353625 - RNA, 19 nt, Artificial Sequence
  Description of Artificial Sequence: Synthetic oligonucleotide
uaaccguucacauguucgc

SEQ ID NO: 1353626 - RNA, 19 nt, Artificial Sequence
  Description of Artificial Sequence: Synthetic oligonucleotide
ucuaucucuccugugggcc

SEQ ID NO: 1353627 - RNA, 19 nt, Artificial Sequence
  Description of Artificial Sequence: Synthetic oligonucleotide
ucgcauuaaagucccugag

SEQ ID NO: 1353628 - RNA, 19 nt, Artificial Sequence
  Description of Artificial Sequence: Synthetic oligonucleotide
ggugagaaucccaacaggg

SEQ ID NO: 1353629 - RNA, 19 nt, Artificial Sequence
  Description of Artificial Sequence: Synthetic oligonucleotide
uguuacaagcaugaugcac

SEQ ID NO: 1353630 - RNA, 19 nt, Artificial Sequence
  Description of Artificial Sequence: Synthetic oligonucleotide
agggacguuaccuacugca

SEQ ID NO: 1353631 - RNA, 19 nt, Artificial Sequence
  Description of Artificial Sequence: Synthetic oligonucleotide
uccuucuuuacuaaccguu

SEQ ID NO: 1353632 - RNA, 19 nt, Artificial Sequence
  Description of Artificial Sequence: Synthetic oligonucleotide
uauuggaacuguaaacauu

SEQ ID NO: 1353633 - RNA, 19 nt, Artificial Sequence
  Description of Artificial Sequence: Synthetic oligonucleotide
aagggacguuaccuacugc

SEQ ID NO: 1353634 - RNA, 19 nt, Artificial Sequence
  Description of Artificial Sequence: Synthetic oligonucleotide
cugucgcucaggaugaccc

SEQ ID NO: 1353635 - RNA, 19 nt, Artificial Sequence
  Description of Artificial Sequence: Synthetic oligonucleotide
acagacgaaaucuuuuaaa

SEQ ID NO: 1353636 - RNA, 19 nt, Artificial Sequence
  Description of Artificial Sequence: Synthetic oligonucleotide
ucuuuacuaaccguucaca

SEQ ID NO: 1353637 - RNA, 19 nt, Artificial Sequence
  Description of Artificial Sequence: Synthetic oligonucleotide
uaugccaauuuaggaauag

SEQ ID NO: 1353638 - RNA, 19 nt, Artificial Sequence
  Description of Artificial Sequence: Synthetic oligonucleotide
acuaaccguucacauguuc

SEQ ID NO: 1353639 - RNA, 19 nt, Artificial Sequence
  Description of Artificial Sequence: Synthetic oligonucleotide
agaguaaguuugugcucgc

SEQ ID NO: 1353640 - RNA, 19 nt, Artificial Sequence
  Description of Artificial Sequence: Synthetic oligonucleotide
aaacauuaagcuggacuca

SEQ ID NO: 1353641 - RNA, 19 nt, Artificial Sequence
  Description of Artificial Sequence: Synthetic oligonucleotide
aaucuaacauuaugccaau

SEQ ID NO: 1353642 - RNA, 19 nt, Artificial Sequence
  Description of Artificial Sequence: Synthetic oligonucleotide
gacucagugugcugcagcc

SEQ ID NO: 1353643 - RNA, 19 nt, Artificial Sequence
  Description of Artificial Sequence: Synthetic oligonucleotide
gaagggacguuaccuacug

SEQ ID NO: 1353644 - RNA, 19 nt, Artificial Sequence
  Description of Artificial Sequence: Synthetic oligonucleotide
aacgagagacagcuacuca

SEQ ID NO: 1353645 - RNA, 19 nt, Artificial Sequence
  Description of Artificial Sequence: Synthetic oligonucleotide
caaagagcccgucugucgc

SEQ ID NO: 1353646 - RNA, 19 nt, Artificial Sequence
  Description of Artificial Sequence: Synthetic oligonucleotide
guuaccuacugcaaauggc

SEQ ID NO: 1353647 - RNA, 19 nt, Artificial Sequence
  Description of Artificial Sequence: Synthetic oligonucleotide
gagucacccagguucgccg

SEQ ID NO: 1353648 - RNA, 19 nt, Artificial Sequence
  Description of Artificial Sequence: Synthetic oligonucleotide
ggcagcuuaagucauagga

SEQ ID NO: 1353649 - RNA, 19 nt, Artificial Sequence
  Description of Artificial Sequence: Synthetic oligonucleotide
uaggaauaguagauaaauu

SEQ ID NO: 1353650 - RNA, 19 nt, Artificial Sequence
  Description of Artificial Sequence: Synthetic oligonucleotide
uggcuauuggaacuguaaa

SEQ ID NO: 1353651 - RNA, 19 nt, Artificial Sequence
  Description of Artificial Sequence: Synthetic oligonucleotide
uaagaguaaguuugugcuc

SEQ ID NO: 1353652 - RNA, 19 nt, Artificial Sequence
  Description of Artificial Sequence: Synthetic oligonucleotide
aucguccuucuuuacuaac

SEQ ID NO: 1353653 - RNA, 19 nt, Artificial Sequence
  Description of Artificial Sequence: Synthetic oligonucleotide
acgagaucuucacaccguc

SEQ ID NO: 1353654 - RNA, 19 nt, Artificial Sequence
  Description of Artificial Sequence: Synthetic oligonucleotide
gcaugaugcacugagauac

SEQ ID NO: 1353655 - RNA, 19 nt, Artificial Sequence
  Description of Artificial Sequence: Synthetic oligonucleotide
gacgacuucagccgcagca

SEQ ID NO: 1353656 - RNA, 19 nt, Artificial Sequence
  Description of Artificial Sequence: Synthetic oligonucleotide
aucagaucggugcacgacu

SEQ ID NO: 1353657 - RNA, 19 nt, Artificial Sequence
  Description of Artificial Sequence: Synthetic oligonucleotide
uguucacgagaucuucaca

SEQ ID NO: 1353658 - RNA, 19 nt, Artificial Sequence
  Description of Artificial Sequence: Synthetic oligonucleotide
gaaucguccuucuuuacua

SEQ ID NO: 1353659 - RNA, 19 nt, Artificial Sequence
  Description of Artificial Sequence: Synthetic oligonucleotide
ucuaagggugugaggcucc

SEQ ID NO: 1353660 - RNA, 19 nt, Artificial Sequence
  Description of Artificial Sequence: Synthetic oligonucleotide
ucuucacaccgucaccuga

SEQ ID NO: 1353661 - RNA, 19 nt, Artificial Sequence
  Description of Artificial Sequence: Synthetic oligonucleotide
agaucggugcacgacuucg

SEQ ID NO: 1353662 - RNA, 19 nt, Artificial Sequence
  Description of Artificial Sequence: Synthetic oligonucleotide
uucgccgugugcaagcggu

SEQ ID NO: 1353663 - RNA, 19 nt, Artificial Sequence
  Description of Artificial Sequence: Synthetic oligonucleotide
acugagacgguccacucau

SEQ ID NO: 1353664 - RNA, 19 nt, Artificial Sequence
  Description of Artificial Sequence: Synthetic oligonucleotide
cagacgaaaucuuuuaaaa

SEQ ID NO: 1353665 - RNA, 19 nt, Artificial Sequence
  Description of Artificial Sequence: Synthetic oligonucleotide
agguucgccgugugcaagc

SEQ ID NO: 1353666 - RNA, 19 nt, Artificial Sequence
  Description of Artificial Sequence: Synthetic oligonucleotide
acgagagacagcuacucaa

SEQ ID NO: 1353667 - RNA, 19 nt, Artificial Sequence
  Description of Artificial Sequence: Synthetic oligonucleotide
uagucaggcauguugucaa

SEQ ID NO: 1353668 - RNA, 19 nt, Artificial Sequence
  Description of Artificial Sequence: Synthetic oligonucleotide
aaaacgagagacagcuacu

SEQ ID NO: 1353669 - RNA, 19 nt, Artificial Sequence
  Description of Artificial Sequence: Synthetic oligonucleotide
acgaaaugccuguuacaag

SEQ ID NO: 1353670 - RNA, 19 nt, Artificial Sequence
  Description of Artificial Sequence: Synthetic oligonucleotide
cauuaaagucccugagaac

SEQ ID NO: 1353671 - RNA, 19 nt, Artificial Sequence
  Description of Artificial Sequence: Synthetic oligonucleotide
ugucuccugcagaggaagg

SEQ ID NO: 1353672 - RNA, 19 nt, Artificial Sequence
  Description of Artificial Sequence: Synthetic oligonucleotide
acuagcuucccuguggacu

SEQ ID NO: 1353673 - RNA, 19 nt, Artificial Sequence
  Description of Artificial Sequence: Synthetic oligonucleotide
acuuaagggcuucuaagua

SEQ ID NO: 1353674 - RNA, 19 nt, Artificial Sequence
  Description of Artificial Sequence: Synthetic oligonucleotide
aguuugugcucgcagguaa

SEQ ID NO: 1353675 - RNA, 19 nt, Artificial Sequence
  Description of Artificial Sequence: Synthetic oligonucleotide
uugugcucgcagguaaugg

SEQ ID NO: 1353676 - RNA, 19 nt, Artificial Sequence
  Description of Artificial Sequence: Synthetic oligonucleotide
auauaucuuuacagcaguc

SEQ ID NO: 1353677 - RNA, 19 nt, Artificial Sequence
  Description of Artificial Sequence: Synthetic oligonucleotide
ugugcguggcuguucacga

SEQ ID NO: 1353678 - RNA, 19 nt, Artificial Sequence
  Description of Artificial Sequence: Synthetic oligonucleotide
cuuaagggcuucuaaguaa

SEQ ID NO: 1353679 - RNA, 19 nt, Artificial Sequence
  Description of Artificial Sequence: Synthetic oligonucleotide
uccuaacuggacaucgaaa

SEQ ID NO: 1353680 - RNA, 19 nt, Artificial Sequence
  Description of Artificial Sequence: Synthetic oligonucleotide
aaucguccuucuuuacuaa

SEQ ID NO: 1353681 - RNA, 19 nt, Artificial Sequence
  Description of Artificial Sequence: Synthetic oligonucleotide
ugagaagggacguuaccua

SEQ ID NO: 1353682 - RNA, 19 nt, Artificial Sequence
  Description of Artificial Sequence: Synthetic oligonucleotide
cuggaauggaguguugaag

SEQ ID NO: 1353683 - RNA, 19 nt, Artificial Sequence
  Description of Artificial Sequence: Synthetic oligonucleotide
cacaccgucaccugacuug

SEQ ID NO: 1353684 - RNA, 19 nt, Artificial Sequence
  Description of Artificial Sequence: Synthetic oligonucleotide
gcaguaaucagggagccag

SEQ ID NO: 1353685 - RNA, 19 nt, Artificial Sequence
  Description of Artificial Sequence: Synthetic oligonucleotide
gaaagacgugcuaucagca

SEQ ID NO: 1353686 - RNA, 19 nt, Artificial Sequence
  Description of Artificial Sequence: Synthetic oligonucleotide
cgugcuaucagcagcgucg

SEQ ID NO: 1353687 - RNA, 19 nt, Artificial Sequence
  Description of Artificial Sequence: Synthetic oligonucleotide
ggggcugucgcucaggaug

SEQ ID NO: 1353688 - RNA, 19 nt, Artificial Sequence
  Description of Artificial Sequence: Synthetic oligonucleotide
gcuauuggaacuguaaaca

SEQ ID NO: 1353689 - RNA, 19 nt, Artificial Sequence
  Description of Artificial Sequence: Synthetic oligonucleotide
guuacaagcaugaugcacu

SEQ ID NO: 1353690 - RNA, 19 nt, Artificial Sequence
  Description of Artificial Sequence: Synthetic oligonucleotide
cugcaaauggcuauuggaa

SEQ ID NO: 1353691 - RNA, 19 nt, Artificial Sequence
  Description of Artificial Sequence: Synthetic oligonucleotide
  modified_base (7)..(7): a, c, u, g, unknown or other
agcucgnggugagaauccc

SEQ ID NO: 1353692 - RNA, 19 nt, Artificial Sequence
  Description of Artificial Sequence: Synthetic oligonucleotide
ggaugauaucuccuaacug

SEQ ID NO: 1353693 - RNA, 19 nt, Artificial Sequence
  Description of Artificial Sequence: Synthetic oligonucleotide
  modified_base (8)..(8): a, c, u, g, unknown or other
uagcucgnggugagaaucc

SEQ ID NO: 1353694 - RNA, 19 nt, Artificial Sequence
  Description of Artificial Sequence: Synthetic oligonucleotide
aaagagcccgucugucgcu

SEQ ID NO: 1353695 - RNA, 19 nt, Artificial Sequence
  Description of Artificial Sequence: Synthetic oligonucleotide
acgguccacucauagucuc

SEQ ID NO: 1353696 - RNA, 19 nt, Artificial Sequence
  Description of Artificial Sequence: Synthetic oligonucleotide
cucaucagaucggugcacg

SEQ ID NO: 1353697 - RNA, 19 nt, Artificial Sequence
  Description of Artificial Sequence: Synthetic oligonucleotide
acgaaucguccuucuuuac

SEQ ID NO: 1353698 - RNA, 19 nt, Artificial Sequence
  Description of Artificial Sequence: Synthetic oligonucleotide
acaucgaaagacgugcuau

SEQ ID NO: 1353699 - RNA, 19 nt, Artificial Sequence
  Description of Artificial Sequence: Synthetic oligonucleotide
cuggacaucgaaagacgug

SEQ ID NO: 1353700 - RNA, 19 nt, Artificial Sequence
  Description of Artificial Sequence: Synthetic oligonucleotide
ugaguaacucauucuuaua

SEQ ID NO: 1353701 - RNA, 19 nt, Artificial Sequence
  Description of Artificial Sequence: Synthetic oligonucleotide
uuaugccaauuuaggaaua

SEQ ID NO: 1353702 - RNA, 19 nt, Artificial Sequence
  Description of Artificial Sequence: Synthetic oligonucleotide
aguaaucagggagccagug

SEQ ID NO: 1353703 - RNA, 19 nt, Artificial Sequence
  Description of Artificial Sequence: Synthetic oligonucleotide
ucuccuaacuggacaucga

SEQ ID NO: 1353704 - RNA, 19 nt, Artificial Sequence
  Description of Artificial Sequence: Synthetic oligonucleotide
ugcucgcagguaaugggga

SEQ ID NO: 1353705 - RNA, 19 nt, Artificial Sequence
  Description of Artificial Sequence: Synthetic oligonucleotide
guucgcauuaaagucccug

SEQ ID NO: 1353706 - RNA, 19 nt, Artificial Sequence
  Description of Artificial Sequence: Synthetic oligonucleotide
gauucaaaauaaggaaucu

SEQ ID NO: 1353707 - RNA, 19 nt, Artificial Sequence
  Description of Artificial Sequence: Synthetic oligonucleotide
cagcuacucaaauauacaa

SEQ ID NO: 1353708 - RNA, 19 nt, Artificial Sequence
  Description of Artificial Sequence: Synthetic oligonucleotide
  modified_base (9)..(9): a, c, u, g, unknown or other
guagcucgnggugagaauc

SEQ ID NO: 1353709 - RNA, 19 nt, Artificial Sequence
  Description of Artificial Sequence: Synthetic oligonucleotide
gacgaaucguccuucuuua

SEQ ID NO: 1353710 - RNA, 19 nt, Artificial Sequence
  Description of Artificial Sequence: Synthetic oligonucleotide
cuguuaauggauucugcaa

SEQ ID NO: 1353711 - RNA, 19 nt, Artificial Sequence
  Description of Artificial Sequence: Synthetic oligonucleotide
ucagccgcagcauuugauu

SEQ ID NO: 1353712 - RNA, 19 nt, Artificial Sequence
  Description of Artificial Sequence: Synthetic oligonucleotide
gaguguugaaguagugcug

SEQ ID NO: 1353713 - RNA, 19 nt, Artificial Sequence
  Description of Artificial Sequence: Synthetic oligonucleotide
uguccaguaccacgaugca

SEQ ID NO: 1353714 - RNA, 19 nt, Artificial Sequence
  Description of Artificial Sequence: Synthetic oligonucleotide
ugugggccaagccucuagu

SEQ ID NO: 1353715 - RNA, 19 nt, Artificial Sequence
  Description of Artificial Sequence: Synthetic oligonucleotide
caucgaaagacgugcuauc

SEQ ID NO: 1353716 - RNA, 19 nt, Artificial Sequence
  Description of Artificial Sequence: Synthetic oligonucleotide
aucgaaagacgugcuauca

SEQ ID NO: 1353717 - RNA, 19 nt, Artificial Sequence
  Description of Artificial Sequence: Synthetic oligonucleotide
caagcgguggcuacuucug

SEQ ID NO: 1353718 - RNA, 19 nt, Artificial Sequence
  Description of Artificial Sequence: Synthetic oligonucleotide
ugcacucucuccccuggga

SEQ ID NO: 1353719 - RNA, 19 nt, Artificial Sequence
  Description of Artificial Sequence: Synthetic oligonucleotide
ugcuggggacgaaucgucc

SEQ ID NO: 1353720 - RNA, 19 nt, Artificial Sequence
  Description of Artificial Sequence: Synthetic oligonucleotide
acgugcuaucagcagcguc

SEQ ID NO: 1353721 - RNA, 19 nt, Artificial Sequence
  Description of Artificial Sequence: Synthetic oligonucleotide
ggaguguugaaguagugcu

SEQ ID NO: 1353722 - RNA, 19 nt, Artificial Sequence
  Description of Artificial Sequence: Synthetic oligonucleotide
ugcgaaugucaggucauca

SEQ ID NO: 1353723 - RNA, 19 nt, Artificial Sequence
  Description of Artificial Sequence: Synthetic oligonucleotide
aaauggcuauuggaacugu

SEQ ID NO: 1353724 - RNA, 19 nt, Artificial Sequence
  Description of Artificial Sequence: Synthetic oligonucleotide
ucuagucaggcauguuguc

SEQ ID NO: 1353725 - RNA, 19 nt, Artificial Sequence
  Description of Artificial Sequence: Synthetic oligonucleotide
gccuguuacaagcaugaug

SEQ ID NO: 1353726 - RNA, 19 nt, Artificial Sequence
  Description of Artificial Sequence: Synthetic oligonucleotide
uuugauucucaggcuuuga

SEQ ID NO: 1353727 - RNA, 19 nt, Artificial Sequence
  Description of Artificial Sequence: Synthetic oligonucleotide
gccggagucacccagguuc

SEQ ID NO: 1353728 - RNA, 19 nt, Artificial Sequence
  Description of Artificial Sequence: Synthetic oligonucleotide
gaagccggagucacccagg

SEQ ID NO: 1353729 - RNA, 19 nt, Artificial Sequence
  Description of Artificial Sequence: Synthetic oligonucleotide
caccuugaggacacagcgc

SEQ ID NO: 1353730 - RNA, 19 nt, Artificial Sequence
  Description of Artificial Sequence: Synthetic oligonucleotide
gugcucgcagguaaugggg

SEQ ID NO: 1353731 - RNA, 19 nt, Artificial Sequence
  Description of Artificial Sequence: Synthetic oligonucleotide
cugugcguggcuguucacg

SEQ ID NO: 1353732 - RNA, 19 nt, Artificial Sequence
  Description of Artificial Sequence: Synthetic oligonucleotide
cacucauagucucuccauc

SEQ ID NO: 1353733 - RNA, 19 nt, Artificial Sequence
  Description of Artificial Sequence: Synthetic oligonucleotide
ucagaucggugcacgacuu

SEQ ID NO: 1353734 - RNA, 19 nt, Artificial Sequence
  Description of Artificial Sequence: Synthetic oligonucleotide
gaaugucaggucaucacua

SEQ ID NO: 1353735 - RNA, 19 nt, Artificial Sequence
  Description of Artificial Sequence: Synthetic oligonucleotide
aacacggcuuuaacuuaag

SEQ ID NO: 1353736 - RNA, 19 nt, Artificial Sequence
  Description of Artificial Sequence: Synthetic oligonucleotide
cgaaagacgugcuaucagc

SEQ ID NO: 1353737 - RNA, 19 nt, Artificial Sequence
  Description of Artificial Sequence: Synthetic oligonucleotide
cacucucuccccugggaag

SEQ ID NO: 1353738 - RNA, 19 nt, Artificial Sequence
  Description of Artificial Sequence: Synthetic oligonucleotide
cagaguggacgacuucagc

SEQ ID NO: 1353739 - RNA, 19 nt, Artificial Sequence
  Description of Artificial Sequence: Synthetic oligonucleotide
uucacaccgucaccugacu

SEQ ID NO: 1353740 - RNA, 19 nt, Artificial Sequence
  Description of Artificial Sequence: Synthetic oligonucleotide
agcuuaagucauaggaaga

SEQ ID NO: 1353741 - RNA, 19 nt, Artificial Sequence
  Description of Artificial Sequence: Synthetic oligonucleotide
acgcugucaccuugaggac

SEQ ID NO: 1353742 - RNA, 19 nt, Artificial Sequence
  Description of Artificial Sequence: Synthetic oligonucleotide
gucugucgcugucaggaug

SEQ ID NO: 1353743 - RNA, 19 nt, Artificial Sequence
  Description of Artificial Sequence: Synthetic oligonucleotide
guacaugguacaugguaaa

SEQ ID NO: 1353744 - RNA, 19 nt, Artificial Sequence
  Description of Artificial Sequence: Synthetic oligonucleotide
agcaugaugcacugagaua

SEQ ID NO: 1353745 - RNA, 19 nt, Artificial Sequence
  Description of Artificial Sequence: Synthetic oligonucleotide
cauugccuuucuguuaaug

SEQ ID NO: 1353746 - RNA, 19 nt, Artificial Sequence
  Description of Artificial Sequence: Synthetic oligonucleotide
gacguuaccuacugcaaau

SEQ ID NO: 1353747 - RNA, 19 nt, Artificial Sequence
  Description of Artificial Sequence: Synthetic oligonucleotide
  modified_base (4)..(4): a, c, u, g, unknown or other
ucgnggugagaaucccaac

SEQ ID NO: 1353748 - RNA, 19 nt, Artificial Sequence
  Description of Artificial Sequence: Synthetic oligonucleotide
accguucacauguucgcau

SEQ ID NO: 1353749 - RNA, 19 nt, Artificial Sequence
  Description of Artificial Sequence: Synthetic oligonucleotide
gucgcugucaggaugauau

SEQ ID NO: 1353750 - RNA, 19 nt, Artificial Sequence
  Description of Artificial Sequence: Synthetic oligonucleotide
gauacagcaaugacaugua

SEQ ID NO: 1353751 - RNA, 19 nt, Artificial Sequence
  Description of Artificial Sequence: Synthetic oligonucleotide
acuggacaucgaaagacgu

SEQ ID NO: 1353752 - RNA, 19 nt, Artificial Sequence
  Description of Artificial Sequence: Synthetic oligonucleotide
cugauauguugacauagua

SEQ ID NO: 1353753 - RNA, 19 nt, Artificial Sequence
  Description of Artificial Sequence: Synthetic oligonucleotide
  modified_base (5)..(5): a, c, u, g, unknown or other
cucgnggugagaaucccaa

SEQ ID NO: 1353754 - RNA, 19 nt, Artificial Sequence
  Description of Artificial Sequence: Synthetic oligonucleotide
gagauacagcaaugacaug

SEQ ID NO: 1353755 - RNA, 19 nt, Artificial Sequence
  Description of Artificial Sequence: Synthetic oligonucleotide
aacucacagacgaaaucuu

SEQ ID NO: 1353756 - RNA, 19 nt, Artificial Sequence
  Description of Artificial Sequence: Synthetic oligonucleotide
uguaaacauuaagcuggac

SEQ ID NO: 1353757 - RNA, 19 nt, Artificial Sequence
  Description of Artificial Sequence: Synthetic oligonucleotide
cacugcgaaugucagguca

SEQ ID NO: 1353758 - RNA, 19 nt, Artificial Sequence
  Description of Artificial Sequence: Synthetic oligonucleotide
cuuuacuaaccguucacau

SEQ ID NO: 1353759 - RNA, 19 nt, Artificial Sequence
  Description of Artificial Sequence: Synthetic oligonucleotide
cagccgcagcauuugauuc

SEQ ID NO: 1353760 - RNA, 19 nt, Artificial Sequence
  Description of Artificial Sequence: Synthetic oligonucleotide
auggcuauuggaacuguaa

SEQ ID NO: 1353761 - RNA, 19 nt, Artificial Sequence
  Description of Artificial Sequence: Synthetic oligonucleotide
caucagaucggugcacgac

SEQ ID NO: 1353762 - RNA, 19 nt, Artificial Sequence
  Description of Artificial Sequence: Synthetic oligonucleotide
cucuaagggugugaggcuc

SEQ ID NO: 1353763 - RNA, 19 nt, Artificial Sequence
  Description of Artificial Sequence: Synthetic oligonucleotide
ggaagccggagucacccag

SEQ ID NO: 1353764 - RNA, 19 nt, Artificial Sequence
  Description of Artificial Sequence: Synthetic oligonucleotide
cucuagucaggcauguugu

SEQ ID NO: 1353765 - RNA, 19 nt, Artificial Sequence
  Description of Artificial Sequence: Synthetic oligonucleotide
gaucggugcacgacuucgc

SEQ ID NO: 1353766 - RNA, 19 nt, Artificial Sequence
  Description of Artificial Sequence: Synthetic oligonucleotide
auauggagucacugcgaau

SEQ ID NO: 1353767 - RNA, 19 nt, Artificial Sequence
  Description of Artificial Sequence: Synthetic oligonucleotide
acguuaccuacugcaaaug

SEQ ID NO: 1353768 - RNA, 19 nt, Artificial Sequence
  Description of Artificial Sequence: Synthetic oligonucleotide
gacaucgaaagacgugcua

SEQ ID NO: 1353769 - RNA, 19 nt, Artificial Sequence
  Description of Artificial Sequence: Synthetic oligonucleotide
cguuaccuacugcaaaugg

SEQ ID NO: 1353770 - RNA, 19 nt, Artificial Sequence
  Description of Artificial Sequence: Synthetic oligonucleotide
auuccaagaugcacucucu

SEQ ID NO: 1353771 - RNA, 19 nt, Artificial Sequence
  Description of Artificial Sequence: Synthetic oligonucleotide
agaagggacguuaccuacu

SEQ ID NO: 1353772 - RNA, 19 nt, Artificial Sequence
  Description of Artificial Sequence: Synthetic oligonucleotide
gcaaauggcuauuggaacu

SEQ ID NO: 1353773 - RNA, 19 nt, Artificial Sequence
  Description of Artificial Sequence: Synthetic oligonucleotide
uuucuaccaccaaguuaaa

SEQ ID NO: 1353774 - RNA, 19 nt, Artificial Sequence
  Description of Artificial Sequence: Synthetic oligonucleotide
gcgaaugucaggucaucac

SEQ ID NO: 1353775 - RNA, 19 nt, Artificial Sequence
  Description of Artificial Sequence: Synthetic oligonucleotide
caagccucuagucaggcau

SEQ ID NO: 1353776 - RNA, 19 nt, Artificial Sequence
  Description of Artificial Sequence: Synthetic oligonucleotide
caagcaugaugcacugaga

SEQ ID NO: 1353777 - RNA, 19 nt, Artificial Sequence
  Description of Artificial Sequence: Synthetic oligonucleotide
ucacaccgucaccugacuu

SEQ ID NO: 1353778 - RNA, 19 nt, Artificial Sequence
  Description of Artificial Sequence: Synthetic oligonucleotide
agcagcgucggggcugucg

SEQ ID NO: 1353779 - RNA, 19 nt, Artificial Sequence
  Description of Artificial Sequence: Synthetic oligonucleotide
cuacugcaaauggcuauug

SEQ ID NO: 1353780 - RNA, 19 nt, Artificial Sequence
  Description of Artificial Sequence: Synthetic oligonucleotide
cacagacgaaaucuuuuaa

SEQ ID NO: 1353781 - RNA, 19 nt, Artificial Sequence
  Description of Artificial Sequence: Synthetic oligonucleotide
cacgacuucgccgccccgg

SEQ ID NO: 1353782 - RNA, 19 nt, Artificial Sequence
  Description of Artificial Sequence: Synthetic oligonucleotide
accacgcugucaccuugag

SEQ ID NO: 1353783 - RNA, 19 nt, Artificial Sequence
  Description of Artificial Sequence: Synthetic oligonucleotide
uugugcgcaggcagcuuaa

SEQ ID NO: 1353784 - RNA, 19 nt, Artificial Sequence
  Description of Artificial Sequence: Synthetic oligonucleotide
caccaaguuaaagaaggaa

SEQ ID NO: 1353785 - RNA, 19 nt, Artificial Sequence
  Description of Artificial Sequence: Synthetic oligonucleotide
cagcagucaauuauacaua

SEQ ID NO: 1353786 - RNA, 19 nt, Artificial Sequence
  Description of Artificial Sequence: Synthetic oligonucleotide
guucgccgugugcaagcgg

SEQ ID NO: 1353787 - RNA, 19 nt, Artificial Sequence
  Description of Artificial Sequence: Synthetic oligonucleotide
gcuuaagucauaggaagaa

SEQ ID NO: 1353788 - RNA, 19 nt, Artificial Sequence
  Description of Artificial Sequence: Synthetic oligonucleotide
cuaucucuccugugggcca

SEQ ID NO: 1353789 - RNA, 19 nt, Artificial Sequence
  Description of Artificial Sequence: Synthetic oligonucleotide
uguucgcauuaaagucccu

SEQ ID NO: 1353790 - RNA, 19 nt, Artificial Sequence
  Description of Artificial Sequence: Synthetic oligonucleotide
gcugcuacccagcaaaggu

SEQ ID NO: 1353791 - RNA, 19 nt, Artificial Sequence
  Description of Artificial Sequence: Synthetic oligonucleotide
caacaggguugcuggggac

SEQ ID NO: 1353792 - RNA, 19 nt, Artificial Sequence
  Description of Artificial Sequence: Synthetic oligonucleotide
cuccaacgccaucugcaac

SEQ ID NO: 1353793 - RNA, 19 nt, Artificial Sequence
  Description of Artificial Sequence: Synthetic oligonucleotide
uggcuguucacgagaucuu

SEQ ID NO: 1353794 - RNA, 19 nt, Artificial Sequence
  Description of Artificial Sequence: Synthetic oligonucleotide
acugcgaaugucaggucau

SEQ ID NO: 1353795 - RNA, 19 nt, Artificial Sequence
  Description of Artificial Sequence: Synthetic oligonucleotide
gcagcuuaagucauaggaa

SEQ ID NO: 1353796 - RNA, 19 nt, Artificial Sequence
  Description of Artificial Sequence: Synthetic oligonucleotide
uacuaaccguucacauguu

SEQ ID NO: 1353797 - RNA, 19 nt, Artificial Sequence
  Description of Artificial Sequence: Synthetic oligonucleotide
gaguaaguuugugcucgca

SEQ ID NO: 1353798 - RNA, 19 nt, Artificial Sequence
  Description of Artificial Sequence: Synthetic oligonucleotide
gagacgguccacucauagu

SEQ ID NO: 1353799 - RNA, 19 nt, Artificial Sequence
  Description of Artificial Sequence: Synthetic oligonucleotide
acauuaagcuggacucaga

SEQ ID NO: 1353800 - RNA, 19 nt, Artificial Sequence
  Description of Artificial Sequence: Synthetic oligonucleotide
ucgccgugugcaagcggug

SEQ ID NO: 1353801 - RNA, 19 nt, Artificial Sequence
  Description of Artificial Sequence: Synthetic oligonucleotide
ggaauggaguguugaagua

SEQ ID NO: 1353802 - RNA, 19 nt, Artificial Sequence
  Description of Artificial Sequence: Synthetic oligonucleotide
caacgccaucugcaacucc

SEQ ID NO: 1353803 - RNA, 19 nt, Artificial Sequence
  Description of Artificial Sequence: Synthetic oligonucleotide
gccgcggagcaauggaaag

SEQ ID NO: 1353804 - RNA, 19 nt, Artificial Sequence
  Description of Artificial Sequence: Synthetic oligonucleotide
acgacuucgccgccccgga

SEQ ID NO: 1353805 - RNA, 19 nt, Artificial Sequence
  Description of Artificial Sequence: Synthetic oligonucleotide
gcgcaggcagcuuaaguca

SEQ ID NO: 1353806 - RNA, 19 nt, Artificial Sequence
  Description of Artificial Sequence: Synthetic oligonucleotide
cuguuacaagcaugaugca

SEQ ID NO: 1353807 - RNA, 19 nt, Artificial Sequence
  Description of Artificial Sequence: Synthetic oligonucleotide
ggacguuaccuacugcaaa

SEQ ID NO: 1353808 - RNA, 19 nt, Artificial Sequence
  Description of Artificial Sequence: Synthetic oligonucleotide
ugcaagcgguggcuacuuc

SEQ ID NO: 1353809 - RNA, 19 nt, Artificial Sequence
  Description of Artificial Sequence: Synthetic oligonucleotide
cugcuacccagcaaaggua

SEQ ID NO: 1353810 - RNA, 19 nt, Artificial Sequence
  Description of Artificial Sequence: Synthetic oligonucleotide
gcagcgucggggcugucgc

SEQ ID NO: 1353811 - RNA, 19 nt, Artificial Sequence
  Description of Artificial Sequence: Synthetic oligonucleotide
cuguggacucagugugcug

SEQ ID NO: 1353812 - RNA, 19 nt, Artificial Sequence
  Description of Artificial Sequence: Synthetic oligonucleotide
agguaauggggaagucuga

SEQ ID NO: 1353813 - RNA, 19 nt, Artificial Sequence
  Description of Artificial Sequence: Synthetic oligonucleotide
ccuuaagaguaaguuugug

SEQ ID NO: 1353814 - RNA, 19 nt, Artificial Sequence
  Description of Artificial Sequence: Synthetic oligonucleotide
  modified_base (3)..(3): a, c, u, g, unknown or other
cgnggugagaaucccaaca

SEQ ID NO: 1353815 - RNA, 19 nt, Artificial Sequence
  Description of Artificial Sequence: Synthetic oligonucleotide
cggugcacgacuucgccgc

SEQ ID NO: 1353816 - RNA, 19 nt, Artificial Sequence
  Description of Artificial Sequence: Synthetic oligonucleotide
cagguucgccgugugcaag

SEQ ID NO: 1353817 - RNA, 19 nt, Artificial Sequence
  Description of Artificial Sequence: Synthetic oligonucleotide
ccugagaacugagacgguc

SEQ ID NO: 1353818 - RNA, 19 nt, Artificial Sequence
  Description of Artificial Sequence: Synthetic oligonucleotide
gcagaguggacgacuucag

SEQ ID NO: 1353819 - RNA, 19 nt, Artificial Sequence
  Description of Artificial Sequence: Synthetic oligonucleotide
cagaucggugcacgacuuc

SEQ ID NO: 1353820 - RNA, 19 nt, Artificial Sequence
  Description of Artificial Sequence: Synthetic oligonucleotide
ccaaccccauuccaagaug

SEQ ID NO: 1353821 - RNA, 19 nt, Artificial Sequence
  Description of Artificial Sequence: Synthetic oligonucleotide
auaaaacgagagacagcua

SEQ ID NO: 1353822 - RNA, 19 nt, Artificial Sequence
  Description of Artificial Sequence: Synthetic oligonucleotide
gguucgccgugugcaagcg

SEQ ID NO: 1353823 - RNA, 19 nt, Artificial Sequence
  Description of Artificial Sequence: Synthetic oligonucleotide
uaccacgaugcaggcugug

SEQ ID NO: 1353824 - RNA, 19 nt, Artificial Sequence
  Description of Artificial Sequence: Synthetic oligonucleotide
ggacgaaucguccuucuuu

SEQ ID NO: 1353825 - RNA, 19 nt, Artificial Sequence
  Description of Artificial Sequence: Synthetic oligonucleotide
cacgagaucuucacaccgu

SEQ ID NO: 1353826 - RNA, 19 nt, Artificial Sequence
  Description of Artificial Sequence: Synthetic oligonucleotide
agacagcuacucaaauaua

SEQ ID NO: 1353827 - RNA, 19 nt, Artificial Sequence
  Description of Artificial Sequence: Synthetic oligonucleotide
uggcuacuucuguccagua

SEQ ID NO: 1353828 - RNA, 19 nt, Artificial Sequence
  Description of Artificial Sequence: Synthetic oligonucleotide
agagcccgucugucgcugu

SEQ ID NO: 1353829 - RNA, 19 nt, Artificial Sequence
  Description of Artificial Sequence: Synthetic oligonucleotide
augcacugagauacagcaa

SEQ ID NO: 1353830 - RNA, 19 nt, Artificial Sequence
  Description of Artificial Sequence: Synthetic oligonucleotide
gcuguucacgagaucuuca

SEQ ID NO: 1353831 - RNA, 19 nt, Artificial Sequence
  Description of Artificial Sequence: Synthetic oligonucleotide
ugucgcugucaggaugaua

SEQ ID NO: 1353832 - RNA, 19 nt, Artificial Sequence
  Description of Artificial Sequence: Synthetic oligonucleotide
cugcgaaugucaggucauc

SEQ ID NO: 1353833 - RNA, 19 nt, Artificial Sequence
  Description of Artificial Sequence: Synthetic oligonucleotide
ccgucugucgcugucagga

SEQ ID NO: 1353834 - RNA, 19 nt, Artificial Sequence
  Description of Artificial Sequence: Synthetic oligonucleotide
gagcccgucugucgcuguc

SEQ ID NO: 1353835 - RNA, 19 nt, Artificial Sequence
  Description of Artificial Sequence: Synthetic oligonucleotide
ggccaagccucuagucagg

SEQ ID NO: 1353836 - RNA, 19 nt, Artificial Sequence
  Description of Artificial Sequence: Synthetic oligonucleotide
agccgcggagcaauggaaa

SEQ ID NO: 1353837 - RNA, 19 nt, Artificial Sequence
  Description of Artificial Sequence: Synthetic oligonucleotide
gcugucgcucaggaugacc

SEQ ID NO: 1353838 - RNA, 19 nt, Artificial Sequence
  Description of Artificial Sequence: Synthetic oligonucleotide
ccaacaggguugcugggga

SEQ ID NO: 1353839 - RNA, 19 nt, Artificial Sequence
  Description of Artificial Sequence: Synthetic oligonucleotide
auuugugcgcaggcagcuu

SEQ ID NO: 1353840 - RNA, 19 nt, Artificial Sequence
  Description of Artificial Sequence: Synthetic oligonucleotide
gcagguaauggggaagucu

SEQ ID NO: 1353841 - RNA, 19 nt, Artificial Sequence
  Description of Artificial Sequence: Synthetic oligonucleotide
agcccgucugucgcuguca

SEQ ID NO: 1353842 - RNA, 19 nt, Artificial Sequence
  Description of Artificial Sequence: Synthetic oligonucleotide
ggugcacgacuucgccgcc

SEQ ID NO: 1353843 - RNA, 19 nt, Artificial Sequence
  Description of Artificial Sequence: Synthetic oligonucleotide
caccugacuugcacagaaa

SEQ ID NO: 1353844 - RNA, 19 nt, Artificial Sequence
  Description of Artificial Sequence: Synthetic oligonucleotide
gcccgucugucgcugucag

SEQ ID NO: 1353845 - RNA, 19 nt, Artificial Sequence
  Description of Artificial Sequence: Synthetic oligonucleotide
ccgcggagcaauggaaagc

SEQ ID NO: 1353846 - RNA, 19 nt, Artificial Sequence
  Description of Artificial Sequence: Synthetic oligonucleotide
gggacguuaccuacugcaa

SEQ ID NO: 1353847 - RNA, 19 nt, Artificial Sequence
  Description of Artificial Sequence: Synthetic oligonucleotide
gcucaucagaucggugcac

SEQ ID NO: 1353848 - RNA, 19 nt, Artificial Sequence
  Description of Artificial Sequence: Synthetic oligonucleotide
gcuggggacgaaucguccu

SEQ ID NO: 1353849 - RNA, 19 nt, Artificial Sequence
  Description of Artificial Sequence: Synthetic oligonucleotide
cuacccagcaaagguacuu

SEQ ID NO: 1353850 - RNA, 19 nt, Artificial Sequence
  Description of Artificial Sequence: Synthetic oligonucleotide
ggcaugcucuaagggugug

SEQ ID NO: 1353851 - RNA, 19 nt, Artificial Sequence
  Description of Artificial Sequence: Synthetic oligonucleotide
agccggagucacccagguu

SEQ ID NO: 1353852 - RNA, 19 nt, Artificial Sequence
  Description of Artificial Sequence: Synthetic oligonucleotide
gccaaccccauuccaagau

SEQ ID NO: 1353853 - RNA, 19 nt, Artificial Sequence
  Description of Artificial Sequence: Synthetic oligonucleotide
ccgucaccugacuugcaca

SEQ ID NO: 1353854 - RNA, 19 nt, Artificial Sequence
  Description of Artificial Sequence: Synthetic oligonucleotide
gcucuaagggugugaggcu

SEQ ID NO: 1353855 - RNA, 19 nt, Artificial Sequence
  Description of Artificial Sequence: Synthetic oligonucleotide
  modified_base (6)..(6): a, c, u, g, unknown or other
gcucgnggugagaauccca

SEQ ID NO: 1353856 - RNA, 19 nt, Artificial Sequence
  Description of Artificial Sequence: Synthetic oligonucleotide
ccagcaaagguacuuuguu

SEQ ID NO: 1353857 - RNA, 19 nt, Artificial Sequence
  Description of Artificial Sequence: Synthetic oligonucleotide
cgagaucuucacaccguca

SEQ ID NO: 1353858 - RNA, 19 nt, Artificial Sequence
  Description of Artificial Sequence: Synthetic oligonucleotide
cccgucugucgcugucagg

SEQ ID NO: 1353859 - RNA, 19 nt, Artificial Sequence
  Description of Artificial Sequence: Synthetic oligonucleotide
cugagacgguccacucaua

SEQ ID NO: 1353860 - RNA, 19 nt, Artificial Sequence
  Description of Artificial Sequence: Synthetic oligonucleotide
gcacgacuucgccgccccg

SEQ ID NO: 1353861 - RNA, 19 nt, Artificial Sequence
  Description of Artificial Sequence: Synthetic oligonucleotide
cuggggacgaaucguccuu

SEQ ID NO: 1353862 - RNA, 19 nt, Artificial Sequence
  Description of Artificial Sequence: Synthetic oligonucleotide
cgaaucguccuucuuuacu

SEQ ID NO: 1353863 - RNA, 19 nt, Artificial Sequence
  Description of Artificial Sequence: Synthetic oligonucleotide
gacgugcuaucagcagcgu

SEQ ID NO: 1353864 - RNA, 19 nt, Artificial Sequence
  Description of Artificial Sequence: Synthetic oligonucleotide
ggacaucgaaagacgugcu

SEQ ID NO: 1353865 - RNA, 19 nt, Artificial Sequence
  Description of Artificial Sequence: Synthetic oligonucleotide
ccgaggcaggcauccucac

SEQ ID NO: 1353866 - RNA, 19 nt, Artificial Sequence
  Description of Artificial Sequence: Synthetic oligonucleotide
ggggacgaaucguccuucu

SEQ ID NO: 1353867 - RNA, 19 nt, Artificial Sequence
  Description of Artificial Sequence: Synthetic oligonucleotide
gaaucccaacaggguugcu

SEQ ID NO: 1353868 - RNA, 19 nt, Artificial Sequence
  Description of Artificial Sequence: Synthetic oligonucleotide
guaccacgaugcaggcugu

SEQ ID NO: 1353869 - RNA, 19 nt, Artificial Sequence
  Description of Artificial Sequence: Synthetic oligonucleotide
ccacacucauauggaguca

SEQ ID NO: 1353870 - RNA, 19 nt, Artificial Sequence
  Description of Artificial Sequence: Synthetic oligonucleotide
cccggaccaccaggaagcc

SEQ ID NO: 1353871 - RNA, 19 nt, Artificial Sequence
  Description of Artificial Sequence: Synthetic oligonucleotide
gugcaagcgguggcuacuu

SEQ ID NO: 1353872 - RNA, 19 nt, Artificial Sequence
  Description of Artificial Sequence: Synthetic oligonucleotide
gggcaugcucuaagggugu

SEQ ID NO: 1353873 - RNA, 19 nt, Artificial Sequence
  Description of Artificial Sequence: Synthetic oligonucleotide
gggacgaaucguccuucuu

SEQ ID NO: 1353874 - RNA, 19 nt, Artificial Sequence
  Description of Artificial Sequence: Synthetic oligonucleotide
cguggcuguucacgagauc

SEQ ID NO: 1353875 - RNA, 19 nt, Artificial Sequence
  Description of Artificial Sequence: Synthetic oligonucleotide
ggcugucgcucaggaugac

SEQ ID NO: 1353876 - RNA, 19 nt, Artificial Sequence
  Description of Artificial Sequence: Synthetic oligonucleotide
ccguucacauguucgcauu

SEQ ID NO: 1353877 - RNA, 19 nt, Artificial Sequence
  Description of Artificial Sequence: Synthetic oligonucleotide
cagcgucggggcugucgcu

SEQ ID NO: 1353878 - RNA, 19 nt, Artificial Sequence
  Description of Artificial Sequence: Synthetic oligonucleotide
gcauugccuuucuguuaau

SEQ ID NO: 1353879 - RNA, 19 nt, Artificial Sequence
  Description of Artificial Sequence: Synthetic oligonucleotide
cgacuucgccgccccggac

SEQ ID NO: 1353880 - RNA, 19 nt, Artificial Sequence
  Description of Artificial Sequence: Synthetic oligonucleotide
cagcagcgucggggcuguc

SEQ ID NO: 1353881 - RNA, 19 nt, Artificial Sequence
  Description of Artificial Sequence: Synthetic oligonucleotide
cgucugucgcugucaggau

SEQ ID NO: 1353882 - RNA, 19 nt, Artificial Sequence
  Description of Artificial Sequence: Synthetic oligonucleotide
gccucuagucaggcauguu

SEQ ID NO: 1353883 - RNA, 19 nt, Artificial Sequence
  Description of Artificial Sequence: Synthetic oligonucleotide
aagguuguaaauuuuaaag

SEQ ID NO: 1353884 - RNA, 19 nt, Artificial Sequence
  Description of Artificial Sequence: Synthetic oligonucleotide
uauaaguuaauaaauguca

SEQ ID NO: 1353885 - RNA, 19 nt, Artificial Sequence
  Description of Artificial Sequence: Synthetic oligonucleotide
aauaucacuugauuagacc

SEQ ID NO: 1353886 - RNA, 19 nt, Artificial Sequence
  Description of Artificial Sequence: Synthetic oligonucleotide
uacauaaugacucacauuc

SEQ ID NO: 1353887 - RNA, 19 nt, Artificial Sequence
  Description of Artificial Sequence: Synthetic oligonucleotide
aaaagagagagagagagag

SEQ ID NO: 1353888 - RNA, 19 nt, Artificial Sequence
  Description of Artificial Sequence: Synthetic oligonucleotide
uacaugacgagaaagcacg

SEQ ID NO: 1353889 - RNA, 19 nt, Artificial Sequence
  Description of Artificial Sequence: Synthetic oligonucleotide
uguaucaauaggauggagg

SEQ ID NO: 1353890 - RNA, 19 nt, Artificial Sequence
  Description of Artificial Sequence: Synthetic oligonucleotide
uacguucucauucaaaagg

SEQ ID NO: 1353891 - RNA, 19 nt, Artificial Sequence
  Description of Artificial Sequence: Synthetic oligonucleotide
auuaagaguaagcuaacac

SEQ ID NO: 1353892 - RNA, 19 nt, Artificial Sequence
  Description of Artificial Sequence: Synthetic oligonucleotide
aauaauuccuuagcgaaac

SEQ ID NO: 1353893 - RNA, 19 nt, Artificial Sequence
  Description of Artificial Sequence: Synthetic oligonucleotide
agaucaauuuguuacaauc

SEQ ID NO: 1353894 - RNA, 19 nt, Artificial Sequence
  Description of Artificial Sequence: Synthetic oligonucleotide
gaauacauaacaccuacag

SEQ ID NO: 1353895 - RNA, 19 nt, Artificial Sequence
  Description of Artificial Sequence: Synthetic oligonucleotide
cacuguaucaauaggaugg

SEQ ID NO: 1353896 - RNA, 19 nt, Artificial Sequence
  Description of Artificial Sequence: Synthetic oligonucleotide
uaagaguaagcuaacacug

SEQ ID NO: 1353897 - RNA, 19 nt, Artificial Sequence
  Description of Artificial Sequence: Synthetic oligonucleotide
uuuuauggauaauuuaucc

SEQ ID NO: 1353898 - RNA, 19 nt, Artificial Sequence
  Description of Artificial Sequence: Synthetic oligonucleotide
uugcucacuagcaagaggg

SEQ ID NO: 1353899 - RNA, 19 nt, Artificial Sequence
  Description of Artificial Sequence: Synthetic oligonucleotide
ugucacuauagcaacaucc

SEQ ID NO: 1353900 - RNA, 19 nt, Artificial Sequence
  Description of Artificial Sequence: Synthetic oligonucleotide
uuuugcucaauguacgacg

SEQ ID NO: 1353901 - RNA, 19 nt, Artificial Sequence
  Description of Artificial Sequence: Synthetic oligonucleotide
aguauaaguuaauaaaugu

SEQ ID NO: 1353902 - RNA, 19 nt, Artificial Sequence
  Description of Artificial Sequence: Synthetic oligonucleotide
aaacuuuaccccugaaagg

SEQ ID NO: 1353903 - RNA, 19 nt, Artificial Sequence
  Description of Artificial Sequence: Synthetic oligonucleotide
aagagagagagagagagag

SEQ ID NO: 1353904 - RNA, 19 nt, Artificial Sequence
  Description of Artificial Sequence: Synthetic oligonucleotide
cauaggaauacauaacacc

SEQ ID NO: 1353905 - RNA, 19 nt, Artificial Sequence
  Description of Artificial Sequence: Synthetic oligonucleotide
uuuguuacaaucacuauuu

SEQ ID NO: 1353906 - RNA, 19 nt, Artificial Sequence
  Description of Artificial Sequence: Synthetic oligonucleotide
acaaacaccagacauuaag

SEQ ID NO: 1353907 - RNA, 19 nt, Artificial Sequence
  Description of Artificial Sequence: Synthetic oligonucleotide
aggaauacauaacaccuac

SEQ ID NO: 1353908 - RNA, 19 nt, Artificial Sequence
  Description of Artificial Sequence: Synthetic oligonucleotide
ugugcguuuauuuugcuca

SEQ ID NO: 1353909 - RNA, 19 nt, Artificial Sequence
  Description of Artificial Sequence: Synthetic oligonucleotide
ucauacaugacgagaaagc

SEQ ID NO: 1353910 - RNA, 19 nt, Artificial Sequence
  Description of Artificial Sequence: Synthetic oligonucleotide
gaaauaauuccuuagcgaa

SEQ ID NO: 1353911 - RNA, 19 nt, Artificial Sequence
  Description of Artificial Sequence: Synthetic oligonucleotide
agcaucuacguucucauuc

SEQ ID NO: 1353912 - RNA, 19 nt, Artificial Sequence
  Description of Artificial Sequence: Synthetic oligonucleotide
acaaacuaggcaaagcccc

SEQ ID NO: 1353913 - RNA, 19 nt, Artificial Sequence
  Description of Artificial Sequence: Synthetic oligonucleotide
aauaucagcuccccuccac

SEQ ID NO: 1353914 - RNA, 19 nt, Artificial Sequence
  Description of Artificial Sequence: Synthetic oligonucleotide
accguauagaaauacaaca

SEQ ID NO: 1353915 - RNA, 19 nt, Artificial Sequence
  Description of Artificial Sequence: Synthetic oligonucleotide
uuagaagacagaaagcgua

SEQ ID NO: 1353916 - RNA, 19 nt, Artificial Sequence
  Description of Artificial Sequence: Synthetic oligonucleotide
uuugcucaauguacgacgg

SEQ ID NO: 1353917 - RNA, 19 nt, Artificial Sequence
  Description of Artificial Sequence: Synthetic oligonucleotide
aucacuauuugguaaagca

SEQ ID NO: 1353918 - RNA, 19 nt, Artificial Sequence
  Description of Artificial Sequence: Synthetic oligonucleotide
aguuaauaaaugucaagcu

SEQ ID NO: 1353919 - RNA, 19 nt, Artificial Sequence
  Description of Artificial Sequence: Synthetic oligonucleotide
ugcgaaauaauuccuuagc

SEQ ID NO: 1353920 - RNA, 19 nt, Artificial Sequence
  Description of Artificial Sequence: Synthetic oligonucleotide
uucucaacaguaaagggaa

SEQ ID NO: 1353921 - RNA, 19 nt, Artificial Sequence
  Description of Artificial Sequence: Synthetic oligonucleotide
uucuccuacacuguaauag

SEQ ID NO: 1353922 - RNA, 19 nt, Artificial Sequence
  Description of Artificial Sequence: Synthetic oligonucleotide
auaaaugucaagcuaccgu

SEQ ID NO: 1353923 - RNA, 19 nt, Artificial Sequence
  Description of Artificial Sequence: Synthetic oligonucleotide
cuaaauaucagcuccccuc

SEQ ID NO: 1353924 - RNA, 19 nt, Artificial Sequence
  Description of Artificial Sequence: Synthetic oligonucleotide
uuauaguuucaccaugaca

SEQ ID NO: 1353925 - RNA, 19 nt, Artificial Sequence
  Description of Artificial Sequence: Synthetic oligonucleotide
aaauaucacuugauuagac

SEQ ID NO: 1353926 - RNA, 19 nt, Artificial Sequence
  Description of Artificial Sequence: Synthetic oligonucleotide
gacacagagacaaacuagg

SEQ ID NO: 1353927 - RNA, 19 nt, Artificial Sequence
  Description of Artificial Sequence: Synthetic oligonucleotide
gagagagagagagagagag

SEQ ID NO: 1353928 - RNA, 19 nt, Artificial Sequence
  Description of Artificial Sequence: Synthetic oligonucleotide
aguaagcuaacacuggugu

SEQ ID NO: 1353929 - RNA, 19 nt, Artificial Sequence
  Description of Artificial Sequence: Synthetic oligonucleotide
aacaccagacauuaagagu

SEQ ID NO: 1353930 - RNA, 19 nt, Artificial Sequence
  Description of Artificial Sequence: Synthetic oligonucleotide
ucuacguucucauucaaaa

SEQ ID NO: 1353931 - RNA, 19 nt, Artificial Sequence
  Description of Artificial Sequence: Synthetic oligonucleotide
uauuugguaaagcaaacuu

SEQ ID NO: 1353932 - RNA, 19 nt, Artificial Sequence
  Description of Artificial Sequence: Synthetic oligonucleotide
aaucacuauuugguaaagc

SEQ ID NO: 1353933 - RNA, 19 nt, Artificial Sequence
  Description of Artificial Sequence: Synthetic oligonucleotide
agugagacggaccaugaag

SEQ ID NO: 1353934 - RNA, 19 nt, Artificial Sequence
  Description of Artificial Sequence: Synthetic oligonucleotide
aacuuuaccccugaaagga

SEQ ID NO: 1353935 - RNA, 19 nt, Artificial Sequence
  Description of Artificial Sequence: Synthetic oligonucleotide
uccuuagcgaaacacggag

SEQ ID NO: 1353936 - RNA, 19 nt, Artificial Sequence
  Description of Artificial Sequence: Synthetic oligonucleotide
aacagaucaauuuguuaca

SEQ ID NO: 1353937 - RNA, 19 nt, Artificial Sequence
  Description of Artificial Sequence: Synthetic oligonucleotide
uuuagaagacagaaagcgu

SEQ ID NO: 1353938 - RNA, 19 nt, Artificial Sequence
  Description of Artificial Sequence: Synthetic oligonucleotide
ucucacaagauccuucuac

SEQ ID NO: 1353939 - RNA, 19 nt, Artificial Sequence
  Description of Artificial Sequence: Synthetic oligonucleotide
caguauaaguuaauaaaug

SEQ ID NO: 1353940 - RNA, 19 nt, Artificial Sequence
  Description of Artificial Sequence: Synthetic oligonucleotide
uucagugucacacgugcag

SEQ ID NO: 1353941 - RNA, 19 nt, Artificial Sequence
  Description of Artificial Sequence: Synthetic oligonucleotide
aacugcuaagaaugguccg

SEQ ID NO: 1353942 - RNA, 19 nt, Artificial Sequence
  Description of Artificial Sequence: Synthetic oligonucleotide
uaauaguuauaguuucacc

SEQ ID NO: 1353943 - RNA, 19 nt, Artificial Sequence
  Description of Artificial Sequence: Synthetic oligonucleotide
aauccauaggaccauggau

SEQ ID NO: 1353944 - RNA, 19 nt, Artificial Sequence
  Description of Artificial Sequence: Synthetic oligonucleotide
uguaauaguuauaguuuca

SEQ ID NO: 1353945 - RNA, 19 nt, Artificial Sequence
  Description of Artificial Sequence: Synthetic oligonucleotide
acucagagaacgucguggc

SEQ ID NO: 1353946 - RNA, 19 nt, Artificial Sequence
  Description of Artificial Sequence: Synthetic oligonucleotide
cuacccucucacaagaucc

SEQ ID NO: 1353947 - RNA, 19 nt, Artificial Sequence
  Description of Artificial Sequence: Synthetic oligonucleotide
ucauaggaauacauaacac

SEQ ID NO: 1353948 - RNA, 19 nt, Artificial Sequence
  Description of Artificial Sequence: Synthetic oligonucleotide
uauggauaauuuauccaca

SEQ ID NO: 1353949 - RNA, 19 nt, Artificial Sequence
  Description of Artificial Sequence: Synthetic oligonucleotide
auaggaauacauaacaccu

SEQ ID NO: 1353950 - RNA, 19 nt, Artificial Sequence
  Description of Artificial Sequence: Synthetic oligonucleotide
acuugauuagaccuuaaaa

SEQ ID NO: 1353951 - RNA, 19 nt, Artificial Sequence
  Description of Artificial Sequence: Synthetic oligonucleotide
aaacguccccaccucuucc

SEQ ID NO: 1353952 - RNA, 19 nt, Artificial Sequence
  Description of Artificial Sequence: Synthetic oligonucleotide
acuauagcaacauccaaaa

SEQ ID NO: 1353953 - RNA, 19 nt, Artificial Sequence
  Description of Artificial Sequence: Synthetic oligonucleotide
guaucaauaggauggagga

SEQ ID NO: 1353954 - RNA, 19 nt, Artificial Sequence
  Description of Artificial Sequence: Synthetic oligonucleotide
auuuuauggauaauuuauc

SEQ ID NO: 1353955 - RNA, 19 nt, Artificial Sequence
  Description of Artificial Sequence: Synthetic oligonucleotide
aacaaggcauuuuauggau

SEQ ID NO: 1353956 - RNA, 19 nt, Artificial Sequence
  Description of Artificial Sequence: Synthetic oligonucleotide
acgacggcuacauaaugac

SEQ ID NO: 1353957 - RNA, 19 nt, Artificial Sequence
  Description of Artificial Sequence: Synthetic oligonucleotide
augacgagaaagcacggag

SEQ ID NO: 1353958 - RNA, 19 nt, Artificial Sequence
  Description of Artificial Sequence: Synthetic oligonucleotide
gaccucacgauagagaagc

SEQ ID NO: 1353959 - RNA, 19 nt, Artificial Sequence
  Description of Artificial Sequence: Synthetic oligonucleotide
aggaaaggcaugcuaggac

SEQ ID NO: 1353960 - RNA, 19 nt, Artificial Sequence
  Description of Artificial Sequence: Synthetic oligonucleotide
agaaacuagguuuugcaau

SEQ ID NO: 1353961 - RNA, 19 nt, Artificial Sequence
  Description of Artificial Sequence: Synthetic oligonucleotide
ugaggaaaggcaugcuagg

SEQ ID NO: 1353962 - RNA, 19 nt, Artificial Sequence
  Description of Artificial Sequence: Synthetic oligonucleotide
uuacugcggacacagagac

SEQ ID NO: 1353963 - RNA, 19 nt, Artificial Sequence
  Description of Artificial Sequence: Synthetic oligonucleotide
aacguccccaccucuuccc

SEQ ID NO: 1353964 - RNA, 19 nt, Artificial Sequence
  Description of Artificial Sequence: Synthetic oligonucleotide
gacgagaaagcacggaggc

SEQ ID NO: 1353965 - RNA, 19 nt, Artificial Sequence
  Description of Artificial Sequence: Synthetic oligonucleotide
uaguuauaguuucaccaug

SEQ ID NO: 1353966 - RNA, 19 nt, Artificial Sequence
  Description of Artificial Sequence: Synthetic oligonucleotide
aguaaagggaaggggaagg

SEQ ID NO: 1353967 - RNA, 19 nt, Artificial Sequence
  Description of Artificial Sequence: Synthetic oligonucleotide
auaguuauaguuucaccau

SEQ ID NO: 1353968 - RNA, 19 nt, Artificial Sequence
  Description of Artificial Sequence: Synthetic oligonucleotide
aggaaagcuuagcucaaac

SEQ ID NO: 1353969 - RNA, 19 nt, Artificial Sequence
  Description of Artificial Sequence: Synthetic oligonucleotide
uacaaucacuauuugguaa

SEQ ID NO: 1353970 - RNA, 19 nt, Artificial Sequence
  Description of Artificial Sequence: Synthetic oligonucleotide
ucacuauuugguaaagcaa

SEQ ID NO: 1353971 - RNA, 19 nt, Artificial Sequence
  Description of Artificial Sequence: Synthetic oligonucleotide
gaaacacggaguugagggg

SEQ ID NO: 1353972 - RNA, 19 nt, Artificial Sequence
  Description of Artificial Sequence: Synthetic oligonucleotide
uucaugaauauuccaucac

SEQ ID NO: 1353973 - RNA, 19 nt, Artificial Sequence
  Description of Artificial Sequence: Synthetic oligonucleotide
uaccguauagaaauacaac

SEQ ID NO: 1353974 - RNA, 19 nt, Artificial Sequence
  Description of Artificial Sequence: Synthetic oligonucleotide
ugacucacauucaugaaua

SEQ ID NO: 1353975 - RNA, 19 nt, Artificial Sequence
  Description of Artificial Sequence: Synthetic oligonucleotide
agauccuucuacaacacag

SEQ ID NO: 1353976 - RNA, 19 nt, Artificial Sequence
  Description of Artificial Sequence: Synthetic oligonucleotide
cacgaggaaagcaaguuug

SEQ ID NO: 1353977 - RNA, 19 nt, Artificial Sequence
  Description of Artificial Sequence: Synthetic oligonucleotide
ucaagguuguaaauuuuaa

SEQ ID NO: 1353978 - RNA, 19 nt, Artificial Sequence
  Description of Artificial Sequence: Synthetic oligonucleotide
guauaaguuaauaaauguc

SEQ ID NO: 1353979 - RNA, 19 nt, Artificial Sequence
  Description of Artificial Sequence: Synthetic oligonucleotide
uuuugcaauuccaguaggu

SEQ ID NO: 1353980 - RNA, 19 nt, Artificial Sequence
  Description of Artificial Sequence: Synthetic oligonucleotide
aaggaacggaaacgucccc

SEQ ID NO: 1353981 - RNA, 19 nt, Artificial Sequence
  Description of Artificial Sequence: Synthetic oligonucleotide
ugugaccucacgauagaga

SEQ ID NO: 1353982 - RNA, 19 nt, Artificial Sequence
  Description of Artificial Sequence: Synthetic oligonucleotide
caguaggucauuuccaaac

SEQ ID NO: 1353983 - RNA, 19 nt, Artificial Sequence
  Description of Artificial Sequence: Synthetic oligonucleotide
caauuuguuacaaucacua

SEQ ID NO: 1353984 - RNA, 19 nt, Artificial Sequence
  Description of Artificial Sequence: Synthetic oligonucleotide
acaggcggagcgcacaugg

SEQ ID NO: 1353985 - RNA, 19 nt, Artificial Sequence
  Description of Artificial Sequence: Synthetic oligonucleotide
uacgacggcuacauaauga

SEQ ID NO: 1353986 - RNA, 19 nt, Artificial Sequence
  Description of Artificial Sequence: Synthetic oligonucleotide
guuacaaucacuauuuggu

SEQ ID NO: 1353987 - RNA, 19 nt, Artificial Sequence
  Description of Artificial Sequence: Synthetic oligonucleotide
ugcaauuccaguaggucau

SEQ ID NO: 1353988 - RNA, 19 nt, Artificial Sequence
  Description of Artificial Sequence: Synthetic oligonucleotide
gacaaacuaggcaaagccc

SEQ ID NO: 1353989 - RNA, 19 nt, Artificial Sequence
  Description of Artificial Sequence: Synthetic oligonucleotide
auguacgacggcuacauaa

SEQ ID NO: 1353990 - RNA, 19 nt, Artificial Sequence
  Description of Artificial Sequence: Synthetic oligonucleotide
ugcaugucacuauagcaac

SEQ ID NO: 1353991 - RNA, 19 nt, Artificial Sequence
  Description of Artificial Sequence: Synthetic oligonucleotide
aggaccauggauccuuuag

SEQ ID NO: 1353992 - RNA, 19 nt, Artificial Sequence
  Description of Artificial Sequence: Synthetic oligonucleotide
acaugcuuacugcggacac

SEQ ID NO: 1353993 - RNA, 19 nt, Artificial Sequence
  Description of Artificial Sequence: Synthetic oligonucleotide
guggcguucuccuacacug

SEQ ID NO: 1353994 - RNA, 19 nt, Artificial Sequence
  Description of Artificial Sequence: Synthetic oligonucleotide
augucaagcuaccguauag

SEQ ID NO: 1353995 - RNA, 19 nt, Artificial Sequence
  Description of Artificial Sequence: Synthetic oligonucleotide
agaguaagcuaacacuggu

SEQ ID NO: 1353996 - RNA, 19 nt, Artificial Sequence
  Description of Artificial Sequence: Synthetic oligonucleotide
gcuuagcucaaacaggcgg

SEQ ID NO: 1353997 - RNA, 19 nt, Artificial Sequence
  Description of Artificial Sequence: Synthetic oligonucleotide
uggauaauuuauccacaga

SEQ ID NO: 1353998 - RNA, 19 nt, Artificial Sequence
  Description of Artificial Sequence: Synthetic oligonucleotide
gacggcuacauaaugacuc

SEQ ID NO: 1353999 - RNA, 19 nt, Artificial Sequence
  Description of Artificial Sequence: Synthetic oligonucleotide
cucgguucuuccaugggcc

SEQ ID NO: 1354000 - RNA, 19 nt, Artificial Sequence
  Description of Artificial Sequence: Synthetic oligonucleotide
uccgugugcgaaauaauuc

SEQ ID NO: 1354001 - RNA, 19 nt, Artificial Sequence
  Description of Artificial Sequence: Synthetic oligonucleotide
aguaggucauuuccaaaca

SEQ ID NO: 1354002 - RNA, 19 nt, Artificial Sequence
  Description of Artificial Sequence: Synthetic oligonucleotide
caacacuguaucaauagga

SEQ ID NO: 1354003 - RNA, 19 nt, Artificial Sequence
  Description of Artificial Sequence: Synthetic oligonucleotide
caggucuuugaacacgagg

SEQ ID NO: 1354004 - RNA, 19 nt, Artificial Sequence
  Description of Artificial Sequence: Synthetic oligonucleotide
uccuucuacaacacagcca

SEQ ID NO: 1354005 - RNA, 19 nt, Artificial Sequence
  Description of Artificial Sequence: Synthetic oligonucleotide
gaaggaacggaaacguccc

SEQ ID NO: 1354006 - RNA, 19 nt, Artificial Sequence
  Description of Artificial Sequence: Synthetic oligonucleotide
aacacuguaucaauaggau

SEQ ID NO: 1354007 - RNA, 19 nt, Artificial Sequence
  Description of Artificial Sequence: Synthetic oligonucleotide
aagcuaacacugguguuuc

SEQ ID NO: 1354008 - RNA, 19 nt, Artificial Sequence
  Description of Artificial Sequence: Synthetic oligonucleotide
ucagagaacgucguggcgu

SEQ ID NO: 1354009 - RNA, 19 nt, Artificial Sequence
  Description of Artificial Sequence: Synthetic oligonucleotide
ucuccuacacuguaauagu

SEQ ID NO: 1354010 - RNA, 19 nt, Artificial Sequence
  Description of Artificial Sequence: Synthetic oligonucleotide
agcagcauagcuuccuuca

SEQ ID NO: 1354011 - RNA, 19 nt, Artificial Sequence
  Description of Artificial Sequence: Synthetic oligonucleotide
cgaaacacggaguugaggg

SEQ ID NO: 1354012 - RNA, 19 nt, Artificial Sequence
  Description of Artificial Sequence: Synthetic oligonucleotide
ucuugggaauccauaggac

SEQ ID NO: 1354013 - RNA, 19 nt, Artificial Sequence
  Description of Artificial Sequence: Synthetic oligonucleotide
uguacgacggcuacauaau

SEQ ID NO: 1354014 - RNA, 19 nt, Artificial Sequence
  Description of Artificial Sequence: Synthetic oligonucleotide
acuguaauaguuauaguuu

SEQ ID NO: 1354015 - RNA, 19 nt, Artificial Sequence
  Description of Artificial Sequence: Synthetic oligonucleotide
aacgucguggcguucuccu

SEQ ID NO: 1354016 - RNA, 19 nt, Artificial Sequence
  Description of Artificial Sequence: Synthetic oligonucleotide
uuugcaauuccaguagguc

SEQ ID NO: 1354017 - RNA, 19 nt, Artificial Sequence
  Description of Artificial Sequence: Synthetic oligonucleotide
uagcgaaacacggaguuga

SEQ ID NO: 1354018 - RNA, 19 nt, Artificial Sequence
  Description of Artificial Sequence: Synthetic oligonucleotide
guuguaaauuuuaaagaga

SEQ ID NO: 1354019 - RNA, 19 nt, Artificial Sequence
  Description of Artificial Sequence: Synthetic oligonucleotide
aaugucaagcuaccguaua

SEQ ID NO: 1354020 - RNA, 19 nt, Artificial Sequence
  Description of Artificial Sequence: Synthetic oligonucleotide
cauggauccuuuagaagac

SEQ ID NO: 1354021 - RNA, 19 nt, Artificial Sequence
  Description of Artificial Sequence: Synthetic oligonucleotide
cagugugaccucacgauag

SEQ ID NO: 1354022 - RNA, 19 nt, Artificial Sequence
  Description of Artificial Sequence: Synthetic oligonucleotide
cuacguucucauucaaaag

SEQ ID NO: 1354023 - RNA, 19 nt, Artificial Sequence
  Description of Artificial Sequence: Synthetic oligonucleotide
uuacaaucacuauuuggua

SEQ ID NO: 1354024 - RNA, 19 nt, Artificial Sequence
  Description of Artificial Sequence: Synthetic oligonucleotide
ucuacaacacagccagggu

SEQ ID NO: 1354025 - RNA, 19 nt, Artificial Sequence
  Description of Artificial Sequence: Synthetic oligonucleotide
acugcggacacagagacaa

SEQ ID NO: 1354026 - RNA, 19 nt, Artificial Sequence
  Description of Artificial Sequence: Synthetic oligonucleotide
cacucagagaacgucgugg

SEQ ID NO: 1354027 - RNA, 19 nt, Artificial Sequence
  Description of Artificial Sequence: Synthetic oligonucleotide
accauggauccuuuagaag

SEQ ID NO: 1354028 - RNA, 19 nt, Artificial Sequence
  Description of Artificial Sequence: Synthetic oligonucleotide
uaagcuaacacugguguuu

SEQ ID NO: 1354029 - RNA, 19 nt, Artificial Sequence
  Description of Artificial Sequence: Synthetic oligonucleotide
uccuacacuguaauaguua

SEQ ID NO: 1354030 - RNA, 19 nt, Artificial Sequence
  Description of Artificial Sequence: Synthetic oligonucleotide
agguuuugcaauuccagua

SEQ ID NO: 1354031 - RNA, 19 nt, Artificial Sequence
  Description of Artificial Sequence: Synthetic oligonucleotide
gaaaaggagugcuggguga

SEQ ID NO: 1354032 - RNA, 19 nt, Artificial Sequence
  Description of Artificial Sequence: Synthetic oligonucleotide
agacauuaagaguaagcua

SEQ ID NO: 1354033 - RNA, 19 nt, Artificial Sequence
  Description of Artificial Sequence: Synthetic oligonucleotide
cuugcucacuagcaagagg

SEQ ID NO: 1354034 - RNA, 19 nt, Artificial Sequence
  Description of Artificial Sequence: Synthetic oligonucleotide
caugcuaggacugugcuga

SEQ ID NO: 1354035 - RNA, 19 nt, Artificial Sequence
  Description of Artificial Sequence: Synthetic oligonucleotide
uaucaauaggauggaggag

SEQ ID NO: 1354036 - RNA, 19 nt, Artificial Sequence
  Description of Artificial Sequence: Synthetic oligonucleotide
caacaguaaagggaagggg

SEQ ID NO: 1354037 - RNA, 19 nt, Artificial Sequence
  Description of Artificial Sequence: Synthetic oligonucleotide
aaauaauuccuuagcgaaa

SEQ ID NO: 1354038 - RNA, 19 nt, Artificial Sequence
  Description of Artificial Sequence: Synthetic oligonucleotide
ugcucaauguacgacggcu

SEQ ID NO: 1354039 - RNA, 19 nt, Artificial Sequence
  Description of Artificial Sequence: Synthetic oligonucleotide
cauaacaccuacaguauaa

SEQ ID NO: 1354040 - RNA, 19 nt, Artificial Sequence
  Description of Artificial Sequence: Synthetic oligonucleotide
uaggaauacauaacaccua

SEQ ID NO: 1354041 - RNA, 19 nt, Artificial Sequence
  Description of Artificial Sequence: Synthetic oligonucleotide
ucacuauagcaacauccaa

SEQ ID NO: 1354042 - RNA, 19 nt, Artificial Sequence
  Description of Artificial Sequence: Synthetic oligonucleotide
caccccucuaaauaucagc

SEQ ID NO: 1354043 - RNA, 19 nt, Artificial Sequence
  Description of Artificial Sequence: Synthetic oligonucleotide
ugcacaacacuguaucaau

SEQ ID NO: 1354044 - RNA, 19 nt, Artificial Sequence
  Description of Artificial Sequence: Synthetic oligonucleotide
ugcgcuucucaacaguaaa

SEQ ID NO: 1354045 - RNA, 19 nt, Artificial Sequence
  Description of Artificial Sequence: Synthetic oligonucleotide
cuaccguauagaaauacaa

SEQ ID NO: 1354046 - RNA, 19 nt, Artificial Sequence
  Description of Artificial Sequence: Synthetic oligonucleotide
acgauagagaagccaucuc

SEQ ID NO: 1354047 - RNA, 19 nt, Artificial Sequence
  Description of Artificial Sequence: Synthetic oligonucleotide
gaggcgcacucagagaacg

SEQ ID NO: 1354048 - RNA, 19 nt, Artificial Sequence
  Description of Artificial Sequence: Synthetic oligonucleotide
gugaccucacgauagagaa

SEQ ID NO: 1354049 - RNA, 19 nt, Artificial Sequence
  Description of Artificial Sequence: Synthetic oligonucleotide
auaaugacucacauucaug

SEQ ID NO: 1354050 - RNA, 19 nt, Artificial Sequence
  Description of Artificial Sequence: Synthetic oligonucleotide
caaguuugggguguugccc

SEQ ID NO: 1354051 - RNA, 19 nt, Artificial Sequence
  Description of Artificial Sequence: Synthetic oligonucleotide
guuauaguuucaccaugac

SEQ ID NO: 1354052 - RNA, 19 nt, Artificial Sequence
  Description of Artificial Sequence: Synthetic oligonucleotide
acuaggcaaagccccacug

SEQ ID NO: 1354053 - RNA, 19 nt, Artificial Sequence
  Description of Artificial Sequence: Synthetic oligonucleotide
cuuagcucaaacaggcgga

SEQ ID NO: 1354054 - RNA, 19 nt, Artificial Sequence
  Description of Artificial Sequence: Synthetic oligonucleotide
cacuauagcaacauccaaa

SEQ ID NO: 1354055 - RNA, 19 nt, Artificial Sequence
  Description of Artificial Sequence: Synthetic oligonucleotide
ugucaagcuaccguauaga

SEQ ID NO: 1354056 - RNA, 19 nt, Artificial Sequence
  Description of Artificial Sequence: Synthetic oligonucleotide
uuccuuagcgaaacacgga

SEQ ID NO: 1354057 - RNA, 19 nt, Artificial Sequence
  Description of Artificial Sequence: Synthetic oligonucleotide
aacuaggcaaagccccacu

SEQ ID NO: 1354058 - RNA, 19 nt, Artificial Sequence
  Description of Artificial Sequence: Synthetic oligonucleotide
caacaaggcauuuuaugga

SEQ ID NO: 1354059 - RNA, 19 nt, Artificial Sequence
  Description of Artificial Sequence: Synthetic oligonucleotide
uuagcucaaacaggcggag

SEQ ID NO: 1354060 - RNA, 19 nt, Artificial Sequence
  Description of Artificial Sequence: Synthetic oligonucleotide
gauggaggagcaaccgcgg

SEQ ID NO: 1354061 - RNA, 19 nt, Artificial Sequence
  Description of Artificial Sequence: Synthetic oligonucleotide
aagcaaacuuuaccccuga

SEQ ID NO: 1354062 - RNA, 19 nt, Artificial Sequence
  Description of Artificial Sequence: Synthetic oligonucleotide
ucacaagauccuucuacaa

SEQ ID NO: 1354063 - RNA, 19 nt, Artificial Sequence
  Description of Artificial Sequence: Synthetic oligonucleotide
ugaccucacgauagagaag

SEQ ID NO: 1354064 - RNA, 19 nt, Artificial Sequence
  Description of Artificial Sequence: Synthetic oligonucleotide
ggaaaaggagugcugggug

SEQ ID NO: 1354065 - RNA, 19 nt, Artificial Sequence
  Description of Artificial Sequence: Synthetic oligonucleotide
ccagacauuaagaguaagc

SEQ ID NO: 1354066 - RNA, 19 nt, Artificial Sequence
  Description of Artificial Sequence: Synthetic oligonucleotide
aggacaugcuuacugcgga

SEQ ID NO: 1354067 - RNA, 19 nt, Artificial Sequence
  Description of Artificial Sequence: Synthetic oligonucleotide
cucaauguacgacggcuac

SEQ ID NO: 1354068 - RNA, 19 nt, Artificial Sequence
  Description of Artificial Sequence: Synthetic oligonucleotide
cagaaagcguacacucugc

SEQ ID NO: 1354069 - RNA, 19 nt, Artificial Sequence
  Description of Artificial Sequence: Synthetic oligonucleotide
ugucacacgugcaguguga

SEQ ID NO: 1354070 - RNA, 19 nt, Artificial Sequence
  Description of Artificial Sequence: Synthetic oligonucleotide
gaccauggauccuuuagaa

SEQ ID NO: 1354071 - RNA, 19 nt, Artificial Sequence
  Description of Artificial Sequence: Synthetic oligonucleotide
uaguuucaccaugacaaac

SEQ ID NO: 1354072 - RNA, 19 nt, Artificial Sequence
  Description of Artificial Sequence: Synthetic oligonucleotide
uuuugaagucuuaguguuu

SEQ ID NO: 1354073 - RNA, 19 nt, Artificial Sequence
  Description of Artificial Sequence: Synthetic oligonucleotide
caaagccccacugaccccg

SEQ ID NO: 1354074 - RNA, 19 nt, Artificial Sequence
  Description of Artificial Sequence: Synthetic oligonucleotide
cauacaugacgagaaagca

SEQ ID NO: 1354075 - RNA, 19 nt, Artificial Sequence
  Description of Artificial Sequence: Synthetic oligonucleotide
ggauggaggagcaaccgcg

SEQ ID NO: 1354076 - RNA, 19 nt, Artificial Sequence
  Description of Artificial Sequence: Synthetic oligonucleotide
gaaaggcaugcuaggacug

SEQ ID NO: 1354077 - RNA, 19 nt, Artificial Sequence
  Description of Artificial Sequence: Synthetic oligonucleotide
agacggaccaugaagggca

SEQ ID NO: 1354078 - RNA, 19 nt, Artificial Sequence
  Description of Artificial Sequence: Synthetic oligonucleotide
ccauggauccuuuagaaga

SEQ ID NO: 1354079 - RNA, 19 nt, Artificial Sequence
  Description of Artificial Sequence: Synthetic oligonucleotide
cacggaggcgcacucagag

SEQ ID NO: 1354080 - RNA, 19 nt, Artificial Sequence
  Description of Artificial Sequence: Synthetic oligonucleotide
ggaaaacugcuaagaaugg

SEQ ID NO: 1354081 - RNA, 19 nt, Artificial Sequence
  Description of Artificial Sequence: Synthetic oligonucleotide
caaggcauuuuauggauaa

SEQ ID NO: 1354082 - RNA, 19 nt, Artificial Sequence
  Description of Artificial Sequence: Synthetic oligonucleotide
gccaggaaagcuuagcuca

SEQ ID NO: 1354083 - RNA, 19 nt, Artificial Sequence
  Description of Artificial Sequence: Synthetic oligonucleotide
ugacaucagaucugugcgu

SEQ ID NO: 1354084 - RNA, 19 nt, Artificial Sequence
  Description of Artificial Sequence: Synthetic oligonucleotide
caugacaaacaccagacau

SEQ ID NO: 1354085 - RNA, 19 nt, Artificial Sequence
  Description of Artificial Sequence: Synthetic oligonucleotide
uuagcgaaacacggaguug

SEQ ID NO: 1354086 - RNA, 19 nt, Artificial Sequence
  Description of Artificial Sequence: Synthetic oligonucleotide
agcacggaggcgcacucag

SEQ ID NO: 1354087 - RNA, 19 nt, Artificial Sequence
  Description of Artificial Sequence: Synthetic oligonucleotide
ucacugaggaaaacugcua

SEQ ID NO: 1354088 - RNA, 19 nt, Artificial Sequence
  Description of Artificial Sequence: Synthetic oligonucleotide
aagaaugguccgugugcga

SEQ ID NO: 1354089 - RNA, 19 nt, Artificial Sequence
  Description of Artificial Sequence: Synthetic oligonucleotide
gucacuauagcaacaucca

SEQ ID NO: 1354090 - RNA, 19 nt, Artificial Sequence
  Description of Artificial Sequence: Synthetic oligonucleotide
acugcuaagaaugguccgu

SEQ ID NO: 1354091 - RNA, 19 nt, Artificial Sequence
  Description of Artificial Sequence: Synthetic oligonucleotide
aaagagagagagagagaga

SEQ ID NO: 1354092 - RNA, 19 nt, Artificial Sequence
  Description of Artificial Sequence: Synthetic oligonucleotide
acggaaacguccccaccuc

SEQ ID NO: 1354093 - RNA, 19 nt, Artificial Sequence
  Description of Artificial Sequence: Synthetic oligonucleotide
aaaaggagugcugggugau

SEQ ID NO: 1354094 - RNA, 19 nt, Artificial Sequence
  Description of Artificial Sequence: Synthetic oligonucleotide
ccgugugcgaaauaauucc

SEQ ID NO: 1354095 - RNA, 19 nt, Artificial Sequence
  Description of Artificial Sequence: Synthetic oligonucleotide
auaauuccuuagcgaaaca

SEQ ID NO: 1354096 - RNA, 19 nt, Artificial Sequence
  Description of Artificial Sequence: Synthetic oligonucleotide
ugcggacacagagacaaac

SEQ ID NO: 1354097 - RNA, 19 nt, Artificial Sequence
  Description of Artificial Sequence: Synthetic oligonucleotide
cuauagcaacauccaaaac

SEQ ID NO: 1354098 - RNA, 19 nt, Artificial Sequence
  Description of Artificial Sequence: Synthetic oligonucleotide
acuagguuuugcaauucca

SEQ ID NO: 1354099 - RNA, 19 nt, Artificial Sequence
  Description of Artificial Sequence: Synthetic oligonucleotide
gguaguggguccuugcuca

SEQ ID NO: 1354100 - RNA, 19 nt, Artificial Sequence
  Description of Artificial Sequence: Synthetic oligonucleotide
gaaacguccccaccucuuc

SEQ ID NO: 1354101 - RNA, 19 nt, Artificial Sequence
  Description of Artificial Sequence: Synthetic oligonucleotide
ucacgauagagaagccauc

SEQ ID NO: 1354102 - RNA, 19 nt, Artificial Sequence
  Description of Artificial Sequence: Synthetic oligonucleotide
cucagagaacgucguggcg

SEQ ID NO: 1354103 - RNA, 19 nt, Artificial Sequence
  Description of Artificial Sequence: Synthetic oligonucleotide
caagaggggccucugagga

SEQ ID NO: 1354104 - RNA, 19 nt, Artificial Sequence
  Description of Artificial Sequence: Synthetic oligonucleotide
acgaggaaagcaaguuugg

SEQ ID NO: 1354105 - RNA, 19 nt, Artificial Sequence
  Description of Artificial Sequence: Synthetic oligonucleotide
acauaacaccuacaguaua

SEQ ID NO: 1354106 - RNA, 19 nt, Artificial Sequence
  Description of Artificial Sequence: Synthetic oligonucleotide
ucaauguacgacggcuaca

SEQ ID NO: 1354107 - RNA, 19 nt, Artificial Sequence
  Description of Artificial Sequence: Synthetic oligonucleotide
ggacaagugggacaaggac

SEQ ID NO: 1354108 - RNA, 19 nt, Artificial Sequence
  Description of Artificial Sequence: Synthetic oligonucleotide
gaacggaaacguccccacc

SEQ ID NO: 1354109 - RNA, 19 nt, Artificial Sequence
  Description of Artificial Sequence: Synthetic oligonucleotide
uugcucaauguacgacggc

SEQ ID NO: 1354110 - RNA, 19 nt, Artificial Sequence
  Description of Artificial Sequence: Synthetic oligonucleotide
uacccucucacaagauccu

SEQ ID NO: 1354111 - RNA, 19 nt, Artificial Sequence
  Description of Artificial Sequence: Synthetic oligonucleotide
ggcuaagugagacggacca

SEQ ID NO: 1354112 - RNA, 19 nt, Artificial Sequence
  Description of Artificial Sequence: Synthetic oligonucleotide
gucaagcuaccguauagaa

SEQ ID NO: 1354113 - RNA, 19 nt, Artificial Sequence
  Description of Artificial Sequence: Synthetic oligonucleotide
aaugguccgugugcgaaau

SEQ ID NO: 1354114 - RNA, 19 nt, Artificial Sequence
  Description of Artificial Sequence: Synthetic oligonucleotide
aagugagacggaccaugaa

SEQ ID NO: 1354115 - RNA, 19 nt, Artificial Sequence
  Description of Artificial Sequence: Synthetic oligonucleotide
agugugaccucacgauaga

SEQ ID NO: 1354116 - RNA, 19 nt, Artificial Sequence
  Description of Artificial Sequence: Synthetic oligonucleotide
guacacucugcaugcaaca

SEQ ID NO: 1354117 - RNA, 19 nt, Artificial Sequence
  Description of Artificial Sequence: Synthetic oligonucleotide
ucaaacaggcggagcgcac

SEQ ID NO: 1354118 - RNA, 19 nt, Artificial Sequence
  Description of Artificial Sequence: Synthetic oligonucleotide
gacaacugacuuggggacc

SEQ ID NO: 1354119 - RNA, 19 nt, Artificial Sequence
  Description of Artificial Sequence: Synthetic oligonucleotide
acuguaucaauaggaugga

SEQ ID NO: 1354120 - RNA, 19 nt, Artificial Sequence
  Description of Artificial Sequence: Synthetic oligonucleotide
aggcaugcuaggacugugc

SEQ ID NO: 1354121 - RNA, 19 nt, Artificial Sequence
  Description of Artificial Sequence: Synthetic oligonucleotide
cugugcguuuauuuugcuc

SEQ ID NO: 1354122 - RNA, 19 nt, Artificial Sequence
  Description of Artificial Sequence: Synthetic oligonucleotide
guacgacggcuacauaaug

SEQ ID NO: 1354123 - RNA, 19 nt, Artificial Sequence
  Description of Artificial Sequence: Synthetic oligonucleotide
acagaucaauuuguuacaa

SEQ ID NO: 1354124 - RNA, 19 nt, Artificial Sequence
  Description of Artificial Sequence: Synthetic oligonucleotide
acguccccaccucuucccc

SEQ ID NO: 1354125 - RNA, 19 nt, Artificial Sequence
  Description of Artificial Sequence: Synthetic oligonucleotide
gggacaaggacaugcuuac

SEQ ID NO: 1354126 - RNA, 19 nt, Artificial Sequence
  Description of Artificial Sequence: Synthetic oligonucleotide
gcaagaggggccucugagg

SEQ ID NO: 1354127 - RNA, 19 nt, Artificial Sequence
  Description of Artificial Sequence: Synthetic oligonucleotide
acgagaaagcacggaggcg

SEQ ID NO: 1354128 - RNA, 19 nt, Artificial Sequence
  Description of Artificial Sequence: Synthetic oligonucleotide
gugucacacgugcagugug

SEQ ID NO: 1354129 - RNA, 19 nt, Artificial Sequence
  Description of Artificial Sequence: Synthetic oligonucleotide
augcacaacacuguaucaa

SEQ ID NO: 1354130 - RNA, 19 nt, Artificial Sequence
  Description of Artificial Sequence: Synthetic oligonucleotide
ucacuagcaagaggggccu

SEQ ID NO: 1354131 - RNA, 19 nt, Artificial Sequence
  Description of Artificial Sequence: Synthetic oligonucleotide
agggucaagguuguaaauu

SEQ ID NO: 1354132 - RNA, 19 nt, Artificial Sequence
  Description of Artificial Sequence: Synthetic oligonucleotide
ucggguaguggguccuugc

SEQ ID NO: 1354133 - RNA, 19 nt, Artificial Sequence
  Description of Artificial Sequence: Synthetic oligonucleotide
ccucuaaauaucagcuccc

SEQ ID NO: 1354134 - RNA, 19 nt, Artificial Sequence
  Description of Artificial Sequence: Synthetic oligonucleotide
cauaaugacucacauucau

SEQ ID NO: 1354135 - RNA, 19 nt, Artificial Sequence
  Description of Artificial Sequence: Synthetic oligonucleotide
cauuaagaguaagcuaaca

SEQ ID NO: 1354136 - RNA, 19 nt, Artificial Sequence
  Description of Artificial Sequence: Synthetic oligonucleotide
gacaugcuuacugcggaca

SEQ ID NO: 1354137 - RNA, 19 nt, Artificial Sequence
  Description of Artificial Sequence: Synthetic oligonucleotide
cacugaggaaaacugcuaa

SEQ ID NO: 1354138 - RNA, 19 nt, Artificial Sequence
  Description of Artificial Sequence: Synthetic oligonucleotide
cucacgauagagaagccau

SEQ ID NO: 1354139 - RNA, 19 nt, Artificial Sequence
  Description of Artificial Sequence: Synthetic oligonucleotide
gcaaguuugggguguugcc

SEQ ID NO: 1354140 - RNA, 19 nt, Artificial Sequence
  Description of Artificial Sequence: Synthetic oligonucleotide
acaugacgagaaagcacgg

SEQ ID NO: 1354141 - RNA, 19 nt, Artificial Sequence
  Description of Artificial Sequence: Synthetic oligonucleotide
accagacauuaagaguaag

SEQ ID NO: 1354142 - RNA, 19 nt, Artificial Sequence
  Description of Artificial Sequence: Synthetic oligonucleotide
cuaggcaaagccccacuga

SEQ ID NO: 1354143 - RNA, 19 nt, Artificial Sequence
  Description of Artificial Sequence: Synthetic oligonucleotide
acauaaugacucacauuca

SEQ ID NO: 1354144 - RNA, 19 nt, Artificial Sequence
  Description of Artificial Sequence: Synthetic oligonucleotide
ucacuugauuagaccuuaa

SEQ ID NO: 1354145 - RNA, 19 nt, Artificial Sequence
  Description of Artificial Sequence: Synthetic oligonucleotide
aauguacgacggcuacaua

SEQ ID NO: 1354146 - RNA, 19 nt, Artificial Sequence
  Description of Artificial Sequence: Synthetic oligonucleotide
cuguaucaauaggauggag

SEQ ID NO: 1354147 - RNA, 19 nt, Artificial Sequence
  Description of Artificial Sequence: Synthetic oligonucleotide
ggacugugcugagagacag

SEQ ID NO: 1354148 - RNA, 19 nt, Artificial Sequence
  Description of Artificial Sequence: Synthetic oligonucleotide
accaggcuugagaaaugac

SEQ ID NO: 1354149 - RNA, 19 nt, Artificial Sequence
  Description of Artificial Sequence: Synthetic oligonucleotide
accgcggcacuggagacag

SEQ ID NO: 1354150 - RNA, 19 nt, Artificial Sequence
  Description of Artificial Sequence: Synthetic oligonucleotide
cgagaaagcacggaggcgc

SEQ ID NO: 1354151 - RNA, 19 nt, Artificial Sequence
  Description of Artificial Sequence: Synthetic oligonucleotide
cgaaauaauuccuuagcga

SEQ ID NO: 1354152 - RNA, 19 nt, Artificial Sequence
  Description of Artificial Sequence: Synthetic oligonucleotide
agaaagcacggaggcgcac

SEQ ID NO: 1354153 - RNA, 19 nt, Artificial Sequence
  Description of Artificial Sequence: Synthetic oligonucleotide
ucgguucuuccaugggccu

SEQ ID NO: 1354154 - RNA, 19 nt, Artificial Sequence
  Description of Artificial Sequence: Synthetic oligonucleotide
ggaccauggauccuuuaga

SEQ ID NO: 1354155 - RNA, 19 nt, Artificial Sequence
  Description of Artificial Sequence: Synthetic oligonucleotide
cuuagcgaaacacggaguu

SEQ ID NO: 1354156 - RNA, 19 nt, Artificial Sequence
  Description of Artificial Sequence: Synthetic oligonucleotide
uucuacccucucacaagau

SEQ ID NO: 1354157 - RNA, 19 nt, Artificial Sequence
  Description of Artificial Sequence: Synthetic oligonucleotide
ugggccucggguagugggu

SEQ ID NO: 1354158 - RNA, 19 nt, Artificial Sequence
  Description of Artificial Sequence: Synthetic oligonucleotide
gugugaccucacgauagag

SEQ ID NO: 1354159 - RNA, 19 nt, Artificial Sequence
  Description of Artificial Sequence: Synthetic oligonucleotide
ggaacggaaacguccccac

SEQ ID NO: 1354160 - RNA, 19 nt, Artificial Sequence
  Description of Artificial Sequence: Synthetic oligonucleotide
uacugcggacacagagaca

SEQ ID NO: 1354161 - RNA, 19 nt, Artificial Sequence
  Description of Artificial Sequence: Synthetic oligonucleotide
gaccaggcuugagaaauga

SEQ ID NO: 1354162 - RNA, 19 nt, Artificial Sequence
  Description of Artificial Sequence: Synthetic oligonucleotide
aggacaagugggacaagga

SEQ ID NO: 1354163 - RNA, 19 nt, Artificial Sequence
  Description of Artificial Sequence: Synthetic oligonucleotide
gcaggugcgcuucucaaca

SEQ ID NO: 1354164 - RNA, 19 nt, Artificial Sequence
  Description of Artificial Sequence: Synthetic oligonucleotide
uggcaccccucuaaauauc

SEQ ID NO: 1354165 - RNA, 19 nt, Artificial Sequence
  Description of Artificial Sequence: Synthetic oligonucleotide
caccaagcauuuggaaaag

SEQ ID NO: 1354166 - RNA, 19 nt, Artificial Sequence
  Description of Artificial Sequence: Synthetic oligonucleotide
gcaaccgcggcacuggaga

SEQ ID NO: 1354167 - RNA, 19 nt, Artificial Sequence
  Description of Artificial Sequence: Synthetic oligonucleotide
ggagcaaccgcggcacugg

SEQ ID NO: 1354168 - RNA, 19 nt, Artificial Sequence
  Description of Artificial Sequence: Synthetic oligonucleotide
ccaccaagcauuuggaaaa

SEQ ID NO: 1354169 - RNA, 19 nt, Artificial Sequence
  Description of Artificial Sequence: Synthetic oligonucleotide
accucacgauagagaagcc

SEQ ID NO: 1354170 - RNA, 19 nt, Artificial Sequence
  Description of Artificial Sequence: Synthetic oligonucleotide
ucagaucugugcguuuauu

SEQ ID NO: 1354171 - RNA, 19 nt, Artificial Sequence
  Description of Artificial Sequence: Synthetic oligonucleotide
agagagagagagagagaga

SEQ ID NO: 1354172 - RNA, 19 nt, Artificial Sequence
  Description of Artificial Sequence: Synthetic oligonucleotide
gaacgucguggcguucucc

SEQ ID NO: 1354173 - RNA, 19 nt, Artificial Sequence
  Description of Artificial Sequence: Synthetic oligonucleotide
caucauacaugacgagaaa

SEQ ID NO: 1354174 - RNA, 19 nt, Artificial Sequence
  Description of Artificial Sequence: Synthetic oligonucleotide
gcucacuagcaagaggggc

SEQ ID NO: 1354175 - RNA, 19 nt, Artificial Sequence
  Description of Artificial Sequence: Synthetic oligonucleotide
caggugcgcuucucaacag

SEQ ID NO: 1354176 - RNA, 19 nt, Artificial Sequence
  Description of Artificial Sequence: Synthetic oligonucleotide
cucaaacaggcggagcgca

SEQ ID NO: 1354177 - RNA, 19 nt, Artificial Sequence
  Description of Artificial Sequence: Synthetic oligonucleotide
aacaggcggagcgcacaug

SEQ ID NO: 1354178 - RNA, 19 nt, Artificial Sequence
  Description of Artificial Sequence: Synthetic oligonucleotide
gcgcacucagagaacgucg

SEQ ID NO: 1354179 - RNA, 19 nt, Artificial Sequence
  Description of Artificial Sequence: Synthetic oligonucleotide
caugacgagaaagcacgga

SEQ ID NO: 1354180 - RNA, 19 nt, Artificial Sequence
  Description of Artificial Sequence: Synthetic oligonucleotide
agcgaaacacggaguugag

SEQ ID NO: 1354181 - RNA, 19 nt, Artificial Sequence
  Description of Artificial Sequence: Synthetic oligonucleotide
aucuacguucucauucaaa

SEQ ID NO: 1354182 - RNA, 19 nt, Artificial Sequence
  Description of Artificial Sequence: Synthetic oligonucleotide
ccucugaggaaaggcaugc

SEQ ID NO: 1354183 - RNA, 19 nt, Artificial Sequence
  Description of Artificial Sequence: Synthetic oligonucleotide
acggaggcgcacucagaga

SEQ ID NO: 1354184 - RNA, 19 nt, Artificial Sequence
  Description of Artificial Sequence: Synthetic oligonucleotide
agcaugcacaacacuguau

SEQ ID NO: 1354185 - RNA, 19 nt, Artificial Sequence
  Description of Artificial Sequence: Synthetic oligonucleotide
gcgaaacacggaguugagg

SEQ ID NO: 1354186 - RNA, 19 nt, Artificial Sequence
  Description of Artificial Sequence: Synthetic oligonucleotide
ggcuacauaaugacucaca

SEQ ID NO: 1354187 - RNA, 19 nt, Artificial Sequence
  Description of Artificial Sequence: Synthetic oligonucleotide
augcuaggacugugcugag

SEQ ID NO: 1354188 - RNA, 19 nt, Artificial Sequence
  Description of Artificial Sequence: Synthetic oligonucleotide
gagaaagcacggaggcgca

SEQ ID NO: 1354189 - RNA, 19 nt, Artificial Sequence
  Description of Artificial Sequence: Synthetic oligonucleotide
gucacacgugcagugugac

SEQ ID NO: 1354190 - RNA, 19 nt, Artificial Sequence
  Description of Artificial Sequence: Synthetic oligonucleotide
guaguggguccuugcucac

SEQ ID NO: 1354191 - RNA, 19 nt, Artificial Sequence
  Description of Artificial Sequence: Synthetic oligonucleotide
ggggcuaagugagacggac

SEQ ID NO: 1354192 - RNA, 19 nt, Artificial Sequence
  Description of Artificial Sequence: Synthetic oligonucleotide
cagcuccccuccaccaagc

SEQ ID NO: 1354193 - RNA, 19 nt, Artificial Sequence
  Description of Artificial Sequence: Synthetic oligonucleotide
ggaauacauaacaccuaca

SEQ ID NO: 1354194 - RNA, 19 nt, Artificial Sequence
  Description of Artificial Sequence: Synthetic oligonucleotide
gaaagcacggaggcgcacu

SEQ ID NO: 1354195 - RNA, 19 nt, Artificial Sequence
  Description of Artificial Sequence: Synthetic oligonucleotide
gcgcuucucaacaguaaag

SEQ ID NO: 1354196 - RNA, 19 nt, Artificial Sequence
  Description of Artificial Sequence: Synthetic oligonucleotide
cagggacaacugacuuggg

SEQ ID NO: 1354197 - RNA, 19 nt, Artificial Sequence
  Description of Artificial Sequence: Synthetic oligonucleotide
caaacaggcggagcgcaca

SEQ ID NO: 1354198 - RNA, 19 nt, Artificial Sequence
  Description of Artificial Sequence: Synthetic oligonucleotide
caggcggagcgcacauggc

SEQ ID NO: 1354199 - RNA, 19 nt, Artificial Sequence
  Description of Artificial Sequence: Synthetic oligonucleotide
caauguacgacggcuacau

SEQ ID NO: 1354200 - RNA, 19 nt, Artificial Sequence
  Description of Artificial Sequence: Synthetic oligonucleotide
gugcguuuauuuugcucaa

SEQ ID NO: 1354201 - RNA, 19 nt, Artificial Sequence
  Description of Artificial Sequence: Synthetic oligonucleotide
ggacaugcuuacugcggac

SEQ ID NO: 1354202 - RNA, 19 nt, Artificial Sequence
  Description of Artificial Sequence: Synthetic oligonucleotide
gagaacgucguggcguucu

SEQ ID NO: 1354203 - RNA, 19 nt, Artificial Sequence
  Description of Artificial Sequence: Synthetic oligonucleotide
guucuccuacacuguaaua

SEQ ID NO: 1354204 - RNA, 19 nt, Artificial Sequence
  Description of Artificial Sequence: Synthetic oligonucleotide
agagaacgucguggcguuc

SEQ ID NO: 1354205 - RNA, 19 nt, Artificial Sequence
  Description of Artificial Sequence: Synthetic oligonucleotide
ggguaguggguccuugcuc

SEQ ID NO: 1354206 - RNA, 19 nt, Artificial Sequence
  Description of Artificial Sequence: Synthetic oligonucleotide
ggcaggugcgcuucucaac

SEQ ID NO: 1354207 - RNA, 19 nt, Artificial Sequence
  Description of Artificial Sequence: Synthetic oligonucleotide
guaagcuaacacugguguu

SEQ ID NO: 1354208 - RNA, 19 nt, Artificial Sequence
  Description of Artificial Sequence: Synthetic oligonucleotide
uaggaccauggauccuuua

SEQ ID NO: 1354209 - RNA, 19 nt, Artificial Sequence
  Description of Artificial Sequence: Synthetic oligonucleotide
cuccaccaagcauuuggaa

SEQ ID NO: 1354210 - RNA, 19 nt, Artificial Sequence
  Description of Artificial Sequence: Synthetic oligonucleotide
cacauggcaccccucuaaa

SEQ ID NO: 1354211 - RNA, 19 nt, Artificial Sequence
  Description of Artificial Sequence: Synthetic oligonucleotide
caccagacauuaagaguaa

SEQ ID NO: 1354212 - RNA, 19 nt, Artificial Sequence
  Description of Artificial Sequence: Synthetic oligonucleotide
ggcauuuuauggauaauuu

SEQ ID NO: 1354213 - RNA, 19 nt, Artificial Sequence
  Description of Artificial Sequence: Synthetic oligonucleotide
gucguggcguucuccuaca

SEQ ID NO: 1354214 - RNA, 19 nt, Artificial Sequence
  Description of Artificial Sequence: Synthetic oligonucleotide
aagcuaccguauagaaaua

SEQ ID NO: 1354215 - RNA, 19 nt, Artificial Sequence
  Description of Artificial Sequence: Synthetic oligonucleotide
caugcuuacugcggacaca

SEQ ID NO: 1354216 - RNA, 19 nt, Artificial Sequence
  Description of Artificial Sequence: Synthetic oligonucleotide
agcaaccgcggcacuggag

SEQ ID NO: 1354217 - RNA, 19 nt, Artificial Sequence
  Description of Artificial Sequence: Synthetic oligonucleotide
ggcugccaggucuuugaac

SEQ ID NO: 1354218 - RNA, 19 nt, Artificial Sequence
  Description of Artificial Sequence: Synthetic oligonucleotide
gcucaaacaggcggagcgc

SEQ ID NO: 1354219 - RNA, 19 nt, Artificial Sequence
  Description of Artificial Sequence: Synthetic oligonucleotide
cacugaccccguccauggc

SEQ ID NO: 1354220 - RNA, 19 nt, Artificial Sequence
  Description of Artificial Sequence: Synthetic oligonucleotide
caucuacguucucauucaa

SEQ ID NO: 1354221 - RNA, 19 nt, Artificial Sequence
  Description of Artificial Sequence: Synthetic oligonucleotide
gacggaccaugaagggcac

SEQ ID NO: 1354222 - RNA, 19 nt, Artificial Sequence
  Description of Artificial Sequence: Synthetic oligonucleotide
ccuacacuguaauaguuau

SEQ ID NO: 1354223 - RNA, 19 nt, Artificial Sequence
  Description of Artificial Sequence: Synthetic oligonucleotide
gcacauggcaccccucuaa

SEQ ID NO: 1354224 - RNA, 19 nt, Artificial Sequence
  Description of Artificial Sequence: Synthetic oligonucleotide
ccccucgguucuuccaugg

SEQ ID NO: 1354225 - RNA, 19 nt, Artificial Sequence
  Description of Artificial Sequence: Synthetic oligonucleotide
gcacucagagaacgucgug

SEQ ID NO: 1354226 - RNA, 19 nt, Artificial Sequence
  Description of Artificial Sequence: Synthetic oligonucleotide
cucggguaguggguccuug

SEQ ID NO: 1354227 - RNA, 19 nt, Artificial Sequence
  Description of Artificial Sequence: Synthetic oligonucleotide
gggcuaagugagacggacc

SEQ ID NO: 1354228 - RNA, 19 nt, Artificial Sequence
  Description of Artificial Sequence: Synthetic oligonucleotide
ggcggagcgcacauggcac

SEQ ID NO: 1354229 - RNA, 19 nt, Artificial Sequence
  Description of Artificial Sequence: Synthetic oligonucleotide
ggcgcacucagagaacguc

SEQ ID NO: 1354230 - RNA, 19 nt, Artificial Sequence
  Description of Artificial Sequence: Synthetic oligonucleotide
cuccuacacuguaauaguu

SEQ ID NO: 1354231 - RNA, 19 nt, Artificial Sequence
  Description of Artificial Sequence: Synthetic oligonucleotide
aaagccccacugaccccgu

SEQ ID NO: 1354232 - RNA, 19 nt, Artificial Sequence
  Description of Artificial Sequence: Synthetic oligonucleotide
ggcaugcuaggacugugcu

SEQ ID NO: 1354233 - RNA, 19 nt, Artificial Sequence
  Description of Artificial Sequence: Synthetic oligonucleotide
agcguacacucugcaugca

SEQ ID NO: 1354234 - RNA, 19 nt, Artificial Sequence
  Description of Artificial Sequence: Synthetic oligonucleotide
caucaaaggcaggugcgcu

SEQ ID NO: 1354235 - RNA, 19 nt, Artificial Sequence
  Description of Artificial Sequence: Synthetic oligonucleotide
cguuuauuuugcucaaugu

SEQ ID NO: 1354236 - RNA, 19 nt, Artificial Sequence
  Description of Artificial Sequence: Synthetic oligonucleotide
ccuccaccaagcauuugga

SEQ ID NO: 1354237 - RNA, 19 nt, Artificial Sequence
  Description of Artificial Sequence: Synthetic oligonucleotide
ggaccaggcuugagaaaug

SEQ ID NO: 1354238 - RNA, 19 nt, Artificial Sequence
  Description of Artificial Sequence: Synthetic oligonucleotide
gcaccccucuaaauaucag

SEQ ID NO: 1354239 - RNA, 19 nt, Artificial Sequence
  Description of Artificial Sequence: Synthetic oligonucleotide
gggaaggaacggaaacguc

SEQ ID NO: 1354240 - RNA, 19 nt, Artificial Sequence
  Description of Artificial Sequence: Synthetic oligonucleotide
caacugacuuggggaccag

SEQ ID NO: 1354241 - RNA, 19 nt, Artificial Sequence
  Description of Artificial Sequence: Synthetic oligonucleotide
cgucguggcguucuccuac

SEQ ID NO: 1354242 - RNA, 19 nt, Artificial Sequence
  Description of Artificial Sequence: Synthetic oligonucleotide
ggcguucuccuacacugua

SEQ ID NO: 1354243 - RNA, 19 nt, Artificial Sequence
  Description of Artificial Sequence: Synthetic oligonucleotide
acgucguggcguucuccua

SEQ ID NO: 1354244 - RNA, 19 nt, Artificial Sequence
  Description of Artificial Sequence: Synthetic oligonucleotide
cccaucuugggaauccaua

SEQ ID NO: 1354245 - RNA, 19 nt, Artificial Sequence
  Description of Artificial Sequence: Synthetic oligonucleotide
cccucgguucuuccauggg

SEQ ID NO: 1354246 - RNA, 19 nt, Artificial Sequence
  Description of Artificial Sequence: Synthetic oligonucleotide
gugugcgaaauaauuccuu

SEQ ID NO: 1354247 - RNA, 19 nt, Artificial Sequence
  Description of Artificial Sequence: Synthetic oligonucleotide
cucucacaagauccuucua

SEQ ID NO: 1354248 - RNA, 19 nt, Artificial Sequence
  Description of Artificial Sequence: Synthetic oligonucleotide
gcguacacucugcaugcaa

SEQ ID NO: 1354249 - RNA, 19 nt, Artificial Sequence
  Description of Artificial Sequence: Synthetic oligonucleotide
cacgugcagugugaccuca

SEQ ID NO: 1354250 - RNA, 19 nt, Artificial Sequence
  Description of Artificial Sequence: Synthetic oligonucleotide
augguccgugugcgaaaua

SEQ ID NO: 1354251 - RNA, 19 nt, Artificial Sequence
  Description of Artificial Sequence: Synthetic oligonucleotide
gcacaacacuguaucaaua

SEQ ID NO: 1354252 - RNA, 19 nt, Artificial Sequence
  Description of Artificial Sequence: Synthetic oligonucleotide
gcucaauguacgacggcua

SEQ ID NO: 1354253 - RNA, 19 nt, Artificial Sequence
  Description of Artificial Sequence: Synthetic oligonucleotide
cagagaacgucguggcguu

SEQ ID NO: 1354254 - RNA, 19 nt, Artificial Sequence
  Description of Artificial Sequence: Synthetic oligonucleotide
aggcgcacucagagaacgu

SEQ ID NO: 1354255 - RNA, 19 nt, Artificial Sequence
  Description of Artificial Sequence: Synthetic oligonucleotide
ggaggcgcacucagagaac

SEQ ID NO: 1354256 - RNA, 19 nt, Artificial Sequence
  Description of Artificial Sequence: Synthetic oligonucleotide
gacugugcugagagacagu

SEQ ID NO: 1354257 - RNA, 19 nt, Artificial Sequence
  Description of Artificial Sequence: Synthetic oligonucleotide
cacuagcaagaggggccuc

SEQ ID NO: 1354258 - RNA, 19 nt, Artificial Sequence
  Description of Artificial Sequence: Synthetic oligonucleotide
ccuuagcgaaacacggagu

SEQ ID NO: 1354259 - RNA, 19 nt, Artificial Sequence
  Description of Artificial Sequence: Synthetic oligonucleotide
gugcugagagacagucacu

SEQ ID NO: 1354260 - RNA, 19 nt, Artificial Sequence
  Description of Artificial Sequence: Synthetic oligonucleotide
cgugugcgaaauaauuccu

SEQ ID NO: 1354261 - RNA, 19 nt, Artificial Sequence
  Description of Artificial Sequence: Synthetic oligonucleotide
caauuccaguaggucauuu

SEQ ID NO: 1354262 - RNA, 19 nt, Artificial Sequence
  Description of Artificial Sequence: Synthetic oligonucleotide
cugcggacacagagacaaa

SEQ ID NO: 1354263 - RNA, 19 nt, Artificial Sequence
  Description of Artificial Sequence: Synthetic oligonucleotide
cucugaggaaaggcaugcu

SEQ ID NO: 1354264 - RNA, 19 nt, Artificial Sequence
  Description of Artificial Sequence: Synthetic oligonucleotide
cguucuccuacacuguaau

SEQ ID NO: 1354265 - RNA, 19 nt, Artificial Sequence
  Description of Artificial Sequence: Synthetic oligonucleotide
cacguggcugccaggucuu

SEQ ID NO: 1354266 - RNA, 19 nt, Artificial Sequence
  Description of Artificial Sequence: Synthetic oligonucleotide
gguccgugugcgaaauaau

SEQ ID NO: 1354267 - RNA, 19 nt, Artificial Sequence
  Description of Artificial Sequence: Synthetic oligonucleotide
cagcaucuacguucucauu

SEQ ID NO: 1354268 - RNA, 19 nt, Artificial Sequence
  Description of Artificial Sequence: Synthetic oligonucleotide
cgcacucagagaacgucgu

SEQ ID NO: 1354269 - RNA, 19 nt, Artificial Sequence
  Description of Artificial Sequence: Synthetic oligonucleotide
gcacggaggcgcacucaga

SEQ ID NO: 1354270 - RNA, 19 nt, Artificial Sequence
  Description of Artificial Sequence: Synthetic oligonucleotide
cgacggcuacauaaugacu

SEQ ID NO: 1354271 - RNA, 19 nt, Artificial Sequence
  Description of Artificial Sequence: Synthetic oligonucleotide
cguggcguucuccuacacu

SEQ ID NO: 1354272 - RNA, 19 nt, Artificial Sequence
  Description of Artificial Sequence: Synthetic oligonucleotide
cggguaguggguccuugcu

SEQ ID NO: 1354273 - RNA, 19 nt, Artificial Sequence
  Description of Artificial Sequence: Synthetic oligonucleotide
gccucggguaguggguccu

SEQ ID NO: 1354274 - RNA, 19 nt, Artificial Sequence
  Description of Artificial Sequence: Synthetic oligonucleotide
ccauaggaccauggauccu

SEQ ID NO: 1354275 - RNA, 19 nt, Artificial Sequence
  Description of Artificial Sequence: Synthetic oligonucleotide
ccccuccaccaagcauuug

SEQ ID NO: 1354276 - RNA, 19 nt, Artificial Sequence
  Description of Artificial Sequence: Synthetic oligonucleotide
ccucggguaguggguccuu

SEQ ID NO: 1354277 - RNA, 19 nt, Artificial Sequence
  Description of Artificial Sequence: Synthetic oligonucleotide
aaauauuggaaauaaguga

SEQ ID NO: 1354278 - RNA, 19 nt, Artificial Sequence
  Description of Artificial Sequence: Synthetic oligonucleotide
uuaucgugcaucaagacag

SEQ ID NO: 1354279 - RNA, 19 nt, Artificial Sequence
  Description of Artificial Sequence: Synthetic oligonucleotide
ugugcuaacagaauguucc

SEQ ID NO: 1354280 - RNA, 19 nt, Artificial Sequence
  Description of Artificial Sequence: Synthetic oligonucleotide
aaugucagaucacauaguc

SEQ ID NO: 1354281 - RNA, 19 nt, Artificial Sequence
  Description of Artificial Sequence: Synthetic oligonucleotide
auggucacaaguuugacac

SEQ ID NO: 1354282 - RNA, 19 nt, Artificial Sequence
  Description of Artificial Sequence: Synthetic oligonucleotide
ugaaauaugacuauugcua

SEQ ID NO: 1354283 - RNA, 19 nt, Artificial Sequence
  Description of Artificial Sequence: Synthetic oligonucleotide
acuauugcuagugugagcc

SEQ ID NO: 1354284 - RNA, 19 nt, Artificial Sequence
  Description of Artificial Sequence: Synthetic oligonucleotide
ugaaaucccacauagguac

SEQ ID NO: 1354285 - RNA, 19 nt, Artificial Sequence
  Description of Artificial Sequence: Synthetic oligonucleotide
aauugcaggauccacucag

SEQ ID NO: 1354286 - RNA, 19 nt, Artificial Sequence
  Description of Artificial Sequence: Synthetic oligonucleotide
aagacauugugcaugcucc

SEQ ID NO: 1354287 - RNA, 19 nt, Artificial Sequence
  Description of Artificial Sequence: Synthetic oligonucleotide
uguguuaucgugcaucaag

SEQ ID NO: 1354288 - RNA, 19 nt, Artificial Sequence
  Description of Artificial Sequence: Synthetic oligonucleotide
ucuuauagaugacuucugg

SEQ ID NO: 1354289 - RNA, 19 nt, Artificial Sequence
  Description of Artificial Sequence: Synthetic oligonucleotide
uuauagaugacuucuggca

SEQ ID NO: 1354290 - RNA, 19 nt, Artificial Sequence
  Description of Artificial Sequence: Synthetic oligonucleotide
gaaauaugacuauugcuag

SEQ ID NO: 1354291 - RNA, 19 nt, Artificial Sequence
  Description of Artificial Sequence: Synthetic oligonucleotide
guauauguucuuuagagca

SEQ ID NO: 1354292 - RNA, 19 nt, Artificial Sequence
  Description of Artificial Sequence: Synthetic oligonucleotide
gaugccugcauccuaauug

SEQ ID NO: 1354293 - RNA, 19 nt, Artificial Sequence
  Description of Artificial Sequence: Synthetic oligonucleotide
ugauccauuugucucaucu

SEQ ID NO: 1354294 - RNA, 19 nt, Artificial Sequence
  Description of Artificial Sequence: Synthetic oligonucleotide
gauuguauuuccucccagg

SEQ ID NO: 1354295 - RNA, 19 nt, Artificial Sequence
  Description of Artificial Sequence: Synthetic oligonucleotide
uguauauguucuuuagagc

SEQ ID NO: 1354296 - RNA, 19 nt, Artificial Sequence
  Description of Artificial Sequence: Synthetic oligonucleotide
auuacugaaguauggcaag

SEQ ID NO: 1354297 - RNA, 19 nt, Artificial Sequence
  Description of Artificial Sequence: Synthetic oligonucleotide
aguguuaagccuucccugg

SEQ ID NO: 1354298 - RNA, 19 nt, Artificial Sequence
  Description of Artificial Sequence: Synthetic oligonucleotide
guagcuggacccaagaugg

SEQ ID NO: 1354299 - RNA, 19 nt, Artificial Sequence
  Description of Artificial Sequence: Synthetic oligonucleotide
aaagaagauugugagguug

SEQ ID NO: 1354300 - RNA, 19 nt, Artificial Sequence
  Description of Artificial Sequence: Synthetic oligonucleotide
aaauccuucugcaugagga

SEQ ID NO: 1354301 - RNA, 19 nt, Artificial Sequence
  Description of Artificial Sequence: Synthetic oligonucleotide
aacagaauguuccgauguc

SEQ ID NO: 1354302 - RNA, 19 nt, Artificial Sequence
  Description of Artificial Sequence: Synthetic oligonucleotide
uaugacuauugcuagugug

SEQ ID NO: 1354303 - RNA, 19 nt, Artificial Sequence
  Description of Artificial Sequence: Synthetic oligonucleotide
aguauggcaagauuuaaaa

SEQ ID NO: 1354304 - RNA, 19 nt, Artificial Sequence
  Description of Artificial Sequence: Synthetic oligonucleotide
caaaagacacuguagcgag

SEQ ID NO: 1354305 - RNA, 19 nt, Artificial Sequence
  Description of Artificial Sequence: Synthetic oligonucleotide
ucaaugauuuuauuaguau

SEQ ID NO: 1354306 - RNA, 19 nt, Artificial Sequence
  Description of Artificial Sequence: Synthetic oligonucleotide
ugucaacuuggagugaucg

SEQ ID NO: 1354307 - RNA, 19 nt, Artificial Sequence
  Description of Artificial Sequence: Synthetic oligonucleotide
aauuacugaaguauggcaa

SEQ ID NO: 1354308 - RNA, 19 nt, Artificial Sequence
  Description of Artificial Sequence: Synthetic oligonucleotide
aguccaacuaacaaccugg

SEQ ID NO: 1354309 - RNA, 19 nt, Artificial Sequence
  Description of Artificial Sequence: Synthetic oligonucleotide
ucuacuguguuaucgugca

SEQ ID NO: 1354310 - RNA, 19 nt, Artificial Sequence
  Description of Artificial Sequence: Synthetic oligonucleotide
uuguggugaaauaugacua

SEQ ID NO: 1354311 - RNA, 19 nt, Artificial Sequence
  Description of Artificial Sequence: Synthetic oligonucleotide
auacuguuauuguacagcu

SEQ ID NO: 1354312 - RNA, 19 nt, Artificial Sequence
  Description of Artificial Sequence: Synthetic oligonucleotide
ugacucuguacccucagca

SEQ ID NO: 1354313 - RNA, 19 nt, Artificial Sequence
  Description of Artificial Sequence: Synthetic oligonucleotide
gaucgugcaagccccaugc

SEQ ID NO: 1354314 - RNA, 19 nt, Artificial Sequence
  Description of Artificial Sequence: Synthetic oligonucleotide
aaagacacuguagcgaggu

SEQ ID NO: 1354315 - RNA, 19 nt, Artificial Sequence
  Description of Artificial Sequence: Synthetic oligonucleotide
uguacccucagcaggguug

SEQ ID NO: 1354316 - RNA, 19 nt, Artificial Sequence
  Description of Artificial Sequence: Synthetic oligonucleotide
uguuguccuaucuacugug

SEQ ID NO: 1354317 - RNA, 19 nt, Artificial Sequence
  Description of Artificial Sequence: Synthetic oligonucleotide
auagaugacuucuggcaag

SEQ ID NO: 1354318 - RNA, 19 nt, Artificial Sequence
  Description of Artificial Sequence: Synthetic oligonucleotide
uaaggcauucuguaacggc

SEQ ID NO: 1354319 - RNA, 19 nt, Artificial Sequence
  Description of Artificial Sequence: Synthetic oligonucleotide
uguggaaauuccauguaua

SEQ ID NO: 1354320 - RNA, 19 nt, Artificial Sequence
  Description of Artificial Sequence: Synthetic oligonucleotide
uguuaagccuucccuggag

SEQ ID NO: 1354321 - RNA, 19 nt, Artificial Sequence
  Description of Artificial Sequence: Synthetic oligonucleotide
uuaguauggucacaaguuu

SEQ ID NO: 1354322 - RNA, 19 nt, Artificial Sequence
  Description of Artificial Sequence: Synthetic oligonucleotide
uacaggucgccguuaacag

SEQ ID NO: 1354323 - RNA, 19 nt, Artificial Sequence
  Description of Artificial Sequence: Synthetic oligonucleotide
gguaccacaagacauugug

SEQ ID NO: 1354324 - RNA, 19 nt, Artificial Sequence
  Description of Artificial Sequence: Synthetic oligonucleotide
aaccuggauuccuuuagcu

SEQ ID NO: 1354325 - RNA, 19 nt, Artificial Sequence
  Description of Artificial Sequence: Synthetic oligonucleotide
uuaagggcaacaguguuaa

SEQ ID NO: 1354326 - RNA, 19 nt, Artificial Sequence
  Description of Artificial Sequence: Synthetic oligonucleotide
ugaggaaggcugaaauccc

SEQ ID NO: 1354327 - RNA, 19 nt, Artificial Sequence
  Description of Artificial Sequence: Synthetic oligonucleotide
aucuacuguguuaucgugc

SEQ ID NO: 1354328 - RNA, 19 nt, Artificial Sequence
  Description of Artificial Sequence: Synthetic oligonucleotide
caggucgccguuaacagag

SEQ ID NO: 1354329 - RNA, 19 nt, Artificial Sequence
  Description of Artificial Sequence: Synthetic oligonucleotide
gacggcaccggcucgaagc

SEQ ID NO: 1354330 - RNA, 19 nt, Artificial Sequence
  Description of Artificial Sequence: Synthetic oligonucleotide
guuaucgugcaucaagaca

SEQ ID NO: 1354331 - RNA, 19 nt, Artificial Sequence
  Description of Artificial Sequence: Synthetic oligonucleotide
ucagaucacauagucggcc

SEQ ID NO: 1354332 - RNA, 19 nt, Artificial Sequence
  Description of Artificial Sequence: Synthetic oligonucleotide
auuaguauggucacaaguu

SEQ ID NO: 1354333 - RNA, 19 nt, Artificial Sequence
  Description of Artificial Sequence: Synthetic oligonucleotide
cucuguacccucagcaggg

SEQ ID NO: 1354334 - RNA, 19 nt, Artificial Sequence
  Description of Artificial Sequence: Synthetic oligonucleotide
gaacucauuucugagucug

SEQ ID NO: 1354335 - RNA, 19 nt, Artificial Sequence
  Description of Artificial Sequence: Synthetic oligonucleotide
ugacuauugcuagugugag

SEQ ID NO: 1354336 - RNA, 19 nt, Artificial Sequence
  Description of Artificial Sequence: Synthetic oligonucleotide
aaugucaacuuggagugau

SEQ ID NO: 1354337 - RNA, 19 nt, Artificial Sequence
  Description of Artificial Sequence: Synthetic oligonucleotide
uggaaauuccauguauaug

SEQ ID NO: 1354338 - RNA, 19 nt, Artificial Sequence
  Description of Artificial Sequence: Synthetic oligonucleotide
gguaaggcauucuguaacg

SEQ ID NO: 1354339 - RNA, 19 nt, Artificial Sequence
  Description of Artificial Sequence: Synthetic oligonucleotide
ugagguuguggguaaggca

SEQ ID NO: 1354340 - RNA, 19 nt, Artificial Sequence
  Description of Artificial Sequence: Synthetic oligonucleotide
gaccauacuguuauuguac

SEQ ID NO: 1354341 - RNA, 19 nt, Artificial Sequence
  Description of Artificial Sequence: Synthetic oligonucleotide
gacucuguacccucagcag

SEQ ID NO: 1354342 - RNA, 19 nt, Artificial Sequence
  Description of Artificial Sequence: Synthetic oligonucleotide
ugacgacaaauauuggaaa

SEQ ID NO: 1354343 - RNA, 19 nt, Artificial Sequence
  Description of Artificial Sequence: Synthetic oligonucleotide
uaucgugcaucaagacagg

SEQ ID NO: 1354344 - RNA, 19 nt, Artificial Sequence
  Description of Artificial Sequence: Synthetic oligonucleotide
cuaacagaauguuccgaug

SEQ ID NO: 1354345 - RNA, 19 nt, Artificial Sequence
  Description of Artificial Sequence: Synthetic oligonucleotide
uguuaucgugcaucaagac

SEQ ID NO: 1354346 - RNA, 19 nt, Artificial Sequence
  Description of Artificial Sequence: Synthetic oligonucleotide
ugugugagggcuguuauua

SEQ ID NO: 1354347 - RNA, 19 nt, Artificial Sequence
  Description of Artificial Sequence: Synthetic oligonucleotide
uguggugaaauaugacuau

SEQ ID NO: 1354348 - RNA, 19 nt, Artificial Sequence
  Description of Artificial Sequence: Synthetic oligonucleotide
ugggacucguaauaauucu

SEQ ID NO: 1354349 - RNA, 19 nt, Artificial Sequence
  Description of Artificial Sequence: Synthetic oligonucleotide
cugacgacaaauauuggaa

SEQ ID NO: 1354350 - RNA, 19 nt, Artificial Sequence
  Description of Artificial Sequence: Synthetic oligonucleotide
aacggcuuccuucaaggua

SEQ ID NO: 1354351 - RNA, 19 nt, Artificial Sequence
  Description of Artificial Sequence: Synthetic oligonucleotide
agauccccagggcuugugc

SEQ ID NO: 1354352 - RNA, 19 nt, Artificial Sequence
  Description of Artificial Sequence: Synthetic oligonucleotide
uguugacaguccaacuaac

SEQ ID NO: 1354353 - RNA, 19 nt, Artificial Sequence
  Description of Artificial Sequence: Synthetic oligonucleotide
ugugcaugcuccagucaag

SEQ ID NO: 1354354 - RNA, 19 nt, Artificial Sequence
  Description of Artificial Sequence: Synthetic oligonucleotide
augggacucguaauaauuc

SEQ ID NO: 1354355 - RNA, 19 nt, Artificial Sequence
  Description of Artificial Sequence: Synthetic oligonucleotide
aagaagauugugagguugu

SEQ ID NO: 1354356 - RNA, 19 nt, Artificial Sequence
  Description of Artificial Sequence: Synthetic oligonucleotide
accggcucgaagcugaaga

SEQ ID NO: 1354357 - RNA, 19 nt, Artificial Sequence
  Description of Artificial Sequence: Synthetic oligonucleotide
ucgccguuaacagagcuga

SEQ ID NO: 1354358 - RNA, 19 nt, Artificial Sequence
  Description of Artificial Sequence: Synthetic oligonucleotide
ucaaauagucuggggagac

SEQ ID NO: 1354359 - RNA, 19 nt, Artificial Sequence
  Description of Artificial Sequence: Synthetic oligonucleotide
aaaagacacuguagcgagg

SEQ ID NO: 1354360 - RNA, 19 nt, Artificial Sequence
  Description of Artificial Sequence: Synthetic oligonucleotide
caguguuaagccuucccug

SEQ ID NO: 1354361 - RNA, 19 nt, Artificial Sequence
  Description of Artificial Sequence: Synthetic oligonucleotide
auccauuugucucaucuua

SEQ ID NO: 1354362 - RNA, 19 nt, Artificial Sequence
  Description of Artificial Sequence: Synthetic oligonucleotide
ugccgggcgacgcagagac

SEQ ID NO: 1354363 - RNA, 19 nt, Artificial Sequence
  Description of Artificial Sequence: Synthetic oligonucleotide
uacuguuauuguacagcug

SEQ ID NO: 1354364 - RNA, 19 nt, Artificial Sequence
  Description of Artificial Sequence: Synthetic oligonucleotide
uauugcuagugugagccac

SEQ ID NO: 1354365 - RNA, 19 nt, Artificial Sequence
  Description of Artificial Sequence: Synthetic oligonucleotide
uagugugagccacaagauc

SEQ ID NO: 1354366 - RNA, 19 nt, Artificial Sequence
  Description of Artificial Sequence: Synthetic oligonucleotide
augacuauugcuaguguga

SEQ ID NO: 1354367 - RNA, 19 nt, Artificial Sequence
  Description of Artificial Sequence: Synthetic oligonucleotide
uucaagguagggaucuuuu

SEQ ID NO: 1354368 - RNA, 19 nt, Artificial Sequence
  Description of Artificial Sequence: Synthetic oligonucleotide
caugccggcgccugcaccg

SEQ ID NO: 1354369 - RNA, 19 nt, Artificial Sequence
  Description of Artificial Sequence: Synthetic oligonucleotide
gauguagcuggacccaaga

SEQ ID NO: 1354370 - RNA, 19 nt, Artificial Sequence
  Description of Artificial Sequence: Synthetic oligonucleotide
augucagaucacauagucg

SEQ ID NO: 1354371 - RNA, 19 nt, Artificial Sequence
  Description of Artificial Sequence: Synthetic oligonucleotide
gaagccauaucugcauggc

SEQ ID NO: 1354372 - RNA, 19 nt, Artificial Sequence
  Description of Artificial Sequence: Synthetic oligonucleotide
cuguuauuacuuucugauc

SEQ ID NO: 1354373 - RNA, 19 nt, Artificial Sequence
  Description of Artificial Sequence: Synthetic oligonucleotide
ugaagagccgcagaaggau

SEQ ID NO: 1354374 - RNA, 19 nt, Artificial Sequence
  Description of Artificial Sequence: Synthetic oligonucleotide
uaauugcaggauccacuca

SEQ ID NO: 1354375 - RNA, 19 nt, Artificial Sequence
  Description of Artificial Sequence: Synthetic oligonucleotide
ccuaucuacuguguuaucg

SEQ ID NO: 1354376 - RNA, 19 nt, Artificial Sequence
  Description of Artificial Sequence: Synthetic oligonucleotide
aaguauggcaagauuuaaa

SEQ ID NO: 1354377 - RNA, 19 nt, Artificial Sequence
  Description of Artificial Sequence: Synthetic oligonucleotide
auuugcugcaggguuaagu

SEQ ID NO: 1354378 - RNA, 19 nt, Artificial Sequence
  Description of Artificial Sequence: Synthetic oligonucleotide
aagaugggacucguaauaa

SEQ ID NO: 1354379 - RNA, 19 nt, Artificial Sequence
  Description of Artificial Sequence: Synthetic oligonucleotide
auugcaggauccacucagc

SEQ ID NO: 1354380 - RNA, 19 nt, Artificial Sequence
  Description of Artificial Sequence: Synthetic oligonucleotide
ugaucgugcaagccccaug

SEQ ID NO: 1354381 - RNA, 19 nt, Artificial Sequence
  Description of Artificial Sequence: Synthetic oligonucleotide
ccuuugacaucaaagaaga

SEQ ID NO: 1354382 - RNA, 19 nt, Artificial Sequence
  Description of Artificial Sequence: Synthetic oligonucleotide
gagacgccgagguacuggc

SEQ ID NO: 1354383 - RNA, 19 nt, Artificial Sequence
  Description of Artificial Sequence: Synthetic oligonucleotide
acuaacaaccuggauuccu

SEQ ID NO: 1354384 - RNA, 19 nt, Artificial Sequence
  Description of Artificial Sequence: Synthetic oligonucleotide
aaacauggacugcuuccaa

SEQ ID NO: 1354385 - RNA, 19 nt, Artificial Sequence
  Description of Artificial Sequence: Synthetic oligonucleotide
agaccauacuguuauugua

SEQ ID NO: 1354386 - RNA, 19 nt, Artificial Sequence
  Description of Artificial Sequence: Synthetic oligonucleotide
aggguuaaguuuccuaauu

SEQ ID NO: 1354387 - RNA, 19 nt, Artificial Sequence
  Description of Artificial Sequence: Synthetic oligonucleotide
uuggagugaucgugcaagc

SEQ ID NO: 1354388 - RNA, 19 nt, Artificial Sequence
  Description of Artificial Sequence: Synthetic oligonucleotide
gaugucucugcaagaggcc

SEQ ID NO: 1354389 - RNA, 19 nt, Artificial Sequence
  Description of Artificial Sequence: Synthetic oligonucleotide
ggcuugugcuaacagaaug

SEQ ID NO: 1354390 - RNA, 19 nt, Artificial Sequence
  Description of Artificial Sequence: Synthetic oligonucleotide
ucaugacucuguacccuca

SEQ ID NO: 1354391 - RNA, 19 nt, Artificial Sequence
  Description of Artificial Sequence: Synthetic oligonucleotide
ggaaucuagaagugaggug

SEQ ID NO: 1354392 - RNA, 19 nt, Artificial Sequence
  Description of Artificial Sequence: Synthetic oligonucleotide
gauugugagguugugggua

SEQ ID NO: 1354393 - RNA, 19 nt, Artificial Sequence
  Description of Artificial Sequence: Synthetic oligonucleotide
uguagcgagguuucccauc

SEQ ID NO: 1354394 - RNA, 19 nt, Artificial Sequence
  Description of Artificial Sequence: Synthetic oligonucleotide
cucgaagcugaagagccgc

SEQ ID NO: 1354395 - RNA, 19 nt, Artificial Sequence
  Description of Artificial Sequence: Synthetic oligonucleotide
gcugacgacaaauauugga

SEQ ID NO: 1354396 - RNA, 19 nt, Artificial Sequence
  Description of Artificial Sequence: Synthetic oligonucleotide
ccauguauauguucuuuag

SEQ ID NO: 1354397 - RNA, 19 nt, Artificial Sequence
  Description of Artificial Sequence: Synthetic oligonucleotide
caguccaacuaacaaccug

SEQ ID NO: 1354398 - RNA, 19 nt, Artificial Sequence
  Description of Artificial Sequence: Synthetic oligonucleotide
auagucuggggagacaaaa

SEQ ID NO: 1354399 - RNA, 19 nt, Artificial Sequence
  Description of Artificial Sequence: Synthetic oligonucleotide
ucacauagucggccagacc

SEQ ID NO: 1354400 - RNA, 19 nt, Artificial Sequence
  Description of Artificial Sequence: Synthetic oligonucleotide
uagucggccagacccgucu

SEQ ID NO: 1354401 - RNA, 19 nt, Artificial Sequence
  Description of Artificial Sequence: Synthetic oligonucleotide
uagaugacuucuggcaaga

SEQ ID NO: 1354402 - RNA, 19 nt, Artificial Sequence
  Description of Artificial Sequence: Synthetic oligonucleotide
ucgugcaagccccaugcau

SEQ ID NO: 1354403 - RNA, 19 nt, Artificial Sequence
  Description of Artificial Sequence: Synthetic oligonucleotide
guauggcucaggcuccaag

SEQ ID NO: 1354404 - RNA, 19 nt, Artificial Sequence
  Description of Artificial Sequence: Synthetic oligonucleotide
augagcagaccauacuguu

SEQ ID NO: 1354405 - RNA, 19 nt, Artificial Sequence
  Description of Artificial Sequence: Synthetic oligonucleotide
cucaugacucuguacccuc

SEQ ID NO: 1354406 - RNA, 19 nt, Artificial Sequence
  Description of Artificial Sequence: Synthetic oligonucleotide
cacgcaggcguugaagggg

SEQ ID NO: 1354407 - RNA, 19 nt, Artificial Sequence
  Description of Artificial Sequence: Synthetic oligonucleotide
uagucuggggagacaaaau

SEQ ID NO: 1354408 - RNA, 19 nt, Artificial Sequence
  Description of Artificial Sequence: Synthetic oligonucleotide
guaccacaagacauugugc

SEQ ID NO: 1354409 - RNA, 19 nt, Artificial Sequence
  Description of Artificial Sequence: Synthetic oligonucleotide
uccaacuaacaaccuggau

SEQ ID NO: 1354410 - RNA, 19 nt, Artificial Sequence
  Description of Artificial Sequence: Synthetic oligonucleotide
uguuccgaugucucugcaa

SEQ ID NO: 1354411 - RNA, 19 nt, Artificial Sequence
  Description of Artificial Sequence: Synthetic oligonucleotide
cuuccuucaagguagggau

SEQ ID NO: 1354412 - RNA, 19 nt, Artificial Sequence
  Description of Artificial Sequence: Synthetic oligonucleotide
uccuaauugcaggauccac

SEQ ID NO: 1354413 - RNA, 19 nt, Artificial Sequence
  Description of Artificial Sequence: Synthetic oligonucleotide
ugcaugcuccagucaagca

SEQ ID NO: 1354414 - RNA, 19 nt, Artificial Sequence
  Description of Artificial Sequence: Synthetic oligonucleotide
auugaugccugcauccuaa

SEQ ID NO: 1354415 - RNA, 19 nt, Artificial Sequence
  Description of Artificial Sequence: Synthetic oligonucleotide
uuguccuaucuacuguguu

SEQ ID NO: 1354416 - RNA, 19 nt, Artificial Sequence
  Description of Artificial Sequence: Synthetic oligonucleotide
agaugggacucguaauaau

SEQ ID NO: 1354417 - RNA, 19 nt, Artificial Sequence
  Description of Artificial Sequence: Synthetic oligonucleotide
acauagucggccagacccg

SEQ ID NO: 1354418 - RNA, 19 nt, Artificial Sequence
  Description of Artificial Sequence: Synthetic oligonucleotide
aucuagaagugaggugcac

SEQ ID NO: 1354419 - RNA, 19 nt, Artificial Sequence
  Description of Artificial Sequence: Synthetic oligonucleotide
uagcuggacccaagauggg

SEQ ID NO: 1354420 - RNA, 19 nt, Artificial Sequence
  Description of Artificial Sequence: Synthetic oligonucleotide
ucgaagcugaagagccgca

SEQ ID NO: 1354421 - RNA, 19 nt, Artificial Sequence
  Description of Artificial Sequence: Synthetic oligonucleotide
agagcugacgacaaauauu

SEQ ID NO: 1354422 - RNA, 19 nt, Artificial Sequence
  Description of Artificial Sequence: Synthetic oligonucleotide
gugagguuguggguaaggc

SEQ ID NO: 1354423 - RNA, 19 nt, Artificial Sequence
  Description of Artificial Sequence: Synthetic oligonucleotide
ccuggauuccuuuagcuga

SEQ ID NO: 1354424 - RNA, 19 nt, Artificial Sequence
  Description of Artificial Sequence: Synthetic oligonucleotide
accacaagacauugugcau

SEQ ID NO: 1354425 - RNA, 19 nt, Artificial Sequence
  Description of Artificial Sequence: Synthetic oligonucleotide
uacugaaguauggcaagau

SEQ ID NO: 1354426 - RNA, 19 nt, Artificial Sequence
  Description of Artificial Sequence: Synthetic oligonucleotide
ggauuguauuuccucccag

SEQ ID NO: 1354427 - RNA, 19 nt, Artificial Sequence
  Description of Artificial Sequence: Synthetic oligonucleotide
guugacaguccaacuaaca

SEQ ID NO: 1354428 - RNA, 19 nt, Artificial Sequence
  Description of Artificial Sequence: Synthetic oligonucleotide
gacgcagagacgccgaggu

SEQ ID NO: 1354429 - RNA, 19 nt, Artificial Sequence
  Description of Artificial Sequence: Synthetic oligonucleotide
uaacggcuuccuucaaggu

SEQ ID NO: 1354430 - RNA, 19 nt, Artificial Sequence
  Description of Artificial Sequence: Synthetic oligonucleotide
guacccucagcaggguugg

SEQ ID NO: 1354431 - RNA, 19 nt, Artificial Sequence
  Description of Artificial Sequence: Synthetic oligonucleotide
uucucgggcgcgucguggc

SEQ ID NO: 1354432 - RNA, 19 nt, Artificial Sequence
  Description of Artificial Sequence: Synthetic oligonucleotide
acaggucgccguuaacaga

SEQ ID NO: 1354433 - RNA, 19 nt, Artificial Sequence
  Description of Artificial Sequence: Synthetic oligonucleotide
acgcaggcguugaaggggc

SEQ ID NO: 1354434 - RNA, 19 nt, Artificial Sequence
  Description of Artificial Sequence: Synthetic oligonucleotide
gccguuaacagagcugacg

SEQ ID NO: 1354435 - RNA, 19 nt, Artificial Sequence
  Description of Artificial Sequence: Synthetic oligonucleotide
gguguugacaguccaacua

SEQ ID NO: 1354436 - RNA, 19 nt, Artificial Sequence
  Description of Artificial Sequence: Synthetic oligonucleotide
uuccgaugucucugcaaga

SEQ ID NO: 1354437 - RNA, 19 nt, Artificial Sequence
  Description of Artificial Sequence: Synthetic oligonucleotide
uuccuuuagcugaccacuu

SEQ ID NO: 1354438 - RNA, 19 nt, Artificial Sequence
  Description of Artificial Sequence: Synthetic oligonucleotide
uaacaaccuggauuccuuu

SEQ ID NO: 1354439 - RNA, 19 nt, Artificial Sequence
  Description of Artificial Sequence: Synthetic oligonucleotide
ugacaccuacaggucgccg

SEQ ID NO: 1354440 - RNA, 19 nt, Artificial Sequence
  Description of Artificial Sequence: Synthetic oligonucleotide
caagccccaugcauugaug

SEQ ID NO: 1354441 - RNA, 19 nt, Artificial Sequence
  Description of Artificial Sequence: Synthetic oligonucleotide
aacucauuucugagucugu

SEQ ID NO: 1354442 - RNA, 19 nt, Artificial Sequence
  Description of Artificial Sequence: Synthetic oligonucleotide
acgccgagguacuggccac

SEQ ID NO: 1354443 - RNA, 19 nt, Artificial Sequence
  Description of Artificial Sequence: Synthetic oligonucleotide
cugcgcgucaucaccagca

SEQ ID NO: 1354444 - RNA, 19 nt, Artificial Sequence
  Description of Artificial Sequence: Synthetic oligonucleotide
guugggcggagccacccug

SEQ ID NO: 1354445 - RNA, 19 nt, Artificial Sequence
  Description of Artificial Sequence: Synthetic oligonucleotide
gccagcguguucucgggcg

SEQ ID NO: 1354446 - RNA, 19 nt, Artificial Sequence
  Description of Artificial Sequence: Synthetic oligonucleotide
ugccugcauccuaauugca

SEQ ID NO: 1354447 - RNA, 19 nt, Artificial Sequence
  Description of Artificial Sequence: Synthetic oligonucleotide
ggucacaccugguuucagc

SEQ ID NO: 1354448 - RNA, 19 nt, Artificial Sequence
  Description of Artificial Sequence: Synthetic oligonucleotide
ugagggcuguuauuacuuu

SEQ ID NO: 1354449 - RNA, 19 nt, Artificial Sequence
  Description of Artificial Sequence: Synthetic oligonucleotide
gugcaugcuccagucaagc

SEQ ID NO: 1354450 - RNA, 19 nt, Artificial Sequence
  Description of Artificial Sequence: Synthetic oligonucleotide
gacaccuacaggucgccgu

SEQ ID NO: 1354451 - RNA, 19 nt, Artificial Sequence
  Description of Artificial Sequence: Synthetic oligonucleotide
gagcacgcaggcguugaag

SEQ ID NO: 1354452 - RNA, 19 nt, Artificial Sequence
  Description of Artificial Sequence: Synthetic oligonucleotide
gucacggggcuugagcacc

SEQ ID NO: 1354453 - RNA, 19 nt, Artificial Sequence
  Description of Artificial Sequence: Synthetic oligonucleotide
aggggcugcgcgucaucac

SEQ ID NO: 1354454 - RNA, 19 nt, Artificial Sequence
  Description of Artificial Sequence: Synthetic oligonucleotide
guauggcaagauuuaaaau

SEQ ID NO: 1354455 - RNA, 19 nt, Artificial Sequence
  Description of Artificial Sequence: Synthetic oligonucleotide
gaugggacucguaauaauu

SEQ ID NO: 1354456 - RNA, 19 nt, Artificial Sequence
  Description of Artificial Sequence: Synthetic oligonucleotide
cagaacuuuaagggcaaca

SEQ ID NO: 1354457 - RNA, 19 nt, Artificial Sequence
  Description of Artificial Sequence: Synthetic oligonucleotide
ugcauccuaauugcaggau

SEQ ID NO: 1354458 - RNA, 19 nt, Artificial Sequence
  Description of Artificial Sequence: Synthetic oligonucleotide
cagcaguaaacucgauguc

SEQ ID NO: 1354459 - RNA, 19 nt, Artificial Sequence
  Description of Artificial Sequence: Synthetic oligonucleotide
gauccacucagcucauccu

SEQ ID NO: 1354460 - RNA, 19 nt, Artificial Sequence
  Description of Artificial Sequence: Synthetic oligonucleotide
ggcuguuauuacuuucuga

SEQ ID NO: 1354461 - RNA, 19 nt, Artificial Sequence
  Description of Artificial Sequence: Synthetic oligonucleotide
uguucucgggcgcgucgug

SEQ ID NO: 1354462 - RNA, 19 nt, Artificial Sequence
  Description of Artificial Sequence: Synthetic oligonucleotide
gcauccuaauugcaggauc

SEQ ID NO: 1354463 - RNA, 19 nt, Artificial Sequence
  Description of Artificial Sequence: Synthetic oligonucleotide
agcuggacccaagauggga

SEQ ID NO: 1354464 - RNA, 19 nt, Artificial Sequence
  Description of Artificial Sequence: Synthetic oligonucleotide
agcugacgacaaauauugg

SEQ ID NO: 1354465 - RNA, 19 nt, Artificial Sequence
  Description of Artificial Sequence: Synthetic oligonucleotide
gugugagggcuguuauuac

SEQ ID NO: 1354466 - RNA, 19 nt, Artificial Sequence
  Description of Artificial Sequence: Synthetic oligonucleotide
guucucgggcgcgucgugg

SEQ ID NO: 1354467 - RNA, 19 nt, Artificial Sequence
  Description of Artificial Sequence: Synthetic oligonucleotide
ccacaagacauugugcaug

SEQ ID NO: 1354468 - RNA, 19 nt, Artificial Sequence
  Description of Artificial Sequence: Synthetic oligonucleotide
gucgccguuaacagagcug

SEQ ID NO: 1354469 - RNA, 19 nt, Artificial Sequence
  Description of Artificial Sequence: Synthetic oligonucleotide
ggagccccggaccugccgg

SEQ ID NO: 1354470 - RNA, 19 nt, Artificial Sequence
  Description of Artificial Sequence: Synthetic oligonucleotide
augucaacuuggagugauc

SEQ ID NO: 1354471 - RNA, 19 nt, Artificial Sequence
  Description of Artificial Sequence: Synthetic oligonucleotide
auccuaauugcaggaucca

SEQ ID NO: 1354472 - RNA, 19 nt, Artificial Sequence
  Description of Artificial Sequence: Synthetic oligonucleotide
guguuaagccuucccugga

SEQ ID NO: 1354473 - RNA, 19 nt, Artificial Sequence
  Description of Artificial Sequence: Synthetic oligonucleotide
acaccuacaggucgccguu

SEQ ID NO: 1354474 - RNA, 19 nt, Artificial Sequence
  Description of Artificial Sequence: Synthetic oligonucleotide
ccaacuaacaaccuggauu

SEQ ID NO: 1354475 - RNA, 19 nt, Artificial Sequence
  Description of Artificial Sequence: Synthetic oligonucleotide
uugcuagugugagccacaa

SEQ ID NO: 1354476 - RNA, 19 nt, Artificial Sequence
  Description of Artificial Sequence: Synthetic oligonucleotide
accuacaggucgccguuaa

SEQ ID NO: 1354477 - RNA, 19 nt, Artificial Sequence
  Description of Artificial Sequence: Synthetic oligonucleotide
ccguuaacagagcugacga

SEQ ID NO: 1354478 - RNA, 19 nt, Artificial Sequence
  Description of Artificial Sequence: Synthetic oligonucleotide
cuagugugagccacaagau

SEQ ID NO: 1354479 - RNA, 19 nt, Artificial Sequence
  Description of Artificial Sequence: Synthetic oligonucleotide
aucgugcaucaagacagga

SEQ ID NO: 1354480 - RNA, 19 nt, Artificial Sequence
  Description of Artificial Sequence: Synthetic oligonucleotide
uccuaucuacuguguuauc

SEQ ID NO: 1354481 - RNA, 19 nt, Artificial Sequence
  Description of Artificial Sequence: Synthetic oligonucleotide
gggauuguauuuccuccca

SEQ ID NO: 1354482 - RNA, 19 nt, Artificial Sequence
  Description of Artificial Sequence: Synthetic oligonucleotide
ggggcugcgcgucaucacc

SEQ ID NO: 1354483 - RNA, 19 nt, Artificial Sequence
  Description of Artificial Sequence: Synthetic oligonucleotide
ggcugaaaucccacauagg

SEQ ID NO: 1354484 - RNA, 19 nt, Artificial Sequence
  Description of Artificial Sequence: Synthetic oligonucleotide
aucgugcaagccccaugca

SEQ ID NO: 1354485 - RNA, 19 nt, Artificial Sequence
  Description of Artificial Sequence: Synthetic oligonucleotide
gggaaucuagaagugaggu

SEQ ID NO: 1354486 - RNA, 19 nt, Artificial Sequence
  Description of Artificial Sequence: Synthetic oligonucleotide
gcacgaaggagaaggggcc

SEQ ID NO: 1354487 - RNA, 19 nt, Artificial Sequence
  Description of Artificial Sequence: Synthetic oligonucleotide
gauggcggacacgcgguca

SEQ ID NO: 1354488 - RNA, 19 nt, Artificial Sequence
  Description of Artificial Sequence: Synthetic oligonucleotide
cuuuaagggcaacaguguu

SEQ ID NO: 1354489 - RNA, 19 nt, Artificial Sequence
  Description of Artificial Sequence: Synthetic oligonucleotide
cuaacaaccuggauuccuu

SEQ ID NO: 1354490 - RNA, 19 nt, Artificial Sequence
  Description of Artificial Sequence: Synthetic oligonucleotide
ucuguacccucagcagggu

SEQ ID NO: 1354491 - RNA, 19 nt, Artificial Sequence
  Description of Artificial Sequence: Synthetic oligonucleotide
cccguugcuccauucuuag

SEQ ID NO: 1354492 - RNA, 19 nt, Artificial Sequence
  Description of Artificial Sequence: Synthetic oligonucleotide
caacaguguuaagccuucc

SEQ ID NO: 1354493 - RNA, 19 nt, Artificial Sequence
  Description of Artificial Sequence: Synthetic oligonucleotide
ggucacaaguuugacaccu

SEQ ID NO: 1354494 - RNA, 19 nt, Artificial Sequence
  Description of Artificial Sequence: Synthetic oligonucleotide
agacgccgagguacuggcc

SEQ ID NO: 1354495 - RNA, 19 nt, Artificial Sequence
  Description of Artificial Sequence: Synthetic oligonucleotide
cuguggaaauuccauguau

SEQ ID NO: 1354496 - RNA, 19 nt, Artificial Sequence
  Description of Artificial Sequence: Synthetic oligonucleotide
ucgggcgcgucguggcugc

SEQ ID NO: 1354497 - RNA, 19 nt, Artificial Sequence
  Description of Artificial Sequence: Synthetic oligonucleotide
gacccggcgggacggcacc

SEQ ID NO: 1354498 - RNA, 19 nt, Artificial Sequence
  Description of Artificial Sequence: Synthetic oligonucleotide
uggucacaccugguuucag

SEQ ID NO: 1354499 - RNA, 19 nt, Artificial Sequence
  Description of Artificial Sequence: Synthetic oligonucleotide
cacacccguugcuccauuc

SEQ ID NO: 1354500 - RNA, 19 nt, Artificial Sequence
  Description of Artificial Sequence: Synthetic oligonucleotide
gucaacuuggagugaucgu

SEQ ID NO: 1354501 - RNA, 19 nt, Artificial Sequence
  Description of Artificial Sequence: Synthetic oligonucleotide
ccgaugucucugcaagagg

SEQ ID NO: 1354502 - RNA, 19 nt, Artificial Sequence
  Description of Artificial Sequence: Synthetic oligonucleotide
acccgucuguuguccuauc

SEQ ID NO: 1354503 - RNA, 19 nt, Artificial Sequence
  Description of Artificial Sequence: Synthetic oligonucleotide
ucucgggcgcgucguggcu

SEQ ID NO: 1354504 - RNA, 19 nt, Artificial Sequence
  Description of Artificial Sequence: Synthetic oligonucleotide
guccaacuaacaaccugga

SEQ ID NO: 1354505 - RNA, 19 nt, Artificial Sequence
  Description of Artificial Sequence: Synthetic oligonucleotide
gugauuugcugcaggguua

SEQ ID NO: 1354506 - RNA, 19 nt, Artificial Sequence
  Description of Artificial Sequence: Synthetic oligonucleotide
auagucggccagacccguc

SEQ ID NO: 1354507 - RNA, 19 nt, Artificial Sequence
  Description of Artificial Sequence: Synthetic oligonucleotide
cauugaugccugcauccua

SEQ ID NO: 1354508 - RNA, 19 nt, Artificial Sequence
  Description of Artificial Sequence: Synthetic oligonucleotide
cccaagaugggacucguaa

SEQ ID NO: 1354509 - RNA, 19 nt, Artificial Sequence
  Description of Artificial Sequence: Synthetic oligonucleotide
ugcaagccccaugcauuga

SEQ ID NO: 1354510 - RNA, 19 nt, Artificial Sequence
  Description of Artificial Sequence: Synthetic oligonucleotide
ccgggcgacgcagagacgc

SEQ ID NO: 1354511 - RNA, 19 nt, Artificial Sequence
  Description of Artificial Sequence: Synthetic oligonucleotide
cacaagauccccagggcuu

SEQ ID NO: 1354512 - RNA, 19 nt, Artificial Sequence
  Description of Artificial Sequence: Synthetic oligonucleotide
agacccgucuguuguccua

SEQ ID NO: 1354513 - RNA, 19 nt, Artificial Sequence
  Description of Artificial Sequence: Synthetic oligonucleotide
gucguggcugccgccgcgg

SEQ ID NO: 1354514 - RNA, 19 nt, Artificial Sequence
  Description of Artificial Sequence: Synthetic oligonucleotide
ccggcucgaagcugaagag

SEQ ID NO: 1354515 - RNA, 19 nt, Artificial Sequence
  Description of Artificial Sequence: Synthetic oligonucleotide
ggacacgcggucacggggc

SEQ ID NO: 1354516 - RNA, 19 nt, Artificial Sequence
  Description of Artificial Sequence: Synthetic oligonucleotide
aggguugggcggagccacc

SEQ ID NO: 1354517 - RNA, 19 nt, Artificial Sequence
  Description of Artificial Sequence: Synthetic oligonucleotide
ggcggacacgcggucacgg

SEQ ID NO: 1354518 - RNA, 19 nt, Artificial Sequence
  Description of Artificial Sequence: Synthetic oligonucleotide
cuuuagcugaccacuucuu

SEQ ID NO: 1354519 - RNA, 19 nt, Artificial Sequence
  Description of Artificial Sequence: Synthetic oligonucleotide
gcuugugcuaacagaaugu

SEQ ID NO: 1354520 - RNA, 19 nt, Artificial Sequence
  Description of Artificial Sequence: Synthetic oligonucleotide
ggguuaaguuuccuaauuu

SEQ ID NO: 1354521 - RNA, 19 nt, Artificial Sequence
  Description of Artificial Sequence: Synthetic oligonucleotide
agguaccacaagacauugu

SEQ ID NO: 1354522 - RNA, 19 nt, Artificial Sequence
  Description of Artificial Sequence: Synthetic oligonucleotide
cuugugcuaacagaauguu

SEQ ID NO: 1354523 - RNA, 19 nt, Artificial Sequence
  Description of Artificial Sequence: Synthetic oligonucleotide
cguuaacagagcugacgac

SEQ ID NO: 1354524 - RNA, 19 nt, Artificial Sequence
  Description of Artificial Sequence: Synthetic oligonucleotide
cguugcuccauucuuagcu

SEQ ID NO: 1354525 - RNA, 19 nt, Artificial Sequence
  Description of Artificial Sequence: Synthetic oligonucleotide
caggguuaaguuuccuaau

SEQ ID NO: 1354526 - RNA, 19 nt, Artificial Sequence
  Description of Artificial Sequence: Synthetic oligonucleotide
caaagaagauugugagguu

SEQ ID NO: 1354527 - RNA, 19 nt, Artificial Sequence
  Description of Artificial Sequence: Synthetic oligonucleotide
gcggacacgcggucacggg

SEQ ID NO: 1354528 - RNA, 19 nt, Artificial Sequence
  Description of Artificial Sequence: Synthetic oligonucleotide
ggcgcgucguggcugccgc

SEQ ID NO: 1354529 - RNA, 19 nt, Artificial Sequence
  Description of Artificial Sequence: Synthetic oligonucleotide
ucguggcugccgccgcggu

SEQ ID NO: 1354530 - RNA, 19 nt, Artificial Sequence
  Description of Artificial Sequence: Synthetic oligonucleotide
ccagacccgucuguugucc

SEQ ID NO: 1354531 - RNA, 19 nt, Artificial Sequence
  Description of Artificial Sequence: Synthetic oligonucleotide
acccguugcuccauucuua

SEQ ID NO: 1354532 - RNA, 19 nt, Artificial Sequence
  Description of Artificial Sequence: Synthetic oligonucleotide
cucgggcgcgucguggcug

SEQ ID NO: 1354533 - RNA, 19 nt, Artificial Sequence
  Description of Artificial Sequence: Synthetic oligonucleotide
cggacacgcggucacgggg

SEQ ID NO: 1354534 - RNA, 19 nt, Artificial Sequence
  Description of Artificial Sequence: Synthetic oligonucleotide
gcugcgcgucaucaccagc

SEQ ID NO: 1354535 - RNA, 19 nt, Artificial Sequence
  Description of Artificial Sequence: Synthetic oligonucleotide
cguguucucgggcgcgucg

SEQ ID NO: 1354536 - RNA, 19 nt, Artificial Sequence
  Description of Artificial Sequence: Synthetic oligonucleotide
ggacucguaauaauucuuu

SEQ ID NO: 1354537 - RNA, 19 nt, Artificial Sequence
  Description of Artificial Sequence: Synthetic oligonucleotide
aguauggcucaggcuccaa

SEQ ID NO: 1354538 - RNA, 19 nt, Artificial Sequence
  Description of Artificial Sequence: Synthetic oligonucleotide
gcgcgucaucaccagcagc

SEQ ID NO: 1354539 - RNA, 19 nt, Artificial Sequence
  Description of Artificial Sequence: Synthetic oligonucleotide
gccgcccuggucuucccac

SEQ ID NO: 1354540 - RNA, 19 nt, Artificial Sequence
  Description of Artificial Sequence: Synthetic oligonucleotide
gacccaagaugggacucgu

SEQ ID NO: 1354541 - RNA, 19 nt, Artificial Sequence
  Description of Artificial Sequence: Synthetic oligonucleotide
ggcguugaaggggcugcgc

SEQ ID NO: 1354542 - RNA, 19 nt, Artificial Sequence
  Description of Artificial Sequence: Synthetic oligonucleotide
gucacaaguuugacaccua

SEQ ID NO: 1354543 - RNA, 19 nt, Artificial Sequence
  Description of Artificial Sequence: Synthetic oligonucleotide
ggguugggcggagccaccc

SEQ ID NO: 1354544 - RNA, 19 nt, Artificial Sequence
  Description of Artificial Sequence: Synthetic oligonucleotide
ggucgccguuaacagagcu

SEQ ID NO: 1354545 - RNA, 19 nt, Artificial Sequence
  Description of Artificial Sequence: Synthetic oligonucleotide
gcgacgcagagacgccgag

SEQ ID NO: 1354546 - RNA, 19 nt, Artificial Sequence
  Description of Artificial Sequence: Synthetic oligonucleotide
gacacgcggucacggggcu

SEQ ID NO: 1354547 - RNA, 19 nt, Artificial Sequence
  Description of Artificial Sequence: Synthetic oligonucleotide
gccgagguacuggccacag

SEQ ID NO: 1354548 - RNA, 19 nt, Artificial Sequence
  Description of Artificial Sequence: Synthetic oligonucleotide
caccggcucgaagcugaag

SEQ ID NO: 1354549 - RNA, 19 nt, Artificial Sequence
  Description of Artificial Sequence: Synthetic oligonucleotide
gacccgucuguuguccuau

SEQ ID NO: 1354550 - RNA, 19 nt, Artificial Sequence
  Description of Artificial Sequence: Synthetic oligonucleotide
ccacaagauccccagggcu

SEQ ID NO: 1354551 - RNA, 19 nt, Artificial Sequence
  Description of Artificial Sequence: Synthetic oligonucleotide
caguauggcucaggcucca

SEQ ID NO: 1354552 - RNA, 19 nt, Artificial Sequence
  Description of Artificial Sequence: Synthetic oligonucleotide
gcccuggucuucccacagc

SEQ ID NO: 1354553 - RNA, 19 nt, Artificial Sequence
  Description of Artificial Sequence: Synthetic oligonucleotide
ggacggcaccggcucgaag

SEQ ID NO: 1354554 - RNA, 19 nt, Artificial Sequence
  Description of Artificial Sequence: Synthetic oligonucleotide
gugugugagggcuguuauu

SEQ ID NO: 1354555 - RNA, 19 nt, Artificial Sequence
  Description of Artificial Sequence: Synthetic oligonucleotide
acccggcgggacggcaccg

SEQ ID NO: 1354556 - RNA, 19 nt, Artificial Sequence
  Description of Artificial Sequence: Synthetic oligonucleotide
cauagucggccagacccgu

SEQ ID NO: 1354557 - RNA, 19 nt, Artificial Sequence
  Description of Artificial Sequence: Synthetic oligonucleotide
ggugggcgauggcggacac

SEQ ID NO: 1354558 - RNA, 19 nt, Artificial Sequence
  Description of Artificial Sequence: Synthetic oligonucleotide
guacuggccacagccggau

SEQ ID NO: 1354559 - RNA, 19 nt, Artificial Sequence
  Description of Artificial Sequence: Synthetic oligonucleotide
gcaagccccaugcauugau

SEQ ID NO: 1354560 - RNA, 19 nt, Artificial Sequence
  Description of Artificial Sequence: Synthetic oligonucleotide
ccagaacuuuaagggcaac

SEQ ID NO: 1354561 - RNA, 19 nt, Artificial Sequence
  Description of Artificial Sequence: Synthetic oligonucleotide
gcgggacggcaccggcucg

SEQ ID NO: 1354562 - RNA, 19 nt, Artificial Sequence
  Description of Artificial Sequence: Synthetic oligonucleotide
ggcacggaccggagccccg

SEQ ID NO: 1354563 - RNA, 19 nt, Artificial Sequence
  Description of Artificial Sequence: Synthetic oligonucleotide
ggaccggagccccggaccu

SEQ ID NO: 1354564 - RNA, 19 nt, Artificial Sequence
  Description of Artificial Sequence: Synthetic oligonucleotide
guguucucgggcgcgucgu

SEQ ID NO: 1354565 - RNA, 19 nt, Artificial Sequence
  Description of Artificial Sequence: Synthetic oligonucleotide
gggacucguaauaauucuu

SEQ ID NO: 1354566 - RNA, 19 nt, Artificial Sequence
  Description of Artificial Sequence: Synthetic oligonucleotide
gccauaucugcauggccuu

SEQ ID NO: 1354567 - RNA, 19 nt, Artificial Sequence
  Description of Artificial Sequence: Synthetic oligonucleotide
cacccguugcuccauucuu

SEQ ID NO: 1354568 - RNA, 19 nt, Artificial Sequence
  Description of Artificial Sequence: Synthetic oligonucleotide
gggcgcgucguggcugccg

SEQ ID NO: 1354569 - RNA, 19 nt, Artificial Sequence
  Description of Artificial Sequence: Synthetic oligonucleotide
cagacccgucuguuguccu

SEQ ID NO: 1354570 - RNA, 19 nt, Artificial Sequence
  Description of Artificial Sequence: Synthetic oligonucleotide
ggcgacgcagagacgccga

SEQ ID NO: 1354571 - RNA, 19 nt, Artificial Sequence
  Description of Artificial Sequence: Synthetic oligonucleotide
cgacgcagagacgccgagg

SEQ ID NO: 1354572 - RNA, 19 nt, Artificial Sequence
  Description of Artificial Sequence: Synthetic oligonucleotide
cgcgucguggcugccgccg

SEQ ID NO: 1354573 - RNA, 19 nt, Artificial Sequence
  Description of Artificial Sequence: Synthetic oligonucleotide
cacggggcuugagcaccug

SEQ ID NO: 1354574 - RNA, 19 nt, Artificial Sequence
  Description of Artificial Sequence: Synthetic oligonucleotide
cacggaccggagccccgga

SEQ ID NO: 1354575 - RNA, 19 nt, Artificial Sequence
  Description of Artificial Sequence: Synthetic oligonucleotide
gugaucgugcaagccccau

SEQ ID NO: 1354576 - RNA, 19 nt, Artificial Sequence
  Description of Artificial Sequence: Synthetic oligonucleotide
gguugggcggagccacccu

SEQ ID NO: 1354577 - RNA, 19 nt, Artificial Sequence
  Description of Artificial Sequence: Synthetic oligonucleotide
gcaccggcacggaccggag

SEQ ID NO: 1354578 - RNA, 19 nt, Artificial Sequence
  Description of Artificial Sequence: Synthetic oligonucleotide
cgggcgacgcagagacgcc

SEQ ID NO: 1354579 - RNA, 19 nt, Artificial Sequence
  Description of Artificial Sequence: Synthetic oligonucleotide
caccuacaggucgccguua

SEQ ID NO: 1354580 - RNA, 19 nt, Artificial Sequence
  Description of Artificial Sequence: Synthetic oligonucleotide
cgccguuaacagagcugac

SEQ ID NO: 1354581 - RNA, 19 nt, Artificial Sequence
  Description of Artificial Sequence: Synthetic oligonucleotide
caagauccccagggcuugu

SEQ ID NO: 1354582 - RNA, 19 nt, Artificial Sequence
  Description of Artificial Sequence: Synthetic oligonucleotide
ccacaugccggcgccugca

SEQ ID NO: 1354583 - RNA, 19 nt, Artificial Sequence
  Description of Artificial Sequence: Synthetic oligonucleotide
acgcggucacggggcuuga

SEQ ID NO: 1354584 - RNA, 19 nt, Artificial Sequence
  Description of Artificial Sequence: Synthetic oligonucleotide
cccggcgggacggcaccgg

SEQ ID NO: 1354585 - RNA, 19 nt, Artificial Sequence
  Description of Artificial Sequence: Synthetic oligonucleotide
gccgggcgacgcagagacg

SEQ ID NO: 1354586 - RNA, 19 nt, Artificial Sequence
  Description of Artificial Sequence: Synthetic oligonucleotide
gcguguucucgggcgcguc

SEQ ID NO: 1354587 - RNA, 19 nt, Artificial Sequence
  Description of Artificial Sequence: Synthetic oligonucleotide
cggcacggaccggagcccc

SEQ ID NO: 1354588 - RNA, 19 nt, Artificial Sequence
  Description of Artificial Sequence: Synthetic oligonucleotide
ccggaccugccgggcgacg

SEQ ID NO: 1354589 - RNA, 19 nt, Artificial Sequence
  Description of Artificial Sequence: Synthetic oligonucleotide
gggacggcaccggcucgaa

SEQ ID NO: 1354590 - RNA, 19 nt, Artificial Sequence
  Description of Artificial Sequence: Synthetic oligonucleotide
cgggacggcaccggcucga

SEQ ID NO: 1354591 - RNA, 19 nt, Artificial Sequence
  Description of Artificial Sequence: Synthetic oligonucleotide
ccacacccguugcuccauu

SEQ ID NO: 1354592 - RNA, 19 nt, Artificial Sequence
  Description of Artificial Sequence: Synthetic oligonucleotide
cgggcgcgucguggcugcc

SEQ ID NO: 1354593 - RNA, 19 nt, Artificial Sequence
  Description of Artificial Sequence: Synthetic oligonucleotide
aaacaggugacagaagagc

SEQ ID NO: 1354594 - RNA, 19 nt, Artificial Sequence
  Description of Artificial Sequence: Synthetic oligonucleotide
agagcguugagugugagcc

SEQ ID NO: 1354595 - RNA, 19 nt, Artificial Sequence
  Description of Artificial Sequence: Synthetic oligonucleotide
uugagugugagccugauuc

SEQ ID NO: 1354596 - RNA, 19 nt, Artificial Sequence
  Description of Artificial Sequence: Synthetic oligonucleotide
agugagauuuuccuagggc

SEQ ID NO: 1354597 - RNA, 19 nt, Artificial Sequence
  Description of Artificial Sequence: Synthetic oligonucleotide
acaagugagauuuuccuag

SEQ ID NO: 1354598 - RNA, 19 nt, Artificial Sequence
  Description of Artificial Sequence: Synthetic oligonucleotide
auuccaaacaccaagaacu

SEQ ID NO: 1354599 - RNA, 19 nt, Artificial Sequence
  Description of Artificial Sequence: Synthetic oligonucleotide
uucagcauggcuuuacuag

SEQ ID NO: 1354600 - RNA, 19 nt, Artificial Sequence
  Description of Artificial Sequence: Synthetic oligonucleotide
uaugccucuaugcagggag

SEQ ID NO: 1354601 - RNA, 19 nt, Artificial Sequence
  Description of Artificial Sequence: Synthetic oligonucleotide
gacagaagagcguugagug

SEQ ID NO: 1354602 - RNA, 19 nt, Artificial Sequence
  Description of Artificial Sequence: Synthetic oligonucleotide
aacugcacaggaccgaauc

SEQ ID NO: 1354603 - RNA, 19 nt, Artificial Sequence
  Description of Artificial Sequence: Synthetic oligonucleotide
aaccgagucacucgcacuc

SEQ ID NO: 1354604 - RNA, 19 nt, Artificial Sequence
  Description of Artificial Sequence: Synthetic oligonucleotide
ucagcauggcuuuacuagg

SEQ ID NO: 1354605 - RNA, 19 nt, Artificial Sequence
  Description of Artificial Sequence: Synthetic oligonucleotide
aagugagauuuuccuaggg

SEQ ID NO: 1354606 - RNA, 19 nt, Artificial Sequence
  Description of Artificial Sequence: Synthetic oligonucleotide
uaugcagggaguacuagcu

SEQ ID NO: 1354607 - RNA, 19 nt, Artificial Sequence
  Description of Artificial Sequence: Synthetic oligonucleotide
gauuccaaacaccaagaac

SEQ ID NO: 1354608 - RNA, 19 nt, Artificial Sequence
  Description of Artificial Sequence: Synthetic oligonucleotide
aagagcguugagugugagc

SEQ ID NO: 1354609 - RNA, 19 nt, Artificial Sequence
  Description of Artificial Sequence: Synthetic oligonucleotide
uggacaaccgagucacucg

SEQ ID NO: 1354610 - RNA, 19 nt, Artificial Sequence
  Description of Artificial Sequence: Synthetic oligonucleotide
ugagccugauuccaaacac

SEQ ID NO: 1354611 - RNA, 19 nt, Artificial Sequence
  Description of Artificial Sequence: Synthetic oligonucleotide
caagaacugcacaggaccg

SEQ ID NO: 1354612 - RNA, 19 nt, Artificial Sequence
  Description of Artificial Sequence: Synthetic oligonucleotide
cuuguuuugggguguacug

SEQ ID NO: 1354613 - RNA, 19 nt, Artificial Sequence
  Description of Artificial Sequence: Synthetic oligonucleotide
acaaccgagucacucgcac

SEQ ID NO: 1354614 - RNA, 19 nt, Artificial Sequence
  Description of Artificial Sequence: Synthetic oligonucleotide
aacaagugagauuuuccua

SEQ ID NO: 1354615 - RNA, 19 nt, Artificial Sequence
  Description of Artificial Sequence: Synthetic oligonucleotide
ugagauuuuccuagggcuc

SEQ ID NO: 1354616 - RNA, 19 nt, Artificial Sequence
  Description of Artificial Sequence: Synthetic oligonucleotide
aaggguccuuguuuugggg

SEQ ID NO: 1354617 - RNA, 19 nt, Artificial Sequence
  Description of Artificial Sequence: Synthetic oligonucleotide
uuguuuugggguguacugg

SEQ ID NO: 1354618 - RNA, 19 nt, Artificial Sequence
  Description of Artificial Sequence: Synthetic oligonucleotide
uuccaaacaccaagaacug

SEQ ID NO: 1354619 - RNA, 19 nt, Artificial Sequence
  Description of Artificial Sequence: Synthetic oligonucleotide
ugcagggaguacuagcuug

SEQ ID NO: 1354620 - RNA, 19 nt, Artificial Sequence
  Description of Artificial Sequence: Synthetic oligonucleotide
gagucacucgcacucuugg

SEQ ID NO: 1354621 - RNA, 19 nt, Artificial Sequence
  Description of Artificial Sequence: Synthetic oligonucleotide
aaacaccaagaacugcaca

SEQ ID NO: 1354622 - RNA, 19 nt, Artificial Sequence
  Description of Artificial Sequence: Synthetic oligonucleotide
cuaugcagggaguacuagc

SEQ ID NO: 1354623 - RNA, 19 nt, Artificial Sequence
  Description of Artificial Sequence: Synthetic oligonucleotide
caaacaggugacagaagag

SEQ ID NO: 1354624 - RNA, 19 nt, Artificial Sequence
  Description of Artificial Sequence: Synthetic oligonucleotide
uguuuugggguguacuggu

SEQ ID NO: 1354625 - RNA, 19 nt, Artificial Sequence
  Description of Artificial Sequence: Synthetic oligonucleotide
auuuuccuagggcuccacg

SEQ ID NO: 1354626 - RNA, 19 nt, Artificial Sequence
  Description of Artificial Sequence: Synthetic oligonucleotide
ugauuccaaacaccaagaa

SEQ ID NO: 1354627 - RNA, 19 nt, Artificial Sequence
  Description of Artificial Sequence: Synthetic oligonucleotide
uuuugggguguacugguau

SEQ ID NO: 1354628 - RNA, 19 nt, Artificial Sequence
  Description of Artificial Sequence: Synthetic oligonucleotide
ugagugugagccugauucc

SEQ ID NO: 1354629 - RNA, 19 nt, Artificial Sequence
  Description of Artificial Sequence: Synthetic oligonucleotide
agaggcaaacaggugacag

SEQ ID NO: 1354630 - RNA, 19 nt, Artificial Sequence
  Description of Artificial Sequence: Synthetic oligonucleotide
gucacucgcacucuugggc

SEQ ID NO: 1354631 - RNA, 19 nt, Artificial Sequence
  Description of Artificial Sequence: Synthetic oligonucleotide
ugacagaagagcguugagu

SEQ ID NO: 1354632 - RNA, 19 nt, Artificial Sequence
  Description of Artificial Sequence: Synthetic oligonucleotide
ccugauuccaaacaccaag

SEQ ID NO: 1354633 - RNA, 19 nt, Artificial Sequence
  Description of Artificial Sequence: Synthetic oligonucleotide
ucacucgcacucuugggca

SEQ ID NO: 1354634 - RNA, 19 nt, Artificial Sequence
  Description of Artificial Sequence: Synthetic oligonucleotide
cagaagagcguugagugug

SEQ ID NO: 1354635 - RNA, 19 nt, Artificial Sequence
  Description of Artificial Sequence: Synthetic oligonucleotide
caaacaccaagaacugcac

SEQ ID NO: 1354636 - RNA, 19 nt, Artificial Sequence
  Description of Artificial Sequence: Synthetic oligonucleotide
gcaaacaggugacagaaga

SEQ ID NO: 1354637 - RNA, 19 nt, Artificial Sequence
  Description of Artificial Sequence: Synthetic oligonucleotide
agucacucgcacucuuggg

SEQ ID NO: 1354638 - RNA, 19 nt, Artificial Sequence
  Description of Artificial Sequence: Synthetic oligonucleotide
gugagauuuuccuagggcu

SEQ ID NO: 1354639 - RNA, 19 nt, Artificial Sequence
  Description of Artificial Sequence: Synthetic oligonucleotide
ugugagccugauuccaaac

SEQ ID NO: 1354640 - RNA, 19 nt, Artificial Sequence
  Description of Artificial Sequence: Synthetic oligonucleotide
ucuaugcagggaguacuag

SEQ ID NO: 1354641 - RNA, 19 nt, Artificial Sequence
  Description of Artificial Sequence: Synthetic oligonucleotide
cugauuccaaacaccaaga

SEQ ID NO: 1354642 - RNA, 19 nt, Artificial Sequence
  Description of Artificial Sequence: Synthetic oligonucleotide
uugggguguacugguaucc

SEQ ID NO: 1354643 - RNA, 19 nt, Artificial Sequence
  Description of Artificial Sequence: Synthetic oligonucleotide
acggguggacaaccgaguc

SEQ ID NO: 1354644 - RNA, 19 nt, Artificial Sequence
  Description of Artificial Sequence: Synthetic oligonucleotide
uuucagcauggcuuuacua

SEQ ID NO: 1354645 - RNA, 19 nt, Artificial Sequence
  Description of Artificial Sequence: Synthetic oligonucleotide
cagcauggcuuuacuaggc

SEQ ID NO: 1354646 - RNA, 19 nt, Artificial Sequence
  Description of Artificial Sequence: Synthetic oligonucleotide
accaagaacugcacaggac

SEQ ID NO: 1354647 - RNA, 19 nt, Artificial Sequence
  Description of Artificial Sequence: Synthetic oligonucleotide
acagaagagcguugagugu

SEQ ID NO: 1354648 - RNA, 19 nt, Artificial Sequence
  Description of Artificial Sequence: Synthetic oligonucleotide
acugcacaggaccgaaucu

SEQ ID NO: 1354649 - RNA, 19 nt, Artificial Sequence
  Description of Artificial Sequence: Synthetic oligonucleotide
uuugggguguacugguauc

SEQ ID NO: 1354650 - RNA, 19 nt, Artificial Sequence
  Description of Artificial Sequence: Synthetic oligonucleotide
uccaaacaccaagaacugc

SEQ ID NO: 1354651 - RNA, 19 nt, Artificial Sequence
  Description of Artificial Sequence: Synthetic oligonucleotide
ggcuuuacuaggcacuaug

SEQ ID NO: 1354652 - RNA, 19 nt, Artificial Sequence
  Description of Artificial Sequence: Synthetic oligonucleotide
aggcaaacaggugacagaa

SEQ ID NO: 1354653 - RNA, 19 nt, Artificial Sequence
  Description of Artificial Sequence: Synthetic oligonucleotide
aagaacugcacaggaccga

SEQ ID NO: 1354654 - RNA, 19 nt, Artificial Sequence
  Description of Artificial Sequence: Synthetic oligonucleotide
gaggcaaacaggugacaga

SEQ ID NO: 1354655 - RNA, 19 nt, Artificial Sequence
  Description of Artificial Sequence: Synthetic oligonucleotide
gagccugauuccaaacacc

SEQ ID NO: 1354656 - RNA, 19 nt, Artificial Sequence
  Description of Artificial Sequence: Synthetic oligonucleotide
agccugauuccaaacacca

SEQ ID NO: 1354657 - RNA, 19 nt, Artificial Sequence
  Description of Artificial Sequence: Synthetic oligonucleotide
agcauggcuuuacuaggca

SEQ ID NO: 1354658 - RNA, 19 nt, Artificial Sequence
  Description of Artificial Sequence: Synthetic oligonucleotide
ccaaacaccaagaacugca

SEQ ID NO: 1354659 - RNA, 19 nt, Artificial Sequence
  Description of Artificial Sequence: Synthetic oligonucleotide
caacaagugagauuuuccu

SEQ ID NO: 1354660 - RNA, 19 nt, Artificial Sequence
  Description of Artificial Sequence: Synthetic oligonucleotide
gugagccugauuccaaaca

SEQ ID NO: 1354661 - RNA, 19 nt, Artificial Sequence
  Description of Artificial Sequence: Synthetic oligonucleotide
agcguugagugugagccug

SEQ ID NO: 1354662 - RNA, 19 nt, Artificial Sequence
  Description of Artificial Sequence: Synthetic oligonucleotide
gcaacaagugagauuuucc

SEQ ID NO: 1354663 - RNA, 19 nt, Artificial Sequence
  Description of Artificial Sequence: Synthetic oligonucleotide
gugacagaagagcguugag

SEQ ID NO: 1354664 - RNA, 19 nt, Artificial Sequence
  Description of Artificial Sequence: Synthetic oligonucleotide
ggacaaccgagucacucgc

SEQ ID NO: 1354665 - RNA, 19 nt, Artificial Sequence
  Description of Artificial Sequence: Synthetic oligonucleotide
cauggcuuuacuaggcacu

SEQ ID NO: 1354666 - RNA, 19 nt, Artificial Sequence
  Description of Artificial Sequence: Synthetic oligonucleotide
gagugugagccugauucca

SEQ ID NO: 1354667 - RNA, 19 nt, Artificial Sequence
  Description of Artificial Sequence: Synthetic oligonucleotide
gaagagcguugagugugag

SEQ ID NO: 1354668 - RNA, 19 nt, Artificial Sequence
  Description of Artificial Sequence: Synthetic oligonucleotide
acaggugacagaagagcgu

SEQ ID NO: 1354669 - RNA, 19 nt, Artificial Sequence
  Description of Artificial Sequence: Synthetic oligonucleotide
ggguggacaaccgagucac

SEQ ID NO: 1354670 - RNA, 19 nt, Artificial Sequence
  Description of Artificial Sequence: Synthetic oligonucleotide
guggacaaccgagucacuc

SEQ ID NO: 1354671 - RNA, 19 nt, Artificial Sequence
  Description of Artificial Sequence: Synthetic oligonucleotide
caccaagaacugcacagga

SEQ ID NO: 1354672 - RNA, 19 nt, Artificial Sequence
  Description of Artificial Sequence: Synthetic oligonucleotide
agaacugcacaggaccgaa

SEQ ID NO: 1354673 - RNA, 19 nt, Artificial Sequence
  Description of Artificial Sequence: Synthetic oligonucleotide
agggaguacuagcuugcaa

SEQ ID NO: 1354674 - RNA, 19 nt, Artificial Sequence
  Description of Artificial Sequence: Synthetic oligonucleotide
ggguccuuguuuuggggug

SEQ ID NO: 1354675 - RNA, 19 nt, Artificial Sequence
  Description of Artificial Sequence: Synthetic oligonucleotide
uagccacggguggacaacc

SEQ ID NO: 1354676 - RNA, 19 nt, Artificial Sequence
  Description of Artificial Sequence: Synthetic oligonucleotide
cacucgcacucuugggcag

SEQ ID NO: 1354677 - RNA, 19 nt, Artificial Sequence
  Description of Artificial Sequence: Synthetic oligonucleotide
gcauggcuuuacuaggcac

SEQ ID NO: 1354678 - RNA, 19 nt, Artificial Sequence
  Description of Artificial Sequence: Synthetic oligonucleotide
cucuugggcagaggcaaac

SEQ ID NO: 1354679 - RNA, 19 nt, Artificial Sequence
  Description of Artificial Sequence: Synthetic oligonucleotide
gauuuuccuagggcuccac

SEQ ID NO: 1354680 - RNA, 19 nt, Artificial Sequence
  Description of Artificial Sequence: Synthetic oligonucleotide
ugggguguacugguauccu

SEQ ID NO: 1354681 - RNA, 19 nt, Artificial Sequence
  Description of Artificial Sequence: Synthetic oligonucleotide
cuagccacggguggacaac

SEQ ID NO: 1354682 - RNA, 19 nt, Artificial Sequence
  Description of Artificial Sequence: Synthetic oligonucleotide
agaagagcguugaguguga

SEQ ID NO: 1354683 - RNA, 19 nt, Artificial Sequence
  Description of Artificial Sequence: Synthetic oligonucleotide
auggcuuuacuaggcacua

SEQ ID NO: 1354684 - RNA, 19 nt, Artificial Sequence
  Description of Artificial Sequence: Synthetic oligonucleotide
ccacggguggacaaccgag

SEQ ID NO: 1354685 - RNA, 19 nt, Artificial Sequence
  Description of Artificial Sequence: Synthetic oligonucleotide
agauuuuccuagggcucca

SEQ ID NO: 1354686 - RNA, 19 nt, Artificial Sequence
  Description of Artificial Sequence: Synthetic oligonucleotide
augcagggaguacuagcuu

SEQ ID NO: 1354687 - RNA, 19 nt, Artificial Sequence
  Description of Artificial Sequence: Synthetic oligonucleotide
cucuaugcagggaguacua

SEQ ID NO: 1354688 - RNA, 19 nt, Artificial Sequence
  Description of Artificial Sequence: Synthetic oligonucleotide
gugugagccugauuccaaa

SEQ ID NO: 1354689 - RNA, 19 nt, Artificial Sequence
  Description of Artificial Sequence: Synthetic oligonucleotide
ugccucuaugcagggagua

SEQ ID NO: 1354690 - RNA, 19 nt, Artificial Sequence
  Description of Artificial Sequence: Synthetic oligonucleotide
agugugagccugauuccaa

SEQ ID NO: 1354691 - RNA, 19 nt, Artificial Sequence
  Description of Artificial Sequence: Synthetic oligonucleotide
gcagggaguacuagcuugc

SEQ ID NO: 1354692 - RNA, 19 nt, Artificial Sequence
  Description of Artificial Sequence: Synthetic oligonucleotide
uccuuguuuugggguguac

SEQ ID NO: 1354693 - RNA, 19 nt, Artificial Sequence
  Description of Artificial Sequence: Synthetic oligonucleotide
ugccuagccacggguggac

SEQ ID NO: 1354694 - RNA, 19 nt, Artificial Sequence
  Description of Artificial Sequence: Synthetic oligonucleotide
gacaaccgagucacucgca

SEQ ID NO: 1354695 - RNA, 19 nt, Artificial Sequence
  Description of Artificial Sequence: Synthetic oligonucleotide
cucgcacucuugggcagag

SEQ ID NO: 1354696 - RNA, 19 nt, Artificial Sequence
  Description of Artificial Sequence: Synthetic oligonucleotide
ucgcacucuugggcagagg

SEQ ID NO: 1354697 - RNA, 19 nt, Artificial Sequence
  Description of Artificial Sequence: Synthetic oligonucleotide
agccacggguggacaaccg

SEQ ID NO: 1354698 - RNA, 19 nt, Artificial Sequence
  Description of Artificial Sequence: Synthetic oligonucleotide
ggcaaacaggugacagaag

SEQ ID NO: 1354699 - RNA, 19 nt, Artificial Sequence
  Description of Artificial Sequence: Synthetic oligonucleotide
accgagucacucgcacucu

SEQ ID NO: 1354700 - RNA, 19 nt, Artificial Sequence
  Description of Artificial Sequence: Synthetic oligonucleotide
uggcuuuacuaggcacuau

SEQ ID NO: 1354701 - RNA, 19 nt, Artificial Sequence
  Description of Artificial Sequence: Synthetic oligonucleotide
acucgcacucuugggcaga

SEQ ID NO: 1354702 - RNA, 19 nt, Artificial Sequence
  Description of Artificial Sequence: Synthetic oligonucleotide
augccucuaugcagggagu

SEQ ID NO: 1354703 - RNA, 19 nt, Artificial Sequence
  Description of Artificial Sequence: Synthetic oligonucleotide
gagcguugagugugagccu

SEQ ID NO: 1354704 - RNA, 19 nt, Artificial Sequence
  Description of Artificial Sequence: Synthetic oligonucleotide
acuuuucagcauggcuuua

SEQ ID NO: 1354705 - RNA, 19 nt, Artificial Sequence
  Description of Artificial Sequence: Synthetic oligonucleotide
guuuugggguguacuggua

SEQ ID NO: 1354706 - RNA, 19 nt, Artificial Sequence
  Description of Artificial Sequence: Synthetic oligonucleotide
cacggguggacaaccgagu

SEQ ID NO: 1354707 - RNA, 19 nt, Artificial Sequence
  Description of Artificial Sequence: Synthetic oligonucleotide
caaccgagucacucgcacu

SEQ ID NO: 1354708 - RNA, 19 nt, Artificial Sequence
  Description of Artificial Sequence: Synthetic oligonucleotide
cagaggcaaacaggugaca

SEQ ID NO: 1354709 - RNA, 19 nt, Artificial Sequence
  Description of Artificial Sequence: Synthetic oligonucleotide
gccucuaugcagggaguac

SEQ ID NO: 1354710 - RNA, 19 nt, Artificial Sequence
  Description of Artificial Sequence: Synthetic oligonucleotide
cgagucacucgcacucuug

SEQ ID NO: 1354711 - RNA, 19 nt, Artificial Sequence
  Description of Artificial Sequence: Synthetic oligonucleotide
cagggaguacuagcuugca

SEQ ID NO: 1354712 - RNA, 19 nt, Artificial Sequence
  Description of Artificial Sequence: Synthetic oligonucleotide
gccacggguggacaaccga

SEQ ID NO: 1354713 - RNA, 19 nt, Artificial Sequence
  Description of Artificial Sequence: Synthetic oligonucleotide
guugagugugagccugauu

SEQ ID NO: 1354714 - RNA, 19 nt, Artificial Sequence
  Description of Artificial Sequence: Synthetic oligonucleotide
gcacucuugggcagaggca

SEQ ID NO: 1354715 - RNA, 19 nt, Artificial Sequence
  Description of Artificial Sequence: Synthetic oligonucleotide
cugcacaggaccgaaucuu

SEQ ID NO: 1354716 - RNA, 19 nt, Artificial Sequence
  Description of Artificial Sequence: Synthetic oligonucleotide
gaacugcacaggaccgaau

SEQ ID NO: 1354717 - RNA, 19 nt, Artificial Sequence
  Description of Artificial Sequence: Synthetic oligonucleotide
ccuagccacggguggacaa

SEQ ID NO: 1354718 - RNA, 19 nt, Artificial Sequence
  Description of Artificial Sequence: Synthetic oligonucleotide
ccuuguuuugggguguacu

SEQ ID NO: 1354719 - RNA, 19 nt, Artificial Sequence
  Description of Artificial Sequence: Synthetic oligonucleotide
ccucuaugcagggaguacu

SEQ ID NO: 1354720 - RNA, 19 nt, Artificial Sequence
  Description of Artificial Sequence: Synthetic oligonucleotide
gguccuuguuuuggggugu

SEQ ID NO: 1354721 - RNA, 19 nt, Artificial Sequence
  Description of Artificial Sequence: Synthetic oligonucleotide
gccugauuccaaacaccaa

SEQ ID NO: 1354722 - RNA, 19 nt, Artificial Sequence
  Description of Artificial Sequence: Synthetic oligonucleotide
guccuuguuuuggggugua

SEQ ID NO: 1354723 - RNA, 19 nt, Artificial Sequence
  Description of Artificial Sequence: Synthetic oligonucleotide
cggguggacaaccgaguca

SEQ ID NO: 1354724 - RNA, 19 nt, Artificial Sequence
  Description of Artificial Sequence: Synthetic oligonucleotide
gcguugagugugagccuga

SEQ ID NO: 1354725 - RNA, 19 nt, Artificial Sequence
  Description of Artificial Sequence: Synthetic oligonucleotide
gccuagccacggguggaca

SEQ ID NO: 1354726 - RNA, 19 nt, Artificial Sequence
  Description of Artificial Sequence: Synthetic oligonucleotide
gguggacaaccgagucacu

SEQ ID NO: 1354727 - RNA, 19 nt, Artificial Sequence
  Description of Artificial Sequence: Synthetic oligonucleotide
ccgagucacucgcacucuu

SEQ ID NO: 1354728 - RNA, 19 nt, Artificial Sequence
  Description of Artificial Sequence: Synthetic oligonucleotide
cguugagugugagccugau

SEQ ID NO: 1354729 - RNA, 19 nt, Artificial Sequence
  Description of Artificial Sequence: Synthetic oligonucleotide
aaaacaaucagauaucacc

SEQ ID NO: 1354730 - RNA, 19 nt, Artificial Sequence
  Description of Artificial Sequence: Synthetic oligonucleotide
agucauaugguuuuaaugc

SEQ ID NO: 1354731 - RNA, 19 nt, Artificial Sequence
  Description of Artificial Sequence: Synthetic oligonucleotide
ucagauaucaccuagggag

SEQ ID NO: 1354732 - RNA, 19 nt, Artificial Sequence
  Description of Artificial Sequence: Synthetic oligonucleotide
aaauaagcaauacauuggg

SEQ ID NO: 1354733 - RNA, 19 nt, Artificial Sequence
  Description of Artificial Sequence: Synthetic oligonucleotide
uucaaauaaagucugucgg

SEQ ID NO: 1354734 - RNA, 19 nt, Artificial Sequence
  Description of Artificial Sequence: Synthetic oligonucleotide
accauuuauacuuugagag

SEQ ID NO: 1354735 - RNA, 19 nt, Artificial Sequence
  Description of Artificial Sequence: Synthetic oligonucleotide
uaaacaauaguuauucuug

SEQ ID NO: 1354736 - RNA, 19 nt, Artificial Sequence
  Description of Artificial Sequence: Synthetic oligonucleotide
aaacaauaguuauucuugc

SEQ ID NO: 1354737 - RNA, 19 nt, Artificial Sequence
  Description of Artificial Sequence: Synthetic oligonucleotide
gaaugaacagcuuauauac

SEQ ID NO: 1354738 - RNA, 19 nt, Artificial Sequence
  Description of Artificial Sequence: Synthetic oligonucleotide
aaagcgaccaauaaaacag

SEQ ID NO: 1354739 - RNA, 19 nt, Artificial Sequence
  Description of Artificial Sequence: Synthetic oligonucleotide
gaugaucaggauuuuaugg

SEQ ID NO: 1354740 - RNA, 19 nt, Artificial Sequence
  Description of Artificial Sequence: Synthetic oligonucleotide
aaucagauaucaccuaggg

SEQ ID NO: 1354741 - RNA, 19 nt, Artificial Sequence
  Description of Artificial Sequence: Synthetic oligonucleotide
aauaaagcgaccaauaaaa

SEQ ID NO: 1354742 - RNA, 19 nt, Artificial Sequence
  Description of Artificial Sequence: Synthetic oligonucleotide
aauaguuauucuugccuac

SEQ ID NO: 1354743 - RNA, 19 nt, Artificial Sequence
  Description of Artificial Sequence: Synthetic oligonucleotide
aaugaugaaauguuuugca

SEQ ID NO: 1354744 - RNA, 19 nt, Artificial Sequence
  Description of Artificial Sequence: Synthetic oligonucleotide
aagugagcaagcuuccacc

SEQ ID NO: 1354745 - RNA, 19 nt, Artificial Sequence
  Description of Artificial Sequence: Synthetic oligonucleotide
uauaaugucgguaaacagu

SEQ ID NO: 1354746 - RNA, 19 nt, Artificial Sequence
  Description of Artificial Sequence: Synthetic oligonucleotide
agaaguaugaaagaugauc

SEQ ID NO: 1354747 - RNA, 19 nt, Artificial Sequence
  Description of Artificial Sequence: Synthetic oligonucleotide
cuuauauacacuaucugug

SEQ ID NO: 1354748 - RNA, 19 nt, Artificial Sequence
  Description of Artificial Sequence: Synthetic oligonucleotide
ucaaauaaagucugucggg

SEQ ID NO: 1354749 - RNA, 19 nt, Artificial Sequence
  Description of Artificial Sequence: Synthetic oligonucleotide
augucuaauacacuuggcg

SEQ ID NO: 1354750 - RNA, 19 nt, Artificial Sequence
  Description of Artificial Sequence: Synthetic oligonucleotide
uuuaguuacccacugggug

SEQ ID NO: 1354751 - RNA, 19 nt, Artificial Sequence
  Description of Artificial Sequence: Synthetic oligonucleotide
aagucauaugguuuuaaug

SEQ ID NO: 1354752 - RNA, 19 nt, Artificial Sequence
  Description of Artificial Sequence: Synthetic oligonucleotide
ugucauuaagccaauauau

SEQ ID NO: 1354753 - RNA, 19 nt, Artificial Sequence
  Description of Artificial Sequence: Synthetic oligonucleotide
aaauaaagucugucgggac

SEQ ID NO: 1354754 - RNA, 19 nt, Artificial Sequence
  Description of Artificial Sequence: Synthetic oligonucleotide
uuaguuacccacugggugg

SEQ ID NO: 1354755 - RNA, 19 nt, Artificial Sequence
  Description of Artificial Sequence: Synthetic oligonucleotide
aacugcaagagucgcauuc

SEQ ID NO: 1354756 - RNA, 19 nt, Artificial Sequence
  Description of Artificial Sequence: Synthetic oligonucleotide
ucuguugggaaagaaacgg

SEQ ID NO: 1354757 - RNA, 19 nt, Artificial Sequence
  Description of Artificial Sequence: Synthetic oligonucleotide
aucaaaguauuguagccac

SEQ ID NO: 1354758 - RNA, 19 nt, Artificial Sequence
  Description of Artificial Sequence: Synthetic oligonucleotide
ugcaaggccaccauaauca

SEQ ID NO: 1354759 - RNA, 19 nt, Artificial Sequence
  Description of Artificial Sequence: Synthetic oligonucleotide
agugccauugcaauaaagc

SEQ ID NO: 1354760 - RNA, 19 nt, Artificial Sequence
  Description of Artificial Sequence: Synthetic oligonucleotide
uuuuaugguuugaugcugg

SEQ ID NO: 1354761 - RNA, 19 nt, Artificial Sequence
  Description of Artificial Sequence: Synthetic oligonucleotide
aauaaagucugucgggaca

SEQ ID NO: 1354762 - RNA, 19 nt, Artificial Sequence
  Description of Artificial Sequence: Synthetic oligonucleotide
acgggaaaaccauuuauac

SEQ ID NO: 1354763 - RNA, 19 nt, Artificial Sequence
  Description of Artificial Sequence: Synthetic oligonucleotide
uauuguagccacugaaggg

SEQ ID NO: 1354764 - RNA, 19 nt, Artificial Sequence
  Description of Artificial Sequence: Synthetic oligonucleotide
auuggaaccucccaauuuc

SEQ ID NO: 1354765 - RNA, 19 nt, Artificial Sequence
  Description of Artificial Sequence: Synthetic oligonucleotide
uuuccuagaaucuccaugu

SEQ ID NO: 1354766 - RNA, 19 nt, Artificial Sequence
  Description of Artificial Sequence: Synthetic oligonucleotide
uuucaagggaacaauaaau

SEQ ID NO: 1354767 - RNA, 19 nt, Artificial Sequence
  Description of Artificial Sequence: Synthetic oligonucleotide
uuaaaguaagaguuggccu

SEQ ID NO: 1354768 - RNA, 19 nt, Artificial Sequence
  Description of Artificial Sequence: Synthetic oligonucleotide
ugcaacuaaaacaaucaga

SEQ ID NO: 1354769 - RNA, 19 nt, Artificial Sequence
  Description of Artificial Sequence: Synthetic oligonucleotide
cugucauaugccuauauag

SEQ ID NO: 1354770 - RNA, 19 nt, Artificial Sequence
  Description of Artificial Sequence: Synthetic oligonucleotide
aaugccaugaucuguugga

SEQ ID NO: 1354771 - RNA, 19 nt, Artificial Sequence
  Description of Artificial Sequence: Synthetic oligonucleotide
guauuguagccacugaagg

SEQ ID NO: 1354772 - RNA, 19 nt, Artificial Sequence
  Description of Artificial Sequence: Synthetic oligonucleotide
aaggggaacaacuucauua

SEQ ID NO: 1354773 - RNA, 19 nt, Artificial Sequence
  Description of Artificial Sequence: Synthetic oligonucleotide
uaaaacuagagccacuguc

SEQ ID NO: 1354774 - RNA, 19 nt, Artificial Sequence
  Description of Artificial Sequence: Synthetic oligonucleotide
ucuuguauaaugucgguaa

SEQ ID NO: 1354775 - RNA, 19 nt, Artificial Sequence
  Description of Artificial Sequence: Synthetic oligonucleotide
cuugccuacucaaauaagc

SEQ ID NO: 1354776 - RNA, 19 nt, Artificial Sequence
  Description of Artificial Sequence: Synthetic oligonucleotide
cuuaaaguaagaguuggcc

SEQ ID NO: 1354777 - RNA, 19 nt, Artificial Sequence
  Description of Artificial Sequence: Synthetic oligonucleotide
uaaagcgaccaauaaaaca

SEQ ID NO: 1354778 - RNA, 19 nt, Artificial Sequence
  Description of Artificial Sequence: Synthetic oligonucleotide
accaccuuuaguuacccac

SEQ ID NO: 1354779 - RNA, 19 nt, Artificial Sequence
  Description of Artificial Sequence: Synthetic oligonucleotide
ggauuuuaugguuugaugc

SEQ ID NO: 1354780 - RNA, 19 nt, Artificial Sequence
  Description of Artificial Sequence: Synthetic oligonucleotide
uggguagugcauuagacug

SEQ ID NO: 1354781 - RNA, 19 nt, Artificial Sequence
  Description of Artificial Sequence: Synthetic oligonucleotide
acaauaguuauucuugccu

SEQ ID NO: 1354782 - RNA, 19 nt, Artificial Sequence
  Description of Artificial Sequence: Synthetic oligonucleotide
ugucgggacacauugaucu

SEQ ID NO: 1354783 - RNA, 19 nt, Artificial Sequence
  Description of Artificial Sequence: Synthetic oligonucleotide
ugucauaugccuauauaga

SEQ ID NO: 1354784 - RNA, 19 nt, Artificial Sequence
  Description of Artificial Sequence: Synthetic oligonucleotide
uguauaaugucgguaaaca

SEQ ID NO: 1354785 - RNA, 19 nt, Artificial Sequence
  Description of Artificial Sequence: Synthetic oligonucleotide
aaccauuuauacuuugaga

SEQ ID NO: 1354786 - RNA, 19 nt, Artificial Sequence
  Description of Artificial Sequence: Synthetic oligonucleotide
aaauggaacauuugcacuu

SEQ ID NO: 1354787 - RNA, 19 nt, Artificial Sequence
  Description of Artificial Sequence: Synthetic oligonucleotide
ugccuauauagauauauac

SEQ ID NO: 1354788 - RNA, 19 nt, Artificial Sequence
  Description of Artificial Sequence: Synthetic oligonucleotide
ugaucuuuacaugacuggg

SEQ ID NO: 1354789 - RNA, 19 nt, Artificial Sequence
  Description of Artificial Sequence: Synthetic oligonucleotide
uuugccaacuuuucaauac

SEQ ID NO: 1354790 - RNA, 19 nt, Artificial Sequence
  Description of Artificial Sequence: Synthetic oligonucleotide
auaagcaauacauuggguu

SEQ ID NO: 1354791 - RNA, 19 nt, Artificial Sequence
  Description of Artificial Sequence: Synthetic oligonucleotide
guuucuuguauaaugucgg

SEQ ID NO: 1354792 - RNA, 19 nt, Artificial Sequence
  Description of Artificial Sequence: Synthetic oligonucleotide
uauauacacuaucugugca

SEQ ID NO: 1354793 - RNA, 19 nt, Artificial Sequence
  Description of Artificial Sequence: Synthetic oligonucleotide
gugccauugcaauaaagcg

SEQ ID NO: 1354794 - RNA, 19 nt, Artificial Sequence
  Description of Artificial Sequence: Synthetic oligonucleotide
uuguagaaugguaaagaga

SEQ ID NO: 1354795 - RNA, 19 nt, Artificial Sequence
  Description of Artificial Sequence: Synthetic oligonucleotide
uuaaacccaucaaggaaag

SEQ ID NO: 1354796 - RNA, 19 nt, Artificial Sequence
  Description of Artificial Sequence: Synthetic oligonucleotide
aaaacuagagccacuguca

SEQ ID NO: 1354797 - RNA, 19 nt, Artificial Sequence
  Description of Artificial Sequence: Synthetic oligonucleotide
aguaagaguuggccuaagc

SEQ ID NO: 1354798 - RNA, 19 nt, Artificial Sequence
  Description of Artificial Sequence: Synthetic oligonucleotide
ugccauugcaauaaagcga

SEQ ID NO: 1354799 - RNA, 19 nt, Artificial Sequence
  Description of Artificial Sequence: Synthetic oligonucleotide
acagcauaaccuccaauuc

SEQ ID NO: 1354800 - RNA, 19 nt, Artificial Sequence
  Description of Artificial Sequence: Synthetic oligonucleotide
uaaaguaagaguuggccua

SEQ ID NO: 1354801 - RNA, 19 nt, Artificial Sequence
  Description of Artificial Sequence: Synthetic oligonucleotide
uaagcaauacauuggguuc

SEQ ID NO: 1354802 - RNA, 19 nt, Artificial Sequence
  Description of Artificial Sequence: Synthetic oligonucleotide
uagugcauuagacuggcac

SEQ ID NO: 1354803 - RNA, 19 nt, Artificial Sequence
  Description of Artificial Sequence: Synthetic oligonucleotide
cauucuuacuucauuauca

SEQ ID NO: 1354804 - RNA, 19 nt, Artificial Sequence
  Description of Artificial Sequence: Synthetic oligonucleotide
ucugucauuaagccaauau

SEQ ID NO: 1354805 - RNA, 19 nt, Artificial Sequence
  Description of Artificial Sequence: Synthetic oligonucleotide
ugccaagucaaccucuugc

SEQ ID NO: 1354806 - RNA, 19 nt, Artificial Sequence
  Description of Artificial Sequence: Synthetic oligonucleotide
auuacuuccccaugagcuc

SEQ ID NO: 1354807 - RNA, 19 nt, Artificial Sequence
  Description of Artificial Sequence: Synthetic oligonucleotide
aaguauuguagccacugaa

SEQ ID NO: 1354808 - RNA, 19 nt, Artificial Sequence
  Description of Artificial Sequence: Synthetic oligonucleotide
augaucaggauuuuauggu

SEQ ID NO: 1354809 - RNA, 19 nt, Artificial Sequence
  Description of Artificial Sequence: Synthetic oligonucleotide
gccuccuuaagucauaugg

SEQ ID NO: 1354810 - RNA, 19 nt, Artificial Sequence
  Description of Artificial Sequence: Synthetic oligonucleotide
auguuuugcauauuucugu

SEQ ID NO: 1354811 - RNA, 19 nt, Artificial Sequence
  Description of Artificial Sequence: Synthetic oligonucleotide
uaugccuauauagauauau

SEQ ID NO: 1354812 - RNA, 19 nt, Artificial Sequence
  Description of Artificial Sequence: Synthetic oligonucleotide
guauaaugucgguaaacag

SEQ ID NO: 1354813 - RNA, 19 nt, Artificial Sequence
  Description of Artificial Sequence: Synthetic oligonucleotide
agugucaauaaacuuucca

SEQ ID NO: 1354814 - RNA, 19 nt, Artificial Sequence
  Description of Artificial Sequence: Synthetic oligonucleotide
uauucuugccuacucaaau

SEQ ID NO: 1354815 - RNA, 19 nt, Artificial Sequence
  Description of Artificial Sequence: Synthetic oligonucleotide
accauucucuugcaaggcc

SEQ ID NO: 1354816 - RNA, 19 nt, Artificial Sequence
  Description of Artificial Sequence: Synthetic oligonucleotide
ucgguaaacaguauuucuc

SEQ ID NO: 1354817 - RNA, 19 nt, Artificial Sequence
  Description of Artificial Sequence: Synthetic oligonucleotide
ugagcaagcuuccaccuga

SEQ ID NO: 1354818 - RNA, 19 nt, Artificial Sequence
  Description of Artificial Sequence: Synthetic oligonucleotide
aguaacggaagugagcaag

SEQ ID NO: 1354819 - RNA, 19 nt, Artificial Sequence
  Description of Artificial Sequence: Synthetic oligonucleotide
caaggcaaagcaaauccag

SEQ ID NO: 1354820 - RNA, 19 nt, Artificial Sequence
  Description of Artificial Sequence: Synthetic oligonucleotide
uccuccuagagguaaucgg

SEQ ID NO: 1354821 - RNA, 19 nt, Artificial Sequence
  Description of Artificial Sequence: Synthetic oligonucleotide
aaaauuuuguagaauggua

SEQ ID NO: 1354822 - RNA, 19 nt, Artificial Sequence
  Description of Artificial Sequence: Synthetic oligonucleotide
uacaugacuggguagugca

SEQ ID NO: 1354823 - RNA, 19 nt, Artificial Sequence
  Description of Artificial Sequence: Synthetic oligonucleotide
aaccauucucuugcaaggc

SEQ ID NO: 1354824 - RNA, 19 nt, Artificial Sequence
  Description of Artificial Sequence: Synthetic oligonucleotide
ucuugcaaggccaccauaa

SEQ ID NO: 1354825 - RNA, 19 nt, Artificial Sequence
  Description of Artificial Sequence: Synthetic oligonucleotide
gucauaugguuuuaaugcc

SEQ ID NO: 1354826 - RNA, 19 nt, Artificial Sequence
  Description of Artificial Sequence: Synthetic oligonucleotide
uucuugccuacucaaauaa

SEQ ID NO: 1354827 - RNA, 19 nt, Artificial Sequence
  Description of Artificial Sequence: Synthetic oligonucleotide
aaggaguuauaaaauuuug

SEQ ID NO: 1354828 - RNA, 19 nt, Artificial Sequence
  Description of Artificial Sequence: Synthetic oligonucleotide
acaaguaacggaagugagc

SEQ ID NO: 1354829 - RNA, 19 nt, Artificial Sequence
  Description of Artificial Sequence: Synthetic oligonucleotide
uuuauacuuugagagaauc

SEQ ID NO: 1354830 - RNA, 19 nt, Artificial Sequence
  Description of Artificial Sequence: Synthetic oligonucleotide
agucugucgggacacauug

SEQ ID NO: 1354831 - RNA, 19 nt, Artificial Sequence
  Description of Artificial Sequence: Synthetic oligonucleotide
acggaagugagcaagcuuc

SEQ ID NO: 1354832 - RNA, 19 nt, Artificial Sequence
  Description of Artificial Sequence: Synthetic oligonucleotide
ugaagcugcguucguaagc

SEQ ID NO: 1354833 - RNA, 19 nt, Artificial Sequence
  Description of Artificial Sequence: Synthetic oligonucleotide
aaaguauuguagccacuga

SEQ ID NO: 1354834 - RNA, 19 nt, Artificial Sequence
  Description of Artificial Sequence: Synthetic oligonucleotide
aggauuuuaugguuugaug

SEQ ID NO: 1354835 - RNA, 19 nt, Artificial Sequence
  Description of Artificial Sequence: Synthetic oligonucleotide
agaugaucaggauuuuaug

SEQ ID NO: 1354836 - RNA, 19 nt, Artificial Sequence
  Description of Artificial Sequence: Synthetic oligonucleotide
uggauuuaucuguaaacaa

SEQ ID NO: 1354837 - RNA, 19 nt, Artificial Sequence
  Description of Artificial Sequence: Synthetic oligonucleotide
ugaacagcuuauauacacu

SEQ ID NO: 1354838 - RNA, 19 nt, Artificial Sequence
  Description of Artificial Sequence: Synthetic oligonucleotide
auuagacuggcacaaguaa

SEQ ID NO: 1354839 - RNA, 19 nt, Artificial Sequence
  Description of Artificial Sequence: Synthetic oligonucleotide
gacaagaacauguauggcu

SEQ ID NO: 1354840 - RNA, 19 nt, Artificial Sequence
  Description of Artificial Sequence: Synthetic oligonucleotide
agcuuauauacacuaucug

SEQ ID NO: 1354841 - RNA, 19 nt, Artificial Sequence
  Description of Artificial Sequence: Synthetic oligonucleotide
uaaauaccuuccugaacag

SEQ ID NO: 1354842 - RNA, 19 nt, Artificial Sequence
  Description of Artificial Sequence: Synthetic oligonucleotide
aagaugaucaggauuuuau

SEQ ID NO: 1354843 - RNA, 19 nt, Artificial Sequence
  Description of Artificial Sequence: Synthetic oligonucleotide
auugaucuuuacaugacug

SEQ ID NO: 1354844 - RNA, 19 nt, Artificial Sequence
  Description of Artificial Sequence: Synthetic oligonucleotide
agugcauuagacuggcaca

SEQ ID NO: 1354845 - RNA, 19 nt, Artificial Sequence
  Description of Artificial Sequence: Synthetic oligonucleotide
aaauuugaggaugaucuuu

SEQ ID NO: 1354846 - RNA, 19 nt, Artificial Sequence
  Description of Artificial Sequence: Synthetic oligonucleotide
aaugcaagagcuccuccaa

SEQ ID NO: 1354847 - RNA, 19 nt, Artificial Sequence
  Description of Artificial Sequence: Synthetic oligonucleotide
aguauuguagccacugaag

SEQ ID NO: 1354848 - RNA, 19 nt, Artificial Sequence
  Description of Artificial Sequence: Synthetic oligonucleotide
guaugaaagaugaucagga

SEQ ID NO: 1354849 - RNA, 19 nt, Artificial Sequence
  Description of Artificial Sequence: Synthetic oligonucleotide
agagucgcauucuuacuuc

SEQ ID NO: 1354850 - RNA, 19 nt, Artificial Sequence
  Description of Artificial Sequence: Synthetic oligonucleotide
aagccaauauauucauccu

SEQ ID NO: 1354851 - RNA, 19 nt, Artificial Sequence
  Description of Artificial Sequence: Synthetic oligonucleotide
augcaacuaaaacaaucag

SEQ ID NO: 1354852 - RNA, 19 nt, Artificial Sequence
  Description of Artificial Sequence: Synthetic oligonucleotide
auauaaucgccuccuuaag

SEQ ID NO: 1354853 - RNA, 19 nt, Artificial Sequence
  Description of Artificial Sequence: Synthetic oligonucleotide
aagcaaucuguggaccacc

SEQ ID NO: 1354854 - RNA, 19 nt, Artificial Sequence
  Description of Artificial Sequence: Synthetic oligonucleotide
ucuuuacaugacuggguag

SEQ ID NO: 1354855 - RNA, 19 nt, Artificial Sequence
  Description of Artificial Sequence: Synthetic oligonucleotide
agagccacugucauaugcc

SEQ ID NO: 1354856 - RNA, 19 nt, Artificial Sequence
  Description of Artificial Sequence: Synthetic oligonucleotide
cacauugaucuuuacauga

SEQ ID NO: 1354857 - RNA, 19 nt, Artificial Sequence
  Description of Artificial Sequence: Synthetic oligonucleotide
gacaacaggaacaaggcaa

SEQ ID NO: 1354858 - RNA, 19 nt, Artificial Sequence
  Description of Artificial Sequence: Synthetic oligonucleotide
acuagagccacugucauau

SEQ ID NO: 1354859 - RNA, 19 nt, Artificial Sequence
  Description of Artificial Sequence: Synthetic oligonucleotide
aguuauucuugccuacuca

SEQ ID NO: 1354860 - RNA, 19 nt, Artificial Sequence
  Description of Artificial Sequence: Synthetic oligonucleotide
ucagaucaugugaaguaac

SEQ ID NO: 1354861 - RNA, 19 nt, Artificial Sequence
  Description of Artificial Sequence: Synthetic oligonucleotide
gauuuuaugguuugaugcu

SEQ ID NO: 1354862 - RNA, 19 nt, Artificial Sequence
  Description of Artificial Sequence: Synthetic oligonucleotide
uggcgcucuauaaaacuag

SEQ ID NO: 1354863 - RNA, 19 nt, Artificial Sequence
  Description of Artificial Sequence: Synthetic oligonucleotide
cauauaaucgccuccuuaa

SEQ ID NO: 1354864 - RNA, 19 nt, Artificial Sequence
  Description of Artificial Sequence: Synthetic oligonucleotide
auaaagcgaccaauaaaac

SEQ ID NO: 1354865 - RNA, 19 nt, Artificial Sequence
  Description of Artificial Sequence: Synthetic oligonucleotide
ugguuuuaaugccaugauc

SEQ ID NO: 1354866 - RNA, 19 nt, Artificial Sequence
  Description of Artificial Sequence: Synthetic oligonucleotide
uugccaacuuuucaauaca

SEQ ID NO: 1354867 - RNA, 19 nt, Artificial Sequence
  Description of Artificial Sequence: Synthetic oligonucleotide
uugaugcuggauuuaucug

SEQ ID NO: 1354868 - RNA, 19 nt, Artificial Sequence
  Description of Artificial Sequence: Synthetic oligonucleotide
cacaaguaacggaagugag

SEQ ID NO: 1354869 - RNA, 19 nt, Artificial Sequence
  Description of Artificial Sequence: Synthetic oligonucleotide
auauacacuaucugugcaa

SEQ ID NO: 1354870 - RNA, 19 nt, Artificial Sequence
  Description of Artificial Sequence: Synthetic oligonucleotide
guaaccaggugucuuugcc

SEQ ID NO: 1354871 - RNA, 19 nt, Artificial Sequence
  Description of Artificial Sequence: Synthetic oligonucleotide
uuggccuaagcccuaaaua

SEQ ID NO: 1354872 - RNA, 19 nt, Artificial Sequence
  Description of Artificial Sequence: Synthetic oligonucleotide
uucuugguaaccagguguc

SEQ ID NO: 1354873 - RNA, 19 nt, Artificial Sequence
  Description of Artificial Sequence: Synthetic oligonucleotide
caaguaacggaagugagca

SEQ ID NO: 1354874 - RNA, 19 nt, Artificial Sequence
  Description of Artificial Sequence: Synthetic oligonucleotide
augaugaaauguuuugcau

SEQ ID NO: 1354875 - RNA, 19 nt, Artificial Sequence
  Description of Artificial Sequence: Synthetic oligonucleotide
ucugucgggacacauugau

SEQ ID NO: 1354876 - RNA, 19 nt, Artificial Sequence
  Description of Artificial Sequence: Synthetic oligonucleotide
acuggguagugcauuagac

SEQ ID NO: 1354877 - RNA, 19 nt, Artificial Sequence
  Description of Artificial Sequence: Synthetic oligonucleotide
uaagucauaugguuuuaau

SEQ ID NO: 1354878 - RNA, 19 nt, Artificial Sequence
  Description of Artificial Sequence: Synthetic oligonucleotide
auuuuaugguuugaugcug

SEQ ID NO: 1354879 - RNA, 19 nt, Artificial Sequence
  Description of Artificial Sequence: Synthetic oligonucleotide
auugcaauaaagcgaccaa

SEQ ID NO: 1354880 - RNA, 19 nt, Artificial Sequence
  Description of Artificial Sequence: Synthetic oligonucleotide
ugucucuuauccagauaag

SEQ ID NO: 1354881 - RNA, 19 nt, Artificial Sequence
  Description of Artificial Sequence: Synthetic oligonucleotide
uaugaaagaugaucaggau

SEQ ID NO: 1354882 - RNA, 19 nt, Artificial Sequence
  Description of Artificial Sequence: Synthetic oligonucleotide
cauuacuuccccaugagcu

SEQ ID NO: 1354883 - RNA, 19 nt, Artificial Sequence
  Description of Artificial Sequence: Synthetic oligonucleotide
caaauaauuugcuugcugu

SEQ ID NO: 1354884 - RNA, 19 nt, Artificial Sequence
  Description of Artificial Sequence: Synthetic oligonucleotide
aacaaucagauaucaccua

SEQ ID NO: 1354885 - RNA, 19 nt, Artificial Sequence
  Description of Artificial Sequence: Synthetic oligonucleotide
auaaugucgguaaacagua

SEQ ID NO: 1354886 - RNA, 19 nt, Artificial Sequence
  Description of Artificial Sequence: Synthetic oligonucleotide
uuguauaaugucgguaaac

SEQ ID NO: 1354887 - RNA, 19 nt, Artificial Sequence
  Description of Artificial Sequence: Synthetic oligonucleotide
uccuuaagucauaugguuu

SEQ ID NO: 1354888 - RNA, 19 nt, Artificial Sequence
  Description of Artificial Sequence: Synthetic oligonucleotide
uacacuuggcgcucuauaa

SEQ ID NO: 1354889 - RNA, 19 nt, Artificial Sequence
  Description of Artificial Sequence: Synthetic oligonucleotide
uccuagagguaaucggcag

SEQ ID NO: 1354890 - RNA, 19 nt, Artificial Sequence
  Description of Artificial Sequence: Synthetic oligonucleotide
aucuuuacaugacugggua

SEQ ID NO: 1354891 - RNA, 19 nt, Artificial Sequence
  Description of Artificial Sequence: Synthetic oligonucleotide
gggaacaauaaauaaagua

SEQ ID NO: 1354892 - RNA, 19 nt, Artificial Sequence
  Description of Artificial Sequence: Synthetic oligonucleotide
cuaagcccuaaauaccuuc

SEQ ID NO: 1354893 - RNA, 19 nt, Artificial Sequence
  Description of Artificial Sequence: Synthetic oligonucleotide
cuucaauaguuguugucuc

SEQ ID NO: 1354894 - RNA, 19 nt, Artificial Sequence
  Description of Artificial Sequence: Synthetic oligonucleotide
uggaaccucccaauuucag

SEQ ID NO: 1354895 - RNA, 19 nt, Artificial Sequence
  Description of Artificial Sequence: Synthetic oligonucleotide
guuauucuugccuacucaa

SEQ ID NO: 1354896 - RNA, 19 nt, Artificial Sequence
  Description of Artificial Sequence: Synthetic oligonucleotide
accucccaauuucagauca

SEQ ID NO: 1354897 - RNA, 19 nt, Artificial Sequence
  Description of Artificial Sequence: Synthetic oligonucleotide
uugcaaggccaccauaauc

SEQ ID NO: 1354898 - RNA, 19 nt, Artificial Sequence
  Description of Artificial Sequence: Synthetic oligonucleotide
auaaggaguuauaaaauuu

SEQ ID NO: 1354899 - RNA, 19 nt, Artificial Sequence
  Description of Artificial Sequence: Synthetic oligonucleotide
uuaaaugcaagagcuccuc

SEQ ID NO: 1354900 - RNA, 19 nt, Artificial Sequence
  Description of Artificial Sequence: Synthetic oligonucleotide
ggcugggguauuuaaaugc

SEQ ID NO: 1354901 - RNA, 19 nt, Artificial Sequence
  Description of Artificial Sequence: Synthetic oligonucleotide
uuucuuguauaaugucggu

SEQ ID NO: 1354902 - RNA, 19 nt, Artificial Sequence
  Description of Artificial Sequence: Synthetic oligonucleotide
uuuaugguuugaugcugga

SEQ ID NO: 1354903 - RNA, 19 nt, Artificial Sequence
  Description of Artificial Sequence: Synthetic oligonucleotide
accuuuaguuacccacugg

SEQ ID NO: 1354904 - RNA, 19 nt, Artificial Sequence
  Description of Artificial Sequence: Synthetic oligonucleotide
aucagauaucaccuaggga

SEQ ID NO: 1354905 - RNA, 19 nt, Artificial Sequence
  Description of Artificial Sequence: Synthetic oligonucleotide
auuaucuguacagaaugaa

SEQ ID NO: 1354906 - RNA, 19 nt, Artificial Sequence
  Description of Artificial Sequence: Synthetic oligonucleotide
agauaaggaguuauaaaau

SEQ ID NO: 1354907 - RNA, 19 nt, Artificial Sequence
  Description of Artificial Sequence: Synthetic oligonucleotide
uucagaucaugugaaguaa

SEQ ID NO: 1354908 - RNA, 19 nt, Artificial Sequence
  Description of Artificial Sequence: Synthetic oligonucleotide
ugguaaagagaagccagug

SEQ ID NO: 1354909 - RNA, 19 nt, Artificial Sequence
  Description of Artificial Sequence: Synthetic oligonucleotide
gguuuuaaugccaugaucu

SEQ ID NO: 1354910 - RNA, 19 nt, Artificial Sequence
  Description of Artificial Sequence: Synthetic oligonucleotide
uuaagccaauauauucauc

SEQ ID NO: 1354911 - RNA, 19 nt, Artificial Sequence
  Description of Artificial Sequence: Synthetic oligonucleotide
ucgcauucuuacuucauua

SEQ ID NO: 1354912 - RNA, 19 nt, Artificial Sequence
  Description of Artificial Sequence: Synthetic oligonucleotide
uuggaaccucccaauuuca

SEQ ID NO: 1354913 - RNA, 19 nt, Artificial Sequence
  Description of Artificial Sequence: Synthetic oligonucleotide
agccaugcaacuaaaacaa

SEQ ID NO: 1354914 - RNA, 19 nt, Artificial Sequence
  Description of Artificial Sequence: Synthetic oligonucleotide
agugagcaagcuuccaccu

SEQ ID NO: 1354915 - RNA, 19 nt, Artificial Sequence
  Description of Artificial Sequence: Synthetic oligonucleotide
gaucaugugaaguaacuuu

SEQ ID NO: 1354916 - RNA, 19 nt, Artificial Sequence
  Description of Artificial Sequence: Synthetic oligonucleotide
aagcccuaaauaccuuccu

SEQ ID NO: 1354917 - RNA, 19 nt, Artificial Sequence
  Description of Artificial Sequence: Synthetic oligonucleotide
ugguuguuguauuaugauu

SEQ ID NO: 1354918 - RNA, 19 nt, Artificial Sequence
  Description of Artificial Sequence: Synthetic oligonucleotide
uucagucaccaggauauug

SEQ ID NO: 1354919 - RNA, 19 nt, Artificial Sequence
  Description of Artificial Sequence: Synthetic oligonucleotide
uauccagauaaggaguuau

SEQ ID NO: 1354920 - RNA, 19 nt, Artificial Sequence
  Description of Artificial Sequence: Synthetic oligonucleotide
aacgggaaaaccauuuaua

SEQ ID NO: 1354921 - RNA, 19 nt, Artificial Sequence
  Description of Artificial Sequence: Synthetic oligonucleotide
ggaaagaaacgggaaaacc

SEQ ID NO: 1354922 - RNA, 19 nt, Artificial Sequence
  Description of Artificial Sequence: Synthetic oligonucleotide
cauaugccuauauagauau

SEQ ID NO: 1354923 - RNA, 19 nt, Artificial Sequence
  Description of Artificial Sequence: Synthetic oligonucleotide
acauauaaucgccuccuua

SEQ ID NO: 1354924 - RNA, 19 nt, Artificial Sequence
  Description of Artificial Sequence: Synthetic oligonucleotide
gaagcugcguucguaagca

SEQ ID NO: 1354925 - RNA, 19 nt, Artificial Sequence
  Description of Artificial Sequence: Synthetic oligonucleotide
ccaugucuaauacacuugg

SEQ ID NO: 1354926 - RNA, 19 nt, Artificial Sequence
  Description of Artificial Sequence: Synthetic oligonucleotide
uuacaugacuggguagugc

SEQ ID NO: 1354927 - RNA, 19 nt, Artificial Sequence
  Description of Artificial Sequence: Synthetic oligonucleotide
uuggcgcucuauaaaacua

SEQ ID NO: 1354928 - RNA, 19 nt, Artificial Sequence
  Description of Artificial Sequence: Synthetic oligonucleotide
aacggaagugagcaagcuu

SEQ ID NO: 1354929 - RNA, 19 nt, Artificial Sequence
  Description of Artificial Sequence: Synthetic oligonucleotide
aaggcaaagcaaauccaga

SEQ ID NO: 1354930 - RNA, 19 nt, Artificial Sequence
  Description of Artificial Sequence: Synthetic oligonucleotide
aaaguaagaguuggccuaa

SEQ ID NO: 1354931 - RNA, 19 nt, Artificial Sequence
  Description of Artificial Sequence: Synthetic oligonucleotide
caaauaaagucugucggga

SEQ ID NO: 1354932 - RNA, 19 nt, Artificial Sequence
  Description of Artificial Sequence: Synthetic oligonucleotide
agcccuaaauaccuuccug

SEQ ID NO: 1354933 - RNA, 19 nt, Artificial Sequence
  Description of Artificial Sequence: Synthetic oligonucleotide
uggcacaaguaacggaagu

SEQ ID NO: 1354934 - RNA, 19 nt, Artificial Sequence
  Description of Artificial Sequence: Synthetic oligonucleotide
gcaagagucgcauucuuac

SEQ ID NO: 1354935 - RNA, 19 nt, Artificial Sequence
  Description of Artificial Sequence: Synthetic oligonucleotide
ucuaauacacuuggcgcuc

SEQ ID NO: 1354936 - RNA, 19 nt, Artificial Sequence
  Description of Artificial Sequence: Synthetic oligonucleotide
acuggcacaaguaacggaa

SEQ ID NO: 1354937 - RNA, 19 nt, Artificial Sequence
  Description of Artificial Sequence: Synthetic oligonucleotide
auauuacauauaaucgccu

SEQ ID NO: 1354938 - RNA, 19 nt, Artificial Sequence
  Description of Artificial Sequence: Synthetic oligonucleotide
acugucauaugccuauaua

SEQ ID NO: 1354939 - RNA, 19 nt, Artificial Sequence
  Description of Artificial Sequence: Synthetic oligonucleotide
gauaucaccuagggagaag

SEQ ID NO: 1354940 - RNA, 19 nt, Artificial Sequence
  Description of Artificial Sequence: Synthetic oligonucleotide
uuaagucauaugguuuuaa

SEQ ID NO: 1354941 - RNA, 19 nt, Artificial Sequence
  Description of Artificial Sequence: Synthetic oligonucleotide
auucuugccuacucaaaua

SEQ ID NO: 1354942 - RNA, 19 nt, Artificial Sequence
  Description of Artificial Sequence: Synthetic oligonucleotide
cauugcaauaaagcgacca

SEQ ID NO: 1354943 - RNA, 19 nt, Artificial Sequence
  Description of Artificial Sequence: Synthetic oligonucleotide
gauauuggaaccucccaau

SEQ ID NO: 1354944 - RNA, 19 nt, Artificial Sequence
  Description of Artificial Sequence: Synthetic oligonucleotide
ugcguucguaagcaaucug

SEQ ID NO: 1354945 - RNA, 19 nt, Artificial Sequence
  Description of Artificial Sequence: Synthetic oligonucleotide
caauaguuauucuugccua

SEQ ID NO: 1354946 - RNA, 19 nt, Artificial Sequence
  Description of Artificial Sequence: Synthetic oligonucleotide
gccaauauauucauccuug

SEQ ID NO: 1354947 - RNA, 19 nt, Artificial Sequence
  Description of Artificial Sequence: Synthetic oligonucleotide
uuguagccacugaagggga

SEQ ID NO: 1354948 - RNA, 19 nt, Artificial Sequence
  Description of Artificial Sequence: Synthetic oligonucleotide
ugucgguaaacaguauuuc

SEQ ID NO: 1354949 - RNA, 19 nt, Artificial Sequence
  Description of Artificial Sequence: Synthetic oligonucleotide
agacuggcacaaguaacgg

SEQ ID NO: 1354950 - RNA, 19 nt, Artificial Sequence
  Description of Artificial Sequence: Synthetic oligonucleotide
auaguuauucuugccuacu

SEQ ID NO: 1354951 - RNA, 19 nt, Artificial Sequence
  Description of Artificial Sequence: Synthetic oligonucleotide
cuagaaucuccaugucaac

SEQ ID NO: 1354952 - RNA, 19 nt, Artificial Sequence
  Description of Artificial Sequence: Synthetic oligonucleotide
uguuuucuucagucaccag

SEQ ID NO: 1354953 - RNA, 19 nt, Artificial Sequence
  Description of Artificial Sequence: Synthetic oligonucleotide
uucuuguauaaugucggua

SEQ ID NO: 1354954 - RNA, 19 nt, Artificial Sequence
  Description of Artificial Sequence: Synthetic oligonucleotide
acuuggcgcucuauaaaac

SEQ ID NO: 1354955 - RNA, 19 nt, Artificial Sequence
  Description of Artificial Sequence: Synthetic oligonucleotide
auaaauucucuugcuugcu

SEQ ID NO: 1354956 - RNA, 19 nt, Artificial Sequence
  Description of Artificial Sequence: Synthetic oligonucleotide
agucauuucaagggaacaa

SEQ ID NO: 1354957 - RNA, 19 nt, Artificial Sequence
  Description of Artificial Sequence: Synthetic oligonucleotide
uauuucuguugggaaagaa

SEQ ID NO: 1354958 - RNA, 19 nt, Artificial Sequence
  Description of Artificial Sequence: Synthetic oligonucleotide
ugcaagagucgcauucuua

SEQ ID NO: 1354959 - RNA, 19 nt, Artificial Sequence
  Description of Artificial Sequence: Synthetic oligonucleotide
gggaacaacuucauuaaac

SEQ ID NO: 1354960 - RNA, 19 nt, Artificial Sequence
  Description of Artificial Sequence: Synthetic oligonucleotide
cauucucuugcaaggccac

SEQ ID NO: 1354961 - RNA, 19 nt, Artificial Sequence
  Description of Artificial Sequence: Synthetic oligonucleotide
gucuaauacacuuggcgcu

SEQ ID NO: 1354962 - RNA, 19 nt, Artificial Sequence
  Description of Artificial Sequence: Synthetic oligonucleotide
aaaacuuuugaggcccauu

SEQ ID NO: 1354963 - RNA, 19 nt, Artificial Sequence
  Description of Artificial Sequence: Synthetic oligonucleotide
caucaaaguauuguagcca

SEQ ID NO: 1354964 - RNA, 19 nt, Artificial Sequence
  Description of Artificial Sequence: Synthetic oligonucleotide
cugucauuaagccaauaua

SEQ ID NO: 1354965 - RNA, 19 nt, Artificial Sequence
  Description of Artificial Sequence: Synthetic oligonucleotide
uaagcaaucuguggaccac

SEQ ID NO: 1354966 - RNA, 19 nt, Artificial Sequence
  Description of Artificial Sequence: Synthetic oligonucleotide
auauuggaaccucccaauu

SEQ ID NO: 1354967 - RNA, 19 nt, Artificial Sequence
  Description of Artificial Sequence: Synthetic oligonucleotide
gccauugcaauaaagcgac

SEQ ID NO: 1354968 - RNA, 19 nt, Artificial Sequence
  Description of Artificial Sequence: Synthetic oligonucleotide
uccaccugaagcugcguuc

SEQ ID NO: 1354969 - RNA, 19 nt, Artificial Sequence
  Description of Artificial Sequence: Synthetic oligonucleotide
auccuccuagagguaaucg

SEQ ID NO: 1354970 - RNA, 19 nt, Artificial Sequence
  Description of Artificial Sequence: Synthetic oligonucleotide
uguggaccaccuuuaguua

SEQ ID NO: 1354971 - RNA, 19 nt, Artificial Sequence
  Description of Artificial Sequence: Synthetic oligonucleotide
guaacggaagugagcaagc

SEQ ID NO: 1354972 - RNA, 19 nt, Artificial Sequence
  Description of Artificial Sequence: Synthetic oligonucleotide
gaauagugccauugcaaua

SEQ ID NO: 1354973 - RNA, 19 nt, Artificial Sequence
  Description of Artificial Sequence: Synthetic oligonucleotide
ccuccuagagguaaucggc

SEQ ID NO: 1354974 - RNA, 19 nt, Artificial Sequence
  Description of Artificial Sequence: Synthetic oligonucleotide
gaaacgggaaaaccauuua

SEQ ID NO: 1354975 - RNA, 19 nt, Artificial Sequence
  Description of Artificial Sequence: Synthetic oligonucleotide
acacuuggcgcucuauaaa

SEQ ID NO: 1354976 - RNA, 19 nt, Artificial Sequence
  Description of Artificial Sequence: Synthetic oligonucleotide
gacuggguagugcauuaga

SEQ ID NO: 1354977 - RNA, 19 nt, Artificial Sequence
  Description of Artificial Sequence: Synthetic oligonucleotide
aacccaucaaggaaagcuu

SEQ ID NO: 1354978 - RNA, 19 nt, Artificial Sequence
  Description of Artificial Sequence: Synthetic oligonucleotide
caccuagggagaagaaaug

SEQ ID NO: 1354979 - RNA, 19 nt, Artificial Sequence
  Description of Artificial Sequence: Synthetic oligonucleotide
aauacacuuggcgcucuau

SEQ ID NO: 1354980 - RNA, 19 nt, Artificial Sequence
  Description of Artificial Sequence: Synthetic oligonucleotide
gaccaauaaaacagaagua

SEQ ID NO: 1354981 - RNA, 19 nt, Artificial Sequence
  Description of Artificial Sequence: Synthetic oligonucleotide
cugaagcugcguucguaag

SEQ ID NO: 1354982 - RNA, 19 nt, Artificial Sequence
  Description of Artificial Sequence: Synthetic oligonucleotide
uaucaccuagggagaagaa

SEQ ID NO: 1354983 - RNA, 19 nt, Artificial Sequence
  Description of Artificial Sequence: Synthetic oligonucleotide
cauuagacuggcacaagua

SEQ ID NO: 1354984 - RNA, 19 nt, Artificial Sequence
  Description of Artificial Sequence: Synthetic oligonucleotide
aagcgaccaauaaaacaga

SEQ ID NO: 1354985 - RNA, 19 nt, Artificial Sequence
  Description of Artificial Sequence: Synthetic oligonucleotide
ucaggauuuuaugguuuga

SEQ ID NO: 1354986 - RNA, 19 nt, Artificial Sequence
  Description of Artificial Sequence: Synthetic oligonucleotide
auacacuuggcgcucuaua

SEQ ID NO: 1354987 - RNA, 19 nt, Artificial Sequence
  Description of Artificial Sequence: Synthetic oligonucleotide
aacuagagccacugucaua

SEQ ID NO: 1354988 - RNA, 19 nt, Artificial Sequence
  Description of Artificial Sequence: Synthetic oligonucleotide
caaaacugcaagagucgca

SEQ ID NO: 1354989 - RNA, 19 nt, Artificial Sequence
  Description of Artificial Sequence: Synthetic oligonucleotide
cagauaucaccuagggaga

SEQ ID NO: 1354990 - RNA, 19 nt, Artificial Sequence
  Description of Artificial Sequence: Synthetic oligonucleotide
agaucaugugaaguaacuu

SEQ ID NO: 1354991 - RNA, 19 nt, Artificial Sequence
  Description of Artificial Sequence: Synthetic oligonucleotide
agcauaaccuccaauucuu

SEQ ID NO: 1354992 - RNA, 19 nt, Artificial Sequence
  Description of Artificial Sequence: Synthetic oligonucleotide
aaguaagaguuggccuaag

SEQ ID NO: 1354993 - RNA, 19 nt, Artificial Sequence
  Description of Artificial Sequence: Synthetic oligonucleotide
ugcauuagacuggcacaag

SEQ ID NO: 1354994 - RNA, 19 nt, Artificial Sequence
  Description of Artificial Sequence: Synthetic oligonucleotide
uaccuuccugaacagccau

SEQ ID NO: 1354995 - RNA, 19 nt, Artificial Sequence
  Description of Artificial Sequence: Synthetic oligonucleotide
aaucuguggaccaccuuua

SEQ ID NO: 1354996 - RNA, 19 nt, Artificial Sequence
  Description of Artificial Sequence: Synthetic oligonucleotide
uaacggaagugagcaagcu

SEQ ID NO: 1354997 - RNA, 19 nt, Artificial Sequence
  Description of Artificial Sequence: Synthetic oligonucleotide
gagucgcauucuuacuuca

SEQ ID NO: 1354998 - RNA, 19 nt, Artificial Sequence
  Description of Artificial Sequence: Synthetic oligonucleotide
cucccaauuucagaucaug

SEQ ID NO: 1354999 - RNA, 19 nt, Artificial Sequence
  Description of Artificial Sequence: Synthetic oligonucleotide
ccuauauagauauauacuu

SEQ ID NO: 1355000 - RNA, 19 nt, Artificial Sequence
  Description of Artificial Sequence: Synthetic oligonucleotide
gucgguaaacaguauuucu

SEQ ID NO: 1355001 - RNA, 19 nt, Artificial Sequence
  Description of Artificial Sequence: Synthetic oligonucleotide
ucucuugcaaggccaccau

SEQ ID NO: 1355002 - RNA, 19 nt, Artificial Sequence
  Description of Artificial Sequence: Synthetic oligonucleotide
uacauauaaucgccuccuu

SEQ ID NO: 1355003 - RNA, 19 nt, Artificial Sequence
  Description of Artificial Sequence: Synthetic oligonucleotide
aucaccuagggagaagaaa

SEQ ID NO: 1355004 - RNA, 19 nt, Artificial Sequence
  Description of Artificial Sequence: Synthetic oligonucleotide
accucuugcaugccacaca

SEQ ID NO: 1355005 - RNA, 19 nt, Artificial Sequence
  Description of Artificial Sequence: Synthetic oligonucleotide
ugguaaccaggugucuuug

SEQ ID NO: 1355006 - RNA, 19 nt, Artificial Sequence
  Description of Artificial Sequence: Synthetic oligonucleotide
cacuuggcgcucuauaaaa

SEQ ID NO: 1355007 - RNA, 19 nt, Artificial Sequence
  Description of Artificial Sequence: Synthetic oligonucleotide
uguagccacugaaggggaa

SEQ ID NO: 1355008 - RNA, 19 nt, Artificial Sequence
  Description of Artificial Sequence: Synthetic oligonucleotide
accaaauaauuugcuugcu

SEQ ID NO: 1355009 - RNA, 19 nt, Artificial Sequence
  Description of Artificial Sequence: Synthetic oligonucleotide
cuccuagagguaaucggca

SEQ ID NO: 1355010 - RNA, 19 nt, Artificial Sequence
  Description of Artificial Sequence: Synthetic oligonucleotide
aggcccauuacuuccccau

SEQ ID NO: 1355011 - RNA, 19 nt, Artificial Sequence
  Description of Artificial Sequence: Synthetic oligonucleotide
cuguggaccaccuuuaguu

SEQ ID NO: 1355012 - RNA, 19 nt, Artificial Sequence
  Description of Artificial Sequence: Synthetic oligonucleotide
ggcacaaguaacggaagug

SEQ ID NO: 1355013 - RNA, 19 nt, Artificial Sequence
  Description of Artificial Sequence: Synthetic oligonucleotide
ggugguuguuguauuauga

SEQ ID NO: 1355014 - RNA, 19 nt, Artificial Sequence
  Description of Artificial Sequence: Synthetic oligonucleotide
ccuaaauaccuuccugaac

SEQ ID NO: 1355015 - RNA, 19 nt, Artificial Sequence
  Description of Artificial Sequence: Synthetic oligonucleotide
augacuggguagugcauua

SEQ ID NO: 1355016 - RNA, 19 nt, Artificial Sequence
  Description of Artificial Sequence: Synthetic oligonucleotide
cuuggcgcucuauaaaacu

SEQ ID NO: 1355017 - RNA, 19 nt, Artificial Sequence
  Description of Artificial Sequence: Synthetic oligonucleotide
gugagcaagcuuccaccug

SEQ ID NO: 1355018 - RNA, 19 nt, Artificial Sequence
  Description of Artificial Sequence: Synthetic oligonucleotide
ggaaccucccaauuucaga

SEQ ID NO: 1355019 - RNA, 19 nt, Artificial Sequence
  Description of Artificial Sequence: Synthetic oligonucleotide
ggucagucauuucaaggga

SEQ ID NO: 1355020 - RNA, 19 nt, Artificial Sequence
  Description of Artificial Sequence: Synthetic oligonucleotide
aaauccuccuagagguaau

SEQ ID NO: 1355021 - RNA, 19 nt, Artificial Sequence
  Description of Artificial Sequence: Synthetic oligonucleotide
cgaccaauaaaacagaagu

SEQ ID NO: 1355022 - RNA, 19 nt, Artificial Sequence
  Description of Artificial Sequence: Synthetic oligonucleotide
cuuugccaacuuuucaaua

SEQ ID NO: 1355023 - RNA, 19 nt, Artificial Sequence
  Description of Artificial Sequence: Synthetic oligonucleotide
uuauccagauaaggaguua

SEQ ID NO: 1355024 - RNA, 19 nt, Artificial Sequence
  Description of Artificial Sequence: Synthetic oligonucleotide
cauugaucuuuacaugacu

SEQ ID NO: 1355025 - RNA, 19 nt, Artificial Sequence
  Description of Artificial Sequence: Synthetic oligonucleotide
cauaugguuuuaaugccau

SEQ ID NO: 1355026 - RNA, 19 nt, Artificial Sequence
  Description of Artificial Sequence: Synthetic oligonucleotide
aacagccaugcaacuaaaa

SEQ ID NO: 1355027 - RNA, 19 nt, Artificial Sequence
  Description of Artificial Sequence: Synthetic oligonucleotide
agucaaccucuugcaugcc

SEQ ID NO: 1355028 - RNA, 19 nt, Artificial Sequence
  Description of Artificial Sequence: Synthetic oligonucleotide
aaacgccauucugucauua

SEQ ID NO: 1355029 - RNA, 19 nt, Artificial Sequence
  Description of Artificial Sequence: Synthetic oligonucleotide
gcgaccaauaaaacagaag

SEQ ID NO: 1355030 - RNA, 19 nt, Artificial Sequence
  Description of Artificial Sequence: Synthetic oligonucleotide
cugucgggacacauugauc

SEQ ID NO: 1355031 - RNA, 19 nt, Artificial Sequence
  Description of Artificial Sequence: Synthetic oligonucleotide
cagaucaugugaaguaacu

SEQ ID NO: 1355032 - RNA, 19 nt, Artificial Sequence
  Description of Artificial Sequence: Synthetic oligonucleotide
acugggugguuguuguauu

SEQ ID NO: 1355033 - RNA, 19 nt, Artificial Sequence
  Description of Artificial Sequence: Synthetic oligonucleotide
caaauccuccuagagguaa

SEQ ID NO: 1355034 - RNA, 19 nt, Artificial Sequence
  Description of Artificial Sequence: Synthetic oligonucleotide
agauaucaccuagggagaa

SEQ ID NO: 1355035 - RNA, 19 nt, Artificial Sequence
  Description of Artificial Sequence: Synthetic oligonucleotide
guagccacugaaggggaac

SEQ ID NO: 1355036 - RNA, 19 nt, Artificial Sequence
  Description of Artificial Sequence: Synthetic oligonucleotide
gcacaaguaacggaaguga

SEQ ID NO: 1355037 - RNA, 19 nt, Artificial Sequence
  Description of Artificial Sequence: Synthetic oligonucleotide
gguaaagagaagccagugu

SEQ ID NO: 1355038 - RNA, 19 nt, Artificial Sequence
  Description of Artificial Sequence: Synthetic oligonucleotide
ccauuuauacuuugagaga

SEQ ID NO: 1355039 - RNA, 19 nt, Artificial Sequence
  Description of Artificial Sequence: Synthetic oligonucleotide
cuggguagugcauuagacu

SEQ ID NO: 1355040 - RNA, 19 nt, Artificial Sequence
  Description of Artificial Sequence: Synthetic oligonucleotide
ccauuacuuccccaugagc

SEQ ID NO: 1355041 - RNA, 19 nt, Artificial Sequence
  Description of Artificial Sequence: Synthetic oligonucleotide
ggccuaagcccuaaauacc

SEQ ID NO: 1355042 - RNA, 19 nt, Artificial Sequence
  Description of Artificial Sequence: Synthetic oligonucleotide
cagcauaaccuccaauucu

SEQ ID NO: 1355043 - RNA, 19 nt, Artificial Sequence
  Description of Artificial Sequence: Synthetic oligonucleotide
caggaacaaggcaaagcaa

SEQ ID NO: 1355044 - RNA, 19 nt, Artificial Sequence
  Description of Artificial Sequence: Synthetic oligonucleotide
agcgaccaauaaaacagaa

SEQ ID NO: 1355045 - RNA, 19 nt, Artificial Sequence
  Description of Artificial Sequence: Synthetic oligonucleotide
cagucugccaagucaaccu

SEQ ID NO: 1355046 - RNA, 19 nt, Artificial Sequence
  Description of Artificial Sequence: Synthetic oligonucleotide
gccuauauagauauauacu

SEQ ID NO: 1355047 - RNA, 19 nt, Artificial Sequence
  Description of Artificial Sequence: Synthetic oligonucleotide
cuccuuaagucauaugguu

SEQ ID NO: 1355048 - RNA, 19 nt, Artificial Sequence
  Description of Artificial Sequence: Synthetic oligonucleotide
aagcugcguucguaagcaa

SEQ ID NO: 1355049 - RNA, 19 nt, Artificial Sequence
  Description of Artificial Sequence: Synthetic oligonucleotide
gccaugucuaauacacuug

SEQ ID NO: 1355050 - RNA, 19 nt, Artificial Sequence
  Description of Artificial Sequence: Synthetic oligonucleotide
cuagagccacugucauaug

SEQ ID NO: 1355051 - RNA, 19 nt, Artificial Sequence
  Description of Artificial Sequence: Synthetic oligonucleotide
gcgcucuauaaaacuagag

SEQ ID NO: 1355052 - RNA, 19 nt, Artificial Sequence
  Description of Artificial Sequence: Synthetic oligonucleotide
cccauuacuuccccaugag

SEQ ID NO: 1355053 - RNA, 19 nt, Artificial Sequence
  Description of Artificial Sequence: Synthetic oligonucleotide
ccaccugaagcugcguucg

SEQ ID NO: 1355054 - RNA, 19 nt, Artificial Sequence
  Description of Artificial Sequence: Synthetic oligonucleotide
agucaccaggauauuggaa

SEQ ID NO: 1355055 - RNA, 19 nt, Artificial Sequence
  Description of Artificial Sequence: Synthetic oligonucleotide
agaacauguauggcuucuu

SEQ ID NO: 1355056 - RNA, 19 nt, Artificial Sequence
  Description of Artificial Sequence: Synthetic oligonucleotide
ugguuugaugcuggauuua

SEQ ID NO: 1355057 - RNA, 19 nt, Artificial Sequence
  Description of Artificial Sequence: Synthetic oligonucleotide
guuggccuaagcccuaaau

SEQ ID NO: 1355058 - RNA, 19 nt, Artificial Sequence
  Description of Artificial Sequence: Synthetic oligonucleotide
gaggcccauuacuucccca

SEQ ID NO: 1355059 - RNA, 19 nt, Artificial Sequence
  Description of Artificial Sequence: Synthetic oligonucleotide
gcugggguauuuaaaugca

SEQ ID NO: 1355060 - RNA, 19 nt, Artificial Sequence
  Description of Artificial Sequence: Synthetic oligonucleotide
augccaugaucuguuggaa

SEQ ID NO: 1355061 - RNA, 19 nt, Artificial Sequence
  Description of Artificial Sequence: Synthetic oligonucleotide
cuaagccacauucuucaau

SEQ ID NO: 1355062 - RNA, 19 nt, Artificial Sequence
  Description of Artificial Sequence: Synthetic oligonucleotide
gaccaccuuuaguuaccca

SEQ ID NO: 1355063 - RNA, 19 nt, Artificial Sequence
  Description of Artificial Sequence: Synthetic oligonucleotide
gcugcguucguaagcaauc

SEQ ID NO: 1355064 - RNA, 19 nt, Artificial Sequence
  Description of Artificial Sequence: Synthetic oligonucleotide
gcccauuacuuccccauga

SEQ ID NO: 1355065 - RNA, 19 nt, Artificial Sequence
  Description of Artificial Sequence: Synthetic oligonucleotide
cuuaagucauaugguuuua

SEQ ID NO: 1355066 - RNA, 19 nt, Artificial Sequence
  Description of Artificial Sequence: Synthetic oligonucleotide
gcauuagacuggcacaagu

SEQ ID NO: 1355067 - RNA, 19 nt, Artificial Sequence
  Description of Artificial Sequence: Synthetic oligonucleotide
ccauucugucauuaagcca

SEQ ID NO: 1355068 - RNA, 19 nt, Artificial Sequence
  Description of Artificial Sequence: Synthetic oligonucleotide
ucgccuccuuaagucauau

SEQ ID NO: 1355069 - RNA, 19 nt, Artificial Sequence
  Description of Artificial Sequence: Synthetic oligonucleotide
gucgcauucuuacuucauu

SEQ ID NO: 1355070 - RNA, 19 nt, Artificial Sequence
  Description of Artificial Sequence: Synthetic oligonucleotide
auccagauaaggaguuaua

SEQ ID NO: 1355071 - RNA, 19 nt, Artificial Sequence
  Description of Artificial Sequence: Synthetic oligonucleotide
agucgcauucuuacuucau

SEQ ID NO: 1355072 - RNA, 19 nt, Artificial Sequence
  Description of Artificial Sequence: Synthetic oligonucleotide
ggcccauuacuuccccaug

SEQ ID NO: 1355073 - RNA, 19 nt, Artificial Sequence
  Description of Artificial Sequence: Synthetic oligonucleotide
cugggugguuguuguauua

SEQ ID NO: 1355074 - RNA, 19 nt, Artificial Sequence
  Description of Artificial Sequence: Synthetic oligonucleotide
gccuacucaaauaagcaau

SEQ ID NO: 1355075 - RNA, 19 nt, Artificial Sequence
  Description of Artificial Sequence: Synthetic oligonucleotide
ccugaagcugcguucguaa

SEQ ID NO: 1355076 - RNA, 19 nt, Artificial Sequence
  Description of Artificial Sequence: Synthetic oligonucleotide
ccuuaagucauaugguuuu

SEQ ID NO: 1355077 - RNA, 19 nt, Artificial Sequence
  Description of Artificial Sequence: Synthetic oligonucleotide
cccuaaauaccuuccugaa

SEQ ID NO: 1355078 - RNA, 19 nt, Artificial Sequence
  Description of Artificial Sequence: Synthetic oligonucleotide
ggcgcucuauaaaacuaga

SEQ ID NO: 1355079 - RNA, 19 nt, Artificial Sequence
  Description of Artificial Sequence: Synthetic oligonucleotide
ccauugcaauaaagcgacc

SEQ ID NO: 1355080 - RNA, 19 nt, Artificial Sequence
  Description of Artificial Sequence: Synthetic oligonucleotide
gggacacauugaucuuuac

SEQ ID NO: 1355081 - RNA, 19 nt, Artificial Sequence
  Description of Artificial Sequence: Synthetic oligonucleotide
gccuaagcccuaaauaccu

SEQ ID NO: 1355082 - RNA, 19 nt, Artificial Sequence
  Description of Artificial Sequence: Synthetic oligonucleotide
gcguucguaagcaaucugu

SEQ ID NO: 1355083 - RNA, 19 nt, Artificial Sequence
  Description of Artificial Sequence: Synthetic oligonucleotide
cuugcaaggccaccauaau

SEQ ID NO: 1355084 - RNA, 19 nt, Artificial Sequence
  Description of Artificial Sequence: Synthetic oligonucleotide
gguuugaugcuggauuuau

SEQ ID NO: 1355085 - RNA, 19 nt, Artificial Sequence
  Description of Artificial Sequence: Synthetic oligonucleotide
gagcaagcuuccaccugaa

SEQ ID NO: 1355086 - RNA, 19 nt, Artificial Sequence
  Description of Artificial Sequence: Synthetic oligonucleotide
gaguuggccuaagcccuaa

SEQ ID NO: 1355087 - RNA, 19 nt, Artificial Sequence
  Description of Artificial Sequence: Synthetic oligonucleotide
agaguuggccuaagcccua

SEQ ID NO: 1355088 - RNA, 19 nt, Artificial Sequence
  Description of Artificial Sequence: Synthetic oligonucleotide
guagugcauuagacuggca

SEQ ID NO: 1355089 - RNA, 19 nt, Artificial Sequence
  Description of Artificial Sequence: Synthetic oligonucleotide
cacugggugguuguuguau

SEQ ID NO: 1355090 - RNA, 19 nt, Artificial Sequence
  Description of Artificial Sequence: Synthetic oligonucleotide
cugcguucguaagcaaucu

SEQ ID NO: 1355091 - RNA, 19 nt, Artificial Sequence
  Description of Artificial Sequence: Synthetic oligonucleotide
aucgccuccuuaagucaua

SEQ ID NO: 1355092 - RNA, 19 nt, Artificial Sequence
  Description of Artificial Sequence: Synthetic oligonucleotide
cccuggacaacaggaacaa

SEQ ID NO: 1355093 - RNA, 19 nt, Artificial Sequence
  Description of Artificial Sequence: Synthetic oligonucleotide
ccuaagcccuaaauaccuu

SEQ ID NO: 1355094 - RNA, 19 nt, Artificial Sequence
  Description of Artificial Sequence: Synthetic oligonucleotide
aacaguaucauauuaacuc

SEQ ID NO: 1355095 - RNA, 19 nt, Artificial Sequence
  Description of Artificial Sequence: Synthetic oligonucleotide
aauacauccaggcaguugc

SEQ ID NO: 1355096 - RNA, 19 nt, Artificial Sequence
  Description of Artificial Sequence: Synthetic oligonucleotide
aauuaagaguccuucauac

SEQ ID NO: 1355097 - RNA, 19 nt, Artificial Sequence
  Description of Artificial Sequence: Synthetic oligonucleotide
aauaaaccaugauaaaagc

SEQ ID NO: 1355098 - RNA, 19 nt, Artificial Sequence
  Description of Artificial Sequence: Synthetic oligonucleotide
uaaauuucauugaagaacc

SEQ ID NO: 1355099 - RNA, 19 nt, Artificial Sequence
  Description of Artificial Sequence: Synthetic oligonucleotide
aagguauuaauugaguagc

SEQ ID NO: 1355100 - RNA, 19 nt, Artificial Sequence
  Description of Artificial Sequence: Synthetic oligonucleotide
aaauacagcgcuugcaccc

SEQ ID NO: 1355101 - RNA, 19 nt, Artificial Sequence
  Description of Artificial Sequence: Synthetic oligonucleotide
aaccauguaacaauaaggc

SEQ ID NO: 1355102 - RNA, 19 nt, Artificial Sequence
  Description of Artificial Sequence: Synthetic oligonucleotide
uucuuuaggacacugaaug

SEQ ID NO: 1355103 - RNA, 19 nt, Artificial Sequence
  Description of Artificial Sequence: Synthetic oligonucleotide
ugaaaauagccgcaggugg

SEQ ID NO: 1355104 - RNA, 19 nt, Artificial Sequence
  Description of Artificial Sequence: Synthetic oligonucleotide
augaguaccauguagauga

SEQ ID NO: 1355105 - RNA, 19 nt, Artificial Sequence
  Description of Artificial Sequence: Synthetic oligonucleotide
aacagaucaccucccaucc

SEQ ID NO: 1355106 - RNA, 19 nt, Artificial Sequence
  Description of Artificial Sequence: Synthetic oligonucleotide
uuugcccuaagacagagcc

SEQ ID NO: 1355107 - RNA, 19 nt, Artificial Sequence
  Description of Artificial Sequence: Synthetic oligonucleotide
aaucucuaagccaaggccc

SEQ ID NO: 1355108 - RNA, 19 nt, Artificial Sequence
  Description of Artificial Sequence: Synthetic oligonucleotide
uuucacuuggaauuaagag

SEQ ID NO: 1355109 - RNA, 19 nt, Artificial Sequence
  Description of Artificial Sequence: Synthetic oligonucleotide
gauucugaagacaacauag

SEQ ID NO: 1355110 - RNA, 19 nt, Artificial Sequence
  Description of Artificial Sequence: Synthetic oligonucleotide
uugacguucaagcugaaca

SEQ ID NO: 1355111 - RNA, 19 nt, Artificial Sequence
  Description of Artificial Sequence: Synthetic oligonucleotide
guaacaauaaggcugaguc

SEQ ID NO: 1355112 - RNA, 19 nt, Artificial Sequence
  Description of Artificial Sequence: Synthetic oligonucleotide
acugaaugcaccguuagcc

SEQ ID NO: 1355113 - RNA, 19 nt, Artificial Sequence
  Description of Artificial Sequence: Synthetic oligonucleotide
uuaagaguccuucauacgu

SEQ ID NO: 1355114 - RNA, 19 nt, Artificial Sequence
  Description of Artificial Sequence: Synthetic oligonucleotide
aaaguguuuacaccaaaca

SEQ ID NO: 1355115 - RNA, 19 nt, Artificial Sequence
  Description of Artificial Sequence: Synthetic oligonucleotide
aaaagcuucaguucuggcu

SEQ ID NO: 1355116 - RNA, 19 nt, Artificial Sequence
  Description of Artificial Sequence: Synthetic oligonucleotide
guauuaauugaguagcugc

SEQ ID NO: 1355117 - RNA, 19 nt, Artificial Sequence
  Description of Artificial Sequence: Synthetic oligonucleotide
aguaagaguacguccagac

SEQ ID NO: 1355118 - RNA, 19 nt, Artificial Sequence
  Description of Artificial Sequence: Synthetic oligonucleotide
aaaauggacugccuguauc

SEQ ID NO: 1355119 - RNA, 19 nt, Artificial Sequence
  Description of Artificial Sequence: Synthetic oligonucleotide
aacggagguagucuguggc

SEQ ID NO: 1355120 - RNA, 19 nt, Artificial Sequence
  Description of Artificial Sequence: Synthetic oligonucleotide
uaaucucuaagccaaggcc

SEQ ID NO: 1355121 - RNA, 19 nt, Artificial Sequence
  Description of Artificial Sequence: Synthetic oligonucleotide
uaaaccaugauaaaagcuu

SEQ ID NO: 1355122 - RNA, 19 nt, Artificial Sequence
  Description of Artificial Sequence: Synthetic oligonucleotide
accaaguaagaguacgucc

SEQ ID NO: 1355123 - RNA, 19 nt, Artificial Sequence
  Description of Artificial Sequence: Synthetic oligonucleotide
gauaacggcacuuugagaa

SEQ ID NO: 1355124 - RNA, 19 nt, Artificial Sequence
  Description of Artificial Sequence: Synthetic oligonucleotide
uggguuuucaguaacgaug

SEQ ID NO: 1355125 - RNA, 19 nt, Artificial Sequence
  Description of Artificial Sequence: Synthetic oligonucleotide
guagauauaggaguaauag

SEQ ID NO: 1355126 - RNA, 19 nt, Artificial Sequence
  Description of Artificial Sequence: Synthetic oligonucleotide
uuuucaguaacgaugccac

SEQ ID NO: 1355127 - RNA, 19 nt, Artificial Sequence
  Description of Artificial Sequence: Synthetic oligonucleotide
uuauauaaccaacugcaaa

SEQ ID NO: 1355128 - RNA, 19 nt, Artificial Sequence
  Description of Artificial Sequence: Synthetic oligonucleotide
guaacuugugacuuucugg

SEQ ID NO: 1355129 - RNA, 19 nt, Artificial Sequence
  Description of Artificial Sequence: Synthetic oligonucleotide
uguggcaaggaacacagga

SEQ ID NO: 1355130 - RNA, 19 nt, Artificial Sequence
  Description of Artificial Sequence: Synthetic oligonucleotide
caagguauuaauugaguag

SEQ ID NO: 1355131 - RNA, 19 nt, Artificial Sequence
  Description of Artificial Sequence: Synthetic oligonucleotide
  modified_base (12)..(12): a, c, u, g, unknown or other
aaucccugggunuaguuca

SEQ ID NO: 1355132 - RNA, 19 nt, Artificial Sequence
  Description of Artificial Sequence: Synthetic oligonucleotide
uauuaauugaguagcugcu

SEQ ID NO: 1355133 - RNA, 19 nt, Artificial Sequence
  Description of Artificial Sequence: Synthetic oligonucleotide
ucauacguuauucuuaaau

SEQ ID NO: 1355134 - RNA, 19 nt, Artificial Sequence
  Description of Artificial Sequence: Synthetic oligonucleotide
aacuagaauagccagcaau

SEQ ID NO: 1355135 - RNA, 19 nt, Artificial Sequence
  Description of Artificial Sequence: Synthetic oligonucleotide
uaucauauuaacuccugga

SEQ ID NO: 1355136 - RNA, 19 nt, Artificial Sequence
  Description of Artificial Sequence: Synthetic oligonucleotide
aggaguaauaggcaauuuc

SEQ ID NO: 1355137 - RNA, 19 nt, Artificial Sequence
  Description of Artificial Sequence: Synthetic oligonucleotide
aaagcuucaguucuggcuu

SEQ ID NO: 1355138 - RNA, 19 nt, Artificial Sequence
  Description of Artificial Sequence: Synthetic oligonucleotide
aauuucauugaagaaccug

SEQ ID NO: 1355139 - RNA, 19 nt, Artificial Sequence
  Description of Artificial Sequence: Synthetic oligonucleotide
uagaugauucugaagacaa

SEQ ID NO: 1355140 - RNA, 19 nt, Artificial Sequence
  Description of Artificial Sequence: Synthetic oligonucleotide
augaccgcaaaguaacugg

SEQ ID NO: 1355141 - RNA, 19 nt, Artificial Sequence
  Description of Artificial Sequence: Synthetic oligonucleotide
acaacauaggauguauagc

SEQ ID NO: 1355142 - RNA, 19 nt, Artificial Sequence
  Description of Artificial Sequence: Synthetic oligonucleotide
aauguggugaaagaagaga

SEQ ID NO: 1355143 - RNA, 19 nt, Artificial Sequence
  Description of Artificial Sequence: Synthetic oligonucleotide
caggaaggugguuagaugc

SEQ ID NO: 1355144 - RNA, 19 nt, Artificial Sequence
  Description of Artificial Sequence: Synthetic oligonucleotide
gagauugacguucaagcug

SEQ ID NO: 1355145 - RNA, 19 nt, Artificial Sequence
  Description of Artificial Sequence: Synthetic oligonucleotide
aagacagagcccuacugug

SEQ ID NO: 1355146 - RNA, 19 nt, Artificial Sequence
  Description of Artificial Sequence: Synthetic oligonucleotide
aaaccaugauaaaagcuuc

SEQ ID NO: 1355147 - RNA, 19 nt, Artificial Sequence
  Description of Artificial Sequence: Synthetic oligonucleotide
auuaagaguccuucauacg

SEQ ID NO: 1355148 - RNA, 19 nt, Artificial Sequence
  Description of Artificial Sequence: Synthetic oligonucleotide
ugugguaaucucuaagcca

SEQ ID NO: 1355149 - RNA, 19 nt, Artificial Sequence
  Description of Artificial Sequence: Synthetic oligonucleotide
uucuacaguaacuugugac

SEQ ID NO: 1355150 - RNA, 19 nt, Artificial Sequence
  Description of Artificial Sequence: Synthetic oligonucleotide
aagccuaccaagguggcac

SEQ ID NO: 1355151 - RNA, 19 nt, Artificial Sequence
  Description of Artificial Sequence: Synthetic oligonucleotide
aaaagggguaugcaaacau

SEQ ID NO: 1355152 - RNA, 19 nt, Artificial Sequence
  Description of Artificial Sequence: Synthetic oligonucleotide
uacguuauucuuaaauuaa

SEQ ID NO: 1355153 - RNA, 19 nt, Artificial Sequence
  Description of Artificial Sequence: Synthetic oligonucleotide
aaguaaaagggguaugcaa

SEQ ID NO: 1355154 - RNA, 19 nt, Artificial Sequence
  Description of Artificial Sequence: Synthetic oligonucleotide
ugaaguaaaagggguaugc

SEQ ID NO: 1355155 - RNA, 19 nt, Artificial Sequence
  Description of Artificial Sequence: Synthetic oligonucleotide
aaauauuuaucugaaccau

SEQ ID NO: 1355156 - RNA, 19 nt, Artificial Sequence
  Description of Artificial Sequence: Synthetic oligonucleotide
gaagaauuccaagaacuag

SEQ ID NO: 1355157 - RNA, 19 nt, Artificial Sequence
  Description of Artificial Sequence: Synthetic oligonucleotide
caagaacuagaauagccag

SEQ ID NO: 1355158 - RNA, 19 nt, Artificial Sequence
  Description of Artificial Sequence: Synthetic oligonucleotide
  modified_base (2)..(2): a, c, u, g, unknown or other
unuaguucaccacuugaaa

SEQ ID NO: 1355159 - RNA, 19 nt, Artificial Sequence
  Description of Artificial Sequence: Synthetic oligonucleotide
ucaccucccauccaggaag

SEQ ID NO: 1355160 - RNA, 19 nt, Artificial Sequence
  Description of Artificial Sequence: Synthetic oligonucleotide
aguaauaggcaauuucagu

SEQ ID NO: 1355161 - RNA, 19 nt, Artificial Sequence
  Description of Artificial Sequence: Synthetic oligonucleotide
aagaauuccaagaacuaga

SEQ ID NO: 1355162 - RNA, 19 nt, Artificial Sequence
  Description of Artificial Sequence: Synthetic oligonucleotide
uguauagcacacccaaaug

SEQ ID NO: 1355163 - RNA, 19 nt, Artificial Sequence
  Description of Artificial Sequence: Synthetic oligonucleotide
aauagccgcagguggagag

SEQ ID NO: 1355164 - RNA, 19 nt, Artificial Sequence
  Description of Artificial Sequence: Synthetic oligonucleotide
ugacguucaagcugaacag

SEQ ID NO: 1355165 - RNA, 19 nt, Artificial Sequence
  Description of Artificial Sequence: Synthetic oligonucleotide
auagccagcaauccuuggg

SEQ ID NO: 1355166 - RNA, 19 nt, Artificial Sequence
  Description of Artificial Sequence: Synthetic oligonucleotide
ugugcagaguccuugcuug

SEQ ID NO: 1355167 - RNA, 19 nt, Artificial Sequence
  Description of Artificial Sequence: Synthetic oligonucleotide
agcagcaugaaccauguaa

SEQ ID NO: 1355168 - RNA, 19 nt, Artificial Sequence
  Description of Artificial Sequence: Synthetic oligonucleotide
uguagauaacggcacuuug

SEQ ID NO: 1355169 - RNA, 19 nt, Artificial Sequence
  Description of Artificial Sequence: Synthetic oligonucleotide
gaagagacucuucuguggc

SEQ ID NO: 1355170 - RNA, 19 nt, Artificial Sequence
  Description of Artificial Sequence: Synthetic oligonucleotide
cuugcacccagcaagguug

SEQ ID NO: 1355171 - RNA, 19 nt, Artificial Sequence
  Description of Artificial Sequence: Synthetic oligonucleotide
aaggcccuuguuaucaacc

SEQ ID NO: 1355172 - RNA, 19 nt, Artificial Sequence
  Description of Artificial Sequence: Synthetic oligonucleotide
ucucuaacuuauaaaugac

SEQ ID NO: 1355173 - RNA, 19 nt, Artificial Sequence
  Description of Artificial Sequence: Synthetic oligonucleotide
ugacacaaggauuugcccu

SEQ ID NO: 1355174 - RNA, 19 nt, Artificial Sequence
  Description of Artificial Sequence: Synthetic oligonucleotide
uuaacuccuggaauacaag

SEQ ID NO: 1355175 - RNA, 19 nt, Artificial Sequence
  Description of Artificial Sequence: Synthetic oligonucleotide
guaucauauuaacuccugg

SEQ ID NO: 1355176 - RNA, 19 nt, Artificial Sequence
  Description of Artificial Sequence: Synthetic oligonucleotide
aaagaggagcaccaaguaa

SEQ ID NO: 1355177 - RNA, 19 nt, Artificial Sequence
  Description of Artificial Sequence: Synthetic oligonucleotide
agagaacagaggaauagcg

SEQ ID NO: 1355178 - RNA, 19 nt, Artificial Sequence
  Description of Artificial Sequence: Synthetic oligonucleotide
ccauguaacaauaaggcug

SEQ ID NO: 1355179 - RNA, 19 nt, Artificial Sequence
  Description of Artificial Sequence: Synthetic oligonucleotide
uaacaauaaggcugagucc

SEQ ID NO: 1355180 - RNA, 19 nt, Artificial Sequence
  Description of Artificial Sequence: Synthetic oligonucleotide
aaggugguuagaugcuggg

SEQ ID NO: 1355181 - RNA, 19 nt, Artificial Sequence
  Description of Artificial Sequence: Synthetic oligonucleotide
cauaggauguauagcacac

SEQ ID NO: 1355182 - RNA, 19 nt, Artificial Sequence
  Description of Artificial Sequence: Synthetic oligonucleotide
ugcaccguuagccaggaaa

SEQ ID NO: 1355183 - RNA, 19 nt, Artificial Sequence
  Description of Artificial Sequence: Synthetic oligonucleotide
uuuuguaccuugaugccau

SEQ ID NO: 1355184 - RNA, 19 nt, Artificial Sequence
  Description of Artificial Sequence: Synthetic oligonucleotide
ucgaccacacuguagauau

SEQ ID NO: 1355185 - RNA, 19 nt, Artificial Sequence
  Description of Artificial Sequence: Synthetic oligonucleotide
aagggcguaacguuccaug

SEQ ID NO: 1355186 - RNA, 19 nt, Artificial Sequence
  Description of Artificial Sequence: Synthetic oligonucleotide
guaaucucuaagccaaggc

SEQ ID NO: 1355187 - RNA, 19 nt, Artificial Sequence
  Description of Artificial Sequence: Synthetic oligonucleotide
ugaaugcaccguuagccag

SEQ ID NO: 1355188 - RNA, 19 nt, Artificial Sequence
  Description of Artificial Sequence: Synthetic oligonucleotide
ugagguuugcagcaaucug

SEQ ID NO: 1355189 - RNA, 19 nt, Artificial Sequence
  Description of Artificial Sequence: Synthetic oligonucleotide
gggagauugacguucaagc

SEQ ID NO: 1355190 - RNA, 19 nt, Artificial Sequence
  Description of Artificial Sequence: Synthetic oligonucleotide
acauaggauguauagcaca

SEQ ID NO: 1355191 - RNA, 19 nt, Artificial Sequence
  Description of Artificial Sequence: Synthetic oligonucleotide
uuaauugaguagcugcuuu

SEQ ID NO: 1355192 - RNA, 19 nt, Artificial Sequence
  Description of Artificial Sequence: Synthetic oligonucleotide
auauaggaguaauaggcaa

SEQ ID NO: 1355193 - RNA, 19 nt, Artificial Sequence
  Description of Artificial Sequence: Synthetic oligonucleotide
uucaguaacgaugccacca

SEQ ID NO: 1355194 - RNA, 19 nt, Artificial Sequence
  Description of Artificial Sequence: Synthetic oligonucleotide
uauagcacacccaaauguu

SEQ ID NO: 1355195 - RNA, 19 nt, Artificial Sequence
  Description of Artificial Sequence: Synthetic oligonucleotide
gagagggcccaccacacgg

SEQ ID NO: 1355196 - RNA, 19 nt, Artificial Sequence
  Description of Artificial Sequence: Synthetic oligonucleotide
ucaccuucucccacaaucc

SEQ ID NO: 1355197 - RNA, 19 nt, Artificial Sequence
  Description of Artificial Sequence: Synthetic oligonucleotide
cauuuuguaccuugaugcc

SEQ ID NO: 1355198 - RNA, 19 nt, Artificial Sequence
  Description of Artificial Sequence: Synthetic oligonucleotide
uuugaaguaaaagggguau

SEQ ID NO: 1355199 - RNA, 19 nt, Artificial Sequence
  Description of Artificial Sequence: Synthetic oligonucleotide
aaaauagccgcagguggag

SEQ ID NO: 1355200 - RNA, 19 nt, Artificial Sequence
  Description of Artificial Sequence: Synthetic oligonucleotide
acuugaaaauagccgcagg

SEQ ID NO: 1355201 - RNA, 19 nt, Artificial Sequence
  Description of Artificial Sequence: Synthetic oligonucleotide
guaagaguacguccagacg

SEQ ID NO: 1355202 - RNA, 19 nt, Artificial Sequence
  Description of Artificial Sequence: Synthetic oligonucleotide
ucaagcugaacaguggcca

SEQ ID NO: 1355203 - RNA, 19 nt, Artificial Sequence
  Description of Artificial Sequence: Synthetic oligonucleotide
aggagcaccaaguaagagu

SEQ ID NO: 1355204 - RNA, 19 nt, Artificial Sequence
  Description of Artificial Sequence: Synthetic oligonucleotide
gaguaauaggcaauuucag

SEQ ID NO: 1355205 - RNA, 19 nt, Artificial Sequence
  Description of Artificial Sequence: Synthetic oligonucleotide
gucauuucuccccaaguug

SEQ ID NO: 1355206 - RNA, 19 nt, Artificial Sequence
  Description of Artificial Sequence: Synthetic oligonucleotide
cauguaacaauaaggcuga

SEQ ID NO: 1355207 - RNA, 19 nt, Artificial Sequence
  Description of Artificial Sequence: Synthetic oligonucleotide
agcaccaaguaagaguacg

SEQ ID NO: 1355208 - RNA, 19 nt, Artificial Sequence
  Description of Artificial Sequence: Synthetic oligonucleotide
aauaaggcugagucccuga

SEQ ID NO: 1355209 - RNA, 19 nt, Artificial Sequence
  Description of Artificial Sequence: Synthetic oligonucleotide
aagcucauaaauaaaccau

SEQ ID NO: 1355210 - RNA, 19 nt, Artificial Sequence
  Description of Artificial Sequence: Synthetic oligonucleotide
acaagguauuaauugagua

SEQ ID NO: 1355211 - RNA, 19 nt, Artificial Sequence
  Description of Artificial Sequence: Synthetic oligonucleotide
caaauacagcgcuugcacc

SEQ ID NO: 1355212 - RNA, 19 nt, Artificial Sequence
  Description of Artificial Sequence: Synthetic oligonucleotide
guaaaagggguaugcaaac

SEQ ID NO: 1355213 - RNA, 19 nt, Artificial Sequence
  Description of Artificial Sequence: Synthetic oligonucleotide
gaaaguguuuacaccaaac

SEQ ID NO: 1355214 - RNA, 19 nt, Artificial Sequence
  Description of Artificial Sequence: Synthetic oligonucleotide
ugauucugaagacaacaua

SEQ ID NO: 1355215 - RNA, 19 nt, Artificial Sequence
  Description of Artificial Sequence: Synthetic oligonucleotide
aggaauagcgucauuucuc

SEQ ID NO: 1355216 - RNA, 19 nt, Artificial Sequence
  Description of Artificial Sequence: Synthetic oligonucleotide
ugacaggcuuguaacggag

SEQ ID NO: 1355217 - RNA, 19 nt, Artificial Sequence
  Description of Artificial Sequence: Synthetic oligonucleotide
gugugguaaucucuaagcc

SEQ ID NO: 1355218 - RNA, 19 nt, Artificial Sequence
  Description of Artificial Sequence: Synthetic oligonucleotide
aagaguacguccagacggg

SEQ ID NO: 1355219 - RNA, 19 nt, Artificial Sequence
  Description of Artificial Sequence: Synthetic oligonucleotide
ugcuggguuuucaguaacg

SEQ ID NO: 1355220 - RNA, 19 nt, Artificial Sequence
  Description of Artificial Sequence: Synthetic oligonucleotide
auaggauguauagcacacc

SEQ ID NO: 1355221 - RNA, 19 nt, Artificial Sequence
  Description of Artificial Sequence: Synthetic oligonucleotide
guugcuauggugaugagua

SEQ ID NO: 1355222 - RNA, 19 nt, Artificial Sequence
  Description of Artificial Sequence: Synthetic oligonucleotide
uuguaacggagguagucug

SEQ ID NO: 1355223 - RNA, 19 nt, Artificial Sequence
  Description of Artificial Sequence: Synthetic oligonucleotide
ugaccgcaaaguaacuggc

SEQ ID NO: 1355224 - RNA, 19 nt, Artificial Sequence
  Description of Artificial Sequence: Synthetic oligonucleotide
uccaugguauacacugcag

SEQ ID NO: 1355225 - RNA, 19 nt, Artificial Sequence
  Description of Artificial Sequence: Synthetic oligonucleotide
aguaaaagggguaugcaaa

SEQ ID NO: 1355226 - RNA, 19 nt, Artificial Sequence
  Description of Artificial Sequence: Synthetic oligonucleotide
uauacacugcagcagcaau

SEQ ID NO: 1355227 - RNA, 19 nt, Artificial Sequence
  Description of Artificial Sequence: Synthetic oligonucleotide
ugcccuaagacagagcccu

SEQ ID NO: 1355228 - RNA, 19 nt, Artificial Sequence
  Description of Artificial Sequence: Synthetic oligonucleotide
aauggacugccuguaucuc

SEQ ID NO: 1355229 - RNA, 19 nt, Artificial Sequence
  Description of Artificial Sequence: Synthetic oligonucleotide
ugaaaguguuuacaccaaa

SEQ ID NO: 1355230 - RNA, 19 nt, Artificial Sequence
  Description of Artificial Sequence: Synthetic oligonucleotide
guuagggaguaguugcuug

SEQ ID NO: 1355231 - RNA, 19 nt, Artificial Sequence
  Description of Artificial Sequence: Synthetic oligonucleotide
auaaccaacugcaaauaca

SEQ ID NO: 1355232 - RNA, 19 nt, Artificial Sequence
  Description of Artificial Sequence: Synthetic oligonucleotide
aguaacuggcauaaaucag

SEQ ID NO: 1355233 - RNA, 19 nt, Artificial Sequence
  Description of Artificial Sequence: Synthetic oligonucleotide
auaacggcacuuugagaag

SEQ ID NO: 1355234 - RNA, 19 nt, Artificial Sequence
  Description of Artificial Sequence: Synthetic oligonucleotide
agcucauaaauaaaccaug

SEQ ID NO: 1355235 - RNA, 19 nt, Artificial Sequence
  Description of Artificial Sequence: Synthetic oligonucleotide
ggaauagcgucauuucucc

SEQ ID NO: 1355236 - RNA, 19 nt, Artificial Sequence
  Description of Artificial Sequence: Synthetic oligonucleotide
gagagaacagaggaauagc

SEQ ID NO: 1355237 - RNA, 19 nt, Artificial Sequence
  Description of Artificial Sequence: Synthetic oligonucleotide
cacccagcaagguugacac

SEQ ID NO: 1355238 - RNA, 19 nt, Artificial Sequence
  Description of Artificial Sequence: Synthetic oligonucleotide
gaugaccgcaaaguaacug

SEQ ID NO: 1355239 - RNA, 19 nt, Artificial Sequence
  Description of Artificial Sequence: Synthetic oligonucleotide
aagggguaugcaaacauaa

SEQ ID NO: 1355240 - RNA, 19 nt, Artificial Sequence
  Description of Artificial Sequence: Synthetic oligonucleotide
gauuugcccuaagacagag

SEQ ID NO: 1355241 - RNA, 19 nt, Artificial Sequence
  Description of Artificial Sequence: Synthetic oligonucleotide
gaauuaagaguccuucaua

SEQ ID NO: 1355242 - RNA, 19 nt, Artificial Sequence
  Description of Artificial Sequence: Synthetic oligonucleotide
agauugacguucaagcuga

SEQ ID NO: 1355243 - RNA, 19 nt, Artificial Sequence
  Description of Artificial Sequence: Synthetic oligonucleotide
aacggcacuuugagaaggc

SEQ ID NO: 1355244 - RNA, 19 nt, Artificial Sequence
  Description of Artificial Sequence: Synthetic oligonucleotide
gaaugcaccguuagccagg

SEQ ID NO: 1355245 - RNA, 19 nt, Artificial Sequence
  Description of Artificial Sequence: Synthetic oligonucleotide
aaggcaucaccuucuccca

SEQ ID NO: 1355246 - RNA, 19 nt, Artificial Sequence
  Description of Artificial Sequence: Synthetic oligonucleotide
accaugauaaaagcuucag

SEQ ID NO: 1355247 - RNA, 19 nt, Artificial Sequence
  Description of Artificial Sequence: Synthetic oligonucleotide
guauagcacacccaaaugu

SEQ ID NO: 1355248 - RNA, 19 nt, Artificial Sequence
  Description of Artificial Sequence: Synthetic oligonucleotide
uguaacggagguagucugu

SEQ ID NO: 1355249 - RNA, 19 nt, Artificial Sequence
  Description of Artificial Sequence: Synthetic oligonucleotide
aagaguccuucauacguua

SEQ ID NO: 1355250 - RNA, 19 nt, Artificial Sequence
  Description of Artificial Sequence: Synthetic oligonucleotide
uaccuugaugccauucacu

SEQ ID NO: 1355251 - RNA, 19 nt, Artificial Sequence
  Description of Artificial Sequence: Synthetic oligonucleotide
auuaacuccuggaauacaa

SEQ ID NO: 1355252 - RNA, 19 nt, Artificial Sequence
  Description of Artificial Sequence: Synthetic oligonucleotide
ucaguaacgaugccaccau

SEQ ID NO: 1355253 - RNA, 19 nt, Artificial Sequence
  Description of Artificial Sequence: Synthetic oligonucleotide
auuuuguaccuugaugcca

SEQ ID NO: 1355254 - RNA, 19 nt, Artificial Sequence
  Description of Artificial Sequence: Synthetic oligonucleotide
uuugagaaggcaucaccuu

SEQ ID NO: 1355255 - RNA, 19 nt, Artificial Sequence
  Description of Artificial Sequence: Synthetic oligonucleotide
uaacggagguagucugugg

SEQ ID NO: 1355256 - RNA, 19 nt, Artificial Sequence
  Description of Artificial Sequence: Synthetic oligonucleotide
guaacguuccaugcugagg

SEQ ID NO: 1355257 - RNA, 19 nt, Artificial Sequence
  Description of Artificial Sequence: Synthetic oligonucleotide
aguaacagaucaccuccca

SEQ ID NO: 1355258 - RNA, 19 nt, Artificial Sequence
  Description of Artificial Sequence: Synthetic oligonucleotide
uaagaguccuucauacguu

SEQ ID NO: 1355259 - RNA, 19 nt, Artificial Sequence
  Description of Artificial Sequence: Synthetic oligonucleotide
aagagacucuucuguggca

SEQ ID NO: 1355260 - RNA, 19 nt, Artificial Sequence
  Description of Artificial Sequence: Synthetic oligonucleotide
agggaguaguugcuugagg

SEQ ID NO: 1355261 - RNA, 19 nt, Artificial Sequence
  Description of Artificial Sequence: Synthetic oligonucleotide
uaaaauggacugccuguau

SEQ ID NO: 1355262 - RNA, 19 nt, Artificial Sequence
  Description of Artificial Sequence: Synthetic oligonucleotide
cuugagcagcauguuaggg

SEQ ID NO: 1355263 - RNA, 19 nt, Artificial Sequence
  Description of Artificial Sequence: Synthetic oligonucleotide
cuucauacguuauucuuaa

SEQ ID NO: 1355264 - RNA, 19 nt, Artificial Sequence
  Description of Artificial Sequence: Synthetic oligonucleotide
aguaucauauuaacuccug

SEQ ID NO: 1355265 - RNA, 19 nt, Artificial Sequence
  Description of Artificial Sequence: Synthetic oligonucleotide
gcaagguugacacagccuc

SEQ ID NO: 1355266 - RNA, 19 nt, Artificial Sequence
  Description of Artificial Sequence: Synthetic oligonucleotide
ggagagaacagaggaauag

SEQ ID NO: 1355267 - RNA, 19 nt, Artificial Sequence
  Description of Artificial Sequence: Synthetic oligonucleotide
  modified_base (13)..(13): a, c, u, g, unknown or other
caaucccugggunuaguuc

SEQ ID NO: 1355268 - RNA, 19 nt, Artificial Sequence
  Description of Artificial Sequence: Synthetic oligonucleotide
ccaacugcaaauacagcgc

SEQ ID NO: 1355269 - RNA, 19 nt, Artificial Sequence
  Description of Artificial Sequence: Synthetic oligonucleotide
accgcaaaguaacuggcau

SEQ ID NO: 1355270 - RNA, 19 nt, Artificial Sequence
  Description of Artificial Sequence: Synthetic oligonucleotide
acuucuacaguaacuugug

SEQ ID NO: 1355271 - RNA, 19 nt, Artificial Sequence
  Description of Artificial Sequence: Synthetic oligonucleotide
uggcacuucuacaguaacu

SEQ ID NO: 1355272 - RNA, 19 nt, Artificial Sequence
  Description of Artificial Sequence: Synthetic oligonucleotide
  modified_base (4)..(4): a, c, u, g, unknown or other
ggunuaguucaccacuuga

SEQ ID NO: 1355273 - RNA, 19 nt, Artificial Sequence
  Description of Artificial Sequence: Synthetic oligonucleotide
uauuaacuccuggaauaca

SEQ ID NO: 1355274 - RNA, 19 nt, Artificial Sequence
  Description of Artificial Sequence: Synthetic oligonucleotide
gaauagcgucauuucuccc

SEQ ID NO: 1355275 - RNA, 19 nt, Artificial Sequence
  Description of Artificial Sequence: Synthetic oligonucleotide
ugagcagggucugcaaugc

SEQ ID NO: 1355276 - RNA, 19 nt, Artificial Sequence
  Description of Artificial Sequence: Synthetic oligonucleotide
cguuauucuuaaauuaaag

SEQ ID NO: 1355277 - RNA, 19 nt, Artificial Sequence
  Description of Artificial Sequence: Synthetic oligonucleotide
guagauaacggcacuuuga

SEQ ID NO: 1355278 - RNA, 19 nt, Artificial Sequence
  Description of Artificial Sequence: Synthetic oligonucleotide
gaaagaggagcaccaagua

SEQ ID NO: 1355279 - RNA, 19 nt, Artificial Sequence
  Description of Artificial Sequence: Synthetic oligonucleotide
agaauagccagcaauccuu

SEQ ID NO: 1355280 - RNA, 19 nt, Artificial Sequence
  Description of Artificial Sequence: Synthetic oligonucleotide
aguacguccagacggggua

SEQ ID NO: 1355281 - RNA, 19 nt, Artificial Sequence
  Description of Artificial Sequence: Synthetic oligonucleotide
ggguuuucaguaacgaugc

SEQ ID NO: 1355282 - RNA, 19 nt, Artificial Sequence
  Description of Artificial Sequence: Synthetic oligonucleotide
gguaaucucuaagccaagg

SEQ ID NO: 1355283 - RNA, 19 nt, Artificial Sequence
  Description of Artificial Sequence: Synthetic oligonucleotide
acgggguaaauuucauuga

SEQ ID NO: 1355284 - RNA, 19 nt, Artificial Sequence
  Description of Artificial Sequence: Synthetic oligonucleotide
aaguugaccaggauauuuu

SEQ ID NO: 1355285 - RNA, 19 nt, Artificial Sequence
  Description of Artificial Sequence: Synthetic oligonucleotide
guucaccacuugaaaauag

SEQ ID NO: 1355286 - RNA, 19 nt, Artificial Sequence
  Description of Artificial Sequence: Synthetic oligonucleotide
ggauguauagcacacccaa

SEQ ID NO: 1355287 - RNA, 19 nt, Artificial Sequence
  Description of Artificial Sequence: Synthetic oligonucleotide
ugguaaucucuaagccaag

SEQ ID NO: 1355288 - RNA, 19 nt, Artificial Sequence
  Description of Artificial Sequence: Synthetic oligonucleotide
uuccaagaacuagaauagc

SEQ ID NO: 1355289 - RNA, 19 nt, Artificial Sequence
  Description of Artificial Sequence: Synthetic oligonucleotide
gguauuaauugaguagcug

SEQ ID NO: 1355290 - RNA, 19 nt, Artificial Sequence
  Description of Artificial Sequence: Synthetic oligonucleotide
agaauuccaagaacuagaa

SEQ ID NO: 1355291 - RNA, 19 nt, Artificial Sequence
  Description of Artificial Sequence: Synthetic oligonucleotide
uugcccuaagacagagccc

SEQ ID NO: 1355292 - RNA, 19 nt, Artificial Sequence
  Description of Artificial Sequence: Synthetic oligonucleotide
  modified_base (6)..(6): a, c, u, g, unknown or other
ugggunuaguucaccacuu

SEQ ID NO: 1355293 - RNA, 19 nt, Artificial Sequence
  Description of Artificial Sequence: Synthetic oligonucleotide
gacacaaggauuugcccua

SEQ ID NO: 1355294 - RNA, 19 nt, Artificial Sequence
  Description of Artificial Sequence: Synthetic oligonucleotide
uccagacgggguaaauuuc

SEQ ID NO: 1355295 - RNA, 19 nt, Artificial Sequence
  Description of Artificial Sequence: Synthetic oligonucleotide
acacaagggcguaacguuc

SEQ ID NO: 1355296 - RNA, 19 nt, Artificial Sequence
  Description of Artificial Sequence: Synthetic oligonucleotide
  modified_base (3)..(3): a, c, u, g, unknown or other
gunuaguucaccacuugaa

SEQ ID NO: 1355297 - RNA, 19 nt, Artificial Sequence
  Description of Artificial Sequence: Synthetic oligonucleotide
auaaaauggacugccugua

SEQ ID NO: 1355298 - RNA, 19 nt, Artificial Sequence
  Description of Artificial Sequence: Synthetic oligonucleotide
cauacguuauucuuaaauu

SEQ ID NO: 1355299 - RNA, 19 nt, Artificial Sequence
  Description of Artificial Sequence: Synthetic oligonucleotide
gggguaugcaaacauaaaa

SEQ ID NO: 1355300 - RNA, 19 nt, Artificial Sequence
  Description of Artificial Sequence: Synthetic oligonucleotide
uggacugccuguaucucua

SEQ ID NO: 1355301 - RNA, 19 nt, Artificial Sequence
  Description of Artificial Sequence: Synthetic oligonucleotide
ggaguaguugcuugagggc

SEQ ID NO: 1355302 - RNA, 19 nt, Artificial Sequence
  Description of Artificial Sequence: Synthetic oligonucleotide
gaggaauagcgucauuucu

SEQ ID NO: 1355303 - RNA, 19 nt, Artificial Sequence
  Description of Artificial Sequence: Synthetic oligonucleotide
cacuugaaaauagccgcag

SEQ ID NO: 1355304 - RNA, 19 nt, Artificial Sequence
  Description of Artificial Sequence: Synthetic oligonucleotide
  modified_base (14)..(14): a, c, u, g, unknown or other
acaaucccugggunuaguu

SEQ ID NO: 1355305 - RNA, 19 nt, Artificial Sequence
  Description of Artificial Sequence: Synthetic oligonucleotide
acguucaagcugaacagug

SEQ ID NO: 1355306 - RNA, 19 nt, Artificial Sequence
  Description of Artificial Sequence: Synthetic oligonucleotide
aaagggguaugcaaacaua

SEQ ID NO: 1355307 - RNA, 19 nt, Artificial Sequence
  Description of Artificial Sequence: Synthetic oligonucleotide
cacugaaugcaccguuagc

SEQ ID NO: 1355308 - RNA, 19 nt, Artificial Sequence
  Description of Artificial Sequence: Synthetic oligonucleotide
ggcguaacguuccaugcug

SEQ ID NO: 1355309 - RNA, 19 nt, Artificial Sequence
  Description of Artificial Sequence: Synthetic oligonucleotide
guaacggagguagucugug

SEQ ID NO: 1355310 - RNA, 19 nt, Artificial Sequence
  Description of Artificial Sequence: Synthetic oligonucleotide
auuaauugaguagcugcuu

SEQ ID NO: 1355311 - RNA, 19 nt, Artificial Sequence
  Description of Artificial Sequence: Synthetic oligonucleotide
gaucaccucccauccagga

SEQ ID NO: 1355312 - RNA, 19 nt, Artificial Sequence
  Description of Artificial Sequence: Synthetic oligonucleotide
ccaaguaagaguacgucca

SEQ ID NO: 1355313 - RNA, 19 nt, Artificial Sequence
  Description of Artificial Sequence: Synthetic oligonucleotide
ggcaauuucaguuggcugu

SEQ ID NO: 1355314 - RNA, 19 nt, Artificial Sequence
  Description of Artificial Sequence: Synthetic oligonucleotide
uacaguaacuugugacuuu

SEQ ID NO: 1355315 - RNA, 19 nt, Artificial Sequence
  Description of Artificial Sequence: Synthetic oligonucleotide
  modified_base (7)..(7): a, c, u, g, unknown or other
cugggunuaguucaccacu

SEQ ID NO: 1355316 - RNA, 19 nt, Artificial Sequence
  Description of Artificial Sequence: Synthetic oligonucleotide
caugggcagaaaccaggcc

SEQ ID NO: 1355317 - RNA, 19 nt, Artificial Sequence
  Description of Artificial Sequence: Synthetic oligonucleotide
ccaagaacuagaauagcca

SEQ ID NO: 1355318 - RNA, 19 nt, Artificial Sequence
  Description of Artificial Sequence: Synthetic oligonucleotide
cacccaaauguuauucaca

SEQ ID NO: 1355319 - RNA, 19 nt, Artificial Sequence
  Description of Artificial Sequence: Synthetic oligonucleotide
gaggagcaccaaguaagag

SEQ ID NO: 1355320 - RNA, 19 nt, Artificial Sequence
  Description of Artificial Sequence: Synthetic oligonucleotide
agguugacacagccuccac

SEQ ID NO: 1355321 - RNA, 19 nt, Artificial Sequence
  Description of Artificial Sequence: Synthetic oligonucleotide
guaguugcuugagggcugg

SEQ ID NO: 1355322 - RNA, 19 nt, Artificial Sequence
  Description of Artificial Sequence: Synthetic oligonucleotide
caccuucucccacaauccc

SEQ ID NO: 1355323 - RNA, 19 nt, Artificial Sequence
  Description of Artificial Sequence: Synthetic oligonucleotide
guggcaugggcagaaacca

SEQ ID NO: 1355324 - RNA, 19 nt, Artificial Sequence
  Description of Artificial Sequence: Synthetic oligonucleotide
acguuauucuuaaauuaaa

SEQ ID NO: 1355325 - RNA, 19 nt, Artificial Sequence
  Description of Artificial Sequence: Synthetic oligonucleotide
gaagcagaaugacaggcuu

SEQ ID NO: 1355326 - RNA, 19 nt, Artificial Sequence
  Description of Artificial Sequence: Synthetic oligonucleotide
uugcagcaaucugaaaagu

SEQ ID NO: 1355327 - RNA, 19 nt, Artificial Sequence
  Description of Artificial Sequence: Synthetic oligonucleotide
agucccugaagcagaauga

SEQ ID NO: 1355328 - RNA, 19 nt, Artificial Sequence
  Description of Artificial Sequence: Synthetic oligonucleotide
gaguaguugcuugagggcu

SEQ ID NO: 1355329 - RNA, 19 nt, Artificial Sequence
  Description of Artificial Sequence: Synthetic oligonucleotide
agaguacguccagacgggg

SEQ ID NO: 1355330 - RNA, 19 nt, Artificial Sequence
  Description of Artificial Sequence: Synthetic oligonucleotide
agagacucuucuguggcau

SEQ ID NO: 1355331 - RNA, 19 nt, Artificial Sequence
  Description of Artificial Sequence: Synthetic oligonucleotide
agguauuaauugaguagcu

SEQ ID NO: 1355332 - RNA, 19 nt, Artificial Sequence
  Description of Artificial Sequence: Synthetic oligonucleotide
ucugaaccauaaagaguuu

SEQ ID NO: 1355333 - RNA, 19 nt, Artificial Sequence
  Description of Artificial Sequence: Synthetic oligonucleotide
uucucucaacaguaucaua

SEQ ID NO: 1355334 - RNA, 19 nt, Artificial Sequence
  Description of Artificial Sequence: Synthetic oligonucleotide
caccaaguaagaguacguc

SEQ ID NO: 1355335 - RNA, 19 nt, Artificial Sequence
  Description of Artificial Sequence: Synthetic oligonucleotide
ugccuguaucucuaacuua

SEQ ID NO: 1355336 - RNA, 19 nt, Artificial Sequence
  Description of Artificial Sequence: Synthetic oligonucleotide
acuguagauauaggaguaa

SEQ ID NO: 1355337 - RNA, 19 nt, Artificial Sequence
  Description of Artificial Sequence: Synthetic oligonucleotide
gagaacagaggaauagcgu

SEQ ID NO: 1355338 - RNA, 19 nt, Artificial Sequence
  Description of Artificial Sequence: Synthetic oligonucleotide
caccucccauccaggaagg

SEQ ID NO: 1355339 - RNA, 19 nt, Artificial Sequence
  Description of Artificial Sequence: Synthetic oligonucleotide
aucucuaagccaaggcccu

SEQ ID NO: 1355340 - RNA, 19 nt, Artificial Sequence
  Description of Artificial Sequence: Synthetic oligonucleotide
ggagcaccaaguaagagua

SEQ ID NO: 1355341 - RNA, 19 nt, Artificial Sequence
  Description of Artificial Sequence: Synthetic oligonucleotide
aucaccucccauccaggaa

SEQ ID NO: 1355342 - RNA, 19 nt, Artificial Sequence
  Description of Artificial Sequence: Synthetic oligonucleotide
uugcacccagcaagguuga

SEQ ID NO: 1355343 - RNA, 19 nt, Artificial Sequence
  Description of Artificial Sequence: Synthetic oligonucleotide
caaggcccuuguuaucaac

SEQ ID NO: 1355344 - RNA, 19 nt, Artificial Sequence
  Description of Artificial Sequence: Synthetic oligonucleotide
gauguauagcacacccaaa

SEQ ID NO: 1355345 - RNA, 19 nt, Artificial Sequence
  Description of Artificial Sequence: Synthetic oligonucleotide
uuccaugcugagguuugca

SEQ ID NO: 1355346 - RNA, 19 nt, Artificial Sequence
  Description of Artificial Sequence: Synthetic oligonucleotide
uucauacguuauucuuaaa

SEQ ID NO: 1355347 - RNA, 19 nt, Artificial Sequence
  Description of Artificial Sequence: Synthetic oligonucleotide
gcccaggucgaccacacug

SEQ ID NO: 1355348 - RNA, 19 nt, Artificial Sequence
  Description of Artificial Sequence: Synthetic oligonucleotide
acagaucaccucccaucca

SEQ ID NO: 1355349 - RNA, 19 nt, Artificial Sequence
  Description of Artificial Sequence: Synthetic oligonucleotide
caguaucauauuaacuccu

SEQ ID NO: 1355350 - RNA, 19 nt, Artificial Sequence
  Description of Artificial Sequence: Synthetic oligonucleotide
auacagcgcuugcacccag

SEQ ID NO: 1355351 - RNA, 19 nt, Artificial Sequence
  Description of Artificial Sequence: Synthetic oligonucleotide
aacguuccaugcugagguu

SEQ ID NO: 1355352 - RNA, 19 nt, Artificial Sequence
  Description of Artificial Sequence: Synthetic oligonucleotide
agacgggguaaauuucauu

SEQ ID NO: 1355353 - RNA, 19 nt, Artificial Sequence
  Description of Artificial Sequence: Synthetic oligonucleotide
agaggagcaccaaguaaga

SEQ ID NO: 1355354 - RNA, 19 nt, Artificial Sequence
  Description of Artificial Sequence: Synthetic oligonucleotide
uggugaugaguaccaugua

SEQ ID NO: 1355355 - RNA, 19 nt, Artificial Sequence
  Description of Artificial Sequence: Synthetic oligonucleotide
ugaguaccauguagaugau

SEQ ID NO: 1355356 - RNA, 19 nt, Artificial Sequence
  Description of Artificial Sequence: Synthetic oligonucleotide
agcaagguugacacagccu

SEQ ID NO: 1355357 - RNA, 19 nt, Artificial Sequence
  Description of Artificial Sequence: Synthetic oligonucleotide
  modified_base (5)..(5): a, c, u, g, unknown or other
gggunuaguucaccacuug

SEQ ID NO: 1355358 - RNA, 19 nt, Artificial Sequence
  Description of Artificial Sequence: Synthetic oligonucleotide
gaauuccaagaacuagaau

SEQ ID NO: 1355359 - RNA, 19 nt, Artificial Sequence
  Description of Artificial Sequence: Synthetic oligonucleotide
acaagggcguaacguucca

SEQ ID NO: 1355360 - RNA, 19 nt, Artificial Sequence
  Description of Artificial Sequence: Synthetic oligonucleotide
cuacugugaagccuaccaa

SEQ ID NO: 1355361 - RNA, 19 nt, Artificial Sequence
  Description of Artificial Sequence: Synthetic oligonucleotide
ggagauugacguucaagcu

SEQ ID NO: 1355362 - RNA, 19 nt, Artificial Sequence
  Description of Artificial Sequence: Synthetic oligonucleotide
agacagagcccuacuguga

SEQ ID NO: 1355363 - RNA, 19 nt, Artificial Sequence
  Description of Artificial Sequence: Synthetic oligonucleotide
gaacuagaauagccagcaa

SEQ ID NO: 1355364 - RNA, 19 nt, Artificial Sequence
  Description of Artificial Sequence: Synthetic oligonucleotide
gaccgcaaaguaacuggca

SEQ ID NO: 1355365 - RNA, 19 nt, Artificial Sequence
  Description of Artificial Sequence: Synthetic oligonucleotide
uagagugagcagggucugc

SEQ ID NO: 1355366 - RNA, 19 nt, Artificial Sequence
  Description of Artificial Sequence: Synthetic oligonucleotide
aacugcaaauacagcgcuu

SEQ ID NO: 1355367 - RNA, 19 nt, Artificial Sequence
  Description of Artificial Sequence: Synthetic oligonucleotide
gacacugaaugcaccguua

SEQ ID NO: 1355368 - RNA, 19 nt, Artificial Sequence
  Description of Artificial Sequence: Synthetic oligonucleotide
guccagacgggguaaauuu

SEQ ID NO: 1355369 - RNA, 19 nt, Artificial Sequence
  Description of Artificial Sequence: Synthetic oligonucleotide
cacaaggauuugcccuaag

SEQ ID NO: 1355370 - RNA, 19 nt, Artificial Sequence
  Description of Artificial Sequence: Synthetic oligonucleotide
gcaugaaccauguaacaau

SEQ ID NO: 1355371 - RNA, 19 nt, Artificial Sequence
  Description of Artificial Sequence: Synthetic oligonucleotide
acaauaaggcugagucccu

SEQ ID NO: 1355372 - RNA, 19 nt, Artificial Sequence
  Description of Artificial Sequence: Synthetic oligonucleotide
  modified_base (11)..(11): a, c, u, g, unknown or other
aucccugggunuaguucac

SEQ ID NO: 1355373 - RNA, 19 nt, Artificial Sequence
  Description of Artificial Sequence: Synthetic oligonucleotide
ggguaugcaaacauaaaau

SEQ ID NO: 1355374 - RNA, 19 nt, Artificial Sequence
  Description of Artificial Sequence: Synthetic oligonucleotide
aggugguuagaugcugggu

SEQ ID NO: 1355375 - RNA, 19 nt, Artificial Sequence
  Description of Artificial Sequence: Synthetic oligonucleotide
gagggcccaccacacggac

SEQ ID NO: 1355376 - RNA, 19 nt, Artificial Sequence
  Description of Artificial Sequence: Synthetic oligonucleotide
cugaaccauaaagaguuua

SEQ ID NO: 1355377 - RNA, 19 nt, Artificial Sequence
  Description of Artificial Sequence: Synthetic oligonucleotide
caggcaguugcugugcaga

SEQ ID NO: 1355378 - RNA, 19 nt, Artificial Sequence
  Description of Artificial Sequence: Synthetic oligonucleotide
caacugcaaauacagcgcu

SEQ ID NO: 1355379 - RNA, 19 nt, Artificial Sequence
  Description of Artificial Sequence: Synthetic oligonucleotide
gaagccuaccaagguggca

SEQ ID NO: 1355380 - RNA, 19 nt, Artificial Sequence
  Description of Artificial Sequence: Synthetic oligonucleotide
  modified_base (8)..(8): a, c, u, g, unknown or other
ccugggunuaguucaccac

SEQ ID NO: 1355381 - RNA, 19 nt, Artificial Sequence
  Description of Artificial Sequence: Synthetic oligonucleotide
ggcuucucucaacaguauc

SEQ ID NO: 1355382 - RNA, 19 nt, Artificial Sequence
  Description of Artificial Sequence: Synthetic oligonucleotide
guauacacugcagcagcaa

SEQ ID NO: 1355383 - RNA, 19 nt, Artificial Sequence
  Description of Artificial Sequence: Synthetic oligonucleotide
cauuguagauaacggcacu

SEQ ID NO: 1355384 - RNA, 19 nt, Artificial Sequence
  Description of Artificial Sequence: Synthetic oligonucleotide
guaacagaucaccucccau

SEQ ID NO: 1355385 - RNA, 19 nt, Artificial Sequence
  Description of Artificial Sequence: Synthetic oligonucleotide
gacguucaagcugaacagu

SEQ ID NO: 1355386 - RNA, 19 nt, Artificial Sequence
  Description of Artificial Sequence: Synthetic oligonucleotide
agggguaugcaaacauaaa

SEQ ID NO: 1355387 - RNA, 19 nt, Artificial Sequence
  Description of Artificial Sequence: Synthetic oligonucleotide
auguaacaauaaggcugag

SEQ ID NO: 1355388 - RNA, 19 nt, Artificial Sequence
  Description of Artificial Sequence: Synthetic oligonucleotide
ccuugggcaguagagcagc

SEQ ID NO: 1355389 - RNA, 19 nt, Artificial Sequence
  Description of Artificial Sequence: Synthetic oligonucleotide
uuuguaccuugaugccauu

SEQ ID NO: 1355390 - RNA, 19 nt, Artificial Sequence
  Description of Artificial Sequence: Synthetic oligonucleotide
cuuggaauuaagaguccuu

SEQ ID NO: 1355391 - RNA, 19 nt, Artificial Sequence
  Description of Artificial Sequence: Synthetic oligonucleotide
agacaacauaggauguaua

SEQ ID NO: 1355392 - RNA, 19 nt, Artificial Sequence
  Description of Artificial Sequence: Synthetic oligonucleotide
ccagacgggguaaauuuca

SEQ ID NO: 1355393 - RNA, 19 nt, Artificial Sequence
  Description of Artificial Sequence: Synthetic oligonucleotide
gaguccuucauacguuauu

SEQ ID NO: 1355394 - RNA, 19 nt, Artificial Sequence
  Description of Artificial Sequence: Synthetic oligonucleotide
cuacagagaugaccgcaaa

SEQ ID NO: 1355395 - RNA, 19 nt, Artificial Sequence
  Description of Artificial Sequence: Synthetic oligonucleotide
auacauccaggcaguugcu

SEQ ID NO: 1355396 - RNA, 19 nt, Artificial Sequence
  Description of Artificial Sequence: Synthetic oligonucleotide
cagaggaauagcgucauuu

SEQ ID NO: 1355397 - RNA, 19 nt, Artificial Sequence
  Description of Artificial Sequence: Synthetic oligonucleotide
acguuccaugcugagguuu

SEQ ID NO: 1355398 - RNA, 19 nt, Artificial Sequence
  Description of Artificial Sequence: Synthetic oligonucleotide
agccacugacacaaggauu

SEQ ID NO: 1355399 - RNA, 19 nt, Artificial Sequence
  Description of Artificial Sequence: Synthetic oligonucleotide
cuaccaagguggcacuucu

SEQ ID NO: 1355400 - RNA, 19 nt, Artificial Sequence
  Description of Artificial Sequence: Synthetic oligonucleotide
agcaauccuugggcaguag

SEQ ID NO: 1355401 - RNA, 19 nt, Artificial Sequence
  Description of Artificial Sequence: Synthetic oligonucleotide
acggcacuuugagaaggca

SEQ ID NO: 1355402 - RNA, 19 nt, Artificial Sequence
  Description of Artificial Sequence: Synthetic oligonucleotide
gagggcgggaggaguaaca

SEQ ID NO: 1355403 - RNA, 19 nt, Artificial Sequence
  Description of Artificial Sequence: Synthetic oligonucleotide
accaaacacaagggcguaa

SEQ ID NO: 1355404 - RNA, 19 nt, Artificial Sequence
  Description of Artificial Sequence: Synthetic oligonucleotide
gagcaccaaguaagaguac

SEQ ID NO: 1355405 - RNA, 19 nt, Artificial Sequence
  Description of Artificial Sequence: Synthetic oligonucleotide
agaguccuucauacguuau

SEQ ID NO: 1355406 - RNA, 19 nt, Artificial Sequence
  Description of Artificial Sequence: Synthetic oligonucleotide
cugccuguaucucuaacuu

SEQ ID NO: 1355407 - RNA, 19 nt, Artificial Sequence
  Description of Artificial Sequence: Synthetic oligonucleotide
cuacaguaacuugugacuu

SEQ ID NO: 1355408 - RNA, 19 nt, Artificial Sequence
  Description of Artificial Sequence: Synthetic oligonucleotide
acagaggaauagcgucauu

SEQ ID NO: 1355409 - RNA, 19 nt, Artificial Sequence
  Description of Artificial Sequence: Synthetic oligonucleotide
ccguuagccaggaaaacua

SEQ ID NO: 1355410 - RNA, 19 nt, Artificial Sequence
  Description of Artificial Sequence: Synthetic oligonucleotide
gucgaccacacuguagaua

SEQ ID NO: 1355411 - RNA, 19 nt, Artificial Sequence
  Description of Artificial Sequence: Synthetic oligonucleotide
gcaccguuagccaggaaaa

SEQ ID NO: 1355412 - RNA, 19 nt, Artificial Sequence
  Description of Artificial Sequence: Synthetic oligonucleotide
cagcauguuagggaguagu

SEQ ID NO: 1355413 - RNA, 19 nt, Artificial Sequence
  Description of Artificial Sequence: Synthetic oligonucleotide
uacguccagacgggguaaa

SEQ ID NO: 1355414 - RNA, 19 nt, Artificial Sequence
  Description of Artificial Sequence: Synthetic oligonucleotide
ggcgggaggaguaacagau

SEQ ID NO: 1355415 - RNA, 19 nt, Artificial Sequence
  Description of Artificial Sequence: Synthetic oligonucleotide
gccuguaucucuaacuuau

SEQ ID NO: 1355416 - RNA, 19 nt, Artificial Sequence
  Description of Artificial Sequence: Synthetic oligonucleotide
gcgcuugcacccagcaagg

SEQ ID NO: 1355417 - RNA, 19 nt, Artificial Sequence
  Description of Artificial Sequence: Synthetic oligonucleotide
ugcccaggucgaccacacu

SEQ ID NO: 1355418 - RNA, 19 nt, Artificial Sequence
  Description of Artificial Sequence: Synthetic oligonucleotide
gguuagaugcuggguuuuc

SEQ ID NO: 1355419 - RNA, 19 nt, Artificial Sequence
  Description of Artificial Sequence: Synthetic oligonucleotide
gccgcagguggagagggcc

SEQ ID NO: 1355420 - RNA, 19 nt, Artificial Sequence
  Description of Artificial Sequence: Synthetic oligonucleotide
  modified_base (9)..(9): a, c, u, g, unknown or other
cccugggunuaguucacca

SEQ ID NO: 1355421 - RNA, 19 nt, Artificial Sequence
  Description of Artificial Sequence: Synthetic oligonucleotide
gaguacguccagacggggu

SEQ ID NO: 1355422 - RNA, 19 nt, Artificial Sequence
  Description of Artificial Sequence: Synthetic oligonucleotide
  modified_base (19)..(19): a, c, u, g, unknown or other
cucccacaaucccugggun

SEQ ID NO: 1355423 - RNA, 19 nt, Artificial Sequence
  Description of Artificial Sequence: Synthetic oligonucleotide
  modified_base (16)..(16): a, c, u, g, unknown or other
ccacaaucccugggunuag

SEQ ID NO: 1355424 - RNA, 19 nt, Artificial Sequence
  Description of Artificial Sequence: Synthetic oligonucleotide
gagggagauugacguucaa

SEQ ID NO: 1355425 - RNA, 19 nt, Artificial Sequence
  Description of Artificial Sequence: Synthetic oligonucleotide
ccucccauccaggaaggug

SEQ ID NO: 1355426 - RNA, 19 nt, Artificial Sequence
  Description of Artificial Sequence: Synthetic oligonucleotide
gcugagguuugcagcaauc

SEQ ID NO: 1355427 - RNA, 19 nt, Artificial Sequence
  Description of Artificial Sequence: Synthetic oligonucleotide
gcacccagcaagguugaca

SEQ ID NO: 1355428 - RNA, 19 nt, Artificial Sequence
  Description of Artificial Sequence: Synthetic oligonucleotide
cgcaaaguaacuggcauaa

SEQ ID NO: 1355429 - RNA, 19 nt, Artificial Sequence
  Description of Artificial Sequence: Synthetic oligonucleotide
ggauuugcccuaagacaga

SEQ ID NO: 1355430 - RNA, 19 nt, Artificial Sequence
  Description of Artificial Sequence: Synthetic oligonucleotide
ccaugauaaaagcuucagu

SEQ ID NO: 1355431 - RNA, 19 nt, Artificial Sequence
  Description of Artificial Sequence: Synthetic oligonucleotide
cccuaagacagagcccuac

SEQ ID NO: 1355432 - RNA, 19 nt, Artificial Sequence
  Description of Artificial Sequence: Synthetic oligonucleotide
caccaccauuguagauaac

SEQ ID NO: 1355433 - RNA, 19 nt, Artificial Sequence
  Description of Artificial Sequence: Synthetic oligonucleotide
gauugacguucaagcugaa

SEQ ID NO: 1355434 - RNA, 19 nt, Artificial Sequence
  Description of Artificial Sequence: Synthetic oligonucleotide
guacguccagacgggguaa

SEQ ID NO: 1355435 - RNA, 19 nt, Artificial Sequence
  Description of Artificial Sequence: Synthetic oligonucleotide
ccuaccaagguggcacuuc

SEQ ID NO: 1355436 - RNA, 19 nt, Artificial Sequence
  Description of Artificial Sequence: Synthetic oligonucleotide
gcgucauuucuccccaagu

SEQ ID NO: 1355437 - RNA, 19 nt, Artificial Sequence
  Description of Artificial Sequence: Synthetic oligonucleotide
caauuagagugagcagggu

SEQ ID NO: 1355438 - RNA, 19 nt, Artificial Sequence
  Description of Artificial Sequence: Synthetic oligonucleotide
ggacacugaaugcaccguu

SEQ ID NO: 1355439 - RNA, 19 nt, Artificial Sequence
  Description of Artificial Sequence: Synthetic oligonucleotide
cagacgggguaaauuucau

SEQ ID NO: 1355440 - RNA, 19 nt, Artificial Sequence
  Description of Artificial Sequence: Synthetic oligonucleotide
acguccagacgggguaaau

SEQ ID NO: 1355441 - RNA, 19 nt, Artificial Sequence
  Description of Artificial Sequence: Synthetic oligonucleotide
caggcuuguaacggaggua

SEQ ID NO: 1355442 - RNA, 19 nt, Artificial Sequence
  Description of Artificial Sequence: Synthetic oligonucleotide
gaguaccauguagaugauu

SEQ ID NO: 1355443 - RNA, 19 nt, Artificial Sequence
  Description of Artificial Sequence: Synthetic oligonucleotide
gcaccaaguaagaguacgu

SEQ ID NO: 1355444 - RNA, 19 nt, Artificial Sequence
  Description of Artificial Sequence: Synthetic oligonucleotide
gcguaacguuccaugcuga

SEQ ID NO: 1355445 - RNA, 19 nt, Artificial Sequence
  Description of Artificial Sequence: Synthetic oligonucleotide
caccaaacacaagggcgua

SEQ ID NO: 1355446 - RNA, 19 nt, Artificial Sequence
  Description of Artificial Sequence: Synthetic oligonucleotide
ccuaagacagagcccuacu

SEQ ID NO: 1355447 - RNA, 19 nt, Artificial Sequence
  Description of Artificial Sequence: Synthetic oligonucleotide
ccgcaaaguaacuggcaua

SEQ ID NO: 1355448 - RNA, 19 nt, Artificial Sequence
  Description of Artificial Sequence: Synthetic oligonucleotide
gcuugcacccagcaagguu

SEQ ID NO: 1355449 - RNA, 19 nt, Artificial Sequence
  Description of Artificial Sequence: Synthetic oligonucleotide
gcaaaguaacuggcauaaa

SEQ ID NO: 1355450 - RNA, 19 nt, Artificial Sequence
  Description of Artificial Sequence: Synthetic oligonucleotide
cccuacugugaagccuacc

SEQ ID NO: 1355451 - RNA, 19 nt, Artificial Sequence
  Description of Artificial Sequence: Synthetic oligonucleotide
ggacugccuguaucucuaa

SEQ ID NO: 1355452 - RNA, 19 nt, Artificial Sequence
  Description of Artificial Sequence: Synthetic oligonucleotide
ggugagggagauugacguu

SEQ ID NO: 1355453 - RNA, 19 nt, Artificial Sequence
  Description of Artificial Sequence: Synthetic oligonucleotide
  modified_base (15)..(15): a, c, u, g, unknown or other
cacaaucccugggunuagu

SEQ ID NO: 1355454 - RNA, 19 nt, Artificial Sequence
  Description of Artificial Sequence: Synthetic oligonucleotide
augcaccguuagccaggaa

SEQ ID NO: 1355455 - RNA, 19 nt, Artificial Sequence
  Description of Artificial Sequence: Synthetic oligonucleotide
gcgggaggaguaacagauc

SEQ ID NO: 1355456 - RNA, 19 nt, Artificial Sequence
  Description of Artificial Sequence: Synthetic oligonucleotide
ggucgaccacacuguagau

SEQ ID NO: 1355457 - RNA, 19 nt, Artificial Sequence
  Description of Artificial Sequence: Synthetic oligonucleotide
cgucauuucuccccaaguu

SEQ ID NO: 1355458 - RNA, 19 nt, Artificial Sequence
  Description of Artificial Sequence: Synthetic oligonucleotide
caagggcguaacguuccau

SEQ ID NO: 1355459 - RNA, 19 nt, Artificial Sequence
  Description of Artificial Sequence: Synthetic oligonucleotide
gcagaaugacaggcuugua

SEQ ID NO: 1355460 - RNA, 19 nt, Artificial Sequence
  Description of Artificial Sequence: Synthetic oligonucleotide
cggagguagucuguggcaa

SEQ ID NO: 1355461 - RNA, 19 nt, Artificial Sequence
  Description of Artificial Sequence: Synthetic oligonucleotide
ccuugcuuggaagcagcau

SEQ ID NO: 1355462 - RNA, 19 nt, Artificial Sequence
  Description of Artificial Sequence: Synthetic oligonucleotide
gcccuaagacagagcccua

SEQ ID NO: 1355463 - RNA, 19 nt, Artificial Sequence
  Description of Artificial Sequence: Synthetic oligonucleotide
uauaucgaaacucaggucg

SEQ ID NO: 1355464 - RNA, 19 nt, Artificial Sequence
  Description of Artificial Sequence: Synthetic oligonucleotide
aacacuaaaagguucaaag

SEQ ID NO: 1355465 - RNA, 19 nt, Artificial Sequence
  Description of Artificial Sequence: Synthetic oligonucleotide
uguaucaugacaaucaugu

SEQ ID NO: 1355466 - RNA, 19 nt, Artificial Sequence
  Description of Artificial Sequence: Synthetic oligonucleotide
aacauuauuaucuucggcu

SEQ ID NO: 1355467 - RNA, 19 nt, Artificial Sequence
  Description of Artificial Sequence: Synthetic oligonucleotide
ucugaaagcgucuagaaug

SEQ ID NO: 1355468 - RNA, 19 nt, Artificial Sequence
  Description of Artificial Sequence: Synthetic oligonucleotide
acaaauuucuggcuaaagc

SEQ ID NO: 1355469 - RNA, 19 nt, Artificial Sequence
  Description of Artificial Sequence: Synthetic oligonucleotide
uucacuaauuccucgaugg

SEQ ID NO: 1355470 - RNA, 19 nt, Artificial Sequence
  Description of Artificial Sequence: Synthetic oligonucleotide
agucuauaagucuuuaaac

SEQ ID NO: 1355471 - RNA, 19 nt, Artificial Sequence
  Description of Artificial Sequence: Synthetic oligonucleotide
ugucgaguagaucugaaag

SEQ ID NO: 1355472 - RNA, 19 nt, Artificial Sequence
  Description of Artificial Sequence: Synthetic oligonucleotide
aaguggaugauaucuuugg

SEQ ID NO: 1355473 - RNA, 19 nt, Artificial Sequence
  Description of Artificial Sequence: Synthetic oligonucleotide
aagcgaagaacacuaaaag

SEQ ID NO: 1355474 - RNA, 19 nt, Artificial Sequence
  Description of Artificial Sequence: Synthetic oligonucleotide
caauuuuacacucaugaag

SEQ ID NO: 1355475 - RNA, 19 nt, Artificial Sequence
  Description of Artificial Sequence: Synthetic oligonucleotide
acacuaaaagguucaaagc

SEQ ID NO: 1355476 - RNA, 19 nt, Artificial Sequence
  Description of Artificial Sequence: Synthetic oligonucleotide
guuagcgagaaccacaucc

SEQ ID NO: 1355477 - RNA, 19 nt, Artificial Sequence
  Description of Artificial Sequence: Synthetic oligonucleotide
aauggacauauuucuagag

SEQ ID NO: 1355478 - RNA, 19 nt, Artificial Sequence
  Description of Artificial Sequence: Synthetic oligonucleotide
agaacugccgcacugugcg

SEQ ID NO: 1355479 - RNA, 19 nt, Artificial Sequence
  Description of Artificial Sequence: Synthetic oligonucleotide
ugcuauaucgaaacucagg

SEQ ID NO: 1355480 - RNA, 19 nt, Artificial Sequence
  Description of Artificial Sequence: Synthetic oligonucleotide
agcgaagaacacuaaaagg

SEQ ID NO: 1355481 - RNA, 19 nt, Artificial Sequence
  Description of Artificial Sequence: Synthetic oligonucleotide
ucuauaagucuuuaaacau

SEQ ID NO: 1355482 - RNA, 19 nt, Artificial Sequence
  Description of Artificial Sequence: Synthetic oligonucleotide
ucgaguagaucugaaagcg

SEQ ID NO: 1355483 - RNA, 19 nt, Artificial Sequence
  Description of Artificial Sequence: Synthetic oligonucleotide
gauaucuuugggguuagcg

SEQ ID NO: 1355484 - RNA, 19 nt, Artificial Sequence
  Description of Artificial Sequence: Synthetic oligonucleotide
aacuacugcucaugaaagg

SEQ ID NO: 1355485 - RNA, 19 nt, Artificial Sequence
  Description of Artificial Sequence: Synthetic oligonucleotide
cuuugaucagccuuggaac

SEQ ID NO: 1355486 - RNA, 19 nt, Artificial Sequence
  Description of Artificial Sequence: Synthetic oligonucleotide
ugucaucagagucauuugc

SEQ ID NO: 1355487 - RNA, 19 nt, Artificial Sequence
  Description of Artificial Sequence: Synthetic oligonucleotide
gucuauaagucuuuaaaca

SEQ ID NO: 1355488 - RNA, 19 nt, Artificial Sequence
  Description of Artificial Sequence: Synthetic oligonucleotide
aggagauuuugaaacaagc

SEQ ID NO: 1355489 - RNA, 19 nt, Artificial Sequence
  Description of Artificial Sequence: Synthetic oligonucleotide
agaacuacugcucaugaaa

SEQ ID NO: 1355490 - RNA, 19 nt, Artificial Sequence
  Description of Artificial Sequence: Synthetic oligonucleotide
uuaacagcuucuccagggg

SEQ ID NO: 1355491 - RNA, 19 nt, Artificial Sequence
  Description of Artificial Sequence: Synthetic oligonucleotide
uaucuuugggguuagcgac

SEQ ID NO: 1355492 - RNA, 19 nt, Artificial Sequence
  Description of Artificial Sequence: Synthetic oligonucleotide
uuaguggcaguguuucugg

SEQ ID NO: 1355493 - RNA, 19 nt, Artificial Sequence
  Description of Artificial Sequence: Synthetic oligonucleotide
acuacugcucaugaaaggg

SEQ ID NO: 1355494 - RNA, 19 nt, Artificial Sequence
  Description of Artificial Sequence: Synthetic oligonucleotide
uuagagucagcaugcagug

SEQ ID NO: 1355495 - RNA, 19 nt, Artificial Sequence
  Description of Artificial Sequence: Synthetic oligonucleotide
ucuucuacucugagugucg

SEQ ID NO: 1355496 - RNA, 19 nt, Artificial Sequence
  Description of Artificial Sequence: Synthetic oligonucleotide
ucuucggcuucuuagagaa

SEQ ID NO: 1355497 - RNA, 19 nt, Artificial Sequence
  Description of Artificial Sequence: Synthetic oligonucleotide
cugaaagcgucuagaaugg

SEQ ID NO: 1355498 - RNA, 19 nt, Artificial Sequence
  Description of Artificial Sequence: Synthetic oligonucleotide
uucaaucucuucuccaagc

SEQ ID NO: 1355499 - RNA, 19 nt, Artificial Sequence
  Description of Artificial Sequence: Synthetic oligonucleotide
uuugguugggccaauuuua

SEQ ID NO: 1355500 - RNA, 19 nt, Artificial Sequence
  Description of Artificial Sequence: Synthetic oligonucleotide
uucucugaaacgccggacc

SEQ ID NO: 1355501 - RNA, 19 nt, Artificial Sequence
  Description of Artificial Sequence: Synthetic oligonucleotide
gucaccuuaggauugucag

SEQ ID NO: 1355502 - RNA, 19 nt, Artificial Sequence
  Description of Artificial Sequence: Synthetic oligonucleotide
auaucuuugggguuagcga

SEQ ID NO: 1355503 - RNA, 19 nt, Artificial Sequence
  Description of Artificial Sequence: Synthetic oligonucleotide
ucggauaagaggcuucucu

SEQ ID NO: 1355504 - RNA, 19 nt, Artificial Sequence
  Description of Artificial Sequence: Synthetic oligonucleotide
aaagcgaagaacacuaaaa

SEQ ID NO: 1355505 - RNA, 19 nt, Artificial Sequence
  Description of Artificial Sequence: Synthetic oligonucleotide
uuaucuucggcuucuuaga

SEQ ID NO: 1355506 - RNA, 19 nt, Artificial Sequence
  Description of Artificial Sequence: Synthetic oligonucleotide
ugguugaaagagaauuccc

SEQ ID NO: 1355507 - RNA, 19 nt, Artificial Sequence
  Description of Artificial Sequence: Synthetic oligonucleotide
ugggugguuagcgagaacc

SEQ ID NO: 1355508 - RNA, 19 nt, Artificial Sequence
  Description of Artificial Sequence: Synthetic oligonucleotide
guugaacagguuugggugg

SEQ ID NO: 1355509 - RNA, 19 nt, Artificial Sequence
  Description of Artificial Sequence: Synthetic oligonucleotide
uaucuucggcuucuuagag

SEQ ID NO: 1355510 - RNA, 19 nt, Artificial Sequence
  Description of Artificial Sequence: Synthetic oligonucleotide
uccacuguaguccacccgu

SEQ ID NO: 1355511 - RNA, 19 nt, Artificial Sequence
  Description of Artificial Sequence: Synthetic oligonucleotide
auugucaggguugaacagg

SEQ ID NO: 1355512 - RNA, 19 nt, Artificial Sequence
  Description of Artificial Sequence: Synthetic oligonucleotide
uuagcgagaaccacauccu

SEQ ID NO: 1355513 - RNA, 19 nt, Artificial Sequence
  Description of Artificial Sequence: Synthetic oligonucleotide
acaaucauguuccauuaaa

SEQ ID NO: 1355514 - RNA, 19 nt, Artificial Sequence
  Description of Artificial Sequence: Synthetic oligonucleotide
cuagaggucgauguagugg

SEQ ID NO: 1355515 - RNA, 19 nt, Artificial Sequence
  Description of Artificial Sequence: Synthetic oligonucleotide
gaaacgccggaccucuucg

SEQ ID NO: 1355516 - RNA, 19 nt, Artificial Sequence
  Description of Artificial Sequence: Synthetic oligonucleotide
uucuccaagcagaagcucu

SEQ ID NO: 1355517 - RNA, 19 nt, Artificial Sequence
  Description of Artificial Sequence: Synthetic oligonucleotide
uuagcgacccgauaccaca

SEQ ID NO: 1355518 - RNA, 19 nt, Artificial Sequence
  Description of Artificial Sequence: Synthetic oligonucleotide
gaacuacugcucaugaaag

SEQ ID NO: 1355519 - RNA, 19 nt, Artificial Sequence
  Description of Artificial Sequence: Synthetic oligonucleotide
ucaauagucucugaguaau

SEQ ID NO: 1355520 - RNA, 19 nt, Artificial Sequence
  Description of Artificial Sequence: Synthetic oligonucleotide
auucccuagccguucgcgc

SEQ ID NO: 1355521 - RNA, 19 nt, Artificial Sequence
  Description of Artificial Sequence: Synthetic oligonucleotide
gauauggcgcuccuuaaga

SEQ ID NO: 1355522 - RNA, 19 nt, Artificial Sequence
  Description of Artificial Sequence: Synthetic oligonucleotide
ugaacggcuucacccaucc

SEQ ID NO: 1355523 - RNA, 19 nt, Artificial Sequence
  Description of Artificial Sequence: Synthetic oligonucleotide
gucgaguagaucugaaagc

SEQ ID NO: 1355524 - RNA, 19 nt, Artificial Sequence
  Description of Artificial Sequence: Synthetic oligonucleotide
ucuugaacggcuucaccca

SEQ ID NO: 1355525 - RNA, 19 nt, Artificial Sequence
  Description of Artificial Sequence: Synthetic oligonucleotide
gccaauuuuacacucauga

SEQ ID NO: 1355526 - RNA, 19 nt, Artificial Sequence
  Description of Artificial Sequence: Synthetic oligonucleotide
ucccuuuugcucccuaugc

SEQ ID NO: 1355527 - RNA, 19 nt, Artificial Sequence
  Description of Artificial Sequence: Synthetic oligonucleotide
gugucguuccuuccgaagg

SEQ ID NO: 1355528 - RNA, 19 nt, Artificial Sequence
  Description of Artificial Sequence: Synthetic oligonucleotide
uugagcaucugccucgagu

SEQ ID NO: 1355529 - RNA, 19 nt, Artificial Sequence
  Description of Artificial Sequence: Synthetic oligonucleotide
acuaaaagguucaaagccu

SEQ ID NO: 1355530 - RNA, 19 nt, Artificial Sequence
  Description of Artificial Sequence: Synthetic oligonucleotide
aagaacugccgcacugugc

SEQ ID NO: 1355531 - RNA, 19 nt, Artificial Sequence
  Description of Artificial Sequence: Synthetic oligonucleotide
agagcaucgauauggcgcu

SEQ ID NO: 1355532 - RNA, 19 nt, Artificial Sequence
  Description of Artificial Sequence: Synthetic oligonucleotide
uuugcuagauguugugccu

SEQ ID NO: 1355533 - RNA, 19 nt, Artificial Sequence
  Description of Artificial Sequence: Synthetic oligonucleotide
cugguugaaagagaauucc

SEQ ID NO: 1355534 - RNA, 19 nt, Artificial Sequence
  Description of Artificial Sequence: Synthetic oligonucleotide
ugugcggagaggcagcuuc

SEQ ID NO: 1355535 - RNA, 19 nt, Artificial Sequence
  Description of Artificial Sequence: Synthetic oligonucleotide
uguaguccacccguagucg

SEQ ID NO: 1355536 - RNA, 19 nt, Artificial Sequence
  Description of Artificial Sequence: Synthetic oligonucleotide
uccuuaagaaaccgcugug

SEQ ID NO: 1355537 - RNA, 19 nt, Artificial Sequence
  Description of Artificial Sequence: Synthetic oligonucleotide
guacuucacuaauuccucg

SEQ ID NO: 1355538 - RNA, 19 nt, Artificial Sequence
  Description of Artificial Sequence: Synthetic oligonucleotide
ucgaaacucaggucgucag

SEQ ID NO: 1355539 - RNA, 19 nt, Artificial Sequence
  Description of Artificial Sequence: Synthetic oligonucleotide
uaaacaucgucagcuuuag

SEQ ID NO: 1355540 - RNA, 19 nt, Artificial Sequence
  Description of Artificial Sequence: Synthetic oligonucleotide
uagaucugaaagcgucuag

SEQ ID NO: 1355541 - RNA, 19 nt, Artificial Sequence
  Description of Artificial Sequence: Synthetic oligonucleotide
agaauucccuagccguucg

SEQ ID NO: 1355542 - RNA, 19 nt, Artificial Sequence
  Description of Artificial Sequence: Synthetic oligonucleotide
ucuggcuaaagcgaagaac

SEQ ID NO: 1355543 - RNA, 19 nt, Artificial Sequence
  Description of Artificial Sequence: Synthetic oligonucleotide
gguugggccaauuuuacac

SEQ ID NO: 1355544 - RNA, 19 nt, Artificial Sequence
  Description of Artificial Sequence: Synthetic oligonucleotide
cugacugcgaucugagcgc

SEQ ID NO: 1355545 - RNA, 19 nt, Artificial Sequence
  Description of Artificial Sequence: Synthetic oligonucleotide
ucacuaauuccucgauggc

SEQ ID NO: 1355546 - RNA, 19 nt, Artificial Sequence
  Description of Artificial Sequence: Synthetic oligonucleotide
acauuauuaucuucggcuu

SEQ ID NO: 1355547 - RNA, 19 nt, Artificial Sequence
  Description of Artificial Sequence: Synthetic oligonucleotide
aguugaucucuucaccugu

SEQ ID NO: 1355548 - RNA, 19 nt, Artificial Sequence
  Description of Artificial Sequence: Synthetic oligonucleotide
uucugcuauaucgaaacuc

SEQ ID NO: 1355549 - RNA, 19 nt, Artificial Sequence
  Description of Artificial Sequence: Synthetic oligonucleotide
agcaucugccucgaguagc

SEQ ID NO: 1355550 - RNA, 19 nt, Artificial Sequence
  Description of Artificial Sequence: Synthetic oligonucleotide
caucgucagcuuuagaguc

SEQ ID NO: 1355551 - RNA, 19 nt, Artificial Sequence
  Description of Artificial Sequence: Synthetic oligonucleotide
agagaacuacugcucauga

SEQ ID NO: 1355552 - RNA, 19 nt, Artificial Sequence
  Description of Artificial Sequence: Synthetic oligonucleotide
ugcuagauguugugccugg

SEQ ID NO: 1355553 - RNA, 19 nt, Artificial Sequence
  Description of Artificial Sequence: Synthetic oligonucleotide
cugagugucguuccuuccg

SEQ ID NO: 1355554 - RNA, 19 nt, Artificial Sequence
  Description of Artificial Sequence: Synthetic oligonucleotide
aacgccggaccucuucguc

SEQ ID NO: 1355555 - RNA, 19 nt, Artificial Sequence
  Description of Artificial Sequence: Synthetic oligonucleotide
uucaauagucucugaguaa

SEQ ID NO: 1355556 - RNA, 19 nt, Artificial Sequence
  Description of Artificial Sequence: Synthetic oligonucleotide
ucucugaaacgccggaccu

SEQ ID NO: 1355557 - RNA, 19 nt, Artificial Sequence
  Description of Artificial Sequence: Synthetic oligonucleotide
uccguuugcuagauguugu

SEQ ID NO: 1355558 - RNA, 19 nt, Artificial Sequence
  Description of Artificial Sequence: Synthetic oligonucleotide
gaaagcgucuagaauggac

SEQ ID NO: 1355559 - RNA, 19 nt, Artificial Sequence
  Description of Artificial Sequence: Synthetic oligonucleotide
uugguugggccaauuuuac

SEQ ID NO: 1355560 - RNA, 19 nt, Artificial Sequence
  Description of Artificial Sequence: Synthetic oligonucleotide
ugucguuccuuccgaagga

SEQ ID NO: 1355561 - RNA, 19 nt, Artificial Sequence
  Description of Artificial Sequence: Synthetic oligonucleotide
ucuagaggucgauguagug

SEQ ID NO: 1355562 - RNA, 19 nt, Artificial Sequence
  Description of Artificial Sequence: Synthetic oligonucleotide
cuuuugcucccuaugccug

SEQ ID NO: 1355563 - RNA, 19 nt, Artificial Sequence
  Description of Artificial Sequence: Synthetic oligonucleotide
uagagaacuacugcucaug

SEQ ID NO: 1355564 - RNA, 19 nt, Artificial Sequence
  Description of Artificial Sequence: Synthetic oligonucleotide
agugucguuccuuccgaag

SEQ ID NO: 1355565 - RNA, 19 nt, Artificial Sequence
  Description of Artificial Sequence: Synthetic oligonucleotide
ugagugucguuccuuccga

SEQ ID NO: 1355566 - RNA, 19 nt, Artificial Sequence
  Description of Artificial Sequence: Synthetic oligonucleotide
uucccuuuugcucccuaug

SEQ ID NO: 1355567 - RNA, 19 nt, Artificial Sequence
  Description of Artificial Sequence: Synthetic oligonucleotide
ccguagucggauaagaggc

SEQ ID NO: 1355568 - RNA, 19 nt, Artificial Sequence
  Description of Artificial Sequence: Synthetic oligonucleotide
uuugcugucuguucugcua

SEQ ID NO: 1355569 - RNA, 19 nt, Artificial Sequence
  Description of Artificial Sequence: Synthetic oligonucleotide
uauggcgcuccuuaagaaa

SEQ ID NO: 1355570 - RNA, 19 nt, Artificial Sequence
  Description of Artificial Sequence: Synthetic oligonucleotide
uuugggguuagcgacccga

SEQ ID NO: 1355571 - RNA, 19 nt, Artificial Sequence
  Description of Artificial Sequence: Synthetic oligonucleotide
caaucucuucuccaagcag

SEQ ID NO: 1355572 - RNA, 19 nt, Artificial Sequence
  Description of Artificial Sequence: Synthetic oligonucleotide
ugguuagcgagaaccacau

SEQ ID NO: 1355573 - RNA, 19 nt, Artificial Sequence
  Description of Artificial Sequence: Synthetic oligonucleotide
uucgcgcucgguauuuuca

SEQ ID NO: 1355574 - RNA, 19 nt, Artificial Sequence
  Description of Artificial Sequence: Synthetic oligonucleotide
guaguccacccguagucgg

SEQ ID NO: 1355575 - RNA, 19 nt, Artificial Sequence
  Description of Artificial Sequence: Synthetic oligonucleotide
aagcgucuagaauggacau

SEQ ID NO: 1355576 - RNA, 19 nt, Artificial Sequence
  Description of Artificial Sequence: Synthetic oligonucleotide
gaucugagcgcccgggccc

SEQ ID NO: 1355577 - RNA, 19 nt, Artificial Sequence
  Description of Artificial Sequence: Synthetic oligonucleotide
agcaucgauauggcgcucc

SEQ ID NO: 1355578 - RNA, 19 nt, Artificial Sequence
  Description of Artificial Sequence: Synthetic oligonucleotide
cauuauuaucuucggcuuc

SEQ ID NO: 1355579 - RNA, 19 nt, Artificial Sequence
  Description of Artificial Sequence: Synthetic oligonucleotide
guugaaagagaauucccua

SEQ ID NO: 1355580 - RNA, 19 nt, Artificial Sequence
  Description of Artificial Sequence: Synthetic oligonucleotide
cuucguugguauuucucug

SEQ ID NO: 1355581 - RNA, 19 nt, Artificial Sequence
  Description of Artificial Sequence: Synthetic oligonucleotide
aagcccacguguuucuuaa

SEQ ID NO: 1355582 - RNA, 19 nt, Artificial Sequence
  Description of Artificial Sequence: Synthetic oligonucleotide
agaucugaaagcgucuaga

SEQ ID NO: 1355583 - RNA, 19 nt, Artificial Sequence
  Description of Artificial Sequence: Synthetic oligonucleotide
cuuggaacugguaggaaaa

SEQ ID NO: 1355584 - RNA, 19 nt, Artificial Sequence
  Description of Artificial Sequence: Synthetic oligonucleotide
ugaaguugguguuuccauu

SEQ ID NO: 1355585 - RNA, 19 nt, Artificial Sequence
  Description of Artificial Sequence: Synthetic oligonucleotide
acuguaguccacccguagu

SEQ ID NO: 1355586 - RNA, 19 nt, Artificial Sequence
  Description of Artificial Sequence: Synthetic oligonucleotide
cuacucugagugucguucc

SEQ ID NO: 1355587 - RNA, 19 nt, Artificial Sequence
  Description of Artificial Sequence: Synthetic oligonucleotide
aucuuugggguuagcgacc

SEQ ID NO: 1355588 - RNA, 19 nt, Artificial Sequence
  Description of Artificial Sequence: Synthetic oligonucleotide
ucugagugucguuccuucc

SEQ ID NO: 1355589 - RNA, 19 nt, Artificial Sequence
  Description of Artificial Sequence: Synthetic oligonucleotide
gguuugggugguuagcgag

SEQ ID NO: 1355590 - RNA, 19 nt, Artificial Sequence
  Description of Artificial Sequence: Synthetic oligonucleotide
ggauugucaggguugaaca

SEQ ID NO: 1355591 - RNA, 19 nt, Artificial Sequence
  Description of Artificial Sequence: Synthetic oligonucleotide
gaaaccgcuguguuuucuc

SEQ ID NO: 1355592 - RNA, 19 nt, Artificial Sequence
  Description of Artificial Sequence: Synthetic oligonucleotide
aucugaaagcgucuagaau

SEQ ID NO: 1355593 - RNA, 19 nt, Artificial Sequence
  Description of Artificial Sequence: Synthetic oligonucleotide
ugcucccuaugccugaaaa

SEQ ID NO: 1355594 - RNA, 19 nt, Artificial Sequence
  Description of Artificial Sequence: Synthetic oligonucleotide
uucuccgcagucuggaaau

SEQ ID NO: 1355595 - RNA, 19 nt, Artificial Sequence
  Description of Artificial Sequence: Synthetic oligonucleotide
cuguaguccacccguaguc

SEQ ID NO: 1355596 - RNA, 19 nt, Artificial Sequence
  Description of Artificial Sequence: Synthetic oligonucleotide
gauaagaggcuucucuggu

SEQ ID NO: 1355597 - RNA, 19 nt, Artificial Sequence
  Description of Artificial Sequence: Synthetic oligonucleotide
ucgucaaucuugucuucca

SEQ ID NO: 1355598 - RNA, 19 nt, Artificial Sequence
  Description of Artificial Sequence: Synthetic oligonucleotide
cagugagagcugaacauuc

SEQ ID NO: 1355599 - RNA, 19 nt, Artificial Sequence
  Description of Artificial Sequence: Synthetic oligonucleotide
gcugcugucgaguagaucu

SEQ ID NO: 1355600 - RNA, 19 nt, Artificial Sequence
  Description of Artificial Sequence: Synthetic oligonucleotide
uuuugcucccuaugccuga

SEQ ID NO: 1355601 - RNA, 19 nt, Artificial Sequence
  Description of Artificial Sequence: Synthetic oligonucleotide
ucgcacuucaucgucuucu

SEQ ID NO: 1355602 - RNA, 19 nt, Artificial Sequence
  Description of Artificial Sequence: Synthetic oligonucleotide
uggcuaaagcgaagaacac

SEQ ID NO: 1355603 - RNA, 19 nt, Artificial Sequence
  Description of Artificial Sequence: Synthetic oligonucleotide
ucuuugggguuagcgaccc

SEQ ID NO: 1355604 - RNA, 19 nt, Artificial Sequence
  Description of Artificial Sequence: Synthetic oligonucleotide
acugcgaucugagcgcccg

SEQ ID NO: 1355605 - RNA, 19 nt, Artificial Sequence
  Description of Artificial Sequence: Synthetic oligonucleotide
uauuaucuucggcuucuua

SEQ ID NO: 1355606 - RNA, 19 nt, Artificial Sequence
  Description of Artificial Sequence: Synthetic oligonucleotide
uuuuaguggcaguguuucu

SEQ ID NO: 1355607 - RNA, 19 nt, Artificial Sequence
  Description of Artificial Sequence: Synthetic oligonucleotide
cuuuaacgcgcagcaagcc

SEQ ID NO: 1355608 - RNA, 19 nt, Artificial Sequence
  Description of Artificial Sequence: Synthetic oligonucleotide
gggguuagcgacccgauac

SEQ ID NO: 1355609 - RNA, 19 nt, Artificial Sequence
  Description of Artificial Sequence: Synthetic oligonucleotide
ucgucagcuuuagagucag

SEQ ID NO: 1355610 - RNA, 19 nt, Artificial Sequence
  Description of Artificial Sequence: Synthetic oligonucleotide
cccguagucggauaagagg

SEQ ID NO: 1355611 - RNA, 19 nt, Artificial Sequence
  Description of Artificial Sequence: Synthetic oligonucleotide
ugccuggccaccuuugauc

SEQ ID NO: 1355612 - RNA, 19 nt, Artificial Sequence
  Description of Artificial Sequence: Synthetic oligonucleotide
ccuuugagcaucugccucg

SEQ ID NO: 1355613 - RNA, 19 nt, Artificial Sequence
  Description of Artificial Sequence: Synthetic oligonucleotide
auccguuugcuagauguug

SEQ ID NO: 1355614 - RNA, 19 nt, Artificial Sequence
  Description of Artificial Sequence: Synthetic oligonucleotide
aucuucggcuucuuagaga

SEQ ID NO: 1355615 - RNA, 19 nt, Artificial Sequence
  Description of Artificial Sequence: Synthetic oligonucleotide
cuuccgaaggagauuuuga

SEQ ID NO: 1355616 - RNA, 19 nt, Artificial Sequence
  Description of Artificial Sequence: Synthetic oligonucleotide
auauggcgcuccuuaagaa

SEQ ID NO: 1355617 - RNA, 19 nt, Artificial Sequence
  Description of Artificial Sequence: Synthetic oligonucleotide
uccacccguagucggauaa

SEQ ID NO: 1355618 - RNA, 19 nt, Artificial Sequence
  Description of Artificial Sequence: Synthetic oligonucleotide
uccaggggaaagagaaguc

SEQ ID NO: 1355619 - RNA, 19 nt, Artificial Sequence
  Description of Artificial Sequence: Synthetic oligonucleotide
uugcuagauguugugccug

SEQ ID NO: 1355620 - RNA, 19 nt, Artificial Sequence
  Description of Artificial Sequence: Synthetic oligonucleotide
uuccuuccgaaggagauuu

SEQ ID NO: 1355621 - RNA, 19 nt, Artificial Sequence
  Description of Artificial Sequence: Synthetic oligonucleotide
uuacacucaugaaguuggu

SEQ ID NO: 1355622 - RNA, 19 nt, Artificial Sequence
  Description of Artificial Sequence: Synthetic oligonucleotide
uucccuagccguucgcgcu

SEQ ID NO: 1355623 - RNA, 19 nt, Artificial Sequence
  Description of Artificial Sequence: Synthetic oligonucleotide
aaacaucgucagcuuuaga

SEQ ID NO: 1355624 - RNA, 19 nt, Artificial Sequence
  Description of Artificial Sequence: Synthetic oligonucleotide
uucuggcuaaagcgaagaa

SEQ ID NO: 1355625 - RNA, 19 nt, Artificial Sequence
  Description of Artificial Sequence: Synthetic oligonucleotide
ucagagucauuugcugucu

SEQ ID NO: 1355626 - RNA, 19 nt, Artificial Sequence
  Description of Artificial Sequence: Synthetic oligonucleotide
cauuugcugucuguucugc

SEQ ID NO: 1355627 - RNA, 19 nt, Artificial Sequence
  Description of Artificial Sequence: Synthetic oligonucleotide
ugcgaucugagcgcccggg

SEQ ID NO: 1355628 - RNA, 19 nt, Artificial Sequence
  Description of Artificial Sequence: Synthetic oligonucleotide
cccuuuaacgcgcagcaag

SEQ ID NO: 1355629 - RNA, 19 nt, Artificial Sequence
  Description of Artificial Sequence: Synthetic oligonucleotide
ugguugggccaauuuuaca

SEQ ID NO: 1355630 - RNA, 19 nt, Artificial Sequence
  Description of Artificial Sequence: Synthetic oligonucleotide
uggcgcuccuuaagaaacc

SEQ ID NO: 1355631 - RNA, 19 nt, Artificial Sequence
  Description of Artificial Sequence: Synthetic oligonucleotide
uuugggugguuagcgagaa

SEQ ID NO: 1355632 - RNA, 19 nt, Artificial Sequence
  Description of Artificial Sequence: Synthetic oligonucleotide
uagucggauaagaggcuuc

SEQ ID NO: 1355633 - RNA, 19 nt, Artificial Sequence
  Description of Artificial Sequence: Synthetic oligonucleotide
caaagccuccacuguaguc

SEQ ID NO: 1355634 - RNA, 19 nt, Artificial Sequence
  Description of Artificial Sequence: Synthetic oligonucleotide
acccgauaccacaaauuuc

SEQ ID NO: 1355635 - RNA, 19 nt, Artificial Sequence
  Description of Artificial Sequence: Synthetic oligonucleotide
aaacgccggaccucuucgu

SEQ ID NO: 1355636 - RNA, 19 nt, Artificial Sequence
  Description of Artificial Sequence: Synthetic oligonucleotide
auuucuggcuaaagcgaag

SEQ ID NO: 1355637 - RNA, 19 nt, Artificial Sequence
  Description of Artificial Sequence: Synthetic oligonucleotide
guagccgucuccugcccag

SEQ ID NO: 1355638 - RNA, 19 nt, Artificial Sequence
  Description of Artificial Sequence: Synthetic oligonucleotide
ccuuuaacgcgcagcaagc

SEQ ID NO: 1355639 - RNA, 19 nt, Artificial Sequence
  Description of Artificial Sequence: Synthetic oligonucleotide
gaauucccuagccguucgc

SEQ ID NO: 1355640 - RNA, 19 nt, Artificial Sequence
  Description of Artificial Sequence: Synthetic oligonucleotide
ucuucgaccucggccucgg

SEQ ID NO: 1355641 - RNA, 19 nt, Artificial Sequence
  Description of Artificial Sequence: Synthetic oligonucleotide
cucccuuuaacgcgcagca

SEQ ID NO: 1355642 - RNA, 19 nt, Artificial Sequence
  Description of Artificial Sequence: Synthetic oligonucleotide
aacugccgcacugugcgga

SEQ ID NO: 1355643 - RNA, 19 nt, Artificial Sequence
  Description of Artificial Sequence: Synthetic oligonucleotide
gacccgauaccacaaauuu

SEQ ID NO: 1355644 - RNA, 19 nt, Artificial Sequence
  Description of Artificial Sequence: Synthetic oligonucleotide
gucuagaauggacauauuu

SEQ ID NO: 1355645 - RNA, 19 nt, Artificial Sequence
  Description of Artificial Sequence: Synthetic oligonucleotide
cacuaauuccucgauggca

SEQ ID NO: 1355646 - RNA, 19 nt, Artificial Sequence
  Description of Artificial Sequence: Synthetic oligonucleotide
uaguccacccguagucgga

SEQ ID NO: 1355647 - RNA, 19 nt, Artificial Sequence
  Description of Artificial Sequence: Synthetic oligonucleotide
ucgauguaguggccuuuga

SEQ ID NO: 1355648 - RNA, 19 nt, Artificial Sequence
  Description of Artificial Sequence: Synthetic oligonucleotide
cacguguuucuuaacagcu

SEQ ID NO: 1355649 - RNA, 19 nt, Artificial Sequence
  Description of Artificial Sequence: Synthetic oligonucleotide
gagaauucccuagccguuc

SEQ ID NO: 1355650 - RNA, 19 nt, Artificial Sequence
  Description of Artificial Sequence: Synthetic oligonucleotide
cacuguaguccacccguag

SEQ ID NO: 1355651 - RNA, 19 nt, Artificial Sequence
  Description of Artificial Sequence: Synthetic oligonucleotide
aucgaaacucaggucguca

SEQ ID NO: 1355652 - RNA, 19 nt, Artificial Sequence
  Description of Artificial Sequence: Synthetic oligonucleotide
gcuaaagcgaagaacacua

SEQ ID NO: 1355653 - RNA, 19 nt, Artificial Sequence
  Description of Artificial Sequence: Synthetic oligonucleotide
auaucgaaacucaggucgu

SEQ ID NO: 1355654 - RNA, 19 nt, Artificial Sequence
  Description of Artificial Sequence: Synthetic oligonucleotide
gacaaucauguuccauuaa

SEQ ID NO: 1355655 - RNA, 19 nt, Artificial Sequence
  Description of Artificial Sequence: Synthetic oligonucleotide
gucuucuacucugaguguc

SEQ ID NO: 1355656 - RNA, 19 nt, Artificial Sequence
  Description of Artificial Sequence: Synthetic oligonucleotide
agucggauaagaggcuucu

SEQ ID NO: 1355657 - RNA, 19 nt, Artificial Sequence
  Description of Artificial Sequence: Synthetic oligonucleotide
guaguggccuuugagcauc

SEQ ID NO: 1355658 - RNA, 19 nt, Artificial Sequence
  Description of Artificial Sequence: Synthetic oligonucleotide
gaacugccgcacugugcgg

SEQ ID NO: 1355659 - RNA, 19 nt, Artificial Sequence
  Description of Artificial Sequence: Synthetic oligonucleotide
gguacuucacuaauuccuc

SEQ ID NO: 1355660 - RNA, 19 nt, Artificial Sequence
  Description of Artificial Sequence: Synthetic oligonucleotide
ugacugcgaucugagcgcc

SEQ ID NO: 1355661 - RNA, 19 nt, Artificial Sequence
  Description of Artificial Sequence: Synthetic oligonucleotide
gcgcucgguauuuucaagc

SEQ ID NO: 1355662 - RNA, 19 nt, Artificial Sequence
  Description of Artificial Sequence: Synthetic oligonucleotide
agugagagcugaacauucu

SEQ ID NO: 1355663 - RNA, 19 nt, Artificial Sequence
  Description of Artificial Sequence: Synthetic oligonucleotide
uucacccaucccucuuucu

SEQ ID NO: 1355664 - RNA, 19 nt, Artificial Sequence
  Description of Artificial Sequence: Synthetic oligonucleotide
ugcugucgaguagaucuga

SEQ ID NO: 1355665 - RNA, 19 nt, Artificial Sequence
  Description of Artificial Sequence: Synthetic oligonucleotide
cugcugucgaguagaucug

SEQ ID NO: 1355666 - RNA, 19 nt, Artificial Sequence
  Description of Artificial Sequence: Synthetic oligonucleotide
cccacguguuucuuaacag

SEQ ID NO: 1355667 - RNA, 19 nt, Artificial Sequence
  Description of Artificial Sequence: Synthetic oligonucleotide
ucggcuucuuagagaacua

SEQ ID NO: 1355668 - RNA, 19 nt, Artificial Sequence
  Description of Artificial Sequence: Synthetic oligonucleotide
uugggguuagcgacccgau

SEQ ID NO: 1355669 - RNA, 19 nt, Artificial Sequence
  Description of Artificial Sequence: Synthetic oligonucleotide
uagcgacccgauaccacaa

SEQ ID NO: 1355670 - RNA, 19 nt, Artificial Sequence
  Description of Artificial Sequence: Synthetic oligonucleotide
ccuuugaucagccuuggaa

SEQ ID NO: 1355671 - RNA, 19 nt, Artificial Sequence
  Description of Artificial Sequence: Synthetic oligonucleotide
caucagagucauuugcugu

SEQ ID NO: 1355672 - RNA, 19 nt, Artificial Sequence
  Description of Artificial Sequence: Synthetic oligonucleotide
ccacaaauucuugaacggc

SEQ ID NO: 1355673 - RNA, 19 nt, Artificial Sequence
  Description of Artificial Sequence: Synthetic oligonucleotide
agcccacguguuucuuaac

SEQ ID NO: 1355674 - RNA, 19 nt, Artificial Sequence
  Description of Artificial Sequence: Synthetic oligonucleotide
gacauccguuugcuagaug

SEQ ID NO: 1355675 - RNA, 19 nt, Artificial Sequence
  Description of Artificial Sequence: Synthetic oligonucleotide
gucgucagcacugaaggcu

SEQ ID NO: 1355676 - RNA, 19 nt, Artificial Sequence
  Description of Artificial Sequence: Synthetic oligonucleotide
ucgcgcucgguauuuucaa

SEQ ID NO: 1355677 - RNA, 19 nt, Artificial Sequence
  Description of Artificial Sequence: Synthetic oligonucleotide
guuagcgacccgauaccac

SEQ ID NO: 1355678 - RNA, 19 nt, Artificial Sequence
  Description of Artificial Sequence: Synthetic oligonucleotide
uaucgaaacucaggucguc

SEQ ID NO: 1355679 - RNA, 19 nt, Artificial Sequence
  Description of Artificial Sequence: Synthetic oligonucleotide
gugucucggccucucugag

SEQ ID NO: 1355680 - RNA, 19 nt, Artificial Sequence
  Description of Artificial Sequence: Synthetic oligonucleotide
gucgauguaguggccuuug

SEQ ID NO: 1355681 - RNA, 19 nt, Artificial Sequence
  Description of Artificial Sequence: Synthetic oligonucleotide
ucucgcacuucaucgucuu

SEQ ID NO: 1355682 - RNA, 19 nt, Artificial Sequence
  Description of Artificial Sequence: Synthetic oligonucleotide
agaaaccgcuguguuuucu

SEQ ID NO: 1355683 - RNA, 19 nt, Artificial Sequence
  Description of Artificial Sequence: Synthetic oligonucleotide
acccguagucggauaagag

SEQ ID NO: 1355684 - RNA, 19 nt, Artificial Sequence
  Description of Artificial Sequence: Synthetic oligonucleotide
gguugaaagagaauucccu

SEQ ID NO: 1355685 - RNA, 19 nt, Artificial Sequence
  Description of Artificial Sequence: Synthetic oligonucleotide
cugcucauggccucucgca

SEQ ID NO: 1355686 - RNA, 19 nt, Artificial Sequence
  Description of Artificial Sequence: Synthetic oligonucleotide
ggguuagcgacccgauacc

SEQ ID NO: 1355687 - RNA, 19 nt, Artificial Sequence
  Description of Artificial Sequence: Synthetic oligonucleotide
gucaggguugaacagguuu

SEQ ID NO: 1355688 - RNA, 19 nt, Artificial Sequence
  Description of Artificial Sequence: Synthetic oligonucleotide
cagagucauuugcugucug

SEQ ID NO: 1355689 - RNA, 19 nt, Artificial Sequence
  Description of Artificial Sequence: Synthetic oligonucleotide
ggcgcuccuuaagaaaccg

SEQ ID NO: 1355690 - RNA, 19 nt, Artificial Sequence
  Description of Artificial Sequence: Synthetic oligonucleotide
uccucccuuuaacgcgcag

SEQ ID NO: 1355691 - RNA, 19 nt, Artificial Sequence
  Description of Artificial Sequence: Synthetic oligonucleotide
caccuuugaucagccuugg

SEQ ID NO: 1355692 - RNA, 19 nt, Artificial Sequence
  Description of Artificial Sequence: Synthetic oligonucleotide
guuugggugguuagcgaga

SEQ ID NO: 1355693 - RNA, 19 nt, Artificial Sequence
  Description of Artificial Sequence: Synthetic oligonucleotide
agccguucgcgcucgguau

SEQ ID NO: 1355694 - RNA, 19 nt, Artificial Sequence
  Description of Artificial Sequence: Synthetic oligonucleotide
cugucgaguagaucugaaa

SEQ ID NO: 1355695 - RNA, 19 nt, Artificial Sequence
  Description of Artificial Sequence: Synthetic oligonucleotide
ggcaguguuucuggaaggc

SEQ ID NO: 1355696 - RNA, 19 nt, Artificial Sequence
  Description of Artificial Sequence: Synthetic oligonucleotide
cucgaguagccgucuccug

SEQ ID NO: 1355697 - RNA, 19 nt, Artificial Sequence
  Description of Artificial Sequence: Synthetic oligonucleotide
gcaugcagugcuuugauuu

SEQ ID NO: 1355698 - RNA, 19 nt, Artificial Sequence
  Description of Artificial Sequence: Synthetic oligonucleotide
agagaauucccuagccguu

SEQ ID NO: 1355699 - RNA, 19 nt, Artificial Sequence
  Description of Artificial Sequence: Synthetic oligonucleotide
ugauaucuuugggguuagc

SEQ ID NO: 1355700 - RNA, 19 nt, Artificial Sequence
  Description of Artificial Sequence: Synthetic oligonucleotide
ugggguuagcgacccgaua

SEQ ID NO: 1355701 - RNA, 19 nt, Artificial Sequence
  Description of Artificial Sequence: Synthetic oligonucleotide
gucagcacugaaggcugag

SEQ ID NO: 1355702 - RNA, 19 nt, Artificial Sequence
  Description of Artificial Sequence: Synthetic oligonucleotide
ucccuagccguucgcgcuc

SEQ ID NO: 1355703 - RNA, 19 nt, Artificial Sequence
  Description of Artificial Sequence: Synthetic oligonucleotide
acucaugaaguugguguuu

SEQ ID NO: 1355704 - RNA, 19 nt, Artificial Sequence
  Description of Artificial Sequence: Synthetic oligonucleotide
agcgcccgggcccugcuca

SEQ ID NO: 1355705 - RNA, 19 nt, Artificial Sequence
  Description of Artificial Sequence: Synthetic oligonucleotide
uuugcucccuaugccugaa

SEQ ID NO: 1355706 - RNA, 19 nt, Artificial Sequence
  Description of Artificial Sequence: Synthetic oligonucleotide
aacgcgcagcaagcccacg

SEQ ID NO: 1355707 - RNA, 19 nt, Artificial Sequence
  Description of Artificial Sequence: Synthetic oligonucleotide
uugggugguuagcgagaac

SEQ ID NO: 1355708 - RNA, 19 nt, Artificial Sequence
  Description of Artificial Sequence: Synthetic oligonucleotide
guucgcgcucgguauuuuc

SEQ ID NO: 1355709 - RNA, 19 nt, Artificial Sequence
  Description of Artificial Sequence: Synthetic oligonucleotide
cuuugggguuagcgacccg

SEQ ID NO: 1355710 - RNA, 19 nt, Artificial Sequence
  Description of Artificial Sequence: Synthetic oligonucleotide
gggacauccguuugcuaga

SEQ ID NO: 1355711 - RNA, 19 nt, Artificial Sequence
  Description of Artificial Sequence: Synthetic oligonucleotide
ugggucaccuuaggauugu

SEQ ID NO: 1355712 - RNA, 19 nt, Artificial Sequence
  Description of Artificial Sequence: Synthetic oligonucleotide
cagcaagcccacguguuuc

SEQ ID NO: 1355713 - RNA, 19 nt, Artificial Sequence
  Description of Artificial Sequence: Synthetic oligonucleotide
gcccacguguuucuuaaca

SEQ ID NO: 1355714 - RNA, 19 nt, Artificial Sequence
  Description of Artificial Sequence: Synthetic oligonucleotide
gaacagguuugggugguua

SEQ ID NO: 1355715 - RNA, 19 nt, Artificial Sequence
  Description of Artificial Sequence: Synthetic oligonucleotide
cuccaggggaaagagaagu

SEQ ID NO: 1355716 - RNA, 19 nt, Artificial Sequence
  Description of Artificial Sequence: Synthetic oligonucleotide
cucugaaacgccggaccuc

SEQ ID NO: 1355717 - RNA, 19 nt, Artificial Sequence
  Description of Artificial Sequence: Synthetic oligonucleotide
cuucggcuucuuagagaac

SEQ ID NO: 1355718 - RNA, 19 nt, Artificial Sequence
  Description of Artificial Sequence: Synthetic oligonucleotide
gcaucugccucgaguagcc

SEQ ID NO: 1355719 - RNA, 19 nt, Artificial Sequence
  Description of Artificial Sequence: Synthetic oligonucleotide
ugucaggguugaacagguu

SEQ ID NO: 1355720 - RNA, 19 nt, Artificial Sequence
  Description of Artificial Sequence: Synthetic oligonucleotide
gagugucguuccuuccgaa

SEQ ID NO: 1355721 - RNA, 19 nt, Artificial Sequence
  Description of Artificial Sequence: Synthetic oligonucleotide
ccuuggaacugguaggaaa

SEQ ID NO: 1355722 - RNA, 19 nt, Artificial Sequence
  Description of Artificial Sequence: Synthetic oligonucleotide
agcgacccgauaccacaaa

SEQ ID NO: 1355723 - RNA, 19 nt, Artificial Sequence
  Description of Artificial Sequence: Synthetic oligonucleotide
gaggucgauguaguggccu

SEQ ID NO: 1355724 - RNA, 19 nt, Artificial Sequence
  Description of Artificial Sequence: Synthetic oligonucleotide
guucugcuauaucgaaacu

SEQ ID NO: 1355725 - RNA, 19 nt, Artificial Sequence
  Description of Artificial Sequence: Synthetic oligonucleotide
accaggucuucuacucuga

SEQ ID NO: 1355726 - RNA, 19 nt, Artificial Sequence
  Description of Artificial Sequence: Synthetic oligonucleotide
cgauauggcgcuccuuaag

SEQ ID NO: 1355727 - RNA, 19 nt, Artificial Sequence
  Description of Artificial Sequence: Synthetic oligonucleotide
gccucgaguagccgucucc

SEQ ID NO: 1355728 - RNA, 19 nt, Artificial Sequence
  Description of Artificial Sequence: Synthetic oligonucleotide
ucccuuuaacgcgcagcaa

SEQ ID NO: 1355729 - RNA, 19 nt, Artificial Sequence
  Description of Artificial Sequence: Synthetic oligonucleotide
gguuagcgacccgauacca

SEQ ID NO: 1355730 - RNA, 19 nt, Artificial Sequence
  Description of Artificial Sequence: Synthetic oligonucleotide
cugcgaucugagcgcccgg

SEQ ID NO: 1355731 - RNA, 19 nt, Artificial Sequence
  Description of Artificial Sequence: Synthetic oligonucleotide
cguuugcuagauguugugc

SEQ ID NO: 1355732 - RNA, 19 nt, Artificial Sequence
  Description of Artificial Sequence: Synthetic oligonucleotide
acguguuucuuaacagcuu

SEQ ID NO: 1355733 - RNA, 19 nt, Artificial Sequence
  Description of Artificial Sequence: Synthetic oligonucleotide
ccguuugcuagauguugug

SEQ ID NO: 1355734 - RNA, 19 nt, Artificial Sequence
  Description of Artificial Sequence: Synthetic oligonucleotide
ugccucgaguagccgucuc

SEQ ID NO: 1355735 - RNA, 19 nt, Artificial Sequence
  Description of Artificial Sequence: Synthetic oligonucleotide
cacccguagucggauaaga

SEQ ID NO: 1355736 - RNA, 19 nt, Artificial Sequence
  Description of Artificial Sequence: Synthetic oligonucleotide
caagcccacguguuucuua

SEQ ID NO: 1355737 - RNA, 19 nt, Artificial Sequence
  Description of Artificial Sequence: Synthetic oligonucleotide
cacucaugaaguugguguu

SEQ ID NO: 1355738 - RNA, 19 nt, Artificial Sequence
  Description of Artificial Sequence: Synthetic oligonucleotide
guaucaugacaaucauguu

SEQ ID NO: 1355739 - RNA, 19 nt, Artificial Sequence
  Description of Artificial Sequence: Synthetic oligonucleotide
gcgucuagaauggacauau

SEQ ID NO: 1355740 - RNA, 19 nt, Artificial Sequence
  Description of Artificial Sequence: Synthetic oligonucleotide
cacccaucccucuuucugu

SEQ ID NO: 1355741 - RNA, 19 nt, Artificial Sequence
  Description of Artificial Sequence: Synthetic oligonucleotide
ggcuaaagcgaagaacacu

SEQ ID NO: 1355742 - RNA, 19 nt, Artificial Sequence
  Description of Artificial Sequence: Synthetic oligonucleotide
ccgauaccacaaauuucug

SEQ ID NO: 1355743 - RNA, 19 nt, Artificial Sequence
  Description of Artificial Sequence: Synthetic oligonucleotide
uccuuccgaaggagauuuu

SEQ ID NO: 1355744 - RNA, 19 nt, Artificial Sequence
  Description of Artificial Sequence: Synthetic oligonucleotide
gacugcgaucugagcgccc

SEQ ID NO: 1355745 - RNA, 19 nt, Artificial Sequence
  Description of Artificial Sequence: Synthetic oligonucleotide
cgaucugagcgcccgggcc

SEQ ID NO: 1355746 - RNA, 19 nt, Artificial Sequence
  Description of Artificial Sequence: Synthetic oligonucleotide
caagcuucccaaaguugau

SEQ ID NO: 1355747 - RNA, 19 nt, Artificial Sequence
  Description of Artificial Sequence: Synthetic oligonucleotide
ccuuuugcucccuaugccu

SEQ ID NO: 1355748 - RNA, 19 nt, Artificial Sequence
  Description of Artificial Sequence: Synthetic oligonucleotide
ggaaggcugcugucgagua

SEQ ID NO: 1355749 - RNA, 19 nt, Artificial Sequence
  Description of Artificial Sequence: Synthetic oligonucleotide
aucugagcgcccgggcccu

SEQ ID NO: 1355750 - RNA, 19 nt, Artificial Sequence
  Description of Artificial Sequence: Synthetic oligonucleotide
cuaucuggcucugggacau

SEQ ID NO: 1355751 - RNA, 19 nt, Artificial Sequence
  Description of Artificial Sequence: Synthetic oligonucleotide
gucggauaagaggcuucuc

SEQ ID NO: 1355752 - RNA, 19 nt, Artificial Sequence
  Description of Artificial Sequence: Synthetic oligonucleotide
ucuccgcagucuggaaaua

SEQ ID NO: 1355753 - RNA, 19 nt, Artificial Sequence
  Description of Artificial Sequence: Synthetic oligonucleotide
ccgcacugugcggagaggc

SEQ ID NO: 1355754 - RNA, 19 nt, Artificial Sequence
  Description of Artificial Sequence: Synthetic oligonucleotide
gcgaucugagcgcccgggc

SEQ ID NO: 1355755 - RNA, 19 nt, Artificial Sequence
  Description of Artificial Sequence: Synthetic oligonucleotide
ccucucgcacuucaucguc

SEQ ID NO: 1355756 - RNA, 19 nt, Artificial Sequence
  Description of Artificial Sequence: Synthetic oligonucleotide
gggugguuagcgagaacca

SEQ ID NO: 1355757 - RNA, 19 nt, Artificial Sequence
  Description of Artificial Sequence: Synthetic oligonucleotide
guagucggauaagaggcuu

SEQ ID NO: 1355758 - RNA, 19 nt, Artificial Sequence
  Description of Artificial Sequence: Synthetic oligonucleotide
gguuagcgagaaccacauc

SEQ ID NO: 1355759 - RNA, 19 nt, Artificial Sequence
  Description of Artificial Sequence: Synthetic oligonucleotide
caauagucucugaguaauu

SEQ ID NO: 1355760 - RNA, 19 nt, Artificial Sequence
  Description of Artificial Sequence: Synthetic oligonucleotide
cuucgaccucggccucggc

SEQ ID NO: 1355761 - RNA, 19 nt, Artificial Sequence
  Description of Artificial Sequence: Synthetic oligonucleotide
ggucuucuacucugagugu

SEQ ID NO: 1355762 - RNA, 19 nt, Artificial Sequence
  Description of Artificial Sequence: Synthetic oligonucleotide
cauccguuugcuagauguu

SEQ ID NO: 1355763 - RNA, 19 nt, Artificial Sequence
  Description of Artificial Sequence: Synthetic oligonucleotide
cgcucgguauuuucaagca

SEQ ID NO: 1355764 - RNA, 19 nt, Artificial Sequence
  Description of Artificial Sequence: Synthetic oligonucleotide
ccuuaagaaaccgcugugu

SEQ ID NO: 1355765 - RNA, 19 nt, Artificial Sequence
  Description of Artificial Sequence: Synthetic oligonucleotide
ccaagcagaagcucuggau

SEQ ID NO: 1355766 - RNA, 19 nt, Artificial Sequence
  Description of Artificial Sequence: Synthetic oligonucleotide
cagcugguacuucacuaau

SEQ ID NO: 1355767 - RNA, 19 nt, Artificial Sequence
  Description of Artificial Sequence: Synthetic oligonucleotide
gagcaucgauauggcgcuc

SEQ ID NO: 1355768 - RNA, 19 nt, Artificial Sequence
  Description of Artificial Sequence: Synthetic oligonucleotide
cgcgcucgguauuuucaag

SEQ ID NO: 1355769 - RNA, 19 nt, Artificial Sequence
  Description of Artificial Sequence: Synthetic oligonucleotide
cagcaugcagugcuuugau

SEQ ID NO: 1355770 - RNA, 19 nt, Artificial Sequence
  Description of Artificial Sequence: Synthetic oligonucleotide
gugccuggccaccuuugau

SEQ ID NO: 1355771 - RNA, 19 nt, Artificial Sequence
  Description of Artificial Sequence: Synthetic oligonucleotide
ucugagcgcccgggcccug

SEQ ID NO: 1355772 - RNA, 19 nt, Artificial Sequence
  Description of Artificial Sequence: Synthetic oligonucleotide
gcugucgaguagaucugaa

SEQ ID NO: 1355773 - RNA, 19 nt, Artificial Sequence
  Description of Artificial Sequence: Synthetic oligonucleotide
cggcuucuuagagaacuac

SEQ ID NO: 1355774 - RNA, 19 nt, Artificial Sequence
  Description of Artificial Sequence: Synthetic oligonucleotide
gcagugagagcugaacauu

SEQ ID NO: 1355775 - RNA, 19 nt, Artificial Sequence
  Description of Artificial Sequence: Synthetic oligonucleotide
ccacccguagucggauaag

SEQ ID NO: 1355776 - RNA, 19 nt, Artificial Sequence
  Description of Artificial Sequence: Synthetic oligonucleotide
gccgcacugugcggagagg

SEQ ID NO: 1355777 - RNA, 19 nt, Artificial Sequence
  Description of Artificial Sequence: Synthetic oligonucleotide
guccacccguagucggaua

SEQ ID NO: 1355778 - RNA, 19 nt, Artificial Sequence
  Description of Artificial Sequence: Synthetic oligonucleotide
caucgucuucuucguuggu

SEQ ID NO: 1355779 - RNA, 19 nt, Artificial Sequence
  Description of Artificial Sequence: Synthetic oligonucleotide
gcgacccgauaccacaaau

SEQ ID NO: 1355780 - RNA, 19 nt, Artificial Sequence
  Description of Artificial Sequence: Synthetic oligonucleotide
cccuagccguucgcgcucg

SEQ ID NO: 1355781 - RNA, 19 nt, Artificial Sequence
  Description of Artificial Sequence: Synthetic oligonucleotide
gcagcaagcccacguguuu

SEQ ID NO: 1355782 - RNA, 19 nt, Artificial Sequence
  Description of Artificial Sequence: Synthetic oligonucleotide
ccacaaauuucuggcuaaa

SEQ ID NO: 1355783 - RNA, 19 nt, Artificial Sequence
  Description of Artificial Sequence: Synthetic oligonucleotide
cguagucggauaagaggcu

SEQ ID NO: 1355784 - RNA, 19 nt, Artificial Sequence
  Description of Artificial Sequence: Synthetic oligonucleotide
ccuagccguucgcgcucgg

SEQ ID NO: 1355785 - RNA, 19 nt, Artificial Sequence
  Description of Artificial Sequence: Synthetic oligonucleotide
ggacauccguuugcuagau

SEQ ID NO: 1355786 - RNA, 19 nt, Artificial Sequence
  Description of Artificial Sequence: Synthetic oligonucleotide
gccuuggaacugguaggaa

SEQ ID NO: 1355787 - RNA, 19 nt, Artificial Sequence
  Description of Artificial Sequence: Synthetic oligonucleotide
ccucgaguagccgucuccu

SEQ ID NO: 1355788 - RNA, 19 nt, Artificial Sequence
  Description of Artificial Sequence: Synthetic oligonucleotide
cgacccgauaccacaaauu

SEQ ID NO: 1355789 - RNA, 19 nt, Artificial Sequence
  Description of Artificial Sequence: Synthetic oligonucleotide
ggucgauguaguggccuuu

SEQ ID NO: 1355790 - RNA, 19 nt, Artificial Sequence
  Description of Artificial Sequence: Synthetic oligonucleotide
gccguucgcgcucgguauu

SEQ ID NO: 1355791 - RNA, 19 nt, Artificial Sequence
  Description of Artificial Sequence: Synthetic oligonucleotide
cugugcggagaggcagcuu

SEQ ID NO: 1355792 - RNA, 19 nt, Artificial Sequence
  Description of Artificial Sequence: Synthetic oligonucleotide
cgucuagaauggacauauu

SEQ ID NO: 1355793 - RNA, 19 nt, Artificial Sequence
  Description of Artificial Sequence: Synthetic oligonucleotide
ccguucgcgcucgguauuu

SEQ ID NO: 1355794 - RNA, 19 nt, Artificial Sequence
  Description of Artificial Sequence: Synthetic oligonucleotide
cguucgcgcucgguauuuu

SEQ ID NO: 1355795 - RNA, 19 nt, Artificial Sequence
  Description of Artificial Sequence: Synthetic oligonucleotide
aaaucguacaaccaaaggg

SEQ ID NO: 1355796 - RNA, 19 nt, Artificial Sequence
  Description of Artificial Sequence: Synthetic oligonucleotide
ugagcuaagacuaaggaga

SEQ ID NO: 1355797 - RNA, 19 nt, Artificial Sequence
  Description of Artificial Sequence: Synthetic oligonucleotide
ugcaauuauguacaaaggg

SEQ ID NO: 1355798 - RNA, 19 nt, Artificial Sequence
  Description of Artificial Sequence: Synthetic oligonucleotide
aauccgagcauucagucgg

SEQ ID NO: 1355799 - RNA, 19 nt, Artificial Sequence
  Description of Artificial Sequence: Synthetic oligonucleotide
cucaaauguaguuacagcg

SEQ ID NO: 1355800 - RNA, 19 nt, Artificial Sequence
  Description of Artificial Sequence: Synthetic oligonucleotide
aaucguacaaccaaagggg

SEQ ID NO: 1355801 - RNA, 19 nt, Artificial Sequence
  Description of Artificial Sequence: Synthetic oligonucleotide
aaaaucguacaaccaaagg

SEQ ID NO: 1355802 - RNA, 19 nt, Artificial Sequence
  Description of Artificial Sequence: Synthetic oligonucleotide
ucaaauguaguuacagcgg

SEQ ID NO: 1355803 - RNA, 19 nt, Artificial Sequence
  Description of Artificial Sequence: Synthetic oligonucleotide
ugugcauguauguacacgg

SEQ ID NO: 1355804 - RNA, 19 nt, Artificial Sequence
  Description of Artificial Sequence: Synthetic oligonucleotide
uuucccauacuccagagug

SEQ ID NO: 1355805 - RNA, 19 nt, Artificial Sequence
  Description of Artificial Sequence: Synthetic oligonucleotide
cuagcucacaaguagaucc

SEQ ID NO: 1355806 - RNA, 19 nt, Artificial Sequence
  Description of Artificial Sequence: Synthetic oligonucleotide
caauuauguacaaagggag

SEQ ID NO: 1355807 - RNA, 19 nt, Artificial Sequence
  Description of Artificial Sequence: Synthetic oligonucleotide
aagaaaaucguacaaccaa

SEQ ID NO: 1355808 - RNA, 19 nt, Artificial Sequence
  Description of Artificial Sequence: Synthetic oligonucleotide
accauuuaggacugcaccc

SEQ ID NO: 1355809 - RNA, 19 nt, Artificial Sequence
  Description of Artificial Sequence: Synthetic oligonucleotide
caaagugucccauuuauac

SEQ ID NO: 1355810 - RNA, 19 nt, Artificial Sequence
  Description of Artificial Sequence: Synthetic oligonucleotide
uauuacaugugcuucaguc

SEQ ID NO: 1355811 - RNA, 19 nt, Artificial Sequence
  Description of Artificial Sequence: Synthetic oligonucleotide
uuacaugugcuucagucug

SEQ ID NO: 1355812 - RNA, 19 nt, Artificial Sequence
  Description of Artificial Sequence: Synthetic oligonucleotide
acuggaucgacguuagggg

SEQ ID NO: 1355813 - RNA, 19 nt, Artificial Sequence
  Description of Artificial Sequence: Synthetic oligonucleotide
uguuuaugcaggcugggca

SEQ ID NO: 1355814 - RNA, 19 nt, Artificial Sequence
  Description of Artificial Sequence: Synthetic oligonucleotide
ucaggugugauacgggugc

SEQ ID NO: 1355815 - RNA, 19 nt, Artificial Sequence
  Description of Artificial Sequence: Synthetic oligonucleotide
cauaaugagccccaugagc

SEQ ID NO: 1355816 - RNA, 19 nt, Artificial Sequence
  Description of Artificial Sequence: Synthetic oligonucleotide
cagucuauauuacaugugc

SEQ ID NO: 1355817 - RNA, 19 nt, Artificial Sequence
  Description of Artificial Sequence: Synthetic oligonucleotide
augagcuaagacuaaggag

SEQ ID NO: 1355818 - RNA, 19 nt, Artificial Sequence
  Description of Artificial Sequence: Synthetic oligonucleotide
uguacaaagggagaggggu

SEQ ID NO: 1355819 - RNA, 19 nt, Artificial Sequence
  Description of Artificial Sequence: Synthetic oligonucleotide
ugugguuucccauacucca

SEQ ID NO: 1355820 - RNA, 19 nt, Artificial Sequence
  Description of Artificial Sequence: Synthetic oligonucleotide
agauagcugccguucaagc

SEQ ID NO: 1355821 - RNA, 19 nt, Artificial Sequence
  Description of Artificial Sequence: Synthetic oligonucleotide
aucgaguaugaguccaugc

SEQ ID NO: 1355822 - RNA, 19 nt, Artificial Sequence
  Description of Artificial Sequence: Synthetic oligonucleotide
cuuaagagguggaugggcc

SEQ ID NO: 1355823 - RNA, 19 nt, Artificial Sequence
  Description of Artificial Sequence: Synthetic oligonucleotide
ucgaguaugaguccaugca

SEQ ID NO: 1355824 - RNA, 19 nt, Artificial Sequence
  Description of Artificial Sequence: Synthetic oligonucleotide
auacacaacauuguaaaca

SEQ ID NO: 1355825 - RNA, 19 nt, Artificial Sequence
  Description of Artificial Sequence: Synthetic oligonucleotide
acaugacgaagccggaacc

SEQ ID NO: 1355826 - RNA, 19 nt, Artificial Sequence
  Description of Artificial Sequence: Synthetic oligonucleotide
auggcuagcucacaaguag

SEQ ID NO: 1355827 - RNA, 19 nt, Artificial Sequence
  Description of Artificial Sequence: Synthetic oligonucleotide
uccuauauguguguuuggg

SEQ ID NO: 1355828 - RNA, 19 nt, Artificial Sequence
  Description of Artificial Sequence: Synthetic oligonucleotide
uuaagagguggaugggccg

SEQ ID NO: 1355829 - RNA, 19 nt, Artificial Sequence
  Description of Artificial Sequence: Synthetic oligonucleotide
ucuauauuacaugugcuuc

SEQ ID NO: 1355830 - RNA, 19 nt, Artificial Sequence
  Description of Artificial Sequence: Synthetic oligonucleotide
gaaaaucguacaaccaaag

SEQ ID NO: 1355831 - RNA, 19 nt, Artificial Sequence
  Description of Artificial Sequence: Synthetic oligonucleotide
auuacaugugcuucagucu

SEQ ID NO: 1355832 - RNA, 19 nt, Artificial Sequence
  Description of Artificial Sequence: Synthetic oligonucleotide
gaagccggaaccucggaag

SEQ ID NO: 1355833 - RNA, 19 nt, Artificial Sequence
  Description of Artificial Sequence: Synthetic oligonucleotide
auuuauacacaacauugua

SEQ ID NO: 1355834 - RNA, 19 nt, Artificial Sequence
  Description of Artificial Sequence: Synthetic oligonucleotide
auaaugagccccaugagcu

SEQ ID NO: 1355835 - RNA, 19 nt, Artificial Sequence
  Description of Artificial Sequence: Synthetic oligonucleotide
cauuuagagaacucaggug

SEQ ID NO: 1355836 - RNA, 19 nt, Artificial Sequence
  Description of Artificial Sequence: Synthetic oligonucleotide
cucauaaugagccccauga

SEQ ID NO: 1355837 - RNA, 19 nt, Artificial Sequence
  Description of Artificial Sequence: Synthetic oligonucleotide
ucguccucggccaugcagg

SEQ ID NO: 1355838 - RNA, 19 nt, Artificial Sequence
  Description of Artificial Sequence: Synthetic oligonucleotide
gaacucaggugugauacgg

SEQ ID NO: 1355839 - RNA, 19 nt, Artificial Sequence
  Description of Artificial Sequence: Synthetic oligonucleotide
uccagaguccuauaugugu

SEQ ID NO: 1355840 - RNA, 19 nt, Artificial Sequence
  Description of Artificial Sequence: Synthetic oligonucleotide
acaaccaaaggggaggcgg

SEQ ID NO: 1355841 - RNA, 19 nt, Artificial Sequence
  Description of Artificial Sequence: Synthetic oligonucleotide
cucacaaguagauccuccg

SEQ ID NO: 1355842 - RNA, 19 nt, Artificial Sequence
  Description of Artificial Sequence: Synthetic oligonucleotide
auucagucgggguuugccg

SEQ ID NO: 1355843 - RNA, 19 nt, Artificial Sequence
  Description of Artificial Sequence: Synthetic oligonucleotide
aguggauggcaucucauca

SEQ ID NO: 1355844 - RNA, 19 nt, Artificial Sequence
  Description of Artificial Sequence: Synthetic oligonucleotide
aauguaguuacagcggaau

SEQ ID NO: 1355845 - RNA, 19 nt, Artificial Sequence
  Description of Artificial Sequence: Synthetic oligonucleotide
aggcauuuguaucgguccc

SEQ ID NO: 1355846 - RNA, 19 nt, Artificial Sequence
  Description of Artificial Sequence: Synthetic oligonucleotide
uucagucgggguuugccgg

SEQ ID NO: 1355847 - RNA, 19 nt, Artificial Sequence
  Description of Artificial Sequence: Synthetic oligonucleotide
cugacacgagccuucaggg

SEQ ID NO: 1355848 - RNA, 19 nt, Artificial Sequence
  Description of Artificial Sequence: Synthetic oligonucleotide
ugacgaagccggaaccucg

SEQ ID NO: 1355849 - RNA, 19 nt, Artificial Sequence
  Description of Artificial Sequence: Synthetic oligonucleotide
ugguguugcacugagggca

SEQ ID NO: 1355850 - RNA, 19 nt, Artificial Sequence
  Description of Artificial Sequence: Synthetic oligonucleotide
ucauuuucccaauccgagc

SEQ ID NO: 1355851 - RNA, 19 nt, Artificial Sequence
  Description of Artificial Sequence: Synthetic oligonucleotide
caccauuuaggacugcacc

SEQ ID NO: 1355852 - RNA, 19 nt, Artificial Sequence
  Description of Artificial Sequence: Synthetic oligonucleotide
aguccuauauguguguuug

SEQ ID NO: 1355853 - RNA, 19 nt, Artificial Sequence
  Description of Artificial Sequence: Synthetic oligonucleotide
auguaguuacagcggaauc

SEQ ID NO: 1355854 - RNA, 19 nt, Artificial Sequence
  Description of Artificial Sequence: Synthetic oligonucleotide
uugugguuucccauacucc

SEQ ID NO: 1355855 - RNA, 19 nt, Artificial Sequence
  Description of Artificial Sequence: Synthetic oligonucleotide
cacuggaucgacguuaggg

SEQ ID NO: 1355856 - RNA, 19 nt, Artificial Sequence
  Description of Artificial Sequence: Synthetic oligonucleotide
gaggaucauauccuugggc

SEQ ID NO: 1355857 - RNA, 19 nt, Artificial Sequence
  Description of Artificial Sequence: Synthetic oligonucleotide
uguauugugguuucccaua

SEQ ID NO: 1355858 - RNA, 19 nt, Artificial Sequence
  Description of Artificial Sequence: Synthetic oligonucleotide
uaagacuaaggagaggauc

SEQ ID NO: 1355859 - RNA, 19 nt, Artificial Sequence
  Description of Artificial Sequence: Synthetic oligonucleotide
guuacagcggaaucuucag

SEQ ID NO: 1355860 - RNA, 19 nt, Artificial Sequence
  Description of Artificial Sequence: Synthetic oligonucleotide
ucacaaguagauccuccgc

SEQ ID NO: 1355861 - RNA, 19 nt, Artificial Sequence
  Description of Artificial Sequence: Synthetic oligonucleotide
ucguacaaccaaaggggag

SEQ ID NO: 1355862 - RNA, 19 nt, Artificial Sequence
  Description of Artificial Sequence: Synthetic oligonucleotide
uuuaggacugcaccccgga

SEQ ID NO: 1355863 - RNA, 19 nt, Artificial Sequence
  Description of Artificial Sequence: Synthetic oligonucleotide
agaggaucauauccuuggg

SEQ ID NO: 1355864 - RNA, 19 nt, Artificial Sequence
  Description of Artificial Sequence: Synthetic oligonucleotide
uugcacugagggcagagcu

SEQ ID NO: 1355865 - RNA, 19 nt, Artificial Sequence
  Description of Artificial Sequence: Synthetic oligonucleotide
acaugccaacacuggaucg

SEQ ID NO: 1355866 - RNA, 19 nt, Artificial Sequence
  Description of Artificial Sequence: Synthetic oligonucleotide
ucagucuaggggauggauc

SEQ ID NO: 1355867 - RNA, 19 nt, Artificial Sequence
  Description of Artificial Sequence: Synthetic oligonucleotide
cauuuucccaauccgagca

SEQ ID NO: 1355868 - RNA, 19 nt, Artificial Sequence
  Description of Artificial Sequence: Synthetic oligonucleotide
ucacuagcccauuuagaga

SEQ ID NO: 1355869 - RNA, 19 nt, Artificial Sequence
  Description of Artificial Sequence: Synthetic oligonucleotide
auacacagucuauauuaca

SEQ ID NO: 1355870 - RNA, 19 nt, Artificial Sequence
  Description of Artificial Sequence: Synthetic oligonucleotide
ugcaaaugaggcauuugua

SEQ ID NO: 1355871 - RNA, 19 nt, Artificial Sequence
  Description of Artificial Sequence: Synthetic oligonucleotide
ucaacgcaaggccugccug

SEQ ID NO: 1355872 - RNA, 19 nt, Artificial Sequence
  Description of Artificial Sequence: Synthetic oligonucleotide
guuaggggcaucgaguaug

SEQ ID NO: 1355873 - RNA, 19 nt, Artificial Sequence
  Description of Artificial Sequence: Synthetic oligonucleotide
ucccauuuauacacaacau

SEQ ID NO: 1355874 - RNA, 19 nt, Artificial Sequence
  Description of Artificial Sequence: Synthetic oligonucleotide
uggaucgacguuaggggca

SEQ ID NO: 1355875 - RNA, 19 nt, Artificial Sequence
  Description of Artificial Sequence: Synthetic oligonucleotide
acuaaggagaggaucauau

SEQ ID NO: 1355876 - RNA, 19 nt, Artificial Sequence
  Description of Artificial Sequence: Synthetic oligonucleotide
agaacucaggugugauacg

SEQ ID NO: 1355877 - RNA, 19 nt, Artificial Sequence
  Description of Artificial Sequence: Synthetic oligonucleotide
caugagcuaagacuaagga

SEQ ID NO: 1355878 - RNA, 19 nt, Artificial Sequence
  Description of Artificial Sequence: Synthetic oligonucleotide
uucaagcucccugacacga

SEQ ID NO: 1355879 - RNA, 19 nt, Artificial Sequence
  Description of Artificial Sequence: Synthetic oligonucleotide
aggggcaucgaguaugagu

SEQ ID NO: 1355880 - RNA, 19 nt, Artificial Sequence
  Description of Artificial Sequence: Synthetic oligonucleotide
cauuuaggacugcaccccg

SEQ ID NO: 1355881 - RNA, 19 nt, Artificial Sequence
  Description of Artificial Sequence: Synthetic oligonucleotide
cuggaucgacguuaggggc

SEQ ID NO: 1355882 - RNA, 19 nt, Artificial Sequence
  Description of Artificial Sequence: Synthetic oligonucleotide
cacuagcccauuuagagaa

SEQ ID NO: 1355883 - RNA, 19 nt, Artificial Sequence
  Description of Artificial Sequence: Synthetic oligonucleotide
uuuccacucuaccccagcu

SEQ ID NO: 1355884 - RNA, 19 nt, Artificial Sequence
  Description of Artificial Sequence: Synthetic oligonucleotide
aacacuggaucgacguuag

SEQ ID NO: 1355885 - RNA, 19 nt, Artificial Sequence
  Description of Artificial Sequence: Synthetic oligonucleotide
uuaggggcaucgaguauga

SEQ ID NO: 1355886 - RNA, 19 nt, Artificial Sequence
  Description of Artificial Sequence: Synthetic oligonucleotide
aaccugugugcaauuaugu

SEQ ID NO: 1355887 - RNA, 19 nt, Artificial Sequence
  Description of Artificial Sequence: Synthetic oligonucleotide
aguaugaguccaugcaaau

SEQ ID NO: 1355888 - RNA, 19 nt, Artificial Sequence
  Description of Artificial Sequence: Synthetic oligonucleotide
uggauggcuagcucacaag

SEQ ID NO: 1355889 - RNA, 19 nt, Artificial Sequence
  Description of Artificial Sequence: Synthetic oligonucleotide
uuggguguguaugugcaug

SEQ ID NO: 1355890 - RNA, 19 nt, Artificial Sequence
  Description of Artificial Sequence: Synthetic oligonucleotide
accacugaacaccgagcac

SEQ ID NO: 1355891 - RNA, 19 nt, Artificial Sequence
  Description of Artificial Sequence: Synthetic oligonucleotide
guauugugguuucccauac

SEQ ID NO: 1355892 - RNA, 19 nt, Artificial Sequence
  Description of Artificial Sequence: Synthetic oligonucleotide
guuggcucgcacucgcagg

SEQ ID NO: 1355893 - RNA, 19 nt, Artificial Sequence
  Description of Artificial Sequence: Synthetic oligonucleotide
gcuaagacuaaggagagga

SEQ ID NO: 1355894 - RNA, 19 nt, Artificial Sequence
  Description of Artificial Sequence: Synthetic oligonucleotide
gcaauuauguacaaaggga

SEQ ID NO: 1355895 - RNA, 19 nt, Artificial Sequence
  Description of Artificial Sequence: Synthetic oligonucleotide
uuacagcggaaucuucagu

SEQ ID NO: 1355896 - RNA, 19 nt, Artificial Sequence
  Description of Artificial Sequence: Synthetic oligonucleotide
uugcucaacgcaaggccug

SEQ ID NO: 1355897 - RNA, 19 nt, Artificial Sequence
  Description of Artificial Sequence: Synthetic oligonucleotide
uuggcucgcacucgcagga

SEQ ID NO: 1355898 - RNA, 19 nt, Artificial Sequence
  Description of Artificial Sequence: Synthetic oligonucleotide
aacucaggugugauacggg

SEQ ID NO: 1355899 - RNA, 19 nt, Artificial Sequence
  Description of Artificial Sequence: Synthetic oligonucleotide
uuaggacugcaccccggag

SEQ ID NO: 1355900 - RNA, 19 nt, Artificial Sequence
  Description of Artificial Sequence: Synthetic oligonucleotide
agaaaaucguacaaccaaa

SEQ ID NO: 1355901 - RNA, 19 nt, Artificial Sequence
  Description of Artificial Sequence: Synthetic oligonucleotide
uccgcaggucuccaggcgc

SEQ ID NO: 1355902 - RNA, 19 nt, Artificial Sequence
  Description of Artificial Sequence: Synthetic oligonucleotide
aguuacagcggaaucuuca

SEQ ID NO: 1355903 - RNA, 19 nt, Artificial Sequence
  Description of Artificial Sequence: Synthetic oligonucleotide
agaguccgcagccagcacu

SEQ ID NO: 1355904 - RNA, 19 nt, Artificial Sequence
  Description of Artificial Sequence: Synthetic oligonucleotide
uggcuagcucacaaguaga

SEQ ID NO: 1355905 - RNA, 19 nt, Artificial Sequence
  Description of Artificial Sequence: Synthetic oligonucleotide
caacgcaaggccugccugg

SEQ ID NO: 1355906 - RNA, 19 nt, Artificial Sequence
  Description of Artificial Sequence: Synthetic oligonucleotide
aucgacguuaggggcaucg

SEQ ID NO: 1355907 - RNA, 19 nt, Artificial Sequence
  Description of Artificial Sequence: Synthetic oligonucleotide
uagcucacaaguagauccu

SEQ ID NO: 1355908 - RNA, 19 nt, Artificial Sequence
  Description of Artificial Sequence: Synthetic oligonucleotide
uuucccaauccgagcauuc

SEQ ID NO: 1355909 - RNA, 19 nt, Artificial Sequence
  Description of Artificial Sequence: Synthetic oligonucleotide
cccauuuuccacucuaccc

SEQ ID NO: 1355910 - RNA, 19 nt, Artificial Sequence
  Description of Artificial Sequence: Synthetic oligonucleotide
ucaagcucccugacacgag

SEQ ID NO: 1355911 - RNA, 19 nt, Artificial Sequence
  Description of Artificial Sequence: Synthetic oligonucleotide
cacaaguagauccuccgca

SEQ ID NO: 1355912 - RNA, 19 nt, Artificial Sequence
  Description of Artificial Sequence: Synthetic oligonucleotide
acaccacugaacaccgagc

SEQ ID NO: 1355913 - RNA, 19 nt, Artificial Sequence
  Description of Artificial Sequence: Synthetic oligonucleotide
cauucagucgggguuugcc

SEQ ID NO: 1355914 - RNA, 19 nt, Artificial Sequence
  Description of Artificial Sequence: Synthetic oligonucleotide
ccugacacgagccuucagg

SEQ ID NO: 1355915 - RNA, 19 nt, Artificial Sequence
  Description of Artificial Sequence: Synthetic oligonucleotide
uuguuuaugcaggcugggc

SEQ ID NO: 1355916 - RNA, 19 nt, Artificial Sequence
  Description of Artificial Sequence: Synthetic oligonucleotide
uauugugguuucccauacu

SEQ ID NO: 1355917 - RNA, 19 nt, Artificial Sequence
  Description of Artificial Sequence: Synthetic oligonucleotide
ugacacgagccuucagggc

SEQ ID NO: 1355918 - RNA, 19 nt, Artificial Sequence
  Description of Artificial Sequence: Synthetic oligonucleotide
guucaagcucccugacacg

SEQ ID NO: 1355919 - RNA, 19 nt, Artificial Sequence
  Description of Artificial Sequence: Synthetic oligonucleotide
agucuauauuacaugugcu

SEQ ID NO: 1355920 - RNA, 19 nt, Artificial Sequence
  Description of Artificial Sequence: Synthetic oligonucleotide
uucccauacuccagagugu

SEQ ID NO: 1355921 - RNA, 19 nt, Artificial Sequence
  Description of Artificial Sequence: Synthetic oligonucleotide
uguacacggggaaccugug

SEQ ID NO: 1355922 - RNA, 19 nt, Artificial Sequence
  Description of Artificial Sequence: Synthetic oligonucleotide
cacagucuauauuacaugu

SEQ ID NO: 1355923 - RNA, 19 nt, Artificial Sequence
  Description of Artificial Sequence: Synthetic oligonucleotide
acaccgagcacaugggaaa

SEQ ID NO: 1355924 - RNA, 19 nt, Artificial Sequence
  Description of Artificial Sequence: Synthetic oligonucleotide
uuuaugcaggcugggcagc

SEQ ID NO: 1355925 - RNA, 19 nt, Artificial Sequence
  Description of Artificial Sequence: Synthetic oligonucleotide
agccagccggacugcagcc

SEQ ID NO: 1355926 - RNA, 19 nt, Artificial Sequence
  Description of Artificial Sequence: Synthetic oligonucleotide
acaacauuguaaacauaca

SEQ ID NO: 1355927 - RNA, 19 nt, Artificial Sequence
  Description of Artificial Sequence: Synthetic oligonucleotide
cucaggugugauacgggug

SEQ ID NO: 1355928 - RNA, 19 nt, Artificial Sequence
  Description of Artificial Sequence: Synthetic oligonucleotide
ccaaaagaggcaugguccc

SEQ ID NO: 1355929 - RNA, 19 nt, Artificial Sequence
  Description of Artificial Sequence: Synthetic oligonucleotide
caagggaugacaucggccu

SEQ ID NO: 1355930 - RNA, 19 nt, Artificial Sequence
  Description of Artificial Sequence: Synthetic oligonucleotide
acagucuauauuacaugug

SEQ ID NO: 1355931 - RNA, 19 nt, Artificial Sequence
  Description of Artificial Sequence: Synthetic oligonucleotide
augacgaagccggaaccuc

SEQ ID NO: 1355932 - RNA, 19 nt, Artificial Sequence
  Description of Artificial Sequence: Synthetic oligonucleotide
ggugugauacgggugcugg

SEQ ID NO: 1355933 - RNA, 19 nt, Artificial Sequence
  Description of Artificial Sequence: Synthetic oligonucleotide
gauagcugccguucaagcu

SEQ ID NO: 1355934 - RNA, 19 nt, Artificial Sequence
  Description of Artificial Sequence: Synthetic oligonucleotide
augguccccaaguucagaa

SEQ ID NO: 1355935 - RNA, 19 nt, Artificial Sequence
  Description of Artificial Sequence: Synthetic oligonucleotide
ggguuugccgguuggcucg

SEQ ID NO: 1355936 - RNA, 19 nt, Artificial Sequence
  Description of Artificial Sequence: Synthetic oligonucleotide
gacgaagccggaaccucgg

SEQ ID NO: 1355937 - RNA, 19 nt, Artificial Sequence
  Description of Artificial Sequence: Synthetic oligonucleotide
gcccacaccacucauacuc

SEQ ID NO: 1355938 - RNA, 19 nt, Artificial Sequence
  Description of Artificial Sequence: Synthetic oligonucleotide
ggggcaucgaguaugaguc

SEQ ID NO: 1355939 - RNA, 19 nt, Artificial Sequence
  Description of Artificial Sequence: Synthetic oligonucleotide
ccaugagcuaagacuaagg

SEQ ID NO: 1355940 - RNA, 19 nt, Artificial Sequence
  Description of Artificial Sequence: Synthetic oligonucleotide
ugugaugguguugcacuga

SEQ ID NO: 1355941 - RNA, 19 nt, Artificial Sequence
  Description of Artificial Sequence: Synthetic oligonucleotide
gaguaugaguccaugcaaa

SEQ ID NO: 1355942 - RNA, 19 nt, Artificial Sequence
  Description of Artificial Sequence: Synthetic oligonucleotide
uacaaccaaaggggaggcg

SEQ ID NO: 1355943 - RNA, 19 nt, Artificial Sequence
  Description of Artificial Sequence: Synthetic oligonucleotide
gacugcaccccggagugcc

SEQ ID NO: 1355944 - RNA, 19 nt, Artificial Sequence
  Description of Artificial Sequence: Synthetic oligonucleotide
ucccauacuccagaguguc

SEQ ID NO: 1355945 - RNA, 19 nt, Artificial Sequence
  Description of Artificial Sequence: Synthetic oligonucleotide
acguuaggggcaucgagua

SEQ ID NO: 1355946 - RNA, 19 nt, Artificial Sequence
  Description of Artificial Sequence: Synthetic oligonucleotide
gugugauacgggugcuggg

SEQ ID NO: 1355947 - RNA, 19 nt, Artificial Sequence
  Description of Artificial Sequence: Synthetic oligonucleotide
cuaggggauggaucucaag

SEQ ID NO: 1355948 - RNA, 19 nt, Artificial Sequence
  Description of Artificial Sequence: Synthetic oligonucleotide
gccucaaauguaguuacag

SEQ ID NO: 1355949 - RNA, 19 nt, Artificial Sequence
  Description of Artificial Sequence: Synthetic oligonucleotide
accuuaagagguggauggg

SEQ ID NO: 1355950 - RNA, 19 nt, Artificial Sequence
  Description of Artificial Sequence: Synthetic oligonucleotide
agccuguuucugcucgguc

SEQ ID NO: 1355951 - RNA, 19 nt, Artificial Sequence
  Description of Artificial Sequence: Synthetic oligonucleotide
ucuaggggauggaucucaa

SEQ ID NO: 1355952 - RNA, 19 nt, Artificial Sequence
  Description of Artificial Sequence: Synthetic oligonucleotide
ucuguguauugugguuucc

SEQ ID NO: 1355953 - RNA, 19 nt, Artificial Sequence
  Description of Artificial Sequence: Synthetic oligonucleotide
guacaaccaaaggggaggc

SEQ ID NO: 1355954 - RNA, 19 nt, Artificial Sequence
  Description of Artificial Sequence: Synthetic oligonucleotide
caucacuagcccauuuaga

SEQ ID NO: 1355955 - RNA, 19 nt, Artificial Sequence
  Description of Artificial Sequence: Synthetic oligonucleotide
gccuguuucugcucggucc

SEQ ID NO: 1355956 - RNA, 19 nt, Artificial Sequence
  Description of Artificial Sequence: Synthetic oligonucleotide
uaguuacagcggaaucuuc

SEQ ID NO: 1355957 - RNA, 19 nt, Artificial Sequence
  Description of Artificial Sequence: Synthetic oligonucleotide
ugcacaugacgaagccgga

SEQ ID NO: 1355958 - RNA, 19 nt, Artificial Sequence
  Description of Artificial Sequence: Synthetic oligonucleotide
ugacaucggccucugugua

SEQ ID NO: 1355959 - RNA, 19 nt, Artificial Sequence
  Description of Artificial Sequence: Synthetic oligonucleotide
agcuaagacuaaggagagg

SEQ ID NO: 1355960 - RNA, 19 nt, Artificial Sequence
  Description of Artificial Sequence: Synthetic oligonucleotide
uuugccgguuggcucgcac

SEQ ID NO: 1355961 - RNA, 19 nt, Artificial Sequence
  Description of Artificial Sequence: Synthetic oligonucleotide
cguacaaccaaaggggagg

SEQ ID NO: 1355962 - RNA, 19 nt, Artificial Sequence
  Description of Artificial Sequence: Synthetic oligonucleotide
aucguacaaccaaagggga

SEQ ID NO: 1355963 - RNA, 19 nt, Artificial Sequence
  Description of Artificial Sequence: Synthetic oligonucleotide
uagcccauuuagagaacuc

SEQ ID NO: 1355964 - RNA, 19 nt, Artificial Sequence
  Description of Artificial Sequence: Synthetic oligonucleotide
ggaucauauccuugggcac

SEQ ID NO: 1355965 - RNA, 19 nt, Artificial Sequence
  Description of Artificial Sequence: Synthetic oligonucleotide
gucuauauuacaugugcuu

SEQ ID NO: 1355966 - RNA, 19 nt, Artificial Sequence
  Description of Artificial Sequence: Synthetic oligonucleotide
cauggcccgugucugggag

SEQ ID NO: 1355967 - RNA, 19 nt, Artificial Sequence
  Description of Artificial Sequence: Synthetic oligonucleotide
auacuccucaaagcggcug

SEQ ID NO: 1355968 - RNA, 19 nt, Artificial Sequence
  Description of Artificial Sequence: Synthetic oligonucleotide
uucccaauccgagcauuca

SEQ ID NO: 1355969 - RNA, 19 nt, Artificial Sequence
  Description of Artificial Sequence: Synthetic oligonucleotide
cugagggcagagcuucuug

SEQ ID NO: 1355970 - RNA, 19 nt, Artificial Sequence
  Description of Artificial Sequence: Synthetic oligonucleotide
ucucaucacuagcccauuu

SEQ ID NO: 1355971 - RNA, 19 nt, Artificial Sequence
  Description of Artificial Sequence: Synthetic oligonucleotide
cucaagagccuugcccugc

SEQ ID NO: 1355972 - RNA, 19 nt, Artificial Sequence
  Description of Artificial Sequence: Synthetic oligonucleotide
uggcuccagaguccuauau

SEQ ID NO: 1355973 - RNA, 19 nt, Artificial Sequence
  Description of Artificial Sequence: Synthetic oligonucleotide
gggccucaaauguaguuac

SEQ ID NO: 1355974 - RNA, 19 nt, Artificial Sequence
  Description of Artificial Sequence: Synthetic oligonucleotide
cugcucggucccauuuucc

SEQ ID NO: 1355975 - RNA, 19 nt, Artificial Sequence
  Description of Artificial Sequence: Synthetic oligonucleotide
gugguuucccauacuccag

SEQ ID NO: 1355976 - RNA, 19 nt, Artificial Sequence
  Description of Artificial Sequence: Synthetic oligonucleotide
ucuaccccagcuccucaua

SEQ ID NO: 1355977 - RNA, 19 nt, Artificial Sequence
  Description of Artificial Sequence: Synthetic oligonucleotide
ugcccugcuacuccccauc

SEQ ID NO: 1355978 - RNA, 19 nt, Artificial Sequence
  Description of Artificial Sequence: Synthetic oligonucleotide
gguuggcucgcacucgcag

SEQ ID NO: 1355979 - RNA, 19 nt, Artificial Sequence
  Description of Artificial Sequence: Synthetic oligonucleotide
uugggcacauggcccgugu

SEQ ID NO: 1355980 - RNA, 19 nt, Artificial Sequence
  Description of Artificial Sequence: Synthetic oligonucleotide
acuagcccauuuagagaac

SEQ ID NO: 1355981 - RNA, 19 nt, Artificial Sequence
  Description of Artificial Sequence: Synthetic oligonucleotide
gacguuaggggcaucgagu

SEQ ID NO: 1355982 - RNA, 19 nt, Artificial Sequence
  Description of Artificial Sequence: Synthetic oligonucleotide
agagggguucacugucaca

SEQ ID NO: 1355983 - RNA, 19 nt, Artificial Sequence
  Description of Artificial Sequence: Synthetic oligonucleotide
gcccacacuggaaacagag

SEQ ID NO: 1355984 - RNA, 19 nt, Artificial Sequence
  Description of Artificial Sequence: Synthetic oligonucleotide
caugccaacacuggaucga

SEQ ID NO: 1355985 - RNA, 19 nt, Artificial Sequence
  Description of Artificial Sequence: Synthetic oligonucleotide
auggaucucaagagccuug

SEQ ID NO: 1355986 - RNA, 19 nt, Artificial Sequence
  Description of Artificial Sequence: Synthetic oligonucleotide
gauggcuagcucacaagua

SEQ ID NO: 1355987 - RNA, 19 nt, Artificial Sequence
  Description of Artificial Sequence: Synthetic oligonucleotide
uagauccuccgcaggucuc

SEQ ID NO: 1355988 - RNA, 19 nt, Artificial Sequence
  Description of Artificial Sequence: Synthetic oligonucleotide
acacuggaucgacguuagg

SEQ ID NO: 1355989 - RNA, 19 nt, Artificial Sequence
  Description of Artificial Sequence: Synthetic oligonucleotide
ccuuaagagguggaugggc

SEQ ID NO: 1355990 - RNA, 19 nt, Artificial Sequence
  Description of Artificial Sequence: Synthetic oligonucleotide
uauccgcuucugcccacac

SEQ ID NO: 1355991 - RNA, 19 nt, Artificial Sequence
  Description of Artificial Sequence: Synthetic oligonucleotide
aggggaggcgguagagggc

SEQ ID NO: 1355992 - RNA, 19 nt, Artificial Sequence
  Description of Artificial Sequence: Synthetic oligonucleotide
agucuaggggauggaucuc

SEQ ID NO: 1355993 - RNA, 19 nt, Artificial Sequence
  Description of Artificial Sequence: Synthetic oligonucleotide
ggagcaagcaggaagggcu

SEQ ID NO: 1355994 - RNA, 19 nt, Artificial Sequence
  Description of Artificial Sequence: Synthetic oligonucleotide
gcauguauguacacgggga

SEQ ID NO: 1355995 - RNA, 19 nt, Artificial Sequence
  Description of Artificial Sequence: Synthetic oligonucleotide
ccaugggagagggaaaggc

SEQ ID NO: 1355996 - RNA, 19 nt, Artificial Sequence
  Description of Artificial Sequence: Synthetic oligonucleotide
gagugugguggcccguauc

SEQ ID NO: 1355997 - RNA, 19 nt, Artificial Sequence
  Description of Artificial Sequence: Synthetic oligonucleotide
guguuuggguguguaugug

SEQ ID NO: 1355998 - RNA, 19 nt, Artificial Sequence
  Description of Artificial Sequence: Synthetic oligonucleotide
gucuaggggauggaucuca

SEQ ID NO: 1355999 - RNA, 19 nt, Artificial Sequence
  Description of Artificial Sequence: Synthetic oligonucleotide
gaguccgcagccagcacuc

SEQ ID NO: 1356000 - RNA, 19 nt, Artificial Sequence
  Description of Artificial Sequence: Synthetic oligonucleotide
ggauggcuagcucacaagu

SEQ ID NO: 1356001 - RNA, 19 nt, Artificial Sequence
  Description of Artificial Sequence: Synthetic oligonucleotide
gcuaguggauggcaucuca

SEQ ID NO: 1356002 - RNA, 19 nt, Artificial Sequence
  Description of Artificial Sequence: Synthetic oligonucleotide
ucgacguuaggggcaucga

SEQ ID NO: 1356003 - RNA, 19 nt, Artificial Sequence
  Description of Artificial Sequence: Synthetic oligonucleotide
caccgagcacaugggaaag

SEQ ID NO: 1356004 - RNA, 19 nt, Artificial Sequence
  Description of Artificial Sequence: Synthetic oligonucleotide
ggcaaagugucccauuuau

SEQ ID NO: 1356005 - RNA, 19 nt, Artificial Sequence
  Description of Artificial Sequence: Synthetic oligonucleotide
agacuaaggagaggaucau

SEQ ID NO: 1356006 - RNA, 19 nt, Artificial Sequence
  Description of Artificial Sequence: Synthetic oligonucleotide
guguauugugguuucccau

SEQ ID NO: 1356007 - RNA, 19 nt, Artificial Sequence
  Description of Artificial Sequence: Synthetic oligonucleotide
gucccauuuuccacucuac

SEQ ID NO: 1356008 - RNA, 19 nt, Artificial Sequence
  Description of Artificial Sequence: Synthetic oligonucleotide
agucgggguuugccgguug

SEQ ID NO: 1356009 - RNA, 19 nt, Artificial Sequence
  Description of Artificial Sequence: Synthetic oligonucleotide
cucggucccauuuuccacu

SEQ ID NO: 1356010 - RNA, 19 nt, Artificial Sequence
  Description of Artificial Sequence: Synthetic oligonucleotide
gacuaaggagaggaucaua

SEQ ID NO: 1356011 - RNA, 19 nt, Artificial Sequence
  Description of Artificial Sequence: Synthetic oligonucleotide
guaguuacagcggaaucuu

SEQ ID NO: 1356012 - RNA, 19 nt, Artificial Sequence
  Description of Artificial Sequence: Synthetic oligonucleotide
augcaggggccuucccucu

SEQ ID NO: 1356013 - RNA, 19 nt, Artificial Sequence
  Description of Artificial Sequence: Synthetic oligonucleotide
ccaccauuuaggacugcac

SEQ ID NO: 1356014 - RNA, 19 nt, Artificial Sequence
  Description of Artificial Sequence: Synthetic oligonucleotide
ucgggguuugccgguuggc

SEQ ID NO: 1356015 - RNA, 19 nt, Artificial Sequence
  Description of Artificial Sequence: Synthetic oligonucleotide
ggguugcucaacgcaaggc

SEQ ID NO: 1356016 - RNA, 19 nt, Artificial Sequence
  Description of Artificial Sequence: Synthetic oligonucleotide
uggcccgugucugggagaa

SEQ ID NO: 1356017 - RNA, 19 nt, Artificial Sequence
  Description of Artificial Sequence: Synthetic oligonucleotide
ccggacugcagccuguuuc

SEQ ID NO: 1356018 - RNA, 19 nt, Artificial Sequence
  Description of Artificial Sequence: Synthetic oligonucleotide
gccaacacuggaucgacgu

SEQ ID NO: 1356019 - RNA, 19 nt, Artificial Sequence
  Description of Artificial Sequence: Synthetic oligonucleotide
agcauucagucgggguuug

SEQ ID NO: 1356020 - RNA, 19 nt, Artificial Sequence
  Description of Artificial Sequence: Synthetic oligonucleotide
acgaagccggaaccucgga

SEQ ID NO: 1356021 - RNA, 19 nt, Artificial Sequence
  Description of Artificial Sequence: Synthetic oligonucleotide
ugcuaguggauggcaucuc

SEQ ID NO: 1356022 - RNA, 19 nt, Artificial Sequence
  Description of Artificial Sequence: Synthetic oligonucleotide
agcggaaucuucagugauu

SEQ ID NO: 1356023 - RNA, 19 nt, Artificial Sequence
  Description of Artificial Sequence: Synthetic oligonucleotide
ucauauccuugggcacaug

SEQ ID NO: 1356024 - RNA, 19 nt, Artificial Sequence
  Description of Artificial Sequence: Synthetic oligonucleotide
auggcccgugucugggaga

SEQ ID NO: 1356025 - RNA, 19 nt, Artificial Sequence
  Description of Artificial Sequence: Synthetic oligonucleotide
cccaugagcuaagacuaag

SEQ ID NO: 1356026 - RNA, 19 nt, Artificial Sequence
  Description of Artificial Sequence: Synthetic oligonucleotide
agcaucguccucggccaug

SEQ ID NO: 1356027 - RNA, 19 nt, Artificial Sequence
  Description of Artificial Sequence: Synthetic oligonucleotide
cuagcccauuuagagaacu

SEQ ID NO: 1356028 - RNA, 19 nt, Artificial Sequence
  Description of Artificial Sequence: Synthetic oligonucleotide
aucggccucuguguauugu

SEQ ID NO: 1356029 - RNA, 19 nt, Artificial Sequence
  Description of Artificial Sequence: Synthetic oligonucleotide
caucggccucuguguauug

SEQ ID NO: 1356030 - RNA, 19 nt, Artificial Sequence
  Description of Artificial Sequence: Synthetic oligonucleotide
uaggggcaucgaguaugag

SEQ ID NO: 1356031 - RNA, 19 nt, Artificial Sequence
  Description of Artificial Sequence: Synthetic oligonucleotide
ccucauaaugagccccaug

SEQ ID NO: 1356032 - RNA, 19 nt, Artificial Sequence
  Description of Artificial Sequence: Synthetic oligonucleotide
gccccaugagcuaagacua

SEQ ID NO: 1356033 - RNA, 19 nt, Artificial Sequence
  Description of Artificial Sequence: Synthetic oligonucleotide
gggcaucgaguaugagucc

SEQ ID NO: 1356034 - RNA, 19 nt, Artificial Sequence
  Description of Artificial Sequence: Synthetic oligonucleotide
aggcgguagagggcaaagu

SEQ ID NO: 1356035 - RNA, 19 nt, Artificial Sequence
  Description of Artificial Sequence: Synthetic oligonucleotide
gcuagcucacaaguagauc

SEQ ID NO: 1356036 - RNA, 19 nt, Artificial Sequence
  Description of Artificial Sequence: Synthetic oligonucleotide
guauguacacggggaaccu

SEQ ID NO: 1356037 - RNA, 19 nt, Artificial Sequence
  Description of Artificial Sequence: Synthetic oligonucleotide
gacaucggccucuguguau

SEQ ID NO: 1356038 - RNA, 19 nt, Artificial Sequence
  Description of Artificial Sequence: Synthetic oligonucleotide
caugacgaagccggaaccu

SEQ ID NO: 1356039 - RNA, 19 nt, Artificial Sequence
  Description of Artificial Sequence: Synthetic oligonucleotide
caaccaaaggggaggcggu

SEQ ID NO: 1356040 - RNA, 19 nt, Artificial Sequence
  Description of Artificial Sequence: Synthetic oligonucleotide
ccuccgcaggucuccaggc

SEQ ID NO: 1356041 - RNA, 19 nt, Artificial Sequence
  Description of Artificial Sequence: Synthetic oligonucleotide
guacacggggaaccugugu

SEQ ID NO: 1356042 - RNA, 19 nt, Artificial Sequence
  Description of Artificial Sequence: Synthetic oligonucleotide
cgacguuaggggcaucgag

SEQ ID NO: 1356043 - RNA, 19 nt, Artificial Sequence
  Description of Artificial Sequence: Synthetic oligonucleotide
cggccucuguguauugugg

SEQ ID NO: 1356044 - RNA, 19 nt, Artificial Sequence
  Description of Artificial Sequence: Synthetic oligonucleotide
ccuccguuucauuuuccca

SEQ ID NO: 1356045 - RNA, 19 nt, Artificial Sequence
  Description of Artificial Sequence: Synthetic oligonucleotide
caugguccccaaguucaga

SEQ ID NO: 1356046 - RNA, 19 nt, Artificial Sequence
  Description of Artificial Sequence: Synthetic oligonucleotide
cauacuccucaaagcggcu

SEQ ID NO: 1356047 - RNA, 19 nt, Artificial Sequence
  Description of Artificial Sequence: Synthetic oligonucleotide
gccaccauuuaggacugca

SEQ ID NO: 1356048 - RNA, 19 nt, Artificial Sequence
  Description of Artificial Sequence: Synthetic oligonucleotide
aucucaucacuagcccauu

SEQ ID NO: 1356049 - RNA, 19 nt, Artificial Sequence
  Description of Artificial Sequence: Synthetic oligonucleotide
cccgagauagcugccguuc

SEQ ID NO: 1356050 - RNA, 19 nt, Artificial Sequence
  Description of Artificial Sequence: Synthetic oligonucleotide
guauccgcuucugcccaca

SEQ ID NO: 1356051 - RNA, 19 nt, Artificial Sequence
  Description of Artificial Sequence: Synthetic oligonucleotide
ccggagugccucucucucc

SEQ ID NO: 1356052 - RNA, 19 nt, Artificial Sequence
  Description of Artificial Sequence: Synthetic oligonucleotide
ucccuaccuuccugcccac

SEQ ID NO: 1356053 - RNA, 19 nt, Artificial Sequence
  Description of Artificial Sequence: Synthetic oligonucleotide
ggcccguauccgcuucugc

SEQ ID NO: 1356054 - RNA, 19 nt, Artificial Sequence
  Description of Artificial Sequence: Synthetic oligonucleotide
cgaguaugaguccaugcaa

SEQ ID NO: 1356055 - RNA, 19 nt, Artificial Sequence
  Description of Artificial Sequence: Synthetic oligonucleotide
ccgguuggcucgcacucgc

SEQ ID NO: 1356056 - RNA, 19 nt, Artificial Sequence
  Description of Artificial Sequence: Synthetic oligonucleotide
cacugaacaccgagcacau

SEQ ID NO: 1356057 - RNA, 19 nt, Artificial Sequence
  Description of Artificial Sequence: Synthetic oligonucleotide
cccauuuauacacaacauu

SEQ ID NO: 1356058 - RNA, 19 nt, Artificial Sequence
  Description of Artificial Sequence: Synthetic oligonucleotide
gcccugcuacuccccaucc

SEQ ID NO: 1356059 - RNA, 19 nt, Artificial Sequence
  Description of Artificial Sequence: Synthetic oligonucleotide
aggagugugguggcccgua

SEQ ID NO: 1356060 - RNA, 19 nt, Artificial Sequence
  Description of Artificial Sequence: Synthetic oligonucleotide
gccguucaagcucccugac

SEQ ID NO: 1356061 - RNA, 19 nt, Artificial Sequence
  Description of Artificial Sequence: Synthetic oligonucleotide
cugcuacuccccaucccua

SEQ ID NO: 1356062 - RNA, 19 nt, Artificial Sequence
  Description of Artificial Sequence: Synthetic oligonucleotide
aggcaccuuaagaggugga

SEQ ID NO: 1356063 - RNA, 19 nt, Artificial Sequence
  Description of Artificial Sequence: Synthetic oligonucleotide
gucagucuaggggauggau

SEQ ID NO: 1356064 - RNA, 19 nt, Artificial Sequence
  Description of Artificial Sequence: Synthetic oligonucleotide
cagcggaaucuucagugau

SEQ ID NO: 1356065 - RNA, 19 nt, Artificial Sequence
  Description of Artificial Sequence: Synthetic oligonucleotide
gcaaagugucccauuuaua

SEQ ID NO: 1356066 - RNA, 19 nt, Artificial Sequence
  Description of Artificial Sequence: Synthetic oligonucleotide
guacaaagggagagggguu

SEQ ID NO: 1356067 - RNA, 19 nt, Artificial Sequence
  Description of Artificial Sequence: Synthetic oligonucleotide
gccgguuggcucgcacucg

SEQ ID NO: 1356068 - RNA, 19 nt, Artificial Sequence
  Description of Artificial Sequence: Synthetic oligonucleotide
gggcacauggcccgugucu

SEQ ID NO: 1356069 - RNA, 19 nt, Artificial Sequence
  Description of Artificial Sequence: Synthetic oligonucleotide
ggccucuguguauuguggu

SEQ ID NO: 1356070 - RNA, 19 nt, Artificial Sequence
  Description of Artificial Sequence: Synthetic oligonucleotide
cagggccucaaauguaguu

SEQ ID NO: 1356071 - RNA, 19 nt, Artificial Sequence
  Description of Artificial Sequence: Synthetic oligonucleotide
gcgguagagggcaaagugu

SEQ ID NO: 1356072 - RNA, 19 nt, Artificial Sequence
  Description of Artificial Sequence: Synthetic oligonucleotide
ccaaaggggaggcgguaga

SEQ ID NO: 1356073 - RNA, 19 nt, Artificial Sequence
  Description of Artificial Sequence: Synthetic oligonucleotide
cccaauccgagcauucagu

SEQ ID NO: 1356074 - RNA, 19 nt, Artificial Sequence
  Description of Artificial Sequence: Synthetic oligonucleotide
ccggaaccucggaagccac

SEQ ID NO: 1356075 - RNA, 19 nt, Artificial Sequence
  Description of Artificial Sequence: Synthetic oligonucleotide
ggccucaaauguaguuaca

SEQ ID NO: 1356076 - RNA, 19 nt, Artificial Sequence
  Description of Artificial Sequence: Synthetic oligonucleotide
acugcaccccggagugccu

SEQ ID NO: 1356077 - RNA, 19 nt, Artificial Sequence
  Description of Artificial Sequence: Synthetic oligonucleotide
ggcuagcucacaaguagau

SEQ ID NO: 1356078 - RNA, 19 nt, Artificial Sequence
  Description of Artificial Sequence: Synthetic oligonucleotide
ccgagauagcugccguuca

SEQ ID NO: 1356079 - RNA, 19 nt, Artificial Sequence
  Description of Artificial Sequence: Synthetic oligonucleotide
cucuaccccagcuccucau

SEQ ID NO: 1356080 - RNA, 19 nt, Artificial Sequence
  Description of Artificial Sequence: Synthetic oligonucleotide
gcacaugacgaagccggaa

SEQ ID NO: 1356081 - RNA, 19 nt, Artificial Sequence
  Description of Artificial Sequence: Synthetic oligonucleotide
gcucaacgcaaggccugcc

SEQ ID NO: 1356082 - RNA, 19 nt, Artificial Sequence
  Description of Artificial Sequence: Synthetic oligonucleotide
ccguauccgcuucugccca

SEQ ID NO: 1356083 - RNA, 19 nt, Artificial Sequence
  Description of Artificial Sequence: Synthetic oligonucleotide
gcauucagucgggguuugc

SEQ ID NO: 1356084 - RNA, 19 nt, Artificial Sequence
  Description of Artificial Sequence: Synthetic oligonucleotide
ggcaccuuaagagguggau

SEQ ID NO: 1356085 - RNA, 19 nt, Artificial Sequence
  Description of Artificial Sequence: Synthetic oligonucleotide
ccguucaagcucccugaca

SEQ ID NO: 1356086 - RNA, 19 nt, Artificial Sequence
  Description of Artificial Sequence: Synthetic oligonucleotide
gaucgacguuaggggcauc

SEQ ID NO: 1356087 - RNA, 19 nt, Artificial Sequence
  Description of Artificial Sequence: Synthetic oligonucleotide
ccugugcaagggaugacau

SEQ ID NO: 1356088 - RNA, 19 nt, Artificial Sequence
  Description of Artificial Sequence: Synthetic oligonucleotide
gucugucagucuaggggau

SEQ ID NO: 1356089 - RNA, 19 nt, Artificial Sequence
  Description of Artificial Sequence: Synthetic oligonucleotide
agccggacugcagccuguu

SEQ ID NO: 1356090 - RNA, 19 nt, Artificial Sequence
  Description of Artificial Sequence: Synthetic oligonucleotide
caccuuccaggaguguggu

SEQ ID NO: 1356091 - RNA, 19 nt, Artificial Sequence
  Description of Artificial Sequence: Synthetic oligonucleotide
ccgugucugggagaagaca

SEQ ID NO: 1356092 - RNA, 19 nt, Artificial Sequence
  Description of Artificial Sequence: Synthetic oligonucleotide
caucguccucggccaugca

SEQ ID NO: 1356093 - RNA, 19 nt, Artificial Sequence
  Description of Artificial Sequence: Synthetic oligonucleotide
cguauccgcuucugcccac

SEQ ID NO: 1356094 - RNA, 19 nt, Artificial Sequence
  Description of Artificial Sequence: Synthetic oligonucleotide
ggaucgacguuaggggcau

SEQ ID NO: 1356095 - RNA, 19 nt, Artificial Sequence
  Description of Artificial Sequence: Synthetic oligonucleotide
cgaagccggaaccucggaa

SEQ ID NO: 1356096 - RNA, 19 nt, Artificial Sequence
  Description of Artificial Sequence: Synthetic oligonucleotide
ccgagcauucagucggggu

SEQ ID NO: 1356097 - RNA, 19 nt, Artificial Sequence
  Description of Artificial Sequence: Synthetic oligonucleotide
cgagauagcugccguucaa

SEQ ID NO: 1356098 - RNA, 19 nt, Artificial Sequence
  Description of Artificial Sequence: Synthetic oligonucleotide
guuugccgguuggcucgca

SEQ ID NO: 1356099 - RNA, 19 nt, Artificial Sequence
  Description of Artificial Sequence: Synthetic oligonucleotide
ccucuguguauugugguuu

SEQ ID NO: 1356100 - RNA, 19 nt, Artificial Sequence
  Description of Artificial Sequence: Synthetic oligonucleotide
ccccaugagcuaagacuaa

SEQ ID NO: 1356101 - RNA, 19 nt, Artificial Sequence
  Description of Artificial Sequence: Synthetic oligonucleotide
ggagugugguggcccguau

SEQ ID NO: 1356102 - RNA, 19 nt, Artificial Sequence
  Description of Artificial Sequence: Synthetic oligonucleotide
cagccggacugcagccugu

SEQ ID NO: 1356103 - RNA, 19 nt, Artificial Sequence
  Description of Artificial Sequence: Synthetic oligonucleotide
cuccaggcgcugugauggu

SEQ ID NO: 1356104 - RNA, 19 nt, Artificial Sequence
  Description of Artificial Sequence: Synthetic oligonucleotide
gcaucgaguaugaguccau

SEQ ID NO: 1356105 - RNA, 19 nt, Artificial Sequence
  Description of Artificial Sequence: Synthetic oligonucleotide
caccccggagugccucucu

SEQ ID NO: 1356106 - RNA, 19 nt, Artificial Sequence
  Description of Artificial Sequence: Synthetic oligonucleotide
ccaacacuggaucgacguu

SEQ ID NO: 1356107 - RNA, 19 nt, Artificial Sequence
  Description of Artificial Sequence: Synthetic oligonucleotide
caggagugugguggcccgu

SEQ ID NO: 1356108 - RNA, 19 nt, Artificial Sequence
  Description of Artificial Sequence: Synthetic oligonucleotide
cagcaucguccucggccau

SEQ ID NO: 1356109 - RNA, 19 nt, Artificial Sequence
  Description of Artificial Sequence: Synthetic oligonucleotide
cguuaggggcaucgaguau

SEQ ID NO: 1356110 - RNA, 19 nt, Artificial Sequence
  Description of Artificial Sequence: Synthetic oligonucleotide
cagucgggguuugccgguu

SEQ ID NO: 1356111 - RNA, 19 nt, Artificial Sequence
  Description of Artificial Sequence: Synthetic oligonucleotide
cgggguuugccgguuggcu

SEQ ID NO: 1356112 - RNA, 19 nt, Artificial Sequence
  Description of Artificial Sequence: Synthetic oligonucleotide
ccccgagauagcugccguu

SEQ ID NO: 1356113 - RNA, 19 nt, Artificial Sequence
  Description of Artificial Sequence: Synthetic oligonucleotide
aaaucaaccaacaugaggc

SEQ ID NO: 1356114 - RNA, 19 nt, Artificial Sequence
  Description of Artificial Sequence: Synthetic oligonucleotide
aacaguuucacuuaagagg

SEQ ID NO: 1356115 - RNA, 19 nt, Artificial Sequence
  Description of Artificial Sequence: Synthetic oligonucleotide
aguucauuuauuuagguac

SEQ ID NO: 1356116 - RNA, 19 nt, Artificial Sequence
  Description of Artificial Sequence: Synthetic oligonucleotide
gauaaugucgaauaaaaug

SEQ ID NO: 1356117 - RNA, 19 nt, Artificial Sequence
  Description of Artificial Sequence: Synthetic oligonucleotide
aaaaucaaccaacaugagg

SEQ ID NO: 1356118 - RNA, 19 nt, Artificial Sequence
  Description of Artificial Sequence: Synthetic oligonucleotide
auaaugucgaauaaaaugg

SEQ ID NO: 1356119 - RNA, 19 nt, Artificial Sequence
  Description of Artificial Sequence: Synthetic oligonucleotide
agaguuggggcccuaaugc

SEQ ID NO: 1356120 - RNA, 19 nt, Artificial Sequence
  Description of Artificial Sequence: Synthetic oligonucleotide
acaguuucacuuaagaggc

SEQ ID NO: 1356121 - RNA, 19 nt, Artificial Sequence
  Description of Artificial Sequence: Synthetic oligonucleotide
aauggcgaacaucacacuc

SEQ ID NO: 1356122 - RNA, 19 nt, Artificial Sequence
  Description of Artificial Sequence: Synthetic oligonucleotide
aaacgggccaucuuugugg

SEQ ID NO: 1356123 - RNA, 19 nt, Artificial Sequence
  Description of Artificial Sequence: Synthetic oligonucleotide
auaccaaggagucuacacc

SEQ ID NO: 1356124 - RNA, 19 nt, Artificial Sequence
  Description of Artificial Sequence: Synthetic oligonucleotide
ugucgaauaaaauggagcu

SEQ ID NO: 1356125 - RNA, 19 nt, Artificial Sequence
  Description of Artificial Sequence: Synthetic oligonucleotide
uuagguacgaaaccccagg

SEQ ID NO: 1356126 - RNA, 19 nt, Artificial Sequence
  Description of Artificial Sequence: Synthetic oligonucleotide
aaguagccaaacucuaugg

SEQ ID NO: 1356127 - RNA, 19 nt, Artificial Sequence
  Description of Artificial Sequence: Synthetic oligonucleotide
acugacuuccaucagcaac

SEQ ID NO: 1356128 - RNA, 19 nt, Artificial Sequence
  Description of Artificial Sequence: Synthetic oligonucleotide
uuauuuagguacgaaaccc

SEQ ID NO: 1356129 - RNA, 19 nt, Artificial Sequence
  Description of Artificial Sequence: Synthetic oligonucleotide
uuuagguaccgcuccaugg

SEQ ID NO: 1356130 - RNA, 19 nt, Artificial Sequence
  Description of Artificial Sequence: Synthetic oligonucleotide
cuugaguuuucaauggccg

SEQ ID NO: 1356131 - RNA, 19 nt, Artificial Sequence
  Description of Artificial Sequence: Synthetic oligonucleotide
uguaaacuguccuugguca

SEQ ID NO: 1356132 - RNA, 19 nt, Artificial Sequence
  Description of Artificial Sequence: Synthetic oligonucleotide
agcuacuguacucaaaauc

SEQ ID NO: 1356133 - RNA, 19 nt, Artificial Sequence
  Description of Artificial Sequence: Synthetic oligonucleotide
agaacuggaaccgagacug

SEQ ID NO: 1356134 - RNA, 19 nt, Artificial Sequence
  Description of Artificial Sequence: Synthetic oligonucleotide
auacagacguagcagcacc

SEQ ID NO: 1356135 - RNA, 19 nt, Artificial Sequence
  Description of Artificial Sequence: Synthetic oligonucleotide
uauuuagguacgaaacccc

SEQ ID NO: 1356136 - RNA, 19 nt, Artificial Sequence
  Description of Artificial Sequence: Synthetic oligonucleotide
augucgaauaaaauggagc

SEQ ID NO: 1356137 - RNA, 19 nt, Artificial Sequence
  Description of Artificial Sequence: Synthetic oligonucleotide
agaauggcgaacaucacac

SEQ ID NO: 1356138 - RNA, 19 nt, Artificial Sequence
  Description of Artificial Sequence: Synthetic oligonucleotide
auaaaauggagcugcuguc

SEQ ID NO: 1356139 - RNA, 19 nt, Artificial Sequence
  Description of Artificial Sequence: Synthetic oligonucleotide
aaggccuccgcucacgggg

SEQ ID NO: 1356140 - RNA, 19 nt, Artificial Sequence
  Description of Artificial Sequence: Synthetic oligonucleotide
aagaauggcgaacaucaca

SEQ ID NO: 1356141 - RNA, 19 nt, Artificial Sequence
  Description of Artificial Sequence: Synthetic oligonucleotide
ucaauggccggcuugggag

SEQ ID NO: 1356142 - RNA, 19 nt, Artificial Sequence
  Description of Artificial Sequence: Synthetic oligonucleotide
uccuuggucaaacagccgc

SEQ ID NO: 1356143 - RNA, 19 nt, Artificial Sequence
  Description of Artificial Sequence: Synthetic oligonucleotide
uguacucaaaaucaaccaa

SEQ ID NO: 1356144 - RNA, 19 nt, Artificial Sequence
  Description of Artificial Sequence: Synthetic oligonucleotide
uccgcuuccggccaguccg

SEQ ID NO: 1356145 - RNA, 19 nt, Artificial Sequence
  Description of Artificial Sequence: Synthetic oligonucleotide
uuagcauccuguaaacugu

SEQ ID NO: 1356146 - RNA, 19 nt, Artificial Sequence
  Description of Artificial Sequence: Synthetic oligonucleotide
ucuaauaccaaggagucua

SEQ ID NO: 1356147 - RNA, 19 nt, Artificial Sequence
  Description of Artificial Sequence: Synthetic oligonucleotide
aucuccauaccguggaaac

SEQ ID NO: 1356148 - RNA, 19 nt, Artificial Sequence
  Description of Artificial Sequence: Synthetic oligonucleotide
aaugucgaauaaaauggag

SEQ ID NO: 1356149 - RNA, 19 nt, Artificial Sequence
  Description of Artificial Sequence: Synthetic oligonucleotide
auaccaacugacuuccauc

SEQ ID NO: 1356150 - RNA, 19 nt, Artificial Sequence
  Description of Artificial Sequence: Synthetic oligonucleotide
ucauuguggcagaagacca

SEQ ID NO: 1356151 - RNA, 19 nt, Artificial Sequence
  Description of Artificial Sequence: Synthetic oligonucleotide
ucucuaauaccaaggaguc

SEQ ID NO: 1356152 - RNA, 19 nt, Artificial Sequence
  Description of Artificial Sequence: Synthetic oligonucleotide
agcauaccaacugacuucc

SEQ ID NO: 1356153 - RNA, 19 nt, Artificial Sequence
  Description of Artificial Sequence: Synthetic oligonucleotide
uguggcagaagaccacugg

SEQ ID NO: 1356154 - RNA, 19 nt, Artificial Sequence
  Description of Artificial Sequence: Synthetic oligonucleotide
uuuagguacgaaaccccag

SEQ ID NO: 1356155 - RNA, 19 nt, Artificial Sequence
  Description of Artificial Sequence: Synthetic oligonucleotide
uguaaucauaaacccacuc

SEQ ID NO: 1356156 - RNA, 19 nt, Artificial Sequence
  Description of Artificial Sequence: Synthetic oligonucleotide
uugaguuuucaauggccgg

SEQ ID NO: 1356157 - RNA, 19 nt, Artificial Sequence
  Description of Artificial Sequence: Synthetic oligonucleotide
caacaguuucacuuaagag

SEQ ID NO: 1356158 - RNA, 19 nt, Artificial Sequence
  Description of Artificial Sequence: Synthetic oligonucleotide
gagacagcgaggaagcgcg

SEQ ID NO: 1356159 - RNA, 19 nt, Artificial Sequence
  Description of Artificial Sequence: Synthetic oligonucleotide
aaguucauuuauuuaggua

SEQ ID NO: 1356160 - RNA, 19 nt, Artificial Sequence
  Description of Artificial Sequence: Synthetic oligonucleotide
uaaaauggagcugcugucc

SEQ ID NO: 1356161 - RNA, 19 nt, Artificial Sequence
  Description of Artificial Sequence: Synthetic oligonucleotide
uaccaacugacuuccauca

SEQ ID NO: 1356162 - RNA, 19 nt, Artificial Sequence
  Description of Artificial Sequence: Synthetic oligonucleotide
aacagccgccgacaguccc

SEQ ID NO: 1356163 - RNA, 19 nt, Artificial Sequence
  Description of Artificial Sequence: Synthetic oligonucleotide
aucuuuguggcaauggcuc

SEQ ID NO: 1356164 - RNA, 19 nt, Artificial Sequence
  Description of Artificial Sequence: Synthetic oligonucleotide
uagguacgaaaccccaggg

SEQ ID NO: 1356165 - RNA, 19 nt, Artificial Sequence
  Description of Artificial Sequence: Synthetic oligonucleotide
ucugcaagaauggcgaaca

SEQ ID NO: 1356166 - RNA, 19 nt, Artificial Sequence
  Description of Artificial Sequence: Synthetic oligonucleotide
ggagucuacacccugcagg

SEQ ID NO: 1356167 - RNA, 19 nt, Artificial Sequence
  Description of Artificial Sequence: Synthetic oligonucleotide
uuagguaccgcuccauggu

SEQ ID NO: 1356168 - RNA, 19 nt, Artificial Sequence
  Description of Artificial Sequence: Synthetic oligonucleotide
cucggcaccacugauaggc

SEQ ID NO: 1356169 - RNA, 19 nt, Artificial Sequence
  Description of Artificial Sequence: Synthetic oligonucleotide
accacugauaggcucggcg

SEQ ID NO: 1356170 - RNA, 19 nt, Artificial Sequence
  Description of Artificial Sequence: Synthetic oligonucleotide
aacaucacacucucuaaua

SEQ ID NO: 1356171 - RNA, 19 nt, Artificial Sequence
  Description of Artificial Sequence: Synthetic oligonucleotide
gcaacuacucaaaacaggg

SEQ ID NO: 1356172 - RNA, 19 nt, Artificial Sequence
  Description of Artificial Sequence: Synthetic oligonucleotide
aguuggauugucaagguga

SEQ ID NO: 1356173 - RNA, 19 nt, Artificial Sequence
  Description of Artificial Sequence: Synthetic oligonucleotide
uccggaacgucuccgggcg

SEQ ID NO: 1356174 - RNA, 19 nt, Artificial Sequence
  Description of Artificial Sequence: Synthetic oligonucleotide
aaugagaugccagagcaua

SEQ ID NO: 1356175 - RNA, 19 nt, Artificial Sequence
  Description of Artificial Sequence: Synthetic oligonucleotide
ucacgagacagcgaggaag

SEQ ID NO: 1356176 - RNA, 19 nt, Artificial Sequence
  Description of Artificial Sequence: Synthetic oligonucleotide
aaacgcucagcuccuccgg

SEQ ID NO: 1356177 - RNA, 19 nt, Artificial Sequence
  Description of Artificial Sequence: Synthetic oligonucleotide
gaagggcaucuccauaccg

SEQ ID NO: 1356178 - RNA, 19 nt, Artificial Sequence
  Description of Artificial Sequence: Synthetic oligonucleotide
uagaguuggggcccuaaug

SEQ ID NO: 1356179 - RNA, 19 nt, Artificial Sequence
  Description of Artificial Sequence: Synthetic oligonucleotide
ugaguuuucaauggccggc

SEQ ID NO: 1356180 - RNA, 19 nt, Artificial Sequence
  Description of Artificial Sequence: Synthetic oligonucleotide
aacuuccugagguugccca

SEQ ID NO: 1356181 - RNA, 19 nt, Artificial Sequence
  Description of Artificial Sequence: Synthetic oligonucleotide
gaggaucugaccuuucuga

SEQ ID NO: 1356182 - RNA, 19 nt, Artificial Sequence
  Description of Artificial Sequence: Synthetic oligonucleotide
auuccucaaagguguaauc

SEQ ID NO: 1356183 - RNA, 19 nt, Artificial Sequence
  Description of Artificial Sequence: Synthetic oligonucleotide
gguguaaucauaaacccac

SEQ ID NO: 1356184 - RNA, 19 nt, Artificial Sequence
  Description of Artificial Sequence: Synthetic oligonucleotide
agagcauaccaacugacuu

SEQ ID NO: 1356185 - RNA, 19 nt, Artificial Sequence
  Description of Artificial Sequence: Synthetic oligonucleotide
gaugccuggaggauggacc

SEQ ID NO: 1356186 - RNA, 19 nt, Artificial Sequence
  Description of Artificial Sequence: Synthetic oligonucleotide
caacuacucaaaacagggg

SEQ ID NO: 1356187 - RNA, 19 nt, Artificial Sequence
  Description of Artificial Sequence: Synthetic oligonucleotide
caacaugaggcugucgucg

SEQ ID NO: 1356188 - RNA, 19 nt, Artificial Sequence
  Description of Artificial Sequence: Synthetic oligonucleotide
ugacggaguagcaucuagc

SEQ ID NO: 1356189 - RNA, 19 nt, Artificial Sequence
  Description of Artificial Sequence: Synthetic oligonucleotide
ugauucccaaugucaaagc

SEQ ID NO: 1356190 - RNA, 19 nt, Artificial Sequence
  Description of Artificial Sequence: Synthetic oligonucleotide
uucgguagcgagcaucgga

SEQ ID NO: 1356191 - RNA, 19 nt, Artificial Sequence
  Description of Artificial Sequence: Synthetic oligonucleotide
aacgucuccgggcguacuc

SEQ ID NO: 1356192 - RNA, 19 nt, Artificial Sequence
  Description of Artificial Sequence: Synthetic oligonucleotide
cucucuaauaccaaggagu

SEQ ID NO: 1356193 - RNA, 19 nt, Artificial Sequence
  Description of Artificial Sequence: Synthetic oligonucleotide
guacucaaaaucaaccaac

SEQ ID NO: 1356194 - RNA, 19 nt, Artificial Sequence
  Description of Artificial Sequence: Synthetic oligonucleotide
aacccacucacaaaaguga

SEQ ID NO: 1356195 - RNA, 19 nt, Artificial Sequence
  Description of Artificial Sequence: Synthetic oligonucleotide
guagaaaggccauuccuca

SEQ ID NO: 1356196 - RNA, 19 nt, Artificial Sequence
  Description of Artificial Sequence: Synthetic oligonucleotide
caaacgcucagcuccuccg

SEQ ID NO: 1356197 - RNA, 19 nt, Artificial Sequence
  Description of Artificial Sequence: Synthetic oligonucleotide
gacggaguagcaucuagca

SEQ ID NO: 1356198 - RNA, 19 nt, Artificial Sequence
  Description of Artificial Sequence: Synthetic oligonucleotide
cacgagacagcgaggaagc

SEQ ID NO: 1356199 - RNA, 19 nt, Artificial Sequence
  Description of Artificial Sequence: Synthetic oligonucleotide
ggggcaaacgcucagcucc

SEQ ID NO: 1356200 - RNA, 19 nt, Artificial Sequence
  Description of Artificial Sequence: Synthetic oligonucleotide
aaguagaacuggaaccgag

SEQ ID NO: 1356201 - RNA, 19 nt, Artificial Sequence
  Description of Artificial Sequence: Synthetic oligonucleotide
ucccagaugcccaccuugg

SEQ ID NO: 1356202 - RNA, 19 nt, Artificial Sequence
  Description of Artificial Sequence: Synthetic oligonucleotide
caaacagccgccgacaguc

SEQ ID NO: 1356203 - RNA, 19 nt, Artificial Sequence
  Description of Artificial Sequence: Synthetic oligonucleotide
uagaacuggaaccgagacu

SEQ ID NO: 1356204 - RNA, 19 nt, Artificial Sequence
  Description of Artificial Sequence: Synthetic oligonucleotide
uaguuguagcuacuguacu

SEQ ID NO: 1356205 - RNA, 19 nt, Artificial Sequence
  Description of Artificial Sequence: Synthetic oligonucleotide
uucccagaugcccaccuug

SEQ ID NO: 1356206 - RNA, 19 nt, Artificial Sequence
  Description of Artificial Sequence: Synthetic oligonucleotide
gagcauaccaacugacuuc

SEQ ID NO: 1356207 - RNA, 19 nt, Artificial Sequence
  Description of Artificial Sequence: Synthetic oligonucleotide
gaaacgggccaucuuugug

SEQ ID NO: 1356208 - RNA, 19 nt, Artificial Sequence
  Description of Artificial Sequence: Synthetic oligonucleotide
aucugcuuuagguaccgcu

SEQ ID NO: 1356209 - RNA, 19 nt, Artificial Sequence
  Description of Artificial Sequence: Synthetic oligonucleotide
acacucucuaauaccaagg

SEQ ID NO: 1356210 - RNA, 19 nt, Artificial Sequence
  Description of Artificial Sequence: Synthetic oligonucleotide
auugccgccgggcacuuag

SEQ ID NO: 1356211 - RNA, 19 nt, Artificial Sequence
  Description of Artificial Sequence: Synthetic oligonucleotide
uggaaacgggccaucuuug

SEQ ID NO: 1356212 - RNA, 19 nt, Artificial Sequence
  Description of Artificial Sequence: Synthetic oligonucleotide
aaacaaccaguggggcucc

SEQ ID NO: 1356213 - RNA, 19 nt, Artificial Sequence
  Description of Artificial Sequence: Synthetic oligonucleotide
gacguagcagcaccucgcg

SEQ ID NO: 1356214 - RNA, 19 nt, Artificial Sequence
  Description of Artificial Sequence: Synthetic oligonucleotide
uccauaccguggaaacggg

SEQ ID NO: 1356215 - RNA, 19 nt, Artificial Sequence
  Description of Artificial Sequence: Synthetic oligonucleotide
uggaaacacuccauagagu

SEQ ID NO: 1356216 - RNA, 19 nt, Artificial Sequence
  Description of Artificial Sequence: Synthetic oligonucleotide
cuguacucaaaaucaacca

SEQ ID NO: 1356217 - RNA, 19 nt, Artificial Sequence
  Description of Artificial Sequence: Synthetic oligonucleotide
ucuccauaccguggaaacg

SEQ ID NO: 1356218 - RNA, 19 nt, Artificial Sequence
  Description of Artificial Sequence: Synthetic oligonucleotide
caaaaucaaccaacaugag

SEQ ID NO: 1356219 - RNA, 19 nt, Artificial Sequence
  Description of Artificial Sequence: Synthetic oligonucleotide
ucgguagcgagcaucggaa

SEQ ID NO: 1356220 - RNA, 19 nt, Artificial Sequence
  Description of Artificial Sequence: Synthetic oligonucleotide
guuuucaauggccggcuug

SEQ ID NO: 1356221 - RNA, 19 nt, Artificial Sequence
  Description of Artificial Sequence: Synthetic oligonucleotide
gcucuugaguuuucaaugg

SEQ ID NO: 1356222 - RNA, 19 nt, Artificial Sequence
  Description of Artificial Sequence: Synthetic oligonucleotide
uccggcuacaccuguccgg

SEQ ID NO: 1356223 - RNA, 19 nt, Artificial Sequence
  Description of Artificial Sequence: Synthetic oligonucleotide
cacuuaagaggcacagccc

SEQ ID NO: 1356224 - RNA, 19 nt, Artificial Sequence
  Description of Artificial Sequence: Synthetic oligonucleotide
caaacaaccaguggggcuc

SEQ ID NO: 1356225 - RNA, 19 nt, Artificial Sequence
  Description of Artificial Sequence: Synthetic oligonucleotide
caaggagucuacacccugc

SEQ ID NO: 1356226 - RNA, 19 nt, Artificial Sequence
  Description of Artificial Sequence: Synthetic oligonucleotide
uggcucugagagcaguaag

SEQ ID NO: 1356227 - RNA, 19 nt, Artificial Sequence
  Description of Artificial Sequence: Synthetic oligonucleotide
cucgguuccgcuuccggcc

SEQ ID NO: 1356228 - RNA, 19 nt, Artificial Sequence
  Description of Artificial Sequence: Synthetic oligonucleotide
cagguuguacaucuccagc

SEQ ID NO: 1356229 - RNA, 19 nt, Artificial Sequence
  Description of Artificial Sequence: Synthetic oligonucleotide
uggucaaacagccgccgac

SEQ ID NO: 1356230 - RNA, 19 nt, Artificial Sequence
  Description of Artificial Sequence: Synthetic oligonucleotide
ucuagugggguagucugug

SEQ ID NO: 1356231 - RNA, 19 nt, Artificial Sequence
  Description of Artificial Sequence: Synthetic oligonucleotide
ggauugucaaggugaagag

SEQ ID NO: 1356232 - RNA, 19 nt, Artificial Sequence
  Description of Artificial Sequence: Synthetic oligonucleotide
gacugugcugggcucuacg

SEQ ID NO: 1356233 - RNA, 19 nt, Artificial Sequence
  Description of Artificial Sequence: Synthetic oligonucleotide
gaguuggauugucaaggug

SEQ ID NO: 1356234 - RNA, 19 nt, Artificial Sequence
  Description of Artificial Sequence: Synthetic oligonucleotide
ugcuuuguagaaaggccau

SEQ ID NO: 1356235 - RNA, 19 nt, Artificial Sequence
  Description of Artificial Sequence: Synthetic oligonucleotide
cugcuuuagguaccgcucc

SEQ ID NO: 1356236 - RNA, 19 nt, Artificial Sequence
  Description of Artificial Sequence: Synthetic oligonucleotide
agcaucuagcaacuuccug

SEQ ID NO: 1356237 - RNA, 19 nt, Artificial Sequence
  Description of Artificial Sequence: Synthetic oligonucleotide
cacuuagcauccuguaaac

SEQ ID NO: 1356238 - RNA, 19 nt, Artificial Sequence
  Description of Artificial Sequence: Synthetic oligonucleotide
cuaauaccaaggagucuac

SEQ ID NO: 1356239 - RNA, 19 nt, Artificial Sequence
  Description of Artificial Sequence: Synthetic oligonucleotide
gaaaucugagguggaguug

SEQ ID NO: 1356240 - RNA, 19 nt, Artificial Sequence
  Description of Artificial Sequence: Synthetic oligonucleotide
ugucaaagccccuguaguu

SEQ ID NO: 1356241 - RNA, 19 nt, Artificial Sequence
  Description of Artificial Sequence: Synthetic oligonucleotide
aguccggaacgucuccggg

SEQ ID NO: 1356242 - RNA, 19 nt, Artificial Sequence
  Description of Artificial Sequence: Synthetic oligonucleotide
cuuuagguaccgcuccaug

SEQ ID NO: 1356243 - RNA, 19 nt, Artificial Sequence
  Description of Artificial Sequence: Synthetic oligonucleotide
caguaagauguucccuucc

SEQ ID NO: 1356244 - RNA, 19 nt, Artificial Sequence
  Description of Artificial Sequence: Synthetic oligonucleotide
ggcaacuacucaaaacagg

SEQ ID NO: 1356245 - RNA, 19 nt, Artificial Sequence
  Description of Artificial Sequence: Synthetic oligonucleotide
uuccggccaguccggaacg

SEQ ID NO: 1356246 - RNA, 19 nt, Artificial Sequence
  Description of Artificial Sequence: Synthetic oligonucleotide
uacagacguagcagcaccu

SEQ ID NO: 1356247 - RNA, 19 nt, Artificial Sequence
  Description of Artificial Sequence: Synthetic oligonucleotide
cauuguggcagaagaccac

SEQ ID NO: 1356248 - RNA, 19 nt, Artificial Sequence
  Description of Artificial Sequence: Synthetic oligonucleotide
aguggggcuccuuagugaa

SEQ ID NO: 1356249 - RNA, 19 nt, Artificial Sequence
  Description of Artificial Sequence: Synthetic oligonucleotide
ugcaagaauggcgaacauc

SEQ ID NO: 1356250 - RNA, 19 nt, Artificial Sequence
  Description of Artificial Sequence: Synthetic oligonucleotide
auaccguggaaacgggcca

SEQ ID NO: 1356251 - RNA, 19 nt, Artificial Sequence
  Description of Artificial Sequence: Synthetic oligonucleotide
gugacggaguagcaucuag

SEQ ID NO: 1356252 - RNA, 19 nt, Artificial Sequence
  Description of Artificial Sequence: Synthetic oligonucleotide
ucaaacagccgccgacagu

SEQ ID NO: 1356253 - RNA, 19 nt, Artificial Sequence
  Description of Artificial Sequence: Synthetic oligonucleotide
ugcuuuagguaccgcucca

SEQ ID NO: 1356254 - RNA, 19 nt, Artificial Sequence
  Description of Artificial Sequence: Synthetic oligonucleotide
ugaaccucugccagauaau

SEQ ID NO: 1356255 - RNA, 19 nt, Artificial Sequence
  Description of Artificial Sequence: Synthetic oligonucleotide
gucgaauaaaauggagcug

SEQ ID NO: 1356256 - RNA, 19 nt, Artificial Sequence
  Description of Artificial Sequence: Synthetic oligonucleotide
aagcgcgccgccgauuggg

SEQ ID NO: 1356257 - RNA, 19 nt, Artificial Sequence
  Description of Artificial Sequence: Synthetic oligonucleotide
augagaugccagagcauac

SEQ ID NO: 1356258 - RNA, 19 nt, Artificial Sequence
  Description of Artificial Sequence: Synthetic oligonucleotide
uggcgaacaucacacucuc

SEQ ID NO: 1356259 - RNA, 19 nt, Artificial Sequence
  Description of Artificial Sequence: Synthetic oligonucleotide
caauggccggcuugggagg

SEQ ID NO: 1356260 - RNA, 19 nt, Artificial Sequence
  Description of Artificial Sequence: Synthetic oligonucleotide
acaccuguccgguccgccg

SEQ ID NO: 1356261 - RNA, 19 nt, Artificial Sequence
  Description of Artificial Sequence: Synthetic oligonucleotide
aaacagccgccgacagucc

SEQ ID NO: 1356262 - RNA, 19 nt, Artificial Sequence
  Description of Artificial Sequence: Synthetic oligonucleotide
gguucgguagcgagcaucg

SEQ ID NO: 1356263 - RNA, 19 nt, Artificial Sequence
  Description of Artificial Sequence: Synthetic oligonucleotide
uagcaucuagcaacuuccu

SEQ ID NO: 1356264 - RNA, 19 nt, Artificial Sequence
  Description of Artificial Sequence: Synthetic oligonucleotide
uuccugagguugcccaucu

SEQ ID NO: 1356265 - RNA, 19 nt, Artificial Sequence
  Description of Artificial Sequence: Synthetic oligonucleotide
cauacagacguagcagcac

SEQ ID NO: 1356266 - RNA, 19 nt, Artificial Sequence
  Description of Artificial Sequence: Synthetic oligonucleotide
caggugguucgguagcgag

SEQ ID NO: 1356267 - RNA, 19 nt, Artificial Sequence
  Description of Artificial Sequence: Synthetic oligonucleotide
caagaauggcgaacaucac

SEQ ID NO: 1356268 - RNA, 19 nt, Artificial Sequence
  Description of Artificial Sequence: Synthetic oligonucleotide
ccugacaacacuggggucc

SEQ ID NO: 1356269 - RNA, 19 nt, Artificial Sequence
  Description of Artificial Sequence: Synthetic oligonucleotide
cacucucuaauaccaagga

SEQ ID NO: 1356270 - RNA, 19 nt, Artificial Sequence
  Description of Artificial Sequence: Synthetic oligonucleotide
uggggauugccgccgggca

SEQ ID NO: 1356271 - RNA, 19 nt, Artificial Sequence
  Description of Artificial Sequence: Synthetic oligonucleotide
gcaucggaagagcagguug

SEQ ID NO: 1356272 - RNA, 19 nt, Artificial Sequence
  Description of Artificial Sequence: Synthetic oligonucleotide
aggugguucgguagcgagc

SEQ ID NO: 1356273 - RNA, 19 nt, Artificial Sequence
  Description of Artificial Sequence: Synthetic oligonucleotide
uuucaauggccggcuuggg

SEQ ID NO: 1356274 - RNA, 19 nt, Artificial Sequence
  Description of Artificial Sequence: Synthetic oligonucleotide
gaggucaguggaaggcagg

SEQ ID NO: 1356275 - RNA, 19 nt, Artificial Sequence
  Description of Artificial Sequence: Synthetic oligonucleotide
cccauacagacguagcagc

SEQ ID NO: 1356276 - RNA, 19 nt, Artificial Sequence
  Description of Artificial Sequence: Synthetic oligonucleotide
gccgccaugacguggacug

SEQ ID NO: 1356277 - RNA, 19 nt, Artificial Sequence
  Description of Artificial Sequence: Synthetic oligonucleotide
ucugccagauaaugucgaa

SEQ ID NO: 1356278 - RNA, 19 nt, Artificial Sequence
  Description of Artificial Sequence: Synthetic oligonucleotide
uccgccgccaugacgugga

SEQ ID NO: 1356279 - RNA, 19 nt, Artificial Sequence
  Description of Artificial Sequence: Synthetic oligonucleotide
ugauaggcucggcgcugcg

SEQ ID NO: 1356280 - RNA, 19 nt, Artificial Sequence
  Description of Artificial Sequence: Synthetic oligonucleotide
agccccuguaguuguagcu

SEQ ID NO: 1356281 - RNA, 19 nt, Artificial Sequence
  Description of Artificial Sequence: Synthetic oligonucleotide
uagguaccgcuccaugguc

SEQ ID NO: 1356282 - RNA, 19 nt, Artificial Sequence
  Description of Artificial Sequence: Synthetic oligonucleotide
gguacgaaaccccaggggu

SEQ ID NO: 1356283 - RNA, 19 nt, Artificial Sequence
  Description of Artificial Sequence: Synthetic oligonucleotide
cauggaugccuggaggaug

SEQ ID NO: 1356284 - RNA, 19 nt, Artificial Sequence
  Description of Artificial Sequence: Synthetic oligonucleotide
uccucuagugggguagucu

SEQ ID NO: 1356285 - RNA, 19 nt, Artificial Sequence
  Description of Artificial Sequence: Synthetic oligonucleotide
aggccauuccucaaaggug

SEQ ID NO: 1356286 - RNA, 19 nt, Artificial Sequence
  Description of Artificial Sequence: Synthetic oligonucleotide
gcacuuagcauccuguaaa

SEQ ID NO: 1356287 - RNA, 19 nt, Artificial Sequence
  Description of Artificial Sequence: Synthetic oligonucleotide
ggcaccacugauaggcucg

SEQ ID NO: 1356288 - RNA, 19 nt, Artificial Sequence
  Description of Artificial Sequence: Synthetic oligonucleotide
acuuagcauccuguaaacu

SEQ ID NO: 1356289 - RNA, 19 nt, Artificial Sequence
  Description of Artificial Sequence: Synthetic oligonucleotide
auuggggauugccgccggg

SEQ ID NO: 1356290 - RNA, 19 nt, Artificial Sequence
  Description of Artificial Sequence: Synthetic oligonucleotide
cuccaaguagccaaacucu

SEQ ID NO: 1356291 - RNA, 19 nt, Artificial Sequence
  Description of Artificial Sequence: Synthetic oligonucleotide
agccaaacucuauggugga

SEQ ID NO: 1356292 - RNA, 19 nt, Artificial Sequence
  Description of Artificial Sequence: Synthetic oligonucleotide
gaaguagaacuggaaccga

SEQ ID NO: 1356293 - RNA, 19 nt, Artificial Sequence
  Description of Artificial Sequence: Synthetic oligonucleotide
ggcuacaccuguccggucc

SEQ ID NO: 1356294 - RNA, 19 nt, Artificial Sequence
  Description of Artificial Sequence: Synthetic oligonucleotide
ccucugccagauaaugucg

SEQ ID NO: 1356295 - RNA, 19 nt, Artificial Sequence
  Description of Artificial Sequence: Synthetic oligonucleotide
cuguccucuagugggguag

SEQ ID NO: 1356296 - RNA, 19 nt, Artificial Sequence
  Description of Artificial Sequence: Synthetic oligonucleotide
cuggaaccgagacugggca

SEQ ID NO: 1356297 - RNA, 19 nt, Artificial Sequence
  Description of Artificial Sequence: Synthetic oligonucleotide
acggggcaaacgcucagcu

SEQ ID NO: 1356298 - RNA, 19 nt, Artificial Sequence
  Description of Artificial Sequence: Synthetic oligonucleotide
uuggggauugccgccgggc

SEQ ID NO: 1356299 - RNA, 19 nt, Artificial Sequence
  Description of Artificial Sequence: Synthetic oligonucleotide
gccgauuggggauugccgc

SEQ ID NO: 1356300 - RNA, 19 nt, Artificial Sequence
  Description of Artificial Sequence: Synthetic oligonucleotide
caguccggaacgucuccgg

SEQ ID NO: 1356301 - RNA, 19 nt, Artificial Sequence
  Description of Artificial Sequence: Synthetic oligonucleotide
uacgccugccggucggugc

SEQ ID NO: 1356302 - RNA, 19 nt, Artificial Sequence
  Description of Artificial Sequence: Synthetic oligonucleotide
gguacucucggcaccacug

SEQ ID NO: 1356303 - RNA, 19 nt, Artificial Sequence
  Description of Artificial Sequence: Synthetic oligonucleotide
cugggcucuacgccugccg

SEQ ID NO: 1356304 - RNA, 19 nt, Artificial Sequence
  Description of Artificial Sequence: Synthetic oligonucleotide
uggccccauacagacguag

SEQ ID NO: 1356305 - RNA, 19 nt, Artificial Sequence
  Description of Artificial Sequence: Synthetic oligonucleotide
guccggaacgucuccgggc

SEQ ID NO: 1356306 - RNA, 19 nt, Artificial Sequence
  Description of Artificial Sequence: Synthetic oligonucleotide
uccgcucacggggcaaacg

SEQ ID NO: 1356307 - RNA, 19 nt, Artificial Sequence
  Description of Artificial Sequence: Synthetic oligonucleotide
accuguccgguccgccgcc

SEQ ID NO: 1356308 - RNA, 19 nt, Artificial Sequence
  Description of Artificial Sequence: Synthetic oligonucleotide
cucugccagauaaugucga

SEQ ID NO: 1356309 - RNA, 19 nt, Artificial Sequence
  Description of Artificial Sequence: Synthetic oligonucleotide
ggcccuaaugcucucucug

SEQ ID NO: 1356310 - RNA, 19 nt, Artificial Sequence
  Description of Artificial Sequence: Synthetic oligonucleotide
ucgguuccgcuuccggcca

SEQ ID NO: 1356311 - RNA, 19 nt, Artificial Sequence
  Description of Artificial Sequence: Synthetic oligonucleotide
ugguucgguagcgagcauc

SEQ ID NO: 1356312 - RNA, 19 nt, Artificial Sequence
  Description of Artificial Sequence: Synthetic oligonucleotide
gcaaccuucaggugggcuc

SEQ ID NO: 1356313 - RNA, 19 nt, Artificial Sequence
  Description of Artificial Sequence: Synthetic oligonucleotide
uacucucggcaccacugau

SEQ ID NO: 1356314 - RNA, 19 nt, Artificial Sequence
  Description of Artificial Sequence: Synthetic oligonucleotide
ccucuagugggguagucug

SEQ ID NO: 1356315 - RNA, 19 nt, Artificial Sequence
  Description of Artificial Sequence: Synthetic oligonucleotide
acugauaggcucggcgcug

SEQ ID NO: 1356316 - RNA, 19 nt, Artificial Sequence
  Description of Artificial Sequence: Synthetic oligonucleotide
cucuacgccugccggucgg

SEQ ID NO: 1356317 - RNA, 19 nt, Artificial Sequence
  Description of Artificial Sequence: Synthetic oligonucleotide
agcagguugcuaaggccuc

SEQ ID NO: 1356318 - RNA, 19 nt, Artificial Sequence
  Description of Artificial Sequence: Synthetic oligonucleotide
gcgaacaucacacucucua

SEQ ID NO: 1356319 - RNA, 19 nt, Artificial Sequence
  Description of Artificial Sequence: Synthetic oligonucleotide
acuggugacggaguagcau

SEQ ID NO: 1356320 - RNA, 19 nt, Artificial Sequence
  Description of Artificial Sequence: Synthetic oligonucleotide
cuccggcuacaccuguccg

SEQ ID NO: 1356321 - RNA, 19 nt, Artificial Sequence
  Description of Artificial Sequence: Synthetic oligonucleotide
ucucggcaccacugauagg

SEQ ID NO: 1356322 - RNA, 19 nt, Artificial Sequence
  Description of Artificial Sequence: Synthetic oligonucleotide
cccagggguucccagaugc

SEQ ID NO: 1356323 - RNA, 19 nt, Artificial Sequence
  Description of Artificial Sequence: Synthetic oligonucleotide
gggcaacuacucaaaacag

SEQ ID NO: 1356324 - RNA, 19 nt, Artificial Sequence
  Description of Artificial Sequence: Synthetic oligonucleotide
ggaagcgcgccgccgauug

SEQ ID NO: 1356325 - RNA, 19 nt, Artificial Sequence
  Description of Artificial Sequence: Synthetic oligonucleotide
aggucaguggaaggcaggu

SEQ ID NO: 1356326 - RNA, 19 nt, Artificial Sequence
  Description of Artificial Sequence: Synthetic oligonucleotide
acgucuccgggcguacucg

SEQ ID NO: 1356327 - RNA, 19 nt, Artificial Sequence
  Description of Artificial Sequence: Synthetic oligonucleotide
ccagagcauaccaacugac

SEQ ID NO: 1356328 - RNA, 19 nt, Artificial Sequence
  Description of Artificial Sequence: Synthetic oligonucleotide
ccuuggucaaacagccgcc

SEQ ID NO: 1356329 - RNA, 19 nt, Artificial Sequence
  Description of Artificial Sequence: Synthetic oligonucleotide
ggugguucgguagcgagca

SEQ ID NO: 1356330 - RNA, 19 nt, Artificial Sequence
  Description of Artificial Sequence: Synthetic oligonucleotide
gaagcgcgccgccgauugg

SEQ ID NO: 1356331 - RNA, 19 nt, Artificial Sequence
  Description of Artificial Sequence: Synthetic oligonucleotide
gcuacaccuguccgguccg

SEQ ID NO: 1356332 - RNA, 19 nt, Artificial Sequence
  Description of Artificial Sequence: Synthetic oligonucleotide
cagguugcuaaggccuccg

SEQ ID NO: 1356333 - RNA, 19 nt, Artificial Sequence
  Description of Artificial Sequence: Synthetic oligonucleotide
guacucucggcaccacuga

SEQ ID NO: 1356334 - RNA, 19 nt, Artificial Sequence
  Description of Artificial Sequence: Synthetic oligonucleotide
ggcuccuuagugaagggca

SEQ ID NO: 1356335 - RNA, 19 nt, Artificial Sequence
  Description of Artificial Sequence: Synthetic oligonucleotide
uugccacaacaguuucacu

SEQ ID NO: 1356336 - RNA, 19 nt, Artificial Sequence
  Description of Artificial Sequence: Synthetic oligonucleotide
uggaaccgagacugggcau

SEQ ID NO: 1356337 - RNA, 19 nt, Artificial Sequence
  Description of Artificial Sequence: Synthetic oligonucleotide
ggaaggcagguccuggauc

SEQ ID NO: 1356338 - RNA, 19 nt, Artificial Sequence
  Description of Artificial Sequence: Synthetic oligonucleotide
cgcgucacgagacagcgag

SEQ ID NO: 1356339 - RNA, 19 nt, Artificial Sequence
  Description of Artificial Sequence: Synthetic oligonucleotide
gaaccgagacugggcauac

SEQ ID NO: 1356340 - RNA, 19 nt, Artificial Sequence
  Description of Artificial Sequence: Synthetic oligonucleotide
cugauaggcucggcgcugc

SEQ ID NO: 1356341 - RNA, 19 nt, Artificial Sequence
  Description of Artificial Sequence: Synthetic oligonucleotide
gcccuaaugcucucucugc

SEQ ID NO: 1356342 - RNA, 19 nt, Artificial Sequence
  Description of Artificial Sequence: Synthetic oligonucleotide
gaguuggggcccuaaugcu

SEQ ID NO: 1356343 - RNA, 19 nt, Artificial Sequence
  Description of Artificial Sequence: Synthetic oligonucleotide
ggggaggucaguggaaggc

SEQ ID NO: 1356344 - RNA, 19 nt, Artificial Sequence
  Description of Artificial Sequence: Synthetic oligonucleotide
guacuguuccaggcggccc

SEQ ID NO: 1356345 - RNA, 19 nt, Artificial Sequence
  Description of Artificial Sequence: Synthetic oligonucleotide
gcaaacgcucagcuccucc

SEQ ID NO: 1356346 - RNA, 19 nt, Artificial Sequence
  Description of Artificial Sequence: Synthetic oligonucleotide
aguuuucaauggccggcuu

SEQ ID NO: 1356347 - RNA, 19 nt, Artificial Sequence
  Description of Artificial Sequence: Synthetic oligonucleotide
cucgcccacacugggcagg

SEQ ID NO: 1356348 - RNA, 19 nt, Artificial Sequence
  Description of Artificial Sequence: Synthetic oligonucleotide
caacuuccugagguugccc

SEQ ID NO: 1356349 - RNA, 19 nt, Artificial Sequence
  Description of Artificial Sequence: Synthetic oligonucleotide
gguacuguuccaggcggcc

SEQ ID NO: 1356350 - RNA, 19 nt, Artificial Sequence
  Description of Artificial Sequence: Synthetic oligonucleotide
ccacuggugacggaguagc

SEQ ID NO: 1356351 - RNA, 19 nt, Artificial Sequence
  Description of Artificial Sequence: Synthetic oligonucleotide
ggcgccaggagaaaucuga

SEQ ID NO: 1356352 - RNA, 19 nt, Artificial Sequence
  Description of Artificial Sequence: Synthetic oligonucleotide
agcgagcaucggaagagca

SEQ ID NO: 1356353 - RNA, 19 nt, Artificial Sequence
  Description of Artificial Sequence: Synthetic oligonucleotide
acauggaugccuggaggau

SEQ ID NO: 1356354 - RNA, 19 nt, Artificial Sequence
  Description of Artificial Sequence: Synthetic oligonucleotide
cucacggggcaaacgcuca

SEQ ID NO: 1356355 - RNA, 19 nt, Artificial Sequence
  Description of Artificial Sequence: Synthetic oligonucleotide
gaucugcuuuagguaccgc

SEQ ID NO: 1356356 - RNA, 19 nt, Artificial Sequence
  Description of Artificial Sequence: Synthetic oligonucleotide
acgccugccggucggugcu

SEQ ID NO: 1356357 - RNA, 19 nt, Artificial Sequence
  Description of Artificial Sequence: Synthetic oligonucleotide
agcaaccuucaggugggcu

SEQ ID NO: 1356358 - RNA, 19 nt, Artificial Sequence
  Description of Artificial Sequence: Synthetic oligonucleotide
uguccucuagugggguagu

SEQ ID NO: 1356359 - RNA, 19 nt, Artificial Sequence
  Description of Artificial Sequence: Synthetic oligonucleotide
caaccuucaggugggcuca

SEQ ID NO: 1356360 - RNA, 19 nt, Artificial Sequence
  Description of Artificial Sequence: Synthetic oligonucleotide
accguggaaacgggccauc

SEQ ID NO: 1356361 - RNA, 19 nt, Artificial Sequence
  Description of Artificial Sequence: Synthetic oligonucleotide
guucgguagcgagcaucgg

SEQ ID NO: 1356362 - RNA, 19 nt, Artificial Sequence
  Description of Artificial Sequence: Synthetic oligonucleotide
gaccacuggugacggagua

SEQ ID NO: 1356363 - RNA, 19 nt, Artificial Sequence
  Description of Artificial Sequence: Synthetic oligonucleotide
ccgauuggggauugccgcc

SEQ ID NO: 1356364 - RNA, 19 nt, Artificial Sequence
  Description of Artificial Sequence: Synthetic oligonucleotide
uaccgcuccauggucccaa

SEQ ID NO: 1356365 - RNA, 19 nt, Artificial Sequence
  Description of Artificial Sequence: Synthetic oligonucleotide
gccccauacagacguagca

SEQ ID NO: 1356366 - RNA, 19 nt, Artificial Sequence
  Description of Artificial Sequence: Synthetic oligonucleotide
ccgcucacggggcaaacgc

SEQ ID NO: 1356367 - RNA, 19 nt, Artificial Sequence
  Description of Artificial Sequence: Synthetic oligonucleotide
ggucaaacagccgccgaca

SEQ ID NO: 1356368 - RNA, 19 nt, Artificial Sequence
  Description of Artificial Sequence: Synthetic oligonucleotide
uaccguggaaacgggccau

SEQ ID NO: 1356369 - RNA, 19 nt, Artificial Sequence
  Description of Artificial Sequence: Synthetic oligonucleotide
gccgacagucccuccuccg

SEQ ID NO: 1356370 - RNA, 19 nt, Artificial Sequence
  Description of Artificial Sequence: Synthetic oligonucleotide
guuggggcccuaaugcucu

SEQ ID NO: 1356371 - RNA, 19 nt, Artificial Sequence
  Description of Artificial Sequence: Synthetic oligonucleotide
gcgagcaucggaagagcag

SEQ ID NO: 1356372 - RNA, 19 nt, Artificial Sequence
  Description of Artificial Sequence: Synthetic oligonucleotide
ucggaagagcagguugcua

SEQ ID NO: 1356373 - RNA, 19 nt, Artificial Sequence
  Description of Artificial Sequence: Synthetic oligonucleotide
caucuccauaccguggaaa

SEQ ID NO: 1356374 - RNA, 19 nt, Artificial Sequence
  Description of Artificial Sequence: Synthetic oligonucleotide
ccgacagucccuccuccgg

SEQ ID NO: 1356375 - RNA, 19 nt, Artificial Sequence
  Description of Artificial Sequence: Synthetic oligonucleotide
ccagauaaugucgaauaaa

SEQ ID NO: 1356376 - RNA, 19 nt, Artificial Sequence
  Description of Artificial Sequence: Synthetic oligonucleotide
cucuaugguggacauggau

SEQ ID NO: 1356377 - RNA, 19 nt, Artificial Sequence
  Description of Artificial Sequence: Synthetic oligonucleotide
cccaaacaaccaguggggc

SEQ ID NO: 1356378 - RNA, 19 nt, Artificial Sequence
  Description of Artificial Sequence: Synthetic oligonucleotide
ggcgcugcgcgucacgaga

SEQ ID NO: 1356379 - RNA, 19 nt, Artificial Sequence
  Description of Artificial Sequence: Synthetic oligonucleotide
cuccgggcguacucggcuc

SEQ ID NO: 1356380 - RNA, 19 nt, Artificial Sequence
  Description of Artificial Sequence: Synthetic oligonucleotide
ccgccgggcacuuagcauc

SEQ ID NO: 1356381 - RNA, 19 nt, Artificial Sequence
  Description of Artificial Sequence: Synthetic oligonucleotide
cugagguugcccaucucau

SEQ ID NO: 1356382 - RNA, 19 nt, Artificial Sequence
  Description of Artificial Sequence: Synthetic oligonucleotide
ggaguuggauugucaaggu

SEQ ID NO: 1356383 - RNA, 19 nt, Artificial Sequence
  Description of Artificial Sequence: Synthetic oligonucleotide
gcugcgcgucacgagacag

SEQ ID NO: 1356384 - RNA, 19 nt, Artificial Sequence
  Description of Artificial Sequence: Synthetic oligonucleotide
aaccgagacugggcauacu

SEQ ID NO: 1356385 - RNA, 19 nt, Artificial Sequence
  Description of Artificial Sequence: Synthetic oligonucleotide
cgccgauuggggauugccg

SEQ ID NO: 1356386 - RNA, 19 nt, Artificial Sequence
  Description of Artificial Sequence: Synthetic oligonucleotide
ucuacgccugccggucggu

SEQ ID NO: 1356387 - RNA, 19 nt, Artificial Sequence
  Description of Artificial Sequence: Synthetic oligonucleotide
cacugauaggcucggcgcu

SEQ ID NO: 1356388 - RNA, 19 nt, Artificial Sequence
  Description of Artificial Sequence: Synthetic oligonucleotide
gcucuacgccugccggucg

SEQ ID NO: 1356389 - RNA, 19 nt, Artificial Sequence
  Description of Artificial Sequence: Synthetic oligonucleotide
cacuggugacggaguagca

SEQ ID NO: 1356390 - RNA, 19 nt, Artificial Sequence
  Description of Artificial Sequence: Synthetic oligonucleotide
uaggcucggcgcugcgcgu

SEQ ID NO: 1356391 - RNA, 19 nt, Artificial Sequence
  Description of Artificial Sequence: Synthetic oligonucleotide
uggggcccuaaugcucucu

SEQ ID NO: 1356392 - RNA, 19 nt, Artificial Sequence
  Description of Artificial Sequence: Synthetic oligonucleotide
cgagacagcgaggaagcgc

SEQ ID NO: 1356393 - RNA, 19 nt, Artificial Sequence
  Description of Artificial Sequence: Synthetic oligonucleotide
gucacgagacagcgaggaa

SEQ ID NO: 1356394 - RNA, 19 nt, Artificial Sequence
  Description of Artificial Sequence: Synthetic oligonucleotide
cgagacugggcauacucca

SEQ ID NO: 1356395 - RNA, 19 nt, Artificial Sequence
  Description of Artificial Sequence: Synthetic oligonucleotide
ggggauugccgccgggcac

SEQ ID NO: 1356396 - RNA, 19 nt, Artificial Sequence
  Description of Artificial Sequence: Synthetic oligonucleotide
guguaaucauaaacccacu

SEQ ID NO: 1356397 - RNA, 19 nt, Artificial Sequence
  Description of Artificial Sequence: Synthetic oligonucleotide
cuacaccuguccgguccgc

SEQ ID NO: 1356398 - RNA, 19 nt, Artificial Sequence
  Description of Artificial Sequence: Synthetic oligonucleotide
cuuuguggcaauggcuccu

SEQ ID NO: 1356399 - RNA, 19 nt, Artificial Sequence
  Description of Artificial Sequence: Synthetic oligonucleotide
gcucagcaaccuucaggug

SEQ ID NO: 1356400 - RNA, 19 nt, Artificial Sequence
  Description of Artificial Sequence: Synthetic oligonucleotide
agcgcgccgccgauugggg

SEQ ID NO: 1356401 - RNA, 19 nt, Artificial Sequence
  Description of Artificial Sequence: Synthetic oligonucleotide
ccggucggugcucagcaac

SEQ ID NO: 1356402 - RNA, 19 nt, Artificial Sequence
  Description of Artificial Sequence: Synthetic oligonucleotide
gccaugacguggacugugc

SEQ ID NO: 1356403 - RNA, 19 nt, Artificial Sequence
  Description of Artificial Sequence: Synthetic oligonucleotide
guccgguccgccgccauga

SEQ ID NO: 1356404 - RNA, 19 nt, Artificial Sequence
  Description of Artificial Sequence: Synthetic oligonucleotide
agucccuccuccggcuaca

SEQ ID NO: 1356405 - RNA, 19 nt, Artificial Sequence
  Description of Artificial Sequence: Synthetic oligonucleotide
uccgguccgccgccaugac

SEQ ID NO: 1356406 - RNA, 19 nt, Artificial Sequence
  Description of Artificial Sequence: Synthetic oligonucleotide
ucgcccacacugggcaggu

SEQ ID NO: 1356407 - RNA, 19 nt, Artificial Sequence
  Description of Artificial Sequence: Synthetic oligonucleotide
ggaaccgagacugggcaua

SEQ ID NO: 1356408 - RNA, 19 nt, Artificial Sequence
  Description of Artificial Sequence: Synthetic oligonucleotide
cucuagugggguagucugu

SEQ ID NO: 1356409 - RNA, 19 nt, Artificial Sequence
  Description of Artificial Sequence: Synthetic oligonucleotide
ggaaacgggccaucuuugu

SEQ ID NO: 1356410 - RNA, 19 nt, Artificial Sequence
  Description of Artificial Sequence: Synthetic oligonucleotide
gccaguccggaacgucucc

SEQ ID NO: 1356411 - RNA, 19 nt, Artificial Sequence
  Description of Artificial Sequence: Synthetic oligonucleotide
cccuaaugcucucucugca

SEQ ID NO: 1356412 - RNA, 19 nt, Artificial Sequence
  Description of Artificial Sequence: Synthetic oligonucleotide
acgggccaucuuuguggca

SEQ ID NO: 1356413 - RNA, 19 nt, Artificial Sequence
  Description of Artificial Sequence: Synthetic oligonucleotide
uuggggcccuaaugcucuc

SEQ ID NO: 1356414 - RNA, 19 nt, Artificial Sequence
  Description of Artificial Sequence: Synthetic oligonucleotide
ggggcccuaaugcucucuc

SEQ ID NO: 1356415 - RNA, 19 nt, Artificial Sequence
  Description of Artificial Sequence: Synthetic oligonucleotide
cucuaauaccaaggagucu

SEQ ID NO: 1356416 - RNA, 19 nt, Artificial Sequence
  Description of Artificial Sequence: Synthetic oligonucleotide
ggcccucuggaaacacucc

SEQ ID NO: 1356417 - RNA, 19 nt, Artificial Sequence
  Description of Artificial Sequence: Synthetic oligonucleotide
cgauuggggauugccgccg

SEQ ID NO: 1356418 - RNA, 19 nt, Artificial Sequence
  Description of Artificial Sequence: Synthetic oligonucleotide
cggucggugcucagcaacc

SEQ ID NO: 1356419 - RNA, 19 nt, Artificial Sequence
  Description of Artificial Sequence: Synthetic oligonucleotide
cuacgccugccggucggug

SEQ ID NO: 1356420 - RNA, 19 nt, Artificial Sequence
  Description of Artificial Sequence: Synthetic oligonucleotide
uccggccaguccggaacgu

SEQ ID NO: 1356421 - RNA, 19 nt, Artificial Sequence
  Description of Artificial Sequence: Synthetic oligonucleotide
ggcucuacgccugccgguc

SEQ ID NO: 1356422 - RNA, 19 nt, Artificial Sequence
  Description of Artificial Sequence: Synthetic oligonucleotide
guacgaaaccccagggguu

SEQ ID NO: 1356423 - RNA, 19 nt, Artificial Sequence
  Description of Artificial Sequence: Synthetic oligonucleotide
gggcacuuagcauccugua

SEQ ID NO: 1356424 - RNA, 19 nt, Artificial Sequence
  Description of Artificial Sequence: Synthetic oligonucleotide
acaaccaguggggcuccuu

SEQ ID NO: 1356425 - RNA, 19 nt, Artificial Sequence
  Description of Artificial Sequence: Synthetic oligonucleotide
cgacagucccuccuccggc

SEQ ID NO: 1356426 - RNA, 19 nt, Artificial Sequence
  Description of Artificial Sequence: Synthetic oligonucleotide
caccacugauaggcucggc

SEQ ID NO: 1356427 - RNA, 19 nt, Artificial Sequence
  Description of Artificial Sequence: Synthetic oligonucleotide
gcucugagagcaguaagau

SEQ ID NO: 1356428 - RNA, 19 nt, Artificial Sequence
  Description of Artificial Sequence: Synthetic oligonucleotide
cugccagauaaugucgaau

SEQ ID NO: 1356429 - RNA, 19 nt, Artificial Sequence
  Description of Artificial Sequence: Synthetic oligonucleotide
gccaaacucuaugguggac

SEQ ID NO: 1356430 - RNA, 19 nt, Artificial Sequence
  Description of Artificial Sequence: Synthetic oligonucleotide
caaagccccuguaguugua

SEQ ID NO: 1356431 - RNA, 19 nt, Artificial Sequence
  Description of Artificial Sequence: Synthetic oligonucleotide
cugugggacuugcuuugua

SEQ ID NO: 1356432 - RNA, 19 nt, Artificial Sequence
  Description of Artificial Sequence: Synthetic oligonucleotide
ggccaucuuuguggcaaug

SEQ ID NO: 1356433 - RNA, 19 nt, Artificial Sequence
  Description of Artificial Sequence: Synthetic oligonucleotide
cagguacucucggcaccac

SEQ ID NO: 1356434 - RNA, 19 nt, Artificial Sequence
  Description of Artificial Sequence: Synthetic oligonucleotide
guccucuagugggguaguc

SEQ ID NO: 1356435 - RNA, 19 nt, Artificial Sequence
  Description of Artificial Sequence: Synthetic oligonucleotide
cagcaaccuucaggugggc

SEQ ID NO: 1356436 - RNA, 19 nt, Artificial Sequence
  Description of Artificial Sequence: Synthetic oligonucleotide
ggaacgucuccgggcguac

SEQ ID NO: 1356437 - RNA, 19 nt, Artificial Sequence
  Description of Artificial Sequence: Synthetic oligonucleotide
cgucacgagacagcgagga

SEQ ID NO: 1356438 - RNA, 19 nt, Artificial Sequence
  Description of Artificial Sequence: Synthetic oligonucleotide
cgucuccgggcguacucgg

SEQ ID NO: 1356439 - RNA, 19 nt, Artificial Sequence
  Description of Artificial Sequence: Synthetic oligonucleotide
gcgucacgagacagcgagg

SEQ ID NO: 1356440 - RNA, 19 nt, Artificial Sequence
  Description of Artificial Sequence: Synthetic oligonucleotide
ccgggcacuuagcauccug

SEQ ID NO: 1356441 - RNA, 19 nt, Artificial Sequence
  Description of Artificial Sequence: Synthetic oligonucleotide
ccgguccgccgccaugacg

SEQ ID NO: 1356442 - RNA, 19 nt, Artificial Sequence
  Description of Artificial Sequence: Synthetic oligonucleotide
cuccgcucacggggcaaac

SEQ ID NO: 1356443 - RNA, 19 nt, Artificial Sequence
  Description of Artificial Sequence: Synthetic oligonucleotide
cagccgccgacagucccuc

SEQ ID NO: 1356444 - RNA, 19 nt, Artificial Sequence
  Description of Artificial Sequence: Synthetic oligonucleotide
guagucugugggacuugcu

SEQ ID NO: 1356445 - RNA, 19 nt, Artificial Sequence
  Description of Artificial Sequence: Synthetic oligonucleotide
ccaaguagccaaacucuau

SEQ ID NO: 1356446 - RNA, 19 nt, Artificial Sequence
  Description of Artificial Sequence: Synthetic oligonucleotide
gaggaagcgcgccgccgau

SEQ ID NO: 1356447 - RNA, 19 nt, Artificial Sequence
  Description of Artificial Sequence: Synthetic oligonucleotide
ccagguacucucggcacca

SEQ ID NO: 1356448 - RNA, 19 nt, Artificial Sequence
  Description of Artificial Sequence: Synthetic oligonucleotide
ggccaguccggaacgucuc

SEQ ID NO: 1356449 - RNA, 19 nt, Artificial Sequence
  Description of Artificial Sequence: Synthetic oligonucleotide
ggguagucugugggacuug

SEQ ID NO: 1356450 - RNA, 19 nt, Artificial Sequence
  Description of Artificial Sequence: Synthetic oligonucleotide
cgccgggcacuuagcaucc

SEQ ID NO: 1356451 - RNA, 19 nt, Artificial Sequence
  Description of Artificial Sequence: Synthetic oligonucleotide
gccccuguaguuguagcua

SEQ ID NO: 1356452 - RNA, 19 nt, Artificial Sequence
  Description of Artificial Sequence: Synthetic oligonucleotide
gaacgucuccgggcguacu

SEQ ID NO: 1356453 - RNA, 19 nt, Artificial Sequence
  Description of Artificial Sequence: Synthetic oligonucleotide
ccgcuuccggccaguccgg

SEQ ID NO: 1356454 - RNA, 19 nt, Artificial Sequence
  Description of Artificial Sequence: Synthetic oligonucleotide
ccaggcggcccucuggaaa

SEQ ID NO: 1356455 - RNA, 19 nt, Artificial Sequence
  Description of Artificial Sequence: Synthetic oligonucleotide
aggaagcgcgccgccgauu

SEQ ID NO: 1356456 - RNA, 19 nt, Artificial Sequence
  Description of Artificial Sequence: Synthetic oligonucleotide
gcuguccucuaguggggua

SEQ ID NO: 1356457 - RNA, 19 nt, Artificial Sequence
  Description of Artificial Sequence: Synthetic oligonucleotide
guucccagaugcccaccuu

SEQ ID NO: 1356458 - RNA, 19 nt, Artificial Sequence
  Description of Artificial Sequence: Synthetic oligonucleotide
guaccgcuccaugguccca

SEQ ID NO: 1356459 - RNA, 19 nt, Artificial Sequence
  Description of Artificial Sequence: Synthetic oligonucleotide
gggauugccgccgggcacu

SEQ ID NO: 1356460 - RNA, 19 nt, Artificial Sequence
  Description of Artificial Sequence: Synthetic oligonucleotide
ggugacggaguagcaucua

SEQ ID NO: 1356461 - RNA, 19 nt, Artificial Sequence
  Description of Artificial Sequence: Synthetic oligonucleotide
cuggaggcgccaggagaaa

SEQ ID NO: 1356462 - RNA, 19 nt, Artificial Sequence
  Description of Artificial Sequence: Synthetic oligonucleotide
gcgcugcgcgucacgagac

SEQ ID NO: 1356463 - RNA, 19 nt, Artificial Sequence
  Description of Artificial Sequence: Synthetic oligonucleotide
ggacugugcugggcucuac

SEQ ID NO: 1356464 - RNA, 19 nt, Artificial Sequence
  Description of Artificial Sequence: Synthetic oligonucleotide
cgaaaccccagggguuccc

SEQ ID NO: 1356465 - RNA, 19 nt, Artificial Sequence
  Description of Artificial Sequence: Synthetic oligonucleotide
cgccgacagucccuccucc

SEQ ID NO: 1356466 - RNA, 19 nt, Artificial Sequence
  Description of Artificial Sequence: Synthetic oligonucleotide
gccgccgacagucccuccu

SEQ ID NO: 1356467 - RNA, 19 nt, Artificial Sequence
  Description of Artificial Sequence: Synthetic oligonucleotide
ggcaaacgcucagcuccuc

SEQ ID NO: 1356468 - RNA, 19 nt, Artificial Sequence
  Description of Artificial Sequence: Synthetic oligonucleotide
ggcucggcgcugcgcguca

SEQ ID NO: 1356469 - RNA, 19 nt, Artificial Sequence
  Description of Artificial Sequence: Synthetic oligonucleotide
gggcucuacgccugccggu

SEQ ID NO: 1356470 - RNA, 19 nt, Artificial Sequence
  Description of Artificial Sequence: Synthetic oligonucleotide
gcuuuguagaaaggccauu

SEQ ID NO: 1356471 - RNA, 19 nt, Artificial Sequence
  Description of Artificial Sequence: Synthetic oligonucleotide
auggccggcuugggaggua

SEQ ID NO: 1356472 - RNA, 19 nt, Artificial Sequence
  Description of Artificial Sequence: Synthetic oligonucleotide
gauugccgccgggcacuua

SEQ ID NO: 1356473 - RNA, 19 nt, Artificial Sequence
  Description of Artificial Sequence: Synthetic oligonucleotide
gggcaaacgcucagcuccu

SEQ ID NO: 1356474 - RNA, 19 nt, Artificial Sequence
  Description of Artificial Sequence: Synthetic oligonucleotide
cuuccggcucggcucgguu

SEQ ID NO: 1356475 - RNA, 19 nt, Artificial Sequence
  Description of Artificial Sequence: Synthetic oligonucleotide
gcgcgccgccgauugggga

SEQ ID NO: 1356476 - RNA, 19 nt, Artificial Sequence
  Description of Artificial Sequence: Synthetic oligonucleotide
ccggccaguccggaacguc

SEQ ID NO: 1356477 - RNA, 19 nt, Artificial Sequence
  Description of Artificial Sequence: Synthetic oligonucleotide
ggcgaacaucacacucucu

SEQ ID NO: 1356478 - RNA, 19 nt, Artificial Sequence
  Description of Artificial Sequence: Synthetic oligonucleotide
ccggcuacaccuguccggu

SEQ ID NO: 1356479 - RNA, 19 nt, Artificial Sequence
  Description of Artificial Sequence: Synthetic oligonucleotide
gugguucgguagcgagcau

SEQ ID NO: 1356480 - RNA, 19 nt, Artificial Sequence
  Description of Artificial Sequence: Synthetic oligonucleotide
ccgcagcucuugaguuuuc

SEQ ID NO: 1356481 - RNA, 19 nt, Artificial Sequence
  Description of Artificial Sequence: Synthetic oligonucleotide
gccgccgauuggggauugc

SEQ ID NO: 1356482 - RNA, 19 nt, Artificial Sequence
  Description of Artificial Sequence: Synthetic oligonucleotide
cggcgcugcgcgucacgag

SEQ ID NO: 1356483 - RNA, 19 nt, Artificial Sequence
  Description of Artificial Sequence: Synthetic oligonucleotide
cggccaguccggaacgucu

SEQ ID NO: 1356484 - RNA, 19 nt, Artificial Sequence
  Description of Artificial Sequence: Synthetic oligonucleotide
gccugccggucggugcuca

SEQ ID NO: 1356485 - RNA, 19 nt, Artificial Sequence
  Description of Artificial Sequence: Synthetic oligonucleotide
gcgcgucacgagacagcga

SEQ ID NO: 1356486 - RNA, 19 nt, Artificial Sequence
  Description of Artificial Sequence: Synthetic oligonucleotide
ccggcuugggagguacugu

SEQ ID NO: 1356487 - RNA, 19 nt, Artificial Sequence
  Description of Artificial Sequence: Synthetic oligonucleotide
gccuccgcucacggggcaa

SEQ ID NO: 1356488 - RNA, 19 nt, Artificial Sequence
  Description of Artificial Sequence: Synthetic oligonucleotide
ccguggaaacgggccaucu

SEQ ID NO: 1356489 - RNA, 19 nt, Artificial Sequence
  Description of Artificial Sequence: Synthetic oligonucleotide
ccuccgcucacggggcaaa

SEQ ID NO: 1356490 - RNA, 19 nt, Artificial Sequence
  Description of Artificial Sequence: Synthetic oligonucleotide
cggcuacaccuguccgguc

SEQ ID NO: 1356491 - RNA, 19 nt, Artificial Sequence
  Description of Artificial Sequence: Synthetic oligonucleotide
cgcugcgcgucacgagaca

SEQ ID NO: 1356492 - RNA, 19 nt, Artificial Sequence
  Description of Artificial Sequence: Synthetic oligonucleotide
cguggaaacgggccaucuu

SEQ ID NO: 1356493 - RNA, 19 nt, Artificial Sequence
  Description of Artificial Sequence: Synthetic oligonucleotide
cggaacgucuccgggcgua

SEQ ID NO: 1356494 - RNA, 19 nt, Artificial Sequence
  Description of Artificial Sequence: Synthetic oligonucleotide
gcaccucgcggggcuccuc

SEQ ID NO: 1356495 - RNA, 19 nt, Artificial Sequence
  Description of Artificial Sequence: Synthetic oligonucleotide
cgcgccgccgauuggggau

SEQ ID NO: 1356496 - RNA, 19 nt, Artificial Sequence
  Description of Artificial Sequence: Synthetic oligonucleotide
gcggggcuccucgcccaca

SEQ ID NO: 1356497 - RNA, 19 nt, Artificial Sequence
  Description of Artificial Sequence: Synthetic oligonucleotide
ggauugccgccgggcacuu

SEQ ID NO: 1356498 - RNA, 19 nt, Artificial Sequence
  Description of Artificial Sequence: Synthetic oligonucleotide
ccggaacgucuccgggcgu

SEQ ID NO: 1356499 - RNA, 19 nt, Artificial Sequence
  Description of Artificial Sequence: Synthetic oligonucleotide
gcgccgccgauuggggauu

SEQ ID NO: 1356500 - RNA, 19 nt, Artificial Sequence
  Description of Artificial Sequence: Synthetic oligonucleotide
ccgccaugacguggacugu

SEQ ID NO: 1356501 - RNA, 19 nt, Artificial Sequence
  Description of Artificial Sequence: Synthetic oligonucleotide
gaaauuauuacauacgucc

SEQ ID NO: 1356502 - RNA, 19 nt, Artificial Sequence
  Description of Artificial Sequence: Synthetic oligonucleotide
aguuacacuagacagagcc

SEQ ID NO: 1356503 - RNA, 19 nt, Artificial Sequence
  Description of Artificial Sequence: Synthetic oligonucleotide
ucugcaaucaccaaauacc

SEQ ID NO: 1356504 - RNA, 19 nt, Artificial Sequence
  Description of Artificial Sequence: Synthetic oligonucleotide
ucuaaaagaaaauagguau

SEQ ID NO: 1356505 - RNA, 19 nt, Artificial Sequence
  Description of Artificial Sequence: Synthetic oligonucleotide
aaauaccuguuucuuaagc

SEQ ID NO: 1356506 - RNA, 19 nt, Artificial Sequence
  Description of Artificial Sequence: Synthetic oligonucleotide
acuaugaucaaauuccuuc

SEQ ID NO: 1356507 - RNA, 19 nt, Artificial Sequence
  Description of Artificial Sequence: Synthetic oligonucleotide
aagggaaucaaugugauca

SEQ ID NO: 1356508 - RNA, 19 nt, Artificial Sequence
  Description of Artificial Sequence: Synthetic oligonucleotide
aguuacuaugaucaaauuc

SEQ ID NO: 1356509 - RNA, 19 nt, Artificial Sequence
  Description of Artificial Sequence: Synthetic oligonucleotide
guauggaucagucaguagg

SEQ ID NO: 1356510 - RNA, 19 nt, Artificial Sequence
  Description of Artificial Sequence: Synthetic oligonucleotide
caggauaagucuaacagcg

SEQ ID NO: 1356511 - RNA, 19 nt, Artificial Sequence
  Description of Artificial Sequence: Synthetic oligonucleotide
aucagauaagcaauuaucc

SEQ ID NO: 1356512 - RNA, 19 nt, Artificial Sequence
  Description of Artificial Sequence: Synthetic oligonucleotide
uccagagauaucuaaacag

SEQ ID NO: 1356513 - RNA, 19 nt, Artificial Sequence
  Description of Artificial Sequence: Synthetic oligonucleotide
ucugaguugagguaguaag

SEQ ID NO: 1356514 - RNA, 19 nt, Artificial Sequence
  Description of Artificial Sequence: Synthetic oligonucleotide
ucaguaggaauucagcaag

SEQ ID NO: 1356515 - RNA, 19 nt, Artificial Sequence
  Description of Artificial Sequence: Synthetic oligonucleotide
auagaugggcccuggaucc

SEQ ID NO: 1356516 - RNA, 19 nt, Artificial Sequence
  Description of Artificial Sequence: Synthetic oligonucleotide
acaggauaagucuaacagc

SEQ ID NO: 1356517 - RNA, 19 nt, Artificial Sequence
  Description of Artificial Sequence: Synthetic oligonucleotide
gacuguauggaucagucag

SEQ ID NO: 1356518 - RNA, 19 nt, Artificial Sequence
  Description of Artificial Sequence: Synthetic oligonucleotide
uguccuuuagcccuguucc

SEQ ID NO: 1356519 - RNA, 19 nt, Artificial Sequence
  Description of Artificial Sequence: Synthetic oligonucleotide
agaaaauagcuuuucagca

SEQ ID NO: 1356520 - RNA, 19 nt, Artificial Sequence
  Description of Artificial Sequence: Synthetic oligonucleotide
aaauugaccauguguagcu

SEQ ID NO: 1356521 - RNA, 19 nt, Artificial Sequence
  Description of Artificial Sequence: Synthetic oligonucleotide
guuucuuaagcacagugag

SEQ ID NO: 1356522 - RNA, 19 nt, Artificial Sequence
  Description of Artificial Sequence: Synthetic oligonucleotide
aaccaaaagaaaaucauca

SEQ ID NO: 1356523 - RNA, 19 nt, Artificial Sequence
  Description of Artificial Sequence: Synthetic oligonucleotide
uaugcuaaugucauaagua

SEQ ID NO: 1356524 - RNA, 19 nt, Artificial Sequence
  Description of Artificial Sequence: Synthetic oligonucleotide
aagcaauuauccuucaagu

SEQ ID NO: 1356525 - RNA, 19 nt, Artificial Sequence
  Description of Artificial Sequence: Synthetic oligonucleotide
auuacauacguccauggca

SEQ ID NO: 1356526 - RNA, 19 nt, Artificial Sequence
  Description of Artificial Sequence: Synthetic oligonucleotide
aauaagggaaucaauguga

SEQ ID NO: 1356527 - RNA, 19 nt, Artificial Sequence
  Description of Artificial Sequence: Synthetic oligonucleotide
auaccuguuucuuaagcac

SEQ ID NO: 1356528 - RNA, 19 nt, Artificial Sequence
  Description of Artificial Sequence: Synthetic oligonucleotide
uuauuacauacguccaugg

SEQ ID NO: 1356529 - RNA, 19 nt, Artificial Sequence
  Description of Artificial Sequence: Synthetic oligonucleotide
uguuuugcaguuacuauga

SEQ ID NO: 1356530 - RNA, 19 nt, Artificial Sequence
  Description of Artificial Sequence: Synthetic oligonucleotide
aagucuaacagcguuaggu

SEQ ID NO: 1356531 - RNA, 19 nt, Artificial Sequence
  Description of Artificial Sequence: Synthetic oligonucleotide
auacacuucugcuuggccg

SEQ ID NO: 1356532 - RNA, 19 nt, Artificial Sequence
  Description of Artificial Sequence: Synthetic oligonucleotide
ucaacguugucagagauga

SEQ ID NO: 1356533 - RNA, 19 nt, Artificial Sequence
  Description of Artificial Sequence: Synthetic oligonucleotide
agcguuagguucucaaggc

SEQ ID NO: 1356534 - RNA, 19 nt, Artificial Sequence
  Description of Artificial Sequence: Synthetic oligonucleotide
acuagacagagccucauug

SEQ ID NO: 1356535 - RNA, 19 nt, Artificial Sequence
  Description of Artificial Sequence: Synthetic oligonucleotide
ucuaacagcguuagguucu

SEQ ID NO: 1356536 - RNA, 19 nt, Artificial Sequence
  Description of Artificial Sequence: Synthetic oligonucleotide
uccaccgccagacacauac

SEQ ID NO: 1356537 - RNA, 19 nt, Artificial Sequence
  Description of Artificial Sequence: Synthetic oligonucleotide
uuacauacguccauggcau

SEQ ID NO: 1356538 - RNA, 19 nt, Artificial Sequence
  Description of Artificial Sequence: Synthetic oligonucleotide
ucagauaagcaauuauccu

SEQ ID NO: 1356539 - RNA, 19 nt, Artificial Sequence
  Description of Artificial Sequence: Synthetic oligonucleotide
auuucaacugugccccugc

SEQ ID NO: 1356540 - RNA, 19 nt, Artificial Sequence
  Description of Artificial Sequence: Synthetic oligonucleotide
agauaagcaauuauccuuc

SEQ ID NO: 1356541 - RNA, 19 nt, Artificial Sequence
  Description of Artificial Sequence: Synthetic oligonucleotide
ucagugaacuucuguaaag

SEQ ID NO: 1356542 - RNA, 19 nt, Artificial Sequence
  Description of Artificial Sequence: Synthetic oligonucleotide
uauuacauacguccauggc

SEQ ID NO: 1356543 - RNA, 19 nt, Artificial Sequence
  Description of Artificial Sequence: Synthetic oligonucleotide
uauggaucagucaguagga

SEQ ID NO: 1356544 - RNA, 19 nt, Artificial Sequence
  Description of Artificial Sequence: Synthetic oligonucleotide
ugaguugagguaguaagcc

SEQ ID NO: 1356545 - RNA, 19 nt, Artificial Sequence
  Description of Artificial Sequence: Synthetic oligonucleotide
ucucgaacauagaugggcc

SEQ ID NO: 1356546 - RNA, 19 nt, Artificial Sequence
  Description of Artificial Sequence: Synthetic oligonucleotide
uucucgaacauagaugggc

SEQ ID NO: 1356547 - RNA, 19 nt, Artificial Sequence
  Description of Artificial Sequence: Synthetic oligonucleotide
caauaagggaaucaaugug

SEQ ID NO: 1356548 - RNA, 19 nt, Artificial Sequence
  Description of Artificial Sequence: Synthetic oligonucleotide
aagguugacuguauggauc

SEQ ID NO: 1356549 - RNA, 19 nt, Artificial Sequence
  Description of Artificial Sequence: Synthetic oligonucleotide
ucugugaacuucugucugg

SEQ ID NO: 1356550 - RNA, 19 nt, Artificial Sequence
  Description of Artificial Sequence: Synthetic oligonucleotide
cuagacagagccucauugg

SEQ ID NO: 1356551 - RNA, 19 nt, Artificial Sequence
  Description of Artificial Sequence: Synthetic oligonucleotide
aaauuauuacauacgucca

SEQ ID NO: 1356552 - RNA, 19 nt, Artificial Sequence
  Description of Artificial Sequence: Synthetic oligonucleotide
aauagcuuuucagcaaucu

SEQ ID NO: 1356553 - RNA, 19 nt, Artificial Sequence
  Description of Artificial Sequence: Synthetic oligonucleotide
agagauaucuaaacaguuc

SEQ ID NO: 1356554 - RNA, 19 nt, Artificial Sequence
  Description of Artificial Sequence: Synthetic oligonucleotide
guaggaauucagcaagucc

SEQ ID NO: 1356555 - RNA, 19 nt, Artificial Sequence
  Description of Artificial Sequence: Synthetic oligonucleotide
agaaauuauuacauacguc

SEQ ID NO: 1356556 - RNA, 19 nt, Artificial Sequence
  Description of Artificial Sequence: Synthetic oligonucleotide
ggaaagguugacuguaugg

SEQ ID NO: 1356557 - RNA, 19 nt, Artificial Sequence
  Description of Artificial Sequence: Synthetic oligonucleotide
aacaaggccuauguguguc

SEQ ID NO: 1356558 - RNA, 19 nt, Artificial Sequence
  Description of Artificial Sequence: Synthetic oligonucleotide
gucauuuuccgaaugccgg

SEQ ID NO: 1356559 - RNA, 19 nt, Artificial Sequence
  Description of Artificial Sequence: Synthetic oligonucleotide
aagccauugccuugauuuc

SEQ ID NO: 1356560 - RNA, 19 nt, Artificial Sequence
  Description of Artificial Sequence: Synthetic oligonucleotide
ugcucugacugcucgaaag

SEQ ID NO: 1356561 - RNA, 19 nt, Artificial Sequence
  Description of Artificial Sequence: Synthetic oligonucleotide
agccaaauugaccaugugu

SEQ ID NO: 1356562 - RNA, 19 nt, Artificial Sequence
  Description of Artificial Sequence: Synthetic oligonucleotide
aaucaaugugaucaacguu

SEQ ID NO: 1356563 - RNA, 19 nt, Artificial Sequence
  Description of Artificial Sequence: Synthetic oligonucleotide
ugcaggacgaucuggucag

SEQ ID NO: 1356564 - RNA, 19 nt, Artificial Sequence
  Description of Artificial Sequence: Synthetic oligonucleotide
uuagcccuguuccagagau

SEQ ID NO: 1356565 - RNA, 19 nt, Artificial Sequence
  Description of Artificial Sequence: Synthetic oligonucleotide
ucuguaaagcccugagccc

SEQ ID NO: 1356566 - RNA, 19 nt, Artificial Sequence
  Description of Artificial Sequence: Synthetic oligonucleotide
auaagucuaacagcguuag

SEQ ID NO: 1356567 - RNA, 19 nt, Artificial Sequence
  Description of Artificial Sequence: Synthetic oligonucleotide
ugacucuuggcucaacagu

SEQ ID NO: 1356568 - RNA, 19 nt, Artificial Sequence
  Description of Artificial Sequence: Synthetic oligonucleotide
auuuucucgaacauagaug

SEQ ID NO: 1356569 - RNA, 19 nt, Artificial Sequence
  Description of Artificial Sequence: Synthetic oligonucleotide
aauagguauccaauuccag

SEQ ID NO: 1356570 - RNA, 19 nt, Artificial Sequence
  Description of Artificial Sequence: Synthetic oligonucleotide
acguugucagagaugaagc

SEQ ID NO: 1356571 - RNA, 19 nt, Artificial Sequence
  Description of Artificial Sequence: Synthetic oligonucleotide
augcuaaugucauaaguaa

SEQ ID NO: 1356572 - RNA, 19 nt, Artificial Sequence
  Description of Artificial Sequence: Synthetic oligonucleotide
caaauugaccauguguagc

SEQ ID NO: 1356573 - RNA, 19 nt, Artificial Sequence
  Description of Artificial Sequence: Synthetic oligonucleotide
acauacguccauggcaucc

SEQ ID NO: 1356574 - RNA, 19 nt, Artificial Sequence
  Description of Artificial Sequence: Synthetic oligonucleotide
ugcuaugcuaaugucauaa

SEQ ID NO: 1356575 - RNA, 19 nt, Artificial Sequence
  Description of Artificial Sequence: Synthetic oligonucleotide
gauuuggcagaguagcgca

SEQ ID NO: 1356576 - RNA, 19 nt, Artificial Sequence
  Description of Artificial Sequence: Synthetic oligonucleotide
ucaccaaauaccuguuucu

SEQ ID NO: 1356577 - RNA, 19 nt, Artificial Sequence
  Description of Artificial Sequence: Synthetic oligonucleotide
gaaagguugacuguaugga

SEQ ID NO: 1356578 - RNA, 19 nt, Artificial Sequence
  Description of Artificial Sequence: Synthetic oligonucleotide
cagcguuagguucucaagg

SEQ ID NO: 1356579 - RNA, 19 nt, Artificial Sequence
  Description of Artificial Sequence: Synthetic oligonucleotide
ucauuuuccgaaugccggc

SEQ ID NO: 1356580 - RNA, 19 nt, Artificial Sequence
  Description of Artificial Sequence: Synthetic oligonucleotide
cugaguugagguaguaagc

SEQ ID NO: 1356581 - RNA, 19 nt, Artificial Sequence
  Description of Artificial Sequence: Synthetic oligonucleotide
ucaaugugaucaacguugu

SEQ ID NO: 1356582 - RNA, 19 nt, Artificial Sequence
  Description of Artificial Sequence: Synthetic oligonucleotide
uuucaucacucuuacuggu

SEQ ID NO: 1356583 - RNA, 19 nt, Artificial Sequence
  Description of Artificial Sequence: Synthetic oligonucleotide
cauagaugggcccuggauc

SEQ ID NO: 1356584 - RNA, 19 nt, Artificial Sequence
  Description of Artificial Sequence: Synthetic oligonucleotide
ugauagaaguacugagcug

SEQ ID NO: 1356585 - RNA, 19 nt, Artificial Sequence
  Description of Artificial Sequence: Synthetic oligonucleotide
ugcuaaugucauaaguaaa

SEQ ID NO: 1356586 - RNA, 19 nt, Artificial Sequence
  Description of Artificial Sequence: Synthetic oligonucleotide
aaguaaauccaaaccaaaa

SEQ ID NO: 1356587 - RNA, 19 nt, Artificial Sequence
  Description of Artificial Sequence: Synthetic oligonucleotide
ucgaaagcucucuucuugc

SEQ ID NO: 1356588 - RNA, 19 nt, Artificial Sequence
  Description of Artificial Sequence: Synthetic oligonucleotide
uuucucgaacauagauggg

SEQ ID NO: 1356589 - RNA, 19 nt, Artificial Sequence
  Description of Artificial Sequence: Synthetic oligonucleotide
aacagcguuagguucucaa

SEQ ID NO: 1356590 - RNA, 19 nt, Artificial Sequence
  Description of Artificial Sequence: Synthetic oligonucleotide
gaaucaaugugaucaacgu

SEQ ID NO: 1356591 - RNA, 19 nt, Artificial Sequence
  Description of Artificial Sequence: Synthetic oligonucleotide
cagucaguaggaauucagc

SEQ ID NO: 1356592 - RNA, 19 nt, Artificial Sequence
  Description of Artificial Sequence: Synthetic oligonucleotide
gaucuggucagcccagccc

SEQ ID NO: 1356593 - RNA, 19 nt, Artificial Sequence
  Description of Artificial Sequence: Synthetic oligonucleotide
agcagaaaauagcuuuuca

SEQ ID NO: 1356594 - RNA, 19 nt, Artificial Sequence
  Description of Artificial Sequence: Synthetic oligonucleotide
aguaggaauucagcaaguc

SEQ ID NO: 1356595 - RNA, 19 nt, Artificial Sequence
  Description of Artificial Sequence: Synthetic oligonucleotide
uaagucuaacagcguuagg

SEQ ID NO: 1356596 - RNA, 19 nt, Artificial Sequence
  Description of Artificial Sequence: Synthetic oligonucleotide
uguauggaucagucaguag

SEQ ID NO: 1356597 - RNA, 19 nt, Artificial Sequence
  Description of Artificial Sequence: Synthetic oligonucleotide
ucccauaggccucagugaa

SEQ ID NO: 1356598 - RNA, 19 nt, Artificial Sequence
  Description of Artificial Sequence: Synthetic oligonucleotide
cuaaugucauaaguaaauc

SEQ ID NO: 1356599 - RNA, 19 nt, Artificial Sequence
  Description of Artificial Sequence: Synthetic oligonucleotide
auaggccucagugaacuuc

SEQ ID NO: 1356600 - RNA, 19 nt, Artificial Sequence
  Description of Artificial Sequence: Synthetic oligonucleotide
ugcaaucaccaaauaccug

SEQ ID NO: 1356601 - RNA, 19 nt, Artificial Sequence
  Description of Artificial Sequence: Synthetic oligonucleotide
uugccuugauuucaacugu

SEQ ID NO: 1356602 - RNA, 19 nt, Artificial Sequence
  Description of Artificial Sequence: Synthetic oligonucleotide
ucguuucugauagaaguac

SEQ ID NO: 1356603 - RNA, 19 nt, Artificial Sequence
  Description of Artificial Sequence: Synthetic oligonucleotide
acuuuggagugaacaaggc

SEQ ID NO: 1356604 - RNA, 19 nt, Artificial Sequence
  Description of Artificial Sequence: Synthetic oligonucleotide
cucgaaagcucucuucuug

SEQ ID NO: 1356605 - RNA, 19 nt, Artificial Sequence
  Description of Artificial Sequence: Synthetic oligonucleotide
agagggauuuggcagagua

SEQ ID NO: 1356606 - RNA, 19 nt, Artificial Sequence
  Description of Artificial Sequence: Synthetic oligonucleotide
agugagcaaagcaccagac

SEQ ID NO: 1356607 - RNA, 19 nt, Artificial Sequence
  Description of Artificial Sequence: Synthetic oligonucleotide
ugaucaacguugucagaga

SEQ ID NO: 1356608 - RNA, 19 nt, Artificial Sequence
  Description of Artificial Sequence: Synthetic oligonucleotide
agugaacaaggccuaugug

SEQ ID NO: 1356609 - RNA, 19 nt, Artificial Sequence
  Description of Artificial Sequence: Synthetic oligonucleotide
agaacuggagcuucccaga

SEQ ID NO: 1356610 - RNA, 19 nt, Artificial Sequence
  Description of Artificial Sequence: Synthetic oligonucleotide
ggcagaguagcgcagauuc

SEQ ID NO: 1356611 - RNA, 19 nt, Artificial Sequence
  Description of Artificial Sequence: Synthetic oligonucleotide
aaugccggcaucagauaag

SEQ ID NO: 1356612 - RNA, 19 nt, Artificial Sequence
  Description of Artificial Sequence: Synthetic oligonucleotide
auagaaguacugagcugcc

SEQ ID NO: 1356613 - RNA, 19 nt, Artificial Sequence
  Description of Artificial Sequence: Synthetic oligonucleotide
aacaguggcccauggcagu

SEQ ID NO: 1356614 - RNA, 19 nt, Artificial Sequence
  Description of Artificial Sequence: Synthetic oligonucleotide
augccggcaucagauaagc

SEQ ID NO: 1356615 - RNA, 19 nt, Artificial Sequence
  Description of Artificial Sequence: Synthetic oligonucleotide
gguuucugaguugagguag

SEQ ID NO: 1356616 - RNA, 19 nt, Artificial Sequence
  Description of Artificial Sequence: Synthetic oligonucleotide
gccaauaagggaaucaaug

SEQ ID NO: 1356617 - RNA, 19 nt, Artificial Sequence
  Description of Artificial Sequence: Synthetic oligonucleotide
uauccuucaaguggagcug

SEQ ID NO: 1356618 - RNA, 19 nt, Artificial Sequence
  Description of Artificial Sequence: Synthetic oligonucleotide
ucacggguguaugugaaga

SEQ ID NO: 1356619 - RNA, 19 nt, Artificial Sequence
  Description of Artificial Sequence: Synthetic oligonucleotide
gagcaaagcaccagacucc

SEQ ID NO: 1356620 - RNA, 19 nt, Artificial Sequence
  Description of Artificial Sequence: Synthetic oligonucleotide
ucugugaucucaggguuac

SEQ ID NO: 1356621 - RNA, 19 nt, Artificial Sequence
  Description of Artificial Sequence: Synthetic oligonucleotide
uggaucagucaguaggaau

SEQ ID NO: 1356622 - RNA, 19 nt, Artificial Sequence
  Description of Artificial Sequence: Synthetic oligonucleotide
cucgaacauagaugggccc

SEQ ID NO: 1356623 - RNA, 19 nt, Artificial Sequence
  Description of Artificial Sequence: Synthetic oligonucleotide
acauagaugggcccuggau

SEQ ID NO: 1356624 - RNA, 19 nt, Artificial Sequence
  Description of Artificial Sequence: Synthetic oligonucleotide
uguaaagcccugagcccug

SEQ ID NO: 1356625 - RNA, 19 nt, Artificial Sequence
  Description of Artificial Sequence: Synthetic oligonucleotide
cugauagaaguacugagcu

SEQ ID NO: 1356626 - RNA, 19 nt, Artificial Sequence
  Description of Artificial Sequence: Synthetic oligonucleotide
caggaaagauccagucggg

SEQ ID NO: 1356627 - RNA, 19 nt, Artificial Sequence
  Description of Artificial Sequence: Synthetic oligonucleotide
ucgaacauagaugggcccu

SEQ ID NO: 1356628 - RNA, 19 nt, Artificial Sequence
  Description of Artificial Sequence: Synthetic oligonucleotide
ugagcugccuuucgagacu

SEQ ID NO: 1356629 - RNA, 19 nt, Artificial Sequence
  Description of Artificial Sequence: Synthetic oligonucleotide
ugcaguuacuaugaucaaa

SEQ ID NO: 1356630 - RNA, 19 nt, Artificial Sequence
  Description of Artificial Sequence: Synthetic oligonucleotide
gaguugagguaguaagcca

SEQ ID NO: 1356631 - RNA, 19 nt, Artificial Sequence
  Description of Artificial Sequence: Synthetic oligonucleotide
agcaccagacucccauagg

SEQ ID NO: 1356632 - RNA, 19 nt, Artificial Sequence
  Description of Artificial Sequence: Synthetic oligonucleotide
auaagcaauuauccuucaa

SEQ ID NO: 1356633 - RNA, 19 nt, Artificial Sequence
  Description of Artificial Sequence: Synthetic oligonucleotide
gauaagucuaacagcguua

SEQ ID NO: 1356634 - RNA, 19 nt, Artificial Sequence
  Description of Artificial Sequence: Synthetic oligonucleotide
uuggagugaacaaggccua

SEQ ID NO: 1356635 - RNA, 19 nt, Artificial Sequence
  Description of Artificial Sequence: Synthetic oligonucleotide
ccacagaaaagccuuuggg

SEQ ID NO: 1356636 - RNA, 19 nt, Artificial Sequence
  Description of Artificial Sequence: Synthetic oligonucleotide
cagucuuccaccgccagac

SEQ ID NO: 1356637 - RNA, 19 nt, Artificial Sequence
  Description of Artificial Sequence: Synthetic oligonucleotide
gcaaucaccaaauaccugu

SEQ ID NO: 1356638 - RNA, 19 nt, Artificial Sequence
  Description of Artificial Sequence: Synthetic oligonucleotide
cacauacacuucugcuugg

SEQ ID NO: 1356639 - RNA, 19 nt, Artificial Sequence
  Description of Artificial Sequence: Synthetic oligonucleotide
gagggauuuggcagaguag

SEQ ID NO: 1356640 - RNA, 19 nt, Artificial Sequence
  Description of Artificial Sequence: Synthetic oligonucleotide
gagugaacaaggccuaugu

SEQ ID NO: 1356641 - RNA, 19 nt, Artificial Sequence
  Description of Artificial Sequence: Synthetic oligonucleotide
aguggcccauggcaguccg

SEQ ID NO: 1356642 - RNA, 19 nt, Artificial Sequence
  Description of Artificial Sequence: Synthetic oligonucleotide
guggagcugaguuacacua

SEQ ID NO: 1356643 - RNA, 19 nt, Artificial Sequence
  Description of Artificial Sequence: Synthetic oligonucleotide
uuuuccgaaugccggcauc

SEQ ID NO: 1356644 - RNA, 19 nt, Artificial Sequence
  Description of Artificial Sequence: Synthetic oligonucleotide
uccgaaugccggcaucaga

SEQ ID NO: 1356645 - RNA, 19 nt, Artificial Sequence
  Description of Artificial Sequence: Synthetic oligonucleotide
gccuaugugugucuggagc

SEQ ID NO: 1356646 - RNA, 19 nt, Artificial Sequence
  Description of Artificial Sequence: Synthetic oligonucleotide
ucgagacucugcaucuuuc

SEQ ID NO: 1356647 - RNA, 19 nt, Artificial Sequence
  Description of Artificial Sequence: Synthetic oligonucleotide
ugugaucaacguugucaga

SEQ ID NO: 1356648 - RNA, 19 nt, Artificial Sequence
  Description of Artificial Sequence: Synthetic oligonucleotide
gcaccagacucccauaggc

SEQ ID NO: 1356649 - RNA, 19 nt, Artificial Sequence
  Description of Artificial Sequence: Synthetic oligonucleotide
cauacguccauggcauccc

SEQ ID NO: 1356650 - RNA, 19 nt, Artificial Sequence
  Description of Artificial Sequence: Synthetic oligonucleotide
gaguucaugugggugucug

SEQ ID NO: 1356651 - RNA, 19 nt, Artificial Sequence
  Description of Artificial Sequence: Synthetic oligonucleotide
auaagggaaucaaugugau

SEQ ID NO: 1356652 - RNA, 19 nt, Artificial Sequence
  Description of Artificial Sequence: Synthetic oligonucleotide
cuucccuguucaugcacag

SEQ ID NO: 1356653 - RNA, 19 nt, Artificial Sequence
  Description of Artificial Sequence: Synthetic oligonucleotide
uucgagacucugcaucuuu

SEQ ID NO: 1356654 - RNA, 19 nt, Artificial Sequence
  Description of Artificial Sequence: Synthetic oligonucleotide
aacuucuguaaagcccuga

SEQ ID NO: 1356655 - RNA, 19 nt, Artificial Sequence
  Description of Artificial Sequence: Synthetic oligonucleotide
cauuuucucgaacauagau

SEQ ID NO: 1356656 - RNA, 19 nt, Artificial Sequence
  Description of Artificial Sequence: Synthetic oligonucleotide
ccaaauugaccauguguag

SEQ ID NO: 1356657 - RNA, 19 nt, Artificial Sequence
  Description of Artificial Sequence: Synthetic oligonucleotide
cagauaagcaauuauccuu

SEQ ID NO: 1356658 - RNA, 19 nt, Artificial Sequence
  Description of Artificial Sequence: Synthetic oligonucleotide
ugcccauuuucucgaacau

SEQ ID NO: 1356659 - RNA, 19 nt, Artificial Sequence
  Description of Artificial Sequence: Synthetic oligonucleotide
ucgcucccacugcaggacg

SEQ ID NO: 1356660 - RNA, 19 nt, Artificial Sequence
  Description of Artificial Sequence: Synthetic oligonucleotide
caguccggaaccuucucuc

SEQ ID NO: 1356661 - RNA, 19 nt, Artificial Sequence
  Description of Artificial Sequence: Synthetic oligonucleotide
ugcuugcuaugcuaauguc

SEQ ID NO: 1356662 - RNA, 19 nt, Artificial Sequence
  Description of Artificial Sequence: Synthetic oligonucleotide
ggauuuggcagaguagcgc

SEQ ID NO: 1356663 - RNA, 19 nt, Artificial Sequence
  Description of Artificial Sequence: Synthetic oligonucleotide
augaagugaucagucuucu

SEQ ID NO: 1356664 - RNA, 19 nt, Artificial Sequence
  Description of Artificial Sequence: Synthetic oligonucleotide
uucugaguugagguaguaa

SEQ ID NO: 1356665 - RNA, 19 nt, Artificial Sequence
  Description of Artificial Sequence: Synthetic oligonucleotide
acggguguaugugaagaug

SEQ ID NO: 1356666 - RNA, 19 nt, Artificial Sequence
  Description of Artificial Sequence: Synthetic oligonucleotide
ucacucgcucccacugcag

SEQ ID NO: 1356667 - RNA, 19 nt, Artificial Sequence
  Description of Artificial Sequence: Synthetic oligonucleotide
gcgcagauuccccucacgg

SEQ ID NO: 1356668 - RNA, 19 nt, Artificial Sequence
  Description of Artificial Sequence: Synthetic oligonucleotide
gcucguuucugauagaagu

SEQ ID NO: 1356669 - RNA, 19 nt, Artificial Sequence
  Description of Artificial Sequence: Synthetic oligonucleotide
uccaagcuugcaacaggaa

SEQ ID NO: 1356670 - RNA, 19 nt, Artificial Sequence
  Description of Artificial Sequence: Synthetic oligonucleotide
agucgggugagcucccgga

SEQ ID NO: 1356671 - RNA, 19 nt, Artificial Sequence
  Description of Artificial Sequence: Synthetic oligonucleotide
gcuaugcuaaugucauaag

SEQ ID NO: 1356672 - RNA, 19 nt, Artificial Sequence
  Description of Artificial Sequence: Synthetic oligonucleotide
cugcaaucaccaaauaccu

SEQ ID NO: 1356673 - RNA, 19 nt, Artificial Sequence
  Description of Artificial Sequence: Synthetic oligonucleotide
agugaucagucuucucuuu

SEQ ID NO: 1356674 - RNA, 19 nt, Artificial Sequence
  Description of Artificial Sequence: Synthetic oligonucleotide
aguccggaaccuucucucu

SEQ ID NO: 1356675 - RNA, 19 nt, Artificial Sequence
  Description of Artificial Sequence: Synthetic oligonucleotide
acuguauggaucagucagu

SEQ ID NO: 1356676 - RNA, 19 nt, Artificial Sequence
  Description of Artificial Sequence: Synthetic oligonucleotide
gaugaggggaaagguugac

SEQ ID NO: 1356677 - RNA, 19 nt, Artificial Sequence
  Description of Artificial Sequence: Synthetic oligonucleotide
cucacggguguaugugaag

SEQ ID NO: 1356678 - RNA, 19 nt, Artificial Sequence
  Description of Artificial Sequence: Synthetic oligonucleotide
gagccaaauugaccaugug

SEQ ID NO: 1356679 - RNA, 19 nt, Artificial Sequence
  Description of Artificial Sequence: Synthetic oligonucleotide
aaauuccuucaaaggcacu

SEQ ID NO: 1356680 - RNA, 19 nt, Artificial Sequence
  Description of Artificial Sequence: Synthetic oligonucleotide
gccaaauugaccaugugua

SEQ ID NO: 1356681 - RNA, 19 nt, Artificial Sequence
  Description of Artificial Sequence: Synthetic oligonucleotide
aggaauucagcaaguccca

SEQ ID NO: 1356682 - RNA, 19 nt, Artificial Sequence
  Description of Artificial Sequence: Synthetic oligonucleotide
gguauccaauuccagcauc

SEQ ID NO: 1356683 - RNA, 19 nt, Artificial Sequence
  Description of Artificial Sequence: Synthetic oligonucleotide
gaaagccaauaagggaauc

SEQ ID NO: 1356684 - RNA, 19 nt, Artificial Sequence
  Description of Artificial Sequence: Synthetic oligonucleotide
acaguggcccauggcaguc

SEQ ID NO: 1356685 - RNA, 19 nt, Artificial Sequence
  Description of Artificial Sequence: Synthetic oligonucleotide
gcuguucuugacaccaucc

SEQ ID NO: 1356686 - RNA, 19 nt, Artificial Sequence
  Description of Artificial Sequence: Synthetic oligonucleotide
uggcaguccggaaccuucu

SEQ ID NO: 1356687 - RNA, 19 nt, Artificial Sequence
  Description of Artificial Sequence: Synthetic oligonucleotide
agaugggcccuggauccac

SEQ ID NO: 1356688 - RNA, 19 nt, Artificial Sequence
  Description of Artificial Sequence: Synthetic oligonucleotide
cuuucgagacucugcaucu

SEQ ID NO: 1356689 - RNA, 19 nt, Artificial Sequence
  Description of Artificial Sequence: Synthetic oligonucleotide
ucgggugagcucccggaaa

SEQ ID NO: 1356690 - RNA, 19 nt, Artificial Sequence
  Description of Artificial Sequence: Synthetic oligonucleotide
gaacuggagcuucccagaa

SEQ ID NO: 1356691 - RNA, 19 nt, Artificial Sequence
  Description of Artificial Sequence: Synthetic oligonucleotide
cucaggguuacaggauaag

SEQ ID NO: 1356692 - RNA, 19 nt, Artificial Sequence
  Description of Artificial Sequence: Synthetic oligonucleotide
aggaaagauccagucgggu

SEQ ID NO: 1356693 - RNA, 19 nt, Artificial Sequence
  Description of Artificial Sequence: Synthetic oligonucleotide
ggagcugaguuacacuaga

SEQ ID NO: 1356694 - RNA, 19 nt, Artificial Sequence
  Description of Artificial Sequence: Synthetic oligonucleotide
cugcucgaaagcucucuuc

SEQ ID NO: 1356695 - RNA, 19 nt, Artificial Sequence
  Description of Artificial Sequence: Synthetic oligonucleotide
augaggggaaagguugacu

SEQ ID NO: 1356696 - RNA, 19 nt, Artificial Sequence
  Description of Artificial Sequence: Synthetic oligonucleotide
gccggcaucagauaagcaa

SEQ ID NO: 1356697 - RNA, 19 nt, Artificial Sequence
  Description of Artificial Sequence: Synthetic oligonucleotide
acguggguuucugaguuga

SEQ ID NO: 1356698 - RNA, 19 nt, Artificial Sequence
  Description of Artificial Sequence: Synthetic oligonucleotide
uggcccauggcaguccgga

SEQ ID NO: 1356699 - RNA, 19 nt, Artificial Sequence
  Description of Artificial Sequence: Synthetic oligonucleotide
gagcucguuucugauagaa

SEQ ID NO: 1356700 - RNA, 19 nt, Artificial Sequence
  Description of Artificial Sequence: Synthetic oligonucleotide
guacugagcugccuuucga

SEQ ID NO: 1356701 - RNA, 19 nt, Artificial Sequence
  Description of Artificial Sequence: Synthetic oligonucleotide
aggccuaugugugucugga

SEQ ID NO: 1356702 - RNA, 19 nt, Artificial Sequence
  Description of Artificial Sequence: Synthetic oligonucleotide
guagcgcagauuccccuca

SEQ ID NO: 1356703 - RNA, 19 nt, Artificial Sequence
  Description of Artificial Sequence: Synthetic oligonucleotide
aucagucaguaggaauuca

SEQ ID NO: 1356704 - RNA, 19 nt, Artificial Sequence
  Description of Artificial Sequence: Synthetic oligonucleotide
ugucugccaggagacauuu

SEQ ID NO: 1356705 - RNA, 19 nt, Artificial Sequence
  Description of Artificial Sequence: Synthetic oligonucleotide
uuccgaaugccggcaucag

SEQ ID NO: 1356706 - RNA, 19 nt, Artificial Sequence
  Description of Artificial Sequence: Synthetic oligonucleotide
gcuaaugucauaaguaaau

SEQ ID NO: 1356707 - RNA, 19 nt, Artificial Sequence
  Description of Artificial Sequence: Synthetic oligonucleotide
auguguagcugcccauuuu

SEQ ID NO: 1356708 - RNA, 19 nt, Artificial Sequence
  Description of Artificial Sequence: Synthetic oligonucleotide
gcguuagguucucaaggcc

SEQ ID NO: 1356709 - RNA, 19 nt, Artificial Sequence
  Description of Artificial Sequence: Synthetic oligonucleotide
guauccaauuccagcaucu

SEQ ID NO: 1356710 - RNA, 19 nt, Artificial Sequence
  Description of Artificial Sequence: Synthetic oligonucleotide
uuggcucaacaguggccca

SEQ ID NO: 1356711 - RNA, 19 nt, Artificial Sequence
  Description of Artificial Sequence: Synthetic oligonucleotide
cagagauaucuaaacaguu

SEQ ID NO: 1356712 - RNA, 19 nt, Artificial Sequence
  Description of Artificial Sequence: Synthetic oligonucleotide
uacauacguccauggcauc

SEQ ID NO: 1356713 - RNA, 19 nt, Artificial Sequence
  Description of Artificial Sequence: Synthetic oligonucleotide
cauuuuccgaaugccggca

SEQ ID NO: 1356714 - RNA, 19 nt, Artificial Sequence
  Description of Artificial Sequence: Synthetic oligonucleotide
uccccucacggguguaugu

SEQ ID NO: 1356715 - RNA, 19 nt, Artificial Sequence
  Description of Artificial Sequence: Synthetic oligonucleotide
cccauggcaguccggaacc

SEQ ID NO: 1356716 - RNA, 19 nt, Artificial Sequence
  Description of Artificial Sequence: Synthetic oligonucleotide
cagcuuccacgcucacucg

SEQ ID NO: 1356717 - RNA, 19 nt, Artificial Sequence
  Description of Artificial Sequence: Synthetic oligonucleotide
aggauaagucuaacagcgu

SEQ ID NO: 1356718 - RNA, 19 nt, Artificial Sequence
  Description of Artificial Sequence: Synthetic oligonucleotide
caaggccuaugugugucug

SEQ ID NO: 1356719 - RNA, 19 nt, Artificial Sequence
  Description of Artificial Sequence: Synthetic oligonucleotide
gcuuggccgacuguggugc

SEQ ID NO: 1356720 - RNA, 19 nt, Artificial Sequence
  Description of Artificial Sequence: Synthetic oligonucleotide
ggauaagucuaacagcguu

SEQ ID NO: 1356721 - RNA, 19 nt, Artificial Sequence
  Description of Artificial Sequence: Synthetic oligonucleotide
gaacaaggccuaugugugu

SEQ ID NO: 1356722 - RNA, 19 nt, Artificial Sequence
  Description of Artificial Sequence: Synthetic oligonucleotide
ggagugaacaaggccuaug

SEQ ID NO: 1356723 - RNA, 19 nt, Artificial Sequence
  Description of Artificial Sequence: Synthetic oligonucleotide
uagcgcagauuccccucac

SEQ ID NO: 1356724 - RNA, 19 nt, Artificial Sequence
  Description of Artificial Sequence: Synthetic oligonucleotide
agccaauaagggaaucaau

SEQ ID NO: 1356725 - RNA, 19 nt, Artificial Sequence
  Description of Artificial Sequence: Synthetic oligonucleotide
agguucucaaggccucuuu

SEQ ID NO: 1356726 - RNA, 19 nt, Artificial Sequence
  Description of Artificial Sequence: Synthetic oligonucleotide
guccuuuagcccuguucca

SEQ ID NO: 1356727 - RNA, 19 nt, Artificial Sequence
  Description of Artificial Sequence: Synthetic oligonucleotide
acacuucugcuuggccgac

SEQ ID NO: 1356728 - RNA, 19 nt, Artificial Sequence
  Description of Artificial Sequence: Synthetic oligonucleotide
cuaacagcguuagguucuc

SEQ ID NO: 1356729 - RNA, 19 nt, Artificial Sequence
  Description of Artificial Sequence: Synthetic oligonucleotide
uuccccucacggguguaug

SEQ ID NO: 1356730 - RNA, 19 nt, Artificial Sequence
  Description of Artificial Sequence: Synthetic oligonucleotide
uugcuaugcuaaugucaua

SEQ ID NO: 1356731 - RNA, 19 nt, Artificial Sequence
  Description of Artificial Sequence: Synthetic oligonucleotide
acguagagcaaaagaguuu

SEQ ID NO: 1356732 - RNA, 19 nt, Artificial Sequence
  Description of Artificial Sequence: Synthetic oligonucleotide
ccagagauaucuaaacagu

SEQ ID NO: 1356733 - RNA, 19 nt, Artificial Sequence
  Description of Artificial Sequence: Synthetic oligonucleotide
gguuacaggauaagucuaa

SEQ ID NO: 1356734 - RNA, 19 nt, Artificial Sequence
  Description of Artificial Sequence: Synthetic oligonucleotide
aguaagccauugccuugau

SEQ ID NO: 1356735 - RNA, 19 nt, Artificial Sequence
  Description of Artificial Sequence: Synthetic oligonucleotide
cccggaaagacuugaucuc

SEQ ID NO: 1356736 - RNA, 19 nt, Artificial Sequence
  Description of Artificial Sequence: Synthetic oligonucleotide
accgccagacacauacacu

SEQ ID NO: 1356737 - RNA, 19 nt, Artificial Sequence
  Description of Artificial Sequence: Synthetic oligonucleotide
cuguaaagcccugagcccu

SEQ ID NO: 1356738 - RNA, 19 nt, Artificial Sequence
  Description of Artificial Sequence: Synthetic oligonucleotide
auggaucagucaguaggaa

SEQ ID NO: 1356739 - RNA, 19 nt, Artificial Sequence
  Description of Artificial Sequence: Synthetic oligonucleotide
ccgacuguggugcacucug

SEQ ID NO: 1356740 - RNA, 19 nt, Artificial Sequence
  Description of Artificial Sequence: Synthetic oligonucleotide
cuguauggaucagucagua

SEQ ID NO: 1356741 - RNA, 19 nt, Artificial Sequence
  Description of Artificial Sequence: Synthetic oligonucleotide
guuacacuagacagagccu

SEQ ID NO: 1356742 - RNA, 19 nt, Artificial Sequence
  Description of Artificial Sequence: Synthetic oligonucleotide
gggaaucaaugugaucaac

SEQ ID NO: 1356743 - RNA, 19 nt, Artificial Sequence
  Description of Artificial Sequence: Synthetic oligonucleotide
ggcuguucuugacaccauc

SEQ ID NO: 1356744 - RNA, 19 nt, Artificial Sequence
  Description of Artificial Sequence: Synthetic oligonucleotide
uuucgagacucugcaucuu

SEQ ID NO: 1356745 - RNA, 19 nt, Artificial Sequence
  Description of Artificial Sequence: Synthetic oligonucleotide
uggagugaacaaggccuau

SEQ ID NO: 1356746 - RNA, 19 nt, Artificial Sequence
  Description of Artificial Sequence: Synthetic oligonucleotide
ugauguccuuuagcccugu

SEQ ID NO: 1356747 - RNA, 19 nt, Artificial Sequence
  Description of Artificial Sequence: Synthetic oligonucleotide
uaacagcguuagguucuca

SEQ ID NO: 1356748 - RNA, 19 nt, Artificial Sequence
  Description of Artificial Sequence: Synthetic oligonucleotide
uggcucaacaguggcccau

SEQ ID NO: 1356749 - RNA, 19 nt, Artificial Sequence
  Description of Artificial Sequence: Synthetic oligonucleotide
cggguguaugugaagauga

SEQ ID NO: 1356750 - RNA, 19 nt, Artificial Sequence
  Description of Artificial Sequence: Synthetic oligonucleotide
ggccguggcuucugcaggc

SEQ ID NO: 1356751 - RNA, 19 nt, Artificial Sequence
  Description of Artificial Sequence: Synthetic oligonucleotide
ccucauuggugagauguuc

SEQ ID NO: 1356752 - RNA, 19 nt, Artificial Sequence
  Description of Artificial Sequence: Synthetic oligonucleotide
uuggccgacuguggugcac

SEQ ID NO: 1356753 - RNA, 19 nt, Artificial Sequence
  Description of Artificial Sequence: Synthetic oligonucleotide
auuccccucacggguguau

SEQ ID NO: 1356754 - RNA, 19 nt, Artificial Sequence
  Description of Artificial Sequence: Synthetic oligonucleotide
guccggaaccuucucucua

SEQ ID NO: 1356755 - RNA, 19 nt, Artificial Sequence
  Description of Artificial Sequence: Synthetic oligonucleotide
cguagagcaaaagaguuua

SEQ ID NO: 1356756 - RNA, 19 nt, Artificial Sequence
  Description of Artificial Sequence: Synthetic oligonucleotide
guuuugcaguuacuaugau

SEQ ID NO: 1356757 - RNA, 19 nt, Artificial Sequence
  Description of Artificial Sequence: Synthetic oligonucleotide
uggcagaguagcgcagauu

SEQ ID NO: 1356758 - RNA, 19 nt, Artificial Sequence
  Description of Artificial Sequence: Synthetic oligonucleotide
gcugcccauuuucucgaac

SEQ ID NO: 1356759 - RNA, 19 nt, Artificial Sequence
  Description of Artificial Sequence: Synthetic oligonucleotide
gucgggugagcucccggaa

SEQ ID NO: 1356760 - RNA, 19 nt, Artificial Sequence
  Description of Artificial Sequence: Synthetic oligonucleotide
caaucaccaaauaccuguu

SEQ ID NO: 1356761 - RNA, 19 nt, Artificial Sequence
  Description of Artificial Sequence: Synthetic oligonucleotide
caguggcccauggcagucc

SEQ ID NO: 1356762 - RNA, 19 nt, Artificial Sequence
  Description of Artificial Sequence: Synthetic oligonucleotide
cucuauagaacuggagcuu

SEQ ID NO: 1356763 - RNA, 19 nt, Artificial Sequence
  Description of Artificial Sequence: Synthetic oligonucleotide
cuggauccacguggguuuc

SEQ ID NO: 1356764 - RNA, 19 nt, Artificial Sequence
  Description of Artificial Sequence: Synthetic oligonucleotide
ccgaaugccggcaucagau

SEQ ID NO: 1356765 - RNA, 19 nt, Artificial Sequence
  Description of Artificial Sequence: Synthetic oligonucleotide
cauguucaucuccaagcuu

SEQ ID NO: 1356766 - RNA, 19 nt, Artificial Sequence
  Description of Artificial Sequence: Synthetic oligonucleotide
cgggugagcucccggaaag

SEQ ID NO: 1356767 - RNA, 19 nt, Artificial Sequence
  Description of Artificial Sequence: Synthetic oligonucleotide
ccauuuucucgaacauaga

SEQ ID NO: 1356768 - RNA, 19 nt, Artificial Sequence
  Description of Artificial Sequence: Synthetic oligonucleotide
caguuacuaugaucaaauu

SEQ ID NO: 1356769 - RNA, 19 nt, Artificial Sequence
  Description of Artificial Sequence: Synthetic oligonucleotide
cgaucuggucagcccagcc

SEQ ID NO: 1356770 - RNA, 19 nt, Artificial Sequence
  Description of Artificial Sequence: Synthetic oligonucleotide
cuuggccgacuguggugca

SEQ ID NO: 1356771 - RNA, 19 nt, Artificial Sequence
  Description of Artificial Sequence: Synthetic oligonucleotide
ccggcaucagauaagcaau

SEQ ID NO: 1356772 - RNA, 19 nt, Artificial Sequence
  Description of Artificial Sequence: Synthetic oligonucleotide
gugagauguucuagaaguu

SEQ ID NO: 1356773 - RNA, 19 nt, Artificial Sequence
  Description of Artificial Sequence: Synthetic oligonucleotide
cacggguguaugugaagau

SEQ ID NO: 1356774 - RNA, 19 nt, Artificial Sequence
  Description of Artificial Sequence: Synthetic oligonucleotide
gcaguccggaaccuucucu

SEQ ID NO: 1356775 - RNA, 19 nt, Artificial Sequence
  Description of Artificial Sequence: Synthetic oligonucleotide
ggcaguccggaaccuucuc

SEQ ID NO: 1356776 - RNA, 19 nt, Artificial Sequence
  Description of Artificial Sequence: Synthetic oligonucleotide
caacguugucagagaugaa

SEQ ID NO: 1356777 - RNA, 19 nt, Artificial Sequence
  Description of Artificial Sequence: Synthetic oligonucleotide
cgcucacucgcucccacug

SEQ ID NO: 1356778 - RNA, 19 nt, Artificial Sequence
  Description of Artificial Sequence: Synthetic oligonucleotide
guagagcaaaagaguuuau

SEQ ID NO: 1356779 - RNA, 19 nt, Artificial Sequence
  Description of Artificial Sequence: Synthetic oligonucleotide
cgaacauagaugggcccug

SEQ ID NO: 1356780 - RNA, 19 nt, Artificial Sequence
  Description of Artificial Sequence: Synthetic oligonucleotide
ccgccagacacauacacuu

SEQ ID NO: 1356781 - RNA, 19 nt, Artificial Sequence
  Description of Artificial Sequence: Synthetic oligonucleotide
ccucacggguguaugugaa

SEQ ID NO: 1356782 - RNA, 19 nt, Artificial Sequence
  Description of Artificial Sequence: Synthetic oligonucleotide
uuccaccgccagacacaua

SEQ ID NO: 1356783 - RNA, 19 nt, Artificial Sequence
  Description of Artificial Sequence: Synthetic oligonucleotide
ccccucacggguguaugug

SEQ ID NO: 1356784 - RNA, 19 nt, Artificial Sequence
  Description of Artificial Sequence: Synthetic oligonucleotide
gauuccccucacgggugua

SEQ ID NO: 1356785 - RNA, 19 nt, Artificial Sequence
  Description of Artificial Sequence: Synthetic oligonucleotide
gauguccuuuagcccuguu

SEQ ID NO: 1356786 - RNA, 19 nt, Artificial Sequence
  Description of Artificial Sequence: Synthetic oligonucleotide
gcccauuuucucgaacaua

SEQ ID NO: 1356787 - RNA, 19 nt, Artificial Sequence
  Description of Artificial Sequence: Synthetic oligonucleotide
cacuagacagagccucauu

SEQ ID NO: 1356788 - RNA, 19 nt, Artificial Sequence
  Description of Artificial Sequence: Synthetic oligonucleotide
cugugaucucaggguuaca

SEQ ID NO: 1356789 - RNA, 19 nt, Artificial Sequence
  Description of Artificial Sequence: Synthetic oligonucleotide
gcccagcccucuguuuugc

SEQ ID NO: 1356790 - RNA, 19 nt, Artificial Sequence
  Description of Artificial Sequence: Synthetic oligonucleotide
ccggaaagacuugaucucu

SEQ ID NO: 1356791 - RNA, 19 nt, Artificial Sequence
  Description of Artificial Sequence: Synthetic oligonucleotide
ggccgacuguggugcacuc

SEQ ID NO: 1356792 - RNA, 19 nt, Artificial Sequence
  Description of Artificial Sequence: Synthetic oligonucleotide
gcucgaaagcucucuucuu

SEQ ID NO: 1356793 - RNA, 19 nt, Artificial Sequence
  Description of Artificial Sequence: Synthetic oligonucleotide
cgaaagcucucuucuugcu

SEQ ID NO: 1356794 - RNA, 19 nt, Artificial Sequence
  Description of Artificial Sequence: Synthetic oligonucleotide
gggugucugccaggagaca

SEQ ID NO: 1356795 - RNA, 19 nt, Artificial Sequence
  Description of Artificial Sequence: Synthetic oligonucleotide
cauggcaguccggaaccuu

SEQ ID NO: 1356796 - RNA, 19 nt, Artificial Sequence
  Description of Artificial Sequence: Synthetic oligonucleotide
gccuuucgagacucugcau

SEQ ID NO: 1356797 - RNA, 19 nt, Artificial Sequence
  Description of Artificial Sequence: Synthetic oligonucleotide
ccggaaccuucucucuaua

SEQ ID NO: 1356798 - RNA, 19 nt, Artificial Sequence
  Description of Artificial Sequence: Synthetic oligonucleotide
ccauguguagcugcccauu

SEQ ID NO: 1356799 - RNA, 19 nt, Artificial Sequence
  Description of Artificial Sequence: Synthetic oligonucleotide
gccgcacagcuuccacgcu

SEQ ID NO: 1356800 - RNA, 19 nt, Artificial Sequence
  Description of Artificial Sequence: Synthetic oligonucleotide
cggcaucagauaagcaauu

SEQ ID NO: 1356801 - RNA, 19 nt, Artificial Sequence
  Description of Artificial Sequence: Synthetic oligonucleotide
gcucccacugcaggacgau

SEQ ID NO: 1356802 - RNA, 19 nt, Artificial Sequence
  Description of Artificial Sequence: Synthetic oligonucleotide
aaggguaggaccuaaaggc

SEQ ID NO: 1356803 - RNA, 19 nt, Artificial Sequence
  Description of Artificial Sequence: Synthetic oligonucleotide
aaucacaugauuacaaagc

SEQ ID NO: 1356804 - RNA, 19 nt, Artificial Sequence
  Description of Artificial Sequence: Synthetic oligonucleotide
cacaugauuacaaagcugg

SEQ ID NO: 1356805 - RNA, 19 nt, Artificial Sequence
  Description of Artificial Sequence: Synthetic oligonucleotide
aacaaacaacgacuuagcc

SEQ ID NO: 1356806 - RNA, 19 nt, Artificial Sequence
  Description of Artificial Sequence: Synthetic oligonucleotide
agugagguaacaaacaacg

SEQ ID NO: 1356807 - RNA, 19 nt, Artificial Sequence
  Description of Artificial Sequence: Synthetic oligonucleotide
ugagguaacaaacaacgac

SEQ ID NO: 1356808 - RNA, 19 nt, Artificial Sequence
  Description of Artificial Sequence: Synthetic oligonucleotide
guaacaaacaacgacuuag

SEQ ID NO: 1356809 - RNA, 19 nt, Artificial Sequence
  Description of Artificial Sequence: Synthetic oligonucleotide
augauuacaaagcuggggu

SEQ ID NO: 1356810 - RNA, 19 nt, Artificial Sequence
  Description of Artificial Sequence: Synthetic oligonucleotide
acaaacaacgacuuagcca

SEQ ID NO: 1356811 - RNA, 19 nt, Artificial Sequence
  Description of Artificial Sequence: Synthetic oligonucleotide
aaagcugggguuuccagca

SEQ ID NO: 1356812 - RNA, 19 nt, Artificial Sequence
  Description of Artificial Sequence: Synthetic oligonucleotide
caaacaacgacuuagccaa

SEQ ID NO: 1356813 - RNA, 19 nt, Artificial Sequence
  Description of Artificial Sequence: Synthetic oligonucleotide
ggauccauacacuagcugg

SEQ ID NO: 1356814 - RNA, 19 nt, Artificial Sequence
  Description of Artificial Sequence: Synthetic oligonucleotide
uaacaaacaacgacuuagc

SEQ ID NO: 1356815 - RNA, 19 nt, Artificial Sequence
  Description of Artificial Sequence: Synthetic oligonucleotide
aucacaugauuacaaagcu

SEQ ID NO: 1356816 - RNA, 19 nt, Artificial Sequence
  Description of Artificial Sequence: Synthetic oligonucleotide
caaggguaggaccuaaagg

SEQ ID NO: 1356817 - RNA, 19 nt, Artificial Sequence
  Description of Artificial Sequence: Synthetic oligonucleotide
aagugagguaacaaacaac

SEQ ID NO: 1356818 - RNA, 19 nt, Artificial Sequence
  Description of Artificial Sequence: Synthetic oligonucleotide
caugauuacaaagcugggg

SEQ ID NO: 1356819 - RNA, 19 nt, Artificial Sequence
  Description of Artificial Sequence: Synthetic oligonucleotide
aggccuaaggaaaaggugg

SEQ ID NO: 1356820 - RNA, 19 nt, Artificial Sequence
  Description of Artificial Sequence: Synthetic oligonucleotide
aggaccuaaaggccuaagg

SEQ ID NO: 1356821 - RNA, 19 nt, Artificial Sequence
  Description of Artificial Sequence: Synthetic oligonucleotide
gauccauacacuagcuggg

SEQ ID NO: 1356822 - RNA, 19 nt, Artificial Sequence
  Description of Artificial Sequence: Synthetic oligonucleotide
aaaggccuaaggaaaaggu

SEQ ID NO: 1356823 - RNA, 19 nt, Artificial Sequence
  Description of Artificial Sequence: Synthetic oligonucleotide
cagcaagggacuaccaagg

SEQ ID NO: 1356824 - RNA, 19 nt, Artificial Sequence
  Description of Artificial Sequence: Synthetic oligonucleotide
caaagcugggguuuccagc

SEQ ID NO: 1356825 - RNA, 19 nt, Artificial Sequence
  Description of Artificial Sequence: Synthetic oligonucleotide
ugggaagugagguaacaaa

SEQ ID NO: 1356826 - RNA, 19 nt, Artificial Sequence
  Description of Artificial Sequence: Synthetic oligonucleotide
gaccuaaaggccuaaggaa

SEQ ID NO: 1356827 - RNA, 19 nt, Artificial Sequence
  Description of Artificial Sequence: Synthetic oligonucleotide
gacuaccaaggguaggacc

SEQ ID NO: 1356828 - RNA, 19 nt, Artificial Sequence
  Description of Artificial Sequence: Synthetic oligonucleotide
aaggccuaaggaaaaggug

SEQ ID NO: 1356829 - RNA, 19 nt, Artificial Sequence
  Description of Artificial Sequence: Synthetic oligonucleotide
aggguaggaccuaaaggcc

SEQ ID NO: 1356830 - RNA, 19 nt, Artificial Sequence
  Description of Artificial Sequence: Synthetic oligonucleotide
ugggguuuccagcaaggga

SEQ ID NO: 1356831 - RNA, 19 nt, Artificial Sequence
  Description of Artificial Sequence: Synthetic oligonucleotide
acuaccaaggguaggaccu

SEQ ID NO: 1356832 - RNA, 19 nt, Artificial Sequence
  Description of Artificial Sequence: Synthetic oligonucleotide
uuuccagcaagggacuacc

SEQ ID NO: 1356833 - RNA, 19 nt, Artificial Sequence
  Description of Artificial Sequence: Synthetic oligonucleotide
agcaagggacuaccaaggg

SEQ ID NO: 1356834 - RNA, 19 nt, Artificial Sequence
  Description of Artificial Sequence: Synthetic oligonucleotide
acuagcugggaagugaggu

SEQ ID NO: 1356835 - RNA, 19 nt, Artificial Sequence
  Description of Artificial Sequence: Synthetic oligonucleotide
gagguaacaaacaacgacu

SEQ ID NO: 1356836 - RNA, 19 nt, Artificial Sequence
  Description of Artificial Sequence: Synthetic oligonucleotide
uacacuagcugggaaguga

SEQ ID NO: 1356837 - RNA, 19 nt, Artificial Sequence
  Description of Artificial Sequence: Synthetic oligonucleotide
acaaagcugggguuuccag

SEQ ID NO: 1356838 - RNA, 19 nt, Artificial Sequence
  Description of Artificial Sequence: Synthetic oligonucleotide
caagggacuaccaagggua

SEQ ID NO: 1356839 - RNA, 19 nt, Artificial Sequence
  Description of Artificial Sequence: Synthetic oligonucleotide
uccagcaagggacuaccaa

SEQ ID NO: 1356840 - RNA, 19 nt, Artificial Sequence
  Description of Artificial Sequence: Synthetic oligonucleotide
ggaccuaaaggccuaagga

SEQ ID NO: 1356841 - RNA, 19 nt, Artificial Sequence
  Description of Artificial Sequence: Synthetic oligonucleotide
ugauuacaaagcugggguu

SEQ ID NO: 1356842 - RNA, 19 nt, Artificial Sequence
  Description of Artificial Sequence: Synthetic oligonucleotide
cuaaaggccuaaggaaaag

SEQ ID NO: 1356843 - RNA, 19 nt, Artificial Sequence
  Description of Artificial Sequence: Synthetic oligonucleotide
acaugauuacaaagcuggg

SEQ ID NO: 1356844 - RNA, 19 nt, Artificial Sequence
  Description of Artificial Sequence: Synthetic oligonucleotide
uccauacacuagcugggaa

SEQ ID NO: 1356845 - RNA, 19 nt, Artificial Sequence
  Description of Artificial Sequence: Synthetic oligonucleotide
accuaaaggccuaaggaaa

SEQ ID NO: 1356846 - RNA, 19 nt, Artificial Sequence
  Description of Artificial Sequence: Synthetic oligonucleotide
ccagcaagggacuaccaag

SEQ ID NO: 1356847 - RNA, 19 nt, Artificial Sequence
  Description of Artificial Sequence: Synthetic oligonucleotide
ccauacacuagcugggaag

SEQ ID NO: 1356848 - RNA, 19 nt, Artificial Sequence
  Description of Artificial Sequence: Synthetic oligonucleotide
uagcugggaagugagguaa

SEQ ID NO: 1356849 - RNA, 19 nt, Artificial Sequence
  Description of Artificial Sequence: Synthetic oligonucleotide
aagggacuaccaaggguag

SEQ ID NO: 1356850 - RNA, 19 nt, Artificial Sequence
  Description of Artificial Sequence: Synthetic oligonucleotide
uacaaagcugggguuucca

SEQ ID NO: 1356851 - RNA, 19 nt, Artificial Sequence
  Description of Artificial Sequence: Synthetic oligonucleotide
acacuagcugggaagugag

SEQ ID NO: 1356852 - RNA, 19 nt, Artificial Sequence
  Description of Artificial Sequence: Synthetic oligonucleotide
cacuagcugggaagugagg

SEQ ID NO: 1356853 - RNA, 19 nt, Artificial Sequence
  Description of Artificial Sequence: Synthetic oligonucleotide
uuccagcaagggacuacca

SEQ ID NO: 1356854 - RNA, 19 nt, Artificial Sequence
  Description of Artificial Sequence: Synthetic oligonucleotide
cugggguuuccagcaaggg

SEQ ID NO: 1356855 - RNA, 19 nt, Artificial Sequence
  Description of Artificial Sequence: Synthetic oligonucleotide
agguaacaaacaacgacuu

SEQ ID NO: 1356856 - RNA, 19 nt, Artificial Sequence
  Description of Artificial Sequence: Synthetic oligonucleotide
ccaaggguaggaccuaaag

SEQ ID NO: 1356857 - RNA, 19 nt, Artificial Sequence
  Description of Artificial Sequence: Synthetic oligonucleotide
uaggaccuaaaggccuaag

SEQ ID NO: 1356858 - RNA, 19 nt, Artificial Sequence
  Description of Artificial Sequence: Synthetic oligonucleotide
agggacuaccaaggguagg

SEQ ID NO: 1356859 - RNA, 19 nt, Artificial Sequence
  Description of Artificial Sequence: Synthetic oligonucleotide
gggauccauacacuagcug

SEQ ID NO: 1356860 - RNA, 19 nt, Artificial Sequence
  Description of Artificial Sequence: Synthetic oligonucleotide
auacacuagcugggaagug

SEQ ID NO: 1356861 - RNA, 19 nt, Artificial Sequence
  Description of Artificial Sequence: Synthetic oligonucleotide
auccauacacuagcuggga

SEQ ID NO: 1356862 - RNA, 19 nt, Artificial Sequence
  Description of Artificial Sequence: Synthetic oligonucleotide
gugagguaacaaacaacga

SEQ ID NO: 1356863 - RNA, 19 nt, Artificial Sequence
  Description of Artificial Sequence: Synthetic oligonucleotide
cauacacuagcugggaagu

SEQ ID NO: 1356864 - RNA, 19 nt, Artificial Sequence
  Description of Artificial Sequence: Synthetic oligonucleotide
agcugggaagugagguaac

SEQ ID NO: 1356865 - RNA, 19 nt, Artificial Sequence
  Description of Artificial Sequence: Synthetic oligonucleotide
gggacuaccaaggguagga

SEQ ID NO: 1356866 - RNA, 19 nt, Artificial Sequence
  Description of Artificial Sequence: Synthetic oligonucleotide
cuagcugggaagugaggua

SEQ ID NO: 1356867 - RNA, 19 nt, Artificial Sequence
  Description of Artificial Sequence: Synthetic oligonucleotide
gcugggguuuccagcaagg

SEQ ID NO: 1356868 - RNA, 19 nt, Artificial Sequence
  Description of Artificial Sequence: Synthetic oligonucleotide
uaccaaggguaggaccuaa

SEQ ID NO: 1356869 - RNA, 19 nt, Artificial Sequence
  Description of Artificial Sequence: Synthetic oligonucleotide
ccuaaaggccuaaggaaaa

SEQ ID NO: 1356870 - RNA, 19 nt, Artificial Sequence
  Description of Artificial Sequence: Synthetic oligonucleotide
cugggaagugagguaacaa

SEQ ID NO: 1356871 - RNA, 19 nt, Artificial Sequence
  Description of Artificial Sequence: Synthetic oligonucleotide
gcaagggacuaccaagggu

SEQ ID NO: 1356872 - RNA, 19 nt, Artificial Sequence
  Description of Artificial Sequence: Synthetic oligonucleotide
ggacuaccaaggguaggac

SEQ ID NO: 1356873 - RNA, 19 nt, Artificial Sequence
  Description of Artificial Sequence: Synthetic oligonucleotide
gguaggaccuaaaggccua

SEQ ID NO: 1356874 - RNA, 19 nt, Artificial Sequence
  Description of Artificial Sequence: Synthetic oligonucleotide
accaaggguaggaccuaaa

SEQ ID NO: 1356875 - RNA, 19 nt, Artificial Sequence
  Description of Artificial Sequence: Synthetic oligonucleotide
ggguaggaccuaaaggccu

SEQ ID NO: 1356876 - RNA, 19 nt, Artificial Sequence
  Description of Artificial Sequence: Synthetic oligonucleotide
guaggaccuaaaggccuaa

SEQ ID NO: 1356877 - RNA, 19 nt, Artificial Sequence
  Description of Artificial Sequence: Synthetic oligonucleotide
cuaccaaggguaggaccua

SEQ ID NO: 1356878 - RNA, 19 nt, Artificial Sequence
  Description of Artificial Sequence: Synthetic oligonucleotide
gguuuccagcaagggacua

SEQ ID NO: 1356879 - RNA, 19 nt, Artificial Sequence
  Description of Artificial Sequence: Synthetic oligonucleotide
ggguuuccagcaagggacu

SEQ ID NO: 1356880 - RNA, 19 nt, Artificial Sequence
  Description of Artificial Sequence: Synthetic oligonucleotide
aaaauagcaggguaggggc

SEQ ID NO: 1356881 - RNA, 19 nt, Artificial Sequence
  Description of Artificial Sequence: Synthetic oligonucleotide
auaacaaugaacugguccg

SEQ ID NO: 1356882 - RNA, 19 nt, Artificial Sequence
  Description of Artificial Sequence: Synthetic oligonucleotide
uaaauaagaaaugggaugg

SEQ ID NO: 1356883 - RNA, 19 nt, Artificial Sequence
  Description of Artificial Sequence: Synthetic oligonucleotide
ucagauaacaaugaacugg

SEQ ID NO: 1356884 - RNA, 19 nt, Artificial Sequence
  Description of Artificial Sequence: Synthetic oligonucleotide
uucacuucagauaacaaug

SEQ ID NO: 1356885 - RNA, 19 nt, Artificial Sequence
  Description of Artificial Sequence: Synthetic oligonucleotide
aaagcuacuaaugggaggg

SEQ ID NO: 1356886 - RNA, 19 nt, Artificial Sequence
  Description of Artificial Sequence: Synthetic oligonucleotide
ucuaauucuagacagccca

SEQ ID NO: 1356887 - RNA, 19 nt, Artificial Sequence
  Description of Artificial Sequence: Synthetic oligonucleotide
caaaagacagguacgaugg

SEQ ID NO: 1356888 - RNA, 19 nt, Artificial Sequence
  Description of Artificial Sequence: Synthetic oligonucleotide
auaauagucccaugggagc

SEQ ID NO: 1356889 - RNA, 19 nt, Artificial Sequence
  Description of Artificial Sequence: Synthetic oligonucleotide
aggaaugcgagccacacgg

SEQ ID NO: 1356890 - RNA, 19 nt, Artificial Sequence
  Description of Artificial Sequence: Synthetic oligonucleotide
guugcucucacuuagccgg

SEQ ID NO: 1356891 - RNA, 19 nt, Artificial Sequence
  Description of Artificial Sequence: Synthetic oligonucleotide
ugccauaauagucccaugg

SEQ ID NO: 1356892 - RNA, 19 nt, Artificial Sequence
  Description of Artificial Sequence: Synthetic oligonucleotide
uuagccggaccacauaucg

SEQ ID NO: 1356893 - RNA, 19 nt, Artificial Sequence
  Description of Artificial Sequence: Synthetic oligonucleotide
aagaucaccuccugaacgg

SEQ ID NO: 1356894 - RNA, 19 nt, Artificial Sequence
  Description of Artificial Sequence: Synthetic oligonucleotide
gaagaucaccuccugaacg

SEQ ID NO: 1356895 - RNA, 19 nt, Artificial Sequence
  Description of Artificial Sequence: Synthetic oligonucleotide
ugcauuaagccccuucugg

SEQ ID NO: 1356896 - RNA, 19 nt, Artificial Sequence
  Description of Artificial Sequence: Synthetic oligonucleotide
agagugucuaauucuagac

SEQ ID NO: 1356897 - RNA, 19 nt, Artificial Sequence
  Description of Artificial Sequence: Synthetic oligonucleotide
cauaauagucccaugggag

SEQ ID NO: 1356898 - RNA, 19 nt, Artificial Sequence
  Description of Artificial Sequence: Synthetic oligonucleotide
aauaaccgggcccugagcu

SEQ ID NO: 1356899 - RNA, 19 nt, Artificial Sequence
  Description of Artificial Sequence: Synthetic oligonucleotide
uguaccagagccuuguaca

SEQ ID NO: 1356900 - RNA, 19 nt, Artificial Sequence
  Description of Artificial Sequence: Synthetic oligonucleotide
gauguguuccgcuugagca

SEQ ID NO: 1356901 - RNA, 19 nt, Artificial Sequence
  Description of Artificial Sequence: Synthetic oligonucleotide
aaauaaccgggcccugagc

SEQ ID NO: 1356902 - RNA, 19 nt, Artificial Sequence
  Description of Artificial Sequence: Synthetic oligonucleotide
cuuaguauggcuuccacca

SEQ ID NO: 1356903 - RNA, 19 nt, Artificial Sequence
  Description of Artificial Sequence: Synthetic oligonucleotide
aacccaaguacuccgccac

SEQ ID NO: 1356904 - RNA, 19 nt, Artificial Sequence
  Description of Artificial Sequence: Synthetic oligonucleotide
uaaagcuacuaaugggagg

SEQ ID NO: 1356905 - RNA, 19 nt, Artificial Sequence
  Description of Artificial Sequence: Synthetic oligonucleotide
aaaagacagguacgauggc

SEQ ID NO: 1356906 - RNA, 19 nt, Artificial Sequence
  Description of Artificial Sequence: Synthetic oligonucleotide
acaagaaugcccagaagcc

SEQ ID NO: 1356907 - RNA, 19 nt, Artificial Sequence
  Description of Artificial Sequence: Synthetic oligonucleotide
ugucuaauucuagacagcc

SEQ ID NO: 1356908 - RNA, 19 nt, Artificial Sequence
  Description of Artificial Sequence: Synthetic oligonucleotide
agcucaggcagacacuacc

SEQ ID NO: 1356909 - RNA, 19 nt, Artificial Sequence
  Description of Artificial Sequence: Synthetic oligonucleotide
gguacgauggcaaucaccg

SEQ ID NO: 1356910 - RNA, 19 nt, Artificial Sequence
  Description of Artificial Sequence: Synthetic oligonucleotide
agucgggaagaucaccucc

SEQ ID NO: 1356911 - RNA, 19 nt, Artificial Sequence
  Description of Artificial Sequence: Synthetic oligonucleotide
cuucagauaacaaugaacu

SEQ ID NO: 1356912 - RNA, 19 nt, Artificial Sequence
  Description of Artificial Sequence: Synthetic oligonucleotide
acuaagacaggcuggguug

SEQ ID NO: 1356913 - RNA, 19 nt, Artificial Sequence
  Description of Artificial Sequence: Synthetic oligonucleotide
auuaagccccuucuggagg

SEQ ID NO: 1356914 - RNA, 19 nt, Artificial Sequence
  Description of Artificial Sequence: Synthetic oligonucleotide
uucuagacagcccaucaga

SEQ ID NO: 1356915 - RNA, 19 nt, Artificial Sequence
  Description of Artificial Sequence: Synthetic oligonucleotide
augcgagccacacggaacc

SEQ ID NO: 1356916 - RNA, 19 nt, Artificial Sequence
  Description of Artificial Sequence: Synthetic oligonucleotide
uaaauaaccgggcccugag

SEQ ID NO: 1356917 - RNA, 19 nt, Artificial Sequence
  Description of Artificial Sequence: Synthetic oligonucleotide
aaauaagaaaugggauggg

SEQ ID NO: 1356918 - RNA, 19 nt, Artificial Sequence
  Description of Artificial Sequence: Synthetic oligonucleotide
agauguguuccgcuugagc

SEQ ID NO: 1356919 - RNA, 19 nt, Artificial Sequence
  Description of Artificial Sequence: Synthetic oligonucleotide
uuauuccucaagugugugg

SEQ ID NO: 1356920 - RNA, 19 nt, Artificial Sequence
  Description of Artificial Sequence: Synthetic oligonucleotide
aguggcuaguucccaaggc

SEQ ID NO: 1356921 - RNA, 19 nt, Artificial Sequence
  Description of Artificial Sequence: Synthetic oligonucleotide
cacauaaauaaccgggccc

SEQ ID NO: 1356922 - RNA, 19 nt, Artificial Sequence
  Description of Artificial Sequence: Synthetic oligonucleotide
cacauaucgguucuccucg

SEQ ID NO: 1356923 - RNA, 19 nt, Artificial Sequence
  Description of Artificial Sequence: Synthetic oligonucleotide
gaaaggaagcgccucauga

SEQ ID NO: 1356924 - RNA, 19 nt, Artificial Sequence
  Description of Artificial Sequence: Synthetic oligonucleotide
cagguugcacacaagaaug

SEQ ID NO: 1356925 - RNA, 19 nt, Artificial Sequence
  Description of Artificial Sequence: Synthetic oligonucleotide
aaucaccgcauacugggca

SEQ ID NO: 1356926 - RNA, 19 nt, Artificial Sequence
  Description of Artificial Sequence: Synthetic oligonucleotide
uucaacccacuuaguaugg

SEQ ID NO: 1356927 - RNA, 19 nt, Artificial Sequence
  Description of Artificial Sequence: Synthetic oligonucleotide
uggcacguaagccuuagga

SEQ ID NO: 1356928 - RNA, 19 nt, Artificial Sequence
  Description of Artificial Sequence: Synthetic oligonucleotide
gagauguaggaacagggca

SEQ ID NO: 1356929 - RNA, 19 nt, Artificial Sequence
  Description of Artificial Sequence: Synthetic oligonucleotide
aaugcgagccacacggaac

SEQ ID NO: 1356930 - RNA, 19 nt, Artificial Sequence
  Description of Artificial Sequence: Synthetic oligonucleotide
ugucuuggcacguaagccu

SEQ ID NO: 1356931 - RNA, 19 nt, Artificial Sequence
  Description of Artificial Sequence: Synthetic oligonucleotide
aaagacagguacgauggca

SEQ ID NO: 1356932 - RNA, 19 nt, Artificial Sequence
  Description of Artificial Sequence: Synthetic oligonucleotide
uacaacgggaacagcagga

SEQ ID NO: 1356933 - RNA, 19 nt, Artificial Sequence
  Description of Artificial Sequence: Synthetic oligonucleotide
guaggaacagggcagcagc

SEQ ID NO: 1356934 - RNA, 19 nt, Artificial Sequence
  Description of Artificial Sequence: Synthetic oligonucleotide
uuugcuaccccuuccuuuc

SEQ ID NO: 1356935 - RNA, 19 nt, Artificial Sequence
  Description of Artificial Sequence: Synthetic oligonucleotide
aauagcaggguaggggcag

SEQ ID NO: 1356936 - RNA, 19 nt, Artificial Sequence
  Description of Artificial Sequence: Synthetic oligonucleotide
cacguaagccuuaggagcc

SEQ ID NO: 1356937 - RNA, 19 nt, Artificial Sequence
  Description of Artificial Sequence: Synthetic oligonucleotide
uccgugauagucuucacuu

SEQ ID NO: 1356938 - RNA, 19 nt, Artificial Sequence
  Description of Artificial Sequence: Synthetic oligonucleotide
auagucuucacuucagaua

SEQ ID NO: 1356939 - RNA, 19 nt, Artificial Sequence
  Description of Artificial Sequence: Synthetic oligonucleotide
ucuauagccugccauccuc

SEQ ID NO: 1356940 - RNA, 19 nt, Artificial Sequence
  Description of Artificial Sequence: Synthetic oligonucleotide
uaauagucccaugggagcc

SEQ ID NO: 1356941 - RNA, 19 nt, Artificial Sequence
  Description of Artificial Sequence: Synthetic oligonucleotide
uacuuccacaccacgccgg

SEQ ID NO: 1356942 - RNA, 19 nt, Artificial Sequence
  Description of Artificial Sequence: Synthetic oligonucleotide
gaagccuuuagacccuccc

SEQ ID NO: 1356943 - RNA, 19 nt, Artificial Sequence
  Description of Artificial Sequence: Synthetic oligonucleotide
uggcaaucaccgcauacug

SEQ ID NO: 1356944 - RNA, 19 nt, Artificial Sequence
  Description of Artificial Sequence: Synthetic oligonucleotide
auaaagcuacuaaugggag

SEQ ID NO: 1356945 - RNA, 19 nt, Artificial Sequence
  Description of Artificial Sequence: Synthetic oligonucleotide
ggaggcauugccauaauag

SEQ ID NO: 1356946 - RNA, 19 nt, Artificial Sequence
  Description of Artificial Sequence: Synthetic oligonucleotide
uguguuccgcuugagcagg

SEQ ID NO: 1356947 - RNA, 19 nt, Artificial Sequence
  Description of Artificial Sequence: Synthetic oligonucleotide
aaagguccugguaauugag

SEQ ID NO: 1356948 - RNA, 19 nt, Artificial Sequence
  Description of Artificial Sequence: Synthetic oligonucleotide
gagugucuaauucuagaca

SEQ ID NO: 1356949 - RNA, 19 nt, Artificial Sequence
  Description of Artificial Sequence: Synthetic oligonucleotide
acaggccagauaaagcuac

SEQ ID NO: 1356950 - RNA, 19 nt, Artificial Sequence
  Description of Artificial Sequence: Synthetic oligonucleotide
gaaagguccugguaauuga

SEQ ID NO: 1356951 - RNA, 19 nt, Artificial Sequence
  Description of Artificial Sequence: Synthetic oligonucleotide
cagacacuaccacaggagc

SEQ ID NO: 1356952 - RNA, 19 nt, Artificial Sequence
  Description of Artificial Sequence: Synthetic oligonucleotide
uguacaguauggagguggu

SEQ ID NO: 1356953 - RNA, 19 nt, Artificial Sequence
  Description of Artificial Sequence: Synthetic oligonucleotide
auguguuccgcuugagcag

SEQ ID NO: 1356954 - RNA, 19 nt, Artificial Sequence
  Description of Artificial Sequence: Synthetic oligonucleotide
cugcaggaagccuuuagac

SEQ ID NO: 1356955 - RNA, 19 nt, Artificial Sequence
  Description of Artificial Sequence: Synthetic oligonucleotide
caggcacaugcauuaagcc

SEQ ID NO: 1356956 - RNA, 19 nt, Artificial Sequence
  Description of Artificial Sequence: Synthetic oligonucleotide
ugguaauugagcucuccuc

SEQ ID NO: 1356957 - RNA, 19 nt, Artificial Sequence
  Description of Artificial Sequence: Synthetic oligonucleotide
gacaagauggugaucucac

SEQ ID NO: 1356958 - RNA, 19 nt, Artificial Sequence
  Description of Artificial Sequence: Synthetic oligonucleotide
uguaggaacagggcagcag

SEQ ID NO: 1356959 - RNA, 19 nt, Artificial Sequence
  Description of Artificial Sequence: Synthetic oligonucleotide
uggcuaguucccaaggcac

SEQ ID NO: 1356960 - RNA, 19 nt, Artificial Sequence
  Description of Artificial Sequence: Synthetic oligonucleotide
cuacaacgggaacagcagg

SEQ ID NO: 1356961 - RNA, 19 nt, Artificial Sequence
  Description of Artificial Sequence: Synthetic oligonucleotide
auugccauaauagucccau

SEQ ID NO: 1356962 - RNA, 19 nt, Artificial Sequence
  Description of Artificial Sequence: Synthetic oligonucleotide
acuuagccggaccacauau

SEQ ID NO: 1356963 - RNA, 19 nt, Artificial Sequence
  Description of Artificial Sequence: Synthetic oligonucleotide
gaguggcuaguucccaagg

SEQ ID NO: 1356964 - RNA, 19 nt, Artificial Sequence
  Description of Artificial Sequence: Synthetic oligonucleotide
gcacguaagccuuaggagc

SEQ ID NO: 1356965 - RNA, 19 nt, Artificial Sequence
  Description of Artificial Sequence: Synthetic oligonucleotide
ggcacaugcauuaagcccc

SEQ ID NO: 1356966 - RNA, 19 nt, Artificial Sequence
  Description of Artificial Sequence: Synthetic oligonucleotide
ccuuguacaagucagguca

SEQ ID NO: 1356967 - RNA, 19 nt, Artificial Sequence
  Description of Artificial Sequence: Synthetic oligonucleotide
aaugggagggcagcaacgu

SEQ ID NO: 1356968 - RNA, 19 nt, Artificial Sequence
  Description of Artificial Sequence: Synthetic oligonucleotide
acagguacgauggcaauca

SEQ ID NO: 1356969 - RNA, 19 nt, Artificial Sequence
  Description of Artificial Sequence: Synthetic oligonucleotide
aaguacuccgccaccagca

SEQ ID NO: 1356970 - RNA, 19 nt, Artificial Sequence
  Description of Artificial Sequence: Synthetic oligonucleotide
agcuagagcagagacuaag

SEQ ID NO: 1356971 - RNA, 19 nt, Artificial Sequence
  Description of Artificial Sequence: Synthetic oligonucleotide
agugccauucccagacugc

SEQ ID NO: 1356972 - RNA, 19 nt, Artificial Sequence
  Description of Artificial Sequence: Synthetic oligonucleotide
agccggaccacauaucggu

SEQ ID NO: 1356973 - RNA, 19 nt, Artificial Sequence
  Description of Artificial Sequence: Synthetic oligonucleotide
agguugcacacaagaaugc

SEQ ID NO: 1356974 - RNA, 19 nt, Artificial Sequence
  Description of Artificial Sequence: Synthetic oligonucleotide
agguacgauggcaaucacc

SEQ ID NO: 1356975 - RNA, 19 nt, Artificial Sequence
  Description of Artificial Sequence: Synthetic oligonucleotide
auaucgguucuccucggcu

SEQ ID NO: 1356976 - RNA, 19 nt, Artificial Sequence
  Description of Artificial Sequence: Synthetic oligonucleotide
gccauaauagucccauggg

SEQ ID NO: 1356977 - RNA, 19 nt, Artificial Sequence
  Description of Artificial Sequence: Synthetic oligonucleotide
ggccguugcaucuuggucc

SEQ ID NO: 1356978 - RNA, 19 nt, Artificial Sequence
  Description of Artificial Sequence: Synthetic oligonucleotide
uggugaucucacccugacg

SEQ ID NO: 1356979 - RNA, 19 nt, Artificial Sequence
  Description of Artificial Sequence: Synthetic oligonucleotide
agggcagcaacgucaagcu

SEQ ID NO: 1356980 - RNA, 19 nt, Artificial Sequence
  Description of Artificial Sequence: Synthetic oligonucleotide
ggcacguaagccuuaggag

SEQ ID NO: 1356981 - RNA, 19 nt, Artificial Sequence
  Description of Artificial Sequence: Synthetic oligonucleotide
aagcuacuaaugggagggc

SEQ ID NO: 1356982 - RNA, 19 nt, Artificial Sequence
  Description of Artificial Sequence: Synthetic oligonucleotide
uaacaaugaacugguccgc

SEQ ID NO: 1356983 - RNA, 19 nt, Artificial Sequence
  Description of Artificial Sequence: Synthetic oligonucleotide
cuacuuccacaccacgccg

SEQ ID NO: 1356984 - RNA, 19 nt, Artificial Sequence
  Description of Artificial Sequence: Synthetic oligonucleotide
aacaaugaacugguccgcu

SEQ ID NO: 1356985 - RNA, 19 nt, Artificial Sequence
  Description of Artificial Sequence: Synthetic oligonucleotide
uaagccuuaggagcccuag

SEQ ID NO: 1356986 - RNA, 19 nt, Artificial Sequence
  Description of Artificial Sequence: Synthetic oligonucleotide
aucaccgcauacugggcag

SEQ ID NO: 1356987 - RNA, 19 nt, Artificial Sequence
  Description of Artificial Sequence: Synthetic oligonucleotide
cuagacagcccaucagaug

SEQ ID NO: 1356988 - RNA, 19 nt, Artificial Sequence
  Description of Artificial Sequence: Synthetic oligonucleotide
uagccggaccacauaucgg

SEQ ID NO: 1356989 - RNA, 19 nt, Artificial Sequence
  Description of Artificial Sequence: Synthetic oligonucleotide
cccuagauggguuuggggc

SEQ ID NO: 1356990 - RNA, 19 nt, Artificial Sequence
  Description of Artificial Sequence: Synthetic oligonucleotide
cacucuauagccugccauc

SEQ ID NO: 1356991 - RNA, 19 nt, Artificial Sequence
  Description of Artificial Sequence: Synthetic oligonucleotide
gacguccugucuuggcacg

SEQ ID NO: 1356992 - RNA, 19 nt, Artificial Sequence
  Description of Artificial Sequence: Synthetic oligonucleotide
aagaguggcuaguucccaa

SEQ ID NO: 1356993 - RNA, 19 nt, Artificial Sequence
  Description of Artificial Sequence: Synthetic oligonucleotide
agaacccgcaaggaacugg

SEQ ID NO: 1356994 - RNA, 19 nt, Artificial Sequence
  Description of Artificial Sequence: Synthetic oligonucleotide
uaucgguucuccucggcuc

SEQ ID NO: 1356995 - RNA, 19 nt, Artificial Sequence
  Description of Artificial Sequence: Synthetic oligonucleotide
aggccguugcaucuugguc

SEQ ID NO: 1356996 - RNA, 19 nt, Artificial Sequence
  Description of Artificial Sequence: Synthetic oligonucleotide
ggugaucucacccugacgu

SEQ ID NO: 1356997 - RNA, 19 nt, Artificial Sequence
  Description of Artificial Sequence: Synthetic oligonucleotide
aacugguccgcugcucagg

SEQ ID NO: 1356998 - RNA, 19 nt, Artificial Sequence
  Description of Artificial Sequence: Synthetic oligonucleotide
auggcaaucaccgcauacu

SEQ ID NO: 1356999 - RNA, 19 nt, Artificial Sequence
  Description of Artificial Sequence: Synthetic oligonucleotide
cugcuggaggcuucaaccc

SEQ ID NO: 1357000 - RNA, 19 nt, Artificial Sequence
  Description of Artificial Sequence: Synthetic oligonucleotide
augcauuaagccccuucug

SEQ ID NO: 1357001 - RNA, 19 nt, Artificial Sequence
  Description of Artificial Sequence: Synthetic oligonucleotide
agccuuaggagcccuagau

SEQ ID NO: 1357002 - RNA, 19 nt, Artificial Sequence
  Description of Artificial Sequence: Synthetic oligonucleotide
cagauaacaaugaacuggu

SEQ ID NO: 1357003 - RNA, 19 nt, Artificial Sequence
  Description of Artificial Sequence: Synthetic oligonucleotide
cuacuaaugggagggcagc

SEQ ID NO: 1357004 - RNA, 19 nt, Artificial Sequence
  Description of Artificial Sequence: Synthetic oligonucleotide
gaugcuacuuccacaccac

SEQ ID NO: 1357005 - RNA, 19 nt, Artificial Sequence
  Description of Artificial Sequence: Synthetic oligonucleotide
ugacguccugucuuggcac

SEQ ID NO: 1357006 - RNA, 19 nt, Artificial Sequence
  Description of Artificial Sequence: Synthetic oligonucleotide
ugcgcggccccacauaaau

SEQ ID NO: 1357007 - RNA, 19 nt, Artificial Sequence
  Description of Artificial Sequence: Synthetic oligonucleotide
gaccacauaucgguucucc

SEQ ID NO: 1357008 - RNA, 19 nt, Artificial Sequence
  Description of Artificial Sequence: Synthetic oligonucleotide
cccgcaaggaacuggaaag

SEQ ID NO: 1357009 - RNA, 19 nt, Artificial Sequence
  Description of Artificial Sequence: Synthetic oligonucleotide
auaaauaaccgggcccuga

SEQ ID NO: 1357010 - RNA, 19 nt, Artificial Sequence
  Description of Artificial Sequence: Synthetic oligonucleotide
aaauagcaggguaggggca

SEQ ID NO: 1357011 - RNA, 19 nt, Artificial Sequence
  Description of Artificial Sequence: Synthetic oligonucleotide
guggcuaguucccaaggca

SEQ ID NO: 1357012 - RNA, 19 nt, Artificial Sequence
  Description of Artificial Sequence: Synthetic oligonucleotide
agacaagauggugaucuca

SEQ ID NO: 1357013 - RNA, 19 nt, Artificial Sequence
  Description of Artificial Sequence: Synthetic oligonucleotide
acaacgggaacagcaggag

SEQ ID NO: 1357014 - RNA, 19 nt, Artificial Sequence
  Description of Artificial Sequence: Synthetic oligonucleotide
aggcaaaagacagguacga

SEQ ID NO: 1357015 - RNA, 19 nt, Artificial Sequence
  Description of Artificial Sequence: Synthetic oligonucleotide
uccucaaguguguggggcu

SEQ ID NO: 1357016 - RNA, 19 nt, Artificial Sequence
  Description of Artificial Sequence: Synthetic oligonucleotide
gaaaagcuggaacccaagu

SEQ ID NO: 1357017 - RNA, 19 nt, Artificial Sequence
  Description of Artificial Sequence: Synthetic oligonucleotide
uuggcacguaagccuuagg

SEQ ID NO: 1357018 - RNA, 19 nt, Artificial Sequence
  Description of Artificial Sequence: Synthetic oligonucleotide
ggagccuugaaggccaagg

SEQ ID NO: 1357019 - RNA, 19 nt, Artificial Sequence
  Description of Artificial Sequence: Synthetic oligonucleotide
ggaaagguccugguaauug

SEQ ID NO: 1357020 - RNA, 19 nt, Artificial Sequence
  Description of Artificial Sequence: Synthetic oligonucleotide
ucacuuagccggaccacau

SEQ ID NO: 1357021 - RNA, 19 nt, Artificial Sequence
  Description of Artificial Sequence: Synthetic oligonucleotide
agcgccucaugauaccacu

SEQ ID NO: 1357022 - RNA, 19 nt, Artificial Sequence
  Description of Artificial Sequence: Synthetic oligonucleotide
gugauagucuucacuucag

SEQ ID NO: 1357023 - RNA, 19 nt, Artificial Sequence
  Description of Artificial Sequence: Synthetic oligonucleotide
ccucaugauaccacuuucc

SEQ ID NO: 1357024 - RNA, 19 nt, Artificial Sequence
  Description of Artificial Sequence: Synthetic oligonucleotide
gaaugcgagccacacggaa

SEQ ID NO: 1357025 - RNA, 19 nt, Artificial Sequence
  Description of Artificial Sequence: Synthetic oligonucleotide
ugcccgagugccauuccca

SEQ ID NO: 1357026 - RNA, 19 nt, Artificial Sequence
  Description of Artificial Sequence: Synthetic oligonucleotide
caaucaccgcauacugggc

SEQ ID NO: 1357027 - RNA, 19 nt, Artificial Sequence
  Description of Artificial Sequence: Synthetic oligonucleotide
gaacugguccgcugcucag

SEQ ID NO: 1357028 - RNA, 19 nt, Artificial Sequence
  Description of Artificial Sequence: Synthetic oligonucleotide
cauaucgguucuccucggc

SEQ ID NO: 1357029 - RNA, 19 nt, Artificial Sequence
  Description of Artificial Sequence: Synthetic oligonucleotide
gucuaauucuagacagccc

SEQ ID NO: 1357030 - RNA, 19 nt, Artificial Sequence
  Description of Artificial Sequence: Synthetic oligonucleotide
ccacauaaauaaccgggcc

SEQ ID NO: 1357031 - RNA, 19 nt, Artificial Sequence
  Description of Artificial Sequence: Synthetic oligonucleotide
ucgggaagaucaccuccug

SEQ ID NO: 1357032 - RNA, 19 nt, Artificial Sequence
  Description of Artificial Sequence: Synthetic oligonucleotide
ccuuuagacccucccaggg

SEQ ID NO: 1357033 - RNA, 19 nt, Artificial Sequence
  Description of Artificial Sequence: Synthetic oligonucleotide
ucaacccacuuaguauggc

SEQ ID NO: 1357034 - RNA, 19 nt, Artificial Sequence
  Description of Artificial Sequence: Synthetic oligonucleotide
ggccccacauaaauaaccg

SEQ ID NO: 1357035 - RNA, 19 nt, Artificial Sequence
  Description of Artificial Sequence: Synthetic oligonucleotide
aacccacuuaguauggcuu

SEQ ID NO: 1357036 - RNA, 19 nt, Artificial Sequence
  Description of Artificial Sequence: Synthetic oligonucleotide
cuagauggguuuggggcag

SEQ ID NO: 1357037 - RNA, 19 nt, Artificial Sequence
  Description of Artificial Sequence: Synthetic oligonucleotide
ggagauguaggaacagggc

SEQ ID NO: 1357038 - RNA, 19 nt, Artificial Sequence
  Description of Artificial Sequence: Synthetic oligonucleotide
cagagggccugccagaaga

SEQ ID NO: 1357039 - RNA, 19 nt, Artificial Sequence
  Description of Artificial Sequence: Synthetic oligonucleotide
aggcacucuauagccugcc

SEQ ID NO: 1357040 - RNA, 19 nt, Artificial Sequence
  Description of Artificial Sequence: Synthetic oligonucleotide
acccgcaaggaacuggaaa

SEQ ID NO: 1357041 - RNA, 19 nt, Artificial Sequence
  Description of Artificial Sequence: Synthetic oligonucleotide
agauaacaaugaacugguc

SEQ ID NO: 1357042 - RNA, 19 nt, Artificial Sequence
  Description of Artificial Sequence: Synthetic oligonucleotide
agacacuaccacaggagca

SEQ ID NO: 1357043 - RNA, 19 nt, Artificial Sequence
  Description of Artificial Sequence: Synthetic oligonucleotide
gacagguacgauggcaauc

SEQ ID NO: 1357044 - RNA, 19 nt, Artificial Sequence
  Description of Artificial Sequence: Synthetic oligonucleotide
cuuagccggaccacauauc

SEQ ID NO: 1357045 - RNA, 19 nt, Artificial Sequence
  Description of Artificial Sequence: Synthetic oligonucleotide
cacuuaguauggcuuccac

SEQ ID NO: 1357046 - RNA, 19 nt, Artificial Sequence
  Description of Artificial Sequence: Synthetic oligonucleotide
caugcauuaagccccuucu

SEQ ID NO: 1357047 - RNA, 19 nt, Artificial Sequence
  Description of Artificial Sequence: Synthetic oligonucleotide
ccugagcuagagcagagac

SEQ ID NO: 1357048 - RNA, 19 nt, Artificial Sequence
  Description of Artificial Sequence: Synthetic oligonucleotide
gcuacaacgggaacagcag

SEQ ID NO: 1357049 - RNA, 19 nt, Artificial Sequence
  Description of Artificial Sequence: Synthetic oligonucleotide
gugucuaauucuagacagc

SEQ ID NO: 1357050 - RNA, 19 nt, Artificial Sequence
  Description of Artificial Sequence: Synthetic oligonucleotide
agcuacuaaugggagggca

SEQ ID NO: 1357051 - RNA, 19 nt, Artificial Sequence
  Description of Artificial Sequence: Synthetic oligonucleotide
cuaguucccaaggcacagg

SEQ ID NO: 1357052 - RNA, 19 nt, Artificial Sequence
  Description of Artificial Sequence: Synthetic oligonucleotide
gauggguuuggggcaggag

SEQ ID NO: 1357053 - RNA, 19 nt, Artificial Sequence
  Description of Artificial Sequence: Synthetic oligonucleotide
uauagccugccauccucuc

SEQ ID NO: 1357054 - RNA, 19 nt, Artificial Sequence
  Description of Artificial Sequence: Synthetic oligonucleotide
gacagcccaucagaugacc

SEQ ID NO: 1357055 - RNA, 19 nt, Artificial Sequence
  Description of Artificial Sequence: Synthetic oligonucleotide
ccagguugcucucacuuag

SEQ ID NO: 1357056 - RNA, 19 nt, Artificial Sequence
  Description of Artificial Sequence: Synthetic oligonucleotide
cucucacuuagccggacca

SEQ ID NO: 1357057 - RNA, 19 nt, Artificial Sequence
  Description of Artificial Sequence: Synthetic oligonucleotide
gcuacuaaugggagggcag

SEQ ID NO: 1357058 - RNA, 19 nt, Artificial Sequence
  Description of Artificial Sequence: Synthetic oligonucleotide
gguugcacacaagaaugcc

SEQ ID NO: 1357059 - RNA, 19 nt, Artificial Sequence
  Description of Artificial Sequence: Synthetic oligonucleotide
aacggcccggccuccguga

SEQ ID NO: 1357060 - RNA, 19 nt, Artificial Sequence
  Description of Artificial Sequence: Synthetic oligonucleotide
uggcaagaguggcuaguuc

SEQ ID NO: 1357061 - RNA, 19 nt, Artificial Sequence
  Description of Artificial Sequence: Synthetic oligonucleotide
cuuggcacguaagccuuag

SEQ ID NO: 1357062 - RNA, 19 nt, Artificial Sequence
  Description of Artificial Sequence: Synthetic oligonucleotide
ggaacccaaguacuccgcc

SEQ ID NO: 1357063 - RNA, 19 nt, Artificial Sequence
  Description of Artificial Sequence: Synthetic oligonucleotide
gaagcgccucaugauacca

SEQ ID NO: 1357064 - RNA, 19 nt, Artificial Sequence
  Description of Artificial Sequence: Synthetic oligonucleotide
cuucuggcuacaacgggaa

SEQ ID NO: 1357065 - RNA, 19 nt, Artificial Sequence
  Description of Artificial Sequence: Synthetic oligonucleotide
ggcuacaacgggaacagca

SEQ ID NO: 1357066 - RNA, 19 nt, Artificial Sequence
  Description of Artificial Sequence: Synthetic oligonucleotide
ucucacuuagccggaccac

SEQ ID NO: 1357067 - RNA, 19 nt, Artificial Sequence
  Description of Artificial Sequence: Synthetic oligonucleotide
ggcaaucaccgcauacugg

SEQ ID NO: 1357068 - RNA, 19 nt, Artificial Sequence
  Description of Artificial Sequence: Synthetic oligonucleotide
cccaacaggacucagccca

SEQ ID NO: 1357069 - RNA, 19 nt, Artificial Sequence
  Description of Artificial Sequence: Synthetic oligonucleotide
guacgauggcaaucaccgc

SEQ ID NO: 1357070 - RNA, 19 nt, Artificial Sequence
  Description of Artificial Sequence: Synthetic oligonucleotide
gagcccuagauggguuugg

SEQ ID NO: 1357071 - RNA, 19 nt, Artificial Sequence
  Description of Artificial Sequence: Synthetic oligonucleotide
guaccagagccuuguacaa

SEQ ID NO: 1357072 - RNA, 19 nt, Artificial Sequence
  Description of Artificial Sequence: Synthetic oligonucleotide
gagucgggaagaucaccuc

SEQ ID NO: 1357073 - RNA, 19 nt, Artificial Sequence
  Description of Artificial Sequence: Synthetic oligonucleotide
gccccacauaaauaaccgg

SEQ ID NO: 1357074 - RNA, 19 nt, Artificial Sequence
  Description of Artificial Sequence: Synthetic oligonucleotide
cauaaauaaccgggcccug

SEQ ID NO: 1357075 - RNA, 19 nt, Artificial Sequence
  Description of Artificial Sequence: Synthetic oligonucleotide
uugcucucacuuagccgga

SEQ ID NO: 1357076 - RNA, 19 nt, Artificial Sequence
  Description of Artificial Sequence: Synthetic oligonucleotide
accuccugaacggcccggc

SEQ ID NO: 1357077 - RNA, 19 nt, Artificial Sequence
  Description of Artificial Sequence: Synthetic oligonucleotide
agacagguacgauggcaau

SEQ ID NO: 1357078 - RNA, 19 nt, Artificial Sequence
  Description of Artificial Sequence: Synthetic oligonucleotide
agcccuagauggguuuggg

SEQ ID NO: 1357079 - RNA, 19 nt, Artificial Sequence
  Description of Artificial Sequence: Synthetic oligonucleotide
uugcuaccccuuccuuuca

SEQ ID NO: 1357080 - RNA, 19 nt, Artificial Sequence
  Description of Artificial Sequence: Synthetic oligonucleotide
cucacccugacguccuguc

SEQ ID NO: 1357081 - RNA, 19 nt, Artificial Sequence
  Description of Artificial Sequence: Synthetic oligonucleotide
ccauaauagucccauggga

SEQ ID NO: 1357082 - RNA, 19 nt, Artificial Sequence
  Description of Artificial Sequence: Synthetic oligonucleotide
cugcccgagugccauuccc

SEQ ID NO: 1357083 - RNA, 19 nt, Artificial Sequence
  Description of Artificial Sequence: Synthetic oligonucleotide
agacugccggggcucacca

SEQ ID NO: 1357084 - RNA, 19 nt, Artificial Sequence
  Description of Artificial Sequence: Synthetic oligonucleotide
gcaagaguggcuaguuccc

SEQ ID NO: 1357085 - RNA, 19 nt, Artificial Sequence
  Description of Artificial Sequence: Synthetic oligonucleotide
accagguugcucucacuua

SEQ ID NO: 1357086 - RNA, 19 nt, Artificial Sequence
  Description of Artificial Sequence: Synthetic oligonucleotide
gacacuaccacaggagcau

SEQ ID NO: 1357087 - RNA, 19 nt, Artificial Sequence
  Description of Artificial Sequence: Synthetic oligonucleotide
ggagcauggaaaccacaga

SEQ ID NO: 1357088 - RNA, 19 nt, Artificial Sequence
  Description of Artificial Sequence: Synthetic oligonucleotide
gccuuaggagcccuagaug

SEQ ID NO: 1357089 - RNA, 19 nt, Artificial Sequence
  Description of Artificial Sequence: Synthetic oligonucleotide
ugaccagguugcucucacu

SEQ ID NO: 1357090 - RNA, 19 nt, Artificial Sequence
  Description of Artificial Sequence: Synthetic oligonucleotide
uaggagcccuagauggguu

SEQ ID NO: 1357091 - RNA, 19 nt, Artificial Sequence
  Description of Artificial Sequence: Synthetic oligonucleotide
gugaucucacccugacguc

SEQ ID NO: 1357092 - RNA, 19 nt, Artificial Sequence
  Description of Artificial Sequence: Synthetic oligonucleotide
uagauggguuuggggcagg

SEQ ID NO: 1357093 - RNA, 19 nt, Artificial Sequence
  Description of Artificial Sequence: Synthetic oligonucleotide
ggaggcacguccagggucc

SEQ ID NO: 1357094 - RNA, 19 nt, Artificial Sequence
  Description of Artificial Sequence: Synthetic oligonucleotide
cucacuuagccggaccaca

SEQ ID NO: 1357095 - RNA, 19 nt, Artificial Sequence
  Description of Artificial Sequence: Synthetic oligonucleotide
ucuuggcacguaagccuua

SEQ ID NO: 1357096 - RNA, 19 nt, Artificial Sequence
  Description of Artificial Sequence: Synthetic oligonucleotide
ugaacggcccggccuccgu

SEQ ID NO: 1357097 - RNA, 19 nt, Artificial Sequence
  Description of Artificial Sequence: Synthetic oligonucleotide
gaacggcccggccuccgug

SEQ ID NO: 1357098 - RNA, 19 nt, Artificial Sequence
  Description of Artificial Sequence: Synthetic oligonucleotide
ucaccgcauacugggcagc

SEQ ID NO: 1357099 - RNA, 19 nt, Artificial Sequence
  Description of Artificial Sequence: Synthetic oligonucleotide
cacuggcaccugaugcuac

SEQ ID NO: 1357100 - RNA, 19 nt, Artificial Sequence
  Description of Artificial Sequence: Synthetic oligonucleotide
cauugccauaauaguccca

SEQ ID NO: 1357101 - RNA, 19 nt, Artificial Sequence
  Description of Artificial Sequence: Synthetic oligonucleotide
ggcucaccaaugccacugg

SEQ ID NO: 1357102 - RNA, 19 nt, Artificial Sequence
  Description of Artificial Sequence: Synthetic oligonucleotide
gccagauaaagcuacuaau

SEQ ID NO: 1357103 - RNA, 19 nt, Artificial Sequence
  Description of Artificial Sequence: Synthetic oligonucleotide
ccuagauggguuuggggca

SEQ ID NO: 1357104 - RNA, 19 nt, Artificial Sequence
  Description of Artificial Sequence: Synthetic oligonucleotide
gggcucaccaaugccacug

SEQ ID NO: 1357105 - RNA, 19 nt, Artificial Sequence
  Description of Artificial Sequence: Synthetic oligonucleotide
uggaaagguccugguaauu

SEQ ID NO: 1357106 - RNA, 19 nt, Artificial Sequence
  Description of Artificial Sequence: Synthetic oligonucleotide
aggagcccuagauggguuu

SEQ ID NO: 1357107 - RNA, 19 nt, Artificial Sequence
  Description of Artificial Sequence: Synthetic oligonucleotide
caacccacuuaguauggcu

SEQ ID NO: 1357108 - RNA, 19 nt, Artificial Sequence
  Description of Artificial Sequence: Synthetic oligonucleotide
acgauggcaaucaccgcau

SEQ ID NO: 1357109 - RNA, 19 nt, Artificial Sequence
  Description of Artificial Sequence: Synthetic oligonucleotide
gccccaugaggcaaaagac

SEQ ID NO: 1357110 - RNA, 19 nt, Artificial Sequence
  Description of Artificial Sequence: Synthetic oligonucleotide
cacaggccguugcaucuug

SEQ ID NO: 1357111 - RNA, 19 nt, Artificial Sequence
  Description of Artificial Sequence: Synthetic oligonucleotide
cugagcuagagcagagacu

SEQ ID NO: 1357112 - RNA, 19 nt, Artificial Sequence
  Description of Artificial Sequence: Synthetic oligonucleotide
cggccccacauaaauaacc

SEQ ID NO: 1357113 - RNA, 19 nt, Artificial Sequence
  Description of Artificial Sequence: Synthetic oligonucleotide
cuauagccugccauccucu

SEQ ID NO: 1357114 - RNA, 19 nt, Artificial Sequence
  Description of Artificial Sequence: Synthetic oligonucleotide
uccugguaauugagcucuc

SEQ ID NO: 1357115 - RNA, 19 nt, Artificial Sequence
  Description of Artificial Sequence: Synthetic oligonucleotide
acgggaacagcaggagcca

SEQ ID NO: 1357116 - RNA, 19 nt, Artificial Sequence
  Description of Artificial Sequence: Synthetic oligonucleotide
uuguacaagucaggucauu

SEQ ID NO: 1357117 - RNA, 19 nt, Artificial Sequence
  Description of Artificial Sequence: Synthetic oligonucleotide
cuaauucuagacagcccau

SEQ ID NO: 1357118 - RNA, 19 nt, Artificial Sequence
  Description of Artificial Sequence: Synthetic oligonucleotide
cagacugccggggcucacc

SEQ ID NO: 1357119 - RNA, 19 nt, Artificial Sequence
  Description of Artificial Sequence: Synthetic oligonucleotide
gggaggcacguccaggguc

SEQ ID NO: 1357120 - RNA, 19 nt, Artificial Sequence
  Description of Artificial Sequence: Synthetic oligonucleotide
cagauguguuccgcuugag

SEQ ID NO: 1357121 - RNA, 19 nt, Artificial Sequence
  Description of Artificial Sequence: Synthetic oligonucleotide
aggccagauaaagcuacua

SEQ ID NO: 1357122 - RNA, 19 nt, Artificial Sequence
  Description of Artificial Sequence: Synthetic oligonucleotide
gcccgagugccauucccag

SEQ ID NO: 1357123 - RNA, 19 nt, Artificial Sequence
  Description of Artificial Sequence: Synthetic oligonucleotide
ccgcaaggaacuggaaagg

SEQ ID NO: 1357124 - RNA, 19 nt, Artificial Sequence
  Description of Artificial Sequence: Synthetic oligonucleotide
cuccgugauagucuucacu

SEQ ID NO: 1357125 - RNA, 19 nt, Artificial Sequence
  Description of Artificial Sequence: Synthetic oligonucleotide
ggcgaugugggcagaugug

SEQ ID NO: 1357126 - RNA, 19 nt, Artificial Sequence
  Description of Artificial Sequence: Synthetic oligonucleotide
ugcucucacuuagccggac

SEQ ID NO: 1357127 - RNA, 19 nt, Artificial Sequence
  Description of Artificial Sequence: Synthetic oligonucleotide
ggcagagugucuaauucua

SEQ ID NO: 1357128 - RNA, 19 nt, Artificial Sequence
  Description of Artificial Sequence: Synthetic oligonucleotide
cacguccaggguccaggac

SEQ ID NO: 1357129 - RNA, 19 nt, Artificial Sequence
  Description of Artificial Sequence: Synthetic oligonucleotide
cacggaaccugcccacaga

SEQ ID NO: 1357130 - RNA, 19 nt, Artificial Sequence
  Description of Artificial Sequence: Synthetic oligonucleotide
gaucucacccugacguccu

SEQ ID NO: 1357131 - RNA, 19 nt, Artificial Sequence
  Description of Artificial Sequence: Synthetic oligonucleotide
guggcgaugugggcagaug

SEQ ID NO: 1357132 - RNA, 19 nt, Artificial Sequence
  Description of Artificial Sequence: Synthetic oligonucleotide
gggcagagugucuaauucu

SEQ ID NO: 1357133 - RNA, 19 nt, Artificial Sequence
  Description of Artificial Sequence: Synthetic oligonucleotide
cuggaaagguccugguaau

SEQ ID NO: 1357134 - RNA, 19 nt, Artificial Sequence
  Description of Artificial Sequence: Synthetic oligonucleotide
caccacgccgggcccgccg

SEQ ID NO: 1357135 - RNA, 19 nt, Artificial Sequence
  Description of Artificial Sequence: Synthetic oligonucleotide
gggagucgggaagaucacc

SEQ ID NO: 1357136 - RNA, 19 nt, Artificial Sequence
  Description of Artificial Sequence: Synthetic oligonucleotide
ggagucgggaagaucaccu

SEQ ID NO: 1357137 - RNA, 19 nt, Artificial Sequence
  Description of Artificial Sequence: Synthetic oligonucleotide
gccuccgugauagucuuca

SEQ ID NO: 1357138 - RNA, 19 nt, Artificial Sequence
  Description of Artificial Sequence: Synthetic oligonucleotide
ucgguucuccucggcucug

SEQ ID NO: 1357139 - RNA, 19 nt, Artificial Sequence
  Description of Artificial Sequence: Synthetic oligonucleotide
cucagggccgccugcccga

SEQ ID NO: 1357140 - RNA, 19 nt, Artificial Sequence
  Description of Artificial Sequence: Synthetic oligonucleotide
agcgaggccaggcccugua

SEQ ID NO: 1357141 - RNA, 19 nt, Artificial Sequence
  Description of Artificial Sequence: Synthetic oligonucleotide
gucgggaagaucaccuccu

SEQ ID NO: 1357142 - RNA, 19 nt, Artificial Sequence
  Description of Artificial Sequence: Synthetic oligonucleotide
ccgugauagucuucacuuc

SEQ ID NO: 1357143 - RNA, 19 nt, Artificial Sequence
  Description of Artificial Sequence: Synthetic oligonucleotide
gcacacaagaaugcccaga

SEQ ID NO: 1357144 - RNA, 19 nt, Artificial Sequence
  Description of Artificial Sequence: Synthetic oligonucleotide
auagucccaugggagccuu

SEQ ID NO: 1357145 - RNA, 19 nt, Artificial Sequence
  Description of Artificial Sequence: Synthetic oligonucleotide
ccacacggaaccugcccac

SEQ ID NO: 1357146 - RNA, 19 nt, Artificial Sequence
  Description of Artificial Sequence: Synthetic oligonucleotide
cauggcaagaguggcuagu

SEQ ID NO: 1357147 - RNA, 19 nt, Artificial Sequence
  Description of Artificial Sequence: Synthetic oligonucleotide
ggcacucuauagccugcca

SEQ ID NO: 1357148 - RNA, 19 nt, Artificial Sequence
  Description of Artificial Sequence: Synthetic oligonucleotide
acguccugucuuggcacgu

SEQ ID NO: 1357149 - RNA, 19 nt, Artificial Sequence
  Description of Artificial Sequence: Synthetic oligonucleotide
cuccugaacggcccggccu

SEQ ID NO: 1357150 - RNA, 19 nt, Artificial Sequence
  Description of Artificial Sequence: Synthetic oligonucleotide
gcacucuauagccugccau

SEQ ID NO: 1357151 - RNA, 19 nt, Artificial Sequence
  Description of Artificial Sequence: Synthetic oligonucleotide
cacuuagccggaccacaua

SEQ ID NO: 1357152 - RNA, 19 nt, Artificial Sequence
  Description of Artificial Sequence: Synthetic oligonucleotide
accgggcccugagcuagag

SEQ ID NO: 1357153 - RNA, 19 nt, Artificial Sequence
  Description of Artificial Sequence: Synthetic oligonucleotide
guggggagucgggaagauc

SEQ ID NO: 1357154 - RNA, 19 nt, Artificial Sequence
  Description of Artificial Sequence: Synthetic oligonucleotide
ggcccugagcuagagcaga

SEQ ID NO: 1357155 - RNA, 19 nt, Artificial Sequence
  Description of Artificial Sequence: Synthetic oligonucleotide
caggccguugcaucuuggu

SEQ ID NO: 1357156 - RNA, 19 nt, Artificial Sequence
  Description of Artificial Sequence: Synthetic oligonucleotide
cacacggaaccugcccaca

SEQ ID NO: 1357157 - RNA, 19 nt, Artificial Sequence
  Description of Artificial Sequence: Synthetic oligonucleotide
cgcggccccacauaaauaa

SEQ ID NO: 1357158 - RNA, 19 nt, Artificial Sequence
  Description of Artificial Sequence: Synthetic oligonucleotide
cacccugacguccugucuu

SEQ ID NO: 1357159 - RNA, 19 nt, Artificial Sequence
  Description of Artificial Sequence: Synthetic oligonucleotide
ccuccugaacggcccggcc

SEQ ID NO: 1357160 - RNA, 19 nt, Artificial Sequence
  Description of Artificial Sequence: Synthetic oligonucleotide
ggcuggguuggcagucacc

SEQ ID NO: 1357161 - RNA, 19 nt, Artificial Sequence
  Description of Artificial Sequence: Synthetic oligonucleotide
ggaaugcgagccacacgga

SEQ ID NO: 1357162 - RNA, 19 nt, Artificial Sequence
  Description of Artificial Sequence: Synthetic oligonucleotide
cagucaccccuucuaccua

SEQ ID NO: 1357163 - RNA, 19 nt, Artificial Sequence
  Description of Artificial Sequence: Synthetic oligonucleotide
aaccgggcccugagcuaga

SEQ ID NO: 1357164 - RNA, 19 nt, Artificial Sequence
  Description of Artificial Sequence: Synthetic oligonucleotide
gcgaugugggcagaugugu

SEQ ID NO: 1357165 - RNA, 19 nt, Artificial Sequence
  Description of Artificial Sequence: Synthetic oligonucleotide
ggcccaggaagcagcaaaa

SEQ ID NO: 1357166 - RNA, 19 nt, Artificial Sequence
  Description of Artificial Sequence: Synthetic oligonucleotide
ggggagucgggaagaucac

SEQ ID NO: 1357167 - RNA, 19 nt, Artificial Sequence
  Description of Artificial Sequence: Synthetic oligonucleotide
ccuccgugauagucuucac

SEQ ID NO: 1357168 - RNA, 19 nt, Artificial Sequence
  Description of Artificial Sequence: Synthetic oligonucleotide
acggcccggccuccgugau

SEQ ID NO: 1357169 - RNA, 19 nt, Artificial Sequence
  Description of Artificial Sequence: Synthetic oligonucleotide
ccugcgcggccccacauaa

SEQ ID NO: 1357170 - RNA, 19 nt, Artificial Sequence
  Description of Artificial Sequence: Synthetic oligonucleotide
gcggccccacauaaauaac

SEQ ID NO: 1357171 - RNA, 19 nt, Artificial Sequence
  Description of Artificial Sequence: Synthetic oligonucleotide
ggcaaaagacagguacgau

SEQ ID NO: 1357172 - RNA, 19 nt, Artificial Sequence
  Description of Artificial Sequence: Synthetic oligonucleotide
cagcaacgucaagcucccc

SEQ ID NO: 1357173 - RNA, 19 nt, Artificial Sequence
  Description of Artificial Sequence: Synthetic oligonucleotide
ccacuuaguauggcuucca

SEQ ID NO: 1357174 - RNA, 19 nt, Artificial Sequence
  Description of Artificial Sequence: Synthetic oligonucleotide
ggaccacauaucgguucuc

SEQ ID NO: 1357175 - RNA, 19 nt, Artificial Sequence
  Description of Artificial Sequence: Synthetic oligonucleotide
gccugcccgagugccauuc

SEQ ID NO: 1357176 - RNA, 19 nt, Artificial Sequence
  Description of Artificial Sequence: Synthetic oligonucleotide
agccccuucuggaggcauu

SEQ ID NO: 1357177 - RNA, 19 nt, Artificial Sequence
  Description of Artificial Sequence: Synthetic oligonucleotide
cugcgcggccccacauaaa

SEQ ID NO: 1357178 - RNA, 19 nt, Artificial Sequence
  Description of Artificial Sequence: Synthetic oligonucleotide
gaaugcccagaagccccau

SEQ ID NO: 1357179 - RNA, 19 nt, Artificial Sequence
  Description of Artificial Sequence: Synthetic oligonucleotide
ccgggcccugagcuagagc

SEQ ID NO: 1357180 - RNA, 19 nt, Artificial Sequence
  Description of Artificial Sequence: Synthetic oligonucleotide
caccgcauacugggcagcu

SEQ ID NO: 1357181 - RNA, 19 nt, Artificial Sequence
  Description of Artificial Sequence: Synthetic oligonucleotide
cggaaccugcccacagaca

SEQ ID NO: 1357182 - RNA, 19 nt, Artificial Sequence
  Description of Artificial Sequence: Synthetic oligonucleotide
cuggcaccugaugcuacuu

SEQ ID NO: 1357183 - RNA, 19 nt, Artificial Sequence
  Description of Artificial Sequence: Synthetic oligonucleotide
gccugcgcggccccacaua

SEQ ID NO: 1357184 - RNA, 19 nt, Artificial Sequence
  Description of Artificial Sequence: Synthetic oligonucleotide
gguggcgaugugggcagau

SEQ ID NO: 1357185 - RNA, 19 nt, Artificial Sequence
  Description of Artificial Sequence: Synthetic oligonucleotide
gagcgaggccaggcccugu

SEQ ID NO: 1357186 - RNA, 19 nt, Artificial Sequence
  Description of Artificial Sequence: Synthetic oligonucleotide
cgaugugggcagauguguu

SEQ ID NO: 1357187 - RNA, 19 nt, Artificial Sequence
  Description of Artificial Sequence: Synthetic oligonucleotide
gcgcggccccacauaaaua

SEQ ID NO: 1357188 - RNA, 19 nt, Artificial Sequence
  Description of Artificial Sequence: Synthetic oligonucleotide
gccgccugcccgagugcca

SEQ ID NO: 1357189 - RNA, 19 nt, Artificial Sequence
  Description of Artificial Sequence: Synthetic oligonucleotide
cguaagccuuaggagcccu

SEQ ID NO: 1357190 - RNA, 19 nt, Artificial Sequence
  Description of Artificial Sequence: Synthetic oligonucleotide
gccggaccacauaucgguu

SEQ ID NO: 1357191 - RNA, 19 nt, Artificial Sequence
  Description of Artificial Sequence: Synthetic oligonucleotide
gcgccucaugauaccacuu

SEQ ID NO: 1357192 - RNA, 19 nt, Artificial Sequence
  Description of Artificial Sequence: Synthetic oligonucleotide
cacaugcauuaagccccuu

SEQ ID NO: 1357193 - RNA, 19 nt, Artificial Sequence
  Description of Artificial Sequence: Synthetic oligonucleotide
cguccugucuuggcacgua

SEQ ID NO: 1357194 - RNA, 19 nt, Artificial Sequence
  Description of Artificial Sequence: Synthetic oligonucleotide
cgccugcgcggccccacau

SEQ ID NO: 1357195 - RNA, 19 nt, Artificial Sequence
  Description of Artificial Sequence: Synthetic oligonucleotide
ccgcgccugcgcggcccca

SEQ ID NO: 1357196 - RNA, 19 nt, Artificial Sequence
  Description of Artificial Sequence: Synthetic oligonucleotide
aagauaaucuacaaggucc

SEQ ID NO: 1357197 - RNA, 19 nt, Artificial Sequence
  Description of Artificial Sequence: Synthetic oligonucleotide
uuaggauucaaccuguugg

SEQ ID NO: 1357198 - RNA, 19 nt, Artificial Sequence
  Description of Artificial Sequence: Synthetic oligonucleotide
auagaaagaagccuggagc

SEQ ID NO: 1357199 - RNA, 19 nt, Artificial Sequence
  Description of Artificial Sequence: Synthetic oligonucleotide
aaagauaaucuacaagguc

SEQ ID NO: 1357200 - RNA, 19 nt, Artificial Sequence
  Description of Artificial Sequence: Synthetic oligonucleotide
guaaacaacagucuuagag

SEQ ID NO: 1357201 - RNA, 19 nt, Artificial Sequence
  Description of Artificial Sequence: Synthetic oligonucleotide
aauaucaccugcccgaaag

SEQ ID NO: 1357202 - RNA, 19 nt, Artificial Sequence
  Description of Artificial Sequence: Synthetic oligonucleotide
uuuaagaacguuuuguccu

SEQ ID NO: 1357203 - RNA, 19 nt, Artificial Sequence
  Description of Artificial Sequence: Synthetic oligonucleotide
aucaugguuggcuaggugc

SEQ ID NO: 1357204 - RNA, 19 nt, Artificial Sequence
  Description of Artificial Sequence: Synthetic oligonucleotide
ucugaaauagcgugggugg

SEQ ID NO: 1357205 - RNA, 19 nt, Artificial Sequence
  Description of Artificial Sequence: Synthetic oligonucleotide
aacggcaacauccuggcuc

SEQ ID NO: 1357206 - RNA, 19 nt, Artificial Sequence
  Description of Artificial Sequence: Synthetic oligonucleotide
aaagccuucugaaauagcg

SEQ ID NO: 1357207 - RNA, 19 nt, Artificial Sequence
  Description of Artificial Sequence: Synthetic oligonucleotide
uugauugacacaauacugc

SEQ ID NO: 1357208 - RNA, 19 nt, Artificial Sequence
  Description of Artificial Sequence: Synthetic oligonucleotide
uguaauaucaccugcccga

SEQ ID NO: 1357209 - RNA, 19 nt, Artificial Sequence
  Description of Artificial Sequence: Synthetic oligonucleotide
augucacacaaauagacuc

SEQ ID NO: 1357210 - RNA, 19 nt, Artificial Sequence
  Description of Artificial Sequence: Synthetic oligonucleotide
aggagaaacggcaacaucc

SEQ ID NO: 1357211 - RNA, 19 nt, Artificial Sequence
  Description of Artificial Sequence: Synthetic oligonucleotide
cuuaauggaggcaugguag

SEQ ID NO: 1357212 - RNA, 19 nt, Artificial Sequence
  Description of Artificial Sequence: Synthetic oligonucleotide
ugucuguaaacaaagcccc

SEQ ID NO: 1357213 - RNA, 19 nt, Artificial Sequence
  Description of Artificial Sequence: Synthetic oligonucleotide
ugguaggauagaaagaagc

SEQ ID NO: 1357214 - RNA, 19 nt, Artificial Sequence
  Description of Artificial Sequence: Synthetic oligonucleotide
ugucacacaaauagacucg

SEQ ID NO: 1357215 - RNA, 19 nt, Artificial Sequence
  Description of Artificial Sequence: Synthetic oligonucleotide
uugauaaccagguccacag

SEQ ID NO: 1357216 - RNA, 19 nt, Artificial Sequence
  Description of Artificial Sequence: Synthetic oligonucleotide
cuuagggauguucugaggg

SEQ ID NO: 1357217 - RNA, 19 nt, Artificial Sequence
  Description of Artificial Sequence: Synthetic oligonucleotide
uuaggcuagacacuuguug

SEQ ID NO: 1357218 - RNA, 19 nt, Artificial Sequence
  Description of Artificial Sequence: Synthetic oligonucleotide
caggcaaguuuuaagaacg

SEQ ID NO: 1357219 - RNA, 19 nt, Artificial Sequence
  Description of Artificial Sequence: Synthetic oligonucleotide
uagaaagaagccuggagcc

SEQ ID NO: 1357220 - RNA, 19 nt, Artificial Sequence
  Description of Artificial Sequence: Synthetic oligonucleotide
gauagaaagaagccuggag

SEQ ID NO: 1357221 - RNA, 19 nt, Artificial Sequence
  Description of Artificial Sequence: Synthetic oligonucleotide
aguugauugacacaauacu

SEQ ID NO: 1357222 - RNA, 19 nt, Artificial Sequence
  Description of Artificial Sequence: Synthetic oligonucleotide
aauagacucggccugcgug

SEQ ID NO: 1357223 - RNA, 19 nt, Artificial Sequence
  Description of Artificial Sequence: Synthetic oligonucleotide
gauucaaccuguugggucc

SEQ ID NO: 1357224 - RNA, 19 nt, Artificial Sequence
  Description of Artificial Sequence: Synthetic oligonucleotide
uuaauggaggcaugguagg

SEQ ID NO: 1357225 - RNA, 19 nt, Artificial Sequence
  Description of Artificial Sequence: Synthetic oligonucleotide
aacugauacccugacgccc

SEQ ID NO: 1357226 - RNA, 19 nt, Artificial Sequence
  Description of Artificial Sequence: Synthetic oligonucleotide
uaggauucaaccuguuggg

SEQ ID NO: 1357227 - RNA, 19 nt, Artificial Sequence
  Description of Artificial Sequence: Synthetic oligonucleotide
ucuguaauaucaccugccc

SEQ ID NO: 1357228 - RNA, 19 nt, Artificial Sequence
  Description of Artificial Sequence: Synthetic oligonucleotide
uguaccacggcugaucccg

SEQ ID NO: 1357229 - RNA, 19 nt, Artificial Sequence
  Description of Artificial Sequence: Synthetic oligonucleotide
aagagccuaauucugucug

SEQ ID NO: 1357230 - RNA, 19 nt, Artificial Sequence
  Description of Artificial Sequence: Synthetic oligonucleotide
ugauugacacaauacugcc

SEQ ID NO: 1357231 - RNA, 19 nt, Artificial Sequence
  Description of Artificial Sequence: Synthetic oligonucleotide
acuagaagagguuggcuuc

SEQ ID NO: 1357232 - RNA, 19 nt, Artificial Sequence
  Description of Artificial Sequence: Synthetic oligonucleotide
auagacucggccugcgugc

SEQ ID NO: 1357233 - RNA, 19 nt, Artificial Sequence
  Description of Artificial Sequence: Synthetic oligonucleotide
aaggugccagcccaugccc

SEQ ID NO: 1357234 - RNA, 19 nt, Artificial Sequence
  Description of Artificial Sequence: Synthetic oligonucleotide
aauagcguggguggagacc

SEQ ID NO: 1357235 - RNA, 19 nt, Artificial Sequence
  Description of Artificial Sequence: Synthetic oligonucleotide
cacacaaauagacucggcc

SEQ ID NO: 1357236 - RNA, 19 nt, Artificial Sequence
  Description of Artificial Sequence: Synthetic oligonucleotide
auagcguggguggagaccc

SEQ ID NO: 1357237 - RNA, 19 nt, Artificial Sequence
  Description of Artificial Sequence: Synthetic oligonucleotide
ucaacuucaugcacaggag

SEQ ID NO: 1357238 - RNA, 19 nt, Artificial Sequence
  Description of Artificial Sequence: Synthetic oligonucleotide
aaguuuuaagaacguuuug

SEQ ID NO: 1357239 - RNA, 19 nt, Artificial Sequence
  Description of Artificial Sequence: Synthetic oligonucleotide
acuacuagaagagguuggc

SEQ ID NO: 1357240 - RNA, 19 nt, Artificial Sequence
  Description of Artificial Sequence: Synthetic oligonucleotide
uccguugucggguuuggcg

SEQ ID NO: 1357241 - RNA, 19 nt, Artificial Sequence
  Description of Artificial Sequence: Synthetic oligonucleotide
guugauugacacaauacug

SEQ ID NO: 1357242 - RNA, 19 nt, Artificial Sequence
  Description of Artificial Sequence: Synthetic oligonucleotide
ugguacaagacacuucacu

SEQ ID NO: 1357243 - RNA, 19 nt, Artificial Sequence
  Description of Artificial Sequence: Synthetic oligonucleotide
ucuuaggcuagacacuugu

SEQ ID NO: 1357244 - RNA, 19 nt, Artificial Sequence
  Description of Artificial Sequence: Synthetic oligonucleotide
gacacaauacugcccagcc

SEQ ID NO: 1357245 - RNA, 19 nt, Artificial Sequence
  Description of Artificial Sequence: Synthetic oligonucleotide
aaauagcguggguggagac

SEQ ID NO: 1357246 - RNA, 19 nt, Artificial Sequence
  Description of Artificial Sequence: Synthetic oligonucleotide
accagaagagccuaauucu

SEQ ID NO: 1357247 - RNA, 19 nt, Artificial Sequence
  Description of Artificial Sequence: Synthetic oligonucleotide
gaaacggcaacauccuggc

SEQ ID NO: 1357248 - RNA, 19 nt, Artificial Sequence
  Description of Artificial Sequence: Synthetic oligonucleotide
aagggugaaugguaguuga

SEQ ID NO: 1357249 - RNA, 19 nt, Artificial Sequence
  Description of Artificial Sequence: Synthetic oligonucleotide
uggguggagaccccaauag

SEQ ID NO: 1357250 - RNA, 19 nt, Artificial Sequence
  Description of Artificial Sequence: Synthetic oligonucleotide
aacguuuuguccucucaca

SEQ ID NO: 1357251 - RNA, 19 nt, Artificial Sequence
  Description of Artificial Sequence: Synthetic oligonucleotide
gacacuucacuccauugug

SEQ ID NO: 1357252 - RNA, 19 nt, Artificial Sequence
  Description of Artificial Sequence: Synthetic oligonucleotide
aaaggugacuucugguaca

SEQ ID NO: 1357253 - RNA, 19 nt, Artificial Sequence
  Description of Artificial Sequence: Synthetic oligonucleotide
agucaucucaagucuccgc

SEQ ID NO: 1357254 - RNA, 19 nt, Artificial Sequence
  Description of Artificial Sequence: Synthetic oligonucleotide
aauaggcccuggcccaccc

SEQ ID NO: 1357255 - RNA, 19 nt, Artificial Sequence
  Description of Artificial Sequence: Synthetic oligonucleotide
ugaugaaggucuccaaacu

SEQ ID NO: 1357256 - RNA, 19 nt, Artificial Sequence
  Description of Artificial Sequence: Synthetic oligonucleotide
ucaugguuggcuaggugcc

SEQ ID NO: 1357257 - RNA, 19 nt, Artificial Sequence
  Description of Artificial Sequence: Synthetic oligonucleotide
ugauagacacccaagccua

SEQ ID NO: 1357258 - RNA, 19 nt, Artificial Sequence
  Description of Artificial Sequence: Synthetic oligonucleotide
auagcagggcuacuguagg

SEQ ID NO: 1357259 - RNA, 19 nt, Artificial Sequence
  Description of Artificial Sequence: Synthetic oligonucleotide
guagggagaucucuuaggc

SEQ ID NO: 1357260 - RNA, 19 nt, Artificial Sequence
  Description of Artificial Sequence: Synthetic oligonucleotide
uauccuccacaguugauug

SEQ ID NO: 1357261 - RNA, 19 nt, Artificial Sequence
  Description of Artificial Sequence: Synthetic oligonucleotide
ggugaaugguaguugaugc

SEQ ID NO: 1357262 - RNA, 19 nt, Artificial Sequence
  Description of Artificial Sequence: Synthetic oligonucleotide
uucacuccauuguggaagg

SEQ ID NO: 1357263 - RNA, 19 nt, Artificial Sequence
  Description of Artificial Sequence: Synthetic oligonucleotide
uagacacccaagccuaucc

SEQ ID NO: 1357264 - RNA, 19 nt, Artificial Sequence
  Description of Artificial Sequence: Synthetic oligonucleotide
ucaccugcccgaaagguga

SEQ ID NO: 1357265 - RNA, 19 nt, Artificial Sequence
  Description of Artificial Sequence: Synthetic oligonucleotide
uagugcaggggaauacagg

SEQ ID NO: 1357266 - RNA, 19 nt, Artificial Sequence
  Description of Artificial Sequence: Synthetic oligonucleotide
uccaaaagauaaucuacaa

SEQ ID NO: 1357267 - RNA, 19 nt, Artificial Sequence
  Description of Artificial Sequence: Synthetic oligonucleotide
cuucacuccauuguggaag

SEQ ID NO: 1357268 - RNA, 19 nt, Artificial Sequence
  Description of Artificial Sequence: Synthetic oligonucleotide
caguugauugacacaauac

SEQ ID NO: 1357269 - RNA, 19 nt, Artificial Sequence
  Description of Artificial Sequence: Synthetic oligonucleotide
uucauuggugauagacucc

SEQ ID NO: 1357270 - RNA, 19 nt, Artificial Sequence
  Description of Artificial Sequence: Synthetic oligonucleotide
acaaggugccagcccaugc

SEQ ID NO: 1357271 - RNA, 19 nt, Artificial Sequence
  Description of Artificial Sequence: Synthetic oligonucleotide
cuguaauaucaccugcccg

SEQ ID NO: 1357272 - RNA, 19 nt, Artificial Sequence
  Description of Artificial Sequence: Synthetic oligonucleotide
accccaauaggcccuggcc

SEQ ID NO: 1357273 - RNA, 19 nt, Artificial Sequence
  Description of Artificial Sequence: Synthetic oligonucleotide
uccacguaacucuuugagc

SEQ ID NO: 1357274 - RNA, 19 nt, Artificial Sequence
  Description of Artificial Sequence: Synthetic oligonucleotide
gaaauggucugacugaccu

SEQ ID NO: 1357275 - RNA, 19 nt, Artificial Sequence
  Description of Artificial Sequence: Synthetic oligonucleotide
acaaauagacucggccugc

SEQ ID NO: 1357276 - RNA, 19 nt, Artificial Sequence
  Description of Artificial Sequence: Synthetic oligonucleotide
ugcaggggaauacaggguc

SEQ ID NO: 1357277 - RNA, 19 nt, Artificial Sequence
  Description of Artificial Sequence: Synthetic oligonucleotide
cacuacuagaagagguugg

SEQ ID NO: 1357278 - RNA, 19 nt, Artificial Sequence
  Description of Artificial Sequence: Synthetic oligonucleotide
cuuaaggcguccguugucg

SEQ ID NO: 1357279 - RNA, 19 nt, Artificial Sequence
  Description of Artificial Sequence: Synthetic oligonucleotide
acguuuuguccucucacag

SEQ ID NO: 1357280 - RNA, 19 nt, Artificial Sequence
  Description of Artificial Sequence: Synthetic oligonucleotide
aaagccccaccuuaaugga

SEQ ID NO: 1357281 - RNA, 19 nt, Artificial Sequence
  Description of Artificial Sequence: Synthetic oligonucleotide
caccagaagagccuaauuc

SEQ ID NO: 1357282 - RNA, 19 nt, Artificial Sequence
  Description of Artificial Sequence: Synthetic oligonucleotide
cuuguaccacggcugaucc

SEQ ID NO: 1357283 - RNA, 19 nt, Artificial Sequence
  Description of Artificial Sequence: Synthetic oligonucleotide
ugauaaccagguccacagg

SEQ ID NO: 1357284 - RNA, 19 nt, Artificial Sequence
  Description of Artificial Sequence: Synthetic oligonucleotide
gaagagguuggcuucuuga

SEQ ID NO: 1357285 - RNA, 19 nt, Artificial Sequence
  Description of Artificial Sequence: Synthetic oligonucleotide
uuagaguaagggugagcag

SEQ ID NO: 1357286 - RNA, 19 nt, Artificial Sequence
  Description of Artificial Sequence: Synthetic oligonucleotide
guccacguaacucuuugag

SEQ ID NO: 1357287 - RNA, 19 nt, Artificial Sequence
  Description of Artificial Sequence: Synthetic oligonucleotide
gaacguuuuguccucucac

SEQ ID NO: 1357288 - RNA, 19 nt, Artificial Sequence
  Description of Artificial Sequence: Synthetic oligonucleotide
ccuaugucuguaaacaaag

SEQ ID NO: 1357289 - RNA, 19 nt, Artificial Sequence
  Description of Artificial Sequence: Synthetic oligonucleotide
guacccaacaccagaagag

SEQ ID NO: 1357290 - RNA, 19 nt, Artificial Sequence
  Description of Artificial Sequence: Synthetic oligonucleotide
aggaaggcguucucagggc

SEQ ID NO: 1357291 - RNA, 19 nt, Artificial Sequence
  Description of Artificial Sequence: Synthetic oligonucleotide
acugauacccugacgcccc

SEQ ID NO: 1357292 - RNA, 19 nt, Artificial Sequence
  Description of Artificial Sequence: Synthetic oligonucleotide
gguacaagacacuucacuc

SEQ ID NO: 1357293 - RNA, 19 nt, Artificial Sequence
  Description of Artificial Sequence: Synthetic oligonucleotide
augacaaacuugcagccaa

SEQ ID NO: 1357294 - RNA, 19 nt, Artificial Sequence
  Description of Artificial Sequence: Synthetic oligonucleotide
ugaaauagcguggguggag

SEQ ID NO: 1357295 - RNA, 19 nt, Artificial Sequence
  Description of Artificial Sequence: Synthetic oligonucleotide
uuuggcggcaggaguagug

SEQ ID NO: 1357296 - RNA, 19 nt, Artificial Sequence
  Description of Artificial Sequence: Synthetic oligonucleotide
ccauuuggcaucaaugccc

SEQ ID NO: 1357297 - RNA, 19 nt, Artificial Sequence
  Description of Artificial Sequence: Synthetic oligonucleotide
gacuugcacaucaugguug

SEQ ID NO: 1357298 - RNA, 19 nt, Artificial Sequence
  Description of Artificial Sequence: Synthetic oligonucleotide
acacccaagccuauccucc

SEQ ID NO: 1357299 - RNA, 19 nt, Artificial Sequence
  Description of Artificial Sequence: Synthetic oligonucleotide
cuuaggauucaaccuguug

SEQ ID NO: 1357300 - RNA, 19 nt, Artificial Sequence
  Description of Artificial Sequence: Synthetic oligonucleotide
ucuccgcucuaacaugugc

SEQ ID NO: 1357301 - RNA, 19 nt, Artificial Sequence
  Description of Artificial Sequence: Synthetic oligonucleotide
aacaugugccuguccacgu

SEQ ID NO: 1357302 - RNA, 19 nt, Artificial Sequence
  Description of Artificial Sequence: Synthetic oligonucleotide
auaaucuacaagguccaca

SEQ ID NO: 1357303 - RNA, 19 nt, Artificial Sequence
  Description of Artificial Sequence: Synthetic oligonucleotide
ugacgccccuuuuacauug

SEQ ID NO: 1357304 - RNA, 19 nt, Artificial Sequence
  Description of Artificial Sequence: Synthetic oligonucleotide
auagacuccagcaucuuga

SEQ ID NO: 1357305 - RNA, 19 nt, Artificial Sequence
  Description of Artificial Sequence: Synthetic oligonucleotide
aauacaggguccagcuguc

SEQ ID NO: 1357306 - RNA, 19 nt, Artificial Sequence
  Description of Artificial Sequence: Synthetic oligonucleotide
ucccugauuaaggaaaggu

SEQ ID NO: 1357307 - RNA, 19 nt, Artificial Sequence
  Description of Artificial Sequence: Synthetic oligonucleotide
uguggaaggccgaguaaga

SEQ ID NO: 1357308 - RNA, 19 nt, Artificial Sequence
  Description of Artificial Sequence: Synthetic oligonucleotide
gucacacaaauagacucgg

SEQ ID NO: 1357309 - RNA, 19 nt, Artificial Sequence
  Description of Artificial Sequence: Synthetic oligonucleotide
gguaggauagaaagaagcc

SEQ ID NO: 1357310 - RNA, 19 nt, Artificial Sequence
  Description of Artificial Sequence: Synthetic oligonucleotide
auccaaaagauaaucuaca

SEQ ID NO: 1357311 - RNA, 19 nt, Artificial Sequence
  Description of Artificial Sequence: Synthetic oligonucleotide
uggcuguaaacaacagucu

SEQ ID NO: 1357312 - RNA, 19 nt, Artificial Sequence
  Description of Artificial Sequence: Synthetic oligonucleotide
uaaggcguccguugucggg

SEQ ID NO: 1357313 - RNA, 19 nt, Artificial Sequence
  Description of Artificial Sequence: Synthetic oligonucleotide
gcugaagagagacaguuca

SEQ ID NO: 1357314 - RNA, 19 nt, Artificial Sequence
  Description of Artificial Sequence: Synthetic oligonucleotide
augccaaccuccuggaaga

SEQ ID NO: 1357315 - RNA, 19 nt, Artificial Sequence
  Description of Artificial Sequence: Synthetic oligonucleotide
ccaaaagauaaucuacaag

SEQ ID NO: 1357316 - RNA, 19 nt, Artificial Sequence
  Description of Artificial Sequence: Synthetic oligonucleotide
uuaaggcguccguugucgg

SEQ ID NO: 1357317 - RNA, 19 nt, Artificial Sequence
  Description of Artificial Sequence: Synthetic oligonucleotide
cauucugacugacacccac

SEQ ID NO: 1357318 - RNA, 19 nt, Artificial Sequence
  Description of Artificial Sequence: Synthetic oligonucleotide
ggccgaguaagagaaaugg

SEQ ID NO: 1357319 - RNA, 19 nt, Artificial Sequence
  Description of Artificial Sequence: Synthetic oligonucleotide
aaauagacucggccugcgu

SEQ ID NO: 1357320 - RNA, 19 nt, Artificial Sequence
  Description of Artificial Sequence: Synthetic oligonucleotide
uucccugauagacacccaa

SEQ ID NO: 1357321 - RNA, 19 nt, Artificial Sequence
  Description of Artificial Sequence: Synthetic oligonucleotide
uucacauccuuaaggcguc

SEQ ID NO: 1357322 - RNA, 19 nt, Artificial Sequence
  Description of Artificial Sequence: Synthetic oligonucleotide
ucccacaacugauacccug

SEQ ID NO: 1357323 - RNA, 19 nt, Artificial Sequence
  Description of Artificial Sequence: Synthetic oligonucleotide
augauuagaguaaggguga

SEQ ID NO: 1357324 - RNA, 19 nt, Artificial Sequence
  Description of Artificial Sequence: Synthetic oligonucleotide
acccugacgccccuuuuac

SEQ ID NO: 1357325 - RNA, 19 nt, Artificial Sequence
  Description of Artificial Sequence: Synthetic oligonucleotide
ugacuugcacaucaugguu

SEQ ID NO: 1357326 - RNA, 19 nt, Artificial Sequence
  Description of Artificial Sequence: Synthetic oligonucleotide
aggauagaaagaagccugg

SEQ ID NO: 1357327 - RNA, 19 nt, Artificial Sequence
  Description of Artificial Sequence: Synthetic oligonucleotide
gagaaauggucugacugac

SEQ ID NO: 1357328 - RNA, 19 nt, Artificial Sequence
  Description of Artificial Sequence: Synthetic oligonucleotide
agaaauggucugacugacc

SEQ ID NO: 1357329 - RNA, 19 nt, Artificial Sequence
  Description of Artificial Sequence: Synthetic oligonucleotide
uguccucucacagaagaaa

SEQ ID NO: 1357330 - RNA, 19 nt, Artificial Sequence
  Description of Artificial Sequence: Synthetic oligonucleotide
agaacguuuuguccucuca

SEQ ID NO: 1357331 - RNA, 19 nt, Artificial Sequence
  Description of Artificial Sequence: Synthetic oligonucleotide
aauggaggcaugguaggau

SEQ ID NO: 1357332 - RNA, 19 nt, Artificial Sequence
  Description of Artificial Sequence: Synthetic oligonucleotide
caacugauacccugacgcc

SEQ ID NO: 1357333 - RNA, 19 nt, Artificial Sequence
  Description of Artificial Sequence: Synthetic oligonucleotide
cuaacaugugccuguccac

SEQ ID NO: 1357334 - RNA, 19 nt, Artificial Sequence
  Description of Artificial Sequence: Synthetic oligonucleotide
ugcgugcuccccuaguggc

SEQ ID NO: 1357335 - RNA, 19 nt, Artificial Sequence
  Description of Artificial Sequence: Synthetic oligonucleotide
cuuagagcugccuaugucu

SEQ ID NO: 1357336 - RNA, 19 nt, Artificial Sequence
  Description of Artificial Sequence: Synthetic oligonucleotide
cacuugguacccaacacca

SEQ ID NO: 1357337 - RNA, 19 nt, Artificial Sequence
  Description of Artificial Sequence: Synthetic oligonucleotide
uccuuaaggcguccguugu

SEQ ID NO: 1357338 - RNA, 19 nt, Artificial Sequence
  Description of Artificial Sequence: Synthetic oligonucleotide
accuguuggguccuccaag

SEQ ID NO: 1357339 - RNA, 19 nt, Artificial Sequence
  Description of Artificial Sequence: Synthetic oligonucleotide
ugguacccaacaccagaag

SEQ ID NO: 1357340 - RNA, 19 nt, Artificial Sequence
  Description of Artificial Sequence: Synthetic oligonucleotide
gaggggcacuacuagaaga

SEQ ID NO: 1357341 - RNA, 19 nt, Artificial Sequence
  Description of Artificial Sequence: Synthetic oligonucleotide
ugauuagaguaagggugag

SEQ ID NO: 1357342 - RNA, 19 nt, Artificial Sequence
  Description of Artificial Sequence: Synthetic oligonucleotide
cacaacugauacccugacg

SEQ ID NO: 1357343 - RNA, 19 nt, Artificial Sequence
  Description of Artificial Sequence: Synthetic oligonucleotide
uugaccaccuugccuguac

SEQ ID NO: 1357344 - RNA, 19 nt, Artificial Sequence
  Description of Artificial Sequence: Synthetic oligonucleotide
uggcccaccccacaaggug

SEQ ID NO: 1357345 - RNA, 19 nt, Artificial Sequence
  Description of Artificial Sequence: Synthetic oligonucleotide
cuccccuaguggcagaggc

SEQ ID NO: 1357346 - RNA, 19 nt, Artificial Sequence
  Description of Artificial Sequence: Synthetic oligonucleotide
uccgcucuaacaugugccu

SEQ ID NO: 1357347 - RNA, 19 nt, Artificial Sequence
  Description of Artificial Sequence: Synthetic oligonucleotide
gguccacagggcuaguagg

SEQ ID NO: 1357348 - RNA, 19 nt, Artificial Sequence
  Description of Artificial Sequence: Synthetic oligonucleotide
agaccugcuggggaaugcc

SEQ ID NO: 1357349 - RNA, 19 nt, Artificial Sequence
  Description of Artificial Sequence: Synthetic oligonucleotide
acuggcacacacaccaguc

SEQ ID NO: 1357350 - RNA, 19 nt, Artificial Sequence
  Description of Artificial Sequence: Synthetic oligonucleotide
ccucccacaacugauaccc

SEQ ID NO: 1357351 - RNA, 19 nt, Artificial Sequence
  Description of Artificial Sequence: Synthetic oligonucleotide
cuacuguaggccucuggug

SEQ ID NO: 1357352 - RNA, 19 nt, Artificial Sequence
  Description of Artificial Sequence: Synthetic oligonucleotide
ucucuuaggcuagacacuu

SEQ ID NO: 1357353 - RNA, 19 nt, Artificial Sequence
  Description of Artificial Sequence: Synthetic oligonucleotide
gacacccaagccuauccuc

SEQ ID NO: 1357354 - RNA, 19 nt, Artificial Sequence
  Description of Artificial Sequence: Synthetic oligonucleotide
acagucuuagagcugccua

SEQ ID NO: 1357355 - RNA, 19 nt, Artificial Sequence
  Description of Artificial Sequence: Synthetic oligonucleotide
uccauuguggaaggccgag

SEQ ID NO: 1357356 - RNA, 19 nt, Artificial Sequence
  Description of Artificial Sequence: Synthetic oligonucleotide
guagugcaggggaauacag

SEQ ID NO: 1357357 - RNA, 19 nt, Artificial Sequence
  Description of Artificial Sequence: Synthetic oligonucleotide
acgcaugccagugggaaag

SEQ ID NO: 1357358 - RNA, 19 nt, Artificial Sequence
  Description of Artificial Sequence: Synthetic oligonucleotide
aguagugcaggggaauaca

SEQ ID NO: 1357359 - RNA, 19 nt, Artificial Sequence
  Description of Artificial Sequence: Synthetic oligonucleotide
gaaauagcguggguggaga

SEQ ID NO: 1357360 - RNA, 19 nt, Artificial Sequence
  Description of Artificial Sequence: Synthetic oligonucleotide
agaagagguuggcuucuug

SEQ ID NO: 1357361 - RNA, 19 nt, Artificial Sequence
  Description of Artificial Sequence: Synthetic oligonucleotide
uucccugauuaaggaaagg

SEQ ID NO: 1357362 - RNA, 19 nt, Artificial Sequence
  Description of Artificial Sequence: Synthetic oligonucleotide
ugccucccacaacugauac

SEQ ID NO: 1357363 - RNA, 19 nt, Artificial Sequence
  Description of Artificial Sequence: Synthetic oligonucleotide
aaggcguccguugucgggu

SEQ ID NO: 1357364 - RNA, 19 nt, Artificial Sequence
  Description of Artificial Sequence: Synthetic oligonucleotide
cuguccacguaacucuuug

SEQ ID NO: 1357365 - RNA, 19 nt, Artificial Sequence
  Description of Artificial Sequence: Synthetic oligonucleotide
ccugauagacacccaagcc

SEQ ID NO: 1357366 - RNA, 19 nt, Artificial Sequence
  Description of Artificial Sequence: Synthetic oligonucleotide
auagacacccaagccuauc

SEQ ID NO: 1357367 - RNA, 19 nt, Artificial Sequence
  Description of Artificial Sequence: Synthetic oligonucleotide
ccacguaacucuuugagca

SEQ ID NO: 1357368 - RNA, 19 nt, Artificial Sequence
  Description of Artificial Sequence: Synthetic oligonucleotide
agagccuaauucugucuga

SEQ ID NO: 1357369 - RNA, 19 nt, Artificial Sequence
  Description of Artificial Sequence: Synthetic oligonucleotide
gcaggcaaguuuuaagaac

SEQ ID NO: 1357370 - RNA, 19 nt, Artificial Sequence
  Description of Artificial Sequence: Synthetic oligonucleotide
guggacauucuuaggauuc

SEQ ID NO: 1357371 - RNA, 19 nt, Artificial Sequence
  Description of Artificial Sequence: Synthetic oligonucleotide
cugcccagccaauccauag

SEQ ID NO: 1357372 - RNA, 19 nt, Artificial Sequence
  Description of Artificial Sequence: Synthetic oligonucleotide
caaguuuuaagaacguuuu

SEQ ID NO: 1357373 - RNA, 19 nt, Artificial Sequence
  Description of Artificial Sequence: Synthetic oligonucleotide
uguccacguaacucuuuga

SEQ ID NO: 1357374 - RNA, 19 nt, Artificial Sequence
  Description of Artificial Sequence: Synthetic oligonucleotide
uuacauuggggcccacaua

SEQ ID NO: 1357375 - RNA, 19 nt, Artificial Sequence
  Description of Artificial Sequence: Synthetic oligonucleotide
caaauagacucggccugcg

SEQ ID NO: 1357376 - RNA, 19 nt, Artificial Sequence
  Description of Artificial Sequence: Synthetic oligonucleotide
cacguaacucuuugagcac

SEQ ID NO: 1357377 - RNA, 19 nt, Artificial Sequence
  Description of Artificial Sequence: Synthetic oligonucleotide
guaggauagaaagaagccu

SEQ ID NO: 1357378 - RNA, 19 nt, Artificial Sequence
  Description of Artificial Sequence: Synthetic oligonucleotide
guugauaaccagguccaca

SEQ ID NO: 1357379 - RNA, 19 nt, Artificial Sequence
  Description of Artificial Sequence: Synthetic oligonucleotide
cauuggggcccacauagca

SEQ ID NO: 1357380 - RNA, 19 nt, Artificial Sequence
  Description of Artificial Sequence: Synthetic oligonucleotide
ugcccgaaaggugacuucu

SEQ ID NO: 1357381 - RNA, 19 nt, Artificial Sequence
  Description of Artificial Sequence: Synthetic oligonucleotide
agaaagaagccuggagcca

SEQ ID NO: 1357382 - RNA, 19 nt, Artificial Sequence
  Description of Artificial Sequence: Synthetic oligonucleotide
cccugauuaaggaaaggug

SEQ ID NO: 1357383 - RNA, 19 nt, Artificial Sequence
  Description of Artificial Sequence: Synthetic oligonucleotide
aaccuguuggguccuccaa

SEQ ID NO: 1357384 - RNA, 19 nt, Artificial Sequence
  Description of Artificial Sequence: Synthetic oligonucleotide
aggaccauuuggcaucaau

SEQ ID NO: 1357385 - RNA, 19 nt, Artificial Sequence
  Description of Artificial Sequence: Synthetic oligonucleotide
uuggcggcaggaguagugc

SEQ ID NO: 1357386 - RNA, 19 nt, Artificial Sequence
  Description of Artificial Sequence: Synthetic oligonucleotide
augguaggauagaaagaag

SEQ ID NO: 1357387 - RNA, 19 nt, Artificial Sequence
  Description of Artificial Sequence: Synthetic oligonucleotide
ccuguuggguccuccaagg

SEQ ID NO: 1357388 - RNA, 19 nt, Artificial Sequence
  Description of Artificial Sequence: Synthetic oligonucleotide
uaauaucaccugcccgaaa

SEQ ID NO: 1357389 - RNA, 19 nt, Artificial Sequence
  Description of Artificial Sequence: Synthetic oligonucleotide
cuaggugccucccacaacu

SEQ ID NO: 1357390 - RNA, 19 nt, Artificial Sequence
  Description of Artificial Sequence: Synthetic oligonucleotide
gaagagccuaauucugucu

SEQ ID NO: 1357391 - RNA, 19 nt, Artificial Sequence
  Description of Artificial Sequence: Synthetic oligonucleotide
accacggcugaucccgaag

SEQ ID NO: 1357392 - RNA, 19 nt, Artificial Sequence
  Description of Artificial Sequence: Synthetic oligonucleotide
gaguagugcaggggaauac

SEQ ID NO: 1357393 - RNA, 19 nt, Artificial Sequence
  Description of Artificial Sequence: Synthetic oligonucleotide
uccccuaguggcagaggca

SEQ ID NO: 1357394 - RNA, 19 nt, Artificial Sequence
  Description of Artificial Sequence: Synthetic oligonucleotide
ugucggguuuggcggcagg

SEQ ID NO: 1357395 - RNA, 19 nt, Artificial Sequence
  Description of Artificial Sequence: Synthetic oligonucleotide
aaacggcaacauccuggcu

SEQ ID NO: 1357396 - RNA, 19 nt, Artificial Sequence
  Description of Artificial Sequence: Synthetic oligonucleotide
aagccccaccuuaauggag

SEQ ID NO: 1357397 - RNA, 19 nt, Artificial Sequence
  Description of Artificial Sequence: Synthetic oligonucleotide
ccaaggaccauuuggcauc

SEQ ID NO: 1357398 - RNA, 19 nt, Artificial Sequence
  Description of Artificial Sequence: Synthetic oligonucleotide
uaagaacguuuuguccucu

SEQ ID NO: 1357399 - RNA, 19 nt, Artificial Sequence
  Description of Artificial Sequence: Synthetic oligonucleotide
cugaccugauccacugcug

SEQ ID NO: 1357400 - RNA, 19 nt, Artificial Sequence
  Description of Artificial Sequence: Synthetic oligonucleotide
ccguugucggguuuggcgg

SEQ ID NO: 1357401 - RNA, 19 nt, Artificial Sequence
  Description of Artificial Sequence: Synthetic oligonucleotide
cccugauagacacccaagc

SEQ ID NO: 1357402 - RNA, 19 nt, Artificial Sequence
  Description of Artificial Sequence: Synthetic oligonucleotide
gacucggccugcgugcucc

SEQ ID NO: 1357403 - RNA, 19 nt, Artificial Sequence
  Description of Artificial Sequence: Synthetic oligonucleotide
ucuuaggauucaaccuguu

SEQ ID NO: 1357404 - RNA, 19 nt, Artificial Sequence
  Description of Artificial Sequence: Synthetic oligonucleotide
ugccaaugucacacaaaua

SEQ ID NO: 1357405 - RNA, 19 nt, Artificial Sequence
  Description of Artificial Sequence: Synthetic oligonucleotide
uuguaccacggcugauccc

SEQ ID NO: 1357406 - RNA, 19 nt, Artificial Sequence
  Description of Artificial Sequence: Synthetic oligonucleotide
ccacuugguacccaacacc

SEQ ID NO: 1357407 - RNA, 19 nt, Artificial Sequence
  Description of Artificial Sequence: Synthetic oligonucleotide
gaccccaauaggcccuggc

SEQ ID NO: 1357408 - RNA, 19 nt, Artificial Sequence
  Description of Artificial Sequence: Synthetic oligonucleotide
cucuaacaugugccugucc

SEQ ID NO: 1357409 - RNA, 19 nt, Artificial Sequence
  Description of Artificial Sequence: Synthetic oligonucleotide
cauuguggaaggccgagua

SEQ ID NO: 1357410 - RNA, 19 nt, Artificial Sequence
  Description of Artificial Sequence: Synthetic oligonucleotide
uacccugacgccccuuuua

SEQ ID NO: 1357411 - RNA, 19 nt, Artificial Sequence
  Description of Artificial Sequence: Synthetic oligonucleotide
gggugaaugguaguugaug

SEQ ID NO: 1357412 - RNA, 19 nt, Artificial Sequence
  Description of Artificial Sequence: Synthetic oligonucleotide
caucaugguuggcuaggug

SEQ ID NO: 1357413 - RNA, 19 nt, Artificial Sequence
  Description of Artificial Sequence: Synthetic oligonucleotide
gaagaccugcuggggaaug

SEQ ID NO: 1357414 - RNA, 19 nt, Artificial Sequence
  Description of Artificial Sequence: Synthetic oligonucleotide
accugguaucuccaggauu

SEQ ID NO: 1357415 - RNA, 19 nt, Artificial Sequence
  Description of Artificial Sequence: Synthetic oligonucleotide
gacacucuucccugauaga

SEQ ID NO: 1357416 - RNA, 19 nt, Artificial Sequence
  Description of Artificial Sequence: Synthetic oligonucleotide
cugguacaagacacuucac

SEQ ID NO: 1357417 - RNA, 19 nt, Artificial Sequence
  Description of Artificial Sequence: Synthetic oligonucleotide
ggaccugguaucuccagga

SEQ ID NO: 1357418 - RNA, 19 nt, Artificial Sequence
  Description of Artificial Sequence: Synthetic oligonucleotide
aucccgaaggaaggcguuc

SEQ ID NO: 1357419 - RNA, 19 nt, Artificial Sequence
  Description of Artificial Sequence: Synthetic oligonucleotide
gaggcaugguaggauagaa

SEQ ID NO: 1357420 - RNA, 19 nt, Artificial Sequence
  Description of Artificial Sequence: Synthetic oligonucleotide
gcacuacuagaagagguug

SEQ ID NO: 1357421 - RNA, 19 nt, Artificial Sequence
  Description of Artificial Sequence: Synthetic oligonucleotide
cucuuaggcuagacacuug

SEQ ID NO: 1357422 - RNA, 19 nt, Artificial Sequence
  Description of Artificial Sequence: Synthetic oligonucleotide
ggguccuccaaggagaguc

SEQ ID NO: 1357423 - RNA, 19 nt, Artificial Sequence
  Description of Artificial Sequence: Synthetic oligonucleotide
ggcuagacacuuguugacc

SEQ ID NO: 1357424 - RNA, 19 nt, Artificial Sequence
  Description of Artificial Sequence: Synthetic oligonucleotide
ccccuuuuacauuggggcc

SEQ ID NO: 1357425 - RNA, 19 nt, Artificial Sequence
  Description of Artificial Sequence: Synthetic oligonucleotide
cccgaaaggugacuucugg

SEQ ID NO: 1357426 - RNA, 19 nt, Artificial Sequence
  Description of Artificial Sequence: Synthetic oligonucleotide
cuggaagaccugcugggga

SEQ ID NO: 1357427 - RNA, 19 nt, Artificial Sequence
  Description of Artificial Sequence: Synthetic oligonucleotide
accuuaauggaggcauggu

SEQ ID NO: 1357428 - RNA, 19 nt, Artificial Sequence
  Description of Artificial Sequence: Synthetic oligonucleotide
ccuucccugauuaaggaaa

SEQ ID NO: 1357429 - RNA, 19 nt, Artificial Sequence
  Description of Artificial Sequence: Synthetic oligonucleotide
cccuuuuacauuggggccc

SEQ ID NO: 1357430 - RNA, 19 nt, Artificial Sequence
  Description of Artificial Sequence: Synthetic oligonucleotide
ucggccugcgugcuccccu

SEQ ID NO: 1357431 - RNA, 19 nt, Artificial Sequence
  Description of Artificial Sequence: Synthetic oligonucleotide
agcugccuaugucuguaaa

SEQ ID NO: 1357432 - RNA, 19 nt, Artificial Sequence
  Description of Artificial Sequence: Synthetic oligonucleotide
uuguugaccuugggucuug

SEQ ID NO: 1357433 - RNA, 19 nt, Artificial Sequence
  Description of Artificial Sequence: Synthetic oligonucleotide
caucugacuggcacacaca

SEQ ID NO: 1357434 - RNA, 19 nt, Artificial Sequence
  Description of Artificial Sequence: Synthetic oligonucleotide
gauguucugaggggcacua

SEQ ID NO: 1357435 - RNA, 19 nt, Artificial Sequence
  Description of Artificial Sequence: Synthetic oligonucleotide
ccaagccuauccuccacag

SEQ ID NO: 1357436 - RNA, 19 nt, Artificial Sequence
  Description of Artificial Sequence: Synthetic oligonucleotide
uguugaccuugggucuugc

SEQ ID NO: 1357437 - RNA, 19 nt, Artificial Sequence
  Description of Artificial Sequence: Synthetic oligonucleotide
uggcuaggugccucccaca

SEQ ID NO: 1357438 - RNA, 19 nt, Artificial Sequence
  Description of Artificial Sequence: Synthetic oligonucleotide
guaauaucaccugcccgaa

SEQ ID NO: 1357439 - RNA, 19 nt, Artificial Sequence
  Description of Artificial Sequence: Synthetic oligonucleotide
agagcugccuaugucugua

SEQ ID NO: 1357440 - RNA, 19 nt, Artificial Sequence
  Description of Artificial Sequence: Synthetic oligonucleotide
gacgccccuuuuacauugg

SEQ ID NO: 1357441 - RNA, 19 nt, Artificial Sequence
  Description of Artificial Sequence: Synthetic oligonucleotide
ggggaauacaggguccagc

SEQ ID NO: 1357442 - RNA, 19 nt, Artificial Sequence
  Description of Artificial Sequence: Synthetic oligonucleotide
agccuauccuccacaguug

SEQ ID NO: 1357443 - RNA, 19 nt, Artificial Sequence
  Description of Artificial Sequence: Synthetic oligonucleotide
gcuacuguaggccucuggu

SEQ ID NO: 1357444 - RNA, 19 nt, Artificial Sequence
  Description of Artificial Sequence: Synthetic oligonucleotide
gcacaucaugguuggcuag

SEQ ID NO: 1357445 - RNA, 19 nt, Artificial Sequence
  Description of Artificial Sequence: Synthetic oligonucleotide
ccaggcaguugauaaccag

SEQ ID NO: 1357446 - RNA, 19 nt, Artificial Sequence
  Description of Artificial Sequence: Synthetic oligonucleotide
ugagcacuggugcccgguu

SEQ ID NO: 1357447 - RNA, 19 nt, Artificial Sequence
  Description of Artificial Sequence: Synthetic oligonucleotide
agagugcaggggaaugaca

SEQ ID NO: 1357448 - RNA, 19 nt, Artificial Sequence
  Description of Artificial Sequence: Synthetic oligonucleotide
accaccuugccuguaccau

SEQ ID NO: 1357449 - RNA, 19 nt, Artificial Sequence
  Description of Artificial Sequence: Synthetic oligonucleotide
ggggcacuacuagaagagg

SEQ ID NO: 1357450 - RNA, 19 nt, Artificial Sequence
  Description of Artificial Sequence: Synthetic oligonucleotide
aggcaaguuuuaagaacgu

SEQ ID NO: 1357451 - RNA, 19 nt, Artificial Sequence
  Description of Artificial Sequence: Synthetic oligonucleotide
guuggcuaggugccuccca

SEQ ID NO: 1357452 - RNA, 19 nt, Artificial Sequence
  Description of Artificial Sequence: Synthetic oligonucleotide
ggagagucagugccaucug

SEQ ID NO: 1357453 - RNA, 19 nt, Artificial Sequence
  Description of Artificial Sequence: Synthetic oligonucleotide
aggccgaguaagagaaaug

SEQ ID NO: 1357454 - RNA, 19 nt, Artificial Sequence
  Description of Artificial Sequence: Synthetic oligonucleotide
gggagaucucuuaggcuag

SEQ ID NO: 1357455 - RNA, 19 nt, Artificial Sequence
  Description of Artificial Sequence: Synthetic oligonucleotide
gucuguaaacaaagcccca

SEQ ID NO: 1357456 - RNA, 19 nt, Artificial Sequence
  Description of Artificial Sequence: Synthetic oligonucleotide
cugaaauagcgugggugga

SEQ ID NO: 1357457 - RNA, 19 nt, Artificial Sequence
  Description of Artificial Sequence: Synthetic oligonucleotide
aggggaauacaggguccag

SEQ ID NO: 1357458 - RNA, 19 nt, Artificial Sequence
  Description of Artificial Sequence: Synthetic oligonucleotide
caaccuguuggguccucca

SEQ ID NO: 1357459 - RNA, 19 nt, Artificial Sequence
  Description of Artificial Sequence: Synthetic oligonucleotide
cuccauuguggaaggccga

SEQ ID NO: 1357460 - RNA, 19 nt, Artificial Sequence
  Description of Artificial Sequence: Synthetic oligonucleotide
ggauagaaagaagccugga

SEQ ID NO: 1357461 - RNA, 19 nt, Artificial Sequence
  Description of Artificial Sequence: Synthetic oligonucleotide
cugcccgaaaggugacuuc

SEQ ID NO: 1357462 - RNA, 19 nt, Artificial Sequence
  Description of Artificial Sequence: Synthetic oligonucleotide
guggguggagaccccaaua

SEQ ID NO: 1357463 - RNA, 19 nt, Artificial Sequence
  Description of Artificial Sequence: Synthetic oligonucleotide
ugacaaaguugggcaggaa

SEQ ID NO: 1357464 - RNA, 19 nt, Artificial Sequence
  Description of Artificial Sequence: Synthetic oligonucleotide
ccuaauucugucugaugaa

SEQ ID NO: 1357465 - RNA, 19 nt, Artificial Sequence
  Description of Artificial Sequence: Synthetic oligonucleotide
uugucggguuuggcggcag

SEQ ID NO: 1357466 - RNA, 19 nt, Artificial Sequence
  Description of Artificial Sequence: Synthetic oligonucleotide
cgacacgcaugccaguggg

SEQ ID NO: 1357467 - RNA, 19 nt, Artificial Sequence
  Description of Artificial Sequence: Synthetic oligonucleotide
ugcccgguucugguuggcc

SEQ ID NO: 1357468 - RNA, 19 nt, Artificial Sequence
  Description of Artificial Sequence: Synthetic oligonucleotide
aggcaugguaggauagaaa

SEQ ID NO: 1357469 - RNA, 19 nt, Artificial Sequence
  Description of Artificial Sequence: Synthetic oligonucleotide
uagcguggguggagacccc

SEQ ID NO: 1357470 - RNA, 19 nt, Artificial Sequence
  Description of Artificial Sequence: Synthetic oligonucleotide
caauaggcccuggcccacc

SEQ ID NO: 1357471 - RNA, 19 nt, Artificial Sequence
  Description of Artificial Sequence: Synthetic oligonucleotide
ccuuaauggaggcauggua

SEQ ID NO: 1357472 - RNA, 19 nt, Artificial Sequence
  Description of Artificial Sequence: Synthetic oligonucleotide
gccuauccuccacaguuga

SEQ ID NO: 1357473 - RNA, 19 nt, Artificial Sequence
  Description of Artificial Sequence: Synthetic oligonucleotide
cuguuggguccuccaagga

SEQ ID NO: 1357474 - RNA, 19 nt, Artificial Sequence
  Description of Artificial Sequence: Synthetic oligonucleotide
aggcguucucagggcaauc

SEQ ID NO: 1357475 - RNA, 19 nt, Artificial Sequence
  Description of Artificial Sequence: Synthetic oligonucleotide
auacccugacgccccuuuu

SEQ ID NO: 1357476 - RNA, 19 nt, Artificial Sequence
  Description of Artificial Sequence: Synthetic oligonucleotide
caaggaccauuuggcauca

SEQ ID NO: 1357477 - RNA, 19 nt, Artificial Sequence
  Description of Artificial Sequence: Synthetic oligonucleotide
caggggaauacagggucca

SEQ ID NO: 1357478 - RNA, 19 nt, Artificial Sequence
  Description of Artificial Sequence: Synthetic oligonucleotide
uaccacggcugaucccgaa

SEQ ID NO: 1357479 - RNA, 19 nt, Artificial Sequence
  Description of Artificial Sequence: Synthetic oligonucleotide
caccugcccgaaaggugac

SEQ ID NO: 1357480 - RNA, 19 nt, Artificial Sequence
  Description of Artificial Sequence: Synthetic oligonucleotide
cgccccuuuuacauugggg

SEQ ID NO: 1357481 - RNA, 19 nt, Artificial Sequence
  Description of Artificial Sequence: Synthetic oligonucleotide
cugaagagagacaguucau

SEQ ID NO: 1357482 - RNA, 19 nt, Artificial Sequence
  Description of Artificial Sequence: Synthetic oligonucleotide
cugguuggcccaagccaca

SEQ ID NO: 1357483 - RNA, 19 nt, Artificial Sequence
  Description of Artificial Sequence: Synthetic oligonucleotide
gccucccacaacugauacc

SEQ ID NO: 1357484 - RNA, 19 nt, Artificial Sequence
  Description of Artificial Sequence: Synthetic oligonucleotide
ggcuaggugccucccacaa

SEQ ID NO: 1357485 - RNA, 19 nt, Artificial Sequence
  Description of Artificial Sequence: Synthetic oligonucleotide
agggugaaugguaguugau

SEQ ID NO: 1357486 - RNA, 19 nt, Artificial Sequence
  Description of Artificial Sequence: Synthetic oligonucleotide
gucggguuuggcggcagga

SEQ ID NO: 1357487 - RNA, 19 nt, Artificial Sequence
  Description of Artificial Sequence: Synthetic oligonucleotide
agcguggguggagacccca

SEQ ID NO: 1357488 - RNA, 19 nt, Artificial Sequence
  Description of Artificial Sequence: Synthetic oligonucleotide
cagugggaaagccuucccu

SEQ ID NO: 1357489 - RNA, 19 nt, Artificial Sequence
  Description of Artificial Sequence: Synthetic oligonucleotide
cuacuagaagagguuggcu

SEQ ID NO: 1357490 - RNA, 19 nt, Artificial Sequence
  Description of Artificial Sequence: Synthetic oligonucleotide
ccgacacgcaugccagugg

SEQ ID NO: 1357491 - RNA, 19 nt, Artificial Sequence
  Description of Artificial Sequence: Synthetic oligonucleotide
ccucuuagggauguucuga

SEQ ID NO: 1357492 - RNA, 19 nt, Artificial Sequence
  Description of Artificial Sequence: Synthetic oligonucleotide
gucuccgcucuaacaugug

SEQ ID NO: 1357493 - RNA, 19 nt, Artificial Sequence
  Description of Artificial Sequence: Synthetic oligonucleotide
gaccugguaucuccaggau

SEQ ID NO: 1357494 - RNA, 19 nt, Artificial Sequence
  Description of Artificial Sequence: Synthetic oligonucleotide
ccuuaaggcguccguuguc

SEQ ID NO: 1357495 - RNA, 19 nt, Artificial Sequence
  Description of Artificial Sequence: Synthetic oligonucleotide
ggaggcaugguaggauaga

SEQ ID NO: 1357496 - RNA, 19 nt, Artificial Sequence
  Description of Artificial Sequence: Synthetic oligonucleotide
guugucggguuuggcggca

SEQ ID NO: 1357497 - RNA, 19 nt, Artificial Sequence
  Description of Artificial Sequence: Synthetic oligonucleotide
caugcccaguggcuguaaa

SEQ ID NO: 1357498 - RNA, 19 nt, Artificial Sequence
  Description of Artificial Sequence: Synthetic oligonucleotide
gggcacuacuagaagaggu

SEQ ID NO: 1357499 - RNA, 19 nt, Artificial Sequence
  Description of Artificial Sequence: Synthetic oligonucleotide
gauagacacccaagccuau

SEQ ID NO: 1357500 - RNA, 19 nt, Artificial Sequence
  Description of Artificial Sequence: Synthetic oligonucleotide
ggcacacacaccagucauc

SEQ ID NO: 1357501 - RNA, 19 nt, Artificial Sequence
  Description of Artificial Sequence: Synthetic oligonucleotide
gaaggccgaguaagagaaa

SEQ ID NO: 1357502 - RNA, 19 nt, Artificial Sequence
  Description of Artificial Sequence: Synthetic oligonucleotide
guccguugucggguuuggc

SEQ ID NO: 1357503 - RNA, 19 nt, Artificial Sequence
  Description of Artificial Sequence: Synthetic oligonucleotide
ccugacgccccuuuuacau

SEQ ID NO: 1357504 - RNA, 19 nt, Artificial Sequence
  Description of Artificial Sequence: Synthetic oligonucleotide
caagccuauccuccacagu

SEQ ID NO: 1357505 - RNA, 19 nt, Artificial Sequence
  Description of Artificial Sequence: Synthetic oligonucleotide
accugcccgaaaggugacu

SEQ ID NO: 1357506 - RNA, 19 nt, Artificial Sequence
  Description of Artificial Sequence: Synthetic oligonucleotide
cccgacacgcaugccagug

SEQ ID NO: 1357507 - RNA, 19 nt, Artificial Sequence
  Description of Artificial Sequence: Synthetic oligonucleotide
gaguaagggugagcaggcu

SEQ ID NO: 1357508 - RNA, 19 nt, Artificial Sequence
  Description of Artificial Sequence: Synthetic oligonucleotide
ugauacccugacgccccuu

SEQ ID NO: 1357509 - RNA, 19 nt, Artificial Sequence
  Description of Artificial Sequence: Synthetic oligonucleotide
gcucuaacaugugccuguc

SEQ ID NO: 1357510 - RNA, 19 nt, Artificial Sequence
  Description of Artificial Sequence: Synthetic oligonucleotide
ggagaucucuuaggcuaga

SEQ ID NO: 1357511 - RNA, 19 nt, Artificial Sequence
  Description of Artificial Sequence: Synthetic oligonucleotide
ggcacuacuagaagagguu

SEQ ID NO: 1357512 - RNA, 19 nt, Artificial Sequence
  Description of Artificial Sequence: Synthetic oligonucleotide
gcguccguugucggguuug

SEQ ID NO: 1357513 - RNA, 19 nt, Artificial Sequence
  Description of Artificial Sequence: Synthetic oligonucleotide
ccuuuuacauuggggccca

SEQ ID NO: 1357514 - RNA, 19 nt, Artificial Sequence
  Description of Artificial Sequence: Synthetic oligonucleotide
aggcguccguugucggguu

SEQ ID NO: 1357515 - RNA, 19 nt, Artificial Sequence
  Description of Artificial Sequence: Synthetic oligonucleotide
cuuguugaccuugggucuu

SEQ ID NO: 1357516 - RNA, 19 nt, Artificial Sequence
  Description of Artificial Sequence: Synthetic oligonucleotide
ccgaaggaaggcguucuca

SEQ ID NO: 1357517 - RNA, 19 nt, Artificial Sequence
  Description of Artificial Sequence: Synthetic oligonucleotide
gccgaguaagagaaauggu

SEQ ID NO: 1357518 - RNA, 19 nt, Artificial Sequence
  Description of Artificial Sequence: Synthetic oligonucleotide
cuggcccaccccacaaggu

SEQ ID NO: 1357519 - RNA, 19 nt, Artificial Sequence
  Description of Artificial Sequence: Synthetic oligonucleotide
gcaauccaggcaguugaua

SEQ ID NO: 1357520 - RNA, 19 nt, Artificial Sequence
  Description of Artificial Sequence: Synthetic oligonucleotide
gcuccccuaguggcagagg

SEQ ID NO: 1357521 - RNA, 19 nt, Artificial Sequence
  Description of Artificial Sequence: Synthetic oligonucleotide
ggcaaguuuuaagaacguu

SEQ ID NO: 1357522 - RNA, 19 nt, Artificial Sequence
  Description of Artificial Sequence: Synthetic oligonucleotide
ccgcucuaacaugugccug

SEQ ID NO: 1357523 - RNA, 19 nt, Artificial Sequence
  Description of Artificial Sequence: Synthetic oligonucleotide
guaccacggcugaucccga

SEQ ID NO: 1357524 - RNA, 19 nt, Artificial Sequence
  Description of Artificial Sequence: Synthetic oligonucleotide
cccaccuuaauggaggcau

SEQ ID NO: 1357525 - RNA, 19 nt, Artificial Sequence
  Description of Artificial Sequence: Synthetic oligonucleotide
cagggcuaguagggagauc

SEQ ID NO: 1357526 - RNA, 19 nt, Artificial Sequence
  Description of Artificial Sequence: Synthetic oligonucleotide
cugacgccccuuuuacauu

SEQ ID NO: 1357527 - RNA, 19 nt, Artificial Sequence
  Description of Artificial Sequence: Synthetic oligonucleotide
guuuggcggcaggaguagu

SEQ ID NO: 1357528 - RNA, 19 nt, Artificial Sequence
  Description of Artificial Sequence: Synthetic oligonucleotide
gugcuccccuaguggcaga

SEQ ID NO: 1357529 - RNA, 19 nt, Artificial Sequence
  Description of Artificial Sequence: Synthetic oligonucleotide
ggccugcgugcuccccuag

SEQ ID NO: 1357530 - RNA, 19 nt, Artificial Sequence
  Description of Artificial Sequence: Synthetic oligonucleotide
gggaaagccuucccugauu

SEQ ID NO: 1357531 - RNA, 19 nt, Artificial Sequence
  Description of Artificial Sequence: Synthetic oligonucleotide
cucccacaacugauacccu

SEQ ID NO: 1357532 - RNA, 19 nt, Artificial Sequence
  Description of Artificial Sequence: Synthetic oligonucleotide
gugcccgguucugguuggc

SEQ ID NO: 1357533 - RNA, 19 nt, Artificial Sequence
  Description of Artificial Sequence: Synthetic oligonucleotide
cugagcacuggugcccggu

SEQ ID NO: 1357534 - RNA, 19 nt, Artificial Sequence
  Description of Artificial Sequence: Synthetic oligonucleotide
gggcuaguagggagaucuc

SEQ ID NO: 1357535 - RNA, 19 nt, Artificial Sequence
  Description of Artificial Sequence: Synthetic oligonucleotide
cguccguugucggguuugg

SEQ ID NO: 1357536 - RNA, 19 nt, Artificial Sequence
  Description of Artificial Sequence: Synthetic oligonucleotide
cugauacccugacgccccu

SEQ ID NO: 1357537 - RNA, 19 nt, Artificial Sequence
  Description of Artificial Sequence: Synthetic oligonucleotide
gcgugcuccccuaguggca

SEQ ID NO: 1357538 - RNA, 19 nt, Artificial Sequence
  Description of Artificial Sequence: Synthetic oligonucleotide
gccaucugacuggcacaca

SEQ ID NO: 1357539 - RNA, 19 nt, Artificial Sequence
  Description of Artificial Sequence: Synthetic oligonucleotide
caugcacaggagggucuau

SEQ ID NO: 1357540 - RNA, 19 nt, Artificial Sequence
  Description of Artificial Sequence: Synthetic oligonucleotide
ccuauccuccacaguugau

SEQ ID NO: 1357541 - RNA, 19 nt, Artificial Sequence
  Description of Artificial Sequence: Synthetic oligonucleotide
gccugcgugcuccccuagu

SEQ ID NO: 1357542 - RNA, 19 nt, Artificial Sequence
  Description of Artificial Sequence: Synthetic oligonucleotide
cccagugccaaggaccauu

SEQ ID NO: 1357543 - RNA, 19 nt, Artificial Sequence
  Description of Artificial Sequence: Synthetic oligonucleotide
ccugcccgaaaggugacuu

SEQ ID NO: 1357544 - RNA, 19 nt, Artificial Sequence
  Description of Artificial Sequence: Synthetic oligonucleotide
ccccaccuuaauggaggca

SEQ ID NO: 1357545 - RNA, 19 nt, Artificial Sequence
  Description of Artificial Sequence: Synthetic oligonucleotide
ccuguccacguaacucuuu

SEQ ID NO: 1357546 - RNA, 19 nt, Artificial Sequence
  Description of Artificial Sequence: Synthetic oligonucleotide
ccgguucugguuggcccaa

SEQ ID NO: 1357547 - RNA, 19 nt, Artificial Sequence
  Description of Artificial Sequence: Synthetic oligonucleotide
ccaugcccaguggcuguaa

SEQ ID NO: 1357548 - RNA, 19 nt, Artificial Sequence
  Description of Artificial Sequence: Synthetic oligonucleotide
ggcguccguugucggguuu

SEQ ID NO: 1357549 - RNA, 19 nt, Artificial Sequence
  Description of Artificial Sequence: Synthetic oligonucleotide
cccaagccacagcugccuu

SEQ ID NO: 1357550 - RNA, 19 nt, Artificial Sequence
  Description of Artificial Sequence: Synthetic oligonucleotide
ccccgacacgcaugccagu

SEQ ID NO: 1357551 - RNA, 19 nt, Artificial Sequence
  Description of Artificial Sequence: Synthetic oligonucleotide
aauauauccacauccaucc

SEQ ID NO: 1357552 - RNA, 19 nt, Artificial Sequence
  Description of Artificial Sequence: Synthetic oligonucleotide
gauauagauacauagacac

SEQ ID NO: 1357553 - RNA, 19 nt, Artificial Sequence
  Description of Artificial Sequence: Synthetic oligonucleotide
aauaacaauguucagugug

SEQ ID NO: 1357554 - RNA, 19 nt, Artificial Sequence
  Description of Artificial Sequence: Synthetic oligonucleotide
uuaguauagaaucacagga

SEQ ID NO: 1357555 - RNA, 19 nt, Artificial Sequence
  Description of Artificial Sequence: Synthetic oligonucleotide
ugaauaacaauguucagug

SEQ ID NO: 1357556 - RNA, 19 nt, Artificial Sequence
  Description of Artificial Sequence: Synthetic oligonucleotide
uauuaguauagaaucacag

SEQ ID NO: 1357557 - RNA, 19 nt, Artificial Sequence
  Description of Artificial Sequence: Synthetic oligonucleotide
aaaugaauaacaauguuca

SEQ ID NO: 1357558 - RNA, 19 nt, Artificial Sequence
  Description of Artificial Sequence: Synthetic oligonucleotide
uguaaguuaaguuccugcg

SEQ ID NO: 1357559 - RNA, 19 nt, Artificial Sequence
  Description of Artificial Sequence: Synthetic oligonucleotide
gauacauagacacaggaca

SEQ ID NO: 1357560 - RNA, 19 nt, Artificial Sequence
  Description of Artificial Sequence: Synthetic oligonucleotide
auuaguauagaaucacagg

SEQ ID NO: 1357561 - RNA, 19 nt, Artificial Sequence
  Description of Artificial Sequence: Synthetic oligonucleotide
cuacauaggauucaguccg

SEQ ID NO: 1357562 - RNA, 19 nt, Artificial Sequence
  Description of Artificial Sequence: Synthetic oligonucleotide
ucuuuaugcgcauacaaug

SEQ ID NO: 1357563 - RNA, 19 nt, Artificial Sequence
  Description of Artificial Sequence: Synthetic oligonucleotide
uugaagaacagccuggaca

SEQ ID NO: 1357564 - RNA, 19 nt, Artificial Sequence
  Description of Artificial Sequence: Synthetic oligonucleotide
cacaauaaauccuggaagg

SEQ ID NO: 1357565 - RNA, 19 nt, Artificial Sequence
  Description of Artificial Sequence: Synthetic oligonucleotide
aaagacuaguauuuuacaa

SEQ ID NO: 1357566 - RNA, 19 nt, Artificial Sequence
  Description of Artificial Sequence: Synthetic oligonucleotide
gacgaagaaaagcugcucg

SEQ ID NO: 1357567 - RNA, 19 nt, Artificial Sequence
  Description of Artificial Sequence: Synthetic oligonucleotide
uucgaugugggcagcaucg

SEQ ID NO: 1357568 - RNA, 19 nt, Artificial Sequence
  Description of Artificial Sequence: Synthetic oligonucleotide
auaggauucaguccgcuuc

SEQ ID NO: 1357569 - RNA, 19 nt, Artificial Sequence
  Description of Artificial Sequence: Synthetic oligonucleotide
cagauauagauacauagac

SEQ ID NO: 1357570 - RNA, 19 nt, Artificial Sequence
  Description of Artificial Sequence: Synthetic oligonucleotide
acauauaucgcacucauua

SEQ ID NO: 1357571 - RNA, 19 nt, Artificial Sequence
  Description of Artificial Sequence: Synthetic oligonucleotide
aagacuaguauuuuacaaa

SEQ ID NO: 1357572 - RNA, 19 nt, Artificial Sequence
  Description of Artificial Sequence: Synthetic oligonucleotide
ugcacuggcugccauaacg

SEQ ID NO: 1357573 - RNA, 19 nt, Artificial Sequence
  Description of Artificial Sequence: Synthetic oligonucleotide
gacgugaacagcacgaugg

SEQ ID NO: 1357574 - RNA, 19 nt, Artificial Sequence
  Description of Artificial Sequence: Synthetic oligonucleotide
aaugccgaaggucuaggag

SEQ ID NO: 1357575 - RNA, 19 nt, Artificial Sequence
  Description of Artificial Sequence: Synthetic oligonucleotide
aaugaauaacaauguucag

SEQ ID NO: 1357576 - RNA, 19 nt, Artificial Sequence
  Description of Artificial Sequence: Synthetic oligonucleotide
uguguuucuacauaggauu

SEQ ID NO: 1357577 - RNA, 19 nt, Artificial Sequence
  Description of Artificial Sequence: Synthetic oligonucleotide
ucuggaugagucuucuugg

SEQ ID NO: 1357578 - RNA, 19 nt, Artificial Sequence
  Description of Artificial Sequence: Synthetic oligonucleotide
ugccauaacgagauguggg

SEQ ID NO: 1357579 - RNA, 19 nt, Artificial Sequence
  Description of Artificial Sequence: Synthetic oligonucleotide
uuugaggcacuucuugagg

SEQ ID NO: 1357580 - RNA, 19 nt, Artificial Sequence
  Description of Artificial Sequence: Synthetic oligonucleotide
aauuauuaguauagaauca

SEQ ID NO: 1357581 - RNA, 19 nt, Artificial Sequence
  Description of Artificial Sequence: Synthetic oligonucleotide
uauaucgcacucauuauaa

SEQ ID NO: 1357582 - RNA, 19 nt, Artificial Sequence
  Description of Artificial Sequence: Synthetic oligonucleotide
aacgagaugugggauaggg

SEQ ID NO: 1357583 - RNA, 19 nt, Artificial Sequence
  Description of Artificial Sequence: Synthetic oligonucleotide
uuauuaguauagaaucaca

SEQ ID NO: 1357584 - RNA, 19 nt, Artificial Sequence
  Description of Artificial Sequence: Synthetic oligonucleotide
acuuaggcugcauuccugc

SEQ ID NO: 1357585 - RNA, 19 nt, Artificial Sequence
  Description of Artificial Sequence: Synthetic oligonucleotide
uauagaaucacaggaaauc

SEQ ID NO: 1357586 - RNA, 19 nt, Artificial Sequence
  Description of Artificial Sequence: Synthetic oligonucleotide
uggucgaugggacaguucc

SEQ ID NO: 1357587 - RNA, 19 nt, Artificial Sequence
  Description of Artificial Sequence: Synthetic oligonucleotide
cauucuuccucgcugaacc

SEQ ID NO: 1357588 - RNA, 19 nt, Artificial Sequence
  Description of Artificial Sequence: Synthetic oligonucleotide
uagauacauagacacagga

SEQ ID NO: 1357589 - RNA, 19 nt, Artificial Sequence
  Description of Artificial Sequence: Synthetic oligonucleotide
aaggcuuuugaguccuugg

SEQ ID NO: 1357590 - RNA, 19 nt, Artificial Sequence
  Description of Artificial Sequence: Synthetic oligonucleotide
uccacaauaaauccuggaa

SEQ ID NO: 1357591 - RNA, 19 nt, Artificial Sequence
  Description of Artificial Sequence: Synthetic oligonucleotide
guaaguuaaguuccugcgg

SEQ ID NO: 1357592 - RNA, 19 nt, Artificial Sequence
  Description of Artificial Sequence: Synthetic oligonucleotide
ugugggauagggcucugcg

SEQ ID NO: 1357593 - RNA, 19 nt, Artificial Sequence
  Description of Artificial Sequence: Synthetic oligonucleotide
agaagcaaaggguuauauc

SEQ ID NO: 1357594 - RNA, 19 nt, Artificial Sequence
  Description of Artificial Sequence: Synthetic oligonucleotide
uaucgcacucauuauaaga

SEQ ID NO: 1357595 - RNA, 19 nt, Artificial Sequence
  Description of Artificial Sequence: Synthetic oligonucleotide
aguauagaaucacaggaaa

SEQ ID NO: 1357596 - RNA, 19 nt, Artificial Sequence
  Description of Artificial Sequence: Synthetic oligonucleotide
aaacggacgaagaaaagcu

SEQ ID NO: 1357597 - RNA, 19 nt, Artificial Sequence
  Description of Artificial Sequence: Synthetic oligonucleotide
aacauaucucggaugagag

SEQ ID NO: 1357598 - RNA, 19 nt, Artificial Sequence
  Description of Artificial Sequence: Synthetic oligonucleotide
ugaguuguuuucuguacag

SEQ ID NO: 1357599 - RNA, 19 nt, Artificial Sequence
  Description of Artificial Sequence: Synthetic oligonucleotide
uguuccugaaagaugcgga

SEQ ID NO: 1357600 - RNA, 19 nt, Artificial Sequence
  Description of Artificial Sequence: Synthetic oligonucleotide
agcagcgagauguagccgg

SEQ ID NO: 1357601 - RNA, 19 nt, Artificial Sequence
  Description of Artificial Sequence: Synthetic oligonucleotide
acagauguucucgaugccc

SEQ ID NO: 1357602 - RNA, 19 nt, Artificial Sequence
  Description of Artificial Sequence: Synthetic oligonucleotide
augaauaacaauguucagu

SEQ ID NO: 1357603 - RNA, 19 nt, Artificial Sequence
  Description of Artificial Sequence: Synthetic oligonucleotide
uggacaacauauaucgcac

SEQ ID NO: 1357604 - RNA, 19 nt, Artificial Sequence
  Description of Artificial Sequence: Synthetic oligonucleotide
uuugugagugcguacuggc

SEQ ID NO: 1357605 - RNA, 19 nt, Artificial Sequence
  Description of Artificial Sequence: Synthetic oligonucleotide
uaugaguuguuuucuguac

SEQ ID NO: 1357606 - RNA, 19 nt, Artificial Sequence
  Description of Artificial Sequence: Synthetic oligonucleotide
uaguauagaaucacaggaa

SEQ ID NO: 1357607 - RNA, 19 nt, Artificial Sequence
  Description of Artificial Sequence: Synthetic oligonucleotide
guugcgguggugcuggucg

SEQ ID NO: 1357608 - RNA, 19 nt, Artificial Sequence
  Description of Artificial Sequence: Synthetic oligonucleotide
agaaaagcugcucgaugac

SEQ ID NO: 1357609 - RNA, 19 nt, Artificial Sequence
  Description of Artificial Sequence: Synthetic oligonucleotide
aaucgcagcagcaguuugc

SEQ ID NO: 1357610 - RNA, 19 nt, Artificial Sequence
  Description of Artificial Sequence: Synthetic oligonucleotide
aaggccacgacgcgguccg

SEQ ID NO: 1357611 - RNA, 19 nt, Artificial Sequence
  Description of Artificial Sequence: Synthetic oligonucleotide
uuaggcugcauuccugcag

SEQ ID NO: 1357612 - RNA, 19 nt, Artificial Sequence
  Description of Artificial Sequence: Synthetic oligonucleotide
gacauguaaggccaguuga

SEQ ID NO: 1357613 - RNA, 19 nt, Artificial Sequence
  Description of Artificial Sequence: Synthetic oligonucleotide
caaacggacgaagaaaagc

SEQ ID NO: 1357614 - RNA, 19 nt, Artificial Sequence
  Description of Artificial Sequence: Synthetic oligonucleotide
ucgacggcgcuaaagagga

SEQ ID NO: 1357615 - RNA, 19 nt, Artificial Sequence
  Description of Artificial Sequence: Synthetic oligonucleotide
gauguugcgggcccacucg

SEQ ID NO: 1357616 - RNA, 19 nt, Artificial Sequence
  Description of Artificial Sequence: Synthetic oligonucleotide
guguaaguuaaguuccugc

SEQ ID NO: 1357617 - RNA, 19 nt, Artificial Sequence
  Description of Artificial Sequence: Synthetic oligonucleotide
ugaggcguagcagagacac

SEQ ID NO: 1357618 - RNA, 19 nt, Artificial Sequence
  Description of Artificial Sequence: Synthetic oligonucleotide
gaagagagggcaaucgcag

SEQ ID NO: 1357619 - RNA, 19 nt, Artificial Sequence
  Description of Artificial Sequence: Synthetic oligonucleotide
gacaacauauaucgcacuc

SEQ ID NO: 1357620 - RNA, 19 nt, Artificial Sequence
  Description of Artificial Sequence: Synthetic oligonucleotide
gaugggacaguuccuguug

SEQ ID NO: 1357621 - RNA, 19 nt, Artificial Sequence
  Description of Artificial Sequence: Synthetic oligonucleotide
ugcgauuucuccugcagac

SEQ ID NO: 1357622 - RNA, 19 nt, Artificial Sequence
  Description of Artificial Sequence: Synthetic oligonucleotide
auagaaucacaggaaaucu

SEQ ID NO: 1357623 - RNA, 19 nt, Artificial Sequence
  Description of Artificial Sequence: Synthetic oligonucleotide
acggacgaagaaaagcugc

SEQ ID NO: 1357624 - RNA, 19 nt, Artificial Sequence
  Description of Artificial Sequence: Synthetic oligonucleotide
aguauuggcacugguugcg

SEQ ID NO: 1357625 - RNA, 19 nt, Artificial Sequence
  Description of Artificial Sequence: Synthetic oligonucleotide
cucgacggcgcuaaagagg

SEQ ID NO: 1357626 - RNA, 19 nt, Artificial Sequence
  Description of Artificial Sequence: Synthetic oligonucleotide
ugcgaagagagggcaaucg

SEQ ID NO: 1357627 - RNA, 19 nt, Artificial Sequence
  Description of Artificial Sequence: Synthetic oligonucleotide
gcauguguaaguuaaguuc

SEQ ID NO: 1357628 - RNA, 19 nt, Artificial Sequence
  Description of Artificial Sequence: Synthetic oligonucleotide
ugcguacuggccuggauug

SEQ ID NO: 1357629 - RNA, 19 nt, Artificial Sequence
  Description of Artificial Sequence: Synthetic oligonucleotide
ucugguuuggaaccaggaa

SEQ ID NO: 1357630 - RNA, 19 nt, Artificial Sequence
  Description of Artificial Sequence: Synthetic oligonucleotide
auucaguccgcuuccauau

SEQ ID NO: 1357631 - RNA, 19 nt, Artificial Sequence
  Description of Artificial Sequence: Synthetic oligonucleotide
uaugcgcauacaauguuua

SEQ ID NO: 1357632 - RNA, 19 nt, Artificial Sequence
  Description of Artificial Sequence: Synthetic oligonucleotide
agaauauauccacauccau

SEQ ID NO: 1357633 - RNA, 19 nt, Artificial Sequence
  Description of Artificial Sequence: Synthetic oligonucleotide
gucggugaucugcagaucc

SEQ ID NO: 1357634 - RNA, 19 nt, Artificial Sequence
  Description of Artificial Sequence: Synthetic oligonucleotide
ucaguccgcuuccauauga

SEQ ID NO: 1357635 - RNA, 19 nt, Artificial Sequence
  Description of Artificial Sequence: Synthetic oligonucleotide
auauaucgcacucauuaua

SEQ ID NO: 1357636 - RNA, 19 nt, Artificial Sequence
  Description of Artificial Sequence: Synthetic oligonucleotide
uuaaguuccugcggaacgc

SEQ ID NO: 1357637 - RNA, 19 nt, Artificial Sequence
  Description of Artificial Sequence: Synthetic oligonucleotide
ucgcacucauuauaagaag

SEQ ID NO: 1357638 - RNA, 19 nt, Artificial Sequence
  Description of Artificial Sequence: Synthetic oligonucleotide
uuuaugcgcauacaauguu

SEQ ID NO: 1357639 - RNA, 19 nt, Artificial Sequence
  Description of Artificial Sequence: Synthetic oligonucleotide
gacggcgcuaaagaggagg

SEQ ID NO: 1357640 - RNA, 19 nt, Artificial Sequence
  Description of Artificial Sequence: Synthetic oligonucleotide
caucauaccacauucccaa

SEQ ID NO: 1357641 - RNA, 19 nt, Artificial Sequence
  Description of Artificial Sequence: Synthetic oligonucleotide
uuaugcgcauacaauguuu

SEQ ID NO: 1357642 - RNA, 19 nt, Artificial Sequence
  Description of Artificial Sequence: Synthetic oligonucleotide
aucgcagcagcaguuugcc

SEQ ID NO: 1357643 - RNA, 19 nt, Artificial Sequence
  Description of Artificial Sequence: Synthetic oligonucleotide
agagggcaaucgcagcagc

SEQ ID NO: 1357644 - RNA, 19 nt, Artificial Sequence
  Description of Artificial Sequence: Synthetic oligonucleotide
aaucugguuuggaaccagg

SEQ ID NO: 1357645 - RNA, 19 nt, Artificial Sequence
  Description of Artificial Sequence: Synthetic oligonucleotide
auaucgcacucauuauaag

SEQ ID NO: 1357646 - RNA, 19 nt, Artificial Sequence
  Description of Artificial Sequence: Synthetic oligonucleotide
uguucaguguguguguuuc

SEQ ID NO: 1357647 - RNA, 19 nt, Artificial Sequence
  Description of Artificial Sequence: Synthetic oligonucleotide
aguuccugcggaacgcucc

SEQ ID NO: 1357648 - RNA, 19 nt, Artificial Sequence
  Description of Artificial Sequence: Synthetic oligonucleotide
caauaaauccuggaagguc

SEQ ID NO: 1357649 - RNA, 19 nt, Artificial Sequence
  Description of Artificial Sequence: Synthetic oligonucleotide
ugacgugaacagcacgaug

SEQ ID NO: 1357650 - RNA, 19 nt, Artificial Sequence
  Description of Artificial Sequence: Synthetic oligonucleotide
cacacugcgauuucuccug

SEQ ID NO: 1357651 - RNA, 19 nt, Artificial Sequence
  Description of Artificial Sequence: Synthetic oligonucleotide
acgaagaaaagcugcucga

SEQ ID NO: 1357652 - RNA, 19 nt, Artificial Sequence
  Description of Artificial Sequence: Synthetic oligonucleotide
ugcggaacgcuccucuuga

SEQ ID NO: 1357653 - RNA, 19 nt, Artificial Sequence
  Description of Artificial Sequence: Synthetic oligonucleotide
aaacugcucccagacagca

SEQ ID NO: 1357654 - RNA, 19 nt, Artificial Sequence
  Description of Artificial Sequence: Synthetic oligonucleotide
gaggcggcaguauuggcac

SEQ ID NO: 1357655 - RNA, 19 nt, Artificial Sequence
  Description of Artificial Sequence: Synthetic oligonucleotide
cugagcugcguugagcacg

SEQ ID NO: 1357656 - RNA, 19 nt, Artificial Sequence
  Description of Artificial Sequence: Synthetic oligonucleotide
cacuuugaggcacuucuug

SEQ ID NO: 1357657 - RNA, 19 nt, Artificial Sequence
  Description of Artificial Sequence: Synthetic oligonucleotide
ucuuccucgcugaaccgcu

SEQ ID NO: 1357658 - RNA, 19 nt, Artificial Sequence
  Description of Artificial Sequence: Synthetic oligonucleotide
aaagcugcucgaugacaga

SEQ ID NO: 1357659 - RNA, 19 nt, Artificial Sequence
  Description of Artificial Sequence: Synthetic oligonucleotide
ugcgcauacaauguuuaaa

SEQ ID NO: 1357660 - RNA, 19 nt, Artificial Sequence
  Description of Artificial Sequence: Synthetic oligonucleotide
cagacuuucgaugugggca

SEQ ID NO: 1357661 - RNA, 19 nt, Artificial Sequence
  Description of Artificial Sequence: Synthetic oligonucleotide
uacauaggauucaguccgc

SEQ ID NO: 1357662 - RNA, 19 nt, Artificial Sequence
  Description of Artificial Sequence: Synthetic oligonucleotide
auccacaauaaauccugga

SEQ ID NO: 1357663 - RNA, 19 nt, Artificial Sequence
  Description of Artificial Sequence: Synthetic oligonucleotide
aacggacgaagaaaagcug

SEQ ID NO: 1357664 - RNA, 19 nt, Artificial Sequence
  Description of Artificial Sequence: Synthetic oligonucleotide
ucuaggagcacuggaugga

SEQ ID NO: 1357665 - RNA, 19 nt, Artificial Sequence
  Description of Artificial Sequence: Synthetic oligonucleotide
guugcgggcccacucgacg

SEQ ID NO: 1357666 - RNA, 19 nt, Artificial Sequence
  Description of Artificial Sequence: Synthetic oligonucleotide
acucgacggcgcuaaagag

SEQ ID NO: 1357667 - RNA, 19 nt, Artificial Sequence
  Description of Artificial Sequence: Synthetic oligonucleotide
ugagcugcguugagcacga

SEQ ID NO: 1357668 - RNA, 19 nt, Artificial Sequence
  Description of Artificial Sequence: Synthetic oligonucleotide
uugcgggcccacucgacgg

SEQ ID NO: 1357669 - RNA, 19 nt, Artificial Sequence
  Description of Artificial Sequence: Synthetic oligonucleotide
uggucggugaucugcagau

SEQ ID NO: 1357670 - RNA, 19 nt, Artificial Sequence
  Description of Artificial Sequence: Synthetic oligonucleotide
uuccuguuggcacggcaug

SEQ ID NO: 1357671 - RNA, 19 nt, Artificial Sequence
  Description of Artificial Sequence: Synthetic oligonucleotide
ugacagaggaggacacugu

SEQ ID NO: 1357672 - RNA, 19 nt, Artificial Sequence
  Description of Artificial Sequence: Synthetic oligonucleotide
uggguuggaggcauucuuc

SEQ ID NO: 1357673 - RNA, 19 nt, Artificial Sequence
  Description of Artificial Sequence: Synthetic oligonucleotide
gguccaucauaccacauuc

SEQ ID NO: 1357674 - RNA, 19 nt, Artificial Sequence
  Description of Artificial Sequence: Synthetic oligonucleotide
gauucaguccgcuuccaua

SEQ ID NO: 1357675 - RNA, 19 nt, Artificial Sequence
  Description of Artificial Sequence: Synthetic oligonucleotide
aggcuuuugaguccuuggu

SEQ ID NO: 1357676 - RNA, 19 nt, Artificial Sequence
  Description of Artificial Sequence: Synthetic oligonucleotide
aggcguagcagagacaccu

SEQ ID NO: 1357677 - RNA, 19 nt, Artificial Sequence
  Description of Artificial Sequence: Synthetic oligonucleotide
uuccugaaagaugcggaug

SEQ ID NO: 1357678 - RNA, 19 nt, Artificial Sequence
  Description of Artificial Sequence: Synthetic oligonucleotide
auauagauacauagacaca

SEQ ID NO: 1357679 - RNA, 19 nt, Artificial Sequence
  Description of Artificial Sequence: Synthetic oligonucleotide
uaaagaggaggcgcgcggc

SEQ ID NO: 1357680 - RNA, 19 nt, Artificial Sequence
  Description of Artificial Sequence: Synthetic oligonucleotide
acgagaugugggauagggc

SEQ ID NO: 1357681 - RNA, 19 nt, Artificial Sequence
  Description of Artificial Sequence: Synthetic oligonucleotide
ggugaggcguagcagagac

SEQ ID NO: 1357682 - RNA, 19 nt, Artificial Sequence
  Description of Artificial Sequence: Synthetic oligonucleotide
auaaaggccacgacgcggu

SEQ ID NO: 1357683 - RNA, 19 nt, Artificial Sequence
  Description of Artificial Sequence: Synthetic oligonucleotide
cuuuaugcgcauacaaugu

SEQ ID NO: 1357684 - RNA, 19 nt, Artificial Sequence
  Description of Artificial Sequence: Synthetic oligonucleotide
cacggcauguguaaguuaa

SEQ ID NO: 1357685 - RNA, 19 nt, Artificial Sequence
  Description of Artificial Sequence: Synthetic oligonucleotide
acggcgcuaaagaggaggc

SEQ ID NO: 1357686 - RNA, 19 nt, Artificial Sequence
  Description of Artificial Sequence: Synthetic oligonucleotide
cacugagcugcguugagca

SEQ ID NO: 1357687 - RNA, 19 nt, Artificial Sequence
  Description of Artificial Sequence: Synthetic oligonucleotide
ggaacgcuccucuugaaga

SEQ ID NO: 1357688 - RNA, 19 nt, Artificial Sequence
  Description of Artificial Sequence: Synthetic oligonucleotide
uccaugcaacuuaggcugc

SEQ ID NO: 1357689 - RNA, 19 nt, Artificial Sequence
  Description of Artificial Sequence: Synthetic oligonucleotide
cugccauaacgagaugugg

SEQ ID NO: 1357690 - RNA, 19 nt, Artificial Sequence
  Description of Artificial Sequence: Synthetic oligonucleotide
uuugaguccuuggucugga

SEQ ID NO: 1357691 - RNA, 19 nt, Artificial Sequence
  Description of Artificial Sequence: Synthetic oligonucleotide
agcgagauguagccggaca

SEQ ID NO: 1357692 - RNA, 19 nt, Artificial Sequence
  Description of Artificial Sequence: Synthetic oligonucleotide
acauacuccuccagugcac

SEQ ID NO: 1357693 - RNA, 19 nt, Artificial Sequence
  Description of Artificial Sequence: Synthetic oligonucleotide
uguuggcacggcaugugua

SEQ ID NO: 1357694 - RNA, 19 nt, Artificial Sequence
  Description of Artificial Sequence: Synthetic oligonucleotide
uccugcggaacgcuccucu

SEQ ID NO: 1357695 - RNA, 19 nt, Artificial Sequence
  Description of Artificial Sequence: Synthetic oligonucleotide
ggacauguaaggccaguug

SEQ ID NO: 1357696 - RNA, 19 nt, Artificial Sequence
  Description of Artificial Sequence: Synthetic oligonucleotide
ucgcugaaccgcuucccgc

SEQ ID NO: 1357697 - RNA, 19 nt, Artificial Sequence
  Description of Artificial Sequence: Synthetic oligonucleotide
uucaguccgcuuccauaug

SEQ ID NO: 1357698 - RNA, 19 nt, Artificial Sequence
  Description of Artificial Sequence: Synthetic oligonucleotide
cauaacgagaugugggaua

SEQ ID NO: 1357699 - RNA, 19 nt, Artificial Sequence
  Description of Artificial Sequence: Synthetic oligonucleotide
cggaugagaguuucgauag

SEQ ID NO: 1357700 - RNA, 19 nt, Artificial Sequence
  Description of Artificial Sequence: Synthetic oligonucleotide
gucgaugggacaguuccug

SEQ ID NO: 1357701 - RNA, 19 nt, Artificial Sequence
  Description of Artificial Sequence: Synthetic oligonucleotide
ugugcgaagagagggcaau

SEQ ID NO: 1357702 - RNA, 19 nt, Artificial Sequence
  Description of Artificial Sequence: Synthetic oligonucleotide
cugcguugagcacgaagag

SEQ ID NO: 1357703 - RNA, 19 nt, Artificial Sequence
  Description of Artificial Sequence: Synthetic oligonucleotide
aaguuccugcggaacgcuc

SEQ ID NO: 1357704 - RNA, 19 nt, Artificial Sequence
  Description of Artificial Sequence: Synthetic oligonucleotide
aggcguggaggcccgcagc

SEQ ID NO: 1357705 - RNA, 19 nt, Artificial Sequence
  Description of Artificial Sequence: Synthetic oligonucleotide
acaguuccuguuggcacgg

SEQ ID NO: 1357706 - RNA, 19 nt, Artificial Sequence
  Description of Artificial Sequence: Synthetic oligonucleotide
aguccgcuuccauaugagu

SEQ ID NO: 1357707 - RNA, 19 nt, Artificial Sequence
  Description of Artificial Sequence: Synthetic oligonucleotide
gaacgcuccucuugaagaa

SEQ ID NO: 1357708 - RNA, 19 nt, Artificial Sequence
  Description of Artificial Sequence: Synthetic oligonucleotide
caguugaaacugcucccag

SEQ ID NO: 1357709 - RNA, 19 nt, Artificial Sequence
  Description of Artificial Sequence: Synthetic oligonucleotide
cgcacucauuauaagaagc

SEQ ID NO: 1357710 - RNA, 19 nt, Artificial Sequence
  Description of Artificial Sequence: Synthetic oligonucleotide
gauggacauguaaggccag

SEQ ID NO: 1357711 - RNA, 19 nt, Artificial Sequence
  Description of Artificial Sequence: Synthetic oligonucleotide
ggcgcuaaagaggaggcgc

SEQ ID NO: 1357712 - RNA, 19 nt, Artificial Sequence
  Description of Artificial Sequence: Synthetic oligonucleotide
guuggcacggcauguguaa

SEQ ID NO: 1357713 - RNA, 19 nt, Artificial Sequence
  Description of Artificial Sequence: Synthetic oligonucleotide
gaauaacaauguucagugu

SEQ ID NO: 1357714 - RNA, 19 nt, Artificial Sequence
  Description of Artificial Sequence: Synthetic oligonucleotide
gcgagauguagccggacag

SEQ ID NO: 1357715 - RNA, 19 nt, Artificial Sequence
  Description of Artificial Sequence: Synthetic oligonucleotide
cacucgacggcgcuaaaga

SEQ ID NO: 1357716 - RNA, 19 nt, Artificial Sequence
  Description of Artificial Sequence: Synthetic oligonucleotide
acgcgguccgcggacaugg

SEQ ID NO: 1357717 - RNA, 19 nt, Artificial Sequence
  Description of Artificial Sequence: Synthetic oligonucleotide
ucgaugggacaguuccugu

SEQ ID NO: 1357718 - RNA, 19 nt, Artificial Sequence
  Description of Artificial Sequence: Synthetic oligonucleotide
guccccguuugugagugcg

SEQ ID NO: 1357719 - RNA, 19 nt, Artificial Sequence
  Description of Artificial Sequence: Synthetic oligonucleotide
gcaacuuaggcugcauucc

SEQ ID NO: 1357720 - RNA, 19 nt, Artificial Sequence
  Description of Artificial Sequence: Synthetic oligonucleotide
cacagauguucucgaugcc

SEQ ID NO: 1357721 - RNA, 19 nt, Artificial Sequence
  Description of Artificial Sequence: Synthetic oligonucleotide
ggauggacauguaaggcca

SEQ ID NO: 1357722 - RNA, 19 nt, Artificial Sequence
  Description of Artificial Sequence: Synthetic oligonucleotide
uggcacggcauguguaagu

SEQ ID NO: 1357723 - RNA, 19 nt, Artificial Sequence
  Description of Artificial Sequence: Synthetic oligonucleotide
caccuggucggugaucugc

SEQ ID NO: 1357724 - RNA, 19 nt, Artificial Sequence
  Description of Artificial Sequence: Synthetic oligonucleotide
ugagugcguacuggccugg

SEQ ID NO: 1357725 - RNA, 19 nt, Artificial Sequence
  Description of Artificial Sequence: Synthetic oligonucleotide
gcugcguugagcacgaaga

SEQ ID NO: 1357726 - RNA, 19 nt, Artificial Sequence
  Description of Artificial Sequence: Synthetic oligonucleotide
gauagggcucugcgcgcag

SEQ ID NO: 1357727 - RNA, 19 nt, Artificial Sequence
  Description of Artificial Sequence: Synthetic oligonucleotide
augugggauagggcucugc

SEQ ID NO: 1357728 - RNA, 19 nt, Artificial Sequence
  Description of Artificial Sequence: Synthetic oligonucleotide
uuggcacggcauguguaag

SEQ ID NO: 1357729 - RNA, 19 nt, Artificial Sequence
  Description of Artificial Sequence: Synthetic oligonucleotide
gcguagcagagacaccugg

SEQ ID NO: 1357730 - RNA, 19 nt, Artificial Sequence
  Description of Artificial Sequence: Synthetic oligonucleotide
augcggaugugguccauaa

SEQ ID NO: 1357731 - RNA, 19 nt, Artificial Sequence
  Description of Artificial Sequence: Synthetic oligonucleotide
gcuaaagaggaggcgcgcg

SEQ ID NO: 1357732 - RNA, 19 nt, Artificial Sequence
  Description of Artificial Sequence: Synthetic oligonucleotide
gccauaacgagauguggga

SEQ ID NO: 1357733 - RNA, 19 nt, Artificial Sequence
  Description of Artificial Sequence: Synthetic oligonucleotide
acagcacgauggcuuugag

SEQ ID NO: 1357734 - RNA, 19 nt, Artificial Sequence
  Description of Artificial Sequence: Synthetic oligonucleotide
cagauccgggaagaagggg

SEQ ID NO: 1357735 - RNA, 19 nt, Artificial Sequence
  Description of Artificial Sequence: Synthetic oligonucleotide
aagaggaggcgcgcggcca

SEQ ID NO: 1357736 - RNA, 19 nt, Artificial Sequence
  Description of Artificial Sequence: Synthetic oligonucleotide
uaacgagaugugggauagg

SEQ ID NO: 1357737 - RNA, 19 nt, Artificial Sequence
  Description of Artificial Sequence: Synthetic oligonucleotide
ugcagaguaggcuguccuu

SEQ ID NO: 1357738 - RNA, 19 nt, Artificial Sequence
  Description of Artificial Sequence: Synthetic oligonucleotide
guccaucauaccacauucc

SEQ ID NO: 1357739 - RNA, 19 nt, Artificial Sequence
  Description of Artificial Sequence: Synthetic oligonucleotide
uguugcgggcccacucgac

SEQ ID NO: 1357740 - RNA, 19 nt, Artificial Sequence
  Description of Artificial Sequence: Synthetic oligonucleotide
caugggcgaggcguggagg

SEQ ID NO: 1357741 - RNA, 19 nt, Artificial Sequence
  Description of Artificial Sequence: Synthetic oligonucleotide
augcgcauacaauguuuaa

SEQ ID NO: 1357742 - RNA, 19 nt, Artificial Sequence
  Description of Artificial Sequence: Synthetic oligonucleotide
ggcguggaggcccgcagcg

SEQ ID NO: 1357743 - RNA, 19 nt, Artificial Sequence
  Description of Artificial Sequence: Synthetic oligonucleotide
cugcggaacgcuccucuug

SEQ ID NO: 1357744 - RNA, 19 nt, Artificial Sequence
  Description of Artificial Sequence: Synthetic oligonucleotide
aguagcggcgccacgugca

SEQ ID NO: 1357745 - RNA, 19 nt, Artificial Sequence
  Description of Artificial Sequence: Synthetic oligonucleotide
gcgaagagagggcaaucgc

SEQ ID NO: 1357746 - RNA, 19 nt, Artificial Sequence
  Description of Artificial Sequence: Synthetic oligonucleotide
gcugcucgaugacagagga

SEQ ID NO: 1357747 - RNA, 19 nt, Artificial Sequence
  Description of Artificial Sequence: Synthetic oligonucleotide
uccuguuggcacggcaugu

SEQ ID NO: 1357748 - RNA, 19 nt, Artificial Sequence
  Description of Artificial Sequence: Synthetic oligonucleotide
guuugccaaagcggcuggg

SEQ ID NO: 1357749 - RNA, 19 nt, Artificial Sequence
  Description of Artificial Sequence: Synthetic oligonucleotide
auguugcgggcccacucga

SEQ ID NO: 1357750 - RNA, 19 nt, Artificial Sequence
  Description of Artificial Sequence: Synthetic oligonucleotide
gagauguagccggacaggu

SEQ ID NO: 1357751 - RNA, 19 nt, Artificial Sequence
  Description of Artificial Sequence: Synthetic oligonucleotide
cauguaaggccaguugaaa

SEQ ID NO: 1357752 - RNA, 19 nt, Artificial Sequence
  Description of Artificial Sequence: Synthetic oligonucleotide
cauauaucgcacucauuau

SEQ ID NO: 1357753 - RNA, 19 nt, Artificial Sequence
  Description of Artificial Sequence: Synthetic oligonucleotide
guagcggcgccacgugcag

SEQ ID NO: 1357754 - RNA, 19 nt, Artificial Sequence
  Description of Artificial Sequence: Synthetic oligonucleotide
guauagaaucacaggaaau

SEQ ID NO: 1357755 - RNA, 19 nt, Artificial Sequence
  Description of Artificial Sequence: Synthetic oligonucleotide
gcugccauaacgagaugug

SEQ ID NO: 1357756 - RNA, 19 nt, Artificial Sequence
  Description of Artificial Sequence: Synthetic oligonucleotide
cagguagcaguggccauug

SEQ ID NO: 1357757 - RNA, 19 nt, Artificial Sequence
  Description of Artificial Sequence: Synthetic oligonucleotide
gcagauccgggaagaaggg

SEQ ID NO: 1357758 - RNA, 19 nt, Artificial Sequence
  Description of Artificial Sequence: Synthetic oligonucleotide
caguagcggcgccacgugc

SEQ ID NO: 1357759 - RNA, 19 nt, Artificial Sequence
  Description of Artificial Sequence: Synthetic oligonucleotide
cacgugcaggggcauggag

SEQ ID NO: 1357760 - RNA, 19 nt, Artificial Sequence
  Description of Artificial Sequence: Synthetic oligonucleotide
gcagacuuucgaugugggc

SEQ ID NO: 1357761 - RNA, 19 nt, Artificial Sequence
  Description of Artificial Sequence: Synthetic oligonucleotide
acuuucgaugugggcagca

SEQ ID NO: 1357762 - RNA, 19 nt, Artificial Sequence
  Description of Artificial Sequence: Synthetic oligonucleotide
agugcguacuggccuggau

SEQ ID NO: 1357763 - RNA, 19 nt, Artificial Sequence
  Description of Artificial Sequence: Synthetic oligonucleotide
caauguucagugugugugu

SEQ ID NO: 1357764 - RNA, 19 nt, Artificial Sequence
  Description of Artificial Sequence: Synthetic oligonucleotide
aggcugcauuccugcagag

SEQ ID NO: 1357765 - RNA, 19 nt, Artificial Sequence
  Description of Artificial Sequence: Synthetic oligonucleotide
guuccugaaagaugcggau

SEQ ID NO: 1357766 - RNA, 19 nt, Artificial Sequence
  Description of Artificial Sequence: Synthetic oligonucleotide
cauacuccuccagugcaca

SEQ ID NO: 1357767 - RNA, 19 nt, Artificial Sequence
  Description of Artificial Sequence: Synthetic oligonucleotide
uccccguuugugagugcgu

SEQ ID NO: 1357768 - RNA, 19 nt, Artificial Sequence
  Description of Artificial Sequence: Synthetic oligonucleotide
gcagguggaaaugccgaag

SEQ ID NO: 1357769 - RNA, 19 nt, Artificial Sequence
  Description of Artificial Sequence: Synthetic oligonucleotide
guagccggacagguagcag

SEQ ID NO: 1357770 - RNA, 19 nt, Artificial Sequence
  Description of Artificial Sequence: Synthetic oligonucleotide
ggacagguagcaguggcca

SEQ ID NO: 1357771 - RNA, 19 nt, Artificial Sequence
  Description of Artificial Sequence: Synthetic oligonucleotide
cuucccgccucaugcccac

SEQ ID NO: 1357772 - RNA, 19 nt, Artificial Sequence
  Description of Artificial Sequence: Synthetic oligonucleotide
gagcacugagcugcguuga

SEQ ID NO: 1357773 - RNA, 19 nt, Artificial Sequence
  Description of Artificial Sequence: Synthetic oligonucleotide
gcgcuaaagaggaggcgcg

SEQ ID NO: 1357774 - RNA, 19 nt, Artificial Sequence
  Description of Artificial Sequence: Synthetic oligonucleotide
gacuuucgaugugggcagc

SEQ ID NO: 1357775 - RNA, 19 nt, Artificial Sequence
  Description of Artificial Sequence: Synthetic oligonucleotide
ggauguugcgggcccacuc

SEQ ID NO: 1357776 - RNA, 19 nt, Artificial Sequence
  Description of Artificial Sequence: Synthetic oligonucleotide
cauuccugcagaguaggcu

SEQ ID NO: 1357777 - RNA, 19 nt, Artificial Sequence
  Description of Artificial Sequence: Synthetic oligonucleotide
acggcauguguaaguuaag

SEQ ID NO: 1357778 - RNA, 19 nt, Artificial Sequence
  Description of Artificial Sequence: Synthetic oligonucleotide
cgguccgcggacaugggcg

SEQ ID NO: 1357779 - RNA, 19 nt, Artificial Sequence
  Description of Artificial Sequence: Synthetic oligonucleotide
ccggacagguagcaguggc

SEQ ID NO: 1357780 - RNA, 19 nt, Artificial Sequence
  Description of Artificial Sequence: Synthetic oligonucleotide
cacgacgcgguccgcggac

SEQ ID NO: 1357781 - RNA, 19 nt, Artificial Sequence
  Description of Artificial Sequence: Synthetic oligonucleotide
ggcauguguaaguuaaguu

SEQ ID NO: 1357782 - RNA, 19 nt, Artificial Sequence
  Description of Artificial Sequence: Synthetic oligonucleotide
gaggcguagcagagacacc

SEQ ID NO: 1357783 - RNA, 19 nt, Artificial Sequence
  Description of Artificial Sequence: Synthetic oligonucleotide
ggacgaagaaaagcugcuc

SEQ ID NO: 1357784 - RNA, 19 nt, Artificial Sequence
  Description of Artificial Sequence: Synthetic oligonucleotide
ugggcgaggcguggaggcc

SEQ ID NO: 1357785 - RNA, 19 nt, Artificial Sequence
  Description of Artificial Sequence: Synthetic oligonucleotide
gacaugggcgaggcgugga

SEQ ID NO: 1357786 - RNA, 19 nt, Artificial Sequence
  Description of Artificial Sequence: Synthetic oligonucleotide
ugcuggucgaugggacagu

SEQ ID NO: 1357787 - RNA, 19 nt, Artificial Sequence
  Description of Artificial Sequence: Synthetic oligonucleotide
gccacgacgcgguccgcgg

SEQ ID NO: 1357788 - RNA, 19 nt, Artificial Sequence
  Description of Artificial Sequence: Synthetic oligonucleotide
uggauugggcuggguugga

SEQ ID NO: 1357789 - RNA, 19 nt, Artificial Sequence
  Description of Artificial Sequence: Synthetic oligonucleotide
gaugcggaugugguccaua

SEQ ID NO: 1357790 - RNA, 19 nt, Artificial Sequence
  Description of Artificial Sequence: Synthetic oligonucleotide
agauguagccggacaggua

SEQ ID NO: 1357791 - RNA, 19 nt, Artificial Sequence
  Description of Artificial Sequence: Synthetic oligonucleotide
cugcagaguaggcuguccu

SEQ ID NO: 1357792 - RNA, 19 nt, Artificial Sequence
  Description of Artificial Sequence: Synthetic oligonucleotide
aggugaggcguagcagaga

SEQ ID NO: 1357793 - RNA, 19 nt, Artificial Sequence
  Description of Artificial Sequence: Synthetic oligonucleotide
cguacuggccuggauuggg

SEQ ID NO: 1357794 - RNA, 19 nt, Artificial Sequence
  Description of Artificial Sequence: Synthetic oligonucleotide
ggauugggcuggguuggag

SEQ ID NO: 1357795 - RNA, 19 nt, Artificial Sequence
  Description of Artificial Sequence: Synthetic oligonucleotide
ggcuuugaggcagcuguuc

SEQ ID NO: 1357796 - RNA, 19 nt, Artificial Sequence
  Description of Artificial Sequence: Synthetic oligonucleotide
gacgcgguccgcggacaug

SEQ ID NO: 1357797 - RNA, 19 nt, Artificial Sequence
  Description of Artificial Sequence: Synthetic oligonucleotide
cugugcgaagagagggcaa

SEQ ID NO: 1357798 - RNA, 19 nt, Artificial Sequence
  Description of Artificial Sequence: Synthetic oligonucleotide
ggcugccauaacgagaugu

SEQ ID NO: 1357799 - RNA, 19 nt, Artificial Sequence
  Description of Artificial Sequence: Synthetic oligonucleotide
guuccugcggaacgcuccu

SEQ ID NO: 1357800 - RNA, 19 nt, Artificial Sequence
  Description of Artificial Sequence: Synthetic oligonucleotide
gugcgaagagagggcaauc

SEQ ID NO: 1357801 - RNA, 19 nt, Artificial Sequence
  Description of Artificial Sequence: Synthetic oligonucleotide
gcacacugcgauuucuccu

SEQ ID NO: 1357802 - RNA, 19 nt, Artificial Sequence
  Description of Artificial Sequence: Synthetic oligonucleotide
aggcggcaguauuggcacu

SEQ ID NO: 1357803 - RNA, 19 nt, Artificial Sequence
  Description of Artificial Sequence: Synthetic oligonucleotide
cccguuugugagugcguac

SEQ ID NO: 1357804 - RNA, 19 nt, Artificial Sequence
  Description of Artificial Sequence: Synthetic oligonucleotide
cguggaggcccgcagcggc

SEQ ID NO: 1357805 - RNA, 19 nt, Artificial Sequence
  Description of Artificial Sequence: Synthetic oligonucleotide
gcauuccugcagaguaggc

SEQ ID NO: 1357806 - RNA, 19 nt, Artificial Sequence
  Description of Artificial Sequence: Synthetic oligonucleotide
cuguuggcacggcaugugu

SEQ ID NO: 1357807 - RNA, 19 nt, Artificial Sequence
  Description of Artificial Sequence: Synthetic oligonucleotide
cagcgagauguagccggac

SEQ ID NO: 1357808 - RNA, 19 nt, Artificial Sequence
  Description of Artificial Sequence: Synthetic oligonucleotide
ugcgguggugcuggucgau

SEQ ID NO: 1357809 - RNA, 19 nt, Artificial Sequence
  Description of Artificial Sequence: Synthetic oligonucleotide
gguccgcggacaugggcga

SEQ ID NO: 1357810 - RNA, 19 nt, Artificial Sequence
  Description of Artificial Sequence: Synthetic oligonucleotide
ccacucgacggcgcuaaag

SEQ ID NO: 1357811 - RNA, 19 nt, Artificial Sequence
  Description of Artificial Sequence: Synthetic oligonucleotide
ccuguuggcacggcaugug

SEQ ID NO: 1357812 - RNA, 19 nt, Artificial Sequence
  Description of Artificial Sequence: Synthetic oligonucleotide
ccacauccauccacaauaa

SEQ ID NO: 1357813 - RNA, 19 nt, Artificial Sequence
  Description of Artificial Sequence: Synthetic oligonucleotide
ggauagggcucugcgcgca

SEQ ID NO: 1357814 - RNA, 19 nt, Artificial Sequence
  Description of Artificial Sequence: Synthetic oligonucleotide
ggcguagcagagacaccug

SEQ ID NO: 1357815 - RNA, 19 nt, Artificial Sequence
  Description of Artificial Sequence: Synthetic oligonucleotide
gcguacuggccuggauugg

SEQ ID NO: 1357816 - RNA, 19 nt, Artificial Sequence
  Description of Artificial Sequence: Synthetic oligonucleotide
ccaguagcggcgccacgug

SEQ ID NO: 1357817 - RNA, 19 nt, Artificial Sequence
  Description of Artificial Sequence: Synthetic oligonucleotide
gagugcguacuggccugga

SEQ ID NO: 1357818 - RNA, 19 nt, Artificial Sequence
  Description of Artificial Sequence: Synthetic oligonucleotide
gugaggcguagcagagaca

SEQ ID NO: 1357819 - RNA, 19 nt, Artificial Sequence
  Description of Artificial Sequence: Synthetic oligonucleotide
uuccugcggaacgcuccuc

SEQ ID NO: 1357820 - RNA, 19 nt, Artificial Sequence
  Description of Artificial Sequence: Synthetic oligonucleotide
caguuccuguuggcacggc

SEQ ID NO: 1357821 - RNA, 19 nt, Artificial Sequence
  Description of Artificial Sequence: Synthetic oligonucleotide
gccggacagguagcagugg

SEQ ID NO: 1357822 - RNA, 19 nt, Artificial Sequence
  Description of Artificial Sequence: Synthetic oligonucleotide
gcuuccauaugaguuguuu

SEQ ID NO: 1357823 - RNA, 19 nt, Artificial Sequence
  Description of Artificial Sequence: Synthetic oligonucleotide
ggccaguagcggcgccacg

SEQ ID NO: 1357824 - RNA, 19 nt, Artificial Sequence
  Description of Artificial Sequence: Synthetic oligonucleotide
ggcauucuuccucgcugaa

SEQ ID NO: 1357825 - RNA, 19 nt, Artificial Sequence
  Description of Artificial Sequence: Synthetic oligonucleotide
ccgcuucccgccucaugcc

SEQ ID NO: 1357826 - RNA, 19 nt, Artificial Sequence
  Description of Artificial Sequence: Synthetic oligonucleotide
acgacgcgguccgcggaca

SEQ ID NO: 1357827 - RNA, 19 nt, Artificial Sequence
  Description of Artificial Sequence: Synthetic oligonucleotide
ggcgaggcguggaggcccg

SEQ ID NO: 1357828 - RNA, 19 nt, Artificial Sequence
  Description of Artificial Sequence: Synthetic oligonucleotide
guccgcggacaugggcgag

SEQ ID NO: 1357829 - RNA, 19 nt, Artificial Sequence
  Description of Artificial Sequence: Synthetic oligonucleotide
gcucccagacagcaacaua

SEQ ID NO: 1357830 - RNA, 19 nt, Artificial Sequence
  Description of Artificial Sequence: Synthetic oligonucleotide
ggcgccacgugcaggggca

SEQ ID NO: 1357831 - RNA, 19 nt, Artificial Sequence
  Description of Artificial Sequence: Synthetic oligonucleotide
aggccacgacgcgguccgc

SEQ ID NO: 1357832 - RNA, 19 nt, Artificial Sequence
  Description of Artificial Sequence: Synthetic oligonucleotide
cgcuucccgccucaugccc

SEQ ID NO: 1357833 - RNA, 19 nt, Artificial Sequence
  Description of Artificial Sequence: Synthetic oligonucleotide
cuuucgaugugggcagcau

SEQ ID NO: 1357834 - RNA, 19 nt, Artificial Sequence
  Description of Artificial Sequence: Synthetic oligonucleotide
ggauucaguccgcuuccau

SEQ ID NO: 1357835 - RNA, 19 nt, Artificial Sequence
  Description of Artificial Sequence: Synthetic oligonucleotide
gcguggaggcccgcagcgg

SEQ ID NO: 1357836 - RNA, 19 nt, Artificial Sequence
  Description of Artificial Sequence: Synthetic oligonucleotide
cgcuaaagaggaggcgcgc

SEQ ID NO: 1357837 - RNA, 19 nt, Artificial Sequence
  Description of Artificial Sequence: Synthetic oligonucleotide
gcuucccgccucaugccca

SEQ ID NO: 1357838 - RNA, 19 nt, Artificial Sequence
  Description of Artificial Sequence: Synthetic oligonucleotide
ggucggugaucugcagauc

SEQ ID NO: 1357839 - RNA, 19 nt, Artificial Sequence
  Description of Artificial Sequence: Synthetic oligonucleotide
gcagcgagauguagccgga

SEQ ID NO: 1357840 - RNA, 19 nt, Artificial Sequence
  Description of Artificial Sequence: Synthetic oligonucleotide
ggggauguugcgggcccac

SEQ ID NO: 1357841 - RNA, 19 nt, Artificial Sequence
  Description of Artificial Sequence: Synthetic oligonucleotide
gccaguagcggcgccacgu

SEQ ID NO: 1357842 - RNA, 19 nt, Artificial Sequence
  Description of Artificial Sequence: Synthetic oligonucleotide
cagcaucggacaggccaca

SEQ ID NO: 1357843 - RNA, 19 nt, Artificial Sequence
  Description of Artificial Sequence: Synthetic oligonucleotide
ggcacggcauguguaaguu

SEQ ID NO: 1357844 - RNA, 19 nt, Artificial Sequence
  Description of Artificial Sequence: Synthetic oligonucleotide
ccguuugugagugcguacu

SEQ ID NO: 1357845 - RNA, 19 nt, Artificial Sequence
  Description of Artificial Sequence: Synthetic oligonucleotide
cggacgaagaaaagcugcu

SEQ ID NO: 1357846 - RNA, 19 nt, Artificial Sequence
  Description of Artificial Sequence: Synthetic oligonucleotide
cgaugugggcagcaucgga

SEQ ID NO: 1357847 - RNA, 19 nt, Artificial Sequence
  Description of Artificial Sequence: Synthetic oligonucleotide
cggcgcuaaagaggaggcg

SEQ ID NO: 1357848 - RNA, 19 nt, Artificial Sequence
  Description of Artificial Sequence: Synthetic oligonucleotide
ccaugcaacuuaggcugca

SEQ ID NO: 1357849 - RNA, 19 nt, Artificial Sequence
  Description of Artificial Sequence: Synthetic oligonucleotide
ggcugcauuccugcagagu

SEQ ID NO: 1357850 - RNA, 19 nt, Artificial Sequence
  Description of Artificial Sequence: Synthetic oligonucleotide
cgcauacaauguuuaaauu

SEQ ID NO: 1357851 - RNA, 19 nt, Artificial Sequence
  Description of Artificial Sequence: Synthetic oligonucleotide
gcggaacgcuccucuugaa

SEQ ID NO: 1357852 - RNA, 19 nt, Artificial Sequence
  Description of Artificial Sequence: Synthetic oligonucleotide
gcccacucgacggcgcuaa

SEQ ID NO: 1357853 - RNA, 19 nt, Artificial Sequence
  Description of Artificial Sequence: Synthetic oligonucleotide
ccauaacgagaugugggau

SEQ ID NO: 1357854 - RNA, 19 nt, Artificial Sequence
  Description of Artificial Sequence: Synthetic oligonucleotide
ccagugcacacugcgauuu

SEQ ID NO: 1357855 - RNA, 19 nt, Artificial Sequence
  Description of Artificial Sequence: Synthetic oligonucleotide
gggguccccguuugugagu

SEQ ID NO: 1357856 - RNA, 19 nt, Artificial Sequence
  Description of Artificial Sequence: Synthetic oligonucleotide
cggcauguguaaguuaagu

SEQ ID NO: 1357857 - RNA, 19 nt, Artificial Sequence
  Description of Artificial Sequence: Synthetic oligonucleotide
ccccguuugugagugcgua

SEQ ID NO: 1357858 - RNA, 19 nt, Artificial Sequence
  Description of Artificial Sequence: Synthetic oligonucleotide
gaggcccgcagcggccagu

SEQ ID NO: 1357859 - RNA, 19 nt, Artificial Sequence
  Description of Artificial Sequence: Synthetic oligonucleotide
cgacggcgcuaaagaggag

SEQ ID NO: 1357860 - RNA, 19 nt, Artificial Sequence
  Description of Artificial Sequence: Synthetic oligonucleotide
cgcgguccgcggacauggg

SEQ ID NO: 1357861 - RNA, 19 nt, Artificial Sequence
  Description of Artificial Sequence: Synthetic oligonucleotide
gggcagcaucggacaggcc

SEQ ID NO: 1357862 - RNA, 19 nt, Artificial Sequence
  Description of Artificial Sequence: Synthetic oligonucleotide
ccacgacgcgguccgcgga

SEQ ID NO: 1357863 - RNA, 19 nt, Artificial Sequence
  Description of Artificial Sequence: Synthetic oligonucleotide
gggauguugcgggcccacu

SEQ ID NO: 1357864 - RNA, 19 nt, Artificial Sequence
  Description of Artificial Sequence: Synthetic oligonucleotide
ggcccacucgacggcgcua

SEQ ID NO: 1357865 - RNA, 19 nt, Artificial Sequence
  Description of Artificial Sequence: Synthetic oligonucleotide
ccugcggaacgcuccucuu

SEQ ID NO: 1357866 - RNA, 19 nt, Artificial Sequence
  Description of Artificial Sequence: Synthetic oligonucleotide
gcgaggcguggaggcccgc

SEQ ID NO: 1357867 - RNA, 19 nt, Artificial Sequence
  Description of Artificial Sequence: Synthetic oligonucleotide
cgaggcguggaggcccgca

SEQ ID NO: 1357868 - RNA, 19 nt, Artificial Sequence
  Description of Artificial Sequence: Synthetic oligonucleotide
ggcgcgcggccagcucaca

SEQ ID NO: 1357869 - RNA, 19 nt, Artificial Sequence
  Description of Artificial Sequence: Synthetic oligonucleotide
cccacucgacggcgcuaaa

SEQ ID NO: 1357870 - RNA, 19 nt, Artificial Sequence
  Description of Artificial Sequence: Synthetic oligonucleotide
gcgccacgugcaggggcau

SEQ ID NO: 1357871 - RNA, 19 nt, Artificial Sequence
  Description of Artificial Sequence: Synthetic oligonucleotide
uuacuuauggcacagacgg

SEQ ID NO: 1357872 - RNA, 19 nt, Artificial Sequence
  Description of Artificial Sequence: Synthetic oligonucleotide
aauagcuaaaaucuagaac

SEQ ID NO: 1357873 - RNA, 19 nt, Artificial Sequence
  Description of Artificial Sequence: Synthetic oligonucleotide
acaacuucgaaacagcugc

SEQ ID NO: 1357874 - RNA, 19 nt, Artificial Sequence
  Description of Artificial Sequence: Synthetic oligonucleotide
uauucaauagcugagagag

SEQ ID NO: 1357875 - RNA, 19 nt, Artificial Sequence
  Description of Artificial Sequence: Synthetic oligonucleotide
aauuuauugaccuucaguu

SEQ ID NO: 1357876 - RNA, 19 nt, Artificial Sequence
  Description of Artificial Sequence: Synthetic oligonucleotide
uaauagaagauucaagggc

SEQ ID NO: 1357877 - RNA, 19 nt, Artificial Sequence
  Description of Artificial Sequence: Synthetic oligonucleotide
aauuaaaagagcgggaguc

SEQ ID NO: 1357878 - RNA, 19 nt, Artificial Sequence
  Description of Artificial Sequence: Synthetic oligonucleotide
ugugagacguuucauaggg

SEQ ID NO: 1357879 - RNA, 19 nt, Artificial Sequence
  Description of Artificial Sequence: Synthetic oligonucleotide
uauuaugcagcucuaauca

SEQ ID NO: 1357880 - RNA, 19 nt, Artificial Sequence
  Description of Artificial Sequence: Synthetic oligonucleotide
aauaagaagaaccuccccu

SEQ ID NO: 1357881 - RNA, 19 nt, Artificial Sequence
  Description of Artificial Sequence: Synthetic oligonucleotide
uucaguuucacauacguga

SEQ ID NO: 1357882 - RNA, 19 nt, Artificial Sequence
  Description of Artificial Sequence: Synthetic oligonucleotide
aaauaagaagaaccucccc

SEQ ID NO: 1357883 - RNA, 19 nt, Artificial Sequence
  Description of Artificial Sequence: Synthetic oligonucleotide
aagaacauacaacacacga

SEQ ID NO: 1357884 - RNA, 19 nt, Artificial Sequence
  Description of Artificial Sequence: Synthetic oligonucleotide
uauggaauugucauuagac

SEQ ID NO: 1357885 - RNA, 19 nt, Artificial Sequence
  Description of Artificial Sequence: Synthetic oligonucleotide
uucuuaacagccaagagaa

SEQ ID NO: 1357886 - RNA, 19 nt, Artificial Sequence
  Description of Artificial Sequence: Synthetic oligonucleotide
uuucuuaacagccaagaga

SEQ ID NO: 1357887 - RNA, 19 nt, Artificial Sequence
  Description of Artificial Sequence: Synthetic oligonucleotide
aaucucuaauaauuuauug

SEQ ID NO: 1357888 - RNA, 19 nt, Artificial Sequence
  Description of Artificial Sequence: Synthetic oligonucleotide
ugagagagggauauuaugc

SEQ ID NO: 1357889 - RNA, 19 nt, Artificial Sequence
  Description of Artificial Sequence: Synthetic oligonucleotide
uauccuccaaauuauagcc

SEQ ID NO: 1357890 - RNA, 19 nt, Artificial Sequence
  Description of Artificial Sequence: Synthetic oligonucleotide
caaucagacacuuacacug

SEQ ID NO: 1357891 - RNA, 19 nt, Artificial Sequence
  Description of Artificial Sequence: Synthetic oligonucleotide
aauuacagcacugugagaa

SEQ ID NO: 1357892 - RNA, 19 nt, Artificial Sequence
  Description of Artificial Sequence: Synthetic oligonucleotide
aguacaacuagccuaaagu

SEQ ID NO: 1357893 - RNA, 19 nt, Artificial Sequence
  Description of Artificial Sequence: Synthetic oligonucleotide
auauuaugcagcucuaauc

SEQ ID NO: 1357894 - RNA, 19 nt, Artificial Sequence
  Description of Artificial Sequence: Synthetic oligonucleotide
aaagucacuuauaaauagc

SEQ ID NO: 1357895 - RNA, 19 nt, Artificial Sequence
  Description of Artificial Sequence: Synthetic oligonucleotide
guuucauagggugagaacg

SEQ ID NO: 1357896 - RNA, 19 nt, Artificial Sequence
  Description of Artificial Sequence: Synthetic oligonucleotide
aagagaagguuuaaaaguc

SEQ ID NO: 1357897 - RNA, 19 nt, Artificial Sequence
  Description of Artificial Sequence: Synthetic oligonucleotide
aauacaucgagggaccagg

SEQ ID NO: 1357898 - RNA, 19 nt, Artificial Sequence
  Description of Artificial Sequence: Synthetic oligonucleotide
agaacggucaaguagcaag

SEQ ID NO: 1357899 - RNA, 19 nt, Artificial Sequence
  Description of Artificial Sequence: Synthetic oligonucleotide
cuagccuaaaguacuaugg

SEQ ID NO: 1357900 - RNA, 19 nt, Artificial Sequence
  Description of Artificial Sequence: Synthetic oligonucleotide
uuagaauacaucgagggac

SEQ ID NO: 1357901 - RNA, 19 nt, Artificial Sequence
  Description of Artificial Sequence: Synthetic oligonucleotide
acuuacuuauggcacagac

SEQ ID NO: 1357902 - RNA, 19 nt, Artificial Sequence
  Description of Artificial Sequence: Synthetic oligonucleotide
aauguaaaggugguuaucu

SEQ ID NO: 1357903 - RNA, 19 nt, Artificial Sequence
  Description of Artificial Sequence: Synthetic oligonucleotide
uuguuauccguuucuacgg

SEQ ID NO: 1357904 - RNA, 19 nt, Artificial Sequence
  Description of Artificial Sequence: Synthetic oligonucleotide
uuauccuccaaauuauagc

SEQ ID NO: 1357905 - RNA, 19 nt, Artificial Sequence
  Description of Artificial Sequence: Synthetic oligonucleotide
ucuaaucacucuuauucag

SEQ ID NO: 1357906 - RNA, 19 nt, Artificial Sequence
  Description of Artificial Sequence: Synthetic oligonucleotide
ugugaauuguauuugcuuc

SEQ ID NO: 1357907 - RNA, 19 nt, Artificial Sequence
  Description of Artificial Sequence: Synthetic oligonucleotide
agugugagacguuucauag

SEQ ID NO: 1357908 - RNA, 19 nt, Artificial Sequence
  Description of Artificial Sequence: Synthetic oligonucleotide
uugucauuagacaaggcaa

SEQ ID NO: 1357909 - RNA, 19 nt, Artificial Sequence
  Description of Artificial Sequence: Synthetic oligonucleotide
aacauacgagcauccacac

SEQ ID NO: 1357910 - RNA, 19 nt, Artificial Sequence
  Description of Artificial Sequence: Synthetic oligonucleotide
uuugcaucguaaacuacag

SEQ ID NO: 1357911 - RNA, 19 nt, Artificial Sequence
  Description of Artificial Sequence: Synthetic oligonucleotide
auaaauagcuaaaaucuag

SEQ ID NO: 1357912 - RNA, 19 nt, Artificial Sequence
  Description of Artificial Sequence: Synthetic oligonucleotide
agagcgggagucuagaaag

SEQ ID NO: 1357913 - RNA, 19 nt, Artificial Sequence
  Description of Artificial Sequence: Synthetic oligonucleotide
agggauauuaugcagcucu

SEQ ID NO: 1357914 - RNA, 19 nt, Artificial Sequence
  Description of Artificial Sequence: Synthetic oligonucleotide
uuauuuugguccaacuaca

SEQ ID NO: 1357915 - RNA, 19 nt, Artificial Sequence
  Description of Artificial Sequence: Synthetic oligonucleotide
accauuauaccagaagugg

SEQ ID NO: 1357916 - RNA, 19 nt, Artificial Sequence
  Description of Artificial Sequence: Synthetic oligonucleotide
aaagcacgucaacagcuac

SEQ ID NO: 1357917 - RNA, 19 nt, Artificial Sequence
  Description of Artificial Sequence: Synthetic oligonucleotide
aaaaucucuaauaauuuau

SEQ ID NO: 1357918 - RNA, 19 nt, Artificial Sequence
  Description of Artificial Sequence: Synthetic oligonucleotide
gcuuagaauacaucgaggg

SEQ ID NO: 1357919 - RNA, 19 nt, Artificial Sequence
  Description of Artificial Sequence: Synthetic oligonucleotide
uacaacuagccuaaaguac

SEQ ID NO: 1357920 - RNA, 19 nt, Artificial Sequence
  Description of Artificial Sequence: Synthetic oligonucleotide
cuuacuuauggcacagacg

SEQ ID NO: 1357921 - RNA, 19 nt, Artificial Sequence
  Description of Artificial Sequence: Synthetic oligonucleotide
ugguacgugaaccacauau

SEQ ID NO: 1357922 - RNA, 19 nt, Artificial Sequence
  Description of Artificial Sequence: Synthetic oligonucleotide
aaaguacuaugguggagag

SEQ ID NO: 1357923 - RNA, 19 nt, Artificial Sequence
  Description of Artificial Sequence: Synthetic oligonucleotide
gguacaaucagacacuuac

SEQ ID NO: 1357924 - RNA, 19 nt, Artificial Sequence
  Description of Artificial Sequence: Synthetic oligonucleotide
aguacuaugguggagagaa

SEQ ID NO: 1357925 - RNA, 19 nt, Artificial Sequence
  Description of Artificial Sequence: Synthetic oligonucleotide
ugagacguuucauagggug

SEQ ID NO: 1357926 - RNA, 19 nt, Artificial Sequence
  Description of Artificial Sequence: Synthetic oligonucleotide
uucuacggcaaccagcuca

SEQ ID NO: 1357927 - RNA, 19 nt, Artificial Sequence
  Description of Artificial Sequence: Synthetic oligonucleotide
uucaaaaccgcaccccucc

SEQ ID NO: 1357928 - RNA, 19 nt, Artificial Sequence
  Description of Artificial Sequence: Synthetic oligonucleotide
gguuaucugucuuaaaucc

SEQ ID NO: 1357929 - RNA, 19 nt, Artificial Sequence
  Description of Artificial Sequence: Synthetic oligonucleotide
agcaaagcacgucaacagc

SEQ ID NO: 1357930 - RNA, 19 nt, Artificial Sequence
  Description of Artificial Sequence: Synthetic oligonucleotide
auaagaagaaccuccccug

SEQ ID NO: 1357931 - RNA, 19 nt, Artificial Sequence
  Description of Artificial Sequence: Synthetic oligonucleotide
agaaaguuccccugccagc

SEQ ID NO: 1357932 - RNA, 19 nt, Artificial Sequence
  Description of Artificial Sequence: Synthetic oligonucleotide
ugcuuagaauacaucgagg

SEQ ID NO: 1357933 - RNA, 19 nt, Artificial Sequence
  Description of Artificial Sequence: Synthetic oligonucleotide
ucuagaacacauuucuuaa

SEQ ID NO: 1357934 - RNA, 19 nt, Artificial Sequence
  Description of Artificial Sequence: Synthetic oligonucleotide
aaguacaacuagccuaaag

SEQ ID NO: 1357935 - RNA, 19 nt, Artificial Sequence
  Description of Artificial Sequence: Synthetic oligonucleotide
ugugcugugaauuguauuu

SEQ ID NO: 1357936 - RNA, 19 nt, Artificial Sequence
  Description of Artificial Sequence: Synthetic oligonucleotide
uagaauacaucgagggacc

SEQ ID NO: 1357937 - RNA, 19 nt, Artificial Sequence
  Description of Artificial Sequence: Synthetic oligonucleotide
acaaggcaaacacauucac

SEQ ID NO: 1357938 - RNA, 19 nt, Artificial Sequence
  Description of Artificial Sequence: Synthetic oligonucleotide
aaccuccccugucuuaugc

SEQ ID NO: 1357939 - RNA, 19 nt, Artificial Sequence
  Description of Artificial Sequence: Synthetic oligonucleotide
auuaugcagcucuaaucac

SEQ ID NO: 1357940 - RNA, 19 nt, Artificial Sequence
  Description of Artificial Sequence: Synthetic oligonucleotide
cacacgaacauuuucuaac

SEQ ID NO: 1357941 - RNA, 19 nt, Artificial Sequence
  Description of Artificial Sequence: Synthetic oligonucleotide
uaauuaauagaagauucaa

SEQ ID NO: 1357942 - RNA, 19 nt, Artificial Sequence
  Description of Artificial Sequence: Synthetic oligonucleotide
uaaucacucuuauucagac

SEQ ID NO: 1357943 - RNA, 19 nt, Artificial Sequence
  Description of Artificial Sequence: Synthetic oligonucleotide
agaacacauuucuuaacag

SEQ ID NO: 1357944 - RNA, 19 nt, Artificial Sequence
  Description of Artificial Sequence: Synthetic oligonucleotide
cauauucaauagcugagag

SEQ ID NO: 1357945 - RNA, 19 nt, Artificial Sequence
  Description of Artificial Sequence: Synthetic oligonucleotide
aacagcuacaaaaugugca

SEQ ID NO: 1357946 - RNA, 19 nt, Artificial Sequence
  Description of Artificial Sequence: Synthetic oligonucleotide
agcccaaaugccuacauca

SEQ ID NO: 1357947 - RNA, 19 nt, Artificial Sequence
  Description of Artificial Sequence: Synthetic oligonucleotide
cacauauucaauagcugag

SEQ ID NO: 1357948 - RNA, 19 nt, Artificial Sequence
  Description of Artificial Sequence: Synthetic oligonucleotide
aagucacuuauaaauagca

SEQ ID NO: 1357949 - RNA, 19 nt, Artificial Sequence
  Description of Artificial Sequence: Synthetic oligonucleotide
uguuauggaauugucauua

SEQ ID NO: 1357950 - RNA, 19 nt, Artificial Sequence
  Description of Artificial Sequence: Synthetic oligonucleotide
uuaugcagcucuaaucacu

SEQ ID NO: 1357951 - RNA, 19 nt, Artificial Sequence
  Description of Artificial Sequence: Synthetic oligonucleotide
aggguuugguacgugaacc

SEQ ID NO: 1357952 - RNA, 19 nt, Artificial Sequence
  Description of Artificial Sequence: Synthetic oligonucleotide
ugucaagccugagaaaagg

SEQ ID NO: 1357953 - RNA, 19 nt, Artificial Sequence
  Description of Artificial Sequence: Synthetic oligonucleotide
gacaaguacaacuagccua

SEQ ID NO: 1357954 - RNA, 19 nt, Artificial Sequence
  Description of Artificial Sequence: Synthetic oligonucleotide
aaugccuacaucaauuaaa

SEQ ID NO: 1357955 - RNA, 19 nt, Artificial Sequence
  Description of Artificial Sequence: Synthetic oligonucleotide
agagaaauguuauggaauu

SEQ ID NO: 1357956 - RNA, 19 nt, Artificial Sequence
  Description of Artificial Sequence: Synthetic oligonucleotide
gcucuaaucacucuuauuc

SEQ ID NO: 1357957 - RNA, 19 nt, Artificial Sequence
  Description of Artificial Sequence: Synthetic oligonucleotide
uaaaagagcgggagucuag

SEQ ID NO: 1357958 - RNA, 19 nt, Artificial Sequence
  Description of Artificial Sequence: Synthetic oligonucleotide
aucuagaacacauuucuua

SEQ ID NO: 1357959 - RNA, 19 nt, Artificial Sequence
  Description of Artificial Sequence: Synthetic oligonucleotide
uacgugaaccacauauuca

SEQ ID NO: 1357960 - RNA, 19 nt, Artificial Sequence
  Description of Artificial Sequence: Synthetic oligonucleotide
ucuugagacagauuugcau

SEQ ID NO: 1357961 - RNA, 19 nt, Artificial Sequence
  Description of Artificial Sequence: Synthetic oligonucleotide
auaauuuauugaccuucag

SEQ ID NO: 1357962 - RNA, 19 nt, Artificial Sequence
  Description of Artificial Sequence: Synthetic oligonucleotide
acggcuaaccaacaauguc

SEQ ID NO: 1357963 - RNA, 19 nt, Artificial Sequence
  Description of Artificial Sequence: Synthetic oligonucleotide
cugcuuagaauacaucgag

SEQ ID NO: 1357964 - RNA, 19 nt, Artificial Sequence
  Description of Artificial Sequence: Synthetic oligonucleotide
auuucaaaaccgcaccccu

SEQ ID NO: 1357965 - RNA, 19 nt, Artificial Sequence
  Description of Artificial Sequence: Synthetic oligonucleotide
aacggucaaguagcaagcc

SEQ ID NO: 1357966 - RNA, 19 nt, Artificial Sequence
  Description of Artificial Sequence: Synthetic oligonucleotide
gaacugacugccagaaugg

SEQ ID NO: 1357967 - RNA, 19 nt, Artificial Sequence
  Description of Artificial Sequence: Synthetic oligonucleotide
uuauugaccuucaguuuca

SEQ ID NO: 1357968 - RNA, 19 nt, Artificial Sequence
  Description of Artificial Sequence: Synthetic oligonucleotide
ucagacaggugucaagccu

SEQ ID NO: 1357969 - RNA, 19 nt, Artificial Sequence
  Description of Artificial Sequence: Synthetic oligonucleotide
uuggaaucugucucugucc

SEQ ID NO: 1357970 - RNA, 19 nt, Artificial Sequence
  Description of Artificial Sequence: Synthetic oligonucleotide
acuagccuaaaguacuaug

SEQ ID NO: 1357971 - RNA, 19 nt, Artificial Sequence
  Description of Artificial Sequence: Synthetic oligonucleotide
uacuuauccuccaaauuau

SEQ ID NO: 1357972 - RNA, 19 nt, Artificial Sequence
  Description of Artificial Sequence: Synthetic oligonucleotide
ugucccgacauuucaaaac

SEQ ID NO: 1357973 - RNA, 19 nt, Artificial Sequence
  Description of Artificial Sequence: Synthetic oligonucleotide
uaugcagcucuaaucacuc

SEQ ID NO: 1357974 - RNA, 19 nt, Artificial Sequence
  Description of Artificial Sequence: Synthetic oligonucleotide
uuugguacgugaaccacau

SEQ ID NO: 1357975 - RNA, 19 nt, Artificial Sequence
  Description of Artificial Sequence: Synthetic oligonucleotide
agccuaaaguacuauggug

SEQ ID NO: 1357976 - RNA, 19 nt, Artificial Sequence
  Description of Artificial Sequence: Synthetic oligonucleotide
gugagaacggucaaguagc

SEQ ID NO: 1357977 - RNA, 19 nt, Artificial Sequence
  Description of Artificial Sequence: Synthetic oligonucleotide
uguuauccguuucuacggc

SEQ ID NO: 1357978 - RNA, 19 nt, Artificial Sequence
  Description of Artificial Sequence: Synthetic oligonucleotide
cauucuucagucagccagg

SEQ ID NO: 1357979 - RNA, 19 nt, Artificial Sequence
  Description of Artificial Sequence: Synthetic oligonucleotide
ugcagaaaauccucccugc

SEQ ID NO: 1357980 - RNA, 19 nt, Artificial Sequence
  Description of Artificial Sequence: Synthetic oligonucleotide
ucuacuuauccuccaaauu

SEQ ID NO: 1357981 - RNA, 19 nt, Artificial Sequence
  Description of Artificial Sequence: Synthetic oligonucleotide
aaucacucuuauucagaca

SEQ ID NO: 1357982 - RNA, 19 nt, Artificial Sequence
  Description of Artificial Sequence: Synthetic oligonucleotide
uagcuaaaaucuagaacac

SEQ ID NO: 1357983 - RNA, 19 nt, Artificial Sequence
  Description of Artificial Sequence: Synthetic oligonucleotide
aguccugggguucccauuc

SEQ ID NO: 1357984 - RNA, 19 nt, Artificial Sequence
  Description of Artificial Sequence: Synthetic oligonucleotide
gccuaaaguacuauggugg

SEQ ID NO: 1357985 - RNA, 19 nt, Artificial Sequence
  Description of Artificial Sequence: Synthetic oligonucleotide
uagccuaaaguacuauggu

SEQ ID NO: 1357986 - RNA, 19 nt, Artificial Sequence
  Description of Artificial Sequence: Synthetic oligonucleotide
caagagaagguuuaaaagu

SEQ ID NO: 1357987 - RNA, 19 nt, Artificial Sequence
  Description of Artificial Sequence: Synthetic oligonucleotide
uaccaggguacaaucagac

SEQ ID NO: 1357988 - RNA, 19 nt, Artificial Sequence
  Description of Artificial Sequence: Synthetic oligonucleotide
agauuugcaucguaaacua

SEQ ID NO: 1357989 - RNA, 19 nt, Artificial Sequence
  Description of Artificial Sequence: Synthetic oligonucleotide
acaacuagccuaaaguacu

SEQ ID NO: 1357990 - RNA, 19 nt, Artificial Sequence
  Description of Artificial Sequence: Synthetic oligonucleotide
gucccgacauuucaaaacc

SEQ ID NO: 1357991 - RNA, 19 nt, Artificial Sequence
  Description of Artificial Sequence: Synthetic oligonucleotide
cacgucaacagcuacaaaa

SEQ ID NO: 1357992 - RNA, 19 nt, Artificial Sequence
  Description of Artificial Sequence: Synthetic oligonucleotide
cuacuuauccuccaaauua

SEQ ID NO: 1357993 - RNA, 19 nt, Artificial Sequence
  Description of Artificial Sequence: Synthetic oligonucleotide
aaggcugcccuuuguuauc

SEQ ID NO: 1357994 - RNA, 19 nt, Artificial Sequence
  Description of Artificial Sequence: Synthetic oligonucleotide
ucacucuuauucagacagg

SEQ ID NO: 1357995 - RNA, 19 nt, Artificial Sequence
  Description of Artificial Sequence: Synthetic oligonucleotide
ucccgacauuucaaaaccg

SEQ ID NO: 1357996 - RNA, 19 nt, Artificial Sequence
  Description of Artificial Sequence: Synthetic oligonucleotide
caaagagacaucuaaccaa

SEQ ID NO: 1357997 - RNA, 19 nt, Artificial Sequence
  Description of Artificial Sequence: Synthetic oligonucleotide
ucauuagacaaggcaaaca

SEQ ID NO: 1357998 - RNA, 19 nt, Artificial Sequence
  Description of Artificial Sequence: Synthetic oligonucleotide
aagugugagacguuucaua

SEQ ID NO: 1357999 - RNA, 19 nt, Artificial Sequence
  Description of Artificial Sequence: Synthetic oligonucleotide
aaaucucuaauaauuuauu

SEQ ID NO: 1358000 - RNA, 19 nt, Artificial Sequence
  Description of Artificial Sequence: Synthetic oligonucleotide
ccaagagaagguuuaaaag

SEQ ID NO: 1358001 - RNA, 19 nt, Artificial Sequence
  Description of Artificial Sequence: Synthetic oligonucleotide
cugugagaaauauggauca

SEQ ID NO: 1358002 - RNA, 19 nt, Artificial Sequence
  Description of Artificial Sequence: Synthetic oligonucleotide
aagagcgggagucuagaaa

SEQ ID NO: 1358003 - RNA, 19 nt, Artificial Sequence
  Description of Artificial Sequence: Synthetic oligonucleotide
cacccaguaauuaauagaa

SEQ ID NO: 1358004 - RNA, 19 nt, Artificial Sequence
  Description of Artificial Sequence: Synthetic oligonucleotide
guauuugcuucaaagugug

SEQ ID NO: 1358005 - RNA, 19 nt, Artificial Sequence
  Description of Artificial Sequence: Synthetic oligonucleotide
aaaguuccccugccagccg

SEQ ID NO: 1358006 - RNA, 19 nt, Artificial Sequence
  Description of Artificial Sequence: Synthetic oligonucleotide
guacgugaaccacauauuc

SEQ ID NO: 1358007 - RNA, 19 nt, Artificial Sequence
  Description of Artificial Sequence: Synthetic oligonucleotide
uccacuuacuuauggcaca

SEQ ID NO: 1358008 - RNA, 19 nt, Artificial Sequence
  Description of Artificial Sequence: Synthetic oligonucleotide
ucgaaacagcugcagaaaa

SEQ ID NO: 1358009 - RNA, 19 nt, Artificial Sequence
  Description of Artificial Sequence: Synthetic oligonucleotide
ucuacggcaaccagcucac

SEQ ID NO: 1358010 - RNA, 19 nt, Artificial Sequence
  Description of Artificial Sequence: Synthetic oligonucleotide
ucuaaccaaacggcuaacc

SEQ ID NO: 1358011 - RNA, 19 nt, Artificial Sequence
  Description of Artificial Sequence: Synthetic oligonucleotide
uuauccguuucuacggcaa

SEQ ID NO: 1358012 - RNA, 19 nt, Artificial Sequence
  Description of Artificial Sequence: Synthetic oligonucleotide
aaaagagcgggagucuaga

SEQ ID NO: 1358013 - RNA, 19 nt, Artificial Sequence
  Description of Artificial Sequence: Synthetic oligonucleotide
acaauguaaaggugguuau

SEQ ID NO: 1358014 - RNA, 19 nt, Artificial Sequence
  Description of Artificial Sequence: Synthetic oligonucleotide
ugaggacaacguaagcacu

SEQ ID NO: 1358015 - RNA, 19 nt, Artificial Sequence
  Description of Artificial Sequence: Synthetic oligonucleotide
gaaauguuauggaauuguc

SEQ ID NO: 1358016 - RNA, 19 nt, Artificial Sequence
  Description of Artificial Sequence: Synthetic oligonucleotide
gacggacaaguacaacuag

SEQ ID NO: 1358017 - RNA, 19 nt, Artificial Sequence
  Description of Artificial Sequence: Synthetic oligonucleotide
ccaaauuauagccccaaag

SEQ ID NO: 1358018 - RNA, 19 nt, Artificial Sequence
  Description of Artificial Sequence: Synthetic oligonucleotide
cucuuauucagacaggugu

SEQ ID NO: 1358019 - RNA, 19 nt, Artificial Sequence
  Description of Artificial Sequence: Synthetic oligonucleotide
aaguucuggucuuccccag

SEQ ID NO: 1358020 - RNA, 19 nt, Artificial Sequence
  Description of Artificial Sequence: Synthetic oligonucleotide
ucuaaguuuccgucuugga

SEQ ID NO: 1358021 - RNA, 19 nt, Artificial Sequence
  Description of Artificial Sequence: Synthetic oligonucleotide
ugguggagagaaauguuau

SEQ ID NO: 1358022 - RNA, 19 nt, Artificial Sequence
  Description of Artificial Sequence: Synthetic oligonucleotide
uauagccccaaaguuuuca

SEQ ID NO: 1358023 - RNA, 19 nt, Artificial Sequence
  Description of Artificial Sequence: Synthetic oligonucleotide
augcuaccaggguacaauc

SEQ ID NO: 1358024 - RNA, 19 nt, Artificial Sequence
  Description of Artificial Sequence: Synthetic oligonucleotide
uuauggcacagacggacaa

SEQ ID NO: 1358025 - RNA, 19 nt, Artificial Sequence
  Description of Artificial Sequence: Synthetic oligonucleotide
uacuaugguggagagaaau

SEQ ID NO: 1358026 - RNA, 19 nt, Artificial Sequence
  Description of Artificial Sequence: Synthetic oligonucleotide
acacuuacacugcuuagaa

SEQ ID NO: 1358027 - RNA, 19 nt, Artificial Sequence
  Description of Artificial Sequence: Synthetic oligonucleotide
ggaauugucauuagacaag

SEQ ID NO: 1358028 - RNA, 19 nt, Artificial Sequence
  Description of Artificial Sequence: Synthetic oligonucleotide
auuauagccccaaaguuuu

SEQ ID NO: 1358029 - RNA, 19 nt, Artificial Sequence
  Description of Artificial Sequence: Synthetic oligonucleotide
gaacggucaaguagcaagc

SEQ ID NO: 1358030 - RNA, 19 nt, Artificial Sequence
  Description of Artificial Sequence: Synthetic oligonucleotide
uacaggguuugguacguga

SEQ ID NO: 1358031 - RNA, 19 nt, Artificial Sequence
  Description of Artificial Sequence: Synthetic oligonucleotide
agacacuuacacugcuuag

SEQ ID NO: 1358032 - RNA, 19 nt, Artificial Sequence
  Description of Artificial Sequence: Synthetic oligonucleotide
uccaacuacaguccacuua

SEQ ID NO: 1358033 - RNA, 19 nt, Artificial Sequence
  Description of Artificial Sequence: Synthetic oligonucleotide
ccaacuacaguccacuuac

SEQ ID NO: 1358034 - RNA, 19 nt, Artificial Sequence
  Description of Artificial Sequence: Synthetic oligonucleotide
ucaaagugugagacguuuc

SEQ ID NO: 1358035 - RNA, 19 nt, Artificial Sequence
  Description of Artificial Sequence: Synthetic oligonucleotide
acuucgaaacagcugcaga

SEQ ID NO: 1358036 - RNA, 19 nt, Artificial Sequence
  Description of Artificial Sequence: Synthetic oligonucleotide
ucaauagcugagagaggga

SEQ ID NO: 1358037 - RNA, 19 nt, Artificial Sequence
  Description of Artificial Sequence: Synthetic oligonucleotide
cuaaucacucuuauucaga

SEQ ID NO: 1358038 - RNA, 19 nt, Artificial Sequence
  Description of Artificial Sequence: Synthetic oligonucleotide
uccgucuuggaaucugucu

SEQ ID NO: 1358039 - RNA, 19 nt, Artificial Sequence
  Description of Artificial Sequence: Synthetic oligonucleotide
gucuagaaaguuccccugc

SEQ ID NO: 1358040 - RNA, 19 nt, Artificial Sequence
  Description of Artificial Sequence: Synthetic oligonucleotide
gauauuaugcagcucuaau

SEQ ID NO: 1358041 - RNA, 19 nt, Artificial Sequence
  Description of Artificial Sequence: Synthetic oligonucleotide
auuaaaagagcgggagucu

SEQ ID NO: 1358042 - RNA, 19 nt, Artificial Sequence
  Description of Artificial Sequence: Synthetic oligonucleotide
ugccuacaucaauuaaaag

SEQ ID NO: 1358043 - RNA, 19 nt, Artificial Sequence
  Description of Artificial Sequence: Synthetic oligonucleotide
cuuagaauacaucgaggga

SEQ ID NO: 1358044 - RNA, 19 nt, Artificial Sequence
  Description of Artificial Sequence: Synthetic oligonucleotide
auucuucagucagccaggc

SEQ ID NO: 1358045 - RNA, 19 nt, Artificial Sequence
  Description of Artificial Sequence: Synthetic oligonucleotide
uuucaaaaccgcaccccuc

SEQ ID NO: 1358046 - RNA, 19 nt, Artificial Sequence
  Description of Artificial Sequence: Synthetic oligonucleotide
gaggacaacguaagcacug

SEQ ID NO: 1358047 - RNA, 19 nt, Artificial Sequence
  Description of Artificial Sequence: Synthetic oligonucleotide
aacuucuacaggguuuggu

SEQ ID NO: 1358048 - RNA, 19 nt, Artificial Sequence
  Description of Artificial Sequence: Synthetic oligonucleotide
ugcuaccaggguacaauca

SEQ ID NO: 1358049 - RNA, 19 nt, Artificial Sequence
  Description of Artificial Sequence: Synthetic oligonucleotide
caguccacuuacuuauggc

SEQ ID NO: 1358050 - RNA, 19 nt, Artificial Sequence
  Description of Artificial Sequence: Synthetic oligonucleotide
cuaaguuuccgucuuggaa

SEQ ID NO: 1358051 - RNA, 19 nt, Artificial Sequence
  Description of Artificial Sequence: Synthetic oligonucleotide
cuucgaaacagcugcagaa

SEQ ID NO: 1358052 - RNA, 19 nt, Artificial Sequence
  Description of Artificial Sequence: Synthetic oligonucleotide
ugagaacggucaaguagca

SEQ ID NO: 1358053 - RNA, 19 nt, Artificial Sequence
  Description of Artificial Sequence: Synthetic oligonucleotide
ucugucccgacauuucaaa

SEQ ID NO: 1358054 - RNA, 19 nt, Artificial Sequence
  Description of Artificial Sequence: Synthetic oligonucleotide
cauuucuuaacagccaaga

SEQ ID NO: 1358055 - RNA, 19 nt, Artificial Sequence
  Description of Artificial Sequence: Synthetic oligonucleotide
uaaccaacaauguccccau

SEQ ID NO: 1358056 - RNA, 19 nt, Artificial Sequence
  Description of Artificial Sequence: Synthetic oligonucleotide
gacacuuacacugcuuaga

SEQ ID NO: 1358057 - RNA, 19 nt, Artificial Sequence
  Description of Artificial Sequence: Synthetic oligonucleotide
uacggcaaccagcucacaa

SEQ ID NO: 1358058 - RNA, 19 nt, Artificial Sequence
  Description of Artificial Sequence: Synthetic oligonucleotide
gaauacaucgagggaccag

SEQ ID NO: 1358059 - RNA, 19 nt, Artificial Sequence
  Description of Artificial Sequence: Synthetic oligonucleotide
uucaaagugugagacguuu

SEQ ID NO: 1358060 - RNA, 19 nt, Artificial Sequence
  Description of Artificial Sequence: Synthetic oligonucleotide
agcaugcaggcugcaaacc

SEQ ID NO: 1358061 - RNA, 19 nt, Artificial Sequence
  Description of Artificial Sequence: Synthetic oligonucleotide
gcuaccaggguacaaucag

SEQ ID NO: 1358062 - RNA, 19 nt, Artificial Sequence
  Description of Artificial Sequence: Synthetic oligonucleotide
accgcuaccccuucaagau

SEQ ID NO: 1358063 - RNA, 19 nt, Artificial Sequence
  Description of Artificial Sequence: Synthetic oligonucleotide
caagcucaguccucagagg

SEQ ID NO: 1358064 - RNA, 19 nt, Artificial Sequence
  Description of Artificial Sequence: Synthetic oligonucleotide
acugcuuagaauacaucga

SEQ ID NO: 1358065 - RNA, 19 nt, Artificial Sequence
  Description of Artificial Sequence: Synthetic oligonucleotide
uuaaaagagcgggagucua

SEQ ID NO: 1358066 - RNA, 19 nt, Artificial Sequence
  Description of Artificial Sequence: Synthetic oligonucleotide
cagaaaauccucccugcuc

SEQ ID NO: 1358067 - RNA, 19 nt, Artificial Sequence
  Description of Artificial Sequence: Synthetic oligonucleotide
uugguccaacuacagucca

SEQ ID NO: 1358068 - RNA, 19 nt, Artificial Sequence
  Description of Artificial Sequence: Synthetic oligonucleotide
aaagagcgggagucuagaa

SEQ ID NO: 1358069 - RNA, 19 nt, Artificial Sequence
  Description of Artificial Sequence: Synthetic oligonucleotide
ugaauuguauuugcuucaa

SEQ ID NO: 1358070 - RNA, 19 nt, Artificial Sequence
  Description of Artificial Sequence: Synthetic oligonucleotide
guaaucuaaguuuccgucu

SEQ ID NO: 1358071 - RNA, 19 nt, Artificial Sequence
  Description of Artificial Sequence: Synthetic oligonucleotide
uccaaauuauagccccaaa

SEQ ID NO: 1358072 - RNA, 19 nt, Artificial Sequence
  Description of Artificial Sequence: Synthetic oligonucleotide
ucaaaaccgcaccccuccc

SEQ ID NO: 1358073 - RNA, 19 nt, Artificial Sequence
  Description of Artificial Sequence: Synthetic oligonucleotide
uauuugcuucaaaguguga

SEQ ID NO: 1358074 - RNA, 19 nt, Artificial Sequence
  Description of Artificial Sequence: Synthetic oligonucleotide
uugcaucguaaacuacaga

SEQ ID NO: 1358075 - RNA, 19 nt, Artificial Sequence
  Description of Artificial Sequence: Synthetic oligonucleotide
uucgaaacagcugcagaaa

SEQ ID NO: 1358076 - RNA, 19 nt, Artificial Sequence
  Description of Artificial Sequence: Synthetic oligonucleotide
cccaguaauuaauagaaga

SEQ ID NO: 1358077 - RNA, 19 nt, Artificial Sequence
  Description of Artificial Sequence: Synthetic oligonucleotide
auacaacacacgaacauuu

SEQ ID NO: 1358078 - RNA, 19 nt, Artificial Sequence
  Description of Artificial Sequence: Synthetic oligonucleotide
uccccugucuuaugccagg

SEQ ID NO: 1358079 - RNA, 19 nt, Artificial Sequence
  Description of Artificial Sequence: Synthetic oligonucleotide
ugcaaaccauaaauagcua

SEQ ID NO: 1358080 - RNA, 19 nt, Artificial Sequence
  Description of Artificial Sequence: Synthetic oligonucleotide
gaccgcuaccccuucaaga

SEQ ID NO: 1358081 - RNA, 19 nt, Artificial Sequence
  Description of Artificial Sequence: Synthetic oligonucleotide
uuacagcacugugagaaau

SEQ ID NO: 1358082 - RNA, 19 nt, Artificial Sequence
  Description of Artificial Sequence: Synthetic oligonucleotide
uauccguuucuacggcaac

SEQ ID NO: 1358083 - RNA, 19 nt, Artificial Sequence
  Description of Artificial Sequence: Synthetic oligonucleotide
accccuucaagaugagcug

SEQ ID NO: 1358084 - RNA, 19 nt, Artificial Sequence
  Description of Artificial Sequence: Synthetic oligonucleotide
uuauucagacaggugucaa

SEQ ID NO: 1358085 - RNA, 19 nt, Artificial Sequence
  Description of Artificial Sequence: Synthetic oligonucleotide
guaaacuacagagcuggga

SEQ ID NO: 1358086 - RNA, 19 nt, Artificial Sequence
  Description of Artificial Sequence: Synthetic oligonucleotide
acacacgaacauuuucuaa

SEQ ID NO: 1358087 - RNA, 19 nt, Artificial Sequence
  Description of Artificial Sequence: Synthetic oligonucleotide
cggcuaaccaacaaugucc

SEQ ID NO: 1358088 - RNA, 19 nt, Artificial Sequence
  Description of Artificial Sequence: Synthetic oligonucleotide
caaaaccgcaccccucccc

SEQ ID NO: 1358089 - RNA, 19 nt, Artificial Sequence
  Description of Artificial Sequence: Synthetic oligonucleotide
caucuaaccaaacggcuaa

SEQ ID NO: 1358090 - RNA, 19 nt, Artificial Sequence
  Description of Artificial Sequence: Synthetic oligonucleotide
ggcacagacggacaaguac

SEQ ID NO: 1358091 - RNA, 19 nt, Artificial Sequence
  Description of Artificial Sequence: Synthetic oligonucleotide
uucaagggcaggccacaac

SEQ ID NO: 1358092 - RNA, 19 nt, Artificial Sequence
  Description of Artificial Sequence: Synthetic oligonucleotide
agggugagaacggucaagu

SEQ ID NO: 1358093 - RNA, 19 nt, Artificial Sequence
  Description of Artificial Sequence: Synthetic oligonucleotide
ugccucugggauguaaucu

SEQ ID NO: 1358094 - RNA, 19 nt, Artificial Sequence
  Description of Artificial Sequence: Synthetic oligonucleotide
uacaucgagggaccaggaa

SEQ ID NO: 1358095 - RNA, 19 nt, Artificial Sequence
  Description of Artificial Sequence: Synthetic oligonucleotide
cuacaguccacuuacuuau

SEQ ID NO: 1358096 - RNA, 19 nt, Artificial Sequence
  Description of Artificial Sequence: Synthetic oligonucleotide
uacuuauggcacagacgga

SEQ ID NO: 1358097 - RNA, 19 nt, Artificial Sequence
  Description of Artificial Sequence: Synthetic oligonucleotide
aaaaggggcuccaccauua

SEQ ID NO: 1358098 - RNA, 19 nt, Artificial Sequence
  Description of Artificial Sequence: Synthetic oligonucleotide
auuacagcacugugagaaa

SEQ ID NO: 1358099 - RNA, 19 nt, Artificial Sequence
  Description of Artificial Sequence: Synthetic oligonucleotide
uucuucagucagccaggcc

SEQ ID NO: 1358100 - RNA, 19 nt, Artificial Sequence
  Description of Artificial Sequence: Synthetic oligonucleotide
guuauccguuucuacggca

SEQ ID NO: 1358101 - RNA, 19 nt, Artificial Sequence
  Description of Artificial Sequence: Synthetic oligonucleotide
acggcaaccagcucacaaa

SEQ ID NO: 1358102 - RNA, 19 nt, Artificial Sequence
  Description of Artificial Sequence: Synthetic oligonucleotide
uagggugagaacggucaag

SEQ ID NO: 1358103 - RNA, 19 nt, Artificial Sequence
  Description of Artificial Sequence: Synthetic oligonucleotide
cacauuucuuaacagccaa

SEQ ID NO: 1358104 - RNA, 19 nt, Artificial Sequence
  Description of Artificial Sequence: Synthetic oligonucleotide
ggcuccaccauuauaccag

SEQ ID NO: 1358105 - RNA, 19 nt, Artificial Sequence
  Description of Artificial Sequence: Synthetic oligonucleotide
ccacauauucaauagcuga

SEQ ID NO: 1358106 - RNA, 19 nt, Artificial Sequence
  Description of Artificial Sequence: Synthetic oligonucleotide
auagccccaaaguuuucau

SEQ ID NO: 1358107 - RNA, 19 nt, Artificial Sequence
  Description of Artificial Sequence: Synthetic oligonucleotide
aucuaaccaaacggcuaac

SEQ ID NO: 1358108 - RNA, 19 nt, Artificial Sequence
  Description of Artificial Sequence: Synthetic oligonucleotide
guccacuuacuuauggcac

SEQ ID NO: 1358109 - RNA, 19 nt, Artificial Sequence
  Description of Artificial Sequence: Synthetic oligonucleotide
gcaaaccauaaauagcuaa

SEQ ID NO: 1358110 - RNA, 19 nt, Artificial Sequence
  Description of Artificial Sequence: Synthetic oligonucleotide
uagcaagcccaaaugccua

SEQ ID NO: 1358111 - RNA, 19 nt, Artificial Sequence
  Description of Artificial Sequence: Synthetic oligonucleotide
gacaacguaagcacugucu

SEQ ID NO: 1358112 - RNA, 19 nt, Artificial Sequence
  Description of Artificial Sequence: Synthetic oligonucleotide
aagcacgucaacagcuaca

SEQ ID NO: 1358113 - RNA, 19 nt, Artificial Sequence
  Description of Artificial Sequence: Synthetic oligonucleotide
ggagucuagaaaguucccc

SEQ ID NO: 1358114 - RNA, 19 nt, Artificial Sequence
  Description of Artificial Sequence: Synthetic oligonucleotide
cggacaaguacaacuagcc

SEQ ID NO: 1358115 - RNA, 19 nt, Artificial Sequence
  Description of Artificial Sequence: Synthetic oligonucleotide
cgagcauccacacacgccc

SEQ ID NO: 1358116 - RNA, 19 nt, Artificial Sequence
  Description of Artificial Sequence: Synthetic oligonucleotide
cucaguccucagaggaagc

SEQ ID NO: 1358117 - RNA, 19 nt, Artificial Sequence
  Description of Artificial Sequence: Synthetic oligonucleotide
cagauuugcaucguaaacu

SEQ ID NO: 1358118 - RNA, 19 nt, Artificial Sequence
  Description of Artificial Sequence: Synthetic oligonucleotide
gccaagagaagguuuaaaa

SEQ ID NO: 1358119 - RNA, 19 nt, Artificial Sequence
  Description of Artificial Sequence: Synthetic oligonucleotide
ugguccaacuacaguccac

SEQ ID NO: 1358120 - RNA, 19 nt, Artificial Sequence
  Description of Artificial Sequence: Synthetic oligonucleotide
aacuagccuaaaguacuau

SEQ ID NO: 1358121 - RNA, 19 nt, Artificial Sequence
  Description of Artificial Sequence: Synthetic oligonucleotide
aauagcugagagagggaua

SEQ ID NO: 1358122 - RNA, 19 nt, Artificial Sequence
  Description of Artificial Sequence: Synthetic oligonucleotide
caggguuugguacgugaac

SEQ ID NO: 1358123 - RNA, 19 nt, Artificial Sequence
  Description of Artificial Sequence: Synthetic oligonucleotide
cuuauggcacagacggaca

SEQ ID NO: 1358124 - RNA, 19 nt, Artificial Sequence
  Description of Artificial Sequence: Synthetic oligonucleotide
agcugagagagggauauua

SEQ ID NO: 1358125 - RNA, 19 nt, Artificial Sequence
  Description of Artificial Sequence: Synthetic oligonucleotide
ugucuuaugccaggguuuu

SEQ ID NO: 1358126 - RNA, 19 nt, Artificial Sequence
  Description of Artificial Sequence: Synthetic oligonucleotide
gacaucuaaccaaacggcu

SEQ ID NO: 1358127 - RNA, 19 nt, Artificial Sequence
  Description of Artificial Sequence: Synthetic oligonucleotide
agcacgucaacagcuacaa

SEQ ID NO: 1358128 - RNA, 19 nt, Artificial Sequence
  Description of Artificial Sequence: Synthetic oligonucleotide
ggcuaaccaacaauguccc

SEQ ID NO: 1358129 - RNA, 19 nt, Artificial Sequence
  Description of Artificial Sequence: Synthetic oligonucleotide
aaguacuaugguggagaga

SEQ ID NO: 1358130 - RNA, 19 nt, Artificial Sequence
  Description of Artificial Sequence: Synthetic oligonucleotide
gaaggcugcccuuuguuau

SEQ ID NO: 1358131 - RNA, 19 nt, Artificial Sequence
  Description of Artificial Sequence: Synthetic oligonucleotide
caauguaaaggugguuauc

SEQ ID NO: 1358132 - RNA, 19 nt, Artificial Sequence
  Description of Artificial Sequence: Synthetic oligonucleotide
guuuccgucuuggaaucug

SEQ ID NO: 1358133 - RNA, 19 nt, Artificial Sequence
  Description of Artificial Sequence: Synthetic oligonucleotide
gaagugcccacuguuucuc

SEQ ID NO: 1358134 - RNA, 19 nt, Artificial Sequence
  Description of Artificial Sequence: Synthetic oligonucleotide
cccgacauuucaaaaccgc

SEQ ID NO: 1358135 - RNA, 19 nt, Artificial Sequence
  Description of Artificial Sequence: Synthetic oligonucleotide
uuauagccccaaaguuuuc

SEQ ID NO: 1358136 - RNA, 19 nt, Artificial Sequence
  Description of Artificial Sequence: Synthetic oligonucleotide
uaacuucuacaggguuugg

SEQ ID NO: 1358137 - RNA, 19 nt, Artificial Sequence
  Description of Artificial Sequence: Synthetic oligonucleotide
gaguugcaaguucuggucu

SEQ ID NO: 1358138 - RNA, 19 nt, Artificial Sequence
  Description of Artificial Sequence: Synthetic oligonucleotide
acccaguaauuaauagaag

SEQ ID NO: 1358139 - RNA, 19 nt, Artificial Sequence
  Description of Artificial Sequence: Synthetic oligonucleotide
ugagacagauuugcaucgu

SEQ ID NO: 1358140 - RNA, 19 nt, Artificial Sequence
  Description of Artificial Sequence: Synthetic oligonucleotide
acucuuauucagacaggug

SEQ ID NO: 1358141 - RNA, 19 nt, Artificial Sequence
  Description of Artificial Sequence: Synthetic oligonucleotide
acaucuaaccaaacggcua

SEQ ID NO: 1358142 - RNA, 19 nt, Artificial Sequence
  Description of Artificial Sequence: Synthetic oligonucleotide
cuaccaggguacaaucaga

SEQ ID NO: 1358143 - RNA, 19 nt, Artificial Sequence
  Description of Artificial Sequence: Synthetic oligonucleotide
ugcccuuuguuauccguuu

SEQ ID NO: 1358144 - RNA, 19 nt, Artificial Sequence
  Description of Artificial Sequence: Synthetic oligonucleotide
cagacacuuacacugcuua

SEQ ID NO: 1358145 - RNA, 19 nt, Artificial Sequence
  Description of Artificial Sequence: Synthetic oligonucleotide
cacuggccaugcuaccagg

SEQ ID NO: 1358146 - RNA, 19 nt, Artificial Sequence
  Description of Artificial Sequence: Synthetic oligonucleotide
agcucuaaucacucuuauu

SEQ ID NO: 1358147 - RNA, 19 nt, Artificial Sequence
  Description of Artificial Sequence: Synthetic oligonucleotide
guacaaucagacacuuaca

SEQ ID NO: 1358148 - RNA, 19 nt, Artificial Sequence
  Description of Artificial Sequence: Synthetic oligonucleotide
cguuucuacggcaaccagc

SEQ ID NO: 1358149 - RNA, 19 nt, Artificial Sequence
  Description of Artificial Sequence: Synthetic oligonucleotide
cgacauuucaaaaccgcac

SEQ ID NO: 1358150 - RNA, 19 nt, Artificial Sequence
  Description of Artificial Sequence: Synthetic oligonucleotide
agaauacaucgagggacca

SEQ ID NO: 1358151 - RNA, 19 nt, Artificial Sequence
  Description of Artificial Sequence: Synthetic oligonucleotide
acguuucauagggugagaa

SEQ ID NO: 1358152 - RNA, 19 nt, Artificial Sequence
  Description of Artificial Sequence: Synthetic oligonucleotide
gagcauccacacacgcccg

SEQ ID NO: 1358153 - RNA, 19 nt, Artificial Sequence
  Description of Artificial Sequence: Synthetic oligonucleotide
caucgagggaccaggaacu

SEQ ID NO: 1358154 - RNA, 19 nt, Artificial Sequence
  Description of Artificial Sequence: Synthetic oligonucleotide
ccuuccugacccaugcuug

SEQ ID NO: 1358155 - RNA, 19 nt, Artificial Sequence
  Description of Artificial Sequence: Synthetic oligonucleotide
cuaaaaucuagaacacauu

SEQ ID NO: 1358156 - RNA, 19 nt, Artificial Sequence
  Description of Artificial Sequence: Synthetic oligonucleotide
aggacaacguaagcacugu

SEQ ID NO: 1358157 - RNA, 19 nt, Artificial Sequence
  Description of Artificial Sequence: Synthetic oligonucleotide
cagaguugcaaguucuggu

SEQ ID NO: 1358158 - RNA, 19 nt, Artificial Sequence
  Description of Artificial Sequence: Synthetic oligonucleotide
gcacagacggacaaguaca

SEQ ID NO: 1358159 - RNA, 19 nt, Artificial Sequence
  Description of Artificial Sequence: Synthetic oligonucleotide
caaacggcuaaccaacaau

SEQ ID NO: 1358160 - RNA, 19 nt, Artificial Sequence
  Description of Artificial Sequence: Synthetic oligonucleotide
cuaccccuucaagaugagc

SEQ ID NO: 1358161 - RNA, 19 nt, Artificial Sequence
  Description of Artificial Sequence: Synthetic oligonucleotide
ccuaaaguacuauggugga

SEQ ID NO: 1358162 - RNA, 19 nt, Artificial Sequence
  Description of Artificial Sequence: Synthetic oligonucleotide
cugugaauuguauuugcuu

SEQ ID NO: 1358163 - RNA, 19 nt, Artificial Sequence
  Description of Artificial Sequence: Synthetic oligonucleotide
uuucuacggcaaccagcuc

SEQ ID NO: 1358164 - RNA, 19 nt, Artificial Sequence
  Description of Artificial Sequence: Synthetic oligonucleotide
guaagcacugucucagcau

SEQ ID NO: 1358165 - RNA, 19 nt, Artificial Sequence
  Description of Artificial Sequence: Synthetic oligonucleotide
gccacaacuucgaaacagc

SEQ ID NO: 1358166 - RNA, 19 nt, Artificial Sequence
  Description of Artificial Sequence: Synthetic oligonucleotide
ccaguaauuaauagaagau

SEQ ID NO: 1358167 - RNA, 19 nt, Artificial Sequence
  Description of Artificial Sequence: Synthetic oligonucleotide
ccacccaguaauuaauaga

SEQ ID NO: 1358168 - RNA, 19 nt, Artificial Sequence
  Description of Artificial Sequence: Synthetic oligonucleotide
gguuugguacgugaaccac

SEQ ID NO: 1358169 - RNA, 19 nt, Artificial Sequence
  Description of Artificial Sequence: Synthetic oligonucleotide
uggcacagacggacaagua

SEQ ID NO: 1358170 - RNA, 19 nt, Artificial Sequence
  Description of Artificial Sequence: Synthetic oligonucleotide
cacacgcccgcacacguga

SEQ ID NO: 1358171 - RNA, 19 nt, Artificial Sequence
  Description of Artificial Sequence: Synthetic oligonucleotide
ggguuugguacgugaacca

SEQ ID NO: 1358172 - RNA, 19 nt, Artificial Sequence
  Description of Artificial Sequence: Synthetic oligonucleotide
caggguacaaucagacacu

SEQ ID NO: 1358173 - RNA, 19 nt, Artificial Sequence
  Description of Artificial Sequence: Synthetic oligonucleotide
acaggguuugguacgugaa

SEQ ID NO: 1358174 - RNA, 19 nt, Artificial Sequence
  Description of Artificial Sequence: Synthetic oligonucleotide
cugggauguaaucuaaguu

SEQ ID NO: 1358175 - RNA, 19 nt, Artificial Sequence
  Description of Artificial Sequence: Synthetic oligonucleotide
cacucuuauucagacaggu

SEQ ID NO: 1358176 - RNA, 19 nt, Artificial Sequence
  Description of Artificial Sequence: Synthetic oligonucleotide
cacgcccgcacacgugagg

SEQ ID NO: 1358177 - RNA, 19 nt, Artificial Sequence
  Description of Artificial Sequence: Synthetic oligonucleotide
aaccaacaauguccccauu

SEQ ID NO: 1358178 - RNA, 19 nt, Artificial Sequence
  Description of Artificial Sequence: Synthetic oligonucleotide
aggccacaacuucgaaaca

SEQ ID NO: 1358179 - RNA, 19 nt, Artificial Sequence
  Description of Artificial Sequence: Synthetic oligonucleotide
caacuagccuaaaguacua

SEQ ID NO: 1358180 - RNA, 19 nt, Artificial Sequence
  Description of Artificial Sequence: Synthetic oligonucleotide
auacaucgagggaccagga

SEQ ID NO: 1358181 - RNA, 19 nt, Artificial Sequence
  Description of Artificial Sequence: Synthetic oligonucleotide
aucgagggaccaggaacug

SEQ ID NO: 1358182 - RNA, 19 nt, Artificial Sequence
  Description of Artificial Sequence: Synthetic oligonucleotide
agcgggagucuagaaaguu

SEQ ID NO: 1358183 - RNA, 19 nt, Artificial Sequence
  Description of Artificial Sequence: Synthetic oligonucleotide
caauagcugagagagggau

SEQ ID NO: 1358184 - RNA, 19 nt, Artificial Sequence
  Description of Artificial Sequence: Synthetic oligonucleotide
accaaacggcuaaccaaca

SEQ ID NO: 1358185 - RNA, 19 nt, Artificial Sequence
  Description of Artificial Sequence: Synthetic oligonucleotide
ggccaugcuaccaggguac

SEQ ID NO: 1358186 - RNA, 19 nt, Artificial Sequence
  Description of Artificial Sequence: Synthetic oligonucleotide
cugucccgacauuucaaaa

SEQ ID NO: 1358187 - RNA, 19 nt, Artificial Sequence
  Description of Artificial Sequence: Synthetic oligonucleotide
cacacgugaggacaacgua

SEQ ID NO: 1358188 - RNA, 19 nt, Artificial Sequence
  Description of Artificial Sequence: Synthetic oligonucleotide
gcuaaccaacaaugucccc

SEQ ID NO: 1358189 - RNA, 19 nt, Artificial Sequence
  Description of Artificial Sequence: Synthetic oligonucleotide
ggacaaguacaacuagccu

SEQ ID NO: 1358190 - RNA, 19 nt, Artificial Sequence
  Description of Artificial Sequence: Synthetic oligonucleotide
acgcccgcacacgugagga

SEQ ID NO: 1358191 - RNA, 19 nt, Artificial Sequence
  Description of Artificial Sequence: Synthetic oligonucleotide
gacguuucauagggugaga

SEQ ID NO: 1358192 - RNA, 19 nt, Artificial Sequence
  Description of Artificial Sequence: Synthetic oligonucleotide
cguuucauagggugagaac

SEQ ID NO: 1358193 - RNA, 19 nt, Artificial Sequence
  Description of Artificial Sequence: Synthetic oligonucleotide
gaagaaccuccccugucuu

SEQ ID NO: 1358194 - RNA, 19 nt, Artificial Sequence
  Description of Artificial Sequence: Synthetic oligonucleotide
ggaccgcuaccccuucaag

SEQ ID NO: 1358195 - RNA, 19 nt, Artificial Sequence
  Description of Artificial Sequence: Synthetic oligonucleotide
caugcuaccaggguacaau

SEQ ID NO: 1358196 - RNA, 19 nt, Artificial Sequence
  Description of Artificial Sequence: Synthetic oligonucleotide
uugguacgugaaccacaua

SEQ ID NO: 1358197 - RNA, 19 nt, Artificial Sequence
  Description of Artificial Sequence: Synthetic oligonucleotide
ggaaggcugcccuuuguua

SEQ ID NO: 1358198 - RNA, 19 nt, Artificial Sequence
  Description of Artificial Sequence: Synthetic oligonucleotide
aguuccccugccagccggg

SEQ ID NO: 1358199 - RNA, 19 nt, Artificial Sequence
  Description of Artificial Sequence: Synthetic oligonucleotide
ccauuguucacaggcguuc

SEQ ID NO: 1358200 - RNA, 19 nt, Artificial Sequence
  Description of Artificial Sequence: Synthetic oligonucleotide
ggauauuaugcagcucuaa

SEQ ID NO: 1358201 - RNA, 19 nt, Artificial Sequence
  Description of Artificial Sequence: Synthetic oligonucleotide
gagaacggucaaguagcaa

SEQ ID NO: 1358202 - RNA, 19 nt, Artificial Sequence
  Description of Artificial Sequence: Synthetic oligonucleotide
ccacuuacuuauggcacag

SEQ ID NO: 1358203 - RNA, 19 nt, Artificial Sequence
  Description of Artificial Sequence: Synthetic oligonucleotide
cugucuuaugccaggguuu

SEQ ID NO: 1358204 - RNA, 19 nt, Artificial Sequence
  Description of Artificial Sequence: Synthetic oligonucleotide
cgugaggacaacguaagca

SEQ ID NO: 1358205 - RNA, 19 nt, Artificial Sequence
  Description of Artificial Sequence: Synthetic oligonucleotide
auucaagggcaggccacaa

SEQ ID NO: 1358206 - RNA, 19 nt, Artificial Sequence
  Description of Artificial Sequence: Synthetic oligonucleotide
gcaggccacaacuucgaaa

SEQ ID NO: 1358207 - RNA, 19 nt, Artificial Sequence
  Description of Artificial Sequence: Synthetic oligonucleotide
ccgcccucuacuuauccuc

SEQ ID NO: 1358208 - RNA, 19 nt, Artificial Sequence
  Description of Artificial Sequence: Synthetic oligonucleotide
gggagucuagaaaguuccc

SEQ ID NO: 1358209 - RNA, 19 nt, Artificial Sequence
  Description of Artificial Sequence: Synthetic oligonucleotide
gguccaacuacaguccacu

SEQ ID NO: 1358210 - RNA, 19 nt, Artificial Sequence
  Description of Artificial Sequence: Synthetic oligonucleotide
cuacaggguuugguacgug

SEQ ID NO: 1358211 - RNA, 19 nt, Artificial Sequence
  Description of Artificial Sequence: Synthetic oligonucleotide
ggugguuaucugucuuaaa

SEQ ID NO: 1358212 - RNA, 19 nt, Artificial Sequence
  Description of Artificial Sequence: Synthetic oligonucleotide
gcagaaaauccucccugcu

SEQ ID NO: 1358213 - RNA, 19 nt, Artificial Sequence
  Description of Artificial Sequence: Synthetic oligonucleotide
gcgggagucuagaaaguuc

SEQ ID NO: 1358214 - RNA, 19 nt, Artificial Sequence
  Description of Artificial Sequence: Synthetic oligonucleotide
cgcuaccccuucaagauga

SEQ ID NO: 1358215 - RNA, 19 nt, Artificial Sequence
  Description of Artificial Sequence: Synthetic oligonucleotide
cuccaccauuauaccagaa

SEQ ID NO: 1358216 - RNA, 19 nt, Artificial Sequence
  Description of Artificial Sequence: Synthetic oligonucleotide
gucaaguagcaagcccaaa

SEQ ID NO: 1358217 - RNA, 19 nt, Artificial Sequence
  Description of Artificial Sequence: Synthetic oligonucleotide
cacuuacacugcuuagaau

SEQ ID NO: 1358218 - RNA, 19 nt, Artificial Sequence
  Description of Artificial Sequence: Synthetic oligonucleotide
ccguuucuacggcaaccag

SEQ ID NO: 1358219 - RNA, 19 nt, Artificial Sequence
  Description of Artificial Sequence: Synthetic oligonucleotide
ggucaaguagcaagcccaa

SEQ ID NO: 1358220 - RNA, 19 nt, Artificial Sequence
  Description of Artificial Sequence: Synthetic oligonucleotide
ccuccccugucuuaugcca

SEQ ID NO: 1358221 - RNA, 19 nt, Artificial Sequence
  Description of Artificial Sequence: Synthetic oligonucleotide
cacgaacauuuucuaacuu

SEQ ID NO: 1358222 - RNA, 19 nt, Artificial Sequence
  Description of Artificial Sequence: Synthetic oligonucleotide
caagcccaaaugccuacau

SEQ ID NO: 1358223 - RNA, 19 nt, Artificial Sequence
  Description of Artificial Sequence: Synthetic oligonucleotide
cacuuacuuauggcacaga

SEQ ID NO: 1358224 - RNA, 19 nt, Artificial Sequence
  Description of Artificial Sequence: Synthetic oligonucleotide
gggaccgcuaccccuucaa

SEQ ID NO: 1358225 - RNA, 19 nt, Artificial Sequence
  Description of Artificial Sequence: Synthetic oligonucleotide
acacgcccgcacacgugag

SEQ ID NO: 1358226 - RNA, 19 nt, Artificial Sequence
  Description of Artificial Sequence: Synthetic oligonucleotide
ccaaacggcuaaccaacaa

SEQ ID NO: 1358227 - RNA, 19 nt, Artificial Sequence
  Description of Artificial Sequence: Synthetic oligonucleotide
cgcacacgugaggacaacg

SEQ ID NO: 1358228 - RNA, 19 nt, Artificial Sequence
  Description of Artificial Sequence: Synthetic oligonucleotide
gagcgggagucuagaaagu

SEQ ID NO: 1358229 - RNA, 19 nt, Artificial Sequence
  Description of Artificial Sequence: Synthetic oligonucleotide
ccacaacuucgaaacagcu

SEQ ID NO: 1358230 - RNA, 19 nt, Artificial Sequence
  Description of Artificial Sequence: Synthetic oligonucleotide
guacuaugguggagagaaa

SEQ ID NO: 1358231 - RNA, 19 nt, Artificial Sequence
  Description of Artificial Sequence: Synthetic oligonucleotide
cacccgcccucuacuuauc

SEQ ID NO: 1358232 - RNA, 19 nt, Artificial Sequence
  Description of Artificial Sequence: Synthetic oligonucleotide
gguacgugaaccacauauu

SEQ ID NO: 1358233 - RNA, 19 nt, Artificial Sequence
  Description of Artificial Sequence: Synthetic oligonucleotide
cuucaaagugugagacguu

SEQ ID NO: 1358234 - RNA, 19 nt, Artificial Sequence
  Description of Artificial Sequence: Synthetic oligonucleotide
cagcucuaaucacucuuau

SEQ ID NO: 1358235 - RNA, 19 nt, Artificial Sequence
  Description of Artificial Sequence: Synthetic oligonucleotide
ccugucuuaugccaggguu

SEQ ID NO: 1358236 - RNA, 19 nt, Artificial Sequence
  Description of Artificial Sequence: Synthetic oligonucleotide
gggugagaacggucaagua

SEQ ID NO: 1358237 - RNA, 19 nt, Artificial Sequence
  Description of Artificial Sequence: Synthetic oligonucleotide
gcaagcccaaaugccuaca

SEQ ID NO: 1358238 - RNA, 19 nt, Artificial Sequence
  Description of Artificial Sequence: Synthetic oligonucleotide
gcccgcacacgugaggaca

SEQ ID NO: 1358239 - RNA, 19 nt, Artificial Sequence
  Description of Artificial Sequence: Synthetic oligonucleotide
ccgcuaccccuucaagaug

SEQ ID NO: 1358240 - RNA, 19 nt, Artificial Sequence
  Description of Artificial Sequence: Synthetic oligonucleotide
caaguacaacuagccuaaa

SEQ ID NO: 1358241 - RNA, 19 nt, Artificial Sequence
  Description of Artificial Sequence: Synthetic oligonucleotide
gcacacgugaggacaacgu

SEQ ID NO: 1358242 - RNA, 19 nt, Artificial Sequence
  Description of Artificial Sequence: Synthetic oligonucleotide
gcccucuacuuauccucca

SEQ ID NO: 1358243 - RNA, 19 nt, Artificial Sequence
  Description of Artificial Sequence: Synthetic oligonucleotide
guccaacuacaguccacuu

SEQ ID NO: 1358244 - RNA, 19 nt, Artificial Sequence
  Description of Artificial Sequence: Synthetic oligonucleotide
gggcaggccacaacuucga

SEQ ID NO: 1358245 - RNA, 19 nt, Artificial Sequence
  Description of Artificial Sequence: Synthetic oligonucleotide
ccccuucaagaugagcuga

SEQ ID NO: 1358246 - RNA, 19 nt, Artificial Sequence
  Description of Artificial Sequence: Synthetic oligonucleotide
cugacccaugcuuggcuuu

SEQ ID NO: 1358247 - RNA, 19 nt, Artificial Sequence
  Description of Artificial Sequence: Synthetic oligonucleotide
ggcaggccacaacuucgaa

SEQ ID NO: 1358248 - RNA, 19 nt, Artificial Sequence
  Description of Artificial Sequence: Synthetic oligonucleotide
cccucuacuuauccuccaa

SEQ ID NO: 1358249 - RNA, 19 nt, Artificial Sequence
  Description of Artificial Sequence: Synthetic oligonucleotide
ggggcccacccaguaauua

SEQ ID NO: 1358250 - RNA, 19 nt, Artificial Sequence
  Description of Artificial Sequence: Synthetic oligonucleotide
cccaugcuuggcuuugcgu

SEQ ID NO: 1358251 - RNA, 19 nt, Artificial Sequence
  Description of Artificial Sequence: Synthetic oligonucleotide
ggggaccgcuaccccuuca

SEQ ID NO: 1358252 - RNA, 19 nt, Artificial Sequence
  Description of Artificial Sequence: Synthetic oligonucleotide
cuacggcaaccagcucaca

SEQ ID NO: 1358253 - RNA, 19 nt, Artificial Sequence
  Description of Artificial Sequence: Synthetic oligonucleotide
cccgcacacgugaggacaa

SEQ ID NO: 1358254 - RNA, 19 nt, Artificial Sequence
  Description of Artificial Sequence: Synthetic oligonucleotide
gccaugcuaccaggguaca

SEQ ID NO: 1358255 - RNA, 19 nt, Artificial Sequence
  Description of Artificial Sequence: Synthetic oligonucleotide
ccacccgcccucuacuuau

SEQ ID NO: 1358256 - RNA, 19 nt, Artificial Sequence
  Description of Artificial Sequence: Synthetic oligonucleotide
ccaugcuaccaggguacaa

SEQ ID NO: 1358257 - RNA, 19 nt, Artificial Sequence
  Description of Artificial Sequence: Synthetic oligonucleotide
cccgcccucuacuuauccu

SEQ ID NO: 1358258 - RNA, 19 nt, Artificial Sequence
  Description of Artificial Sequence: Synthetic oligonucleotide
ccgcacacgugaggacaac

SEQ ID NO: 1358259 - RNA, 19 nt, Artificial Sequence
  Description of Artificial Sequence: Synthetic oligonucleotide
cgcccgcacacgugaggac

SEQ ID NO: 1358260 - RNA, 19 nt, Artificial Sequence
  Description of Artificial Sequence: Synthetic oligonucleotide
ccggggcccacccaguaau

SEQ ID NO: 1358261 - RNA, 19 nt, Artificial Sequence
  Description of Artificial Sequence: Synthetic oligonucleotide
cccugucuuaugccagggu

SEQ ID NO: 1358262 - RNA, 19 nt, Artificial Sequence
  Description of Artificial Sequence: Synthetic oligonucleotide
cccacccgcccucuacuua

SEQ ID NO: 1358263 - RNA, 19 nt, Artificial Sequence
  Description of Artificial Sequence: Synthetic oligonucleotide
ccccacccgcccucuacuu

SEQ ID NO: 1358264 - RNA, 19 nt, Artificial Sequence
  Description of Artificial Sequence: Synthetic oligonucleotide
cggggcccacccaguaauu

SEQ ID NO: 1358265 - RNA, 19 nt, Artificial Sequence
  Description of Artificial Sequence: Synthetic oligonucleotide
uuauguuauggaaagaugg

SEQ ID NO: 1358266 - RNA, 19 nt, Artificial Sequence
  Description of Artificial Sequence: Synthetic oligonucleotide
aauuccucgcuguugaucc

SEQ ID NO: 1358267 - RNA, 19 nt, Artificial Sequence
  Description of Artificial Sequence: Synthetic oligonucleotide
uauaacaucuccuuggucc

SEQ ID NO: 1358268 - RNA, 19 nt, Artificial Sequence
  Description of Artificial Sequence: Synthetic oligonucleotide
gauuauaacaucuccuugg

SEQ ID NO: 1358269 - RNA, 19 nt, Artificial Sequence
  Description of Artificial Sequence: Synthetic oligonucleotide
acuguuacauauucaaucc

SEQ ID NO: 1358270 - RNA, 19 nt, Artificial Sequence
  Description of Artificial Sequence: Synthetic oligonucleotide
ugucagaucugcaagauug

SEQ ID NO: 1358271 - RNA, 19 nt, Artificial Sequence
  Description of Artificial Sequence: Synthetic oligonucleotide
uauguuauggaaagauggg

SEQ ID NO: 1358272 - RNA, 19 nt, Artificial Sequence
  Description of Artificial Sequence: Synthetic oligonucleotide
aguuuugaugagcagcucc

SEQ ID NO: 1358273 - RNA, 19 nt, Artificial Sequence
  Description of Artificial Sequence: Synthetic oligonucleotide
agaucugcaagauugaugu

SEQ ID NO: 1358274 - RNA, 19 nt, Artificial Sequence
  Description of Artificial Sequence: Synthetic oligonucleotide
uguuuauucaaaugacagg

SEQ ID NO: 1358275 - RNA, 19 nt, Artificial Sequence
  Description of Artificial Sequence: Synthetic oligonucleotide
uccuucuuaguuuugauga

SEQ ID NO: 1358276 - RNA, 19 nt, Artificial Sequence
  Description of Artificial Sequence: Synthetic oligonucleotide
guuguguaggaauagcugg

SEQ ID NO: 1358277 - RNA, 19 nt, Artificial Sequence
  Description of Artificial Sequence: Synthetic oligonucleotide
uguuauggaaagaugggug

SEQ ID NO: 1358278 - RNA, 19 nt, Artificial Sequence
  Description of Artificial Sequence: Synthetic oligonucleotide
uguuacauauucaauccug

SEQ ID NO: 1358279 - RNA, 19 nt, Artificial Sequence
  Description of Artificial Sequence: Synthetic oligonucleotide
ugauccuuaaaccaccuga

SEQ ID NO: 1358280 - RNA, 19 nt, Artificial Sequence
  Description of Artificial Sequence: Synthetic oligonucleotide
ggugcuuucaaucaugggg

SEQ ID NO: 1358281 - RNA, 19 nt, Artificial Sequence
  Description of Artificial Sequence: Synthetic oligonucleotide
aguagugcuggccuggagc

SEQ ID NO: 1358282 - RNA, 19 nt, Artificial Sequence
  Description of Artificial Sequence: Synthetic oligonucleotide
uuuauguuauggaaagaug

SEQ ID NO: 1358283 - RNA, 19 nt, Artificial Sequence
  Description of Artificial Sequence: Synthetic oligonucleotide
uuaguuuugaugagcagcu

SEQ ID NO: 1358284 - RNA, 19 nt, Artificial Sequence
  Description of Artificial Sequence: Synthetic oligonucleotide
acucguuugauguauguag

SEQ ID NO: 1358285 - RNA, 19 nt, Artificial Sequence
  Description of Artificial Sequence: Synthetic oligonucleotide
aaguaagggaugaaggugg

SEQ ID NO: 1358286 - RNA, 19 nt, Artificial Sequence
  Description of Artificial Sequence: Synthetic oligonucleotide
caaaugacaggugagaagc

SEQ ID NO: 1358287 - RNA, 19 nt, Artificial Sequence
  Description of Artificial Sequence: Synthetic oligonucleotide
gauagugauccuuaaacca

SEQ ID NO: 1358288 - RNA, 19 nt, Artificial Sequence
  Description of Artificial Sequence: Synthetic oligonucleotide
ugugcaaucacucguuuga

SEQ ID NO: 1358289 - RNA, 19 nt, Artificial Sequence
  Description of Artificial Sequence: Synthetic oligonucleotide
uucggcaucaaagucauag

SEQ ID NO: 1358290 - RNA, 19 nt, Artificial Sequence
  Description of Artificial Sequence: Synthetic oligonucleotide
uugaaauuuauguuaugga

SEQ ID NO: 1358291 - RNA, 19 nt, Artificial Sequence
  Description of Artificial Sequence: Synthetic oligonucleotide
uacauauucaauccugggu

SEQ ID NO: 1358292 - RNA, 19 nt, Artificial Sequence
  Description of Artificial Sequence: Synthetic oligonucleotide
cagaguucgaggaacaggc

SEQ ID NO: 1358293 - RNA, 19 nt, Artificial Sequence
  Description of Artificial Sequence: Synthetic oligonucleotide
gaugaaguaagggaugaag

SEQ ID NO: 1358294 - RNA, 19 nt, Artificial Sequence
  Description of Artificial Sequence: Synthetic oligonucleotide
ugaaguaagggaugaaggu

SEQ ID NO: 1358295 - RNA, 19 nt, Artificial Sequence
  Description of Artificial Sequence: Synthetic oligonucleotide
cuaccgauccaucucaucc

SEQ ID NO: 1358296 - RNA, 19 nt, Artificial Sequence
  Description of Artificial Sequence: Synthetic oligonucleotide
uagacuguggaguagugcu

SEQ ID NO: 1358297 - RNA, 19 nt, Artificial Sequence
  Description of Artificial Sequence: Synthetic oligonucleotide
acauauucaauccuggguu

SEQ ID NO: 1358298 - RNA, 19 nt, Artificial Sequence
  Description of Artificial Sequence: Synthetic oligonucleotide
gauguauguaguccgcugc

SEQ ID NO: 1358299 - RNA, 19 nt, Artificial Sequence
  Description of Artificial Sequence: Synthetic oligonucleotide
guagcauugauagaagcag

SEQ ID NO: 1358300 - RNA, 19 nt, Artificial Sequence
  Description of Artificial Sequence: Synthetic oligonucleotide
ugcgaagucauguucugag

SEQ ID NO: 1358301 - RNA, 19 nt, Artificial Sequence
  Description of Artificial Sequence: Synthetic oligonucleotide
acaugguaggcgcugcugc

SEQ ID NO: 1358302 - RNA, 19 nt, Artificial Sequence
  Description of Artificial Sequence: Synthetic oligonucleotide
auagugauccuuaaaccac

SEQ ID NO: 1358303 - RNA, 19 nt, Artificial Sequence
  Description of Artificial Sequence: Synthetic oligonucleotide
augaaguaagggaugaagg

SEQ ID NO: 1358304 - RNA, 19 nt, Artificial Sequence
  Description of Artificial Sequence: Synthetic oligonucleotide
ucggauuauaacaucuccu

SEQ ID NO: 1358305 - RNA, 19 nt, Artificial Sequence
  Description of Artificial Sequence: Synthetic oligonucleotide
uaauacuugugguucagaa

SEQ ID NO: 1358306 - RNA, 19 nt, Artificial Sequence
  Description of Artificial Sequence: Synthetic oligonucleotide
uugcuugaaauuuauguua

SEQ ID NO: 1358307 - RNA, 19 nt, Artificial Sequence
  Description of Artificial Sequence: Synthetic oligonucleotide
aagaugggugugcaaucac

SEQ ID NO: 1358308 - RNA, 19 nt, Artificial Sequence
  Description of Artificial Sequence: Synthetic oligonucleotide
gaaguaagggaugaaggug

SEQ ID NO: 1358309 - RNA, 19 nt, Artificial Sequence
  Description of Artificial Sequence: Synthetic oligonucleotide
auuauaacaucuccuuggu

SEQ ID NO: 1358310 - RNA, 19 nt, Artificial Sequence
  Description of Artificial Sequence: Synthetic oligonucleotide
aaauuccucgcuguugauc

SEQ ID NO: 1358311 - RNA, 19 nt, Artificial Sequence
  Description of Artificial Sequence: Synthetic oligonucleotide
augggcuggacauaucggg

SEQ ID NO: 1358312 - RNA, 19 nt, Artificial Sequence
  Description of Artificial Sequence: Synthetic oligonucleotide
aaugcguagaugaggguag

SEQ ID NO: 1358313 - RNA, 19 nt, Artificial Sequence
  Description of Artificial Sequence: Synthetic oligonucleotide
caauccuggguuuaccccg

SEQ ID NO: 1358314 - RNA, 19 nt, Artificial Sequence
  Description of Artificial Sequence: Synthetic oligonucleotide
caagauugauguuggcugg

SEQ ID NO: 1358315 - RNA, 19 nt, Artificial Sequence
  Description of Artificial Sequence: Synthetic oligonucleotide
ucuucaaauuccucgcugu

SEQ ID NO: 1358316 - RNA, 19 nt, Artificial Sequence
  Description of Artificial Sequence: Synthetic oligonucleotide
gacauaucgggcaacaauc

SEQ ID NO: 1358317 - RNA, 19 nt, Artificial Sequence
  Description of Artificial Sequence: Synthetic oligonucleotide
aggguagguaggcagcggc

SEQ ID NO: 1358318 - RNA, 19 nt, Artificial Sequence
  Description of Artificial Sequence: Synthetic oligonucleotide
gaguucgaggaacaggccc

SEQ ID NO: 1358319 - RNA, 19 nt, Artificial Sequence
  Description of Artificial Sequence: Synthetic oligonucleotide
ucuaacuucuuccggucac

SEQ ID NO: 1358320 - RNA, 19 nt, Artificial Sequence
  Description of Artificial Sequence: Synthetic oligonucleotide
uccacgugcugguaaaugc

SEQ ID NO: 1358321 - RNA, 19 nt, Artificial Sequence
  Description of Artificial Sequence: Synthetic oligonucleotide
ugggguagcauugauagaa

SEQ ID NO: 1358322 - RNA, 19 nt, Artificial Sequence
  Description of Artificial Sequence: Synthetic oligonucleotide
ucaauccuggguuuacccc

SEQ ID NO: 1358323 - RNA, 19 nt, Artificial Sequence
  Description of Artificial Sequence: Synthetic oligonucleotide
agaguccauucacaguugg

SEQ ID NO: 1358324 - RNA, 19 nt, Artificial Sequence
  Description of Artificial Sequence: Synthetic oligonucleotide
ugauguauguaguccgcug

SEQ ID NO: 1358325 - RNA, 19 nt, Artificial Sequence
  Description of Artificial Sequence: Synthetic oligonucleotide
uguguaggaauagcugggg

SEQ ID NO: 1358326 - RNA, 19 nt, Artificial Sequence
  Description of Artificial Sequence: Synthetic oligonucleotide
uacaauccugguaauacuu

SEQ ID NO: 1358327 - RNA, 19 nt, Artificial Sequence
  Description of Artificial Sequence: Synthetic oligonucleotide
gagguaaccagaguucgag

SEQ ID NO: 1358328 - RNA, 19 nt, Artificial Sequence
  Description of Artificial Sequence: Synthetic oligonucleotide
cugacuuuccaggucaccg

SEQ ID NO: 1358329 - RNA, 19 nt, Artificial Sequence
  Description of Artificial Sequence: Synthetic oligonucleotide
ugguaaaugccaucacuga

SEQ ID NO: 1358330 - RNA, 19 nt, Artificial Sequence
  Description of Artificial Sequence: Synthetic oligonucleotide
gaugccugguacaggaucc

SEQ ID NO: 1358331 - RNA, 19 nt, Artificial Sequence
  Description of Artificial Sequence: Synthetic oligonucleotide
uugauccacaaaguggccc

SEQ ID NO: 1358332 - RNA, 19 nt, Artificial Sequence
  Description of Artificial Sequence: Synthetic oligonucleotide
augggugugcaaucacucg

SEQ ID NO: 1358333 - RNA, 19 nt, Artificial Sequence
  Description of Artificial Sequence: Synthetic oligonucleotide
ugggugugcaaucacucgu

SEQ ID NO: 1358334 - RNA, 19 nt, Artificial Sequence
  Description of Artificial Sequence: Synthetic oligonucleotide
cuucuuaguuuugaugagc

SEQ ID NO: 1358335 - RNA, 19 nt, Artificial Sequence
  Description of Artificial Sequence: Synthetic oligonucleotide
gguaccggaauccuucagg

SEQ ID NO: 1358336 - RNA, 19 nt, Artificial Sequence
  Description of Artificial Sequence: Synthetic oligonucleotide
gguggcaaugcguagauga

SEQ ID NO: 1358337 - RNA, 19 nt, Artificial Sequence
  Description of Artificial Sequence: Synthetic oligonucleotide
gugguaaugggcuggcuug

SEQ ID NO: 1358338 - RNA, 19 nt, Artificial Sequence
  Description of Artificial Sequence: Synthetic oligonucleotide
guauguaguccgcugcugc

SEQ ID NO: 1358339 - RNA, 19 nt, Artificial Sequence
  Description of Artificial Sequence: Synthetic oligonucleotide
gaaagaugggugugcaauc

SEQ ID NO: 1358340 - RNA, 19 nt, Artificial Sequence
  Description of Artificial Sequence: Synthetic oligonucleotide
cagaucugcaagauugaug

SEQ ID NO: 1358341 - RNA, 19 nt, Artificial Sequence
  Description of Artificial Sequence: Synthetic oligonucleotide
ucugcuugcuugaaauuua

SEQ ID NO: 1358342 - RNA, 19 nt, Artificial Sequence
  Description of Artificial Sequence: Synthetic oligonucleotide
uggcaaugcguagaugagg

SEQ ID NO: 1358343 - RNA, 19 nt, Artificial Sequence
  Description of Artificial Sequence: Synthetic oligonucleotide
cagagguaaccagaguucg

SEQ ID NO: 1358344 - RNA, 19 nt, Artificial Sequence
  Description of Artificial Sequence: Synthetic oligonucleotide
auugauguuggcuggggua

SEQ ID NO: 1358345 - RNA, 19 nt, Artificial Sequence
  Description of Artificial Sequence: Synthetic oligonucleotide
auuggcuggaugcccacug

SEQ ID NO: 1358346 - RNA, 19 nt, Artificial Sequence
  Description of Artificial Sequence: Synthetic oligonucleotide
aauccugguaauacuugug

SEQ ID NO: 1358347 - RNA, 19 nt, Artificial Sequence
  Description of Artificial Sequence: Synthetic oligonucleotide
uuauaacaucuccuugguc

SEQ ID NO: 1358348 - RNA, 19 nt, Artificial Sequence
  Description of Artificial Sequence: Synthetic oligonucleotide
ggcaaugcguagaugaggg

SEQ ID NO: 1358349 - RNA, 19 nt, Artificial Sequence
  Description of Artificial Sequence: Synthetic oligonucleotide
agguaaccagaguucgagg

SEQ ID NO: 1358350 - RNA, 19 nt, Artificial Sequence
  Description of Artificial Sequence: Synthetic oligonucleotide
auguuauggaaagaugggu

SEQ ID NO: 1358351 - RNA, 19 nt, Artificial Sequence
  Description of Artificial Sequence: Synthetic oligonucleotide
uccugguaauacuuguggu

SEQ ID NO: 1358352 - RNA, 19 nt, Artificial Sequence
  Description of Artificial Sequence: Synthetic oligonucleotide
gguaaaugccaucacugac

SEQ ID NO: 1358353 - RNA, 19 nt, Artificial Sequence
  Description of Artificial Sequence: Synthetic oligonucleotide
gaagcagggguccgagucc

SEQ ID NO: 1358354 - RNA, 19 nt, Artificial Sequence
  Description of Artificial Sequence: Synthetic oligonucleotide
auauuggcuggaugcccac

SEQ ID NO: 1358355 - RNA, 19 nt, Artificial Sequence
  Description of Artificial Sequence: Synthetic oligonucleotide
ugggaacacaugguaggcg

SEQ ID NO: 1358356 - RNA, 19 nt, Artificial Sequence
  Description of Artificial Sequence: Synthetic oligonucleotide
guagcauugggguucuguc

SEQ ID NO: 1358357 - RNA, 19 nt, Artificial Sequence
  Description of Artificial Sequence: Synthetic oligonucleotide
guugucgggagcuggagga

SEQ ID NO: 1358358 - RNA, 19 nt, Artificial Sequence
  Description of Artificial Sequence: Synthetic oligonucleotide
uuuaccccggggcugguau

SEQ ID NO: 1358359 - RNA, 19 nt, Artificial Sequence
  Description of Artificial Sequence: Synthetic oligonucleotide
auguauguaguccgcugcu

SEQ ID NO: 1358360 - RNA, 19 nt, Artificial Sequence
  Description of Artificial Sequence: Synthetic oligonucleotide
guagguaggcagcggcugg

SEQ ID NO: 1358361 - RNA, 19 nt, Artificial Sequence
  Description of Artificial Sequence: Synthetic oligonucleotide
gguaaccagaguucgagga

SEQ ID NO: 1358362 - RNA, 19 nt, Artificial Sequence
  Description of Artificial Sequence: Synthetic oligonucleotide
uagauggccaggccucuug

SEQ ID NO: 1358363 - RNA, 19 nt, Artificial Sequence
  Description of Artificial Sequence: Synthetic oligonucleotide
gggaacacaugguaggcgc

SEQ ID NO: 1358364 - RNA, 19 nt, Artificial Sequence
  Description of Artificial Sequence: Synthetic oligonucleotide
ucucgagcaaaggaagcca

SEQ ID NO: 1358365 - RNA, 19 nt, Artificial Sequence
  Description of Artificial Sequence: Synthetic oligonucleotide
gccucuuggagccucagag

SEQ ID NO: 1358366 - RNA, 19 nt, Artificial Sequence
  Description of Artificial Sequence: Synthetic oligonucleotide
uagccauauuggcuggaug

SEQ ID NO: 1358367 - RNA, 19 nt, Artificial Sequence
  Description of Artificial Sequence: Synthetic oligonucleotide
uugggaacacaugguaggc

SEQ ID NO: 1358368 - RNA, 19 nt, Artificial Sequence
  Description of Artificial Sequence: Synthetic oligonucleotide
aauccuggguuuaccccgg

SEQ ID NO: 1358369 - RNA, 19 nt, Artificial Sequence
  Description of Artificial Sequence: Synthetic oligonucleotide
ugacuuuccaggucaccgu

SEQ ID NO: 1358370 - RNA, 19 nt, Artificial Sequence
  Description of Artificial Sequence: Synthetic oligonucleotide
uucagaaggucucgagcaa

SEQ ID NO: 1358371 - RNA, 19 nt, Artificial Sequence
  Description of Artificial Sequence: Synthetic oligonucleotide
ucgagcaaaggaagccaug

SEQ ID NO: 1358372 - RNA, 19 nt, Artificial Sequence
  Description of Artificial Sequence: Synthetic oligonucleotide
cauugauagaagcaggggu

SEQ ID NO: 1358373 - RNA, 19 nt, Artificial Sequence
  Description of Artificial Sequence: Synthetic oligonucleotide
ugcugggucggauuauaac

SEQ ID NO: 1358374 - RNA, 19 nt, Artificial Sequence
  Description of Artificial Sequence: Synthetic oligonucleotide
gcugggucggauuauaaca

SEQ ID NO: 1358375 - RNA, 19 nt, Artificial Sequence
  Description of Artificial Sequence: Synthetic oligonucleotide
acugacuuuccaggucacc

SEQ ID NO: 1358376 - RNA, 19 nt, Artificial Sequence
  Description of Artificial Sequence: Synthetic oligonucleotide
guaccggaauccuucagga

SEQ ID NO: 1358377 - RNA, 19 nt, Artificial Sequence
  Description of Artificial Sequence: Synthetic oligonucleotide
uuuccgucguucugccucc

SEQ ID NO: 1358378 - RNA, 19 nt, Artificial Sequence
  Description of Artificial Sequence: Synthetic oligonucleotide
aaaccaccugaagagucca

SEQ ID NO: 1358379 - RNA, 19 nt, Artificial Sequence
  Description of Artificial Sequence: Synthetic oligonucleotide
ucggcaucaaagucauagu

SEQ ID NO: 1358380 - RNA, 19 nt, Artificial Sequence
  Description of Artificial Sequence: Synthetic oligonucleotide
accgucaggugguucucac

SEQ ID NO: 1358381 - RNA, 19 nt, Artificial Sequence
  Description of Artificial Sequence: Synthetic oligonucleotide
caugguaggcgcugcugcc

SEQ ID NO: 1358382 - RNA, 19 nt, Artificial Sequence
  Description of Artificial Sequence: Synthetic oligonucleotide
guacaggauccugauagug

SEQ ID NO: 1358383 - RNA, 19 nt, Artificial Sequence
  Description of Artificial Sequence: Synthetic oligonucleotide
ucuuccggucaccaccacu

SEQ ID NO: 1358384 - RNA, 19 nt, Artificial Sequence
  Description of Artificial Sequence: Synthetic oligonucleotide
acaauccugguaauacuug

SEQ ID NO: 1358385 - RNA, 19 nt, Artificial Sequence
  Description of Artificial Sequence: Synthetic oligonucleotide
auagaagcagggguccgag

SEQ ID NO: 1358386 - RNA, 19 nt, Artificial Sequence
  Description of Artificial Sequence: Synthetic oligonucleotide
agaguucgaggaacaggcc

SEQ ID NO: 1358387 - RNA, 19 nt, Artificial Sequence
  Description of Artificial Sequence: Synthetic oligonucleotide
cauaucgggcaacaaucuc

SEQ ID NO: 1358388 - RNA, 19 nt, Artificial Sequence
  Description of Artificial Sequence: Synthetic oligonucleotide
aguaagggaugaagguggg

SEQ ID NO: 1358389 - RNA, 19 nt, Artificial Sequence
  Description of Artificial Sequence: Synthetic oligonucleotide
gucucgagcaaaggaagcc

SEQ ID NO: 1358390 - RNA, 19 nt, Artificial Sequence
  Description of Artificial Sequence: Synthetic oligonucleotide
auucacaguugggaagauc

SEQ ID NO: 1358391 - RNA, 19 nt, Artificial Sequence
  Description of Artificial Sequence: Synthetic oligonucleotide
gguuguguaggaauagcug

SEQ ID NO: 1358392 - RNA, 19 nt, Artificial Sequence
  Description of Artificial Sequence: Synthetic oligonucleotide
aaaugacaggugagaagca

SEQ ID NO: 1358393 - RNA, 19 nt, Artificial Sequence
  Description of Artificial Sequence: Synthetic oligonucleotide
gacuuuccaggucaccguc

SEQ ID NO: 1358394 - RNA, 19 nt, Artificial Sequence
  Description of Artificial Sequence: Synthetic oligonucleotide
guagacuguggaguagugc

SEQ ID NO: 1358395 - RNA, 19 nt, Artificial Sequence
  Description of Artificial Sequence: Synthetic oligonucleotide
ccaugggcuggacauaucg

SEQ ID NO: 1358396 - RNA, 19 nt, Artificial Sequence
  Description of Artificial Sequence: Synthetic oligonucleotide
ugggguuguguaggaauag

SEQ ID NO: 1358397 - RNA, 19 nt, Artificial Sequence
  Description of Artificial Sequence: Synthetic oligonucleotide
guaaaugccaucacugacu

SEQ ID NO: 1358398 - RNA, 19 nt, Artificial Sequence
  Description of Artificial Sequence: Synthetic oligonucleotide
cuaacuucuuccggucacc

SEQ ID NO: 1358399 - RNA, 19 nt, Artificial Sequence
  Description of Artificial Sequence: Synthetic oligonucleotide
ugcuuucaaucauggggcu

SEQ ID NO: 1358400 - RNA, 19 nt, Artificial Sequence
  Description of Artificial Sequence: Synthetic oligonucleotide
gccgccauagccauauugg

SEQ ID NO: 1358401 - RNA, 19 nt, Artificial Sequence
  Description of Artificial Sequence: Synthetic oligonucleotide
ugcugguaaaugccaucac

SEQ ID NO: 1358402 - RNA, 19 nt, Artificial Sequence
  Description of Artificial Sequence: Synthetic oligonucleotide
uuucaaucauggggcuggg

SEQ ID NO: 1358403 - RNA, 19 nt, Artificial Sequence
  Description of Artificial Sequence: Synthetic oligonucleotide
agggaugaaggugggcuuc

SEQ ID NO: 1358404 - RNA, 19 nt, Artificial Sequence
  Description of Artificial Sequence: Synthetic oligonucleotide
auuagugguguggccacug

SEQ ID NO: 1358405 - RNA, 19 nt, Artificial Sequence
  Description of Artificial Sequence: Synthetic oligonucleotide
gcacugaacaucugcgaag

SEQ ID NO: 1358406 - RNA, 19 nt, Artificial Sequence
  Description of Artificial Sequence: Synthetic oligonucleotide
ggguagcauugauagaagc

SEQ ID NO: 1358407 - RNA, 19 nt, Artificial Sequence
  Description of Artificial Sequence: Synthetic oligonucleotide
cuacugggagugaugccug

SEQ ID NO: 1358408 - RNA, 19 nt, Artificial Sequence
  Description of Artificial Sequence: Synthetic oligonucleotide
uguaguccgcugcugcuuu

SEQ ID NO: 1358409 - RNA, 19 nt, Artificial Sequence
  Description of Artificial Sequence: Synthetic oligonucleotide
acauaucgggcaacaaucu

SEQ ID NO: 1358410 - RNA, 19 nt, Artificial Sequence
  Description of Artificial Sequence: Synthetic oligonucleotide
uaguccgcugcugcuuucg

SEQ ID NO: 1358411 - RNA, 19 nt, Artificial Sequence
  Description of Artificial Sequence: Synthetic oligonucleotide
gcauugauagaagcagggg

SEQ ID NO: 1358412 - RNA, 19 nt, Artificial Sequence
  Description of Artificial Sequence: Synthetic oligonucleotide
cuguuuccgucguucugcc

SEQ ID NO: 1358413 - RNA, 19 nt, Artificial Sequence
  Description of Artificial Sequence: Synthetic oligonucleotide
uggagccucagagguaacc

SEQ ID NO: 1358414 - RNA, 19 nt, Artificial Sequence
  Description of Artificial Sequence: Synthetic oligonucleotide
guuggcugggguagcauug

SEQ ID NO: 1358415 - RNA, 19 nt, Artificial Sequence
  Description of Artificial Sequence: Synthetic oligonucleotide
guaaccagaguucgaggaa

SEQ ID NO: 1358416 - RNA, 19 nt, Artificial Sequence
  Description of Artificial Sequence: Synthetic oligonucleotide
ugguauuguggggugguaa

SEQ ID NO: 1358417 - RNA, 19 nt, Artificial Sequence
  Description of Artificial Sequence: Synthetic oligonucleotide
caaucauggggcugggaga

SEQ ID NO: 1358418 - RNA, 19 nt, Artificial Sequence
  Description of Artificial Sequence: Synthetic oligonucleotide
uugucagaucugcaagauu

SEQ ID NO: 1358419 - RNA, 19 nt, Artificial Sequence
  Description of Artificial Sequence: Synthetic oligonucleotide
guauuguggggugguaaug

SEQ ID NO: 1358420 - RNA, 19 nt, Artificial Sequence
  Description of Artificial Sequence: Synthetic oligonucleotide
uguuggcugggguagcauu

SEQ ID NO: 1358421 - RNA, 19 nt, Artificial Sequence
  Description of Artificial Sequence: Synthetic oligonucleotide
ugggucggauuauaacauc

SEQ ID NO: 1358422 - RNA, 19 nt, Artificial Sequence
  Description of Artificial Sequence: Synthetic oligonucleotide
cuuccggucaccaccacua

SEQ ID NO: 1358423 - RNA, 19 nt, Artificial Sequence
  Description of Artificial Sequence: Synthetic oligonucleotide
uggugguauuguggggugg

SEQ ID NO: 1358424 - RNA, 19 nt, Artificial Sequence
  Description of Artificial Sequence: Synthetic oligonucleotide
gauagaagcagggguccga

SEQ ID NO: 1358425 - RNA, 19 nt, Artificial Sequence
  Description of Artificial Sequence: Synthetic oligonucleotide
agggucgaggggucagccg

SEQ ID NO: 1358426 - RNA, 19 nt, Artificial Sequence
  Description of Artificial Sequence: Synthetic oligonucleotide
ggagugaugccugguacag

SEQ ID NO: 1358427 - RNA, 19 nt, Artificial Sequence
  Description of Artificial Sequence: Synthetic oligonucleotide
gcgaagucauguucugagg

SEQ ID NO: 1358428 - RNA, 19 nt, Artificial Sequence
  Description of Artificial Sequence: Synthetic oligonucleotide
ucuuggagccucagaggua

SEQ ID NO: 1358429 - RNA, 19 nt, Artificial Sequence
  Description of Artificial Sequence: Synthetic oligonucleotide
uggaaagaugggugugcaa

SEQ ID NO: 1358430 - RNA, 19 nt, Artificial Sequence
  Description of Artificial Sequence: Synthetic oligonucleotide
cuuggagccucagagguaa

SEQ ID NO: 1358431 - RNA, 19 nt, Artificial Sequence
  Description of Artificial Sequence: Synthetic oligonucleotide
ugccguugucgggagcugg

SEQ ID NO: 1358432 - RNA, 19 nt, Artificial Sequence
  Description of Artificial Sequence: Synthetic oligonucleotide
uccugcuuguggucugcug

SEQ ID NO: 1358433 - RNA, 19 nt, Artificial Sequence
  Description of Artificial Sequence: Synthetic oligonucleotide
guugauccacaaaguggcc

SEQ ID NO: 1358434 - RNA, 19 nt, Artificial Sequence
  Description of Artificial Sequence: Synthetic oligonucleotide
cugcuucggcaucaaaguc

SEQ ID NO: 1358435 - RNA, 19 nt, Artificial Sequence
  Description of Artificial Sequence: Synthetic oligonucleotide
caaugcguagaugagggua

SEQ ID NO: 1358436 - RNA, 19 nt, Artificial Sequence
  Description of Artificial Sequence: Synthetic oligonucleotide
cguuugauguauguagucc

SEQ ID NO: 1358437 - RNA, 19 nt, Artificial Sequence
  Description of Artificial Sequence: Synthetic oligonucleotide
auccacgugcugguaaaug

SEQ ID NO: 1358438 - RNA, 19 nt, Artificial Sequence
  Description of Artificial Sequence: Synthetic oligonucleotide
agugauccuuaaaccaccu

SEQ ID NO: 1358439 - RNA, 19 nt, Artificial Sequence
  Description of Artificial Sequence: Synthetic oligonucleotide
ccacucauuguuccugucc

SEQ ID NO: 1358440 - RNA, 19 nt, Artificial Sequence
  Description of Artificial Sequence: Synthetic oligonucleotide
cucguuugauguauguagu

SEQ ID NO: 1358441 - RNA, 19 nt, Artificial Sequence
  Description of Artificial Sequence: Synthetic oligonucleotide
cugcaagauugauguuggc

SEQ ID NO: 1358442 - RNA, 19 nt, Artificial Sequence
  Description of Artificial Sequence: Synthetic oligonucleotide
uguugccguugucgggagc

SEQ ID NO: 1358443 - RNA, 19 nt, Artificial Sequence
  Description of Artificial Sequence: Synthetic oligonucleotide
augcguagaugaggguagg

SEQ ID NO: 1358444 - RNA, 19 nt, Artificial Sequence
  Description of Artificial Sequence: Synthetic oligonucleotide
agggguccgaguccugcug

SEQ ID NO: 1358445 - RNA, 19 nt, Artificial Sequence
  Description of Artificial Sequence: Synthetic oligonucleotide
gagagggucgaggggucag

SEQ ID NO: 1358446 - RNA, 19 nt, Artificial Sequence
  Description of Artificial Sequence: Synthetic oligonucleotide
uggccugucacagcagcaa

SEQ ID NO: 1358447 - RNA, 19 nt, Artificial Sequence
  Description of Artificial Sequence: Synthetic oligonucleotide
cuacaauccugguaauacu

SEQ ID NO: 1358448 - RNA, 19 nt, Artificial Sequence
  Description of Artificial Sequence: Synthetic oligonucleotide
gauguuggcugggguagca

SEQ ID NO: 1358449 - RNA, 19 nt, Artificial Sequence
  Description of Artificial Sequence: Synthetic oligonucleotide
uuccucgcuguugauccac

SEQ ID NO: 1358450 - RNA, 19 nt, Artificial Sequence
  Description of Artificial Sequence: Synthetic oligonucleotide
uaccccggggcugguaucc

SEQ ID NO: 1358451 - RNA, 19 nt, Artificial Sequence
  Description of Artificial Sequence: Synthetic oligonucleotide
uguuggacuuuggcugcug

SEQ ID NO: 1358452 - RNA, 19 nt, Artificial Sequence
  Description of Artificial Sequence: Synthetic oligonucleotide
ugcccggcaguuccuugca

SEQ ID NO: 1358453 - RNA, 19 nt, Artificial Sequence
  Description of Artificial Sequence: Synthetic oligonucleotide
auagccauauuggcuggau

SEQ ID NO: 1358454 - RNA, 19 nt, Artificial Sequence
  Description of Artificial Sequence: Synthetic oligonucleotide
gggugcuuucaaucauggg

SEQ ID NO: 1358455 - RNA, 19 nt, Artificial Sequence
  Description of Artificial Sequence: Synthetic oligonucleotide
uccacucauuguuccuguc

SEQ ID NO: 1358456 - RNA, 19 nt, Artificial Sequence
  Description of Artificial Sequence: Synthetic oligonucleotide
ugcguagaugaggguaggu

SEQ ID NO: 1358457 - RNA, 19 nt, Artificial Sequence
  Description of Artificial Sequence: Synthetic oligonucleotide
ugggcaguuuccacucauu

SEQ ID NO: 1358458 - RNA, 19 nt, Artificial Sequence
  Description of Artificial Sequence: Synthetic oligonucleotide
gaauccuucaggagucacu

SEQ ID NO: 1358459 - RNA, 19 nt, Artificial Sequence
  Description of Artificial Sequence: Synthetic oligonucleotide
agaugaggguagguaggca

SEQ ID NO: 1358460 - RNA, 19 nt, Artificial Sequence
  Description of Artificial Sequence: Synthetic oligonucleotide
gucagaucugcaagauuga

SEQ ID NO: 1358461 - RNA, 19 nt, Artificial Sequence
  Description of Artificial Sequence: Synthetic oligonucleotide
caggauccugauagugauc

SEQ ID NO: 1358462 - RNA, 19 nt, Artificial Sequence
  Description of Artificial Sequence: Synthetic oligonucleotide
acccuugcugcugggucgg

SEQ ID NO: 1358463 - RNA, 19 nt, Artificial Sequence
  Description of Artificial Sequence: Synthetic oligonucleotide
gcugcuucggcaucaaagu

SEQ ID NO: 1358464 - RNA, 19 nt, Artificial Sequence
  Description of Artificial Sequence: Synthetic oligonucleotide
agagguaaccagaguucga

SEQ ID NO: 1358465 - RNA, 19 nt, Artificial Sequence
  Description of Artificial Sequence: Synthetic oligonucleotide
ggaaagaugggugugcaau

SEQ ID NO: 1358466 - RNA, 19 nt, Artificial Sequence
  Description of Artificial Sequence: Synthetic oligonucleotide
cugggcuggcguugggaac

SEQ ID NO: 1358467 - RNA, 19 nt, Artificial Sequence
  Description of Artificial Sequence: Synthetic oligonucleotide
cccggcaguuccuugcagg

SEQ ID NO: 1358468 - RNA, 19 nt, Artificial Sequence
  Description of Artificial Sequence: Synthetic oligonucleotide
gauccugauagugauccuu

SEQ ID NO: 1358469 - RNA, 19 nt, Artificial Sequence
  Description of Artificial Sequence: Synthetic oligonucleotide
gccauauuggcuggaugcc

SEQ ID NO: 1358470 - RNA, 19 nt, Artificial Sequence
  Description of Artificial Sequence: Synthetic oligonucleotide
cuguugccguugucgggag

SEQ ID NO: 1358471 - RNA, 19 nt, Artificial Sequence
  Description of Artificial Sequence: Synthetic oligonucleotide
gggagugaugccugguaca

SEQ ID NO: 1358472 - RNA, 19 nt, Artificial Sequence
  Description of Artificial Sequence: Synthetic oligonucleotide
guucugaggcaaggcauuc

SEQ ID NO: 1358473 - RNA, 19 nt, Artificial Sequence
  Description of Artificial Sequence: Synthetic oligonucleotide
ccauauuggcuggaugccc

SEQ ID NO: 1358474 - RNA, 19 nt, Artificial Sequence
  Description of Artificial Sequence: Synthetic oligonucleotide
cugggucggauuauaacau

SEQ ID NO: 1358475 - RNA, 19 nt, Artificial Sequence
  Description of Artificial Sequence: Synthetic oligonucleotide
ggacauaucgggcaacaau

SEQ ID NO: 1358476 - RNA, 19 nt, Artificial Sequence
  Description of Artificial Sequence: Synthetic oligonucleotide
cccgguaccggaauccuuc

SEQ ID NO: 1358477 - RNA, 19 nt, Artificial Sequence
  Description of Artificial Sequence: Synthetic oligonucleotide
caaucacucguuugaugua

SEQ ID NO: 1358478 - RNA, 19 nt, Artificial Sequence
  Description of Artificial Sequence: Synthetic oligonucleotide
gggguuguguaggaauagc

SEQ ID NO: 1358479 - RNA, 19 nt, Artificial Sequence
  Description of Artificial Sequence: Synthetic oligonucleotide
gggguagcauugauagaag

SEQ ID NO: 1358480 - RNA, 19 nt, Artificial Sequence
  Description of Artificial Sequence: Synthetic oligonucleotide
ccggcaguuccuugcaggc

SEQ ID NO: 1358481 - RNA, 19 nt, Artificial Sequence
  Description of Artificial Sequence: Synthetic oligonucleotide
guugccguugucgggagcu

SEQ ID NO: 1358482 - RNA, 19 nt, Artificial Sequence
  Description of Artificial Sequence: Synthetic oligonucleotide
ggucggauuauaacaucuc

SEQ ID NO: 1358483 - RNA, 19 nt, Artificial Sequence
  Description of Artificial Sequence: Synthetic oligonucleotide
aguuccuugcaggcacaga

SEQ ID NO: 1358484 - RNA, 19 nt, Artificial Sequence
  Description of Artificial Sequence: Synthetic oligonucleotide
aguccgcugcugcuuucgu

SEQ ID NO: 1358485 - RNA, 19 nt, Artificial Sequence
  Description of Artificial Sequence: Synthetic oligonucleotide
uucuuccggucaccaccac

SEQ ID NO: 1358486 - RNA, 19 nt, Artificial Sequence
  Description of Artificial Sequence: Synthetic oligonucleotide
gguagacuguggaguagug

SEQ ID NO: 1358487 - RNA, 19 nt, Artificial Sequence
  Description of Artificial Sequence: Synthetic oligonucleotide
cacugaacaucugcgaagu

SEQ ID NO: 1358488 - RNA, 19 nt, Artificial Sequence
  Description of Artificial Sequence: Synthetic oligonucleotide
gucguucugccuccuucuc

SEQ ID NO: 1358489 - RNA, 19 nt, Artificial Sequence
  Description of Artificial Sequence: Synthetic oligonucleotide
caguuccuugcaggcacag

SEQ ID NO: 1358490 - RNA, 19 nt, Artificial Sequence
  Description of Artificial Sequence: Synthetic oligonucleotide
uggccacugguugcugggc

SEQ ID NO: 1358491 - RNA, 19 nt, Artificial Sequence
  Description of Artificial Sequence: Synthetic oligonucleotide
uuaccccggggcugguauc

SEQ ID NO: 1358492 - RNA, 19 nt, Artificial Sequence
  Description of Artificial Sequence: Synthetic oligonucleotide
uuggagccucagagguaac

SEQ ID NO: 1358493 - RNA, 19 nt, Artificial Sequence
  Description of Artificial Sequence: Synthetic oligonucleotide
gguauuguggggugguaau

SEQ ID NO: 1358494 - RNA, 19 nt, Artificial Sequence
  Description of Artificial Sequence: Synthetic oligonucleotide
cugggguagcauugauaga

SEQ ID NO: 1358495 - RNA, 19 nt, Artificial Sequence
  Description of Artificial Sequence: Synthetic oligonucleotide
ccggucaccaccacuacaa

SEQ ID NO: 1358496 - RNA, 19 nt, Artificial Sequence
  Description of Artificial Sequence: Synthetic oligonucleotide
cuugucagaucugcaagau

SEQ ID NO: 1358497 - RNA, 19 nt, Artificial Sequence
  Description of Artificial Sequence: Synthetic oligonucleotide
cugggagugaugccuggua

SEQ ID NO: 1358498 - RNA, 19 nt, Artificial Sequence
  Description of Artificial Sequence: Synthetic oligonucleotide
uugccguugucgggagcug

SEQ ID NO: 1358499 - RNA, 19 nt, Artificial Sequence
  Description of Artificial Sequence: Synthetic oligonucleotide
gggguucuguccuuggccu

SEQ ID NO: 1358500 - RNA, 19 nt, Artificial Sequence
  Description of Artificial Sequence: Synthetic oligonucleotide
cucgagcaaaggaagccau

SEQ ID NO: 1358501 - RNA, 19 nt, Artificial Sequence
  Description of Artificial Sequence: Synthetic oligonucleotide
cacucguuugauguaugua

SEQ ID NO: 1358502 - RNA, 19 nt, Artificial Sequence
  Description of Artificial Sequence: Synthetic oligonucleotide
gcguugggaacacauggua

SEQ ID NO: 1358503 - RNA, 19 nt, Artificial Sequence
  Description of Artificial Sequence: Synthetic oligonucleotide
caggagucacuguuacaua

SEQ ID NO: 1358504 - RNA, 19 nt, Artificial Sequence
  Description of Artificial Sequence: Synthetic oligonucleotide
gggucggauuauaacaucu

SEQ ID NO: 1358505 - RNA, 19 nt, Artificial Sequence
  Description of Artificial Sequence: Synthetic oligonucleotide
ggguuguguaggaauagcu

SEQ ID NO: 1358506 - RNA, 19 nt, Artificial Sequence
  Description of Artificial Sequence: Synthetic oligonucleotide
guaguccgcugcugcuuuc

SEQ ID NO: 1358507 - RNA, 19 nt, Artificial Sequence
  Description of Artificial Sequence: Synthetic oligonucleotide
accccggggcugguauccc

SEQ ID NO: 1358508 - RNA, 19 nt, Artificial Sequence
  Description of Artificial Sequence: Synthetic oligonucleotide
uggccccgguaccggaauc

SEQ ID NO: 1358509 - RNA, 19 nt, Artificial Sequence
  Description of Artificial Sequence: Synthetic oligonucleotide
agguggcaaugcguagaug

SEQ ID NO: 1358510 - RNA, 19 nt, Artificial Sequence
  Description of Artificial Sequence: Synthetic oligonucleotide
cacuacaauccugguaaua

SEQ ID NO: 1358511 - RNA, 19 nt, Artificial Sequence
  Description of Artificial Sequence: Synthetic oligonucleotide
gguacaggauccugauagu

SEQ ID NO: 1358512 - RNA, 19 nt, Artificial Sequence
  Description of Artificial Sequence: Synthetic oligonucleotide
ccugauagugauccuuaaa

SEQ ID NO: 1358513 - RNA, 19 nt, Artificial Sequence
  Description of Artificial Sequence: Synthetic oligonucleotide
cugcgaagucauguucuga

SEQ ID NO: 1358514 - RNA, 19 nt, Artificial Sequence
  Description of Artificial Sequence: Synthetic oligonucleotide
cugcugggucggauuauaa

SEQ ID NO: 1358515 - RNA, 19 nt, Artificial Sequence
  Description of Artificial Sequence: Synthetic oligonucleotide
gguaggcgcugcugccucc

SEQ ID NO: 1358516 - RNA, 19 nt, Artificial Sequence
  Description of Artificial Sequence: Synthetic oligonucleotide
ccuaccgauccaucucauc

SEQ ID NO: 1358517 - RNA, 19 nt, Artificial Sequence
  Description of Artificial Sequence: Synthetic oligonucleotide
caggaguggggucgcaucu

SEQ ID NO: 1358518 - RNA, 19 nt, Artificial Sequence
  Description of Artificial Sequence: Synthetic oligonucleotide
agcccuugucagaucugca

SEQ ID NO: 1358519 - RNA, 19 nt, Artificial Sequence
  Description of Artificial Sequence: Synthetic oligonucleotide
auguuggcugggguagcau

SEQ ID NO: 1358520 - RNA, 19 nt, Artificial Sequence
  Description of Artificial Sequence: Synthetic oligonucleotide
ccgucaggugguucucacc

SEQ ID NO: 1358521 - RNA, 19 nt, Artificial Sequence
  Description of Artificial Sequence: Synthetic oligonucleotide
ccgucguucugccuccuuc

SEQ ID NO: 1358522 - RNA, 19 nt, Artificial Sequence
  Description of Artificial Sequence: Synthetic oligonucleotide
ggccccgguaccggaaucc

SEQ ID NO: 1358523 - RNA, 19 nt, Artificial Sequence
  Description of Artificial Sequence: Synthetic oligonucleotide
cugguacaggauccugaua

SEQ ID NO: 1358524 - RNA, 19 nt, Artificial Sequence
  Description of Artificial Sequence: Synthetic oligonucleotide
gcguagaugaggguaggua

SEQ ID NO: 1358525 - RNA, 19 nt, Artificial Sequence
  Description of Artificial Sequence: Synthetic oligonucleotide
gcugguaucccaggaggaa

SEQ ID NO: 1358526 - RNA, 19 nt, Artificial Sequence
  Description of Artificial Sequence: Synthetic oligonucleotide
ggugguauugugggguggu

SEQ ID NO: 1358527 - RNA, 19 nt, Artificial Sequence
  Description of Artificial Sequence: Synthetic oligonucleotide
gcuggacauaucgggcaac

SEQ ID NO: 1358528 - RNA, 19 nt, Artificial Sequence
  Description of Artificial Sequence: Synthetic oligonucleotide
ccccuaccgauccaucuca

SEQ ID NO: 1358529 - RNA, 19 nt, Artificial Sequence
  Description of Artificial Sequence: Synthetic oligonucleotide
gcuucggcaucaaagucau

SEQ ID NO: 1358530 - RNA, 19 nt, Artificial Sequence
  Description of Artificial Sequence: Synthetic oligonucleotide
caggccucuuggagccuca

SEQ ID NO: 1358531 - RNA, 19 nt, Artificial Sequence
  Description of Artificial Sequence: Synthetic oligonucleotide
uuccgucguucugccuccu

SEQ ID NO: 1358532 - RNA, 19 nt, Artificial Sequence
  Description of Artificial Sequence: Synthetic oligonucleotide
gugcaaucacucguuugau

SEQ ID NO: 1358533 - RNA, 19 nt, Artificial Sequence
  Description of Artificial Sequence: Synthetic oligonucleotide
cagcggcuggcaggcacac

SEQ ID NO: 1358534 - RNA, 19 nt, Artificial Sequence
  Description of Artificial Sequence: Synthetic oligonucleotide
gguucuguccuuggccugu

SEQ ID NO: 1358535 - RNA, 19 nt, Artificial Sequence
  Description of Artificial Sequence: Synthetic oligonucleotide
gugguauugugggguggua

SEQ ID NO: 1358536 - RNA, 19 nt, Artificial Sequence
  Description of Artificial Sequence: Synthetic oligonucleotide
ggugugcaaucacucguuu

SEQ ID NO: 1358537 - RNA, 19 nt, Artificial Sequence
  Description of Artificial Sequence: Synthetic oligonucleotide
ggcguugggaacacauggu

SEQ ID NO: 1358538 - RNA, 19 nt, Artificial Sequence
  Description of Artificial Sequence: Synthetic oligonucleotide
caccgucaggugguucuca

SEQ ID NO: 1358539 - RNA, 19 nt, Artificial Sequence
  Description of Artificial Sequence: Synthetic oligonucleotide
gcccggcaguuccuugcag

SEQ ID NO: 1358540 - RNA, 19 nt, Artificial Sequence
  Description of Artificial Sequence: Synthetic oligonucleotide
ggcugggguagcauugaua

SEQ ID NO: 1358541 - RNA, 19 nt, Artificial Sequence
  Description of Artificial Sequence: Synthetic oligonucleotide
gcaaugcguagaugagggu

SEQ ID NO: 1358542 - RNA, 19 nt, Artificial Sequence
  Description of Artificial Sequence: Synthetic oligonucleotide
ggagagggucgagggguca

SEQ ID NO: 1358543 - RNA, 19 nt, Artificial Sequence
  Description of Artificial Sequence: Synthetic oligonucleotide
ccguugucgggagcuggag

SEQ ID NO: 1358544 - RNA, 19 nt, Artificial Sequence
  Description of Artificial Sequence: Synthetic oligonucleotide
gucagccgcuguuucuguu

SEQ ID NO: 1358545 - RNA, 19 nt, Artificial Sequence
  Description of Artificial Sequence: Synthetic oligonucleotide
guuuaccccggggcuggua

SEQ ID NO: 1358546 - RNA, 19 nt, Artificial Sequence
  Description of Artificial Sequence: Synthetic oligonucleotide
cgguaccggaauccuucag

SEQ ID NO: 1358547 - RNA, 19 nt, Artificial Sequence
  Description of Artificial Sequence: Synthetic oligonucleotide
cuugguccauggucuccau

SEQ ID NO: 1358548 - RNA, 19 nt, Artificial Sequence
  Description of Artificial Sequence: Synthetic oligonucleotide
gcagcggcuggcaggcaca

SEQ ID NO: 1358549 - RNA, 19 nt, Artificial Sequence
  Description of Artificial Sequence: Synthetic oligonucleotide
ccgguaccggaauccuuca

SEQ ID NO: 1358550 - RNA, 19 nt, Artificial Sequence
  Description of Artificial Sequence: Synthetic oligonucleotide
gccguugucgggagcugga

SEQ ID NO: 1358551 - RNA, 19 nt, Artificial Sequence
  Description of Artificial Sequence: Synthetic oligonucleotide
ggccugucacagcagcaau

SEQ ID NO: 1358552 - RNA, 19 nt, Artificial Sequence
  Description of Artificial Sequence: Synthetic oligonucleotide
gggucgcaucuccagcagu

SEQ ID NO: 1358553 - RNA, 19 nt, Artificial Sequence
  Description of Artificial Sequence: Synthetic oligonucleotide
gggaugaaggugggcuucu

SEQ ID NO: 1358554 - RNA, 19 nt, Artificial Sequence
  Description of Artificial Sequence: Synthetic oligonucleotide
aggucaccgucaggugguu

SEQ ID NO: 1358555 - RNA, 19 nt, Artificial Sequence
  Description of Artificial Sequence: Synthetic oligonucleotide
cuucggcaucaaagucaua

SEQ ID NO: 1358556 - RNA, 19 nt, Artificial Sequence
  Description of Artificial Sequence: Synthetic oligonucleotide
cccacugggcugggguagc

SEQ ID NO: 1358557 - RNA, 19 nt, Artificial Sequence
  Description of Artificial Sequence: Synthetic oligonucleotide
cccgaacauccacgugcug

SEQ ID NO: 1358558 - RNA, 19 nt, Artificial Sequence
  Description of Artificial Sequence: Synthetic oligonucleotide
cuguuggacuuuggcugcu

SEQ ID NO: 1358559 - RNA, 19 nt, Artificial Sequence
  Description of Artificial Sequence: Synthetic oligonucleotide
gggugugcaaucacucguu

SEQ ID NO: 1358560 - RNA, 19 nt, Artificial Sequence
  Description of Artificial Sequence: Synthetic oligonucleotide
ggguccgaguccugcugcu

SEQ ID NO: 1358561 - RNA, 19 nt, Artificial Sequence
  Description of Artificial Sequence: Synthetic oligonucleotide
cauccacgugcugguaaau

SEQ ID NO: 1358562 - RNA, 19 nt, Artificial Sequence
  Description of Artificial Sequence: Synthetic oligonucleotide
gggcuggcguugggaacac

SEQ ID NO: 1358563 - RNA, 19 nt, Artificial Sequence
  Description of Artificial Sequence: Synthetic oligonucleotide
ccccggggcugguauccca

SEQ ID NO: 1358564 - RNA, 19 nt, Artificial Sequence
  Description of Artificial Sequence: Synthetic oligonucleotide
ccgcuguuucuguuuccgu

SEQ ID NO: 1358565 - RNA, 19 nt, Artificial Sequence
  Description of Artificial Sequence: Synthetic oligonucleotide
ggcuggcguugggaacaca

SEQ ID NO: 1358566 - RNA, 19 nt, Artificial Sequence
  Description of Artificial Sequence: Synthetic oligonucleotide
gccccgguaccggaauccu

SEQ ID NO: 1358567 - RNA, 19 nt, Artificial Sequence
  Description of Artificial Sequence: Synthetic oligonucleotide
cccuaccgauccaucucau

SEQ ID NO: 1358568 - RNA, 19 nt, Artificial Sequence
  Description of Artificial Sequence: Synthetic oligonucleotide
gguuuaccccggggcuggu

SEQ ID NO: 1358569 - RNA, 19 nt, Artificial Sequence
  Description of Artificial Sequence: Synthetic oligonucleotide
cgaggggucagccgcuguu

SEQ ID NO: 1358570 - RNA, 19 nt, Artificial Sequence
  Description of Artificial Sequence: Synthetic oligonucleotide
cugccgccauagccauauu

SEQ ID NO: 1358571 - RNA, 19 nt, Artificial Sequence
  Description of Artificial Sequence: Synthetic oligonucleotide
uuuugcacagauaagaggg

SEQ ID NO: 1358572 - RNA, 19 nt, Artificial Sequence
  Description of Artificial Sequence: Synthetic oligonucleotide
aagaacaacaggcucaccc

SEQ ID NO: 1358573 - RNA, 19 nt, Artificial Sequence
  Description of Artificial Sequence: Synthetic oligonucleotide
aaggcuuugaaaccggucc

SEQ ID NO: 1358574 - RNA, 19 nt, Artificial Sequence
  Description of Artificial Sequence: Synthetic oligonucleotide
aagaacuacaugcccagcc

SEQ ID NO: 1358575 - RNA, 19 nt, Artificial Sequence
  Description of Artificial Sequence: Synthetic oligonucleotide
aauggcaacaucccaaauc

SEQ ID NO: 1358576 - RNA, 19 nt, Artificial Sequence
  Description of Artificial Sequence: Synthetic oligonucleotide
aaagugcucaggccgaccc

SEQ ID NO: 1358577 - RNA, 19 nt, Artificial Sequence
  Description of Artificial Sequence: Synthetic oligonucleotide
ugcagcagaacacugaucu

SEQ ID NO: 1358578 - RNA, 19 nt, Artificial Sequence
  Description of Artificial Sequence: Synthetic oligonucleotide
uuucagagagacuccaugg

SEQ ID NO: 1358579 - RNA, 19 nt, Artificial Sequence
  Description of Artificial Sequence: Synthetic oligonucleotide
uucaggacgagcauaaaga

SEQ ID NO: 1358580 - RNA, 19 nt, Artificial Sequence
  Description of Artificial Sequence: Synthetic oligonucleotide
uugauugacuggaaugugg

SEQ ID NO: 1358581 - RNA, 19 nt, Artificial Sequence
  Description of Artificial Sequence: Synthetic oligonucleotide
aaacagaacuuuucauggg

SEQ ID NO: 1358582 - RNA, 19 nt, Artificial Sequence
  Description of Artificial Sequence: Synthetic oligonucleotide
aaucuaucuggagaagggc

SEQ ID NO: 1358583 - RNA, 19 nt, Artificial Sequence
  Description of Artificial Sequence: Synthetic oligonucleotide
ucacccaauggcaacaucc

SEQ ID NO: 1358584 - RNA, 19 nt, Artificial Sequence
  Description of Artificial Sequence: Synthetic oligonucleotide
aggacaccaaucucuaugc

SEQ ID NO: 1358585 - RNA, 19 nt, Artificial Sequence
  Description of Artificial Sequence: Synthetic oligonucleotide
aaaucuaucuggagaaggg

SEQ ID NO: 1358586 - RNA, 19 nt, Artificial Sequence
  Description of Artificial Sequence: Synthetic oligonucleotide
agcauaaagacucccacug

SEQ ID NO: 1358587 - RNA, 19 nt, Artificial Sequence
  Description of Artificial Sequence: Synthetic oligonucleotide
uuuucagagagacuccaug

SEQ ID NO: 1358588 - RNA, 19 nt, Artificial Sequence
  Description of Artificial Sequence: Synthetic oligonucleotide
auucggaacacuuuucuug

SEQ ID NO: 1358589 - RNA, 19 nt, Artificial Sequence
  Description of Artificial Sequence: Synthetic oligonucleotide
aggacgagcauaaagacuc

SEQ ID NO: 1358590 - RNA, 19 nt, Artificial Sequence
  Description of Artificial Sequence: Synthetic oligonucleotide
cuuguagauuccaaugggg

SEQ ID NO: 1358591 - RNA, 19 nt, Artificial Sequence
  Description of Artificial Sequence: Synthetic oligonucleotide
aaucucuaugcugagaggu

SEQ ID NO: 1358592 - RNA, 19 nt, Artificial Sequence
  Description of Artificial Sequence: Synthetic oligonucleotide
ucgcauucaacugugaccc

SEQ ID NO: 1358593 - RNA, 19 nt, Artificial Sequence
  Description of Artificial Sequence: Synthetic oligonucleotide
ucagagagacuccauggag

SEQ ID NO: 1358594 - RNA, 19 nt, Artificial Sequence
  Description of Artificial Sequence: Synthetic oligonucleotide
uucccugcccauuucaacg

SEQ ID NO: 1358595 - RNA, 19 nt, Artificial Sequence
  Description of Artificial Sequence: Synthetic oligonucleotide
uugugcgccaacaggacgg

SEQ ID NO: 1358596 - RNA, 19 nt, Artificial Sequence
  Description of Artificial Sequence: Synthetic oligonucleotide
ugggaacaugcuaucaggg

SEQ ID NO: 1358597 - RNA, 19 nt, Artificial Sequence
  Description of Artificial Sequence: Synthetic oligonucleotide
agaacuacaugcccagccg

SEQ ID NO: 1358598 - RNA, 19 nt, Artificial Sequence
  Description of Artificial Sequence: Synthetic oligonucleotide
ugucggaauauucggaaca

SEQ ID NO: 1358599 - RNA, 19 nt, Artificial Sequence
  Description of Artificial Sequence: Synthetic oligonucleotide
ucccaaaucuaucuggaga

SEQ ID NO: 1358600 - RNA, 19 nt, Artificial Sequence
  Description of Artificial Sequence: Synthetic oligonucleotide
agauucaggcaccagagga

SEQ ID NO: 1358601 - RNA, 19 nt, Artificial Sequence
  Description of Artificial Sequence: Synthetic oligonucleotide
aauauucggaacacuuuuc

SEQ ID NO: 1358602 - RNA, 19 nt, Artificial Sequence
  Description of Artificial Sequence: Synthetic oligonucleotide
ugauucgaucugcugaaag

SEQ ID NO: 1358603 - RNA, 19 nt, Artificial Sequence
  Description of Artificial Sequence: Synthetic oligonucleotide
ugaggcgauccauugauug

SEQ ID NO: 1358604 - RNA, 19 nt, Artificial Sequence
  Description of Artificial Sequence: Synthetic oligonucleotide
aacaucccaaaucuaucug

SEQ ID NO: 1358605 - RNA, 19 nt, Artificial Sequence
  Description of Artificial Sequence: Synthetic oligonucleotide
ugguuagagugcuugugcg

SEQ ID NO: 1358606 - RNA, 19 nt, Artificial Sequence
  Description of Artificial Sequence: Synthetic oligonucleotide
ucuaucuggagaagggcug

SEQ ID NO: 1358607 - RNA, 19 nt, Artificial Sequence
  Description of Artificial Sequence: Synthetic oligonucleotide
aauacccgcggcaaacagc

SEQ ID NO: 1358608 - RNA, 19 nt, Artificial Sequence
  Description of Artificial Sequence: Synthetic oligonucleotide
gacaccaaucucuaugcug

SEQ ID NO: 1358609 - RNA, 19 nt, Artificial Sequence
  Description of Artificial Sequence: Synthetic oligonucleotide
uguaguuuuccugucguca

SEQ ID NO: 1358610 - RNA, 19 nt, Artificial Sequence
  Description of Artificial Sequence: Synthetic oligonucleotide
acaacugcaccccaagucu

SEQ ID NO: 1358611 - RNA, 19 nt, Artificial Sequence
  Description of Artificial Sequence: Synthetic oligonucleotide
uugaaaccgguccaggaac

SEQ ID NO: 1358612 - RNA, 19 nt, Artificial Sequence
  Description of Artificial Sequence: Synthetic oligonucleotide
auauucggaacacuuuucu

SEQ ID NO: 1358613 - RNA, 19 nt, Artificial Sequence
  Description of Artificial Sequence: Synthetic oligonucleotide
gucacuuugguaaucaaac

SEQ ID NO: 1358614 - RNA, 19 nt, Artificial Sequence
  Description of Artificial Sequence: Synthetic oligonucleotide
agucuuuucaauacccgcg

SEQ ID NO: 1358615 - RNA, 19 nt, Artificial Sequence
  Description of Artificial Sequence: Synthetic oligonucleotide
caucguuccuuauaucugc

SEQ ID NO: 1358616 - RNA, 19 nt, Artificial Sequence
  Description of Artificial Sequence: Synthetic oligonucleotide
gauguggacuugcaugucc

SEQ ID NO: 1358617 - RNA, 19 nt, Artificial Sequence
  Description of Artificial Sequence: Synthetic oligonucleotide
gagcauaucgcauucaacu

SEQ ID NO: 1358618 - RNA, 19 nt, Artificial Sequence
  Description of Artificial Sequence: Synthetic oligonucleotide
gaguucgggagacaauggg

SEQ ID NO: 1358619 - RNA, 19 nt, Artificial Sequence
  Description of Artificial Sequence: Synthetic oligonucleotide
aaagaacuacaugcccagc

SEQ ID NO: 1358620 - RNA, 19 nt, Artificial Sequence
  Description of Artificial Sequence: Synthetic oligonucleotide
uucagagagacuccaugga

SEQ ID NO: 1358621 - RNA, 19 nt, Artificial Sequence
  Description of Artificial Sequence: Synthetic oligonucleotide
gaggucuaaaugacaaagg

SEQ ID NO: 1358622 - RNA, 19 nt, Artificial Sequence
  Description of Artificial Sequence: Synthetic oligonucleotide
agaacacugaucuugucuu

SEQ ID NO: 1358623 - RNA, 19 nt, Artificial Sequence
  Description of Artificial Sequence: Synthetic oligonucleotide
uugcuuguaguuuuccugu

SEQ ID NO: 1358624 - RNA, 19 nt, Artificial Sequence
  Description of Artificial Sequence: Synthetic oligonucleotide
cuucgggucaucauccgcc

SEQ ID NO: 1358625 - RNA, 19 nt, Artificial Sequence
  Description of Artificial Sequence: Synthetic oligonucleotide
agcauaucgcauucaacug

SEQ ID NO: 1358626 - RNA, 19 nt, Artificial Sequence
  Description of Artificial Sequence: Synthetic oligonucleotide
auaaagacucccacugucg

SEQ ID NO: 1358627 - RNA, 19 nt, Artificial Sequence
  Description of Artificial Sequence: Synthetic oligonucleotide
cauaaagacucccacuguc

SEQ ID NO: 1358628 - RNA, 19 nt, Artificial Sequence
  Description of Artificial Sequence: Synthetic oligonucleotide
gauccauugauugacugga

SEQ ID NO: 1358629 - RNA, 19 nt, Artificial Sequence
  Description of Artificial Sequence: Synthetic oligonucleotide
agaacaacaggcucaccca

SEQ ID NO: 1358630 - RNA, 19 nt, Artificial Sequence
  Description of Artificial Sequence: Synthetic oligonucleotide
acagauaagaggggacagc

SEQ ID NO: 1358631 - RNA, 19 nt, Artificial Sequence
  Description of Artificial Sequence: Synthetic oligonucleotide
cagaggaaagugcucaggc

SEQ ID NO: 1358632 - RNA, 19 nt, Artificial Sequence
  Description of Artificial Sequence: Synthetic oligonucleotide
ugguaaucaaacucauccu

SEQ ID NO: 1358633 - RNA, 19 nt, Artificial Sequence
  Description of Artificial Sequence: Synthetic oligonucleotide
uccgagcccaauuugcuug

SEQ ID NO: 1358634 - RNA, 19 nt, Artificial Sequence
  Description of Artificial Sequence: Synthetic oligonucleotide
agaccgaccuuccgcauac

SEQ ID NO: 1358635 - RNA, 19 nt, Artificial Sequence
  Description of Artificial Sequence: Synthetic oligonucleotide
uccgcauacacugggaaca

SEQ ID NO: 1358636 - RNA, 19 nt, Artificial Sequence
  Description of Artificial Sequence: Synthetic oligonucleotide
gaugauucgaucugcugaa

SEQ ID NO: 1358637 - RNA, 19 nt, Artificial Sequence
  Description of Artificial Sequence: Synthetic oligonucleotide
uugagcauaucgcauucaa

SEQ ID NO: 1358638 - RNA, 19 nt, Artificial Sequence
  Description of Artificial Sequence: Synthetic oligonucleotide
cugguuagagugcuugugc

SEQ ID NO: 1358639 - RNA, 19 nt, Artificial Sequence
  Description of Artificial Sequence: Synthetic oligonucleotide
ggagcacuugagcauaucg

SEQ ID NO: 1358640 - RNA, 19 nt, Artificial Sequence
  Description of Artificial Sequence: Synthetic oligonucleotide
ucuuccgggacaauccccu

SEQ ID NO: 1358641 - RNA, 19 nt, Artificial Sequence
  Description of Artificial Sequence: Synthetic oligonucleotide
acggucaacacugccuucc

SEQ ID NO: 1358642 - RNA, 19 nt, Artificial Sequence
  Description of Artificial Sequence: Synthetic oligonucleotide
agaaacuguggcaucuugg

SEQ ID NO: 1358643 - RNA, 19 nt, Artificial Sequence
  Description of Artificial Sequence: Synthetic oligonucleotide
cuggaggggacuuccaagc

SEQ ID NO: 1358644 - RNA, 19 nt, Artificial Sequence
  Description of Artificial Sequence: Synthetic oligonucleotide
guuagagugcuugugcgcc

SEQ ID NO: 1358645 - RNA, 19 nt, Artificial Sequence
  Description of Artificial Sequence: Synthetic oligonucleotide
uccgccuaggagauucagg

SEQ ID NO: 1358646 - RNA, 19 nt, Artificial Sequence
  Description of Artificial Sequence: Synthetic oligonucleotide
uguucacccaaggacacca

SEQ ID NO: 1358647 - RNA, 19 nt, Artificial Sequence
  Description of Artificial Sequence: Synthetic oligonucleotide
uuggcuucgggucaucauc

SEQ ID NO: 1358648 - RNA, 19 nt, Artificial Sequence
  Description of Artificial Sequence: Synthetic oligonucleotide
ggaggucuaaaugacaaag

SEQ ID NO: 1358649 - RNA, 19 nt, Artificial Sequence
  Description of Artificial Sequence: Synthetic oligonucleotide
ugagcauaucgcauucaac

SEQ ID NO: 1358650 - RNA, 19 nt, Artificial Sequence
  Description of Artificial Sequence: Synthetic oligonucleotide
agugcuugugcgccaacag

SEQ ID NO: 1358651 - RNA, 19 nt, Artificial Sequence
  Description of Artificial Sequence: Synthetic oligonucleotide
ucuuuucaauacccgcggc

SEQ ID NO: 1358652 - RNA, 19 nt, Artificial Sequence
  Description of Artificial Sequence: Synthetic oligonucleotide
gagguaucugagcugccag

SEQ ID NO: 1358653 - RNA, 19 nt, Artificial Sequence
  Description of Artificial Sequence: Synthetic oligonucleotide
uggggugucccuucagggg

SEQ ID NO: 1358654 - RNA, 19 nt, Artificial Sequence
  Description of Artificial Sequence: Synthetic oligonucleotide
uucaggggaccgaacaacu

SEQ ID NO: 1358655 - RNA, 19 nt, Artificial Sequence
  Description of Artificial Sequence: Synthetic oligonucleotide
uuccuuauaucugcugaag

SEQ ID NO: 1358656 - RNA, 19 nt, Artificial Sequence
  Description of Artificial Sequence: Synthetic oligonucleotide
auggaguccaucucagcug

SEQ ID NO: 1358657 - RNA, 19 nt, Artificial Sequence
  Description of Artificial Sequence: Synthetic oligonucleotide
ugcacagauaagaggggac

SEQ ID NO: 1358658 - RNA, 19 nt, Artificial Sequence
  Description of Artificial Sequence: Synthetic oligonucleotide
acaacaggcucacccaaug

SEQ ID NO: 1358659 - RNA, 19 nt, Artificial Sequence
  Description of Artificial Sequence: Synthetic oligonucleotide
ugacuguucagaguuggga

SEQ ID NO: 1358660 - RNA, 19 nt, Artificial Sequence
  Description of Artificial Sequence: Synthetic oligonucleotide
acuggucggcuccuggugg

SEQ ID NO: 1358661 - RNA, 19 nt, Artificial Sequence
  Description of Artificial Sequence: Synthetic oligonucleotide
acugucggaauauucggaa

SEQ ID NO: 1358662 - RNA, 19 nt, Artificial Sequence
  Description of Artificial Sequence: Synthetic oligonucleotide
ugaaaccgguccaggaacu

SEQ ID NO: 1358663 - RNA, 19 nt, Artificial Sequence
  Description of Artificial Sequence: Synthetic oligonucleotide
gagcacuugagcauaucgc

SEQ ID NO: 1358664 - RNA, 19 nt, Artificial Sequence
  Description of Artificial Sequence: Synthetic oligonucleotide
ucuaugcugagaggugggg

SEQ ID NO: 1358665 - RNA, 19 nt, Artificial Sequence
  Description of Artificial Sequence: Synthetic oligonucleotide
aaccgguccaggaacucac

SEQ ID NO: 1358666 - RNA, 19 nt, Artificial Sequence
  Description of Artificial Sequence: Synthetic oligonucleotide
uucggucaagcacauacuu

SEQ ID NO: 1358667 - RNA, 19 nt, Artificial Sequence
  Description of Artificial Sequence: Synthetic oligonucleotide
cauucaacugugacccagc

SEQ ID NO: 1358668 - RNA, 19 nt, Artificial Sequence
  Description of Artificial Sequence: Synthetic oligonucleotide
guaguuuuccugucgucac

SEQ ID NO: 1358669 - RNA, 19 nt, Artificial Sequence
  Description of Artificial Sequence: Synthetic oligonucleotide
caaucucuaugcugagagg

SEQ ID NO: 1358670 - RNA, 19 nt, Artificial Sequence
  Description of Artificial Sequence: Synthetic oligonucleotide
agcugccgaacuuucuggg

SEQ ID NO: 1358671 - RNA, 19 nt, Artificial Sequence
  Description of Artificial Sequence: Synthetic oligonucleotide
acaauccccucaucuauca

SEQ ID NO: 1358672 - RNA, 19 nt, Artificial Sequence
  Description of Artificial Sequence: Synthetic oligonucleotide
caggggaccgaacaacugc

SEQ ID NO: 1358673 - RNA, 19 nt, Artificial Sequence
  Description of Artificial Sequence: Synthetic oligonucleotide
gaauauucggaacacuuuu

SEQ ID NO: 1358674 - RNA, 19 nt, Artificial Sequence
  Description of Artificial Sequence: Synthetic oligonucleotide
uuuaaguccucuggccuca

SEQ ID NO: 1358675 - RNA, 19 nt, Artificial Sequence
  Description of Artificial Sequence: Synthetic oligonucleotide
accuuccgcauacacuggg

SEQ ID NO: 1358676 - RNA, 19 nt, Artificial Sequence
  Description of Artificial Sequence: Synthetic oligonucleotide
uguccgagcccaauuugcu

SEQ ID NO: 1358677 - RNA, 19 nt, Artificial Sequence
  Description of Artificial Sequence: Synthetic oligonucleotide
accgaccuuccgcauacac

SEQ ID NO: 1358678 - RNA, 19 nt, Artificial Sequence
  Description of Artificial Sequence: Synthetic oligonucleotide
ucauccgccuaggagauuc

SEQ ID NO: 1358679 - RNA, 19 nt, Artificial Sequence
  Description of Artificial Sequence: Synthetic oligonucleotide
agccgcacaaagaaagcac

SEQ ID NO: 1358680 - RNA, 19 nt, Artificial Sequence
  Description of Artificial Sequence: Synthetic oligonucleotide
gaggggacuuccaagccag

SEQ ID NO: 1358681 - RNA, 19 nt, Artificial Sequence
  Description of Artificial Sequence: Synthetic oligonucleotide
uucgggagacaaugggacc

SEQ ID NO: 1358682 - RNA, 19 nt, Artificial Sequence
  Description of Artificial Sequence: Synthetic oligonucleotide
ucaggggaccgaacaacug

SEQ ID NO: 1358683 - RNA, 19 nt, Artificial Sequence
  Description of Artificial Sequence: Synthetic oligonucleotide
uguggguuccaaagaacua

SEQ ID NO: 1358684 - RNA, 19 nt, Artificial Sequence
  Description of Artificial Sequence: Synthetic oligonucleotide
uuucaugggcacugcacaa

SEQ ID NO: 1358685 - RNA, 19 nt, Artificial Sequence
  Description of Artificial Sequence: Synthetic oligonucleotide
gguuucuuuggcaagugug

SEQ ID NO: 1358686 - RNA, 19 nt, Artificial Sequence
  Description of Artificial Sequence: Synthetic oligonucleotide
aaagccccagagaccgacc

SEQ ID NO: 1358687 - RNA, 19 nt, Artificial Sequence
  Description of Artificial Sequence: Synthetic oligonucleotide
gauguucacccaaggacac

SEQ ID NO: 1358688 - RNA, 19 nt, Artificial Sequence
  Description of Artificial Sequence: Synthetic oligonucleotide
agcuggaggucuaaaugac

SEQ ID NO: 1358689 - RNA, 19 nt, Artificial Sequence
  Description of Artificial Sequence: Synthetic oligonucleotide
uugcacagauaagagggga

SEQ ID NO: 1358690 - RNA, 19 nt, Artificial Sequence
  Description of Artificial Sequence: Synthetic oligonucleotide
uucagcacaucguuccuua

SEQ ID NO: 1358691 - RNA, 19 nt, Artificial Sequence
  Description of Artificial Sequence: Synthetic oligonucleotide
auuuucaggacgagcauaa

SEQ ID NO: 1358692 - RNA, 19 nt, Artificial Sequence
  Description of Artificial Sequence: Synthetic oligonucleotide
gagcccaauuugcuuguag

SEQ ID NO: 1358693 - RNA, 19 nt, Artificial Sequence
  Description of Artificial Sequence: Synthetic oligonucleotide
guucgggagacaaugggac

SEQ ID NO: 1358694 - RNA, 19 nt, Artificial Sequence
  Description of Artificial Sequence: Synthetic oligonucleotide
aucuaucuggagaagggcu

SEQ ID NO: 1358695 - RNA, 19 nt, Artificial Sequence
  Description of Artificial Sequence: Synthetic oligonucleotide
aacaugcuaucaggggaag

SEQ ID NO: 1358696 - RNA, 19 nt, Artificial Sequence
  Description of Artificial Sequence: Synthetic oligonucleotide
acaaaggcuuugaaaccgg

SEQ ID NO: 1358697 - RNA, 19 nt, Artificial Sequence
  Description of Artificial Sequence: Synthetic oligonucleotide
gcagagacgagcucgcuug

SEQ ID NO: 1358698 - RNA, 19 nt, Artificial Sequence
  Description of Artificial Sequence: Synthetic oligonucleotide
gcuuguaguuuuccugucg

SEQ ID NO: 1358699 - RNA, 19 nt, Artificial Sequence
  Description of Artificial Sequence: Synthetic oligonucleotide
aggccgacccuccaucccg

SEQ ID NO: 1358700 - RNA, 19 nt, Artificial Sequence
  Description of Artificial Sequence: Synthetic oligonucleotide
uuccgcauacacugggaac

SEQ ID NO: 1358701 - RNA, 19 nt, Artificial Sequence
  Description of Artificial Sequence: Synthetic oligonucleotide
auguggacuugcauguccg

SEQ ID NO: 1358702 - RNA, 19 nt, Artificial Sequence
  Description of Artificial Sequence: Synthetic oligonucleotide
auacccgcggcaaacagcu

SEQ ID NO: 1358703 - RNA, 19 nt, Artificial Sequence
  Description of Artificial Sequence: Synthetic oligonucleotide
uaguuuuccugucgucacu

SEQ ID NO: 1358704 - RNA, 19 nt, Artificial Sequence
  Description of Artificial Sequence: Synthetic oligonucleotide
acuacaugcccagccgcac

SEQ ID NO: 1358705 - RNA, 19 nt, Artificial Sequence
  Description of Artificial Sequence: Synthetic oligonucleotide
acaucguuccuuauaucug

SEQ ID NO: 1358706 - RNA, 19 nt, Artificial Sequence
  Description of Artificial Sequence: Synthetic oligonucleotide
uuccgggacaauccccuca

SEQ ID NO: 1358707 - RNA, 19 nt, Artificial Sequence
  Description of Artificial Sequence: Synthetic oligonucleotide
aaaccgguccaggaacuca

SEQ ID NO: 1358708 - RNA, 19 nt, Artificial Sequence
  Description of Artificial Sequence: Synthetic oligonucleotide
cugucggaauauucggaac

SEQ ID NO: 1358709 - RNA, 19 nt, Artificial Sequence
  Description of Artificial Sequence: Synthetic oligonucleotide
aacuuucuggggugucccu

SEQ ID NO: 1358710 - RNA, 19 nt, Artificial Sequence
  Description of Artificial Sequence: Synthetic oligonucleotide
uuagagugcuugugcgcca

SEQ ID NO: 1358711 - RNA, 19 nt, Artificial Sequence
  Description of Artificial Sequence: Synthetic oligonucleotide
ucggucaagcacauacuuu

SEQ ID NO: 1358712 - RNA, 19 nt, Artificial Sequence
  Description of Artificial Sequence: Synthetic oligonucleotide
cauguccgagcccaauuug

SEQ ID NO: 1358713 - RNA, 19 nt, Artificial Sequence
  Description of Artificial Sequence: Synthetic oligonucleotide
ccgccuaggagauucaggc

SEQ ID NO: 1358714 - RNA, 19 nt, Artificial Sequence
  Description of Artificial Sequence: Synthetic oligonucleotide
uggcugguuagagugcuug

SEQ ID NO: 1358715 - RNA, 19 nt, Artificial Sequence
  Description of Artificial Sequence: Synthetic oligonucleotide
gaccgaacaacugcacccc

SEQ ID NO: 1358716 - RNA, 19 nt, Artificial Sequence
  Description of Artificial Sequence: Synthetic oligonucleotide
caauacccgcggcaaacag

SEQ ID NO: 1358717 - RNA, 19 nt, Artificial Sequence
  Description of Artificial Sequence: Synthetic oligonucleotide
aggcuuugaaaccggucca

SEQ ID NO: 1358718 - RNA, 19 nt, Artificial Sequence
  Description of Artificial Sequence: Synthetic oligonucleotide
ucaauacccgcggcaaaca

SEQ ID NO: 1358719 - RNA, 19 nt, Artificial Sequence
  Description of Artificial Sequence: Synthetic oligonucleotide
gugacccagccauauuuug

SEQ ID NO: 1358720 - RNA, 19 nt, Artificial Sequence
  Description of Artificial Sequence: Synthetic oligonucleotide
gacgagcauaaagacuccc

SEQ ID NO: 1358721 - RNA, 19 nt, Artificial Sequence
  Description of Artificial Sequence: Synthetic oligonucleotide
aggcaccagaggaaagugc

SEQ ID NO: 1358722 - RNA, 19 nt, Artificial Sequence
  Description of Artificial Sequence: Synthetic oligonucleotide
gguuagagugcuugugcgc

SEQ ID NO: 1358723 - RNA, 19 nt, Artificial Sequence
  Description of Artificial Sequence: Synthetic oligonucleotide
ugccgaacuuucuggggug

SEQ ID NO: 1358724 - RNA, 19 nt, Artificial Sequence
  Description of Artificial Sequence: Synthetic oligonucleotide
gaaagccccagagaccgac

SEQ ID NO: 1358725 - RNA, 19 nt, Artificial Sequence
  Description of Artificial Sequence: Synthetic oligonucleotide
aguucgggagacaauggga

SEQ ID NO: 1358726 - RNA, 19 nt, Artificial Sequence
  Description of Artificial Sequence: Synthetic oligonucleotide
ucaggccgacccuccaucc

SEQ ID NO: 1358727 - RNA, 19 nt, Artificial Sequence
  Description of Artificial Sequence: Synthetic oligonucleotide
gaacaacaggcucacccaa

SEQ ID NO: 1358728 - RNA, 19 nt, Artificial Sequence
  Description of Artificial Sequence: Synthetic oligonucleotide
cccagccgcacaaagaaag

SEQ ID NO: 1358729 - RNA, 19 nt, Artificial Sequence
  Description of Artificial Sequence: Synthetic oligonucleotide
agagacgagcucgcuuggc

SEQ ID NO: 1358730 - RNA, 19 nt, Artificial Sequence
  Description of Artificial Sequence: Synthetic oligonucleotide
cucuuccgggacaaucccc

SEQ ID NO: 1358731 - RNA, 19 nt, Artificial Sequence
  Description of Artificial Sequence: Synthetic oligonucleotide
uuguaguuuuccugucguc

SEQ ID NO: 1358732 - RNA, 19 nt, Artificial Sequence
  Description of Artificial Sequence: Synthetic oligonucleotide
guuccuuauaucugcugaa

SEQ ID NO: 1358733 - RNA, 19 nt, Artificial Sequence
  Description of Artificial Sequence: Synthetic oligonucleotide
uggaggucuaaaugacaaa

SEQ ID NO: 1358734 - RNA, 19 nt, Artificial Sequence
  Description of Artificial Sequence: Synthetic oligonucleotide
uguggacuugcauguccga

SEQ ID NO: 1358735 - RNA, 19 nt, Artificial Sequence
  Description of Artificial Sequence: Synthetic oligonucleotide
agcuccgaguucgggagac

SEQ ID NO: 1358736 - RNA, 19 nt, Artificial Sequence
  Description of Artificial Sequence: Synthetic oligonucleotide
ccacugucggaauauucgg

SEQ ID NO: 1358737 - RNA, 19 nt, Artificial Sequence
  Description of Artificial Sequence: Synthetic oligonucleotide
uccgggacaauccccucau

SEQ ID NO: 1358738 - RNA, 19 nt, Artificial Sequence
  Description of Artificial Sequence: Synthetic oligonucleotide
gagcauaaagacucccacu

SEQ ID NO: 1358739 - RNA, 19 nt, Artificial Sequence
  Description of Artificial Sequence: Synthetic oligonucleotide
uucgggucaucauccgccu

SEQ ID NO: 1358740 - RNA, 19 nt, Artificial Sequence
  Description of Artificial Sequence: Synthetic oligonucleotide
cagggaugauucgaucugc

SEQ ID NO: 1358741 - RNA, 19 nt, Artificial Sequence
  Description of Artificial Sequence: Synthetic oligonucleotide
acaggcucacccaauggca

SEQ ID NO: 1358742 - RNA, 19 nt, Artificial Sequence
  Description of Artificial Sequence: Synthetic oligonucleotide
cagagaccgaccuuccgca

SEQ ID NO: 1358743 - RNA, 19 nt, Artificial Sequence
  Description of Artificial Sequence: Synthetic oligonucleotide
gacaauccccucaucuauc

SEQ ID NO: 1358744 - RNA, 19 nt, Artificial Sequence
  Description of Artificial Sequence: Synthetic oligonucleotide
gaaagugcucaggccgacc

SEQ ID NO: 1358745 - RNA, 19 nt, Artificial Sequence
  Description of Artificial Sequence: Synthetic oligonucleotide
aucucuaugcugagaggug

SEQ ID NO: 1358746 - RNA, 19 nt, Artificial Sequence
  Description of Artificial Sequence: Synthetic oligonucleotide
cuuguaguuuuccugucgu

SEQ ID NO: 1358747 - RNA, 19 nt, Artificial Sequence
  Description of Artificial Sequence: Synthetic oligonucleotide
cugagagguggggucaaag

SEQ ID NO: 1358748 - RNA, 19 nt, Artificial Sequence
  Description of Artificial Sequence: Synthetic oligonucleotide
ccagagaccgaccuuccgc

SEQ ID NO: 1358749 - RNA, 19 nt, Artificial Sequence
  Description of Artificial Sequence: Synthetic oligonucleotide
acgagcauaaagacuccca

SEQ ID NO: 1358750 - RNA, 19 nt, Artificial Sequence
  Description of Artificial Sequence: Synthetic oligonucleotide
agagugcuugugcgccaac

SEQ ID NO: 1358751 - RNA, 19 nt, Artificial Sequence
  Description of Artificial Sequence: Synthetic oligonucleotide
cgauccauugauugacugg

SEQ ID NO: 1358752 - RNA, 19 nt, Artificial Sequence
  Description of Artificial Sequence: Synthetic oligonucleotide
gcugccgaacuuucugggg

SEQ ID NO: 1358753 - RNA, 19 nt, Artificial Sequence
  Description of Artificial Sequence: Synthetic oligonucleotide
gggaccgaacaacugcacc

SEQ ID NO: 1358754 - RNA, 19 nt, Artificial Sequence
  Description of Artificial Sequence: Synthetic oligonucleotide
cuccgcugucccauucucc

SEQ ID NO: 1358755 - RNA, 19 nt, Artificial Sequence
  Description of Artificial Sequence: Synthetic oligonucleotide
ucuuggcuucgggucauca

SEQ ID NO: 1358756 - RNA, 19 nt, Artificial Sequence
  Description of Artificial Sequence: Synthetic oligonucleotide
gcauucaacugugacccag

SEQ ID NO: 1358757 - RNA, 19 nt, Artificial Sequence
  Description of Artificial Sequence: Synthetic oligonucleotide
cacugucggaauauucgga

SEQ ID NO: 1358758 - RNA, 19 nt, Artificial Sequence
  Description of Artificial Sequence: Synthetic oligonucleotide
cuugaggcgauccauugau

SEQ ID NO: 1358759 - RNA, 19 nt, Artificial Sequence
  Description of Artificial Sequence: Synthetic oligonucleotide
gucgucacuuugguaauca

SEQ ID NO: 1358760 - RNA, 19 nt, Artificial Sequence
  Description of Artificial Sequence: Synthetic oligonucleotide
ccuaggagauucaggcacc

SEQ ID NO: 1358761 - RNA, 19 nt, Artificial Sequence
  Description of Artificial Sequence: Synthetic oligonucleotide
uccuuugguucugugccuc

SEQ ID NO: 1358762 - RNA, 19 nt, Artificial Sequence
  Description of Artificial Sequence: Synthetic oligonucleotide
caccaaucucuaugcugag

SEQ ID NO: 1358763 - RNA, 19 nt, Artificial Sequence
  Description of Artificial Sequence: Synthetic oligonucleotide
agacgagcucgcuuggcuu

SEQ ID NO: 1358764 - RNA, 19 nt, Artificial Sequence
  Description of Artificial Sequence: Synthetic oligonucleotide
ccccaagucuuuucaauac

SEQ ID NO: 1358765 - RNA, 19 nt, Artificial Sequence
  Description of Artificial Sequence: Synthetic oligonucleotide
ucgucacuuugguaaucaa

SEQ ID NO: 1358766 - RNA, 19 nt, Artificial Sequence
  Description of Artificial Sequence: Synthetic oligonucleotide
gcgauccauugauugacug

SEQ ID NO: 1358767 - RNA, 19 nt, Artificial Sequence
  Description of Artificial Sequence: Synthetic oligonucleotide
uugaggcgauccauugauu

SEQ ID NO: 1358768 - RNA, 19 nt, Artificial Sequence
  Description of Artificial Sequence: Synthetic oligonucleotide
uccgaguucgggagacaau

SEQ ID NO: 1358769 - RNA, 19 nt, Artificial Sequence
  Description of Artificial Sequence: Synthetic oligonucleotide
cucacugguagccgccauc

SEQ ID NO: 1358770 - RNA, 19 nt, Artificial Sequence
  Description of Artificial Sequence: Synthetic oligonucleotide
aggaaagugcucaggccga

SEQ ID NO: 1358771 - RNA, 19 nt, Artificial Sequence
  Description of Artificial Sequence: Synthetic oligonucleotide
gagacgagcucgcuuggcu

SEQ ID NO: 1358772 - RNA, 19 nt, Artificial Sequence
  Description of Artificial Sequence: Synthetic oligonucleotide
accaaucucuaugcugaga

SEQ ID NO: 1358773 - RNA, 19 nt, Artificial Sequence
  Description of Artificial Sequence: Synthetic oligonucleotide
aggggaccgaacaacugca

SEQ ID NO: 1358774 - RNA, 19 nt, Artificial Sequence
  Description of Artificial Sequence: Synthetic oligonucleotide
cagaguugggagaaacugu

SEQ ID NO: 1358775 - RNA, 19 nt, Artificial Sequence
  Description of Artificial Sequence: Synthetic oligonucleotide
cagauaagaggggacagcu

SEQ ID NO: 1358776 - RNA, 19 nt, Artificial Sequence
  Description of Artificial Sequence: Synthetic oligonucleotide
uuuucaggacgagcauaaa

SEQ ID NO: 1358777 - RNA, 19 nt, Artificial Sequence
  Description of Artificial Sequence: Synthetic oligonucleotide
ccaugcuucgggucacugg

SEQ ID NO: 1358778 - RNA, 19 nt, Artificial Sequence
  Description of Artificial Sequence: Synthetic oligonucleotide
gagugcuugugcgccaaca

SEQ ID NO: 1358779 - RNA, 19 nt, Artificial Sequence
  Description of Artificial Sequence: Synthetic oligonucleotide
ucggaacacuuuucuugau

SEQ ID NO: 1358780 - RNA, 19 nt, Artificial Sequence
  Description of Artificial Sequence: Synthetic oligonucleotide
gaagcuguguggguuccaa

SEQ ID NO: 1358781 - RNA, 19 nt, Artificial Sequence
  Description of Artificial Sequence: Synthetic oligonucleotide
uggcaacaucccaaaucua

SEQ ID NO: 1358782 - RNA, 19 nt, Artificial Sequence
  Description of Artificial Sequence: Synthetic oligonucleotide
acucccacugucggaauau

SEQ ID NO: 1358783 - RNA, 19 nt, Artificial Sequence
  Description of Artificial Sequence: Synthetic oligonucleotide
agcuucguggggagguauc

SEQ ID NO: 1358784 - RNA, 19 nt, Artificial Sequence
  Description of Artificial Sequence: Synthetic oligonucleotide
aagcuucguggggagguau

SEQ ID NO: 1358785 - RNA, 19 nt, Artificial Sequence
  Description of Artificial Sequence: Synthetic oligonucleotide
aggugcagcagaacacuga

SEQ ID NO: 1358786 - RNA, 19 nt, Artificial Sequence
  Description of Artificial Sequence: Synthetic oligonucleotide
aucguuccuuauaucugcu

SEQ ID NO: 1358787 - RNA, 19 nt, Artificial Sequence
  Description of Artificial Sequence: Synthetic oligonucleotide
uagagugcuugugcgccaa

SEQ ID NO: 1358788 - RNA, 19 nt, Artificial Sequence
  Description of Artificial Sequence: Synthetic oligonucleotide
ugucgucacuuugguaauc

SEQ ID NO: 1358789 - RNA, 19 nt, Artificial Sequence
  Description of Artificial Sequence: Synthetic oligonucleotide
gacggucaacacugccuuc

SEQ ID NO: 1358790 - RNA, 19 nt, Artificial Sequence
  Description of Artificial Sequence: Synthetic oligonucleotide
caggacgagcauaaagacu

SEQ ID NO: 1358791 - RNA, 19 nt, Artificial Sequence
  Description of Artificial Sequence: Synthetic oligonucleotide
gagaccgaccuuccgcaua

SEQ ID NO: 1358792 - RNA, 19 nt, Artificial Sequence
  Description of Artificial Sequence: Synthetic oligonucleotide
cuucguggggagguaucug

SEQ ID NO: 1358793 - RNA, 19 nt, Artificial Sequence
  Description of Artificial Sequence: Synthetic oligonucleotide
uccugucgucacuuuggua

SEQ ID NO: 1358794 - RNA, 19 nt, Artificial Sequence
  Description of Artificial Sequence: Synthetic oligonucleotide
gcuucgggucaucauccgc

SEQ ID NO: 1358795 - RNA, 19 nt, Artificial Sequence
  Description of Artificial Sequence: Synthetic oligonucleotide
auccgccuaggagauucag

SEQ ID NO: 1358796 - RNA, 19 nt, Artificial Sequence
  Description of Artificial Sequence: Synthetic oligonucleotide
ccagccgcacaaagaaagc

SEQ ID NO: 1358797 - RNA, 19 nt, Artificial Sequence
  Description of Artificial Sequence: Synthetic oligonucleotide
uaucuggagaagggcuguc

SEQ ID NO: 1358798 - RNA, 19 nt, Artificial Sequence
  Description of Artificial Sequence: Synthetic oligonucleotide
ggcuucgggucaucauccg

SEQ ID NO: 1358799 - RNA, 19 nt, Artificial Sequence
  Description of Artificial Sequence: Synthetic oligonucleotide
ccaagccagcagaaucucc

SEQ ID NO: 1358800 - RNA, 19 nt, Artificial Sequence
  Description of Artificial Sequence: Synthetic oligonucleotide
caacaggacggucaacacu

SEQ ID NO: 1358801 - RNA, 19 nt, Artificial Sequence
  Description of Artificial Sequence: Synthetic oligonucleotide
ugugcgccaacaggacggu

SEQ ID NO: 1358802 - RNA, 19 nt, Artificial Sequence
  Description of Artificial Sequence: Synthetic oligonucleotide
agagaccgaccuuccgcau

SEQ ID NO: 1358803 - RNA, 19 nt, Artificial Sequence
  Description of Artificial Sequence: Synthetic oligonucleotide
ccaacaggacggucaacac

SEQ ID NO: 1358804 - RNA, 19 nt, Artificial Sequence
  Description of Artificial Sequence: Synthetic oligonucleotide
ccgcacaaagaaagcacac

SEQ ID NO: 1358805 - RNA, 19 nt, Artificial Sequence
  Description of Artificial Sequence: Synthetic oligonucleotide
gcuucgggucacuggucgg

SEQ ID NO: 1358806 - RNA, 19 nt, Artificial Sequence
  Description of Artificial Sequence: Synthetic oligonucleotide
auaucgcauucaacuguga

SEQ ID NO: 1358807 - RNA, 19 nt, Artificial Sequence
  Description of Artificial Sequence: Synthetic oligonucleotide
gacucccacugucggaaua

SEQ ID NO: 1358808 - RNA, 19 nt, Artificial Sequence
  Description of Artificial Sequence: Synthetic oligonucleotide
ggagguaucugagcugcca

SEQ ID NO: 1358809 - RNA, 19 nt, Artificial Sequence
  Description of Artificial Sequence: Synthetic oligonucleotide
cugccgaacuuucuggggu

SEQ ID NO: 1358810 - RNA, 19 nt, Artificial Sequence
  Description of Artificial Sequence: Synthetic oligonucleotide
gcuaucaggggaagcugug

SEQ ID NO: 1358811 - RNA, 19 nt, Artificial Sequence
  Description of Artificial Sequence: Synthetic oligonucleotide
augcuucgggucacugguc

SEQ ID NO: 1358812 - RNA, 19 nt, Artificial Sequence
  Description of Artificial Sequence: Synthetic oligonucleotide
ggacaauccccucaucuau

SEQ ID NO: 1358813 - RNA, 19 nt, Artificial Sequence
  Description of Artificial Sequence: Synthetic oligonucleotide
cacuugagcauaucgcauu

SEQ ID NO: 1358814 - RNA, 19 nt, Artificial Sequence
  Description of Artificial Sequence: Synthetic oligonucleotide
gccgcacaaagaaagcaca

SEQ ID NO: 1358815 - RNA, 19 nt, Artificial Sequence
  Description of Artificial Sequence: Synthetic oligonucleotide
ggcaccagaggaaagugcu

SEQ ID NO: 1358816 - RNA, 19 nt, Artificial Sequence
  Description of Artificial Sequence: Synthetic oligonucleotide
augauucgaucugcugaaa

SEQ ID NO: 1358817 - RNA, 19 nt, Artificial Sequence
  Description of Artificial Sequence: Synthetic oligonucleotide
ucgggucaucauccgccua

SEQ ID NO: 1358818 - RNA, 19 nt, Artificial Sequence
  Description of Artificial Sequence: Synthetic oligonucleotide
gacgagcucgcuuggcuuu

SEQ ID NO: 1358819 - RNA, 19 nt, Artificial Sequence
  Description of Artificial Sequence: Synthetic oligonucleotide
caucauccgccuaggagau

SEQ ID NO: 1358820 - RNA, 19 nt, Artificial Sequence
  Description of Artificial Sequence: Synthetic oligonucleotide
aggaagcuggaggucuaaa

SEQ ID NO: 1358821 - RNA, 19 nt, Artificial Sequence
  Description of Artificial Sequence: Synthetic oligonucleotide
ggacgagcauaaagacucc

SEQ ID NO: 1358822 - RNA, 19 nt, Artificial Sequence
  Description of Artificial Sequence: Synthetic oligonucleotide
cccgcggcaaacagcugcc

SEQ ID NO: 1358823 - RNA, 19 nt, Artificial Sequence
  Description of Artificial Sequence: Synthetic oligonucleotide
auccauugauugacuggaa

SEQ ID NO: 1358824 - RNA, 19 nt, Artificial Sequence
  Description of Artificial Sequence: Synthetic oligonucleotide
cuccgaguucgggagacaa

SEQ ID NO: 1358825 - RNA, 19 nt, Artificial Sequence
  Description of Artificial Sequence: Synthetic oligonucleotide
aucuuggcuucgggucauc

SEQ ID NO: 1358826 - RNA, 19 nt, Artificial Sequence
  Description of Artificial Sequence: Synthetic oligonucleotide
ggaauauucggaacacuuu

SEQ ID NO: 1358827 - RNA, 19 nt, Artificial Sequence
  Description of Artificial Sequence: Synthetic oligonucleotide
uggucggcuccugguggug

SEQ ID NO: 1358828 - RNA, 19 nt, Artificial Sequence
  Description of Artificial Sequence: Synthetic oligonucleotide
gcauaaagacucccacugu

SEQ ID NO: 1358829 - RNA, 19 nt, Artificial Sequence
  Description of Artificial Sequence: Synthetic oligonucleotide
caccccaagucuuuucaau

SEQ ID NO: 1358830 - RNA, 19 nt, Artificial Sequence
  Description of Artificial Sequence: Synthetic oligonucleotide
gaagcuucguggggaggua

SEQ ID NO: 1358831 - RNA, 19 nt, Artificial Sequence
  Description of Artificial Sequence: Synthetic oligonucleotide
gugcagcagaacacugauc

SEQ ID NO: 1358832 - RNA, 19 nt, Artificial Sequence
  Description of Artificial Sequence: Synthetic oligonucleotide
cuugcauguccgagcccaa

SEQ ID NO: 1358833 - RNA, 19 nt, Artificial Sequence
  Description of Artificial Sequence: Synthetic oligonucleotide
cccuucaggggaccgaaca

SEQ ID NO: 1358834 - RNA, 19 nt, Artificial Sequence
  Description of Artificial Sequence: Synthetic oligonucleotide
ggucaucauccgccuagga

SEQ ID NO: 1358835 - RNA, 19 nt, Artificial Sequence
  Description of Artificial Sequence: Synthetic oligonucleotide
cgucacuuugguaaucaaa

SEQ ID NO: 1358836 - RNA, 19 nt, Artificial Sequence
  Description of Artificial Sequence: Synthetic oligonucleotide
cuaucaggggaagcugugu

SEQ ID NO: 1358837 - RNA, 19 nt, Artificial Sequence
  Description of Artificial Sequence: Synthetic oligonucleotide
cauccgccuaggagauuca

SEQ ID NO: 1358838 - RNA, 19 nt, Artificial Sequence
  Description of Artificial Sequence: Synthetic oligonucleotide
cugucgucacuuugguaau

SEQ ID NO: 1358839 - RNA, 19 nt, Artificial Sequence
  Description of Artificial Sequence: Synthetic oligonucleotide
cgcggcaaacagcugcccc

SEQ ID NO: 1358840 - RNA, 19 nt, Artificial Sequence
  Description of Artificial Sequence: Synthetic oligonucleotide
accgguccaggaacucacu

SEQ ID NO: 1358841 - RNA, 19 nt, Artificial Sequence
  Description of Artificial Sequence: Synthetic oligonucleotide
ccccagagaccgaccuucc

SEQ ID NO: 1358842 - RNA, 19 nt, Artificial Sequence
  Description of Artificial Sequence: Synthetic oligonucleotide
cgcugucccauucucccug

SEQ ID NO: 1358843 - RNA, 19 nt, Artificial Sequence
  Description of Artificial Sequence: Synthetic oligonucleotide
caacugcaccccaagucuu

SEQ ID NO: 1358844 - RNA, 19 nt, Artificial Sequence
  Description of Artificial Sequence: Synthetic oligonucleotide
ggugucccuucaggggacc

SEQ ID NO: 1358845 - RNA, 19 nt, Artificial Sequence
  Description of Artificial Sequence: Synthetic oligonucleotide
guccgagcccaauuugcuu

SEQ ID NO: 1358846 - RNA, 19 nt, Artificial Sequence
  Description of Artificial Sequence: Synthetic oligonucleotide
ggccgacccuccaucccgg

SEQ ID NO: 1358847 - RNA, 19 nt, Artificial Sequence
  Description of Artificial Sequence: Synthetic oligonucleotide
gcauguccgagcccaauuu

SEQ ID NO: 1358848 - RNA, 19 nt, Artificial Sequence
  Description of Artificial Sequence: Synthetic oligonucleotide
caaggacaccaaucucuau

SEQ ID NO: 1358849 - RNA, 19 nt, Artificial Sequence
  Description of Artificial Sequence: Synthetic oligonucleotide
ggggaccgaacaacugcac

SEQ ID NO: 1358850 - RNA, 19 nt, Artificial Sequence
  Description of Artificial Sequence: Synthetic oligonucleotide
cggaauauucggaacacuu

SEQ ID NO: 1358851 - RNA, 19 nt, Artificial Sequence
  Description of Artificial Sequence: Synthetic oligonucleotide
cgcacaaagaaagcacaca

SEQ ID NO: 1358852 - RNA, 19 nt, Artificial Sequence
  Description of Artificial Sequence: Synthetic oligonucleotide
ccggucaacaggacuggaa

SEQ ID NO: 1358853 - RNA, 19 nt, Artificial Sequence
  Description of Artificial Sequence: Synthetic oligonucleotide
guucagcacaucguuccuu

SEQ ID NO: 1358854 - RNA, 19 nt, Artificial Sequence
  Description of Artificial Sequence: Synthetic oligonucleotide
cggucaagcacauacuuuu

SEQ ID NO: 1358855 - RNA, 19 nt, Artificial Sequence
  Description of Artificial Sequence: Synthetic oligonucleotide
gccgacccuccaucccggg

SEQ ID NO: 1358856 - RNA, 19 nt, Artificial Sequence
  Description of Artificial Sequence: Synthetic oligonucleotide
gacccuccaucccgggaau

SEQ ID NO: 1358857 - RNA, 19 nt, Artificial Sequence
  Description of Artificial Sequence: Synthetic oligonucleotide
cuggucggcuccugguggu

SEQ ID NO: 1358858 - RNA, 19 nt, Artificial Sequence
  Description of Artificial Sequence: Synthetic oligonucleotide
gcgccaacaggacggucaa

SEQ ID NO: 1358859 - RNA, 19 nt, Artificial Sequence
  Description of Artificial Sequence: Synthetic oligonucleotide
ccgaccuuccgcauacacu

SEQ ID NO: 1358860 - RNA, 19 nt, Artificial Sequence
  Description of Artificial Sequence: Synthetic oligonucleotide
gcuucguggggagguaucu

SEQ ID NO: 1358861 - RNA, 19 nt, Artificial Sequence
  Description of Artificial Sequence: Synthetic oligonucleotide
cgggacaauccccucaucu

SEQ ID NO: 1358862 - RNA, 19 nt, Artificial Sequence
  Description of Artificial Sequence: Synthetic oligonucleotide
gaccgaccuuccgcauaca

SEQ ID NO: 1358863 - RNA, 19 nt, Artificial Sequence
  Description of Artificial Sequence: Synthetic oligonucleotide
ggucacuggucggcuccug

SEQ ID NO: 1358864 - RNA, 19 nt, Artificial Sequence
  Description of Artificial Sequence: Synthetic oligonucleotide
ggaagcuguguggguucca

SEQ ID NO: 1358865 - RNA, 19 nt, Artificial Sequence
  Description of Artificial Sequence: Synthetic oligonucleotide
aucauccgccuaggagauu

SEQ ID NO: 1358866 - RNA, 19 nt, Artificial Sequence
  Description of Artificial Sequence: Synthetic oligonucleotide
ggcgauccauugauugacu

SEQ ID NO: 1358867 - RNA, 19 nt, Artificial Sequence
  Description of Artificial Sequence: Synthetic oligonucleotide
cgacccuccaucccgggaa

SEQ ID NO: 1358868 - RNA, 19 nt, Artificial Sequence
  Description of Artificial Sequence: Synthetic oligonucleotide
caaugggaccuggacuuuu

SEQ ID NO: 1358869 - RNA, 19 nt, Artificial Sequence
  Description of Artificial Sequence: Synthetic oligonucleotide
ccgaacuuucugggguguc

SEQ ID NO: 1358870 - RNA, 19 nt, Artificial Sequence
  Description of Artificial Sequence: Synthetic oligonucleotide
cgccuaggagauucaggca

SEQ ID NO: 1358871 - RNA, 19 nt, Artificial Sequence
  Description of Artificial Sequence: Synthetic oligonucleotide
gucuucggucaagcacaua

SEQ ID NO: 1358872 - RNA, 19 nt, Artificial Sequence
  Description of Artificial Sequence: Synthetic oligonucleotide
gccggucaacaggacugga

SEQ ID NO: 1358873 - RNA, 19 nt, Artificial Sequence
  Description of Artificial Sequence: Synthetic oligonucleotide
ccgggacaauccccucauc

SEQ ID NO: 1358874 - RNA, 19 nt, Artificial Sequence
  Description of Artificial Sequence: Synthetic oligonucleotide
cuggcugguuagagugcuu

SEQ ID NO: 1358875 - RNA, 19 nt, Artificial Sequence
  Description of Artificial Sequence: Synthetic oligonucleotide
ccgagcccaauuugcuugu

SEQ ID NO: 1358876 - RNA, 19 nt, Artificial Sequence
  Description of Artificial Sequence: Synthetic oligonucleotide
gccgaacuuucuggggugu

SEQ ID NO: 1358877 - RNA, 19 nt, Artificial Sequence
  Description of Artificial Sequence: Synthetic oligonucleotide
gcucaggccgacccuccau

SEQ ID NO: 1358878 - RNA, 19 nt, Artificial Sequence
  Description of Artificial Sequence: Synthetic oligonucleotide
ccgacccuccaucccggga

SEQ ID NO: 1358879 - RNA, 19 nt, Artificial Sequence
  Description of Artificial Sequence: Synthetic oligonucleotide
gcccagccgcacaaagaaa

SEQ ID NO: 1358880 - RNA, 19 nt, Artificial Sequence
  Description of Artificial Sequence: Synthetic oligonucleotide
cggucaacacugccuucca

SEQ ID NO: 1358881 - RNA, 19 nt, Artificial Sequence
  Description of Artificial Sequence: Synthetic oligonucleotide
gcuccgaguucgggagaca

SEQ ID NO: 1358882 - RNA, 19 nt, Artificial Sequence
  Description of Artificial Sequence: Synthetic oligonucleotide
cgcauucaacugugaccca

SEQ ID NO: 1358883 - RNA, 19 nt, Artificial Sequence
  Description of Artificial Sequence: Synthetic oligonucleotide
cucccacugucggaauauu

SEQ ID NO: 1358884 - RNA, 19 nt, Artificial Sequence
  Description of Artificial Sequence: Synthetic oligonucleotide
ccucacugguagccgccau

SEQ ID NO: 1358885 - RNA, 19 nt, Artificial Sequence
  Description of Artificial Sequence: Synthetic oligonucleotide
ccgcauacacugggaacau

SEQ ID NO: 1358886 - RNA, 19 nt, Artificial Sequence
  Description of Artificial Sequence: Synthetic oligonucleotide
cgagcccaauuugcuugua

SEQ ID NO: 1358887 - RNA, 19 nt, Artificial Sequence
  Description of Artificial Sequence: Synthetic oligonucleotide
aaagauggcccacauacac

SEQ ID NO: 1358888 - RNA, 19 nt, Artificial Sequence
  Description of Artificial Sequence: Synthetic oligonucleotide
aaauucuuaaagccgauca

SEQ ID NO: 1358889 - RNA, 19 nt, Artificial Sequence
  Description of Artificial Sequence: Synthetic oligonucleotide
aauauggacuuccaucugg

SEQ ID NO: 1358890 - RNA, 19 nt, Artificial Sequence
  Description of Artificial Sequence: Synthetic oligonucleotide
aauaacuuguauaagucuc

SEQ ID NO: 1358891 - RNA, 19 nt, Artificial Sequence
  Description of Artificial Sequence: Synthetic oligonucleotide
auuugcuuuaacucuaugg

SEQ ID NO: 1358892 - RNA, 19 nt, Artificial Sequence
  Description of Artificial Sequence: Synthetic oligonucleotide
uuugcuuuaacucuauggu

SEQ ID NO: 1358893 - RNA, 19 nt, Artificial Sequence
  Description of Artificial Sequence: Synthetic oligonucleotide
cuuucauuagaaaugggcc

SEQ ID NO: 1358894 - RNA, 19 nt, Artificial Sequence
  Description of Artificial Sequence: Synthetic oligonucleotide
agagaaucgggccagaauc

SEQ ID NO: 1358895 - RNA, 19 nt, Artificial Sequence
  Description of Artificial Sequence: Synthetic oligonucleotide
ugcuuuaacucuaugguag

SEQ ID NO: 1358896 - RNA, 19 nt, Artificial Sequence
  Description of Artificial Sequence: Synthetic oligonucleotide
uguucaguaaacuauagua

SEQ ID NO: 1358897 - RNA, 19 nt, Artificial Sequence
  Description of Artificial Sequence: Synthetic oligonucleotide
aacucuaugguagaaauca

SEQ ID NO: 1358898 - RNA, 19 nt, Artificial Sequence
  Description of Artificial Sequence: Synthetic oligonucleotide
caauuuucucaacugaucg

SEQ ID NO: 1358899 - RNA, 19 nt, Artificial Sequence
  Description of Artificial Sequence: Synthetic oligonucleotide
uguauaagucucaacacac

SEQ ID NO: 1358900 - RNA, 19 nt, Artificial Sequence
  Description of Artificial Sequence: Synthetic oligonucleotide
cauucguucaucuacugcc

SEQ ID NO: 1358901 - RNA, 19 nt, Artificial Sequence
  Description of Artificial Sequence: Synthetic oligonucleotide
uuuguugagagguugacaa

SEQ ID NO: 1358902 - RNA, 19 nt, Artificial Sequence
  Description of Artificial Sequence: Synthetic oligonucleotide
aaguuuaccaggcaauaug

SEQ ID NO: 1358903 - RNA, 19 nt, Artificial Sequence
  Description of Artificial Sequence: Synthetic oligonucleotide
gauaacugaagcaagacuc

SEQ ID NO: 1358904 - RNA, 19 nt, Artificial Sequence
  Description of Artificial Sequence: Synthetic oligonucleotide
ucguaauugucccaaaggc

SEQ ID NO: 1358905 - RNA, 19 nt, Artificial Sequence
  Description of Artificial Sequence: Synthetic oligonucleotide
uguucugugagaaaguuua

SEQ ID NO: 1358906 - RNA, 19 nt, Artificial Sequence
  Description of Artificial Sequence: Synthetic oligonucleotide
guagaaaucagcuugacua

SEQ ID NO: 1358907 - RNA, 19 nt, Artificial Sequence
  Description of Artificial Sequence: Synthetic oligonucleotide
agaaaucucauggacaaac

SEQ ID NO: 1358908 - RNA, 19 nt, Artificial Sequence
  Description of Artificial Sequence: Synthetic oligonucleotide
cuuguuuagacauucguuc

SEQ ID NO: 1358909 - RNA, 19 nt, Artificial Sequence
  Description of Artificial Sequence: Synthetic oligonucleotide
ucgaauaacuuguauaagu

SEQ ID NO: 1358910 - RNA, 19 nt, Artificial Sequence
  Description of Artificial Sequence: Synthetic oligonucleotide
uagacauucguucaucuac

SEQ ID NO: 1358911 - RNA, 19 nt, Artificial Sequence
  Description of Artificial Sequence: Synthetic oligonucleotide
auggacuuccaucuggggc

SEQ ID NO: 1358912 - RNA, 19 nt, Artificial Sequence
  Description of Artificial Sequence: Synthetic oligonucleotide
aucggauacagucucaaag

SEQ ID NO: 1358913 - RNA, 19 nt, Artificial Sequence
  Description of Artificial Sequence: Synthetic oligonucleotide
ugagagucuuccauggccg

SEQ ID NO: 1358914 - RNA, 19 nt, Artificial Sequence
  Description of Artificial Sequence: Synthetic oligonucleotide
acaaggaacucugagaguc

SEQ ID NO: 1358915 - RNA, 19 nt, Artificial Sequence
  Description of Artificial Sequence: Synthetic oligonucleotide
ggaccuaagacucauaacc

SEQ ID NO: 1358916 - RNA, 19 nt, Artificial Sequence
  Description of Artificial Sequence: Synthetic oligonucleotide
gaucgaauaacuuguauaa

SEQ ID NO: 1358917 - RNA, 19 nt, Artificial Sequence
  Description of Artificial Sequence: Synthetic oligonucleotide
aguucagcacaucggauac

SEQ ID NO: 1358918 - RNA, 19 nt, Artificial Sequence
  Description of Artificial Sequence: Synthetic oligonucleotide
uuucauuagaaaugggccu

SEQ ID NO: 1358919 - RNA, 19 nt, Artificial Sequence
  Description of Artificial Sequence: Synthetic oligonucleotide
uucaguaaacuauaguaaa

SEQ ID NO: 1358920 - RNA, 19 nt, Artificial Sequence
  Description of Artificial Sequence: Synthetic oligonucleotide
uuccauacaauggaaaggc

SEQ ID NO: 1358921 - RNA, 19 nt, Artificial Sequence
  Description of Artificial Sequence: Synthetic oligonucleotide
uuaacucuaugguagaaau

SEQ ID NO: 1358922 - RNA, 19 nt, Artificial Sequence
  Description of Artificial Sequence: Synthetic oligonucleotide
uuuaccaggcaauauggac

SEQ ID NO: 1358923 - RNA, 19 nt, Artificial Sequence
  Description of Artificial Sequence: Synthetic oligonucleotide
aaagccgaucauuucaagu

SEQ ID NO: 1358924 - RNA, 19 nt, Artificial Sequence
  Description of Artificial Sequence: Synthetic oligonucleotide
acaauggaaaggcuuuugg

SEQ ID NO: 1358925 - RNA, 19 nt, Artificial Sequence
  Description of Artificial Sequence: Synthetic oligonucleotide
aagcugguaaaauggcuuc

SEQ ID NO: 1358926 - RNA, 19 nt, Artificial Sequence
  Description of Artificial Sequence: Synthetic oligonucleotide
agugcugcaucacugcugg

SEQ ID NO: 1358927 - RNA, 19 nt, Artificial Sequence
  Description of Artificial Sequence: Synthetic oligonucleotide
ugagagguugacaaagucu

SEQ ID NO: 1358928 - RNA, 19 nt, Artificial Sequence
  Description of Artificial Sequence: Synthetic oligonucleotide
ucugcauaguccuuguuga

SEQ ID NO: 1358929 - RNA, 19 nt, Artificial Sequence
  Description of Artificial Sequence: Synthetic oligonucleotide
gaugucacuggucugcaag

SEQ ID NO: 1358930 - RNA, 19 nt, Artificial Sequence
  Description of Artificial Sequence: Synthetic oligonucleotide
ucaucuuuucuuccuaaug

SEQ ID NO: 1358931 - RNA, 19 nt, Artificial Sequence
  Description of Artificial Sequence: Synthetic oligonucleotide
uaucuguucucccaggaac

SEQ ID NO: 1358932 - RNA, 19 nt, Artificial Sequence
  Description of Artificial Sequence: Synthetic oligonucleotide
ucuucagauaacugaagca

SEQ ID NO: 1358933 - RNA, 19 nt, Artificial Sequence
  Description of Artificial Sequence: Synthetic oligonucleotide
aaagcaauuuguucaguaa

SEQ ID NO: 1358934 - RNA, 19 nt, Artificial Sequence
  Description of Artificial Sequence: Synthetic oligonucleotide
cuuguauaagucucaacac

SEQ ID NO: 1358935 - RNA, 19 nt, Artificial Sequence
  Description of Artificial Sequence: Synthetic oligonucleotide
ucagauaacugaagcaaga

SEQ ID NO: 1358936 - RNA, 19 nt, Artificial Sequence
  Description of Artificial Sequence: Synthetic oligonucleotide
acauucguucaucuacugc

SEQ ID NO: 1358937 - RNA, 19 nt, Artificial Sequence
  Description of Artificial Sequence: Synthetic oligonucleotide
gaacuccacaucaagagcc

SEQ ID NO: 1358938 - RNA, 19 nt, Artificial Sequence
  Description of Artificial Sequence: Synthetic oligonucleotide
ugaucgaauaacuuguaua

SEQ ID NO: 1358939 - RNA, 19 nt, Artificial Sequence
  Description of Artificial Sequence: Synthetic oligonucleotide
ugcacuguccacauaagaa

SEQ ID NO: 1358940 - RNA, 19 nt, Artificial Sequence
  Description of Artificial Sequence: Synthetic oligonucleotide
cucguaauugucccaaagg

SEQ ID NO: 1358941 - RNA, 19 nt, Artificial Sequence
  Description of Artificial Sequence: Synthetic oligonucleotide
gauccugccaauuuucuca

SEQ ID NO: 1358942 - RNA, 19 nt, Artificial Sequence
  Description of Artificial Sequence: Synthetic oligonucleotide
aauucuuaaagccgaucau

SEQ ID NO: 1358943 - RNA, 19 nt, Artificial Sequence
  Description of Artificial Sequence: Synthetic oligonucleotide
uuccuuauugguccugcgg

SEQ ID NO: 1358944 - RNA, 19 nt, Artificial Sequence
  Description of Artificial Sequence: Synthetic oligonucleotide
aaggacaagcucugugagg

SEQ ID NO: 1358945 - RNA, 19 nt, Artificial Sequence
  Description of Artificial Sequence: Synthetic oligonucleotide
aaauggacgcugccuguac

SEQ ID NO: 1358946 - RNA, 19 nt, Artificial Sequence
  Description of Artificial Sequence: Synthetic oligonucleotide
aacugaucgaauaacuugu

SEQ ID NO: 1358947 - RNA, 19 nt, Artificial Sequence
  Description of Artificial Sequence: Synthetic oligonucleotide
ucaguaaacuauaguaaaa

SEQ ID NO: 1358948 - RNA, 19 nt, Artificial Sequence
  Description of Artificial Sequence: Synthetic oligonucleotide
uggacaauccugcugcuca

SEQ ID NO: 1358949 - RNA, 19 nt, Artificial Sequence
  Description of Artificial Sequence: Synthetic oligonucleotide
uaagucucaacacacucau

SEQ ID NO: 1358950 - RNA, 19 nt, Artificial Sequence
  Description of Artificial Sequence: Synthetic oligonucleotide
aguuuaccaggcaauaugg

SEQ ID NO: 1358951 - RNA, 19 nt, Artificial Sequence
  Description of Artificial Sequence: Synthetic oligonucleotide
aaaugggccuagcagaaau

SEQ ID NO: 1358952 - RNA, 19 nt, Artificial Sequence
  Description of Artificial Sequence: Synthetic oligonucleotide
aagccgaucauuucaaguu

SEQ ID NO: 1358953 - RNA, 19 nt, Artificial Sequence
  Description of Artificial Sequence: Synthetic oligonucleotide
aacaucucauuggaccagc

SEQ ID NO: 1358954 - RNA, 19 nt, Artificial Sequence
  Description of Artificial Sequence: Synthetic oligonucleotide
caaacacagagaaucgggc

SEQ ID NO: 1358955 - RNA, 19 nt, Artificial Sequence
  Description of Artificial Sequence: Synthetic oligonucleotide
agugaugcuucuaaggauc

SEQ ID NO: 1358956 - RNA, 19 nt, Artificial Sequence
  Description of Artificial Sequence: Synthetic oligonucleotide
ucucguaauugucccaaag

SEQ ID NO: 1358957 - RNA, 19 nt, Artificial Sequence
  Description of Artificial Sequence: Synthetic oligonucleotide
uggaccagcauuucucuag

SEQ ID NO: 1358958 - RNA, 19 nt, Artificial Sequence
  Description of Artificial Sequence: Synthetic oligonucleotide
ucggauacagucucaaagu

SEQ ID NO: 1358959 - RNA, 19 nt, Artificial Sequence
  Description of Artificial Sequence: Synthetic oligonucleotide
uccuuauugguccugcggu

SEQ ID NO: 1358960 - RNA, 19 nt, Artificial Sequence
  Description of Artificial Sequence: Synthetic oligonucleotide
cuuaaagccgaucauuuca

SEQ ID NO: 1358961 - RNA, 19 nt, Artificial Sequence
  Description of Artificial Sequence: Synthetic oligonucleotide
acaaacacagagaaucggg

SEQ ID NO: 1358962 - RNA, 19 nt, Artificial Sequence
  Description of Artificial Sequence: Synthetic oligonucleotide
cucuaugguagaaaucagc

SEQ ID NO: 1358963 - RNA, 19 nt, Artificial Sequence
  Description of Artificial Sequence: Synthetic oligonucleotide
agauggcccacauacacug

SEQ ID NO: 1358964 - RNA, 19 nt, Artificial Sequence
  Description of Artificial Sequence: Synthetic oligonucleotide
ucuuccuaaugucuucuug

SEQ ID NO: 1358965 - RNA, 19 nt, Artificial Sequence
  Description of Artificial Sequence: Synthetic oligonucleotide
agcaauuuguucaguaaac

SEQ ID NO: 1358966 - RNA, 19 nt, Artificial Sequence
  Description of Artificial Sequence: Synthetic oligonucleotide
agauaacugaagcaagacu

SEQ ID NO: 1358967 - RNA, 19 nt, Artificial Sequence
  Description of Artificial Sequence: Synthetic oligonucleotide
uguagucggaucuugucgu

SEQ ID NO: 1358968 - RNA, 19 nt, Artificial Sequence
  Description of Artificial Sequence: Synthetic oligonucleotide
ucuuguuuagacauucguu

SEQ ID NO: 1358969 - RNA, 19 nt, Artificial Sequence
  Description of Artificial Sequence: Synthetic oligonucleotide
augucacuggucugcaagc

SEQ ID NO: 1358970 - RNA, 19 nt, Artificial Sequence
  Description of Artificial Sequence: Synthetic oligonucleotide
auacacuggguagagguac

SEQ ID NO: 1358971 - RNA, 19 nt, Artificial Sequence
  Description of Artificial Sequence: Synthetic oligonucleotide
cuguagucggaucuugucg

SEQ ID NO: 1358972 - RNA, 19 nt, Artificial Sequence
  Description of Artificial Sequence: Synthetic oligonucleotide
cuucuggcuuguuugaggc

SEQ ID NO: 1358973 - RNA, 19 nt, Artificial Sequence
  Description of Artificial Sequence: Synthetic oligonucleotide
uuaaagccgaucauuucaa

SEQ ID NO: 1358974 - RNA, 19 nt, Artificial Sequence
  Description of Artificial Sequence: Synthetic oligonucleotide
gacaaacacagagaaucgg

SEQ ID NO: 1358975 - RNA, 19 nt, Artificial Sequence
  Description of Artificial Sequence: Synthetic oligonucleotide
uucuuaaagccgaucauuu

SEQ ID NO: 1358976 - RNA, 19 nt, Artificial Sequence
  Description of Artificial Sequence: Synthetic oligonucleotide
ucaagagccagcuguaguc

SEQ ID NO: 1358977 - RNA, 19 nt, Artificial Sequence
  Description of Artificial Sequence: Synthetic oligonucleotide
uaaagcaauuuguucagua

SEQ ID NO: 1358978 - RNA, 19 nt, Artificial Sequence
  Description of Artificial Sequence: Synthetic oligonucleotide
gaucuugucgucaucacuc

SEQ ID NO: 1358979 - RNA, 19 nt, Artificial Sequence
  Description of Artificial Sequence: Synthetic oligonucleotide
uagaaaucagcuugacuac

SEQ ID NO: 1358980 - RNA, 19 nt, Artificial Sequence
  Description of Artificial Sequence: Synthetic oligonucleotide
aaccucuucucguaauugu

SEQ ID NO: 1358981 - RNA, 19 nt, Artificial Sequence
  Description of Artificial Sequence: Synthetic oligonucleotide
aauugucccaaaggcacag

SEQ ID NO: 1358982 - RNA, 19 nt, Artificial Sequence
  Description of Artificial Sequence: Synthetic oligonucleotide
auaacugaagcaagacucg

SEQ ID NO: 1358983 - RNA, 19 nt, Artificial Sequence
  Description of Artificial Sequence: Synthetic oligonucleotide
uuguucaguaaacuauagu

SEQ ID NO: 1358984 - RNA, 19 nt, Artificial Sequence
  Description of Artificial Sequence: Synthetic oligonucleotide
cuugacuacaguaagauuu

SEQ ID NO: 1358985 - RNA, 19 nt, Artificial Sequence
  Description of Artificial Sequence: Synthetic oligonucleotide
cugacagaggaccuaagac

SEQ ID NO: 1358986 - RNA, 19 nt, Artificial Sequence
  Description of Artificial Sequence: Synthetic oligonucleotide
uggugcuuucauuagaaau

SEQ ID NO: 1358987 - RNA, 19 nt, Artificial Sequence
  Description of Artificial Sequence: Synthetic oligonucleotide
uggccgcugagauagauga

SEQ ID NO: 1358988 - RNA, 19 nt, Artificial Sequence
  Description of Artificial Sequence: Synthetic oligonucleotide
cuuguucccauguccacgc

SEQ ID NO: 1358989 - RNA, 19 nt, Artificial Sequence
  Description of Artificial Sequence: Synthetic oligonucleotide
cagcacaucggauacaguc

SEQ ID NO: 1358990 - RNA, 19 nt, Artificial Sequence
  Description of Artificial Sequence: Synthetic oligonucleotide
ucaacugaucgaauaacuu

SEQ ID NO: 1358991 - RNA, 19 nt, Artificial Sequence
  Description of Artificial Sequence: Synthetic oligonucleotide
aaaucagcuugacuacagu

SEQ ID NO: 1358992 - RNA, 19 nt, Artificial Sequence
  Description of Artificial Sequence: Synthetic oligonucleotide
aggaccuaagacucauaac

SEQ ID NO: 1358993 - RNA, 19 nt, Artificial Sequence
  Description of Artificial Sequence: Synthetic oligonucleotide
auggcuucagugcacuguc

SEQ ID NO: 1358994 - RNA, 19 nt, Artificial Sequence
  Description of Artificial Sequence: Synthetic oligonucleotide
gugcuuucauuagaaaugg

SEQ ID NO: 1358995 - RNA, 19 nt, Artificial Sequence
  Description of Artificial Sequence: Synthetic oligonucleotide
acucauaaccucuucucgu

SEQ ID NO: 1358996 - RNA, 19 nt, Artificial Sequence
  Description of Artificial Sequence: Synthetic oligonucleotide
ugacaaagucugcauaguc

SEQ ID NO: 1358997 - RNA, 19 nt, Artificial Sequence
  Description of Artificial Sequence: Synthetic oligonucleotide
cauuggaccagcauuucuc

SEQ ID NO: 1358998 - RNA, 19 nt, Artificial Sequence
  Description of Artificial Sequence: Synthetic oligonucleotide
ucaaaguacuugugugugc

SEQ ID NO: 1358999 - RNA, 19 nt, Artificial Sequence
  Description of Artificial Sequence: Synthetic oligonucleotide
guugcugggugacucagag

SEQ ID NO: 1359000 - RNA, 19 nt, Artificial Sequence
  Description of Artificial Sequence: Synthetic oligonucleotide
gaaaucagcuugacuacag

SEQ ID NO: 1359001 - RNA, 19 nt, Artificial Sequence
  Description of Artificial Sequence: Synthetic oligonucleotide
gaugcuucuaaggauccug

SEQ ID NO: 1359002 - RNA, 19 nt, Artificial Sequence
  Description of Artificial Sequence: Synthetic oligonucleotide
uuucucaacugaucgaaua

SEQ ID NO: 1359003 - RNA, 19 nt, Artificial Sequence
  Description of Artificial Sequence: Synthetic oligonucleotide
ucagguccugccaggaugc

SEQ ID NO: 1359004 - RNA, 19 nt, Artificial Sequence
  Description of Artificial Sequence: Synthetic oligonucleotide
aagcaagacucgcucaggu

SEQ ID NO: 1359005 - RNA, 19 nt, Artificial Sequence
  Description of Artificial Sequence: Synthetic oligonucleotide
cucuucucguaauuguccc

SEQ ID NO: 1359006 - RNA, 19 nt, Artificial Sequence
  Description of Artificial Sequence: Synthetic oligonucleotide
ugugccaacaaaggcagga

SEQ ID NO: 1359007 - RNA, 19 nt, Artificial Sequence
  Description of Artificial Sequence: Synthetic oligonucleotide
cuugucgucaucacucaug

SEQ ID NO: 1359008 - RNA, 19 nt, Artificial Sequence
  Description of Artificial Sequence: Synthetic oligonucleotide
ucugcaagcccaucuuuug

SEQ ID NO: 1359009 - RNA, 19 nt, Artificial Sequence
  Description of Artificial Sequence: Synthetic oligonucleotide
aucucauuggaccagcauu

SEQ ID NO: 1359010 - RNA, 19 nt, Artificial Sequence
  Description of Artificial Sequence: Synthetic oligonucleotide
gaagcucuugaugucacug

SEQ ID NO: 1359011 - RNA, 19 nt, Artificial Sequence
  Description of Artificial Sequence: Synthetic oligonucleotide
gaggacaagggucacuuuc

SEQ ID NO: 1359012 - RNA, 19 nt, Artificial Sequence
  Description of Artificial Sequence: Synthetic oligonucleotide
uguuuagacauucguucau

SEQ ID NO: 1359013 - RNA, 19 nt, Artificial Sequence
  Description of Artificial Sequence: Synthetic oligonucleotide
uugacuacaguaagauuua

SEQ ID NO: 1359014 - RNA, 19 nt, Artificial Sequence
  Description of Artificial Sequence: Synthetic oligonucleotide
gacagaggaccuaagacuc

SEQ ID NO: 1359015 - RNA, 19 nt, Artificial Sequence
  Description of Artificial Sequence: Synthetic oligonucleotide
uuugaggcgcuucaggcuu

SEQ ID NO: 1359016 - RNA, 19 nt, Artificial Sequence
  Description of Artificial Sequence: Synthetic oligonucleotide
auugguccugcgguaaagc

SEQ ID NO: 1359017 - RNA, 19 nt, Artificial Sequence
  Description of Artificial Sequence: Synthetic oligonucleotide
augccuagggcuguucugc

SEQ ID NO: 1359018 - RNA, 19 nt, Artificial Sequence
  Description of Artificial Sequence: Synthetic oligonucleotide
uuuuagucuccuuggugcu

SEQ ID NO: 1359019 - RNA, 19 nt, Artificial Sequence
  Description of Artificial Sequence: Synthetic oligonucleotide
uugagagguugacaaaguc

SEQ ID NO: 1359020 - RNA, 19 nt, Artificial Sequence
  Description of Artificial Sequence: Synthetic oligonucleotide
uauggacuuccaucugggg

SEQ ID NO: 1359021 - RNA, 19 nt, Artificial Sequence
  Description of Artificial Sequence: Synthetic oligonucleotide
ugcgguaaagccuggggac

SEQ ID NO: 1359022 - RNA, 19 nt, Artificial Sequence
  Description of Artificial Sequence: Synthetic oligonucleotide
gacggugugccaacaaagg

SEQ ID NO: 1359023 - RNA, 19 nt, Artificial Sequence
  Description of Artificial Sequence: Synthetic oligonucleotide
uuguaucuguucucccagg

SEQ ID NO: 1359024 - RNA, 19 nt, Artificial Sequence
  Description of Artificial Sequence: Synthetic oligonucleotide
ucuggggcgucuucuagcc

SEQ ID NO: 1359025 - RNA, 19 nt, Artificial Sequence
  Description of Artificial Sequence: Synthetic oligonucleotide
cuucuuguuuagacauucg

SEQ ID NO: 1359026 - RNA, 19 nt, Artificial Sequence
  Description of Artificial Sequence: Synthetic oligonucleotide
uaauugucccaaaggcaca

SEQ ID NO: 1359027 - RNA, 19 nt, Artificial Sequence
  Description of Artificial Sequence: Synthetic oligonucleotide
gcaagacucgcucaggucc

SEQ ID NO: 1359028 - RNA, 19 nt, Artificial Sequence
  Description of Artificial Sequence: Synthetic oligonucleotide
augucuucuuguuuagaca

SEQ ID NO: 1359029 - RNA, 19 nt, Artificial Sequence
  Description of Artificial Sequence: Synthetic oligonucleotide
gcuuucauuagaaaugggc

SEQ ID NO: 1359030 - RNA, 19 nt, Artificial Sequence
  Description of Artificial Sequence: Synthetic oligonucleotide
agcaaggacaagcucugug

SEQ ID NO: 1359031 - RNA, 19 nt, Artificial Sequence
  Description of Artificial Sequence: Synthetic oligonucleotide
ggcaauauggacuuccauc

SEQ ID NO: 1359032 - RNA, 19 nt, Artificial Sequence
  Description of Artificial Sequence: Synthetic oligonucleotide
aaaguuuaccaggcaauau

SEQ ID NO: 1359033 - RNA, 19 nt, Artificial Sequence
  Description of Artificial Sequence: Synthetic oligonucleotide
ucauuggaccagcauuucu

SEQ ID NO: 1359034 - RNA, 19 nt, Artificial Sequence
  Description of Artificial Sequence: Synthetic oligonucleotide
acucugagagucuuccaug

SEQ ID NO: 1359035 - RNA, 19 nt, Artificial Sequence
  Description of Artificial Sequence: Synthetic oligonucleotide
uaaagccgaucauuucaag

SEQ ID NO: 1359036 - RNA, 19 nt, Artificial Sequence
  Description of Artificial Sequence: Synthetic oligonucleotide
augccgaccagguuuguug

SEQ ID NO: 1359037 - RNA, 19 nt, Artificial Sequence
  Description of Artificial Sequence: Synthetic oligonucleotide
ucuuaaagccgaucauuuc

SEQ ID NO: 1359038 - RNA, 19 nt, Artificial Sequence
  Description of Artificial Sequence: Synthetic oligonucleotide
uucguucaucuacugccag

SEQ ID NO: 1359039 - RNA, 19 nt, Artificial Sequence
  Description of Artificial Sequence: Synthetic oligonucleotide
aggauggcuuccuuggucu

SEQ ID NO: 1359040 - RNA, 19 nt, Artificial Sequence
  Description of Artificial Sequence: Synthetic oligonucleotide
caaggacaagcucugugag

SEQ ID NO: 1359041 - RNA, 19 nt, Artificial Sequence
  Description of Artificial Sequence: Synthetic oligonucleotide
guugccuggucccuggcag

SEQ ID NO: 1359042 - RNA, 19 nt, Artificial Sequence
  Description of Artificial Sequence: Synthetic oligonucleotide
cucaaaguacuugugugug

SEQ ID NO: 1359043 - RNA, 19 nt, Artificial Sequence
  Description of Artificial Sequence: Synthetic oligonucleotide
ucuaggcugcuccauguuc

SEQ ID NO: 1359044 - RNA, 19 nt, Artificial Sequence
  Description of Artificial Sequence: Synthetic oligonucleotide
ucucaacugaucgaauaac

SEQ ID NO: 1359045 - RNA, 19 nt, Artificial Sequence
  Description of Artificial Sequence: Synthetic oligonucleotide
gaggaccuaagacucauaa

SEQ ID NO: 1359046 - RNA, 19 nt, Artificial Sequence
  Description of Artificial Sequence: Synthetic oligonucleotide
agcaagacucgcucagguc

SEQ ID NO: 1359047 - RNA, 19 nt, Artificial Sequence
  Description of Artificial Sequence: Synthetic oligonucleotide
aaugggccuagcagaaauc

SEQ ID NO: 1359048 - RNA, 19 nt, Artificial Sequence
  Description of Artificial Sequence: Synthetic oligonucleotide
cuucagauaacugaagcaa

SEQ ID NO: 1359049 - RNA, 19 nt, Artificial Sequence
  Description of Artificial Sequence: Synthetic oligonucleotide
uucauuagaaaugggccua

SEQ ID NO: 1359050 - RNA, 19 nt, Artificial Sequence
  Description of Artificial Sequence: Synthetic oligonucleotide
ucuagcccgucugugagug

SEQ ID NO: 1359051 - RNA, 19 nt, Artificial Sequence
  Description of Artificial Sequence: Synthetic oligonucleotide
cuucuagcccgucugugag

SEQ ID NO: 1359052 - RNA, 19 nt, Artificial Sequence
  Description of Artificial Sequence: Synthetic oligonucleotide
aucgaauaacuuguauaag

SEQ ID NO: 1359053 - RNA, 19 nt, Artificial Sequence
  Description of Artificial Sequence: Synthetic oligonucleotide
ucauuagaaaugggccuag

SEQ ID NO: 1359054 - RNA, 19 nt, Artificial Sequence
  Description of Artificial Sequence: Synthetic oligonucleotide
uccuuggugcuuucauuag

SEQ ID NO: 1359055 - RNA, 19 nt, Artificial Sequence
  Description of Artificial Sequence: Synthetic oligonucleotide
auaagucucaacacacuca

SEQ ID NO: 1359056 - RNA, 19 nt, Artificial Sequence
  Description of Artificial Sequence: Synthetic oligonucleotide
augcuucuaaggauccugc

SEQ ID NO: 1359057 - RNA, 19 nt, Artificial Sequence
  Description of Artificial Sequence: Synthetic oligonucleotide
cugaaggauggcuuccuug

SEQ ID NO: 1359058 - RNA, 19 nt, Artificial Sequence
  Description of Artificial Sequence: Synthetic oligonucleotide
ucggaucuugucgucauca

SEQ ID NO: 1359059 - RNA, 19 nt, Artificial Sequence
  Description of Artificial Sequence: Synthetic oligonucleotide
gacauucguucaucuacug

SEQ ID NO: 1359060 - RNA, 19 nt, Artificial Sequence
  Description of Artificial Sequence: Synthetic oligonucleotide
aagccauuccugaagccug

SEQ ID NO: 1359061 - RNA, 19 nt, Artificial Sequence
  Description of Artificial Sequence: Synthetic oligonucleotide
uuagacauucguucaucua

SEQ ID NO: 1359062 - RNA, 19 nt, Artificial Sequence
  Description of Artificial Sequence: Synthetic oligonucleotide
cuagcagaaaucucaugga

SEQ ID NO: 1359063 - RNA, 19 nt, Artificial Sequence
  Description of Artificial Sequence: Synthetic oligonucleotide
cuucuaaggauccugccaa

SEQ ID NO: 1359064 - RNA, 19 nt, Artificial Sequence
  Description of Artificial Sequence: Synthetic oligonucleotide
auucuuaaagccgaucauu

SEQ ID NO: 1359065 - RNA, 19 nt, Artificial Sequence
  Description of Artificial Sequence: Synthetic oligonucleotide
ugcuucuaaggauccugcc

SEQ ID NO: 1359066 - RNA, 19 nt, Artificial Sequence
  Description of Artificial Sequence: Synthetic oligonucleotide
uuuucucaacugaucgaau

SEQ ID NO: 1359067 - RNA, 19 nt, Artificial Sequence
  Description of Artificial Sequence: Synthetic oligonucleotide
ucucuaggcugcuccaugu

SEQ ID NO: 1359068 - RNA, 19 nt, Artificial Sequence
  Description of Artificial Sequence: Synthetic oligonucleotide
accuuguucccauguccac

SEQ ID NO: 1359069 - RNA, 19 nt, Artificial Sequence
  Description of Artificial Sequence: Synthetic oligonucleotide
acgugggcagacaaggaac

SEQ ID NO: 1359070 - RNA, 19 nt, Artificial Sequence
  Description of Artificial Sequence: Synthetic oligonucleotide
ugucccaaaggcacagaaa

SEQ ID NO: 1359071 - RNA, 19 nt, Artificial Sequence
  Description of Artificial Sequence: Synthetic oligonucleotide
cagauaacugaagcaagac

SEQ ID NO: 1359072 - RNA, 19 nt, Artificial Sequence
  Description of Artificial Sequence: Synthetic oligonucleotide
cauaagaagaggcugcacu

SEQ ID NO: 1359073 - RNA, 19 nt, Artificial Sequence
  Description of Artificial Sequence: Synthetic oligonucleotide
agcucuugaugucacuggu

SEQ ID NO: 1359074 - RNA, 19 nt, Artificial Sequence
  Description of Artificial Sequence: Synthetic oligonucleotide
caagagccagcuguagucg

SEQ ID NO: 1359075 - RNA, 19 nt, Artificial Sequence
  Description of Artificial Sequence: Synthetic oligonucleotide
cuuggugcuuucauuagaa

SEQ ID NO: 1359076 - RNA, 19 nt, Artificial Sequence
  Description of Artificial Sequence: Synthetic oligonucleotide
gaguucagcacaucggaua

SEQ ID NO: 1359077 - RNA, 19 nt, Artificial Sequence
  Description of Artificial Sequence: Synthetic oligonucleotide
acauaagaagaggcugcac

SEQ ID NO: 1359078 - RNA, 19 nt, Artificial Sequence
  Description of Artificial Sequence: Synthetic oligonucleotide
auuucucuaggcugcucca

SEQ ID NO: 1359079 - RNA, 19 nt, Artificial Sequence
  Description of Artificial Sequence: Synthetic oligonucleotide
auuuguucaguaaacuaua

SEQ ID NO: 1359080 - RNA, 19 nt, Artificial Sequence
  Description of Artificial Sequence: Synthetic oligonucleotide
cacaucaagagccagcugu

SEQ ID NO: 1359081 - RNA, 19 nt, Artificial Sequence
  Description of Artificial Sequence: Synthetic oligonucleotide
agacggugugccaacaaag

SEQ ID NO: 1359082 - RNA, 19 nt, Artificial Sequence
  Description of Artificial Sequence: Synthetic oligonucleotide
uucaccuuguucccauguc

SEQ ID NO: 1359083 - RNA, 19 nt, Artificial Sequence
  Description of Artificial Sequence: Synthetic oligonucleotide
cacagaaagcugguugagg

SEQ ID NO: 1359084 - RNA, 19 nt, Artificial Sequence
  Description of Artificial Sequence: Synthetic oligonucleotide
ggaacaucucauuggacca

SEQ ID NO: 1359085 - RNA, 19 nt, Artificial Sequence
  Description of Artificial Sequence: Synthetic oligonucleotide
uccuaaugucuucuuguuu

SEQ ID NO: 1359086 - RNA, 19 nt, Artificial Sequence
  Description of Artificial Sequence: Synthetic oligonucleotide
acuugugugugcucucaga

SEQ ID NO: 1359087 - RNA, 19 nt, Artificial Sequence
  Description of Artificial Sequence: Synthetic oligonucleotide
agaaaucagcuugacuaca

SEQ ID NO: 1359088 - RNA, 19 nt, Artificial Sequence
  Description of Artificial Sequence: Synthetic oligonucleotide
ccacauaagaagaggcugc

SEQ ID NO: 1359089 - RNA, 19 nt, Artificial Sequence
  Description of Artificial Sequence: Synthetic oligonucleotide
accucuucucguaauuguc

SEQ ID NO: 1359090 - RNA, 19 nt, Artificial Sequence
  Description of Artificial Sequence: Synthetic oligonucleotide
uuauugguccugcgguaaa

SEQ ID NO: 1359091 - RNA, 19 nt, Artificial Sequence
  Description of Artificial Sequence: Synthetic oligonucleotide
ggucugagaccacauacac

SEQ ID NO: 1359092 - RNA, 19 nt, Artificial Sequence
  Description of Artificial Sequence: Synthetic oligonucleotide
cgaauaacuuguauaaguc

SEQ ID NO: 1359093 - RNA, 19 nt, Artificial Sequence
  Description of Artificial Sequence: Synthetic oligonucleotide
ugcugcucagggcuggcac

SEQ ID NO: 1359094 - RNA, 19 nt, Artificial Sequence
  Description of Artificial Sequence: Synthetic oligonucleotide
gaaucgggccagaaucugc

SEQ ID NO: 1359095 - RNA, 19 nt, Artificial Sequence
  Description of Artificial Sequence: Synthetic oligonucleotide
gcacucuucagauaacuga

SEQ ID NO: 1359096 - RNA, 19 nt, Artificial Sequence
  Description of Artificial Sequence: Synthetic oligonucleotide
ggagcugacaggguuggcg

SEQ ID NO: 1359097 - RNA, 19 nt, Artificial Sequence
  Description of Artificial Sequence: Synthetic oligonucleotide
aucuugucgucaucacuca

SEQ ID NO: 1359098 - RNA, 19 nt, Artificial Sequence
  Description of Artificial Sequence: Synthetic oligonucleotide
uaaugucuucuuguuuaga

SEQ ID NO: 1359099 - RNA, 19 nt, Artificial Sequence
  Description of Artificial Sequence: Synthetic oligonucleotide
caucuacugccagaauucc

SEQ ID NO: 1359100 - RNA, 19 nt, Artificial Sequence
  Description of Artificial Sequence: Synthetic oligonucleotide
gaaucugcaaggucagccu

SEQ ID NO: 1359101 - RNA, 19 nt, Artificial Sequence
  Description of Artificial Sequence: Synthetic oligonucleotide
gagagucuuccauggccgc

SEQ ID NO: 1359102 - RNA, 19 nt, Artificial Sequence
  Description of Artificial Sequence: Synthetic oligonucleotide
ggucagccuccacagacgg

SEQ ID NO: 1359103 - RNA, 19 nt, Artificial Sequence
  Description of Artificial Sequence: Synthetic oligonucleotide
uccacagacggugugccaa

SEQ ID NO: 1359104 - RNA, 19 nt, Artificial Sequence
  Description of Artificial Sequence: Synthetic oligonucleotide
ccagaauuccuucacugac

SEQ ID NO: 1359105 - RNA, 19 nt, Artificial Sequence
  Description of Artificial Sequence: Synthetic oligonucleotide
ugccgaccagguuuguuga

SEQ ID NO: 1359106 - RNA, 19 nt, Artificial Sequence
  Description of Artificial Sequence: Synthetic oligonucleotide
augggccuagcagaaaucu

SEQ ID NO: 1359107 - RNA, 19 nt, Artificial Sequence
  Description of Artificial Sequence: Synthetic oligonucleotide
agcacaucggauacagucu

SEQ ID NO: 1359108 - RNA, 19 nt, Artificial Sequence
  Description of Artificial Sequence: Synthetic oligonucleotide
ccucuucucguaauugucc

SEQ ID NO: 1359109 - RNA, 19 nt, Artificial Sequence
  Description of Artificial Sequence: Synthetic oligonucleotide
ggaccagcauuucucuagg

SEQ ID NO: 1359110 - RNA, 19 nt, Artificial Sequence
  Description of Artificial Sequence: Synthetic oligonucleotide
uuguugagagguugacaaa

SEQ ID NO: 1359111 - RNA, 19 nt, Artificial Sequence
  Description of Artificial Sequence: Synthetic oligonucleotide
cagggcacucuucagauaa

SEQ ID NO: 1359112 - RNA, 19 nt, Artificial Sequence
  Description of Artificial Sequence: Synthetic oligonucleotide
cuuguuugaggcgcuucag

SEQ ID NO: 1359113 - RNA, 19 nt, Artificial Sequence
  Description of Artificial Sequence: Synthetic oligonucleotide
cucaacugaucgaauaacu

SEQ ID NO: 1359114 - RNA, 19 nt, Artificial Sequence
  Description of Artificial Sequence: Synthetic oligonucleotide
uguugcugggugacucaga

SEQ ID NO: 1359115 - RNA, 19 nt, Artificial Sequence
  Description of Artificial Sequence: Synthetic oligonucleotide
ucacugacagaggaccuaa

SEQ ID NO: 1359116 - RNA, 19 nt, Artificial Sequence
  Description of Artificial Sequence: Synthetic oligonucleotide
auaaagcaauuuguucagu

SEQ ID NO: 1359117 - RNA, 19 nt, Artificial Sequence
  Description of Artificial Sequence: Synthetic oligonucleotide
agaccacauacaccagcug

SEQ ID NO: 1359118 - RNA, 19 nt, Artificial Sequence
  Description of Artificial Sequence: Synthetic oligonucleotide
agaaucgggccagaaucug

SEQ ID NO: 1359119 - RNA, 19 nt, Artificial Sequence
  Description of Artificial Sequence: Synthetic oligonucleotide
gugaugcuucuaaggaucc

SEQ ID NO: 1359120 - RNA, 19 nt, Artificial Sequence
  Description of Artificial Sequence: Synthetic oligonucleotide
ggcacagaaagcugguuga

SEQ ID NO: 1359121 - RNA, 19 nt, Artificial Sequence
  Description of Artificial Sequence: Synthetic oligonucleotide
uggcacgugggcagacaag

SEQ ID NO: 1359122 - RNA, 19 nt, Artificial Sequence
  Description of Artificial Sequence: Synthetic oligonucleotide
gauggcccacauacacugg

SEQ ID NO: 1359123 - RNA, 19 nt, Artificial Sequence
  Description of Artificial Sequence: Synthetic oligonucleotide
gcuucuaaggauccugcca

SEQ ID NO: 1359124 - RNA, 19 nt, Artificial Sequence
  Description of Artificial Sequence: Synthetic oligonucleotide
ucuaaggauccugccaauu

SEQ ID NO: 1359125 - RNA, 19 nt, Artificial Sequence
  Description of Artificial Sequence: Synthetic oligonucleotide
auucguucaucuacugcca

SEQ ID NO: 1359126 - RNA, 19 nt, Artificial Sequence
  Description of Artificial Sequence: Synthetic oligonucleotide
agucggaucuugucgucau

SEQ ID NO: 1359127 - RNA, 19 nt, Artificial Sequence
  Description of Artificial Sequence: Synthetic oligonucleotide
caccuuguucccaugucca

SEQ ID NO: 1359128 - RNA, 19 nt, Artificial Sequence
  Description of Artificial Sequence: Synthetic oligonucleotide
cauuagaaaugggccuagc

SEQ ID NO: 1359129 - RNA, 19 nt, Artificial Sequence
  Description of Artificial Sequence: Synthetic oligonucleotide
cuaucuccaggagcucugg

SEQ ID NO: 1359130 - RNA, 19 nt, Artificial Sequence
  Description of Artificial Sequence: Synthetic oligonucleotide
caucuggggcgucuucuag

SEQ ID NO: 1359131 - RNA, 19 nt, Artificial Sequence
  Description of Artificial Sequence: Synthetic oligonucleotide
acuaucuccaggagcucug

SEQ ID NO: 1359132 - RNA, 19 nt, Artificial Sequence
  Description of Artificial Sequence: Synthetic oligonucleotide
gaccuaagacucauaaccu

SEQ ID NO: 1359133 - RNA, 19 nt, Artificial Sequence
  Description of Artificial Sequence: Synthetic oligonucleotide
gguccugcgguaaagccug

SEQ ID NO: 1359134 - RNA, 19 nt, Artificial Sequence
  Description of Artificial Sequence: Synthetic oligonucleotide
uucuaaggauccugccaau

SEQ ID NO: 1359135 - RNA, 19 nt, Artificial Sequence
  Description of Artificial Sequence: Synthetic oligonucleotide
cugcgguaaagccugggga

SEQ ID NO: 1359136 - RNA, 19 nt, Artificial Sequence
  Description of Artificial Sequence: Synthetic oligonucleotide
cugugagugaugcuucuaa

SEQ ID NO: 1359137 - RNA, 19 nt, Artificial Sequence
  Description of Artificial Sequence: Synthetic oligonucleotide
ucuguucucccaggaacuc

SEQ ID NO: 1359138 - RNA, 19 nt, Artificial Sequence
  Description of Artificial Sequence: Synthetic oligonucleotide
ugguagaaaucagcuugac

SEQ ID NO: 1359139 - RNA, 19 nt, Artificial Sequence
  Description of Artificial Sequence: Synthetic oligonucleotide
aggucagccuccacagacg

SEQ ID NO: 1359140 - RNA, 19 nt, Artificial Sequence
  Description of Artificial Sequence: Synthetic oligonucleotide
ucagcacaucggauacagu

SEQ ID NO: 1359141 - RNA, 19 nt, Artificial Sequence
  Description of Artificial Sequence: Synthetic oligonucleotide
aggcaauauggacuuccau

SEQ ID NO: 1359142 - RNA, 19 nt, Artificial Sequence
  Description of Artificial Sequence: Synthetic oligonucleotide
uucuagcccgucugugagu

SEQ ID NO: 1359143 - RNA, 19 nt, Artificial Sequence
  Description of Artificial Sequence: Synthetic oligonucleotide
guuuaccaggcaauaugga

SEQ ID NO: 1359144 - RNA, 19 nt, Artificial Sequence
  Description of Artificial Sequence: Synthetic oligonucleotide
uuucaaguuuuggcuugac

SEQ ID NO: 1359145 - RNA, 19 nt, Artificial Sequence
  Description of Artificial Sequence: Synthetic oligonucleotide
cucgcucagguccuggaca

SEQ ID NO: 1359146 - RNA, 19 nt, Artificial Sequence
  Description of Artificial Sequence: Synthetic oligonucleotide
guaaagccuggggaccucc

SEQ ID NO: 1359147 - RNA, 19 nt, Artificial Sequence
  Description of Artificial Sequence: Synthetic oligonucleotide
ugaugcuucuaaggauccu

SEQ ID NO: 1359148 - RNA, 19 nt, Artificial Sequence
  Description of Artificial Sequence: Synthetic oligonucleotide
cuaggcugcuccauguucu

SEQ ID NO: 1359149 - RNA, 19 nt, Artificial Sequence
  Description of Artificial Sequence: Synthetic oligonucleotide
agccagcuguagucggauc

SEQ ID NO: 1359150 - RNA, 19 nt, Artificial Sequence
  Description of Artificial Sequence: Synthetic oligonucleotide
uccugcgguaaagccuggg

SEQ ID NO: 1359151 - RNA, 19 nt, Artificial Sequence
  Description of Artificial Sequence: Synthetic oligonucleotide
ccaggcaauauggacuucc

SEQ ID NO: 1359152 - RNA, 19 nt, Artificial Sequence
  Description of Artificial Sequence: Synthetic oligonucleotide
gacgcugccuguacuucug

SEQ ID NO: 1359153 - RNA, 19 nt, Artificial Sequence
  Description of Artificial Sequence: Synthetic oligonucleotide
guuugaggcgcuucaggcu

SEQ ID NO: 1359154 - RNA, 19 nt, Artificial Sequence
  Description of Artificial Sequence: Synthetic oligonucleotide
gaauuccuucacugacaga

SEQ ID NO: 1359155 - RNA, 19 nt, Artificial Sequence
  Description of Artificial Sequence: Synthetic oligonucleotide
ugcaguugccuggucccug

SEQ ID NO: 1359156 - RNA, 19 nt, Artificial Sequence
  Description of Artificial Sequence: Synthetic oligonucleotide
uuucucuaggcugcuccau

SEQ ID NO: 1359157 - RNA, 19 nt, Artificial Sequence
  Description of Artificial Sequence: Synthetic oligonucleotide
guagagguacaggcuguug

SEQ ID NO: 1359158 - RNA, 19 nt, Artificial Sequence
  Description of Artificial Sequence: Synthetic oligonucleotide
ugccuagggcuguucugca

SEQ ID NO: 1359159 - RNA, 19 nt, Artificial Sequence
  Description of Artificial Sequence: Synthetic oligonucleotide
ccugcgguaaagccugggg

SEQ ID NO: 1359160 - RNA, 19 nt, Artificial Sequence
  Description of Artificial Sequence: Synthetic oligonucleotide
acagacggugugccaacaa

SEQ ID NO: 1359161 - RNA, 19 nt, Artificial Sequence
  Description of Artificial Sequence: Synthetic oligonucleotide
uuggaccagcauuucucua

SEQ ID NO: 1359162 - RNA, 19 nt, Artificial Sequence
  Description of Artificial Sequence: Synthetic oligonucleotide
gacaagcucugugagggcu

SEQ ID NO: 1359163 - RNA, 19 nt, Artificial Sequence
  Description of Artificial Sequence: Synthetic oligonucleotide
cuuauugguccugcgguaa

SEQ ID NO: 1359164 - RNA, 19 nt, Artificial Sequence
  Description of Artificial Sequence: Synthetic oligonucleotide
gccuguccaggucugagac

SEQ ID NO: 1359165 - RNA, 19 nt, Artificial Sequence
  Description of Artificial Sequence: Synthetic oligonucleotide
aucuacugccagaauuccu

SEQ ID NO: 1359166 - RNA, 19 nt, Artificial Sequence
  Description of Artificial Sequence: Synthetic oligonucleotide
agguuuguugagagguuga

SEQ ID NO: 1359167 - RNA, 19 nt, Artificial Sequence
  Description of Artificial Sequence: Synthetic oligonucleotide
uuuagucuccuuggugcuu

SEQ ID NO: 1359168 - RNA, 19 nt, Artificial Sequence
  Description of Artificial Sequence: Synthetic oligonucleotide
gguugacaaagucugcaua

SEQ ID NO: 1359169 - RNA, 19 nt, Artificial Sequence
  Description of Artificial Sequence: Synthetic oligonucleotide
gcacaucggauacagucuc

SEQ ID NO: 1359170 - RNA, 19 nt, Artificial Sequence
  Description of Artificial Sequence: Synthetic oligonucleotide
uagcccgucugugagugau

SEQ ID NO: 1359171 - RNA, 19 nt, Artificial Sequence
  Description of Artificial Sequence: Synthetic oligonucleotide
ccuuguucccauguccacg

SEQ ID NO: 1359172 - RNA, 19 nt, Artificial Sequence
  Description of Artificial Sequence: Synthetic oligonucleotide
cuuuaacucuaugguagaa

SEQ ID NO: 1359173 - RNA, 19 nt, Artificial Sequence
  Description of Artificial Sequence: Synthetic oligonucleotide
caggcaauauggacuucca

SEQ ID NO: 1359174 - RNA, 19 nt, Artificial Sequence
  Description of Artificial Sequence: Synthetic oligonucleotide
cauacacuggguagaggua

SEQ ID NO: 1359175 - RNA, 19 nt, Artificial Sequence
  Description of Artificial Sequence: Synthetic oligonucleotide
gaaauggacgcugccugua

SEQ ID NO: 1359176 - RNA, 19 nt, Artificial Sequence
  Description of Artificial Sequence: Synthetic oligonucleotide
gagaaucgggccagaaucu

SEQ ID NO: 1359177 - RNA, 19 nt, Artificial Sequence
  Description of Artificial Sequence: Synthetic oligonucleotide
agagucuuccauggccgcu

SEQ ID NO: 1359178 - RNA, 19 nt, Artificial Sequence
  Description of Artificial Sequence: Synthetic oligonucleotide
guauaagucucaacacacu

SEQ ID NO: 1359179 - RNA, 19 nt, Artificial Sequence
  Description of Artificial Sequence: Synthetic oligonucleotide
uuguucccauguccacgcu

SEQ ID NO: 1359180 - RNA, 19 nt, Artificial Sequence
  Description of Artificial Sequence: Synthetic oligonucleotide
ggcacucuucagauaacug

SEQ ID NO: 1359181 - RNA, 19 nt, Artificial Sequence
  Description of Artificial Sequence: Synthetic oligonucleotide
gacuaucuccaggagcucu

SEQ ID NO: 1359182 - RNA, 19 nt, Artificial Sequence
  Description of Artificial Sequence: Synthetic oligonucleotide
guacuugugugugcucuca

SEQ ID NO: 1359183 - RNA, 19 nt, Artificial Sequence
  Description of Artificial Sequence: Synthetic oligonucleotide
cucauuggaccagcauuuc

SEQ ID NO: 1359184 - RNA, 19 nt, Artificial Sequence
  Description of Artificial Sequence: Synthetic oligonucleotide
agggcucuguccaugccga

SEQ ID NO: 1359185 - RNA, 19 nt, Artificial Sequence
  Description of Artificial Sequence: Synthetic oligonucleotide
cuaaggauccugccaauuu

SEQ ID NO: 1359186 - RNA, 19 nt, Artificial Sequence
  Description of Artificial Sequence: Synthetic oligonucleotide
cagacggugugccaacaaa

SEQ ID NO: 1359187 - RNA, 19 nt, Artificial Sequence
  Description of Artificial Sequence: Synthetic oligonucleotide
ccgaucauuucaaguuuug

SEQ ID NO: 1359188 - RNA, 19 nt, Artificial Sequence
  Description of Artificial Sequence: Synthetic oligonucleotide
uccugccaauuuucucaac

SEQ ID NO: 1359189 - RNA, 19 nt, Artificial Sequence
  Description of Artificial Sequence: Synthetic oligonucleotide
cuaugguagaaaucagcuu

SEQ ID NO: 1359190 - RNA, 19 nt, Artificial Sequence
  Description of Artificial Sequence: Synthetic oligonucleotide
ccuaagacucauaaccucu

SEQ ID NO: 1359191 - RNA, 19 nt, Artificial Sequence
  Description of Artificial Sequence: Synthetic oligonucleotide
agagcuuccugcagccagu

SEQ ID NO: 1359192 - RNA, 19 nt, Artificial Sequence
  Description of Artificial Sequence: Synthetic oligonucleotide
ccauuccugaagccugucc

SEQ ID NO: 1359193 - RNA, 19 nt, Artificial Sequence
  Description of Artificial Sequence: Synthetic oligonucleotide
auggacaaacacagagaau

SEQ ID NO: 1359194 - RNA, 19 nt, Artificial Sequence
  Description of Artificial Sequence: Synthetic oligonucleotide
uuccauggccgcugagaua

SEQ ID NO: 1359195 - RNA, 19 nt, Artificial Sequence
  Description of Artificial Sequence: Synthetic oligonucleotide
acugaucgaauaacuugua

SEQ ID NO: 1359196 - RNA, 19 nt, Artificial Sequence
  Description of Artificial Sequence: Synthetic oligonucleotide
guugagagguugacaaagu

SEQ ID NO: 1359197 - RNA, 19 nt, Artificial Sequence
  Description of Artificial Sequence: Synthetic oligonucleotide
gcaauuuguucaguaaacu

SEQ ID NO: 1359198 - RNA, 19 nt, Artificial Sequence
  Description of Artificial Sequence: Synthetic oligonucleotide
uugguucuuccugggugaa

SEQ ID NO: 1359199 - RNA, 19 nt, Artificial Sequence
  Description of Artificial Sequence: Synthetic oligonucleotide
gaaaugggccuagcagaaa

SEQ ID NO: 1359200 - RNA, 19 nt, Artificial Sequence
  Description of Artificial Sequence: Synthetic oligonucleotide
gugaaagauggcccacaua

SEQ ID NO: 1359201 - RNA, 19 nt, Artificial Sequence
  Description of Artificial Sequence: Synthetic oligonucleotide
cuuccauggccgcugagau

SEQ ID NO: 1359202 - RNA, 19 nt, Artificial Sequence
  Description of Artificial Sequence: Synthetic oligonucleotide
cuaagacucauaaccucuu

SEQ ID NO: 1359203 - RNA, 19 nt, Artificial Sequence
  Description of Artificial Sequence: Synthetic oligonucleotide
ggagcucuggaagccauuc

SEQ ID NO: 1359204 - RNA, 19 nt, Artificial Sequence
  Description of Artificial Sequence: Synthetic oligonucleotide
cuggacaauccugcugcuc

SEQ ID NO: 1359205 - RNA, 19 nt, Artificial Sequence
  Description of Artificial Sequence: Synthetic oligonucleotide
agaggacaagggucacuuu

SEQ ID NO: 1359206 - RNA, 19 nt, Artificial Sequence
  Description of Artificial Sequence: Synthetic oligonucleotide
cugaucgaauaacuuguau

SEQ ID NO: 1359207 - RNA, 19 nt, Artificial Sequence
  Description of Artificial Sequence: Synthetic oligonucleotide
ugacuaucuccaggagcuc

SEQ ID NO: 1359208 - RNA, 19 nt, Artificial Sequence
  Description of Artificial Sequence: Synthetic oligonucleotide
agagccagcuguagucgga

SEQ ID NO: 1359209 - RNA, 19 nt, Artificial Sequence
  Description of Artificial Sequence: Synthetic oligonucleotide
cacgcugaagcugguaaaa

SEQ ID NO: 1359210 - RNA, 19 nt, Artificial Sequence
  Description of Artificial Sequence: Synthetic oligonucleotide
acgcugaagcugguaaaau

SEQ ID NO: 1359211 - RNA, 19 nt, Artificial Sequence
  Description of Artificial Sequence: Synthetic oligonucleotide
ggaucuugucgucaucacu

SEQ ID NO: 1359212 - RNA, 19 nt, Artificial Sequence
  Description of Artificial Sequence: Synthetic oligonucleotide
gccacgccuguguauuugc

SEQ ID NO: 1359213 - RNA, 19 nt, Artificial Sequence
  Description of Artificial Sequence: Synthetic oligonucleotide
cuggggcgucuucuagccc

SEQ ID NO: 1359214 - RNA, 19 nt, Artificial Sequence
  Description of Artificial Sequence: Synthetic oligonucleotide
aucgggccagaaucugcaa

SEQ ID NO: 1359215 - RNA, 19 nt, Artificial Sequence
  Description of Artificial Sequence: Synthetic oligonucleotide
caagacucgcucagguccu

SEQ ID NO: 1359216 - RNA, 19 nt, Artificial Sequence
  Description of Artificial Sequence: Synthetic oligonucleotide
ggcucuguccaugccgacc

SEQ ID NO: 1359217 - RNA, 19 nt, Artificial Sequence
  Description of Artificial Sequence: Synthetic oligonucleotide
cuggcacgugggcagacaa

SEQ ID NO: 1359218 - RNA, 19 nt, Artificial Sequence
  Description of Artificial Sequence: Synthetic oligonucleotide
gcgguaaagccuggggacc

SEQ ID NO: 1359219 - RNA, 19 nt, Artificial Sequence
  Description of Artificial Sequence: Synthetic oligonucleotide
ggacaagcucugugagggc

SEQ ID NO: 1359220 - RNA, 19 nt, Artificial Sequence
  Description of Artificial Sequence: Synthetic oligonucleotide
caaggaacucugagagucu

SEQ ID NO: 1359221 - RNA, 19 nt, Artificial Sequence
  Description of Artificial Sequence: Synthetic oligonucleotide
gccgcugagauagaugaaa

SEQ ID NO: 1359222 - RNA, 19 nt, Artificial Sequence
  Description of Artificial Sequence: Synthetic oligonucleotide
cucuguccaugccgaccag

SEQ ID NO: 1359223 - RNA, 19 nt, Artificial Sequence
  Description of Artificial Sequence: Synthetic oligonucleotide
gcccgucugugagugaugc

SEQ ID NO: 1359224 - RNA, 19 nt, Artificial Sequence
  Description of Artificial Sequence: Synthetic oligonucleotide
gccagcuguagucggaucu

SEQ ID NO: 1359225 - RNA, 19 nt, Artificial Sequence
  Description of Artificial Sequence: Synthetic oligonucleotide
guucagcacaucggauaca

SEQ ID NO: 1359226 - RNA, 19 nt, Artificial Sequence
  Description of Artificial Sequence: Synthetic oligonucleotide
gggaagcucuugaugucac

SEQ ID NO: 1359227 - RNA, 19 nt, Artificial Sequence
  Description of Artificial Sequence: Synthetic oligonucleotide
ccauacaauggaaaggcuu

SEQ ID NO: 1359228 - RNA, 19 nt, Artificial Sequence
  Description of Artificial Sequence: Synthetic oligonucleotide
cgucugugagugaugcuuc

SEQ ID NO: 1359229 - RNA, 19 nt, Artificial Sequence
  Description of Artificial Sequence: Synthetic oligonucleotide
caucucauuggaccagcau

SEQ ID NO: 1359230 - RNA, 19 nt, Artificial Sequence
  Description of Artificial Sequence: Synthetic oligonucleotide
gccaauuuucucaacugau

SEQ ID NO: 1359231 - RNA, 19 nt, Artificial Sequence
  Description of Artificial Sequence: Synthetic oligonucleotide
gccgaccagguuuguugag

SEQ ID NO: 1359232 - RNA, 19 nt, Artificial Sequence
  Description of Artificial Sequence: Synthetic oligonucleotide
gcugagugcuggaaaugga

SEQ ID NO: 1359233 - RNA, 19 nt, Artificial Sequence
  Description of Artificial Sequence: Synthetic oligonucleotide
ggcccacauacacugggua

SEQ ID NO: 1359234 - RNA, 19 nt, Artificial Sequence
  Description of Artificial Sequence: Synthetic oligonucleotide
cugccagaauuccuucacu

SEQ ID NO: 1359235 - RNA, 19 nt, Artificial Sequence
  Description of Artificial Sequence: Synthetic oligonucleotide
ggaugccuagggcuguucu

SEQ ID NO: 1359236 - RNA, 19 nt, Artificial Sequence
  Description of Artificial Sequence: Synthetic oligonucleotide
ccacagacggugugccaac

SEQ ID NO: 1359237 - RNA, 19 nt, Artificial Sequence
  Description of Artificial Sequence: Synthetic oligonucleotide
gaggcgcuucaggcuuucc

SEQ ID NO: 1359238 - RNA, 19 nt, Artificial Sequence
  Description of Artificial Sequence: Synthetic oligonucleotide
ccgcugagauagaugaaaa

SEQ ID NO: 1359239 - RNA, 19 nt, Artificial Sequence
  Description of Artificial Sequence: Synthetic oligonucleotide
cguucaucuacugccagaa

SEQ ID NO: 1359240 - RNA, 19 nt, Artificial Sequence
  Description of Artificial Sequence: Synthetic oligonucleotide
agaggaccuaagacucaua

SEQ ID NO: 1359241 - RNA, 19 nt, Artificial Sequence
  Description of Artificial Sequence: Synthetic oligonucleotide
ccuuauugguccugcggua

SEQ ID NO: 1359242 - RNA, 19 nt, Artificial Sequence
  Description of Artificial Sequence: Synthetic oligonucleotide
cacagacggugugccaaca

SEQ ID NO: 1359243 - RNA, 19 nt, Artificial Sequence
  Description of Artificial Sequence: Synthetic oligonucleotide
cugcauaguccuuguugau

SEQ ID NO: 1359244 - RNA, 19 nt, Artificial Sequence
  Description of Artificial Sequence: Synthetic oligonucleotide
cuagcccgucugugaguga

SEQ ID NO: 1359245 - RNA, 19 nt, Artificial Sequence
  Description of Artificial Sequence: Synthetic oligonucleotide
cuagggcuguucugcaguu

SEQ ID NO: 1359246 - RNA, 19 nt, Artificial Sequence
  Description of Artificial Sequence: Synthetic oligonucleotide
gguaaagccuggggaccuc

SEQ ID NO: 1359247 - RNA, 19 nt, Artificial Sequence
  Description of Artificial Sequence: Synthetic oligonucleotide
gagccagcuguagucggau

SEQ ID NO: 1359248 - RNA, 19 nt, Artificial Sequence
  Description of Artificial Sequence: Synthetic oligonucleotide
gcuugacuacaguaagauu

SEQ ID NO: 1359249 - RNA, 19 nt, Artificial Sequence
  Description of Artificial Sequence: Synthetic oligonucleotide
ccagcugagugcuggaaau

SEQ ID NO: 1359250 - RNA, 19 nt, Artificial Sequence
  Description of Artificial Sequence: Synthetic oligonucleotide
aggagcucuggaagccauu

SEQ ID NO: 1359251 - RNA, 19 nt, Artificial Sequence
  Description of Artificial Sequence: Synthetic oligonucleotide
gccuguacuucugaaggau

SEQ ID NO: 1359252 - RNA, 19 nt, Artificial Sequence
  Description of Artificial Sequence: Synthetic oligonucleotide
ccacgcugaagcugguaaa

SEQ ID NO: 1359253 - RNA, 19 nt, Artificial Sequence
  Description of Artificial Sequence: Synthetic oligonucleotide
ccgaccagguuuguugaga

SEQ ID NO: 1359254 - RNA, 19 nt, Artificial Sequence
  Description of Artificial Sequence: Synthetic oligonucleotide
gccuguguauuugcuuuaa

SEQ ID NO: 1359255 - RNA, 19 nt, Artificial Sequence
  Description of Artificial Sequence: Synthetic oligonucleotide
ggacaagggucacuuucuu

SEQ ID NO: 1359256 - RNA, 19 nt, Artificial Sequence
  Description of Artificial Sequence: Synthetic oligonucleotide
cauggccgcugagauagau

SEQ ID NO: 1359257 - RNA, 19 nt, Artificial Sequence
  Description of Artificial Sequence: Synthetic oligonucleotide
cucuaggcugcuccauguu

SEQ ID NO: 1359258 - RNA, 19 nt, Artificial Sequence
  Description of Artificial Sequence: Synthetic oligonucleotide
gcacgugggcagacaagga

SEQ ID NO: 1359259 - RNA, 19 nt, Artificial Sequence
  Description of Artificial Sequence: Synthetic oligonucleotide
gggcucuguccaugccgac

SEQ ID NO: 1359260 - RNA, 19 nt, Artificial Sequence
  Description of Artificial Sequence: Synthetic oligonucleotide
gcuggcacgugggcagaca

SEQ ID NO: 1359261 - RNA, 19 nt, Artificial Sequence
  Description of Artificial Sequence: Synthetic oligonucleotide
ggccuagcagaaaucucau

SEQ ID NO: 1359262 - RNA, 19 nt, Artificial Sequence
  Description of Artificial Sequence: Synthetic oligonucleotide
ccgucugugagugaugcuu

SEQ ID NO: 1359263 - RNA, 19 nt, Artificial Sequence
  Description of Artificial Sequence: Synthetic oligonucleotide
gggaccuccagggcacucu

SEQ ID NO: 1359264 - RNA, 19 nt, Artificial Sequence
  Description of Artificial Sequence: Synthetic oligonucleotide
gguagagguacaggcuguu

SEQ ID NO: 1359265 - RNA, 19 nt, Artificial Sequence
  Description of Artificial Sequence: Synthetic oligonucleotide
ccuuggucuucagaagggu

SEQ ID NO: 1359266 - RNA, 19 nt, Artificial Sequence
  Description of Artificial Sequence: Synthetic oligonucleotide
caugccgaccagguuuguu

SEQ ID NO: 1359267 - RNA, 19 nt, Artificial Sequence
  Description of Artificial Sequence: Synthetic oligonucleotide
cugcaguugccuggucccu

SEQ ID NO: 1359268 - RNA, 19 nt, Artificial Sequence
  Description of Artificial Sequence: Synthetic oligonucleotide
ggacuuccaucuggggcgu

SEQ ID NO: 1359269 - RNA, 19 nt, Artificial Sequence
  Description of Artificial Sequence: Synthetic oligonucleotide
ggccgcugagauagaugaa

SEQ ID NO: 1359270 - RNA, 19 nt, Artificial Sequence
  Description of Artificial Sequence: Synthetic oligonucleotide
ccacgccuguguauuugcu

SEQ ID NO: 1359271 - RNA, 19 nt, Artificial Sequence
  Description of Artificial Sequence: Synthetic oligonucleotide
ccuggacaauccugcugcu

SEQ ID NO: 1359272 - RNA, 19 nt, Artificial Sequence
  Description of Artificial Sequence: Synthetic oligonucleotide
cgccuguguauuugcuuua

SEQ ID NO: 1359273 - RNA, 19 nt, Artificial Sequence
  Description of Artificial Sequence: Synthetic oligonucleotide
cgucuucuagcccgucugu

SEQ ID NO: 1359274 - RNA, 19 nt, Artificial Sequence
  Description of Artificial Sequence: Synthetic oligonucleotide
ggggcgucuucuagcccgu

SEQ ID NO: 1359275 - RNA, 19 nt, Artificial Sequence
  Description of Artificial Sequence: Synthetic oligonucleotide
ccauggccgcugagauaga

SEQ ID NO: 1359276 - RNA, 19 nt, Artificial Sequence
  Description of Artificial Sequence: Synthetic oligonucleotide
cgguaaagccuggggaccu

SEQ ID NO: 1359277 - RNA, 19 nt, Artificial Sequence
  Description of Artificial Sequence: Synthetic oligonucleotide
cccgucugugagugaugcu

SEQ ID NO: 1359278 - RNA, 19 nt, Artificial Sequence
  Description of Artificial Sequence: Synthetic oligonucleotide
ccaugccgaccagguuugu

SEQ ID NO: 1359279 - RNA, 19 nt, Artificial Sequence
  Description of Artificial Sequence: Synthetic oligonucleotide
aauauuauaacauacauug

SEQ ID NO: 1359280 - RNA, 19 nt, Artificial Sequence
  Description of Artificial Sequence: Synthetic oligonucleotide
aacaauaugaugucuaucc

SEQ ID NO: 1359281 - RNA, 19 nt, Artificial Sequence
  Description of Artificial Sequence: Synthetic oligonucleotide
auggguauaaacuacaucc

SEQ ID NO: 1359282 - RNA, 19 nt, Artificial Sequence
  Description of Artificial Sequence: Synthetic oligonucleotide
aacgauacaaaauaaaccu

SEQ ID NO: 1359283 - RNA, 19 nt, Artificial Sequence
  Description of Artificial Sequence: Synthetic oligonucleotide
aacucgugcauauagagac

SEQ ID NO: 1359284 - RNA, 19 nt, Artificial Sequence
  Description of Artificial Sequence: Synthetic oligonucleotide
uucaugaugaauuugaaca

SEQ ID NO: 1359285 - RNA, 19 nt, Artificial Sequence
  Description of Artificial Sequence: Synthetic oligonucleotide
uuaagaaugcauuugagca

SEQ ID NO: 1359286 - RNA, 19 nt, Artificial Sequence
  Description of Artificial Sequence: Synthetic oligonucleotide
gaaaguauaugcuugagug

SEQ ID NO: 1359287 - RNA, 19 nt, Artificial Sequence
  Description of Artificial Sequence: Synthetic oligonucleotide
uauauaauaguauuaauau

SEQ ID NO: 1359288 - RNA, 19 nt, Artificial Sequence
  Description of Artificial Sequence: Synthetic oligonucleotide
aaacgauacaaaauaaacc

SEQ ID NO: 1359289 - RNA, 19 nt, Artificial Sequence
  Description of Artificial Sequence: Synthetic oligonucleotide
ucuaauaugagaauccugu

SEQ ID NO: 1359290 - RNA, 19 nt, Artificial Sequence
  Description of Artificial Sequence: Synthetic oligonucleotide
uuuaguaucuaauaugaga

SEQ ID NO: 1359291 - RNA, 19 nt, Artificial Sequence
  Description of Artificial Sequence: Synthetic oligonucleotide
ucuuuuaagcaacauuugg

SEQ ID NO: 1359292 - RNA, 19 nt, Artificial Sequence
  Description of Artificial Sequence: Synthetic oligonucleotide
uuaguaucuaauaugagaa

SEQ ID NO: 1359293 - RNA, 19 nt, Artificial Sequence
  Description of Artificial Sequence: Synthetic oligonucleotide
cucaguaucaucuaugagc

SEQ ID NO: 1359294 - RNA, 19 nt, Artificial Sequence
  Description of Artificial Sequence: Synthetic oligonucleotide
gguacuaaacucuagauag

SEQ ID NO: 1359295 - RNA, 19 nt, Artificial Sequence
  Description of Artificial Sequence: Synthetic oligonucleotide
uguaacaccaccauuggca

SEQ ID NO: 1359296 - RNA, 19 nt, Artificial Sequence
  Description of Artificial Sequence: Synthetic oligonucleotide
aaaugaaguuguuagugag

SEQ ID NO: 1359297 - RNA, 19 nt, Artificial Sequence
  Description of Artificial Sequence: Synthetic oligonucleotide
aaagacggcagcauuaagc

SEQ ID NO: 1359298 - RNA, 19 nt, Artificial Sequence
  Description of Artificial Sequence: Synthetic oligonucleotide
ugaagcaugacacauauuu

SEQ ID NO: 1359299 - RNA, 19 nt, Artificial Sequence
  Description of Artificial Sequence: Synthetic oligonucleotide
uguauaauuuaugacauca

SEQ ID NO: 1359300 - RNA, 19 nt, Artificial Sequence
  Description of Artificial Sequence: Synthetic oligonucleotide
auaaaccucaguauaaacc

SEQ ID NO: 1359301 - RNA, 19 nt, Artificial Sequence
  Description of Artificial Sequence: Synthetic oligonucleotide
cucaguauaaaccauuuag

SEQ ID NO: 1359302 - RNA, 19 nt, Artificial Sequence
  Description of Artificial Sequence: Synthetic oligonucleotide
aaauacaugguuauaaaca

SEQ ID NO: 1359303 - RNA, 19 nt, Artificial Sequence
  Description of Artificial Sequence: Synthetic oligonucleotide
aauaugagaauccuguuuu

SEQ ID NO: 1359304 - RNA, 19 nt, Artificial Sequence
  Description of Artificial Sequence: Synthetic oligonucleotide
uaaaccucaguauaaacca

SEQ ID NO: 1359305 - RNA, 19 nt, Artificial Sequence
  Description of Artificial Sequence: Synthetic oligonucleotide
cagugcaagacaaagacgg

SEQ ID NO: 1359306 - RNA, 19 nt, Artificial Sequence
  Description of Artificial Sequence: Synthetic oligonucleotide
uguacauuauguaauaaau

SEQ ID NO: 1359307 - RNA, 19 nt, Artificial Sequence
  Description of Artificial Sequence: Synthetic oligonucleotide
agaaguugguacuaaacuc

SEQ ID NO: 1359308 - RNA, 19 nt, Artificial Sequence
  Description of Artificial Sequence: Synthetic oligonucleotide
uacaugguuauaaacagga

SEQ ID NO: 1359309 - RNA, 19 nt, Artificial Sequence
  Description of Artificial Sequence: Synthetic oligonucleotide
aacuuuugaaaacaauaug

SEQ ID NO: 1359310 - RNA, 19 nt, Artificial Sequence
  Description of Artificial Sequence: Synthetic oligonucleotide
uaucaaacgauacaaaaua

SEQ ID NO: 1359311 - RNA, 19 nt, Artificial Sequence
  Description of Artificial Sequence: Synthetic oligonucleotide
cucuagauagucaacaggc

SEQ ID NO: 1359312 - RNA, 19 nt, Artificial Sequence
  Description of Artificial Sequence: Synthetic oligonucleotide
cuuucgagcaguauggagg

SEQ ID NO: 1359313 - RNA, 19 nt, Artificial Sequence
  Description of Artificial Sequence: Synthetic oligonucleotide
aacuacaucccagugcucc

SEQ ID NO: 1359314 - RNA, 19 nt, Artificial Sequence
  Description of Artificial Sequence: Synthetic oligonucleotide
cauaaugcugaacugaagc

SEQ ID NO: 1359315 - RNA, 19 nt, Artificial Sequence
  Description of Artificial Sequence: Synthetic oligonucleotide
uaauuuaugacaucaguuc

SEQ ID NO: 1359316 - RNA, 19 nt, Artificial Sequence
  Description of Artificial Sequence: Synthetic oligonucleotide
acacaaauguaacaccacc

SEQ ID NO: 1359317 - RNA, 19 nt, Artificial Sequence
  Description of Artificial Sequence: Synthetic oligonucleotide
uuuggauuauauaauacau

SEQ ID NO: 1359318 - RNA, 19 nt, Artificial Sequence
  Description of Artificial Sequence: Synthetic oligonucleotide
aagucaguaguuugggaac

SEQ ID NO: 1359319 - RNA, 19 nt, Artificial Sequence
  Description of Artificial Sequence: Synthetic oligonucleotide
aauguucauuaccacacag

SEQ ID NO: 1359320 - RNA, 19 nt, Artificial Sequence
  Description of Artificial Sequence: Synthetic oligonucleotide
uuaagcaacauuuggauua

SEQ ID NO: 1359321 - RNA, 19 nt, Artificial Sequence
  Description of Artificial Sequence: Synthetic oligonucleotide
cuucaugucucuuuuaagc

SEQ ID NO: 1359322 - RNA, 19 nt, Artificial Sequence
  Description of Artificial Sequence: Synthetic oligonucleotide
aacaacgcaguguuaacag

SEQ ID NO: 1359323 - RNA, 19 nt, Artificial Sequence
  Description of Artificial Sequence: Synthetic oligonucleotide
cacaaauagagcauggccc

SEQ ID NO: 1359324 - RNA, 19 nt, Artificial Sequence
  Description of Artificial Sequence: Synthetic oligonucleotide
aaacauuacaauauguaca

SEQ ID NO: 1359325 - RNA, 19 nt, Artificial Sequence
  Description of Artificial Sequence: Synthetic oligonucleotide
uauucagcucauauaaaag

SEQ ID NO: 1359326 - RNA, 19 nt, Artificial Sequence
  Description of Artificial Sequence: Synthetic oligonucleotide
ucaucuaugagcaaaugua

SEQ ID NO: 1359327 - RNA, 19 nt, Artificial Sequence
  Description of Artificial Sequence: Synthetic oligonucleotide
aaggagagagauuaugugu

SEQ ID NO: 1359328 - RNA, 19 nt, Artificial Sequence
  Description of Artificial Sequence: Synthetic oligonucleotide
uguucauuaccacacagaa

SEQ ID NO: 1359329 - RNA, 19 nt, Artificial Sequence
  Description of Artificial Sequence: Synthetic oligonucleotide
uugaacaugacuccccugc

SEQ ID NO: 1359330 - RNA, 19 nt, Artificial Sequence
  Description of Artificial Sequence: Synthetic oligonucleotide
agaauguucauuaccacac

SEQ ID NO: 1359331 - RNA, 19 nt, Artificial Sequence
  Description of Artificial Sequence: Synthetic oligonucleotide
ucaacaggcaucucgaaga

SEQ ID NO: 1359332 - RNA, 19 nt, Artificial Sequence
  Description of Artificial Sequence: Synthetic oligonucleotide
uugagcacaauauauaaua

SEQ ID NO: 1359333 - RNA, 19 nt, Artificial Sequence
  Description of Artificial Sequence: Synthetic oligonucleotide
auaacauacauugugagaa

SEQ ID NO: 1359334 - RNA, 19 nt, Artificial Sequence
  Description of Artificial Sequence: Synthetic oligonucleotide
auagaacauggguauaaac

SEQ ID NO: 1359335 - RNA, 19 nt, Artificial Sequence
  Description of Artificial Sequence: Synthetic oligonucleotide
acaacggccauuccugucc

SEQ ID NO: 1359336 - RNA, 19 nt, Artificial Sequence
  Description of Artificial Sequence: Synthetic oligonucleotide
aagacggcagcauuaagcu

SEQ ID NO: 1359337 - RNA, 19 nt, Artificial Sequence
  Description of Artificial Sequence: Synthetic oligonucleotide
ucuuuaacuauugucauaa

SEQ ID NO: 1359338 - RNA, 19 nt, Artificial Sequence
  Description of Artificial Sequence: Synthetic oligonucleotide
ucagaauaagaaagggcag

SEQ ID NO: 1359339 - RNA, 19 nt, Artificial Sequence
  Description of Artificial Sequence: Synthetic oligonucleotide
cauuuaguaucuaauauga

SEQ ID NO: 1359340 - RNA, 19 nt, Artificial Sequence
  Description of Artificial Sequence: Synthetic oligonucleotide
aguucagucaccuguuagg

SEQ ID NO: 1359341 - RNA, 19 nt, Artificial Sequence
  Description of Artificial Sequence: Synthetic oligonucleotide
aucucgaagacacgaaaac

SEQ ID NO: 1359342 - RNA, 19 nt, Artificial Sequence
  Description of Artificial Sequence: Synthetic oligonucleotide
agagauuaugugucgauug

SEQ ID NO: 1359343 - RNA, 19 nt, Artificial Sequence
  Description of Artificial Sequence: Synthetic oligonucleotide
aacucuagauagucaacag

SEQ ID NO: 1359344 - RNA, 19 nt, Artificial Sequence
  Description of Artificial Sequence: Synthetic oligonucleotide
ucuacacaaauguaacacc

SEQ ID NO: 1359345 - RNA, 19 nt, Artificial Sequence
  Description of Artificial Sequence: Synthetic oligonucleotide
ugucuauccagaacaacgc

SEQ ID NO: 1359346 - RNA, 19 nt, Artificial Sequence
  Description of Artificial Sequence: Synthetic oligonucleotide
auucagcucauauaaaagu

SEQ ID NO: 1359347 - RNA, 19 nt, Artificial Sequence
  Description of Artificial Sequence: Synthetic oligonucleotide
uaauauuauaacauacauu

SEQ ID NO: 1359348 - RNA, 19 nt, Artificial Sequence
  Description of Artificial Sequence: Synthetic oligonucleotide
aauaugaugucuauccaga

SEQ ID NO: 1359349 - RNA, 19 nt, Artificial Sequence
  Description of Artificial Sequence: Synthetic oligonucleotide
gagauuaugugucgauugg

SEQ ID NO: 1359350 - RNA, 19 nt, Artificial Sequence
  Description of Artificial Sequence: Synthetic oligonucleotide
gauuaugugucgauugggg

SEQ ID NO: 1359351 - RNA, 19 nt, Artificial Sequence
  Description of Artificial Sequence: Synthetic oligonucleotide
uguuagugaguucagucac

SEQ ID NO: 1359352 - RNA, 19 nt, Artificial Sequence
  Description of Artificial Sequence: Synthetic oligonucleotide
uagagacuuggauagaaca

SEQ ID NO: 1359353 - RNA, 19 nt, Artificial Sequence
  Description of Artificial Sequence: Synthetic oligonucleotide
aacauuacaagaaaagguu

SEQ ID NO: 1359354 - RNA, 19 nt, Artificial Sequence
  Description of Artificial Sequence: Synthetic oligonucleotide
uucuacacaaauguaacac

SEQ ID NO: 1359355 - RNA, 19 nt, Artificial Sequence
  Description of Artificial Sequence: Synthetic oligonucleotide
acucuagauagucaacagg

SEQ ID NO: 1359356 - RNA, 19 nt, Artificial Sequence
  Description of Artificial Sequence: Synthetic oligonucleotide
augucuauccagaacaacg

SEQ ID NO: 1359357 - RNA, 19 nt, Artificial Sequence
  Description of Artificial Sequence: Synthetic oligonucleotide
acgaaaacguuuuacaaaa

SEQ ID NO: 1359358 - RNA, 19 nt, Artificial Sequence
  Description of Artificial Sequence: Synthetic oligonucleotide
uguuuucaagccauugagc

SEQ ID NO: 1359359 - RNA, 19 nt, Artificial Sequence
  Description of Artificial Sequence: Synthetic oligonucleotide
ugaaaguauaugcuugagu

SEQ ID NO: 1359360 - RNA, 19 nt, Artificial Sequence
  Description of Artificial Sequence: Synthetic oligonucleotide
aagcaugacacauauuuua

SEQ ID NO: 1359361 - RNA, 19 nt, Artificial Sequence
  Description of Artificial Sequence: Synthetic oligonucleotide
auuaauauuauaacauaca

SEQ ID NO: 1359362 - RNA, 19 nt, Artificial Sequence
  Description of Artificial Sequence: Synthetic oligonucleotide
cauuuguauaauuuaugac

SEQ ID NO: 1359363 - RNA, 19 nt, Artificial Sequence
  Description of Artificial Sequence: Synthetic oligonucleotide
gaaggagagagauuaugug

SEQ ID NO: 1359364 - RNA, 19 nt, Artificial Sequence
  Description of Artificial Sequence: Synthetic oligonucleotide
aaacucuagauagucaaca

SEQ ID NO: 1359365 - RNA, 19 nt, Artificial Sequence
  Description of Artificial Sequence: Synthetic oligonucleotide
uaacuauugucauaaugcu

SEQ ID NO: 1359366 - RNA, 19 nt, Artificial Sequence
  Description of Artificial Sequence: Synthetic oligonucleotide
caucuaugagcaaauguag

SEQ ID NO: 1359367 - RNA, 19 nt, Artificial Sequence
  Description of Artificial Sequence: Synthetic oligonucleotide
uucaugucucuuuuaagca

SEQ ID NO: 1359368 - RNA, 19 nt, Artificial Sequence
  Description of Artificial Sequence: Synthetic oligonucleotide
aauguuagauauauaaauu

SEQ ID NO: 1359369 - RNA, 19 nt, Artificial Sequence
  Description of Artificial Sequence: Synthetic oligonucleotide
gaaugagggacucagaaua

SEQ ID NO: 1359370 - RNA, 19 nt, Artificial Sequence
  Description of Artificial Sequence: Synthetic oligonucleotide
auguuagauauauaaauua

SEQ ID NO: 1359371 - RNA, 19 nt, Artificial Sequence
  Description of Artificial Sequence: Synthetic oligonucleotide
ucucgaagacacgaaaacg

SEQ ID NO: 1359372 - RNA, 19 nt, Artificial Sequence
  Description of Artificial Sequence: Synthetic oligonucleotide
uuaugugucgauuggggac

SEQ ID NO: 1359373 - RNA, 19 nt, Artificial Sequence
  Description of Artificial Sequence: Synthetic oligonucleotide
uuucaagccauugagcugu

SEQ ID NO: 1359374 - RNA, 19 nt, Artificial Sequence
  Description of Artificial Sequence: Synthetic oligonucleotide
agaacauggguauaaacua

SEQ ID NO: 1359375 - RNA, 19 nt, Artificial Sequence
  Description of Artificial Sequence: Synthetic oligonucleotide
ugcuauuggggcuucaugu

SEQ ID NO: 1359376 - RNA, 19 nt, Artificial Sequence
  Description of Artificial Sequence: Synthetic oligonucleotide
uucacauugucuuguuucc

SEQ ID NO: 1359377 - RNA, 19 nt, Artificial Sequence
  Description of Artificial Sequence: Synthetic oligonucleotide
uccucauugcuauuggggc

SEQ ID NO: 1359378 - RNA, 19 nt, Artificial Sequence
  Description of Artificial Sequence: Synthetic oligonucleotide
auuauaacauacauuguga

SEQ ID NO: 1359379 - RNA, 19 nt, Artificial Sequence
  Description of Artificial Sequence: Synthetic oligonucleotide
uuguuuauucagcucauau

SEQ ID NO: 1359380 - RNA, 19 nt, Artificial Sequence
  Description of Artificial Sequence: Synthetic oligonucleotide
cuguuuucaagccauugag

SEQ ID NO: 1359381 - RNA, 19 nt, Artificial Sequence
  Description of Artificial Sequence: Synthetic oligonucleotide
cagguugucagacaacagg

SEQ ID NO: 1359382 - RNA, 19 nt, Artificial Sequence
  Description of Artificial Sequence: Synthetic oligonucleotide
auaaugcugaacugaagca

SEQ ID NO: 1359383 - RNA, 19 nt, Artificial Sequence
  Description of Artificial Sequence: Synthetic oligonucleotide
cuuuuaagcaacauuugga

SEQ ID NO: 1359384 - RNA, 19 nt, Artificial Sequence
  Description of Artificial Sequence: Synthetic oligonucleotide
uggguauaaacuacauccc

SEQ ID NO: 1359385 - RNA, 19 nt, Artificial Sequence
  Description of Artificial Sequence: Synthetic oligonucleotide
cacggaacggcuaauuugc

SEQ ID NO: 1359386 - RNA, 19 nt, Artificial Sequence
  Description of Artificial Sequence: Synthetic oligonucleotide
aauagagcauggcccagug

SEQ ID NO: 1359387 - RNA, 19 nt, Artificial Sequence
  Description of Artificial Sequence: Synthetic oligonucleotide
ugcauauagagacuuggau

SEQ ID NO: 1359388 - RNA, 19 nt, Artificial Sequence
  Description of Artificial Sequence: Synthetic oligonucleotide
ucgauuggggacuuggucu

SEQ ID NO: 1359389 - RNA, 19 nt, Artificial Sequence
  Description of Artificial Sequence: Synthetic oligonucleotide
aguguuagugcaggaaggc

SEQ ID NO: 1359390 - RNA, 19 nt, Artificial Sequence
  Description of Artificial Sequence: Synthetic oligonucleotide
uuucgagcaguauggaggc

SEQ ID NO: 1359391 - RNA, 19 nt, Artificial Sequence
  Description of Artificial Sequence: Synthetic oligonucleotide
aggacagcuucccaacacc

SEQ ID NO: 1359392 - RNA, 19 nt, Artificial Sequence
  Description of Artificial Sequence: Synthetic oligonucleotide
aaguguuagugcaggaagg

SEQ ID NO: 1359393 - RNA, 19 nt, Artificial Sequence
  Description of Artificial Sequence: Synthetic oligonucleotide
uagauagucaacaggcauc

SEQ ID NO: 1359394 - RNA, 19 nt, Artificial Sequence
  Description of Artificial Sequence: Synthetic oligonucleotide
uggaacaacggccauuccu

SEQ ID NO: 1359395 - RNA, 19 nt, Artificial Sequence
  Description of Artificial Sequence: Synthetic oligonucleotide
uguuaucagaagcuucaca

SEQ ID NO: 1359396 - RNA, 19 nt, Artificial Sequence
  Description of Artificial Sequence: Synthetic oligonucleotide
ucuagauagucaacaggca

SEQ ID NO: 1359397 - RNA, 19 nt, Artificial Sequence
  Description of Artificial Sequence: Synthetic oligonucleotide
uuggauuauauaauacaua

SEQ ID NO: 1359398 - RNA, 19 nt, Artificial Sequence
  Description of Artificial Sequence: Synthetic oligonucleotide
guuguuagugaguucaguc

SEQ ID NO: 1359399 - RNA, 19 nt, Artificial Sequence
  Description of Artificial Sequence: Synthetic oligonucleotide
uaugacaucaguucacauu

SEQ ID NO: 1359400 - RNA, 19 nt, Artificial Sequence
  Description of Artificial Sequence: Synthetic oligonucleotide
auguaacaccaccauuggc

SEQ ID NO: 1359401 - RNA, 19 nt, Artificial Sequence
  Description of Artificial Sequence: Synthetic oligonucleotide
uguuuauucagcucauaua

SEQ ID NO: 1359402 - RNA, 19 nt, Artificial Sequence
  Description of Artificial Sequence: Synthetic oligonucleotide
ucagacaacagggugggug

SEQ ID NO: 1359403 - RNA, 19 nt, Artificial Sequence
  Description of Artificial Sequence: Synthetic oligonucleotide
agaacaacgcaguguuaac

SEQ ID NO: 1359404 - RNA, 19 nt, Artificial Sequence
  Description of Artificial Sequence: Synthetic oligonucleotide
ugcuuuuguuuauucagcu

SEQ ID NO: 1359405 - RNA, 19 nt, Artificial Sequence
  Description of Artificial Sequence: Synthetic oligonucleotide
aggagagagauuauguguc

SEQ ID NO: 1359406 - RNA, 19 nt, Artificial Sequence
  Description of Artificial Sequence: Synthetic oligonucleotide
caaaauaaaccucaguaua

SEQ ID NO: 1359407 - RNA, 19 nt, Artificial Sequence
  Description of Artificial Sequence: Synthetic oligonucleotide
auuaugugucgauugggga

SEQ ID NO: 1359408 - RNA, 19 nt, Artificial Sequence
  Description of Artificial Sequence: Synthetic oligonucleotide
agagaaguguuagugcagg

SEQ ID NO: 1359409 - RNA, 19 nt, Artificial Sequence
  Description of Artificial Sequence: Synthetic oligonucleotide
caugucucuuuuaagcaac

SEQ ID NO: 1359410 - RNA, 19 nt, Artificial Sequence
  Description of Artificial Sequence: Synthetic oligonucleotide
ugguacuaaacucuagaua

SEQ ID NO: 1359411 - RNA, 19 nt, Artificial Sequence
  Description of Artificial Sequence: Synthetic oligonucleotide
aacaacggccauuccuguc

SEQ ID NO: 1359412 - RNA, 19 nt, Artificial Sequence
  Description of Artificial Sequence: Synthetic oligonucleotide
gaccuuuggaacaacggcc

SEQ ID NO: 1359413 - RNA, 19 nt, Artificial Sequence
  Description of Artificial Sequence: Synthetic oligonucleotide
uaaacucuagauagucaac

SEQ ID NO: 1359414 - RNA, 19 nt, Artificial Sequence
  Description of Artificial Sequence: Synthetic oligonucleotide
aacaugacuccccugcuuu

SEQ ID NO: 1359415 - RNA, 19 nt, Artificial Sequence
  Description of Artificial Sequence: Synthetic oligonucleotide
uuuggaacaacggccauuc

SEQ ID NO: 1359416 - RNA, 19 nt, Artificial Sequence
  Description of Artificial Sequence: Synthetic oligonucleotide
caacgcaguguuaacagac

SEQ ID NO: 1359417 - RNA, 19 nt, Artificial Sequence
  Description of Artificial Sequence: Synthetic oligonucleotide
aguaucaucuaugagcaaa

SEQ ID NO: 1359418 - RNA, 19 nt, Artificial Sequence
  Description of Artificial Sequence: Synthetic oligonucleotide
cagaccuuuggaacaacgg

SEQ ID NO: 1359419 - RNA, 19 nt, Artificial Sequence
  Description of Artificial Sequence: Synthetic oligonucleotide
agacacgaaaacguuuuac

SEQ ID NO: 1359420 - RNA, 19 nt, Artificial Sequence
  Description of Artificial Sequence: Synthetic oligonucleotide
gagacuuggauagaacaug

SEQ ID NO: 1359421 - RNA, 19 nt, Artificial Sequence
  Description of Artificial Sequence: Synthetic oligonucleotide
guugguacuaaacucuaga

SEQ ID NO: 1359422 - RNA, 19 nt, Artificial Sequence
  Description of Artificial Sequence: Synthetic oligonucleotide
uaucuaauaugagaauccu

SEQ ID NO: 1359423 - RNA, 19 nt, Artificial Sequence
  Description of Artificial Sequence: Synthetic oligonucleotide
agcaugacacauauuuuac

SEQ ID NO: 1359424 - RNA, 19 nt, Artificial Sequence
  Description of Artificial Sequence: Synthetic oligonucleotide
acauacaaacccauugguc

SEQ ID NO: 1359425 - RNA, 19 nt, Artificial Sequence
  Description of Artificial Sequence: Synthetic oligonucleotide
ggaaaugaaguuguuagug
